United States Patent Application Publication US 2026/0103690 A1 - sequence listing, part 73

SEQ ID NO: 357920 - protein, 456 aa, unidentified
MNDRPTINEGWNNTDEEIAVWVGLDWADRQHSIALYEVGSGKRESYTLKHTAEAFQDWVSGLRAQYGGRKVAVVLEQSRGGVLYALMSCDFIVLYPVNPQSLANYRKAFHTSGAKNDPGDAQLLCEMVRKHPERFRAWVTEDADTRSLRLLVEDRRNLVDEITTLTNRLTSHLKNYYPQALEWAGELNSRQACDFFQRWPTLEALQQTRPASLRKFYLSYGRPRTEVLNERLERIKQATALVGDRAVVLAGSMMVQALVAQIRPMIIAVEKYDDEIERLFQKHPDRAVFESFAGAGRVLAPRLLAAMGADRDRWQSAAQIQQLSGIAPVTEQSGKHKWVHRRWACPKFLLQTFHEFAKQTIICCDWAKAYYDQQREGGRGHNAAVRALAYKWIRIVFRCWKNRVAYDEDLYVRALQRRGSNLPARTEIVKRARELRRSRRARKSVENLLLNPQLGS

SEQ ID NO: 357921 - protein, 354 aa, unidentified
MTSDPGQPAQTFASIGIDIGKDVFHIVGFDAAGKVVLRKKFKRLALEAELAKLAPSIVGLEACLSAHFVSRTLRRLGHTPRIIPAIYVKPFAKGQKNDYNDAEAIAEAALRPNLRVVQEKTQDQLDLQALHRVRARLVSRRTATINQIRAFLIEHGIAVRAGANSLRRSLFAILENRADELSPRMSDLIVGLYEDWLWLDERIETLTGEIEQISHREANCRRLMSVPGIGPIISTAMVAAIGTGEAFERGRDFGAWLGLVPRQFSTGGKSILGRISKRGSKYLRTLFIQAANVILMRPQTWERFSFGAWLKAAQPRLHRNKLATALANKLARIAWSVLRHNTAFDAHRVEVVAI

SEQ ID NO: 357922 - protein, 340 aa, unidentified
MRIIGCDLHAAQQTIAMLDGDTGEVVERTLTHDGDTVREFYASIPRPAVVGIEATGSMGWFVRLLEELAIPCRVGHPAAVRKAETRRQKHDRRDADLLLKLLVEDRFPAIWMPSTEQRDLRALLLHRHQWVRMRTRVQHALQAIALSHGLRRGPTLWSRDGQAVLASLPLPPHAAHRRNELVALYQHLAAQVDQLDDRVKDAAVPRPGATLLMTHPGVGPVTALATDVFLGDPARFADGKALASYVGMIPSEYSSGTRQRLGALSKQGNPLLRFLWGEAALHAVRRDPELRRFYRRKLAQKGLGKSRVAAARKLGIRLWIMLRDQIGYEEFCRRSPRRPA

SEQ ID NO: 357923 - protein, 413 aa, unidentified
MTQLNPLYVGIDVSSRSNVAYLMNPDGSKHSVFPIVNSKAGCQQLVKRIVSAMTGNGLSEMKIGMEATSIYGSHLVYTLKEDFSLSAYTKEIHVLNPKQVAKFKESYNDLPKNDYVDAYVIADCLRFGRINNEVYLGDYRHEALKKLTRARYSAVVNLSREKQRFLNTLFLKYSTFAQEKVFSDTFSTTALAVYEEFESADQLALMDLHELTEFIKEKGKNRFPDPDAVAKAIQKAARSSYRLPKTVNDSVNQVLSISISSMRALEASIKQYDKAIAEQMNAISNPLISIKGIGPVYSAGIIAEIGDIHRFKNQASLAKYAGLAWKQHQSGGFEAENTPLIHTGNRYLKYYLCEAVMSLVRCDTEYNSYYHLKYKEVNRAQHKRALVLTARKFVRLVYCLLSENRMYIAPEER

SEQ ID NO: 357924 - protein, 439 aa, unidentified
MRYPLCTWTKKARTYLGGYLMTKSNISKQLRQVPPGALHVGVDLALEKNVAVVINEKAERLDQFSFTQDRGGYDYFLRRLEGVRQKHHAPSTVVAMEPSNYFWKLLAKELEEQKIAYHLVNAYTVKKHREGNQLDRSKDDQRDAGQIAELSRNGHYTQTRLQKGAYEELRQYAALYHRLVQGIRCERQVLWGLVGQVFPEYFQVFKDLGGETSRACLESCACAAAMRRITEEELIAEVRAVYTGKKLSVSKIRQAYRWAATSIGVAEGLQAIQLTVRLHLAQLQSLQTQLEQVTHAMLACLVSLPETPYLLSVKSLGAVSVALFLAEVGDPSRYQTAAQWVKLAGIQPAANTSGKKQRSQTPMSHQGRSQLRTLLYFTCLRMVRFDPHFAQLYAALQRRPKNPLTKMQALGVLMNKLLHILWALIHNQTFYDPSFASSI

SEQ ID NO: 357925 - protein, 256 aa, unidentified
MLINTYVGIDVSKLTLDVFIRESKLHKQVKNNLSGFNSLLKWLETQTLRSLDTVLVCFEHTGLYSLPLALFLEERNMHYSMISPLEIKRSMGITRGKNDLIDSKRIAEFAFRFKDKVSETKLPAKDIRKVHSLLTLRDKLVTNMKGYAMTYNETLRTMRKEDFPELFSTYENMVASLKAEIKKVENAIKTILKNNLQLWTSYKLVTSVKGIGFIVASYLIVYTYNFTRFDTWRKFACYSGIAPFDYQSGTSVRGKT

SEQ ID NO: 357926 - protein, 387 aa, unidentified
MQSATSATAVATTARANDTTLFASLELSKSKWVVTINSPGSEKFSKHLVEGGDGAGLIDLLSRSRARAEQRCGVQIKAIVIQEAGLDGFWIHRLLLAHGIESHVVDAASIAVDRRHRRAKTDSIDGEMLLRALMAWARGERRVCSMVRAPSLEEEDRRRLTRERGTLLKERIQHTNRIKGLLSGQGVRDYNPLRRDCFERLEAFRTGDGRELPPMLKAEIRRELDRIAVVTTQLATVERARDALIRTDAEERNNPAALLLKLKGLGPEFASLLWLESLFRNFGNRRQVAAYGGLAPSPWQSGGVERDQGISKSGNRRLRKTMIELAWFWLRHQPDTALSRWFHTRVGAAKGRVRRIAIVALARKLLVALWRYVTQGVVPEGAVFKAA

SEQ ID NO: 357927 - protein, 412 aa, unidentified
METFFERVSALDVHKAQVTACVRVPDGSGKRAVHLAEFATTVRGLLALADWLKEYGVTHVAMEATGVYWQPVWHVLEEDFELMLVNARDVKNVPGRKTDVSDAQWLCQLMEAGLLRSSFVPPKSQRQLRALTRYRKTQIAERQREANRLHKALEDTGIKLGNVASDIMGKSGRAMLDALVAGTTDPEVLADLAKGRLREKLPALREALEGHFEAHHSLIIGAILAHLDFLNEQIDVLSEAIGELLGPTGLVSVKLASTIPGVAARTAEVMVAEIGTDMSKFPSARHLASWAGRCPGNDQSAGKRRSGRTRKGSKWLGIALEEAALGAIRGRNTYLGAQYRRLKPRLGHGRALGAVKHSIVIAYWHMFTNGEVYRDLGGDYFQRRDPAKATKRLVAKLQALGHTVTLQPQAAT

SEQ ID NO: 357928 - protein, 319 aa, unidentified
MDNLSHGRVIGIDVSRDWLDLYCLPDGHRGRAPNTPAGHAVVVALARDRDAIVCFESTGGQEWQLWAALEVEGVTARQVPPAQVKAFAQSCGTRAKTDRIDAELIARFFAFRPEAGRSLPAEKLRLLRALTSKRAQLVEMRKRLLAQIRAHQKLGTAAMFEDVDTELKQRIDSLIKELEDRISQAIASDERLSETAGVLRSIPGIGPVASTMLIAEMPEIGTITGEQAAALIGLAPVAHDSGTLRGKRAIAGGRRALRHVMFQAALVAAHHNPSLRSFADRLRKAGKPHKVIITAVARKLVTIANALCKNRQKWAVPTT

SEQ ID NO: 357929 - protein, 456 aa, unidentified
MDTLHRVCAGLDVHKDTVVACVRCLDDRSRAHQEVKTFGTTTPDLLELLDWLLQHQVPIVAMESTGVYWKPIFNLLEGPVEVLLVNPEHIKKVPGRKTDVKDCEWIAQLLQHGLLKASFVPPRPIRELRDLTRQRTQLVGEKASVSNRIQKVLEDANLKLGSVASDVLGVSGRDMLRSLLAGVDSAEALANLARGRLRDKLPQLRKALQGRVTEHHRFLLGMQLDHLTHLEALIGRLEQRIYQEMEKDRPPEPPEPKPPGGSADAASAAKPGMPAGGAGPSEPAAPDSGGLGLWQSLWLLVTIPGINRRTAEVVLAEIGTDMSRFATPQQLASWAGLCPGNNESAGKRRSGRTPHGDRWLRSILVQAAWAASHTKATYLSAQYRRLARRRGKKKALVAVAHTLLVMCYEVLSKGEAYQELGADYLDRLEPDRRTKQLVRQLEKLGHKVTLEPQTAA

SEQ ID NO: 357930 - protein, 411 aa, unidentified
MAVPCDADPDPVRTFATFTDDLHALRDWLLQCRVKTVAMESTSVHRIPLFQILEAAGLEVCLVNARHCKNLPGRKTDISDCQWIQYLHSVGLLRASFRPPEQICAVRSLLRHRATLGRYAGSHVQHLQIHNVISDLTGLTGLAILDAILAGERDPQKLAALKDHRIKASHDTIARSLHGDWRDEHLFVLQQALDTWRHYQKLMAQCDEHIQQQMAQFDSKVDLNQHPLVANRRGNKKPQRNEPKFDARTELYRLCGVDLTKVPGIQVSTALVLFTALGPDFVTRFPTAKCFSSWLGLCPDNRITGGKIISVKTRDVKSRAAMALRLAAQSLWHSKDYLGDCFRRWKARLGTPKAITAMAHKLARVIWHRIKYRLPCDPAVWKQAEAKLKQKKIKRLQQNAAARGFQLLCTS

SEQ ID NO: 357931 - protein, 424 aa, unidentified
MNLTQNDRLKQVTSDTLIVGVDVGSQTHFCRAFDWRGFELSRRVFKFSNTGMGFLTFLRWTEELMNKTEMKKVIVGCEPTGCYWLTFQKFLQDHDVQLVTVNPFTVNRSMELDDNSPEKSDLKDPKTIALLVKDGRFSTSYLPSGVYAEIREASVCRDQIMKQHVRLSNQIQGWLQKFFPEYFECYADWDSTSGLMLLREAPLPQDILKIGAGGINQIWRDAKVRAAGIKRAQTLVEAAQNSVGLEAGEAARLEIWVLVNDYILKAEQLKRLDEYLEEKVKEVPNVEKLLAIKGVGMSTVIGFIAEVGDIGRFTDPKQIQKLAGLEIVKKSSGKKKGQPRISKRGRRKLRRTMYESARALMTWNPAFQDVFLYYRNRTKKPLGGMQAKIAVACKAIRIFYVVLQTGCDFDEEKFRKDIIRPEAA

SEQ ID NO: 357932 - protein, 417 aa, unidentified
MKEEFTFYVGVDWGVEFHQACILDAHGEKICQRRIEHSGPGMLEFCDFLQALTNGEASALAVAIEVPRGPIVEALLEHNYAVFSINPKQLDRFRDRHTVAGAKDDRRDALVAADSLRTDQHCFRRVRPEHPDVIRLRELSRTEETLGIDLRRCVNQLSQLLLRYFPQLLRLCSTPDEPWLWALLELAPTPQQAAKLTEKRLKQLLAKYRIRRWTAEKVGEILTAPPLPLAAGSAEAISEHALLLLPQLRLLHLQRKQVADRTQQLLDQMATSTNDFPMSQEHRDIPVLLSLPGVGRIITATMLAEGSHILSLRDYHAMRAYAGIAPVTKQSGKSRQVLMRYRCNQRLRNAFYHWARTSIQHDPRSKQHYARLRQVGHDHGRALRGVADRLLAMLIAMLKSGQTYDPNRRSTANLTAA

SEQ ID NO: 357933 - protein, 340 aa, unidentified
MTVMIGVDPHKATHTAVAIGDDERELATIKVRATRKQVPQLLAWAAPFESRTWAIESAAGMGYLLAQQLVDAGESVVDVSPTLASRVRLLGSGRSDKNDPNDALAVAVAALRAPTLREVYAVDHGEVLRLLAKRNLDIGSHRTRVVCRLHAALAGLAPGGMSKELNASEAEAFLDQVEPVSPVEHVRLELAREMLADVRRLDAQLKDCHRRIRAAVLASKTSLTDLFGVGPMIACSLIGYTRDVRRFRNRDQFAAYNGTAPVEVSSGGRITHRLSRRGNRRLNHAIHMAAVTQVRHAHSEGRAYFDRKLAEGKTKKEALRALKRQVSNAVYRQLLVDAAR

SEQ ID NO: 357934 - protein, 319 aa, unidentified
MNKEKVYVGIDVAKADLDIALDSSEERWQFPNNEAGIRRIVELLQKLSPALVVMEATGGYETPLAYALKVSGIPIAIANPRAVRDFAKATGKLAKTDALDAKVLAHFAAVIKPEPRPIADEELQELDAILARRRQISEMLTAEKNRLHTARKPVRAGIKAHIAYLEKEMGDIEASLNDRIQESPVEQAKYNLLRSVPGVGPILCTTLLIELPELGKLNKKQIAALVGVAPLNRDSGTFRGKRTVWGGRATVRAALYMAALVATRYNPVIRTFYQRLCAAGKAKKVAITACMRKLLIILNAMLKHRTPWGLAPQILALCH

SEQ ID NO: 357935 - protein, 347 aa, unidentified
MKLVKQVLGVDVAQKELVATLGRMNDDFSIELYAYCVFKNNETGIAALLKWVKKLTDQNVRVHYVMEATGVYHQKFAYYLDELGFDVSIVLPNKISNYMRTLENKTTTDKSCSEAITRFGLERKLDNWVRPAKVYKQLQQLTREREQIVTERVVVKNQLHAEEAEAEPNESSVRRLNERIKFLNRQEMEIKREIHLIVSRNKELKKEIENICTIPGVGELTAVIILAETNGFELIRNKRQLVSYAGLDVREKLSGTSVKGKPRISKKGNRYLRAALHLPALGSIRSNENYRDIYAKLVSKSGIKMKGLVAIQRKLLELIYIIHKNKTVFMKDYEEKKREQLQLVNSL

SEQ ID NO: 357936 - protein, 391 aa, unidentified
MLYVGIDIAKRFHEATVMDETGNQIASSFRFANTVDGVNTLLDRVKTYDQPVSFALEATGHYWVALYERVTDAGYEVKVLNPLQTDSYRHSFLRKVKTDKRDSWVIAELLRIGRGQAAVIPDDQILQLRELARFRFSLIDQIADLKRKLLSVLDRVFPEYERIVGDVFQKSSRALLAHATTSEEVAQLDLGELTRLLYSSSRGHFGEERAQQIKSAAENSLGVSFLADACQVEVRCLLSHVELLEDQVALVDERLAKLLADIPDAQYLLSIKGIGTVLGAVILGEIGDVSRFAGPENLVAYAGMDPSVYRTGEFVADEAHLSKRGSPYLRRAIWLAASTARLYNPDLREVYERKVKQGKHHNDAIAAVCHRLLNRIYIVLKEKRPLIVRSC

SEQ ID NO: 357937 - protein, 413 aa, unidentified
MSQKTDYVYVGMDIHKETHTAVLMTYMEERLGKIKITNNIAGYRRLKAYVEKIQGNRIPIYGLEDVSHYGRDLAVYLLDQEYIVKEVNSALSCMERNSYATVKKNDEWDARCICSVLSRRSDSLPDANPQDYYWTMKHLVGRRDALVKNTSALVRQFHEQIQKQYPSYKKFFTVIECQTSLAFFERYPSAGHLTGVTVQELGTFLREQSHNTCSDKRAERILNLVEQDKMKEREYQSGRDLILQSITRQMIFNQQEMKRLEWMQGELLKELGYHLETIPGISTVTASALVAHIGDIKRFKNADRLANYAGVAPICHSSEGKGKNTQNKHLGNRDLYNVLYLLAMQQIQVNKEGTARNPLLRAYFEYKVSQGKTKIQAMICIMRRLVSIIYRMMKNQTPYQMPEVESPKEQMIS

SEQ ID NO: 357938 - protein, 436 aa, unidentified
MTLINFVAANQKYYAFNLLSVFIMVFWSVQYLLQHLLVQTQVSHQLLQPLILILQLPQTPQFRHARPGKFFLPVNGMDYFLPLRLTVRNVLTRRITMNIVFLGIDLAKNVFQLCGLNQAGKPVYTKRTGRKELLQTLANIPACLIGIEASTGAFYWQREFEKLGHKVKVISPQYVRPFVRGQKNDGNDAQAIAVALMQPTMQFVPPKSSEQQDIQALHRARQRIVNHRTATVCQIRGLLLDRGIPIGSAVSRARRAIPLILEDAENGLSSRMRRTIAELYDLFNDLGRRIHFFDKEIETVFRQSEACPRIAKVKGIGPKTATAVVAAIGKGTEFKNGRHFAAWLGLVPRQHSSGDRQVLMNMTKKGDKHLRTLFIHGARAVVRVATNNNDGHMNQWVNQLKERRGFNKTTVAVANKNARIIWSMLRNDTGYQVVCN

SEQ ID NO: 357939 - protein, 359 aa, unidentified
MSLASWVVAGLIPGVNREPLKKIAADPEELLRLLYRWRDQAIKAGKDITRIAVAYETGRDSFWLARWLRDRGIDAHVIHATSVAISREHRRAKTDRIDTAMLRRGFLGWLRGERGHCSMAVVPTIAEEDAKRPHRERESLLKERTSTINRMKAILAQFGVRNFKPSLRKAAEKIDAVRTPEGVPLPPNAAAALRRQIERFRLINEQIKTVEKTRMQRLRHNPAGKYNTMVFLLVRIIGLGVETAEQLVHEMLSRNLRDRKAVARYAGVTGSPDESGASRREKGLSRSGNGRVRKILIQLSWRMLQFQPDSRLARWFKNRTANSQRSRKPMIVALARKLIIALWRYVNTGVVPDGFKLAK

SEQ ID NO: 357940 - protein, 343 aa, unidentified
MTQTMQTYVGLDVHKKFIFGCVKDEKGNILHEKKFRNEEHSMDAFLMNVPKDSKIALESSSCWQYVFDYLVDQEYEVFLSNPIKTRLIGESKKKTDIEDARKLADLLRMNMLPLSYAAPPHIRIQRQITRHRLSLVNMRTEIKNKIHAILRRHGVMTEVEDAFTQKSIEYMQVLDLPMTDKFELDQYLAMLRHINLKIDETQERIEELANDEPNARILMTHPGVGHYSALMSTGEIGYIGRFSSAKKLVSFAGLNPSVYQSGDKCYQGHITKEGSKNLRWILIQCANIAVQKDKRLKSFYLKKKLGKGHNKAIVAVARKMLINMYVMLKYNIRFDQLRVNKAS

SEQ ID NO: 357941 - protein, 347 aa, unidentified
MSTHYIGADVHAYNTEIHVENKKKVVGRYSVPTTISAIREVLQSISGEKHLVIEEGPMAGWLYRNLHKCVDEMIVCDPKRNKYVYSDGDVDDQIAAEKLAQLLRGGYLRPVYHSIDEQRVELKQWVALYRDRVRSGVSQVNKIRAQCRMHGVRIPRAAVHNPEARETWLGQQDQSALASQLRLLWIGYDATRQQVKLAKQQLVQLSKKYEIITYWKDLPGFGLIRSVTLYAYLDTPWRFKKKTKLGRYSGLGIRHVTSGKDKRGRPKEAHFALDRQCNRKLKDTIMGAAISAVRTSSPNVFKDYYERLRDEGKLAGNARHSVARKMLRVTWGMWKTMSRFDASLLES

SEQ ID NO: 357942 - protein, 361 aa, unidentified
MRIIGCDLHARQQTLAMLDTETGEVVNLTLLHEGHNVREFYSQLPRPVLVGVEATGSMHWFLNLLEELGIECRVGHPATIRAAEPRKQKHDRRDADLILKLLAENRFPAIWLPTKELLDLRALLLHRHHWVRMRTRIQNALQAIALANGLRRGSGLWSHEGQNKIASLPLLPHTAYRRSALQLLYHKMEAEIEKLTQQVAEQADYRSGARRLMTHPGVGPVTALATDVFLGDAKRFVDGKALASYVGLIPGEYSSGERQRLGKVTKQGSPLLRFLWGEAGAHAVRRDPELQRFYRRKLVHKGLGKARVAVARKLGIRLWIMLRDEIDYQEFCRRGQKQQSGAACAGMPEIADGAKSHRALD

SEQ ID NO: 357943 - protein, 345 aa, unidentified
MQPMYYIGLDVHKRTISYCVKDSSGAIHAEGTIPATRFDLDRWMKILPQPWSAAMEATVFTGWIYDHLRPHATALKVAHPLMLRAIAAAKKKNDRIDAKKICDCLRCDFLPECYMASTAIRERRRTLRYRNLLVRQMVQMKNKIGMLLMEAGVSYNKQRLHKAGYFRELLATNQGIDEGLQSLLRLCRETVVRLQRTESALVRSLERDSLLVERVERLMTIPAVGPITALAWALEVGDVERFSSIKKAISYCGLCGAEKSSGNTVQHTPLSKQRNKHLQTTLIEAAKMAPRNSSELAMLYDKEKQKGNANRATLAVARKLVAYLMAVDRGQRNFQVVETNNGIAA

SEQ ID NO: 357944 - protein, 413 aa, unidentified
MDILYPQCAGLDVHKQTVLACRISRDANGHSTSQTRTFSTMTGQLLLLLDWLQAGGCTHVAMESTGDYWKPVYNLLEGHFTLLVVNAQHIKAVPGRKSDVKDAEWIAQLLEHGLLRASFVPPPGQRELRDLTRHRSSCVRDRAALVNRLHKTLEGANIKLGCVLTDLQGVSGRAILEALSHGQQDPKTLADLAQWRLRAKREQLEAALVGTLKAHQRLILTDLLCQLETLDESIARLDAAIVEACRPFSEAVAHLDTIPGISQTAAQIIVSEVGVDMSRFPTPHHLASWAGVCPGNNQSAGKRLCSRTRAGRSPLRALLLQAAHAASRTRNTYLSAQYHRLAARRGKKRALMAVAHSILVIAYRLIERGQDYQDLGGDYFDKRQPNSTVQRLSKRLAQLGFQVVPVQDAQAAA

SEQ ID NO: 357945 - protein, 376 aa, unidentified
MEKDIRHVGFDVDSERIAVAVAEASGEVRSLGMIPYTAESVRRLVKKLGPARRLRVCYEAGPHGYGLYWQLMGLGVHCDVVAPTLVPVKAGDRVKTNRRDAEKLARCYRSGDLTPVWVPDAAHEALRDLVRAREAAKKDQLRARHRLGKFLLRRGLRAAGGVKNWTLKHLLWVRTLRFEQPAQEATFLDYLHEVEHAAERVARLEKAIDQAVAGLPEEMRAVVAGLQALRGIKQITAVTIVAEVGPLSRFARPKPLMGYSGMVSSEDSTGNSVRRFGITKTGNAHLRRVVGEAAWAYQYRPAMSAALKERQEGLSEEVKEIAWKAQHRLCTRYRRLLTKGKVKPQVITAVGRELLGFIWAIGVQVEKEEQLRRRAA

SEQ ID NO: 357946 - protein, 313 aa, unidentified
MEKLSYGGIDVSKDRLDVVVLPEGWFFSVSNDTAGWAELVARLRPLAVCAIGLEPSGGYERGIIRALLAAGLSVRRINPNKLRQFARARGVLAKNDRLDARLIAEYVAIMPTRVVQRDGAVERLAEVVTMRRQLCDEHVAVENQAAHLLQDAMLRRLSKRRLVRLEADIRLLDKRLAEMVATNAAFAQLYELLTSMPGVGPVLAFTLIALLPELGKMSRKQIAALVGLAPYDFDSGKLRGHRSIYGGRMPIRNVLYMAALSASRYNPALKTFSNRLAHANKKSKVIIVAVMRKMITTLNAMLRDNAAWQPRSA

SEQ ID NO: 357947 - protein, 300 aa, unidentified
MENIALIGIDLGKNSFHIHCQDRRGKAVYRKKFTRPKLIEFLATCPATTIAMEACGGSHFMARKLEELGHFPKLISPQFVRPFVKSNKNDFVDAEAICEAASRPSMRFVQPRTESQQAMRALHRVRESLVQDKVKTTNQMHAFLLEFGISVPRGAAVISRLSTLLEDNSLPHYLSQLLLKLQQHYHYLVEQIKDLESQLKRKLDEDEIGQRLLSIPCVGTLTASTISTEIGDGKQYASSRDFAAATGLVPRQYSTGGRTTLLGISKRGNKKIRTLLVQCARVFIQKLEHQSGKLGQGSTV

SEQ ID NO: 357948 - protein, 316 aa, unidentified
MNTVTGLVVGIDVAKDTLEVATSAGEHWQVSNDPEGQEALRDRLNGAAVALIVLEATGGYEVALVAVLAHAGLPAVVVNPRQVRQFARSLGRLAKTDAIDAEVLVSFGVHVAPQVRPLPDEQTQLLDALLTRRRQLLGMIQAERNRLPLAVGPIRTDLKQHIAFLVRRLKDTDRDLESRLRASPLWREREKLLTAVPGVGRQMLLTVCAALPELGRVPSRQLAALVGVAPYNCDSGTLRGHRHCWGGRAQVRQVLYMATLAATRCNPVIRPHYERLIGAGKPKKVALVACMRRLLAILNAMVRNGTPWNPQLTMAK

SEQ ID NO: 357949 - protein, 349 aa, unidentified
MSQTVDTTIAVIGIDIGKNSFHVVGLDDRGAIVLRQKWSRSQMEARFANMPPCLIGMEACVGAHHLSRKLHGFGHDARLMPAKYVRAYSKGQKNDFRAAEAIAEAVQRPTMKFVATKTADQLDLQALHRVRERLVSQRTGVINQIRAFLLERGIAVRQGQRFLRAELPRILAIPSNVLSPRMLQMIEDLTGDWRRLDERIQGLSNEIEAIARQEIGCERLMSVPGIGPIISSAMVAAVGAGDAFSKGRDFAAWLGLVPRQMSTGDRTILGKISKRGNRYLRVLFVQAAWVVLIKLKSWERHGLKSWLEAAKKRLHHNVLAIALANKLARIAWSVLARGRDFEASKLRVA

SEQ ID NO: 357950 - protein, 464 aa, unidentified
MTAGKQLWRNRKEKKEWARRLQSEDPGLEVVHPHAAGIDVGNSTHYVAVRPDRDPEPVRRFECFTADLHRLADWLQSCGVKTVAMQSTGVYWIPLYEILEEHGLEVYLVNARHTKNLPGRKSDVQESQWLLKLHTYGLLNNSFQPVSEIRVLRTYWRQRGEHVRGAATCIQRMQKALTQMNVQLANVISDISGLTGQAILRAIVAGERNPLKLAMLSDPRVHASHEEIAKSLEGNWRPELLFVLHQEVDMYDTYQKRIAECDQRLQKHLASFTRPLPIQPPTQKLKTKKPAAKNAPRFDLSSELQRVTGVDLTRIDGIDVMVAQTLLSEVGLDMSRWTTESHFASWLGLCPDNRISGDKVLSRGTRRVVNRAATALRQAANTLMRSRSYLGAQYRRLRTKLGAPKAITAMAHRLARLVYRMLKYGQTYVDKGTEYYEERFRQQQIQLLRKRAAKLGLQVAEIHA

SEQ ID NO: 357951 - protein, 406 aa, unidentified
MELVTLYKRVVGLDVHQAKITACAISEDEAGKVTVELAEFGGFKRDRQALAEWVSTRDPEVVVMESTGIYWKSPYAALEKLGIVATVVNARHVKTVPGRKTDWADAQWLATLARSGLLRASFVPPAKLRELRQVARQRQQLVGILAGEKNRVHKVLSDGGIRLSVVVSDIHGVAGRTMVKALIEGQSPAEVLMLAGNRLKADRQELLDALDGDLTAEHRFVLRELMAHVQELEQRIDRFDRHLLNELEPYRTTLALMQTIPGIDAIGAALLLVEIGNDMDAFGSVDRLASWVGICPGNDESAGKRKSGRIRKGNPWVRRLLCQFAHAAGRTQCAFKSKFEALRLRRGHRRAIVAIAHKILKTVFLLIRRQTHYRDSVVDFEAMSVTRNAPRWLKMLRKHGFIPAAA

SEQ ID NO: 357952 - protein, 342 aa, unidentified
MKDMMIGVDLAKNVLQVHGALHTGEIQFRKKLTRTQFPVFMAKQEPSLVIFEACGSAHYWAREMEALGHEVKLIAPQYARPFVKRQKNDAADAEAIVIAARQLEMRFVEPKTVEQQSRAAVFRGRERLVHQRTADVNALRALLYEHGHVFPQGIRSLNRMTALVEDKTADLQPLIREECLDLLAQITEKTARIIERTAKLKALAAESDRARRLQTMPCVGPLTAIAVEAFGPEMAQFKTGRDFAAWLGLVPKQHSSGGKERLGRMTKAGQADIRRLLIIGAMSRLGWLGQRKITEGSWLSRMLARKPKMLVAIALANKMARQIWAMLTKNEDYKDPALAVAA

SEQ ID NO: 357953 - protein, 339 aa, unidentified
MDHVAIDLGAKKSQICVRAADGRILEEKRWPTGELENFLAGRPTSRVIVETCAEAFCVADAARKLGHETRVVPATLVKTLGVGARRLKTDQRDARALSEVSCRIDLPSVHIPKTESRDRKTMCGMREALVGARTKIINNVRGWLRSRGRRIERGGRASFKQRIEAAWQGQLPSYVERQLLVLDVLTTQISEANAELESWAEADETCARLMTVPGVGPLTALRFVAAIDEVTRFESAHQVESYLGLVPGESSSSERQQRLSITKAGPRALRWVLVQAAWALRTRSRKPEAIPLQLWAHRIEQRRGKRTAIVALARKLAGILFAIWRNGSVYDGSRGAKML

SEQ ID NO: 357954 - protein, 350 aa, unidentified
MTVGIDTHKYFHVAVALSGQGARLGELTVAADPGGYEQLLSWARSLGTPWCFGVEGCGSYGQGLVSYLRRHDQRVVEAGRPDRRDRRERGKSDPIDAENAARAVLAGTATGVPKSADGTSEMIREIKIARDTAVKARSQAIITLKALIVTAPEELRGELQPLTKAKLRERCTGLRPGRLDTPLAAAKHALRALARRWQDLDREIKEHDGLLDTLTAQAAPALREAFGIGVDVAAEMLILAGDNPERIRSEAAFAKLCGASPIPASSGNTQRHRLNWAGHRQANSALYRSVIVRMRFHPPTIAYVQRRTAEGKSKREIIRCLKRYLAREIYRHIRQAAPVLKPVSVGDLSL

SEQ ID NO: 357955 - protein, 340 aa, unidentified
MVHVGVDLDKRSSQIAVLTEEGEISQQRLPNDPVRLEKFFAELPPHTPVAIEASGTWWWLVDLLEHLGHDPILSHPKQTKAIAAARLKNDRVDAERLALLLRGDLLPTVWIPSAALREARELVRHRVQLVWLRGIVRNRLHAMLARRNLQPVSTKTWLTQRGQRELQRLPLADTPSRIREDCSTLLPLLDAQIRRLDGELGARWGRDPRVHRLTTIPGIGPFIAIVLVLELGDIARFPSAKQVASYVDLTPRIRASAGRIRAGHISKEGNRLLRWVLVLAATQAVRRPGPLRTWFHAVKKRRGKKVARVALARRLAEIVFHVWKHECDYFTVVRHGVVRG

SEQ ID NO: 357956 - protein, 417 aa, unidentified
MLKIVHKICCGIDVHKKFVVATIGSTNQAGVTDYKTKQFSTFTVDLLALREWLKQHSCQEVCMESTGKYWIPVFNILETACNVFVANPKYVKGIRGKKTDKKDSIWLCDLHKHGLVPNSFIPPLIIRQIRDLMRYRVKLTNFKSSEKNRIQNSLTVSNIMLSSVVSDTFGKSSMRIINHILENPEDTYFDVVPMLHSSMKKNAEDITKSINGNLTKPQAEKMAVCLSHLNSIEQLKMEIESAVVKLIGPYQREINLILTIPGIKDIFTAIAIIGEIGVDMSVFLSSRHLCSWAGVTPQNNESAGKKKSVRVSRAGVYIKPLLVQCANAAIKSKDCPYFRVRYEQIKHRRGHKKAIIAIAHMLLNCIYYMLSKNVPFDFNRYRIETVSKPKPSSKFTPEQAIKLLESLGAQIILPAST

SEQ ID NO: 357957 - protein, 403 aa, unidentified
MNAVGIDVSKGKSMVAIMRPFGEIVSTPFEIKHTASDIRSLIELINSIEGESRIVMEHTGRYYEVLAHQLSKANFFVSAINPKLIKDFDNDSLRKVKSDKADAVKIARYALDKWQNLKQYSAMDELRNQLKTMNRQFGFYMKHKTAMKNNLIGILDQTYPGINTYFDSPARSDGSQKWVDFASTYWHVDCVRKMSLNAFIDHYHKWCKRKKYNFSQTKAEEIYGKAKELVPVLPKDEITKLIIKQAVEQLNNASTTVEELRTLMNDTASKLPEYPIVMEMKGVGPSLGPQLMAEIGDVTRFTHKGAITAFAGVDPGVNESGSYEQKSVPTSKRGSADLRKTLFQVMDVLIKTMPQDDPVYQFLDKKRAQGKPYYVYMTAGANKFLRIYYGRVKEYLSSLPDSE

SEQ ID NO: 357958 - protein, 402 aa, unidentified
MAYDFVIGVDVGKYFHHACVLDPQGRQVLSKRIHQHESSLRKLFGQFIADNASVLAFGDQPNNIGRLTVTVAQDMGADVRYLPGLAMRQLSRIHVGNSKTDVRDAYVIAHAGLNLPDALRSVDRVEEVFIQLKVLNGIDEDLARAYTRLINQMRSALVGTYPAFEHVLRGQMIHRKWILHLLAKYGGPTKIRRIGRTRLAAFARSHKARNPEPVIDAMLAAIHAQTVSIAGAEYAELGVAMSAKDALAKLENRKEIEAQVLKLIQDIPQTEILLSMPGIGPRSAAQILMTAGDMSDFPDAAHLASYAGLSPRTNQSGTSIMSSSPNRAGNKKLKNALWQSSFASIRFHERSRQFYERKRKEGKRHNAAVVALARRRLNVLFAMMRSGELYRDISTVREAAAA

SEQ ID NO: 357959 - protein, 368 aa, unidentified
MTYLGIDLHTRNMTICAVSSNGKKIGEWKLSNDTDQLDKLIREIGAPLKAVVEATSSWYWLADWAEAREIDLILAHAKMLKAIAYAKVKTDSVDAHTMAQLLAADLIPRAHMVMGRQRELRELLRARLRMVWRRCKVQDSLYNLFFKYNVPIPKYPFRDLNRLEEHFQVHLPPASGLEASLHIDQFRLLEGQVHRIEKQIDTYGPEFPDYERISQVPGIGKVSSWSILAEIGDISRFKSDKNFVSYCRLVPGAADSGGKRRHKSRNKDGNKYLKIAFSQAAIGAVSFYPPVRAYYNKIRRRSGKHVARTVVAKELARIVYFMLSRNEPYKGFKGKPTPKDTYLNWPHSVSPHSIRGRDRADPSQPDAI

SEQ ID NO: 357960 - protein, 353 aa, unidentified
MHARSVVAAAIDGVTGELVRSRLTPSWEHIESWLRGLPGPVAVAYEAGPTGFGLFRQLTAAGIRCVVVAPSKVHRPAGDRVKTDAKDAVLLARLLRLSQVTAVTVPTVDQEAARDLVRAREDCRGDLMRARHRLSKLLLRHGIVYSGGAAWTGAHDVWLRGHARARLITTGTRLTFDSDYEAVAAVKARRDRLDTAIEAMAAQSEFTPLVRRLGCLRGISTLTGFALAVEIGDWNRFTGASIGSFIGLTPCEYSSGSSRTMGPITKTGNRHVRRLLVEAAWHHRPRYRPGKTMRDRWDLAPVAARVRGDQGNRRLHHRWTCFIDRRKRSTVATVAIARELAGWCWSLAVLDAD

SEQ ID NO: 357961 - protein, 399 aa, unidentified
MHYCGIDIAKRKHEASAIDESGKALSRSFSLDNSTDGVSKLIDFFSANGITKDSVVIGMEATGHYWLALYSFLIEEGYNVKVINPIQSDDFRKMYIRQTKNDSRDSFIIAQIMRFGEYHTTELADESLIALRQLSRYRLCLVESAGNCKRRIITLLDQVFPEYATLFSDIFGATSLELLETYPLPDDIMNVPTKQLADFLSQASKGRFKEQKARELKDIASGSFGVGFAKDAFCFQIKQLVAQLQFLEEQISDLEEEVDILMQSVVSPITTITGIGSILGAAILSEIGDIHRFDHPSKLVAFAGLDVKVVQSGEFTGTQGKLTKRGSPFLRRALWLAANIAAFKDPTMSEYYQSLRQRGKHHYVGISAVARKMCNIVFVILSENKPYDPYYPKRIQTIL

SEQ ID NO: 357962 - protein, 381 aa, unidentified
MTCWELPGAGMGPTPDNMNNTIKVELASHEETRLEFNPSKTVIKLGIDVHQEHYVVVVQEGGGNPKPAQRFKKEAFLRWVAQLKQKSGAEIHAVYEACGFGFGLQRQLTALGIECYVVCPQKLDERNKRVKTDGLDAKALCLKLDRYVEGNRDALALVRVPSEEEEQLRAIHRQREQLVKTRKRLEAQGRSLMVNHGIEPVKSWWKRRTFAALALPGWMRELLNNSQPLLLALEEKIRALTVKLQAAAAPGQPRGLGAMTSAVIDREVGNWARFSNRRQVGSYTGLCSGEYSSGKTRLQTCVTKHGNPRLRAALVELAWRLVRFQPQYKPVLKWRQVLAKGALATGAARKKAIVAVARQLAVDLWRIRTGRLQPEQLGLSI

SEQ ID NO: 357963 - protein, 339 aa, unidentified
MRLYAAFDLHSSSSYLGISDEKGKRIFKKKIPNDPARIKEVLRPFKAEIEGIVVESTYNWYFLVDLLREEGYRVHLANVMKTQQYAGLKYSDDKHDAFWLTEMLRLGILPEGYIYPKEERPIRDLLRKRGHLVRLRTSLIVSLQNIIARNLGGRLKANDVKVLTTDRVTPLFQGNEDLALAGKVSKEAIDFMTRQIKTIEATIGGRIRLSNPYDRLLSIPGVGKILAFTIQLETGSIDRFQKVGNYVSYCRKVPSGRFSNDKKKGTGNRKNGNKYLAWAFSEASDHARLFDSESRRYYQRKLQKTNAAIAHNALAHKLARAAYYIMKDRVVFMPAKAFA

SEQ ID NO: 357964 - protein, 343 aa, unidentified
MDHFAGLDVSVKETSVCIVDDTGEIVREVKVASEPEALLAVLTNPAYHFKRIGLEAGPLSQWLYSALAEAGLPVICVETRHMRAVLKAQINKTDRNDARGMAQMMRVGLYRPVHVKTLRSQKLRILLTHRKLLQSKAIAIDNDLRGTLRNFGVKVGIVGSARFEARVKELIENLPDLAVLVEPLLVVRRVLREQLGILHRRLLAVVRDDDVCRRLMTVPGVGPVVALTYRATVDVPARFRKSKSVGAVFGLTCAKYQSGESERTGAISRCGDEMMRTMLYEAAQSMLFHSTKWSWLKAWAMKIARHRGMKKAIVALARRLAVIMHRIWVDGTEFRWTREVAAA

SEQ ID NO: 357965 - protein, 341 aa, unidentified
MKLTTIGIDLAKNVLQVHGADDKGRAVLKKQLKRAEVLPFFANLAPCRIGMEACGSAHYWARKLQALGHTVQLIAPQYVKPFVKRNKNDAADAEAICEAMARPNMPAVPIKNAEQQAVLSLHRARQGFVKARTAQANQIRGLLAEYGIAIAQGIRHLPKRVPEILEAGQDELPSSFRLLIQRLLEHLKELDRQVSELEAQIQLWHRENAASRKLASIPGIGPITASAMIASIGDAKNFQNGRQLAAWLGLVPKQHSTGGKATLLGISKRGDTYLRTLLIHGARAVVRMAERKPQAGSWIAGLLARRNKNVAVVALANKNARRIWALLAHNRDYEPDYGQAA

SEQ ID NO: 357966 - protein, 339 aa, unidentified
MKKVFIGIDFSKLKFDAAIYSVDTKAIVSTEVFDNEQSGYVDFLQWVKENTRCQKSGMLFCGEHTGYYSGNLSVFLYESGYDMWLVSGLEMKLTQGIKRTKTDRVDACKIAEHAYRYQDKRVLFQPVSKALEEIRELLSYRERLVEIRKVLTTSAQEMKRVKDNASCDYIYQDSLEYIKSLNASVRDCEKRIEVLLRQDISLNTNYKLVSSVVGIGLVNAALILVATANFTLFDNPRKFGCYCGVVPFEHSSGTSVRGKTRVSKMANKHLKTKLTLAAQNAARFDPELKEYYQRKRSEGKNNWLVLNNVKNKLIHRIFAVVRDGQMYEKQYVHPLKQVA

SEQ ID NO: 357967 - protein, 402 aa, unidentified
MKVCGLDVHKDSIFCSIYDGKTSSEVKVFDSTTRFIYEMGEYLMTEGVNQVAMESTSIYWIPVWNILMEMGFELTLVNPFLIKQMPGRKSDIKDAQWIATLLHKNLIRGSMIPNSTIQELRFYSRKYMRMQQDKCKLLTKMDRIMVMANIRISSCVSKLTNKSVIIVIEALIKGETNPDNLVKLVYGNTKNKQSGKLREALTGYIMDHHRKALKWEKEIYDILERQTLECIKEMERICNKHYKDEMLLLQTLPGVSKISAICLIAETGADMSVFENSGKLTGWAGLRPRNDESAGKFKSKAITKGNKYLRAILIQVAWGASRTKGSYFMEKYHRLAMRKSNKKAIVAIGRKILVIIWNMLKEKKPYNPNLVSIYDPIKIERQLAYHRKEMEKAAKLLHKEII

SEQ ID NO: 357968 - protein, 385 aa, unidentified
MQASTVSTPITDRINTIFVAIELSQKTWLVTMHSPDKDKISRHKVQGGDHAGLLALIDRVRDRAARTLGAVPAVVSCYEAGYDGFWLHRLLMAAGITNYVFDPSSIAVDQRARRVKTDRIDGETMLRTLMAYLRGEPRVVRIVRVPMPEQEDARRNTRERHRLTKEQTAHTNRIKALLRLHGFAVGQPRRRDWLNWLAAQRDWQGQGVPPRVLSEIENEHARLMLVRKQLDALARTPAAADPAPAVAEMVRRSELLQRLKSLGPAFATTLTQEAFYKANRRQVASYFGLAPSPWQSGGTDRDQGISKAGNPRARCSAIELSWLWLRHQPDSELSRWFRQRTLNAGKRTRRIAIVALARKLVVALWRYLTTGLVPAGAVLKSAAVQ

SEQ ID NO: 357969 - protein, 327 aa, unidentified
MMYLGIDISKAKLDCSLLDPATDKRKTKAINNDPKGFEALLAWLDKQGVAPGDVHGVMEATGVYHEQAALWLTDAGVRVSVVNPAQVRDFARGLAMRTKTDGTDSAALARYGALIQPDAWEAPPPEIRELKALITRLEALETDARRELNRREKALVAQAPILVRESLDNHLAALKQEIARLQQAIDDHINRHPGLKADRERLLSIPAVGDKTANRMLAILHSRKFRSADQVAAFLGLVPVEHQSGSSIQKRPRLAKNGDAKTRGVLYMAAIVAAQYNPHVKALYTRLCAKGKSKMAALGAAMRKLVHLCFGVIKHQTVYQPNWQPGG

SEQ ID NO: 357970 - protein, 360 aa, unidentified
MEGNQERSAGRIVGGVDTHKDLHVAAVVDECDRVLASQSFATTRHGYKQMLDWMRAFGSLQRVGIEATGTYGAGLLRYMQKAGIEVLEVTTPDKHDRRKRGKNDDLDAQNAAHAAFAGKRTATPKSRNGMIESLRVLKACRKTAVAARRVALQMIQNTIVCAPDELRELLRKMTRMQLIRTLAAWRPDLTDYRNVTAAYRITLKSLGRRYLELHDEIADLDTMIVALVDELAPNLVARNSIGHESAAQLLLTAGDNVQRLRSEASFAALCGVSPVPASSGKTTRHRLSRGGDRAANSALHIIAIGRLRTEPRTQAYVAKRIAEGHSKLEAIRCVKRYIAREVFSLIKQRSQETHPASTAA

SEQ ID NO: 357971 - protein, 343 aa, unidentified
MKIIGCDFHPSFQQIAMVDTETGEHEEKRLTPTEAVLFYRQLQGQPVVVGMEASGNTLWLERLLTGLGHQMRLGDASKIRAMEVRKQKTDRRDAELLLKLLVENRFPEVWVPSLEMRDTRQLLLHRHKLVGMRRQVKNQLQHLALNQGVQKKWKLWSRAGRQILEELPLSGWTARRRKDLLGWLDQLDQEIVELDRAVEQEARQNAIAQLLQTHPGVGPVTSLAFVLTLGKIERFQYSRQVVSYLGLNPAENSSGGRQRLGGISKQGNPMLRSLLVEAGQSASRRDKELKRAYQRLKQRKHSAIAKVMVARKLAVRLYWMWRTQQPYSATRMQGSPCHLVVAV

SEQ ID NO: 357972 - protein, 342 aa, unidentified
MDQYAGIDVSLESSSVCLVDGSGKILRETKVASEPAALIAWFRSLGQQPERIGLEAGPLSQWLYAGLRDAGLAVELLETRHVREAFKSMPVKTDRNDARRIAQLMRLGWFRPVHCKSVAAQETRTILTARKLLQSKLRDVENSLRGILRGFGLKVGATTERTFAGRIRELVTGHPGLELVASALLQAHAVLLREFKSLDKHTQKLAKAHPSAKLLMTTPSVGPIVALTYAAAIDDPKRFRSSKATGAHFGLTPKKYQSGETDYTGRISKIGDASVREALYQAAHVMLTKPVKNCSALKSWAMRISKRAGMRKAKVALARKLAVILHRMLADAKPFNPMAKAI

SEQ ID NO: 357973 - protein, 342 aa, unidentified
MKYFAGLDVSLEETSLCVVDEAGSVVREGRVASEPSAIAAWLGQTGLSMARVGLEAGPLSPWLHRELGGAGLPSICIETRRMRGATLLMSVKTDRIDARAIAQAMRVGWYTVVHVKSEASQELRVLLRNRKTVREQRVGLDNEIRGTLKAFGIKLGKVSEARFADRVVSAIKEQRPALLSMMEPMLAVRLTLRRAHAVLHNQVKAVVRASAVCQRFMTTPGVASVVALTYMTGVDDPCRFARSRAVAPHFGLTPRKYASGEIDRNGAISKCGDEMVREALFQAAHTLLTRVKRWSALKAWGMQVAKRRGLRRATVAVARKLAILLHQMWVTGEDFRWAANAG

SEQ ID NO: 357974 - protein, 416 aa, unidentified
MPDPAEIPAAFVGIDWADCKHDIHVYPAAGSAATHEVIEAKGEAIQDWILKMRAQFGHDGHKVVICLEQSKGALIYQLMEHDFFVLYPINPKTLASFREAFRPSGAKGDVSDADLLCELGRLHRHRLQAWQPDDEQTRKLGAFCQKRRQVVQTSVRLVQQLRAELKTYYPLPLEVLELDTVLACDFLVRWSTLEQLRGAKVQVIRKFFYAHNYRRGDKLELLLAKIGTAITITSDGAIIEPAAAYVRLLAAQLRVILLAIPEFDQKIAELLEAHPDAPIFQSFPGAGAQLAPRLLTAFGTDRTRFRSAEQISVLSGIAPVRIASGKSAVTAKRWACPKFLRQSFHEFARCSLPQCAWARAFYDDQRSKNKKHHTALRALAFKWIRVLFVCWKHRTPYDDALYNRRLLQRGSAFACE

SEQ ID NO: 357975 - protein, 438 aa, unidentified
MNQSSPAILAFDFSADRLDAALQSPDGRWLIPHQAFANNWSGLAALKQEVLAHLSQCPEGQRLAVVGESTGLYWWHTFYHLATDPDFAAYQPEMALLNPLHVKHFRQALPERDKDDPTDAHLIARYFHNNGVKHGWPGDLRYLPLRQLSRAYCRLVHSLAAEKAFCLTLVYLLASEYKRLNAFSDLFGRTSQYVLTEYPDIAAIAAIPLPELAAALNQVARGKLKDAAATAQTLHQVAADSFPLPDSLRPTVHTCLQLTLKTIAFLEAQQDAYQQLLADQLALYPEAALLLAEPGFGPVLVAGLLAEIGDTRRFVSGQKYDRRTHRTRPRKYKDGQAGVARMAGLWWPKNSSGRFEGQERHLAHERNPYLRYWFVQAAYSLKGHQSEYADYFWKKHREVSKHQHKRALILTARKAVRPVFALLHKGQMRLLEEAPTAA

SEQ ID NO: 357976 - protein, 385 aa, unidentified
MTTTRQVSTFIPGDYDVFAGLDVDKRSIAITFTDHGTMRKSLKLPYSARQLLNYTGKHFPGQRVAFVYEAGPTGFGLHDELTAASHYCLVVSPSMVPSAPRNKVKTNRLDSKKLSEGLGGGQLRGIHVPPPSYRELRHLVQLRDTQVAQLTATKLRIKSLLLYEGIAFPAVDGKWSGRVLRQLEILPCNATVRFKLDQLIDTLQFHFQSAAKVQKQIRYFCQNDPELSQCISFLISLPGVGTITATHALARLGDWRQIKDVRQIAGFLGLVSSEHSTGDKENRGEITHIGDKRLRSKLIQCAWTAIRKDPELGAFYRRIYERHPKKVAARKAIVAVARKLTTRMYAVLKEQRPFVIRADRSIAPLTAEETTGLGERLDGAQNDQP

SEQ ID NO: 357977 - protein, 345 aa, unidentified
MEYFAAIDVSLELSSVCVVDETGKIICEKKVASEPEALVAWFNDTGLEFTRIGLEAGPLSQWLHAGLTAAGLSAILIETRHVKAALKAMTVKTDRNDARGMAQLMRMGWFRPVHVKTVPAQEIRALLTGRKLLLGKLRDVELGIRGLLRGFGLKVGRVSKGRYEARIHELTAGHPMLEPVAAAMLQARVSLRAEYGKLHRMLLGIVRADATCRRLMTVPGVGPLVAVSYKTAVDDPARFRKSKELGPYFGLTPSKYQSGEVDWTGRISKVGDAMVRTALFEAANVMLSRVTRFSTLKAWALRVAKLRGMKRAKVALARKLAVVLHRMWVDGTDFRWRKMPAAVAA

SEQ ID NO: 357978 - protein, 316 aa, unidentified
MQTPLICVGIDISKARLDVHVRPSGTSTSVAYDAAGITALIGQLTEVPPTRIVVEATGGLERPLLRALVDAALPVIVVNPRQVRDFATATGQWAKTDALDAQVLARFAEVIQPALRVLPDAQSQELAALLARRRQVVAMHRAEQNRLDRTPDRVRKRIAVHLRWLRAELARVDAELDDLIQHSPMWRAREDLLQRVPGIGPVMSRTMLAELPELGLLNRKQIAALVGVAPFNRDSGRLRGHRTIWGGRAPVRTALYLATLVATRWNPVIRAFYQRLRTAGKAPKVALVAAMRKLLTIVNAMVHHGTPWHPVVAANA

SEQ ID NO: 357979 - protein, 391 aa, unidentified
MVCVGIDVAKDKHDCCILDSDGTVRADCFTIPNNSDGFKRLLQTIQDCTQKSDKIKVGLEATGHYSYNILGFLLDNGLPTYVINPLHTNLYRKSLSLRKTKTDRVDARTIATMLLSDVDLKSYTDTAYHNEELKSLTRYRFEKVQERAKLKQSVSRLATILFPELEQLVPTLHIASVYSLLSEYPGAKQVSEVHLTKLTNLLATASKGRYGKDKAIQIRDAAKTSIGSVMPAKSLELKHTIKLIRELTSEIDEIEDSIQQIMDELHPPLLSIPGMGIHSAAMILGEIGDFSNFESPDKILAYAGCSPSTYQSGKLTNCYAHMEKRGSRYLRYALYNATKYVCHWNPVFAEYLAKKRAEGKHYNVALSHATKKLVRLIYALQKSGKTYLTAA

SEQ ID NO: 357980 - protein, 332 aa, unidentified
MISRSARCLRRRPLETQRAQVQCIDEDFNGPDRVIVGDVVVEAFGKQRALRSIFTLNKALHQGYLARLLLANTAAIKQYDGLKHRGDESDARQLAHLLRLGLLPEGHIMPKAARAVRDLARKRMQLVQQRTAQILSIESSLSRHSGWKLSSNRIKCLRQADLDEMRLDEMPMLGLKANVAVMQALQTQIDGLEKVLADYCRTEPGYQLLRTVTGIGEVPATVILLETGGIERFADAGNYASYCRCVGSAHLSNGKKKGEGNTKNGNRYLAWAFVEAANFAVRHCEAARRFYQRKKAARNSIVAIKAVAHKLARACYHMLKTQTPFCVERCFA

SEQ ID NO: 357981 - protein, 375 aa, unidentified
MEGAPMLDTTTFIGLDVHARSIKAVSLDVMTGEVRAATFGYDAGAVAEWVRSMDPRARCVYESGVTGFDLQKRLSGLGVDCVVGAVSKMIKPSADRRRKNDRNDAEFLARMLSVGNVVEVWVPDDECEAARDLTRALEDARDDLSRSKQRLSKFLLRHGLVFDERTPTGRRKGNWTRAHWSWIESIRFAERADNDVLAYYVDAVRRAAEEKARLEGLVEAEARKPRWRKRVDSLRCLKGVDTASAADLVFEAGEFSRFRNARSFAAWVGLTPSEHSSGESDRRGAITKAGNKHLRKTLVEAAWHYLTCSGRPKDLARGQAPDRGARRHAAKGVRRLVERREALLARGVHGNKANVATARELACWVWAVGLMAEEA

SEQ ID NO: 357982 - protein, 387 aa, unidentified
MTSITYVGLDVHTTNYTAACYRFETDNTFAVAELKPKADEIEKYLKKVKKNLGEDCEFLCGYEAGCLGYSLYHELTAKGIKCVIMAPSTIESAPVNKIKTDKRDAKKLARCLATGGYKAVYVPTDEDNAVKEYIRMRDDVNGALKRIKQQITAFCIRNGKIYRGVVGKNYWTHKHLNWLEKLEFNNPFLRETLEEYIAIFYVLREKIDTYDAKIAELSQTPRFEEPVKKACCLLGIATHTAMATISEISDFTRFPSAGSFAAYLGLVPGEHSSSNKRNQLSITKQGNTHVRRLLVEAAQSYTKGQIGKKSAALKKRQAGMDPKIIAYADKCVERLKRKYVRIALHSNRNVAKTAIARELACFIWGLMTNNYGDGECRGNVENRPIMC

SEQ ID NO: 357983 - protein, 417 aa, unidentified
MIDADWFVGIDWASATHEVCILDRVGDVSERRQVEHTATGLQTFVEALQARASGDLSRVAIAIETPRGALVEVLVERGCAVYAINPKQLDRFRDRFTAAGAKDDRRDALVLGASLRTDPQAFRRVRLDHPIVIQVREWSRMDEALGIELTRLANQVRELVYRIAPGLLTVCPGADEPWLWALVRLAPTPAQQQRLSVRRLERLLREHQVRRLTAADLRAVLQHPPIATAPGVVDAVAAHLQLLLPRVELVAQQRRQCGRELERLLSALATEAPAPGDQREHPDVTILRSMPGVGVRVAARVLAEASQPLVDRAYHTLRAVMGIAPVTKQSGRSRTVSMRYACNGRLRDAAYHWARVGTQRDAKSRAYYATLRARGHSHARALRSVADRLLRVLMSLLARGQCFDPTYGAPLAATPEA

SEQ ID NO: 357984 - protein, 357 aa, unidentified
MTTATQAPAAGTILAIDLGRHKSVACAYDRATRAAAFQALDTGRADFERLFARHPGALVVVEACSNAGWATDLARACGLAVKVANTSGEAWKFKHLKRKTDRDDAKRLAELEALGQLPTVTLPDAAARQRRALIAHRQALVGRRTACQNRIRALFAGQGLPTPRGHRAWTALGLTGLDAQAEPLADCAPAGLWRGMLHLALADYRHLLDQIAACEAALDKLAAADPATRRLATIPGVGPRTAEAVAAHLGDPKRFASGKQVSAYAGLVPKQYQSGESDRRGRITRRGPGLLRKLLVECAWAMLRYNAWARATYARLTRGGVTRRKPAVVALARRLLVRCWAMLRDGTDWRAGPAPAP

SEQ ID NO: 357985 - protein, 349 aa, unidentified
MTIVEDARVITGGVDTHAGLHVAAALDPLGGLLGVQEFPATAAGYARLLDWLGGFGTVALVGVEGTGSYGAGLARHLAAAGVPVVEVDRADRQDRHRQGKSDPLDAVSAARAAQSGRASGAPKGRDGAVEAIRALMVAKRSARAERTQAINQARALIVTGPDELRARFAGHTPAALVEAIAALRPRPGDVPGHATRVALRELGRRAQFLDAQLDRLDELIGPLVAARAPGLLSLHGVGPDTAALLLIAAGDHPERLRSESSWAHLCGVAPIPASSGKVSRHRLNRGGDRQANHALWRIVITRLSSRPGHPATRAYAERRAKEGLSKKEIIRCLKRYVAREVYHQLRGGA

SEQ ID NO: 357986 - protein, 343 aa, unidentified
MQTVTTIGLDIAKSVFQVHGVDAAGQVVIRRQFKRRQVLAFFQSLPACLVGIEACASSHHWARELQLVGHTVRLMPPAYVKPYVKRHKNDATDAEAICEAVARANMRFVTIKTPEQQSCLVLHRTRHLLIRQQTSVINAIRAHLAEFGIVAAVGRNGVEQLLGVVADANDKRLPEVARACLATLGVQLRVLKAQILEFDRMINAWHRSNETSRRLDKAPGIGPVLATALVATVADPKTFRSGRNFSAWIGLVPQQHSSGGKDRLGHISKQGDRYLRNLFVAGALAVIRYAKIHGTQHRPWLAALLARRPTKVAAIALANKIARMAWAMMVKGEHYKEPVALAR

SEQ ID NO: 357987 - protein, 367 aa, unidentified
MNDTKYIGLDVHQATISAAVRDTTGELVMEAILETKAETILQFFRGLRGSLQVIFEEGTWSAWLHDLLQPHVARVVVSDPRKNALLKDGNKNDRIDARKLSELLYLNKFNPVYHGEHGLRTLKELARSYLTITKDITRVMARIKAIYRSWGIPCAGQQVYAPGHRREWVAKLSEAGVRARAEFYYQQFDGLAPLRQQARRELLSESRKHAAVKLLRQIPSIGPIRAALLVALLQTPNRFRTKRQLWAYVGLALRTYTSGEYRFEHGQLKRSKKVLAIRGLNRNHNHDLKNIFKGAAIWAAGNTGPFQNFYEACLARGLKPHLARLTLARKIAAITLLVWKSMPTPRLCRLLSGNSGWEGLGLRPESA

SEQ ID NO: 357988 - protein, 347 aa, unidentified
MVTLGSDSHKRSHTLLAVDGNGCPLEERKVPATPAGHMEALAWARRWPERRWALENCRHLSRLLERDLLTADEAVVQVSPKLMGKARRSGRELGKSDPIDALAVARAALREAHLPVAQLEGKSRELKLLVDHREDLVGERTRIQNRLLWHLHELEPGFEVAASGLLRAVVLAEVRRRLERHTGVVAEIAVDLVGRLTELTTSAKRLQSRIESLAGELAPSLLSLPGCAGLSAAKLVAETADVNRFHSSAAFAMHNGTAPIPVWSGNHERHRLNRGGNRQLNVALHRIAVTQIRLGGEARVYVNRRMSLGNTKTEAIRALRRQISDEVYRRLRRDSSERLTAPNAVAG

SEQ ID NO: 357989 - protein, 355 aa, unidentified
MNSEKYIGLDVHQATISVAVMDSRGKVVIESILETKASTILEFFAGLRGTLSVTFEEGTWAVWLYDLLKPHVAKVVVCNPRKNALLKDGNKSDRIDARKLAELLRLDNLKPVYHGETGVRMLRELARSYLTIVKDLTRVMNRLKAMYRSWAIPCAGRDVYYTRHRTEWLGKIREAGVRRRAEQLYQQLDMLQHLRQQARRELLAESRKHPITAKLRKIPSLGPIRSALAVALIQTPHRFRTKRQLWAYSGLALETRTSGEHRYVRGQLRRSKKQVSIRGLNKDHNHDLKGLFKAAATRASVQPGPFQDFYQRSLAKGIKPTMVRITLARKIAAITLTLWKKGENFDAENLQSQAA

SEQ ID NO: 357990 - protein, 394 aa, unidentified
MKLVGIDVGKNSHHFCVMDKETGEFNVAPSSFSNNKEGFDFLINSLKPYSKKSILIGMEDTGHYHVALLKFLLSNGYTVALINPKTTDLTRKMEGGITKNDKLDTITICDVLDTPERKKQYRITKVDRFDLYEQRQLTRHHHNLKEELNIYCNRLQKSIDLVFPEFNTLFSSKYGIVYMNLLKTFGSAEAIASTDIRTIRKCFEVKGRGGRISLTAEKLKECAKNSIGISSEVETIQIKHLVSQISLIKEQIAEIDKKIEEFSIKNNSPILSIPGISHFSGTSILAELGDIGNYSKPSQIIKFAGVAPYHYESSQYNAQHTGITKKGSKYLRKTLYQIILPVINNNPVFKKYYLLKISQGKGHRCAQGHCIRKLLRIIYHLLETGQSFDPALLR

SEQ ID NO: 357991 - protein, 282 aa, unidentified
MIIIGCDYHPGFQQIAFVDTDTGEWNERKLGHREEAEQFYRQLKVRGKKVRVGMEASGHARWFERLLTEVQFELWIGDAAEIRTKRVRKQKTDRQDAELLLRLLIEDRFPRIWVADGENRDLRQLLWHRHRLVQMRTRIMNQLHVLALNEGVRRKKALWRPAGRAQLQSLVLARWASRRRQDLLELLDQLTPKIQELTRALEQEVEKRPVARRLMTHPGVGPLTALAFELVIGTPERFGCGKQIASYVGLVPSEEPGHATRETDRQGSHGAETRGSTLLDVA

SEQ ID NO: 357992 - protein, 334 aa, unidentified
MGQQRRDHQYLLGGGMLVGIDVAKAELVVGTRPTAERWTVVNDERGVRTLVERLTRDAPELIVLEATGGYELLSVAAMVAAGLPVVVVNPRQVRDFARATGQLAKTDRIDADILALFAERVRPEVRPIRDNAAQELDALLARRRQLLDMLQAEKNRLGQVFGRGHARVKKSLKTHISYLERELKMADNDLGTMVRESPAWRERDDLLQSVPGVGPVLSRTLLADLPELGRLTRREIAKLVGVAPLSRDSGTLRGRRFIHGGRAAVRAVLYMGALVATKRNAVIRAFYLRLVAAGKPKKLALVACMRKLLTILNTMVRTNQRWCTEVGTPVLQPA

SEQ ID NO: 357993 - protein, 344 aa, unidentified
MGEVSTIGLDIGKSVFQVHGVDDAGAVVIRKRVSRARVLEYFGELPPCLIGIEACPSAHHWGRELQVLGHMVRLVPPSYVKAYLKRSKNDANDAAAICEAVTRPSMRFVPIKTKEQQTALMLHRTRQLLVRQRTMLSNALRGHLAELGIVSAKGRNGTAELLRIITNGADSRVSPAVRGILDVLARQYSAIGIEIASIDRSIMALHRGCEASRRLAEIPGIGPIAATALVAEIGDWKTFSSGRSLAAWIGLVPKQYTTGGKDRLGSITKQGNRYLRWLLIVGAMAVIRYARKHGTEKRPWLGRLMERRPTKVAAVALANKIARMAWAIMVRGERYKEPKLLLAA

SEQ ID NO: 357994 - protein, 357 aa, unidentified
MDKYIGFDMDSNKTVACVIEAGKRDRYQTIGSDIVSMRKFLKSEKQGGCRLELVFEISGRAGFIYDSLIDCVDNIKVANPSKMTWIYRTAKKNDRIDARKMAVLLSIGEIPEVYMPSREVRQWRETILHRKKIIDRFVQVKNRIRATFKGHGFSKPANRGGWWNKLNRIWMQSICQQQAGRIFSLWSIQTGSLFDELELLEKQLKDITEYLDKYLSSKAGGTLLMSIPGVGPRTAEAILAYTDDIRRFGNYKRYCSYFGVTPKLDESGSTRRMGHISRRGPSVVRWVLCESSWKVIRHSKGMRQFYERVMAAQNGRKKIAIVAVARKLLSIMRAMMLTGELFNESMISGFDKLTEAA

SEQ ID NO: 357995 - protein, 346 aa, unidentified
MAIVGGLDIHRKQLTFDYLDTATGEVKRGQVAPADRAHLRAWLARFVGREDVAFALEGCTGWRYVAEELAAAGIAAHLAEPADTAAARGRKRHAKTDKTDSRHLRELLAEGRLPECWIPPSRILECRALLETYHDLRAERTAWVQRVHAVFFHQGAPALADGALRAGRCDLEALRAAAACCLSPAGQLQVATALEVLAALEARLDELRRELLDAARHLTGARVLAARLYGVGPVTALAMTCWLGGEGRFSSSRKAVRFAGLDITVYSSDSRRSPGRLSRQGPPVLRWAVYEAGKVHARGTAPDHAYYSRVKDRKDGKRAALSEARKIIRQACHILAELGDDALSAA

SEQ ID NO: 357996 - protein, 346 aa, unidentified
MEQYAGIDVSLELSSVCVVDAQGKIVKEAKVASEPETLIGFFETLGIAVDRIGLEAGPLSQWLHAGLKRAGFEAVLLETRHVKAALSAMTVKTDRKDARGIAQLIRMGWFRPVHAKSIGSQEVRALLVARKQLLERLIDVELSIRGILRGFGLKVGPVTRKGFEVRIRELVTGQATLERIAGAMLSARAALKAEYEKLHKAVLALVRDDAVCRRLMTVPSVGPLVAITYKSAMDDPHRITRSKSAGALFGLTPKKYQSGEKDVTGGITRAGDEMVRTALYEAANVLLSRITRFSKLKRWGMDVARRRGSKRAKVALARKIAVILHRMWIDGTTYRWAAAEPIAAKA

SEQ ID NO: 357997 - protein, 356 aa, unidentified
MLNKFNKIPDFTGHDVFVGLDVHKGSWAVNIIVDDIEHRSFTQPPEPVTLSNYLTGNFPGANYFSAYESGFCGYHHHRKLLELGIHNIVINPADLPTTDKEKTSKRDPLDSRRISSYLQKDLLSAIHVFDPSHEQFRSLCRMRCTAAKENRRIKNRIRAFLNYYGINPPTHLKPKYWSNKLLHWIEELELSYDSGTLALKYLVADYLKNRELLLDVTKNLRRQVKLLYQDVYTVLLSVPGVGPLTSMCLIAEIGDISRFHSYKQLASFVGLIPRSHQSGEKDFPGQLTYRCNKYLRSALVESAWTAVRHDPALMLYFKERLPGHKSQHIIVKVAHKLLNRIRNVWISHNNYCKGLS

SEQ ID NO: 357998 - protein, 389 aa, unidentified
MKIFVGIDIAKLNHFAAAISSDGEIILEPFKFTNDADGFQLLVSKLESFDKNSIIIGLESTAHYGDNLVRYLVAEFYQVCVLNPIKTCQMRKNNIRKTKTDKVDTFVIAKTLMMQDDLRFVSFYDLDMMDLKALGRFRQKTIKQRTRLKIQLTTYVDQVFPEIQYFFKSGLHQHAVYALLKEAPSPKEIASMHMTHLANLLKVNSHGHFTKEQAKELRVLAQKSVGANDSAISIQITQTIQQIELLDSQLEKIEAEMTDIMRFNDSVIMTIPGIGYINGGMILGEIGDIHRFSNPNKLLAFAGLDPSVYQSGNFQAKTTRMSKRGSRVLRYALVNAAWNVVRNNATFKAYYDAKRAEGRSHYNALGHCAGKLVRVIWKMLTDEVEFNLE

SEQ ID NO: 357999 - protein, 429 aa, unidentified
MDVVEDEPLFAEQVAGIDIGKAEVVAAVRVPGPGGRRMQEVRTFGATRRGLEELADWLDGQGVTRAGMESTGDYWKPVFFTLERRGLECLLYNSRQVKAQPGRPKTDKADAVWLAKITENGWVRSSFVPPAQIRMLREYTRYRRKKIQVMAAEKNRVQGLLEEGHLKLSSVISDIHGVSGRDMLDGLAAGVTDPAVLAAKARGTMKAKIPRIAEALDCSSWTPRHARLLRRMLDTLDYLARQVAELDAEIADLCAPFEAEIARIDQADGIARRTAEDIIAEIGVDMTVFPTSRHLVSWARHCPQIRESAGRRKGRNATGDGNAYLSAAISEAVIGALRTDSFTAARYKRLIRRMPKKKALVATGNTMLTIIWHLLADPATTYRDLGADYYELRDPARQKRNHIRALERLGYHVTISTINPDSGELTPAA

SEQ ID NO: 358000 - protein, 318 aa, unidentified
MMVGLDVAKAELVVAVRPSGEQWTVANDEAGVQALAERLRAVQPTLIVCEATGGYELLSVGALLAAGLPVVVVNPRQVRDFARATGELAKTDRLDAAVLALFAERVQPPVRALPDTDAHELTGLLARRRQLLQMLQAERNRLGQVFSRGKAVTKSLKQHIAYLERELARTDGGLGELIRRTPAWRERDDLLRSVPGIGSVISYTLVADLPELGQLTRREIAKLVGIAPVSRDSGTRRGRRFVQGGRAPVRAALYMGALVAIRHNPTIRAFYERLVDAGKPKKVALVACMRKLLTILNTMLRTGEPWDANYQARAIISS

SEQ ID NO: 358001 - protein, 418 aa, unidentified
MKVVYPICCGVDVHKTFLVATLITSQGITPHYSKKRFSTFNNAILKFKQWLIDNNCFDVCMESTGKYYVPVYNLLEDIIHVTVANPKWVKAVKGNKDDVKDSKWIGDLFRLGLVPGSYIPAKPIRILREYTRYRSKLVSCRSSEKNRFQNAFTVCNVALDAVVSDMFGKSATSITDYLIFSDTFDPEYCTSLLQKSLKKKADTVVESIEGYQMTPAQKDRVIMVRSHLDYVTKSISELDEKLDNLVEPYESAINLLCTIPGVNRASAITIISEIGTDMSQFANSKRLCCWAGLTPGNNESAGKKKSVRITRAGVYLKPALVQVAHAAVKSDKAPYYKIKYERICKRRGKKRAIIAIARMILTAIYNMFVTGEVWNPSDLYKIDMPQDMQDKQKEKAIKQAIKLLISQGLIKTTDISVA

SEQ ID NO: 358002 - protein, 315 aa, unidentified
MLIHYIDIAKRNFVIAVSSLSKTKTETNNPKGIAHTIEYLKKHKVALVVTESTGGLEIPAAKAIRRAGIAVIIANPRQTHQFAQSQPLTKTDAKDAKMPAFFAQMTAQKEDSQTMPYQPPTEAEEVLEALVNRRNQLVDMRTAEKNRLHQVHETQVGSVKQLIAHFDRLIDELDKQIDDHTHTHFDGKAQVAEQIKGIGSITTATLMAMLPELRRLSHKRIAGLAGIAPHPRESGETKFKSRCFGGRSAVRKALHMATVAATRFEPLIRDFYQRPLSEGKPYKVAVTACMRKLLTISNARMRDYFAENDTAENGI

SEQ ID NO: 358003 - protein, 406 aa, unidentified
MEVVHPRCSGLDVHKKSVVACVMVPGRKQVRTFGTVTAELLRLAEWLQEEGVTHVAMESTGVYWKPVFNVLETTDLELLVVNAQHIKAVPGRKTDVKDAEWIADLLRHGLVRASFIPSRPQRELRELVRYRKTVVEQRSHLVQRIQKLLEGANVKLSDVASDIVRVSGMAMLRALANGESDLDRLVELAKTSLRNKREELRLALEGSFGSHQRFLLGTQFDQLEFLDGQISELNLEVEQRLRPFEALLTRLDAIPGIGQRNAEQILVEVGTDMSRFPSAAHFASWAKLCPGNDESAGKRRSGRTGGGSRWLRSTMVEAAWSASRVRNSYFSAQYHRLAPRRGKRRAAVAVAHSMLIAIYHLIKDGTVYQDLGPNHFDELDRRRITHRAVRRLEALGYRVTLDGVPA

SEQ ID NO: 358004 - protein, 350 aa, unidentified
MGEISIIGLDLAKQVFQVHAAGDKGRCVLRKQLKRRELLAFFRVLAPCIVAMEACGSAHFWAREIAKLGHEVRLLPPAYVKPYVKRGKSDRIDAEAICEAASRPAMRFVPVKTIEQQSLTTLHRSRELLIKTRTMLVNALRAHLAEFGFVAAKGIGKLPDLIKIVSEAPAEALPEMGRAPLSGFLDAIAQINAQLDSIEKQLRAWHNANQQSKRLETAPGVGLIGATALCALVPDPKLFKNGRHFAAWIGLTPRIDGTGGKIRLGRISKAGDAALRRLFVLGATSLLKSLATKTTALALWVQALLARRSRRAVTVALANKLARVAWAIMAREEAYRPHCAAQLPMPAVRP

SEQ ID NO: 358005 - protein, 344 aa, unidentified
MKNKKLVVVKQVVGIDIGMKSFYSCYKIQFDDKSTVIKGVKSFDNSPLGLKEFYQWCEKRNKTPEIKPLYVMEATGVYYEELAYFLYHKRQTVSVQLAMKIKYFAKSCNLKTKTDKVDSKMIAEFGIEKNLKGTDLWVPPSEDFKMIRDLSREHTSLKQALISAKSQLHALNHAHGVYKEVIEFKKQQIDFYTTQIIEVEKEISRLVKLDNRLHSKIERIATIKGVRFITIIKVLAETNGFLLFKNIRQLVSYAGLDVIEKESGKYKGKTKISKKGNARIRAALYMPAMTASQHNINLKTFYERINKDRPIKRQGLIAVMRKLLILIYTLWRTDKKYIENYQMG

SEQ ID NO: 358006 - protein, 396 aa, unidentified
MITVGIDIGGKQHVVARCRAGQDKADREVLRVSQDRAGFDRLDAWLARQPEPVERITMESSGHYWMGLTSHLRRGPVPVKVVNPLGAKYFAKSRMSRTKSDPADARTLALMAQQDHTVPRDPIEGVELRQAARFAMTLVTEQARVCQRLIRLVELGFPELGELFDDPACRTAREVLRVAPTAAVARRKRTGTLADANAGPGHRRLGLTKAERLKDAAARSIAVTELDDEVAFEVGMLLDQYDLLERQIDEAEAHVASLLDGELARRLQTIPGVGPATCAALIAEIGDIWRFDDADQLLAYAGVHPAERSSGRKGADPETSWHMSKAGNAHLRAAAYRMALVGVTHNPVIAAHYARKRDAGKSKMNALGHCMSKALNLVWGVWRNGADWDPDWGSRA

SEQ ID NO: 358007 - protein, 566 aa, unidentified
MSKNQAGVSWDAHPLARTFDAGRAPLSVLCYRPYSWSEVIHRAGDESIFPAFERERPRIVNNFAASASSGYELSSFSEKMNRTRLSNLTVVLESGNEYSDEDESSLRRLRLAIRNSHPARAARTTSKLPSSWKGLNMNESVSEQPLSPKVAAFVGIDWADQKHDVVLRSAGDPAEPEHQVVKSEINGLNDWIAQMHERFGEKGKVLVCLEQSRGALIYQLMAYELFELYPINPSQLANYRKTFFSSGAKDDRPDADLLSELVMCHRDRLKAWKPDDQMTRELASLNEGRRNAVNRRTELANEIKSQLKLYFPVALQILENDITTALAADLLVQWPTLAELQKVSPGKLRKFFYGHNSRHEKKILERLALIKEAKPLTADAAIIRPTALRVKLLAQQLKSLLPFIAEYEKRIAELFGSHPDRFLFDNLPGAGPALAPRLLTAFGTDRDRFEVAGDLLNLSGIAPVRIASGKKTGKNASVHFRRACPKFLRQSFHEFGECSIRYCPWAQACYQAQRGRGKGHHAAVRAVTFKWIRILFACWKRRIPYDPQRYFQALQTRGSDYAQTTT

SEQ ID NO: 358008 - protein, 329 aa, unidentified
MSMHYIGVDVSKAKLDCAALVDEAVLKFRSKTFPNTAVGWRALLSWAVEQTGAPTQGLHFVLEATGVYSEAPAAALCRAATAVSVVNPAQVRDFAKGLAMRNKTDALDARVLARYGSVRKPAQFVPPPPEIIELKAMLSRLQAIEAELRRELNRLEKAQTGLSSPLVVSSIERSIAFLQKEKAALDKSIDDHIDANPQLKRERELLESIPAVGPHTSRRMLALMHSRTFRKASQLAAYIGLVPIHHESGSSVYKRPRLLKTGNAQIRAALYMAAVTATRHNPDVKAHYQRLVASGMAKLAAVCAAMRKLVHICFGVIKHQTPYQPQQSA

SEQ ID NO: 358009 - protein, 430 aa, unidentified
MKSNTQNAKIEAITEKTLVLGIDVGSETHYARAFDYRGIEYSKKPFKFSNTEAGFVTFKEWILDIKERHEKDKVVLGMEPTGHYWFNLGKFLQDNEMKPVLVNPHHVKKSKELDDNHPTKNDRKDPKVIAGLVREGRYMIPYLPDGVYADLRTASNIRFQLQAELTRIQNRISRWFNIYFPEYKTVYGKPDAKSGILILKAAPLPEDILTLGIDGVNQIWRDAKLRAVGRARAKTLIEAAEHSVGSKEGAMSARMEIRMLLEDYESRNTRLQEVMVLIEELVRKIPMAEKLLEIKGVGIRTVSGFLAEVGDISRFNNPKELQKLAGLALVENSSGKHKGETTISRRGRKRLRYLLFEVAMSLVAKNPEFRELHNYYTTRRLNPLKKMQSLMAIAAKLLRVFYAILTKGVGYDPKKMVNDIRRPAAYAQAA

SEQ ID NO: 358010 - protein, 354 aa, unidentified
MKRTTKYVAFDVHQATTVASVREESGRVIARSVLPTDSGALTEFVRGMRGARHVTFEEGTQAQWLYELLTPLVDRVIVCDRRGAPRQGNKGDQVDADHLSELLRRGALRAVYHGSADRATLKELTRTYRNLVEDATRVMLRLKALFRARGIATAGTAVYHPRSRARWLAQLLEGGARFRAEALYAELDVLRQLRPQAKAGMVTEARRDPAWRVLRTIPFLGPVRVALLLATMQTPWRFRTKRHLWAYAGLAVVTRSSADYTLRAGAPVRRRRAPMTRGLNRNHNRVLKDVFKGAATAATARPGPLQDFYHGVMARGTREELARLTLTRKLAALTLRLWKKGERYDPTQLTTPAR

SEQ ID NO: 358011 - protein, 401 aa, unidentified
MPRQGFIGLDVAKDTFTAAFLIVDALSGQILHEQIATFSYDHPGWQRFLATWEPLHADFWWIGLEASGPYSALLEAHLLRLHRPNVSLHRLSPLQVRDFARARSRRRTKTDRLDACTIALFLRQQLTVQALPAPLQDHTPLRALAHLDQHLAQELTRTQNQVRQLLHFLFPELERAYARFPKALRILLRHFPSAHAIAQAPLQDLHALLPPRHRLDLEGLQALARASFGLHDPIRAQTLQLLLDRWAFLETLRARCFAALQQAVRQHHPQAWRLLRTIPGIGPRLAALFLALTGPLDRFPDRKALIAYAGLDVTLHQSGRFAGRCRLSKRGDPLLRHVLYLIAAALKRYTRRFAQAFAYYRHQGRAVRETLVILSRKALGMLYHLLRHQVPFQDLPQPAPV

SEQ ID NO: 358012 - protein, 350 aa, unidentified
METAYDGRQVVGMDLHRRRSVLVRMSEDGRRLGTARIENSPAALRREIAGAGQSPRVVVEATYGWHWAADTLAAAGAEVHLAHPLGVKAFTYRRVKNDERDAADLADLLRMGRLPEAWIAPPAVRELRELTRYRHKLVGLRTGCKNQVHGVLGSLGIPVTCSDMFGRAGQAWLDSLPLPQPYAGKVTSLRQLTGVLGEQILLMDTVITGVLAGDRGYQVIRQLPGIGPVLAAVIIAEIGDVTRFKTADRLCSWAGLTPRHRESDTKVTRGRVTKQGSRQLRWALIEAVQRTGPDTVTGAARAAIIARRGPGARSIAKVAAARRLLTLVFYGLRDGQIRCLAAAPAAPPAG

SEQ ID NO: 358013 - protein, 383 aa, unidentified
MYYIGLDVHKKTISYCVKDASGQVKTEGTVNATRTDLDLWMKTLPQPWAAAMEATIFTGWIYDHLQPHATQLKVAHPVMLRAIAASKKKNDRIDAGKIADCLRCDLLPECHMVSTEIRDRRRTLRYRHLLVRQLVQMKNRVSGLLLETGVSHNKQRLHKVGYFGELLTTNQEVKQNIRPLLELSRETIVRLQKMDYALVSSLQRDPLLAKRIKHLQTIPGVGPITALTWALEIGEVERFHSVKQAISYCGLCGDEKSSGESVKRTPISKQRNKHIQSVLVEAAKLAPRHSPELALVYEKEKQKGNANRATPGGRAQARSLPVGRGPAPAGLRAAREQENSSLNRCCQKKRNYTARRLPGLASGRLGEGEKSLKAFFGLFRDWQ

SEQ ID NO: 358014 - protein, 364 aa, unidentified
MDLLHTHGAGLDVHKNSVVAHARITDASGRVTRHTRTFGTMTSDLLALAAWLLNLEITHVAMESTGEYWKPIYTILEGSFTLLVVNAQHIKNVPGRKTDVKDAEWIADLLCHGLLRGSFIPPEPQRDLRDLTRQRTNLVRDRATVVNRLQKVLEWANIKLAAVVSDVVGVSAREMLAAIVDGQSDVSVLAELARGRMREKRAVLEGALSGRVRDHHRFVLASHLEQIDFLDAQIASYDEQIVARVHEQAPPAPPDAPGAPGAAAAPSTGDTDALSWEQAIEIWDSVPGIGRRLAEQLVAEIGPQMEQFPSAEHLASWAKVAPGNRESAGKRLSGKTGKGNRWLRTSLVQAAHSAVKVKSSAVAL

SEQ ID NO: 358015 - protein, 424 aa, unidentified
MKYTQNERILQITEKTLIVGIDVGSELHHARAFNFRGVEFGKLLIFGNNAEGFAKLMEWIDKIAVSNSFTDVTIGMEPTGHYWFNLAENAMKSGKRIVLVNPHHVKKSKELDDNNPSKTDRKDPKTIAMLVKDGRYMEPYIPEGIYKELRTAMDSRWRIMKELSAIKNRISRWIYIYYPEFSTVFGDWEGKAALLILSECPTPKKVVEKGIDGIIAIWKKHKIRAVGRKRAIKLLESAKSSIGTTEGLVSAENDLMMLLEDYERKMQQYERTMALIESLAVQIPGFEKMLKIKGIGLITAAGFIAEIGDVFRFKHPRQIQKLAGLSLKENSSGKHKGETTICKRGRKRLRYYLTFGIMPLLSKNEEFRALHQYYTTRKDRPLKKMQSLVALSNKLIRIFYAILTKNIAYDPQKMMSDIIRPKVA

SEQ ID NO: 358016 - protein, 343 aa, unidentified
MDHIGIDVHKRESQICIETAEGEVIEKRIRTERERFAEVFGKRPRAKILIEAMTESEWVARCLEEMGHEVVVADPNYAVMYATRSRRVKTDRRDAATLADACRLQAYRPAHRASDQQRHVRAELAVRDALVRTRVKCVALVGALLRRHGIHLPSGNVDGFVARAERQEMPSEQRQEILPLLAVIRTVSTELEAADARIAVIAVDNPIIQRLRTVPGVGPITATAFVATLDTWERFSGPHQVEAYLGLVPSEHSSGERQHKGRITKAGNSRARWLLVEAAWSILRSRREDTEPLRRWAQRVALRRGTKTGIVALARKLAGVLYAMWRDETNYERRDAQPQTVAS

SEQ ID NO: 358017 - protein, 339 aa, unidentified
MKLYVGIDLHSTNSYLAIIDGGGKRIFRQKLPNDSASIIQALSLYEGSIVGIVVESTYNWYWLVDALMAEGYQVHLANPAAINQYKGLKHSDDKHDAFWLAEMLRLGILPEGYIYPREQRPIRDLLRKRSHLVNVRTSVLISLQNIITRNCGMKLKTNDLKRLRKNLVHPHLADNEDLALAGQVSKDTIDFLTRKIRAVESFIEKKVELRDSYRNLLTIPGIGKILALTIMLETGPIERFEKVGNFASYSRTVSSKWTSNGKTKGAGNKKNGNKYLAWAFSEAAELARRFDDKCRAYYNRKLQKSNFMIAHSALAHKLARAAYFVMRDGVRFMPEKLFS

SEQ ID NO: 358018 - protein, 317 aa, unidentified
MAIARMTKEASAVKAVNVPSSVKELQIYLGRLKGKKILTFEETTTSQWLYVELKNYVDEILVCDPYRNHLLSDGPKTDELDAAKLVQLLKGDFLKPVFHSADEFIYLRKLISGYEDVIKAGVRLKNQRAALFRAQGKDKREKNLPQQGESFVLEGVDRGIEAYEKEKTRYEAEMDRQRRKHLMIRNLDQIFGIGVIGAVKIVARVVDARRFEDKGKWLSYCGLVRQEKLSGGRSYGWRGSRYCRTLKSVFKTAAMSVIASRSENCFNRYYKFLLDKKHYSEHNSRHAVARKIATIAWAVMKSGKPFDPERMEKGFQN

SEQ ID NO: 358019 - protein, 419 aa, unidentified
MLSLCVCRPTHKPAVDQRLRAAPYKKHAAACRHPSPAGRHKILDQRPAHPLAVEVKQTTKSSPLFTNLRSCVVKKIATIGLDIAKNVFQVHAADADGSTAFNRKIERADLLEFFAKLPPCLVGLEACSTAHHWARRIAEFGHEVRLIHPAYVKPFVKRGKSDFNDAEAINEALTRKTMRFVPVKSAEQQASSMIFRTRTLAIRQRTQAINALRSHLAELGVATAQGRTGLKALIAIANDEQDGRVPASARFALQEILKQIEFLGGYIARLDREILARAKKDDDIKRLMTIPGIGPIIAIAITALVPEPKEFKSARHFAAWIGLTPKSHSSGESQVLGNISRMGNSHLRTLLVTGAMSVIRSAKTAERVSPWLAKLRKRRPFKVAAVALANKTARIVWALLTRGGNYTKPRSSVDVGTMA

SEQ ID NO: 358020 - protein, 316 aa, unidentified
MATRSSVFVGVDISKKSLEVATHNGNSLQNFSNDTMGIPKLVDLMLEIQPVLVVVEATGGYEQALVHAFHQASIPVAVVFPKLIKNFARARGLIAKTDKLDARNIALFGFSINPRPTPPASSPRNRLAALVDRRRQIVNMIKVEKNRLKMVSLDMQPSFVDHLEWLKEEEDHLSSEIQILIENQPEMKAKTEIVQSATGIGMVTASTLVAELSELGALDRKKISALVGVAPLNNDSGNKHGKRRIHGGRRNVRSALFMATLVAVKYNPVIKAFYDRLLARNKEKKVALIACMRKMITILNAMVRDNQPFRYQASMA

SEQ ID NO: 358021 - protein, 343 aa, unidentified
MKLHVLGIDLGKTVFHLVGLDSTGKVVIRKRCSRRQLLAFTANLQVQLIGMESCSGAHFLGRALRDQGHEVRLMPAQYVKPYVQTNKSDYIDAEAIAEAVQRPRMRFVPIKSEEQLDLQALHRVRERWVMRRTAVVNQIRSLLLERGLTLPKGRRYVEEALPRILEDAELPLSGSFRLLLAQLKLELEQPSARIDQLDVALLQRAKEDEACQRLTTIPGVGPVTATAVIAAVGNGSAFGRGRDLAAWIGMVPGEHSSGGKQTLLGISKRGNSYLRRLFVQGARSVLQQRHRQAPGLSSWLAQLLVRKHQNVVIVALANKVVRMAWAVLCKGERYRAPVLAVST

SEQ ID NO: 358022 - protein, 400 aa, unidentified
MISVGIDVSKGKSTVTIMKAGGEILAAPYDVIHNYECLKALADRLNAYDEEVRVVMESTGHYHLPVSTFLADSGVFVCVVNALRMKKFTAQDLRGAKTDDIDSISIASYGITHWSKLIAVLPVDTAYSELKTLSRQYYQFTSLLIKSKVNLSTLLDQVMPEIKTLLADSKSNNKLTDFVARYYHFENILKMGEKRFVADYCKWAKKQGYIKNERKANEIFVLAQNGIPVIPNTISAKIAVLETVRVLQETEKSRNVILTHMIEICKTLPEFSVVLEMGGVGEVLATRLIAEIGDIRRFNSRSSLIAYAGIDVPIYQSGKFKATERHITKRGNKYLRKVGYEVMQSLNKLHCTYADDPVFQFIQKKRSEGKQFKTAAIAGLNKFLRIYFARVCEIYAETNI

SEQ ID NO: 358023 - protein, 311 aa, unidentified
MNDAIGIDISKDTLDTYWLSKRRHKQFSNDKAGLRALIRWVRQAEVSLVVFEATGVYHRLLATSLAAHDLSFARVNPRQARRFAEGTGTLAKTDQVDAAMLARMGSLLELKADKPKSETLHNLKGMETARQALIKDRTAARARLKTATYPLLRKQAILRLRQIERDISQIDAAIETTIAADETLSSKAGILISIPGIAKITAYAMLVEMPELGSMSGKQAASLAGLAPISRQSGKWQGKERIQGGRACLRKAIYLPAVVATRFNPDMKAKYHELIANGKCKKLAITAVMRKLVVMANALLRDGRKWTETRA

SEQ ID NO: 358024 - protein, 419 aa, unidentified
MSNVVYRRCCGMDVHKDTIVVCVLPPDGADGIPARKTYRTFRNDLTRMRVWLKQLKVTEIAMESTGVYWRPVWNILEDHGFRLLLVNPAQVKALQGRKSDRRDAKRIAEYLQDGRLDPSFVPPPEIRELRQLLRHRLSLLQQRGESHNQIRDLFETANIKLSSVASNLLGLTGRRIIEAMIAGEDSPELLAWKVKGKLRKKEKQVKEALKGCFHEFHRTMLKTHYALYQFLTRQVEELEAEIARRMQPYAEQVNALATIPGVEKIAAWHLIAELGADMSVFPDADHCASWAGVNPGSCESAGKQLSSRTKKGNKYLRRILTQSAWAASHCKQGYLRAFFHRVKARRGWARAVIAVAHKILVIAYCVLKTGAPYQDLGDDYFDKLHPERTAKRFVRRLERLGLTVCVTPSEALTPGLSES

SEQ ID NO: 358025 - protein, 341 aa, unidentified
MKKVSTIGLDLAKNVFQVHGADEAGAVVFRKKLRRDKLLAFFAEHPPCVVAMEACASAHHWSREIAKLGHETRMIAAHYVKPFVKRQKNDAADAEAICEAALRPSMRFVRVKTEEEQASAVVFRARDLLVRQRTQIINALRGHLTEYGIVAPSGAAHVARVVALAADPTLAIPDAARTCLAMLVEQLQATQMKMAKLDREIAVRARRDERARRLMTIPGIGPVTAVAITALAAPPETFTKGRDFAAWVGLTPSQRSSGGKQRLGRISKMGERTLRRLFIIGAAAIVRWAVRGRGPANPWLMNLLARKPRMVATVALANKMARIVWALMAQGGTYRAQAATA

SEQ ID NO: 358026 - protein, 394 aa, unidentified
MSATRLHCKVCENVVYMAMELSTKKWVLAFSTGIARDPRIREVQARDMIGLKREIRLALRKFELPEDSLVVSCYEAGRDAFWLDRCLHHHGIENVIIDSASIEQNRRQKHIKTDRIDAKKMVRMLCRWHQGDADVFRTVCVPTEEDEDRRHLHRELKTIKGDRNRVVNRMRAMLAELGLDSQVRLDARFPAWLKGIRLWDGKSVPPGANARLQQQFLRLRSLEAEIAELERVRRDRIRTEDSRQARQVRKLLGLKAIGATSSWLLVNEVFGWRHFKSRRQLASFTGLVGSPFNTGNTDREQGITKAGSKWIRSVMIEVAWMWLRYQPQSALSQWYSRRFGGPGKRMRKIGIVALARKLVIALWRYLEKGIPPEGAILVDWYTKVGLTKAPAMAA

SEQ ID NO: 358027 - protein, 421 aa, unidentified
MKTWTESRFYAGLDWAKDHHDVVVVDPQGTIVADFRFAHTLEGWKQFQEKIAPFMPLAVVLETSQGMAVDQLMAAHCLVFALHAKSAQRYRDRKIPSGNKTDRSDAWALAEALRTDGSQWAPLQPGDPLAEQIRLLCRDEMSLIQQRTLLVNQLQQALYEYYPVVLEAFEDWTMESAWDFVIEFPTPQALQKAGRRRWEKFLHAHHLWRQKTAEERLAIFARATEFCGAPTTLEAKSLLALSLAKLLRTLQAQLNQYRQRIQQLSEQHPHHDLFDSLPGAGATLAPRLLGSLGAQPDRFENHQALQCLAGTAPVSYQSGQIHKVHLRYQCDKFLRQTVHLWSDCSRKTCTWAQVYYQKKRAEGKSHACALRCLGQRWLKILWKMWQTKTPYNPELHAANQQKHGSWVLTLMPQKQTACSGE

SEQ ID NO: 358028 - protein, 346 aa, unidentified
MEHYAGIDVSLELSSVCVVDAQGKIVKEAKVASEPEAVVAFFEALGFAVKRIGLEAGPLSQWLHAGLKEAGFETVLLETRHVKAALSAMTVKTDRKDARGLAQLLRMGWFQPVHAKSMASQEVRALLVGRKQLLGRLIDVELSIRGILRGFGLKVGAVTRKGFEARIRELVTGQATLERIAEAMLSARAALKAEYEKLHKAVLAIVREDPVCRRLMTVPSVGPLVAITYKSAMDDPSRIAKSKAAGALFGLTPKKYQSGEKDVTGGITRTGDEMVRTALYEAANVLLSRITRFSKLKRWGMDVAKRRGSKRAKVALARKIAVILHRIWIDGTTYRWAEATPIAAQA

SEQ ID NO: 358029 - protein, 348 aa, unidentified
MTVYIGVDFHARQQTISYLTTEEGEIKRLQLDHAQPEEVRRFYAQFAGQRVVVGFESSGRAAWFEELLEELGCEIWIGHATAIRLFARRRQKNDRRDADLILDLLVRGDFPRIHRYSAESRAVLQQLRYRQRLVKMRTMLLNSLVFMAASRGVVLRSQLKTKRGLERLRQIDLPPALCEQRDELCQLLLELKPKIDKVESSLAAKAEADLRVGRLRTQYGIGPLTGLCLAHTLEHPERFANPRKVTGYVGFDPVEDSSGERRRIGSISKQGSRLLRFLLVEAGQIAVRRDPELARVYQRVLVRRGHAKAKVAIGRRLLVRAFIMLRDEIDYAEFQRRGVAARSSRGIA

SEQ ID NO: 358030 - protein, 343 aa, unidentified
MDQYVALDVSLQKTAVCVLNVSGRVLIEADVPSEPAALIAFIQTHAPGAARVGLESGPTSPWLWHSLKAAGLPVVCMDARHAHAALSVRPSKSDRNDAHGLAEMVRMGWYREVQVKSLAAHERMALLGVRRRLVDMRVEIDGQIRGILKTFGLVVGSGNKGAFAQRARMLAQNHPVLSALIDKLIEVREVAVAKVAALDKEIRRFVRDDLTLRRFMTVPGVGPVTALAFRSTIDEPNRFKRARDVGPYLGLTPRRYQSGETDRHGGISKCGDRFTRTCLYEAASVLLTKVQRWSPLKAWGTRLARRIGSKKARVAIARKIAVILRCIWTDGTEFWWTRETATA

SEQ ID NO: 358031 - protein, 340 aa, unidentified
MTITTIGIDLAKNVFAVHGVDQNGKTVLVKSRVTRAALPGLIASLPPCVIGMEACSGAHYWARLFLQYGHEPRLMAAKFVSPYRMAGKSGKNDAADAQAICEAVRRPHMRFVPVKDESQQAMQCLHRTRQGFIEEKTATYNRLRGLISEFGVIAPQSTDALRHMVSAQKSSLPLQVQQCVDDLLEHVDRIEANITEYDRILSRIAKTDHRSQRLMKLKGVGPTTACALVACIGNAHDFKNGRQLAAWLGLTPSQYSSGGKSKLGRITKAGDSYLRTLLVQGARSVLIGAEKRTDSFSRWVCSLVERRGYWRAVVAIAAKNARLCWASLHYGDDFRLYSAS

SEQ ID NO: 358032 - protein, 366 aa, unidentified
MPKLSTRRVVRSRIFKGLELTIGLDLGDRWSFYCVLNERGEVVREEKLPTTPEAMKRTFEKFPASRIVLETGTHSPWVSRLLTELRHEVIVAHAQKVQLITKSSRKDDRHDARTLARLARIDPELLGPVRHRSAKAQIHLTVIRARAELVSARTALINAARGLAKSYGERLPKRGTQQVGRELAAALSTDLREVIEPLLRGVESLNERIEEYDQRMEQIAKQVYPEVALLKQVKGVGTQIALTYRLTIDDPYRFAKSREVGCFLGLRPGRRNSGQSEPQKNISKEGDRYLRTMLVQGAHYILGPFGEDSDLRRWGLKLAERGGKNAKKRAIVAVARKLAILLHRLWVTAEVYEPLRNTNRAMGAAA

SEQ ID NO: 358033 - protein, 359 aa, unidentified
MPRTSKEISFNGQKIFVGIDTHLRNWAVTILTENNFHKKFSQDPKPEALANYLQKNFPGAEYYSAYEASYCGFNIHRRLNELGIQNIVVNPADIPTTDKEKRQKEDARDSRKLAMTLRSGELKNIYVPSVESEELRSLIRYRKTLVKDIARGKNRIKSNLYFHGVEIPFAHQQDSKYWSNKFTLWLNTITHTTEYGTLVLQDLTDTNLNLRRKLLKVTKDTRMAAKSEKYSKLCTLLTTIPGIGIISAMTILSELETLERFTSFDKLSSYAGLVPTTHSSGEKDKTGKITPRANQILRNALIESAWVAARIDPALSLAYNELCKRMKATKAIVRIAKKLLNRIKYVLKNETGYVCSVVS

SEQ ID NO: 358034 - protein, 414 aa, unidentified
MTQVIIGVDPHKLSATIEVVDHHETMLGSGRFSTDQAGYTALRTYAKNWPERVWAVEGSNGAGRPLAQRLLEAGEHVVDVPAKLAARVRLFDTGHNRKTDARDAHSIAIVAVRTRTLRVLRRDGELEALRMLCDRREELTRLRVQTVNRLQRLLAELIPGRAKKDLTALQAKAMLTTVRPRDIAGKTRRRIAAEELADLIAVEAKMKKATAELKVLVKSRRSQLMDLHGVGPVVAARTLADVGDIARFADRNRFASWTGTAPLDASSGEQNRHRLSRAGNRRMNHMIHIAAISQIRLDTDGRAYYRRKRAAGNTTLEALRCLKRRISDALYRQLVADAERAAHATRPTWLARVREGTAGRLKNPARSTCPRTSTLRISHFPDPQTRRYNPPSQSGRARGGSLLRPRLDNKGEPI

SEQ ID NO: 358035 - protein, 350 aa, unidentified
MLIIGCDYHPSFQQIALVNTETGELQERRLGHREEAEQFYRALATVGAKVRVGMEASGHAGWFERLLAELNIELWMGDAAKIAAKRVRKQKTDRRDAQHILTLMVKDDFPKIWVPSWENRDVRQLLWHRHRMVQTRTRIMNQLQAAALNEGLRYKKKLWRESGRQQLESLPLAPWASRRRRDLLEVLDRINPTIAELTRAIEQQAEKCPDAQRLMTHPGVGALTAIAFVLIIGKADRFSCGKQIASYLGLVPEEDSSGERRRLGHISKQGNSLLRFLLVEAAQVTVRSDNRWRNRFFHLAQRRGRKIAKVAMARRLAIRFYWMWRRGWSYAQLESFGSHVGQLGNRHGVQ

SEQ ID NO: 358036 - protein, 418 aa, unidentified
MEIVYERVAGIDVGKKILAVAVRTPGEHPGKRRQQVRKYNTFYQTLTEMVAWLASEGVTHVTMEATGIYWRPVFHALCAAEAPLEVLLVNARHVKNVPGRKSDALDAAWLAELTECGLLRGSFIPPPQIAAIRELTRYRKKLIEQRASELQRLGKVLEDSGIKIDSVASTLTTVSAREMIEALINGERDPAVLADLARGVMRKKIPELRMACAGRFGDQHALMCTLHLEHIDHLTDMIARLDTRIDEASLPFDPQIQLLATIPGIGERAAQVIISEIGVDMTRFPTAAHLASWAGLCPGNNESAGRHRSGKTRKGNTELCAVLTECAWAAGRTSTYVGAQFRRFHRRFGKKGGRKAAIATAHTLIVIVWHVLAETTAYRDLGADYFTRRLDNPEARKRRLIRELEALGHKVTVEPAAA

SEQ ID NO: 358037 - protein, 344 aa, unidentified
MEISTIGLDLAKNVFQVHGVDADGNVVVRRTLRRAQLLPFFASLPPCLVGMEACGTAHHWARELIKLGHDVRQMPAAYVKPYVKRGKTDAADAEAICEAVTRPTMRFVPVKSPEQQAALSMHRARDLLVKQRTQLVNMVRALLAEFGINIPQGVRLALDMARKIVDGEAPPVPREAAKIAGRLSQQALDTHAQLREIDLDLLAWQRTNDTARRLMSIPGIGPIGATALAASVTDASQFRSGREFAAWLGLTPRQHSSGGKERLGRISKMGDKYLRTLLVVGMTSLIKGVKRKPETADPRLVALLARKPVRVATVAMANHTARVAWAIMARGETYRAGHQPRLAA

SEQ ID NO: 358038 - protein, 343 aa, unidentified
MKLSRVGIDLAKNVYQLHGVDRSGKTILKRRLKRHQWFKVLLDKTEPDCVIGMEACAGAHHWGRELQALGYTVKLIPPQFVKPYVKSNKSDAKDAEAICEAMSRPNMRFVTVKRVEQQDIQATHRIRAELMTQRTAKANQIRGLVAEYGLVAPKHLSSLRAAIPCWLEDAENGLTGDFRALLQGVWNDLLGLDDRVGEMDQLIKRLADNNEDCVRLQQLRGVGPMISTAMVATVGDARQYQKSRQMAAAIGITPKQHSSGDKHRLLGISKRGDVYLRTLMIHGARAVVARAKHKDDQLSRWVTNIANKKHPNVAAVALANKTARMAWAMLRNETDYDPDYAIS

SEQ ID NO: 358039 - protein, 404 aa, unidentified
MVFLGVDWAEEHHDVCLLDEQGKVLGRARVANSLEGVSRIHALVADYSEGSDEVVVGIETDRGLLVQALVAAGYQIYAINPLAVDRYRDRHAVSGAKSDAADAKVLADLVRTDRDNHRPVAGDSQEVEAIKLLARAHQSLVQSRQRQVNQLRSTLREFYPAALEAFKDDLGGRDAMAILEYAPTPTMGKSVSQAKLVSALRKAGRERNLEARAVELQGILRQPHLEQPATLVAAYAVIVKSSVQMIRELNAQTTALEEELTKSFELHPDAELYLSLPGLGFVLGARVIAEFGDDPNRYLDAKGRRAYSGMAPITKASGMRHVVLARYARNRQLANACYLWAFASLTGSAGAHQYYRTLRARGKSHNQALRALGNRWVSILHGCLRHRTPYSEQVAWTVPVAAAA

SEQ ID NO: 358040 - protein, 369 aa, unidentified
MTFFIGVDLHKTQFTVHVRTEEKIESLEQIKQYPTTAAGYAEFLTRIETYKASGAAVKIGVESTGNTRFFKNQVEKAGAEVTVINTLKFKVINESTKKTDKHDASTISEFLSKDMLPESYLCGKETENIRRLLKSRERLVRSVVGQKNEVHALLVSMGLPDELRSLQSKKGRRNILDTLESNNDYVLEAQSVQLMFQIIDRMTESVKTIEKQLAELTKDDEMVQRLMTIRGCGKITAWTIRAYTEDISRFASAKKYAAFCGLVPWVQDSNATIHHGKITKRGPQELRTCFVQLVLGIRRCKDTSEWRMMQRYEYMKKNKGSGKSIVAAARKMAEIVWAMLSAKQDFNADKMKGIYKPMTLADEALSAMN

SEQ ID NO: 358041 - protein, 382 aa, unidentified
MTTAAATHNAQSNTTEATLFVAFELSEKTWKLGFTTGHGQKPRERTVTARQQEHVLDEIAQAKRRLGLPETAPVVSCYEAGREGFWLHRFLQGHGITNQVVDSSSIEVNRRRRRAKSDGLDVRKLLSMLIRYHHGERQVWQVVKVPSVEAEDQRHLHRDLGTLKQERASTTTRIEGLLSSQGLRVTSLTKLPEQLDALRLWDGSPIPPGLRRRVLRVYAHHTFLSEQIAEVEAERRAQLQTSSEASIDKVRQLMQLKGVGINGAWLLVMEFFGWRAFKNRREVGGLAGFTPTPYQSGESAREQGITKSGNRHVRWMTTELAWSWLRFQPDSALSCWFRERFGGGGKRLRRIGIVAVARKLLIALWRFLETGVLPAGAVLKEA

SEQ ID NO: 358042 - protein, 330 aa, unidentified
MESWNVILGVDVSKLTLDICWAEGNLHIKIDNCSSGFCALKKWCKTHGIDLQKTLVVMEYTGGYEYRFIQFCESSSISYCRVPGLEIKNSGGMIRGKSDQADAFRIGTYGEEKIKKLIPSKPLDSDILTLRQLLSFRKRLVRERAGFESTIKERKHMYSLKKTDTVISIAQAKIKADKKYINQIEQQILEIIKANESLWLNYRIITSIKGIGPVNAWMTIAYTENFTSFTDPRKYAVFVGVIPFEHTSGISIKRRSQVSHLAHKGLKQELNQAAKAAIAHDTEIAAYAERKLKNKAYPLVLNNVKFKLILRMFSLIKRQEMYVENYKRVA

SEQ ID NO: 358043 - protein, 419 aa, unidentified
MQTILHNCCGLDVHKDSVVACILKTRKPLMAERRKEDVEKEIRVFETFPNDLAQLRSWLESENCRHVAMESTGVYWHPIYDALEGAFDGKMEIIVANARHMRNVPGKKTDIKDAEWISSLLRAGLLSASFIPPKQVRELRQMTRYRKNIVQDLGTQKNRIEKTLQQAGFKLSTFLSDVFGVSGRNLISVLIDKGSLTAVDVENETRRISAAKKADIIRAISGKLSLHERYFLRLQIGLLDELSLHLAKIEQSITELSAKFEPEIDLLDTIPGIALTSATAIIAEIGTDMSKFPTAQHFCSWAGVVPGENTSAGKRKSTRITFGNTYIKGLICECAWSAVRMRNTYLSKFYWKIKQRRGAKKAIIALARKILVIVYHLLKNRTVYDESNFETAKLKQQQRRLKNLASDAKKLGFNLTPVA

SEQ ID NO: 358044 - protein, 418 aa, unidentified
MTVDLERGYTSKEPCGLKQYLNLLRRSIFMIYVGIDVAKDKHDCFVTSSDGKVLFPVFTIQNNREGFDDLFSKIQSVEVSNIKVGLEATGHYSYNLLGYLIDKGLPTYVINPLHTNLYRKSLSLRKTKTDKVDARTIAMMLMSDVNLKSYSDTSYHNEALKSLTRYRFDKVQERARLKQSVSRLVTILFPELEKLVPSLHSASVYALLSELPSAEKIASCHLTHLTKLLENASKSRYRREKAIEIRDAARISIGSNMPAKSLELRHTLRLIGELDSEITEIESEIKRIMDQISSPILTIPGISYRMGAMILAEIGDFSRFDSPDKILAYAGASPSTYQSGQLKSSYSHMEKRGSRYLRFALINAAKYVCHWDETFGTYLQKKISEGKHYNVAITHAAKKLVRLIYAMEKSGMPYIKTA

SEQ ID NO: 358045 - protein, 350 aa, unidentified
MLIIGCDYHPGFQQIAFVDTETGECGERRLRHREEAEQFYQDLKQRNATVRLGMESSGHARWFERLLNDLQFELWIGDAAEIRTKRVRKQKTDRQDAQLLLRLMMEDRFPRIWVPDAANRDLRQLLWHRHRLVQMRTRVMNQLHVVALNEGLRRKKALWRPVGRNELESLKLAPWASRRRQDLLDLLDQLTPKIQDLTRQLEQEVERRPVTRRLMTHPGVGPLTALAYELVIGTPQRFHCGKQIASYVGLVPTEESSGDRRRLGHISKQGNVLLRFLLVEAAQVTVRSHPEWRSTFFHLAMRRGRKIAKVAMARKLAVHLYWMWRQGLDYGQMNKLGSHAGEPGHPHGVQ

SEQ ID NO: 358046 - protein, 453 aa, unidentified
MKKDKKKEQKVVELDAFEQINHDAAGIDVGAKEFYVAVPKGRDTESVRAFLTFTADIQRLADWLAQCGVKTVALESTGVYWIPLYEILEQRGFEVYLVNARHLKNVTGRKTDVLDCQWLQQLHTYGLLRASFRPSEQICAIRSLVRHRDMLVAYRSAHIQHMQKALTLMNVRLTNVLSDITGVTGMKIIRAIVSGERNRKILASYRDPKCLKSEEEIEKSLEGNYKLEHLFVLKQDLELYDFYDQQIQQCDQELEILYNQFEEPDQPGSPAPEKRKRKRRKNQPNFDLSESLYRMTGGIDLTKIDGLDALTVQEILSETGADVSKWPTVKHFASWLCLAPNNKITGGKVKSSHTPHTQNRASNAFRIGAQSLMKSKTALGAYCRRMAALHDAPTAITATAHKLATIFYFMLKRHEAYRPLATDYYEKEHRDKVVRSLQRRAASLGFRLEAAVS

SEQ ID NO: 358047 - protein, 359 aa, unidentified
MKNTIIGVDLAKEVIQVCIYTNKKVHSNKEMTHNEFRAWLFKTTPTTIVFEACGTSNYWKQKANEAGHQAKLISAKLVATVRQNQKTDKNDALAIVQASLLPDIQFIKGKSVEQQQLQSMLRLRELAIKQKTACSNQIKALLLELNIRVSPRKGGLKGVVQSTLEEAENGLSFVFREALDAAWKHYLNLLESIRIYNDCLESSILEHADCKRLLKLEGVGTVNAINLYIALGCEELGSFTKGKDASSCIGLTPLQYSSGGKTTLGSIGRHVKNSMLRSQLITGAIAAVSQAMKRTAVTQKDAWIQGLVERRGKKCAAVALANKTVRTAYAMLANGTEYKAKLLPIVKKELLPDLKIECA

SEQ ID NO: 358048 - protein, 372 aa, unidentified
MTNEHAAFIGLDTSKLKISVAIADGERNGEVRFLGDISSEPSSVAAMVKKLAKRGAKLHFCYEAGPTGYGLYRQIVELGHECSVVAPSLVPKRAGDRVKTNRRDAISLARLHRAGELTPVWVPDEAHEAVRDLVRARDAAFEAQKQARQQLNSFLLRHGRYYAGRKAWTRAHGRWLASQAFDHPAHQILLAEYCQTVEDAGVRLDRLNKLIGETSSSWSMAPVVAAYQAMRGVAFMTAVTLVVEIGDVRRFDSPRQLMAYLGLVPTESSTGDRVRRGGITKAGNARARRALIEGAWTYRYPARISPTISARLAGLPKSVCVIAWKGQVRLCTRYRRLISAGKAKTVAVTAIAREMAAFIWAIGQEVEPLSKP

SEQ ID NO: 358049 - protein, 348 aa, unidentified
MGHFVGLDVSVKETSVCVVDAAGRVILEQKVPTEPADIVTLLSSLGVSFCRIGIEAGPLSQWLVNALTEADLPVICVETRHMKALLTAQQINKTDRNDARGIAQMMRVGLFKPVHVKTLVAQEQRMLLTSRKLLQRKLLDLEADLRGTLRNFGLKVGVVSGGRYEARIRELVTDFPRLAAIVGPLLNVRRVMRQQLAVLHKMLLDTVRDDPVCRLLMTAPGVGAVVALTYRATVDQPQRFVHSRAVGAHVGLTPKRYQSGETDYDGGVSKCGDALLRTMLYEAAQVLLVHSGKWSWLKAWGIRVAQRRGIRRAIVAVARRLAVVLHRMWVDGSEFRWSKDSTAVPAAA

SEQ ID NO: 358050 - protein, 408 aa, unidentified
MNTLYVGIDVSSKSNVVYLMLPNGDKHSNFSVANSHEGSTKLIKRILSALTSHSLDTVLIGLESTSVYGDNLVYFLREDATLAPFNRKIHVLNPKQVKKFHDTYNDLPKNDYVDSFVIADCLRFGRINKEVYIGDYRYKALQNLTRARFFAVQNLVKEKQRFINVLFKKYSTMMQEKVFSDTFSTTALAVYEEFESAEALANMDLQELTDFIMEKGKNRFPNPDAVAKAIQKAARSSYRLPKTVNDSVNQVLSISITSMKALDAQIKEFDKAIKSQMELLPNVLISIPGIGPVFSAGIMAEVGDINRFENHAQLAKYAGLAWKQHQSGDFDAQTTRLINSGNRFLKYYLCEAAFSLVRCDKEYSNFYHLKYKEVNRYQHKRALALTARKFVRLVFRLLKDNRLYRAAE

SEQ ID NO: 358051 - protein, 361 aa, unidentified
MRIIGCDLHARQQTLAMLDTVTGEIVSRTLMHEGNEVREFYSELPCPVLVGIEAIGPMQWFLDLLEELGIECQVGDATKIRAAEPRKQKHDRRDAELILKLLVEKRFPAIWMPSKELLDLRALLLHRHQWVRLRTQVQNALQAIALANGLRRGPSLWSYGGQAKIAFLPLPPHASLRRSALQAMYRHMEEEIEKLTVQVAEQAEHRSGAQLLMTHPGVGPVTALATDVFLGDPQRFVDGKSLASYVGLIPGERSSGKRRRLGKITKQGNPLLRFLWNEAGAHAARRDPQLKRFYRRKLVHKGMGKARVAVARKLGIRLWIMLRDQIDYEEFCRRGQKQQSGAVCAGMPEVGYGANRHRPVD

SEQ ID NO: 358052 - protein, 459 aa, unidentified
MNRKQRREMMRKIQSEDLSLEVIHPDAAGVDIGNESHYVAVPPSRDSQSVQRFGCTTAELKAMAAWLKQCSIHTVAMQSTSVYWIAVYDILEQAGLEVYLVNARDTKNLPGRKSDVQESQWLMKLHTYGLLRNSFRPSQEVRTMRTYWRQRNDLVRAAARHIHRIQKALTQMNIQLANVLSDVSGMTGQAIIKAILAGERNPRKLAAFRDPRVKASEEQIARSLEGNWQQDLLFVLKQEQDGYEFCQRQMAECDRQLNQYLEQREDRSQAAPLPEEKRKERLKKKKGNKPQFDLRAGLFRMTGTDLTQIDCVDVMTATTIFSEAGWDMSKWKTEHHFVSWLRLCPDNRISGEKIIGKGRLPTNNRVTTALKIAANNLRLSNTYLGAQFRRLRTKLGAPIAIKAMAAKLARLVYRILRYGIKYVDRGATFYEARHRQIQIKHLKWKAAKLGFKIIEAPAA

SEQ ID NO: 358053 - protein, 323 aa, unidentified
MHTKFIGIDISKQTFDVAFCKEEKWKHYEFSNNLKGFNSLLDLIDKEDWVIMEASGPYYFPLASFLYSKKVQLVVENPLVIKRYSQMKLYRAKTDKKDARTIAEYGMLSELKCWVPDEKHIIAIKQLHTAIEGLQKQLHQSCRQLEAFRSSGVLDKFLEKEMKKVISFLESKILKIEKKQEELAKEHFTPSLEKLTSIPGIGNKTAIMLIVITNDFKKFENYKQLVAYVGFSPRIYQSGTSIKGKGHICKMGKAQIRKLLYICSWSVKRWNNTCKEMHERLVKKGKPERVIKIAIANKLLKQAFAIAKGDKFYEKNYQPNTCF

SEQ ID NO: 358054 - protein, 429 aa, unidentified
MNSTRNKKIEQVKETTMIVGIDIGSEKHYFRAFNWRGIELTRKPVAFSNSMEGFNSFYNTIVELIQKSELEEALVGIEPTGHYWFDLGQFMGEKNIKFVMVNPHHVHKSKELDDNSPSKNDRKDPRVIAGLVRDGRYFYSYMPTGVYAELRNASNRRFVLVEEQTRAKNRLQKWIAVYFPEYKGIYTRIDAKGGLLVLKQAPTPEEIVRLGVEGIIKIWKDAKLRGNGHKKAMLILNAAMKSIGLKAGLTEARMEIQDLIEDYELQTKRLERVNDLIKELCQQIRYADKLLEIKGMGITTIAGFIAEVGDITRFDSAKELQKLAGLELVADSSGKHNGKTKISKRGRKRLRYLLFEAAISVVGKNKEFKEIHRYYTTREKNPLKKMQSLIAVACKLIRVFHVILTKGISYDASKMLKDIQHPGEPLKAA

SEQ ID NO: 358055 - protein, 333 aa, unidentified
MSIRRYVGADIAANSIQLEWVEVSSQQREQLTIQHKQGDYRKVVKRLTQQTAAAEIQVVMEATGSYWMAFAEYLHQAGMVVSVLNPIQSAHFAQMLLQRTKTDRADAHLLCEYGQRLRPDAWTPPPPICQQLQHRLRQRDDLVQIRSAERNRRHALQRQLHVDKSIRQRLEHHIDYLTRQIKILDTEIRQLLLSHHDWKEHVRRLLTLKGLGFLTVAWLLVATHAFSRCETPDQAAAFAGLAPHPRESGQWKGKRSVGGGGHRALRGTLYMASLSAVRFNPRLKSVFAHLLKRGKPKKVALCAIARKLIHLAWALVVKQRDFDPDWNQSLSLP

SEQ ID NO: 358056 - protein, 368 aa, unidentified
MGDRIGYVGLDVHKEGIVVAVAEGGARGEVREYGRIANTRSALDGLARKLGREGVKLRFCYEAGPCGYGIQRQLSAGGHDCVVVAPSLIPKRAGERVKTDQRDAVSLARLDRAGELTAVWVPDPGHEAIRDLVRARLDAVHALRRARQQLAGFLLRQGCHYRRPAWTKLHRWLAGLKFEQAMHHLVLEDYIAAVEAAEARRDRLTAQIAAMLPDWTLAPVVAALQAMRGMALVNAATLIAELGDLSRFANPRQLMAYLGLVPSEHSSGASVKRGGLTKAGNSAARRLLVEAAWTYRFPARVSRELLLRQEELPKAIREIAWKAQTRLCARYRRLARTGKPANVVTAAIARELAGFVWAIARQVTIPAR

SEQ ID NO: 358057 - protein, 343 aa, unidentified
MDHFAGLDVSVKETSLCIVDDSGRIVREVRVASEPEALLAMLTSPACHFKRIGLEAGPLSQWLFSALAEAGLPVICVETRHMRAVLKAQINKTDRNDARGIAQMMRVGLYRPVHVKTLRSQKQRMLLTHRKLMQSKAIAIENDLRATLRNFGLKVGVVGTVKFEARIKELIENLPDLVVLVEPLLIVRRVLREQVSILHRRLLAIVRDDDVCRRLMTVPGVGPVVALTYRATVDVPSRFRNSKAVGAVFGLTPSKHQSGESNRTGGISRCGDEMMRMMLYEAAHIMLVRSAKWSWLKAWAMKIARRRGLKKAIVALARRLAVIMHRIWVNGTEFRWTREVAAA

SEQ ID NO: 358058 - protein, 358 aa, unidentified
MKKQREHILRNERVFVGLEDSKKTWKLCVRSGGMVVHETSMPARYEVLRNYLNNKFPECQILVMYEAGFSGFDLHDHLEADGWECVVTPPHTVTQEKVQRKKNDRTDCRRLAKNLENGDYRRCFVPDKGLREDRQISRTCGQVQADITRVCNRIRRMLEFHGLDKALPAGPWGSGAAYARLKQRLGEKEMSDSLRFSFDVMFRELGQLRQLKKELVQQLRKLAKSDRYRESVRLLMSAPGIGKLTAIRLVLEWGDVSRFGRKEEFASFLGLVPSDYSSGEEERRGHITKQGNRRVRSWLVECSWVAIRYDPVLLEKFRRVLRNNGSKKKAIVAVARKLALRLRRLLQSKEPYIVGVVE

SEQ ID NO: 358059 - protein, 386 aa, unidentified
MKTVAGLDVHKDSVYLCILRENGEKIERVYGVLTPQLDSMRDFMAENEVSEVAMESTSVYWIPIWRVLVDSFELKLVNPYFIRQLPGRKSDVKDAQWIAECVMKELIRGSFIPPPLIQQLRLYDRRIFELNAELVRKYSKIDAILQRCNIRLSNYVSNTDCKSYKNVVKRISEGVTSPQELLMLVHKRIINKHGEDTILAALTGVVSEAEIDMLAQYVAESALLEDNKNKCIEKMREICNREFEEQMKNLQTIPGVSERSALTVLAEIGPDVNAFPSAKHLVSWCGFNPRNDESNKKIKSNKITHGNRFIRIASVQCAWAASRTKDCYFSKFYAFHTQVRKKFKLKVVVAVARKILVCIWHILKFNVSYKDFEPQKSVAKDSTQLA

SEQ ID NO: 358060 - protein, 324 aa, unidentified
MSKVKADRFAGVDVAKAQLDVMVVPGEKYFAQSNDEAGTKRVASRLKRLGVKLAVLEATGGYERRLASELELAGVATAVVNPRNARDFARSQGLLAKTDKLDAGVLAMYAERMKPEPTRPKSQAELEYSSLVSRRRQLVSDRAREKTRLEKTIFEWEKESVAAHIKWLDEQITQIDGKISERIKQDGEMNKRNRLLRSVPGVGPVTSATLMASLPELGGLGRNQISALVGLAPLNNDSGNRRGHRSVWGGRSEVRSALYMAAVAAIVCNPAIKVFYDRLRASGKGGKVAMTACARKLLVILNAMVKDGSAWDKGYRREFYAVAS

SEQ ID NO: 358061 - protein, 330 aa, unidentified
MFYLGIDVAKAKLDCCLLLSIEDGKRKTKSVANTARGFSDLLRWIDKQGLERSQVRVLMEGTGVYHTPAATALSEAQVSVSILNPARVREYAKSMGMQTKNDKADSIVIALYGAKHPEKLIVWEAPSLQARTLQALLARREALERDLQRERNRQEKADFIDTPERITKSLEESIAFLKEQIKKLSKDIDGHIKRYSELKEQMALLTSIPAVGPKTGAQMLSILHHHRFERPEQLSAYIGLNPVEFTSGSSVFHRPHLSKAGPGRVRAVLYMAAVVATRHNPVIKAQYQRLISRGKSKMSALGAAMRKLVHLCFGVLKNRTPFNPNYAFGD

SEQ ID NO: 358062 - protein, 343 aa, unidentified
MQTITTIGLDIAKSVFQVHGVDAQGIVILRRQLKRRHVLVFFQKLSPCLIGIEACASSHHWSRELQALGHTVRLMPPAYVKPYVKRQKNDATDAEAICEAVTRPNMRFVATKTSEQQSCLTLHRTRHLFIRQQTSVINAIRAHLAEFGIIAPVGRRGVDQLLTVVADASDKRLPEVARACVSALGAQLRTLKAQILEFDRMIRAWYRSSEVSRRLDAIPGIGPALATALVASVADPKAFRSGRDFSAWIGLVPKQNSSGGKERLGNISKRGDRYLRSLFTTGALAVIRYAKIHGTKHRPWLTALLARRPTKVAAIALANKIARMAWAMMARGERYKEPAALAA

SEQ ID NO: 358063 - protein, 344 aa, unidentified
MMNKPLKQMDPDAKPALFAGIDVGAEELILVIRKNGKPFDPQKFTNTPADCARLVKKLARLPGLIVCLEATGIYHFDLAIALHDAGVLLMVINPKASHNFAKVLMKNSKTDVVDANTLAEYAARMDFVAWTRPSNEKLALRSFARRINALTGQKAAAKNHLHALTATQETPKAVLKDAKLAIAQLEKRIDLLTAETLLLIGKCPELQRVLTLLIGIKGIAKTSAIALMGELLLLPPGLSHREWVKFAGLDPKAFDSGKSVHKKTRLSKAGNRHIRSALYMPALSAKTHDPHVSAYFQHLLDNGKKPLQAVCAVMRKLLHAIHGILKHDKPFDNTRFYAIPVTAG

SEQ ID NO: 358064 - protein, 341 aa, unidentified
MQVSTLGIDLAKNVFQVHGIDATGKVVITRKLRRSQVLTFFAKLPPCLVGMEACATSHYWARELAAFGHDVRQMPASYVKAYVKRNKNDAADAAAICEAVTRPSMRFVPVKTAEQQAALMLHRTRDLLVRQRTQLINALRAHLAELGLVAAQGCDGVKVLVGIVRDARNQLPDVAQAALQIILNQLDALQQQIGELERQIHTRHRASDASQRLETIPGIGIIGATAIAATVTDPKVFKSGREFAAWIGLVPRQNSTGGKERLGSISKQGDRYLRRLLVIGATTVLRHARAHPAKHPWLMQLLARRPAKVVAVALANKMARIAWAVLARGGTYQAPASVVTV

SEQ ID NO: 358065 - protein, 404 aa, unidentified
MFDTDDVGVFLGLDVGKSAHHGHGLTPAGKKVFDKPLPNSEPKLRAVFDKLAAKFGTVLVIVDQPASIGALPLAVARDAGCKVAYLPGLAMRRIADLYPGEAKTDAKDAAVIADAARTMPHTLRTLELTDEITAELTVLTGFDQDLSTEATRTSNRIRGLLTQFHPSLERVLGPRLDHQAVTWLLERHGSPAALRKAGRRRLVELIRPKAPRMAARLIDDVFDALDEQTVVVPGTGTLDIVIPSLARSLAAVHEQRRALEAQIQALLEAHPLSQVLTSMPGVGVRTAAVLLTTVGDGSSFPSAAHLASYAGLAPTTRQSGTSIHGEHAPRGGNRQLKRAMFLSAFACMNADTASRTYYDKQRARGKTHTQALLRLARQRISVLFAMLRDGTFYEPRTPTVALAA

SEQ ID NO: 358066 - protein, 471 aa, unidentified
MSKGSGTTRGDRRRNARRERLRQLLPRDGAVIGIDLAEDKQALAVVDHDVRVLARKTVKVKAFRLGEALDWAVAQAKVKGFAHVAVACEPTGPRWMQVQRLCAERGLPLVCIQPLVSHIAREQQDYTPHKTDESDCVMIARLAAELHCYIPEELDQTWAHLRHLGRRRGQLITAATASVQRIRDFLSVAWPTVTETCAGPFESVTWLAALQVVTSRCGGDPARLAPLGLEEFTAVVRAAVPGWGGKKGWGRIIGRVFAALTGTEGVVAWSRRGLLRRVADELGDLQRTRAQRRAVEADMVVVLGELGLSRLGDIPGLTAVGAAAILAETGDPRRYDGSSSLVKHAGLSPSGNASGAFEGQAHISRRGRPGLRLTAWRAVWPMLRFNPVLAAKYATLTQAADAAAAADAGPQQARAAAAAARARRATARVACAASLLRWIYSMAVHGTSWDAEVASGAAGLEHAPRCQPKAA

SEQ ID NO: 358067 - protein, 358 aa, unidentified
MMTTQSTKPDFTGQHLFVGIDVSKNSWKVCILTQHVEHKTFTQPPKPEVLTSYLQRHFPGARSHCAYEAGYCGFWIHDQLTTLGVECMVVNPADVPTIHKERTCKTDPVDARKLARALRNGELIPLYVPHRAALEDRSLIRTRHSLVRKQTRCKNQIKGLLNFYGIPLPQEPSTANWSKRFLVWLEQLSMQSGSGTHALKALIQELKYLRQMIADTTKQIRSLANEPPYCSYTVHLITIPGVSSLAAMILLTELVTLSRFRTLDQLSRYVGLVPGEYSSGDREIITGISPRRNPFLRGLIIECAWVAVRKDPALVLAFNKLCTRMPKHQAIIRIAHKLLNRIRFVLKHQTSYVPAIVQ

SEQ ID NO: 358068 - protein, 406 aa, unidentified
MNQLYVGIDVSSRNNVTYVMKPDGSKHSEFSVANNLPGAKELSFRVCQALDELQLDSVIFGMEATSIYGEHLARALREDGSLGKFNRKIFVINPKQVRKYREILPELPKNDFIDAYVIADSLRFGRILPREYAENNVYESLKTLTRTRLALIQKQAEAKQKLTNLLFQKCSSLAQDNVFGGISTTFLNLMECFDSVDDLANLSLPELTSFIADSGRGRFKDPDAIAKAVQAAVRGSYRLPKVMNDSVNQALSLYVSLIQTLKAQIDALDTSIEKHFDIIPNELKTIPGIGKVYSAGIIAEIGDIGRFDSHASLAKYAGLVWSQHQSGNYEAESTHLIKSGNRYLRYYLLEAANSVRRCDSEFKRYYDLKYKEVNRGQHKRALALTARKLVRLIFRLLKDNRLYSAR

SEQ ID NO: 358069 - protein, 403 aa, unidentified
MGGRQQWYAGVDWGSQSHHVVLTDGDGRKIGERSFKHGGEGLAEMAAWLMAASCAAEPGQILAAIEVPHGPVVETLIERGFKVHAINPKQMDRFRDRFTMAGAKDDSRDAEVMASALRTDPRCFRSLAAADPIIVELREWSRIAEDLGVERNRLINRLREQLWRYFPALLELWEAAPTPDTASRLREATIAKLLKRHRIRRFDAAFVVNTLRRPPVCVATGTVEAASAHVTLLVPRIRLLNRQIKDAHSRIDGLTARLMPAEAAEPGQKKQHDAEILASLPGVGRTVLATLLAEASDALQRRDYAALRSLAGVAPVTKRSGKSCVVVRRQACHDRLANAVYHWARVAVQHDPRSRAKYAELRSRGHSHGRALRSVADRLLNVACAMLKSGAAFNPSSAAQKPA

SEQ ID NO: 358070 - protein, 464 aa, unidentified
MTEKKPWRNRKERKEWGRRLQSENPGLEVVHAHAAGIDVGNGMHYVAVRPDRDPQPVRRFECFTADLHCLAEWLQRCGVKTVAMQSTGVYWIPIYEILEERGMQVYLVNARHTKNLPGRKSDVQESQWLLKLHTYGLLNNSFQPPSEIRVLRTYWRQRAEHVHGAATCVQRMQKALTQMNVQLANVISDVSGLTGQAIIRSIIAGEHDPRKLAELSDPRIHASREEVAKSLEGHWRPELLFVLQQEVVMYDTYQQRIAECDQQLQKHLASFAATIPFRPTEGEPKRKKSKPAKNAPRFELRSELQRIAGVDLTRIDGIDVMVAQTLISEVGLEMSRWKTEAHFSSWLGLCPDNRTSGDKVLARGTRRVVNRAATALRMAAVTLMRSRTYLGAQYRRLRTKLGAPKAITAMAHRLARLVYRMLKYGQHYVDKGAEYYEHRYRRQQIEFLRKKATKLGLQITLAQT

SEQ ID NO: 358071 - protein, 351 aa, unidentified
MPSKMDAVVARAIGIDTGKNTLHLVGLDEKGAIVLREKVSRGRIVARLANTPRCLIGIEAGMATHYVARELIALGHEVRQVPPAYAKPFRQGHKNDFRDAHAVAEAVQRPSTRCVPVKTDDQLDLQALHRVRSRLIGERTAVTNQIRSFLLERGIPVRQGLRFLRQQLPDILAKRIDVLSPRMIRIIEDLIGEWRLRDERIDHVTTEIEVLARSNEGCRQLMTVPGIGPIIASAMVAAIGNGTAFATGRDFAAWLGLVPKQMSTGDRTILGRITKRGNRYLRTLFMQGARVILLRPANWAQHSFGPWLTAAAQRLHHNVLATALANKLARIALTVLVQGRAYETRVISEVA

SEQ ID NO: 358072 - protein, 383 aa, unidentified
MQATQSNDFTTKEVILAVSFELSKGSWKLALHDGRREKASIYTVKDEDPAKRLDEAIEVIKQQKIKWGLPETTTVAVVYEAGQDGFWIYRALSKLGFDVKVVDAASIPVERRARRAKTDRLDSIMLVFALLAWLNGERGRMHVIKVPSEAAEAQRQIVRDRGELQKESQQHRDRIRKLLRTVGCWDKVDGYFTERLEQGELKCHDGGIIPSELNERLTREVQRLELVEEQLSKLEEEMISQLPEPIQARVAHLQNLKGIGRVGAVRLVLELFWRKFDNRRQVGSCVGLVPQPYDSGQSRVDQSISKQGNRRVRALLIEMSWFWLRYQPGSAISQWFIQRTEGNTANKRGKRIAIVAVARRMVIALWRYLEDGVIPEGAVLKTI

SEQ ID NO: 358073 - protein, 334 aa, unidentified
MDKQAVAGVEVSADVLVVALDNGQLRACEFPNNALGHQQMLRFLHKHATQVRACMESTGLYGLDAALVLHSQPGIEIMVANPRSVRHFGCAMMQRSKTDPIDAKLLAEYARRMPFQPWQPPSLKGRQLCALSRAIHQLTEMNTMQKNRLHAASVTETTPKIVLRELQRSLTHQQRSIQRLTREALQLIASDAELQKRFELLLSFPGIAQTSALQLLGELVLLSPDFNVRQWVAYAGLDPRQYSSGKSVEKKVRISKVGNRHLRRALFMPALVAVRRDPQFRAYYRYLLAHGKLKMVALVAAMRKLLHGIYGVFQTREPFNPHKLFTLPRTGETI

SEQ ID NO: 358074 - protein, 401 aa, unidentified
MGLEPVVGVDIGKTGHYAVCLDHQGTRLWGHPLGNRQAEIDELVGRAAANSAAVVVDQPNGGAALLIQACWDAGVTVGYLHGLAMARARDFYEGEAKTDPKDAFVIADVARAHPGRIVWLEAVPDERARLELLCGYDEDLRADINRIANRLRSLLAAHWPELEQAIAKRLPGRALCQMLASYPHPDALRRAGKTRLTRFLRTRRLHRPELFVEQVLVAIGEQHTVVAGAQAAGRLVADIAADLDRLLGRREELAKEIEKCFFAQPEAGILTSLPGVGPRLGARILVEVGEITRFATPSKLAAYAGLGPSTRQSGTSINTCVSSRRGNHRLKNALFLAAFASLRHPPSRAYYDRKRAQGRRHNEAILCLARRRIDVLHAMLTRGELYHWSPIPEPDLQVRAA

SEQ ID NO: 358075 - protein, 322 aa, unidentified
MAKHTTICAGIDTGKRKLDVAIEGSREQLQVTNTAEGHEALLTWLRQQRIKRVGIEASGGYEQAVVAELRRKGFVVVVFQPAQVRAYATFHLQRAKNDKIDAALIATCTAAVRKIHTAPDPRLLPFAEQLTMIDQIGEDIARLKNRIESCRNAAINKLWQEDIARLEQRVRVALKALVASIRKHPDLAKRLALINSVDGIGLPTAVAILVRLPEIGQITREQAVALAGLAPYDDDSGDRSGVRHIEGGRKRLRRALYTASLAASFRWNLQLIKLYQRLTAAGKEHKQALVACARKMLIFANTVVARGTPWCGEPPVGSFPAS

SEQ ID NO: 358076 - protein, 337 aa, unidentified
MKYCGIDLHSNNSVVIVSDEEDRIVFSKRLPNDLGQIGAALEPHREELAGVVVESTYNWYWLVDGLMDAGHCLHLAHPSAIKKYEGLKYSGDFADARYLAQLLRLGLLAEGYIYPREERGARDLARKRMQLVRFRVAQILSIENIMTRQTGSSLKGHAVKQLTAEQVDEFGFSPDVALALESNRAVSQALGQQIDVIERRLHESVGLRSEYDLLKTVPGIGKTLATTIMLETGSISRFEQVGNFSSYCRCVDSLRESNGKKKGEGNSRNGNKYLAWAFVEAANFAIRYCPQAKSFYERKKRKANRVLAIKALAHKLARACYHMLKEQKPFDVARCFG

SEQ ID NO: 358077 - protein, 364 aa, unidentified
MIVIGADTHKSTHTCGAVDAGTGQLRSELTAAARKRGFAEFLAWGRELDAERIWAIEDCRHVSGSFERFLVAHGERVIRVAPKLMGESRRGSRERGKSDSIDALAVARAALKEGPETLPAAHLDEPALEIKLLLDHHDDLVSDRSDDQRRLRWHLHDLWPELEIPSGALDRDKWLDRVARRLRRTERTARTRVSLELVAQIRSRTKRVRELEREIGGLVRAYCPELLEIRGCAALTAAKLIAETAGIERFSSDAKLARIAGVAPIPASSGRRDRHRLDKGGNRQLNCALHRLAVNQGKWEPRAQAYLARKRAEGKSTMESLRCLKRQLARLVWRTMRAAQQERMISISPNFQETDKPALALALT

SEQ ID NO: 358078 - protein, 350 aa, unidentified
MSTPVHILGIDLSTTRLDCATLPDERSFQVPYSPAGFQTIIEHLADRRAQGWQVLAVVEATGGYERALVAALLEAGLPIAVVNPKRVRSYAKGLGILAKTDRLDARVIARYGREIRPRPAAPVSPERRDLAELLAYRDQLVGEIVARTQQKRLYTTAAMIGRADTAIARLRQEKRELDREIARMLDEGEALSDTAAPLLSVCGVGPVVAAVLLAFLPELGRLTEKEIASLAGLAPMARDSGNRRGRRHIADGRAKVRHALYMAVVAALKNNAHPRAVYDRLIRAGKPVKVAMVAVMRKLLVMLNAMLRDGETWEPDAQKRRERRAADDGSSALPEESSASPEPAPKTAAA

SEQ ID NO: 358079 - protein, 362 aa, unidentified
MPRMPQPVEDDQNSSPEEVILGVDTHKDLHVAAVLTVLGALRETKTFPATAAGYQALLAWVGTFGILRRAGVECTGSYGAALARYLRAAGVEVIEVNQPDKATRRQRGKTDTLDAEAAARAVLSGRASATAKAGDGPVEMLRMFKLAKASAIKARTQTINQLKAVLVAADPQLRETLSGLSNLRLIRRCADLDIDTPQDTTSAAAYTLQLLARRIQTLTDEIRELDHQITIAVTSHTPQVMTRCGVGPDNAAALLIAAGDNPDRLHSEASFAALCGVSPLEASSGKTSRRRLNRGGDRQANSALYRIALCRLRWNPRTRDYLARRITEGKTRREAIRCLKRYIAREIYRIITSPPETQPSAA

SEQ ID NO: 358080 - protein, 344 aa, unidentified
MEYYAGLDVSLRSCARCIVDSKGTVLFERELPCEVGDIAECLAGFPHPIERVGFEAGAMSQHLFFGLTAEGFDVVCMEARQVSAALSAMRNKTDKTDARGIAQILRTGWFSPVHMKSREAHGLRALLSTRKALLKKTMDLANEVRGLLKIFGVCLPKTVKHGSFDSVVRPMIEIDDVLAYALVPLLDARVVLYQHYLELDRRVKRAASHDDVCMKLMTIPGVGPIAALSFKSAVDDPTRFKRSRTVGAYFGLTPRRYQSGEHDNPGRISKAGDRDVRAVLYAAANALLMRTMASSQIKSWGMRLMRTKGRRRAVVAVARKLAILMHRMWIDGSEFRQDQVGGMA

SEQ ID NO: 358081 - protein, 472 aa, unidentified
MDAFDRNRLEAFRQLRQEVRQSEEYLIVGIDVAKDTHRAFFGTATGKTLLRRFTFSNDRKGFRELLEQALRLMESHGLKQEVYGMEPTANYHKPLGEFLIIHGRTVVLVSGVSAKKNRETLDGRWDKHDTKDAANVADLITQGKCLHYDYPSTQLRGLRGLLSLKKRLKKQEQGYRVRIRNQLIAQYYPEMDEAYGRRESEGLAIVRWCFPSSQMTLLEVEEFVQRVTRRPVKEKQRRRLEGIWEGAQETIGCDEVPGVEHEARVMVEGLGQIREMLKETEGKIEELCKRFPEYDSLLTIPGFGPDVSSKVLGAIGEADRFENGRQVLKLAGLDLGADRSGKESTKAVPKISKRGKADLRYGLYQAALVASTRDRNVKMYYARQLEGREREKGIKTKMRVKIAAKLLRIAWTLMKKKAVFDPSYLNIEGDWPERGEAKPMPARPAERRKKRSRATHGLIGHPLVETGACHRG

SEQ ID NO: 358082 - protein, 428 aa, unidentified
MNTLQKRIERITPITIIVGIDVAKEIHYARITDHRGIDLSKPVKVHNSIDGFESLLERITKLKTKHNCDHVIVGTEPSGHYWRALGWYMKLHESNPDLVGVNPYHTKQAKELSDNSQTKSDPKDAQVIAHLIRNGNYFDTYLPEAEYAELRILNTERQRQTKQISRANNTLIAMLDEYFPEYATVWGNVTCPTSLALLKTYPFPSDVLTASQKKLLDDIREASNGKEGIKLMGEMIQAAKRSIGVTEGLRSARQRILNLIDELEYFEKKKAEIESAMESMMEELQLGEILQSVPGVGPIISAAFIGEVGDISRFDNWKQVRSLAGLNLVESSSGQHRGKTKVSKRGRPYLRHMLYLAGEAGCIHNKEMNGFYRYFRDRKNNPLNGHQAFVATGLKVMRILFHLAKTGEMYDPGKALGEVRKQQISSIT

SEQ ID NO: 358083 - protein, 359 aa, unidentified
MDGGREHPHMTAGLDIGDRYSYLCLIDTDSGEIMEEGRLRTSPETFKRRFASERPPMRIAIEAGTHSPWVSRVLEECGHEVLVANPRKLRLIYSNKRKTDEIDAENLARLARVDPRLLYPLKHRGEGFQAHLAIIRSRQALVDCRTQLVNHVRGAVKSFGHRLPKCPARSFHKRASEHIPEALWVALGPILEQIGSLTQRIRDYERELETISKEHYPETELLRQVVGIGPLTALTFVLTLEDPYRFERSRSVGAYLGLVPASDRSGERDPQKRISKEGDQMLRKLLVGSAHYILGPFGSDSDLRRHGQKIASRGGKNSKKRAVVAVARKLAVLLHSLWMSAEIYEPLRNAQRCCGGQAA

SEQ ID NO: 358084 - protein, 382 aa, unidentified
MNRIIYVGMDVHRESYTLCCVEQNLEGEDKVFGHLRMEAKIDNVKSYLKKIASGLLSKGIIPRFVCGYEAGCLGYSLYYQMIEAGFECVVMAPATLFLRPRHVLKNDMRDAEHIAKSLAYGNYRAVYIPSVQDEEVREFIRMRNDHKQGLKRLKQQIGAFCLRHAMHYDKTKWTQVHLRWLETYDLRPGYREVLDRYLLTYHMLQDLIEQCDLRIEEISQEERYREKVAHLCCFKGIRTQTSMSLIVETGSFARFATAEQFASYLGLIPRESSSGDTIRRGSITKTGNRELRRLLIESAHSICRGRSDRKSKALKARQRGNPPEVIAYADRAVLRLSRKYFRMIRRGKKTCVAITAVARELACFVWGMMNGRFETRVTGQKI

SEQ ID NO: 358085 - protein, 411 aa, unidentified
MDVLVERCAGLDVHKDTVMACVRYPGPSRERLQEVHEFGTTTTALLALADWLASYGVTVVGMESTGVYWKPVYYVLEDAFDAQVLNARHLKAVPGRKTDIRDAEWIAQLVEHGLVRPSFVPPKPIRELRNLTRYRKAQIEERTREAQRLDKILQDAGVKLSSVASDILGVSGRAMLAALVEGTRDPEVLAELARGQLRKKIPALKEALAGRFGPHHALIVGTILSKLEFLEEAISNLSTEIEEAIAPFGLAVEMLRTIPGVDRRTAETLIAEIGVDMTPFGSSGRLASWAGMCPGNDESAGKHRSGKTRKGSKWLRTALAEAGKAAARSKGTYLAAQHARLRGRRGSRKATTAVGHSILVATYHMLDGGVPYQDLGADHFVRHDPKLHAARLVRQLQAIGYRVTLEEVEAA

SEQ ID NO: 358086 - protein, 319 aa, unidentified
MNKEQTYAGVDISKDYLDVTFVDSDKKWRFNNNQPGIKKAIEVFKEMAPVMVVFEATGGLELSLWLALTQAGINAAPINPRQIRNFAQAKGKLAKTDNIDAQIIAQYGQAMKPNAQLVPDTQELKELMARRSQIVEMISAEKSRLKAARQTRIKQDIQTHIDWLEKRLCDTDKELKQAINNDPVLREKAMLLQSTPGVGPTMTAALLTQLPELGTLNRHQVAALAGVAPLNRDSGRMRGKRAVWGGRASIRGVLYMSTLVATRYNPVISIFYQRLCAEGKAKKVALTACMRKLLIILNSMIKHKTLWQHSTPLLVGPCH

SEQ ID NO: 358087 - protein, 395 aa, unidentified
MDVMHPICCGIDVHQKSIVCCILDGPLTSNEPKKYQTTFGTTTKELNAALDWLLEHQVTHVFFESTGQYWIPLFNIFSDSGLELILANPQHIKNVPGRKTDVKDAEWIAQLGRCGLINQSYIPSQEVLQLRYLTRYRLSVKQRLTQIKNHIHVILQRANIKITSYLADIFCKTGQALLTLFINGEVINEDNVESCIHGRIKASTRQLIEAMEGKLSTVDRFLIKECMEEYQLQKKISEELNKEINEYILDHFPEEYQLLLTIPGISDNCCATILAEIGPNVDAFKTDKKLASWAGMCPGSNESAGVKRSSHTTQGNKYLKQALVMSVLSVQRAKEETFSLFYQRISSRGSKMKAIIACGHKMLRIIYKILQSHKPYDSQKALGLRQQTNALSLTI

SEQ ID NO: 358088 - protein, 438 aa, unidentified
MIFHAGSAGDVSLMVEKRLEGTVVEIVYERVAAIDVGKKEVAVTVRVPGQTPGTRTQQTRKFRTFYQVLRQMVGWLVDHGVTHVAMEATGVYWKPVFHALCEADTLEVVLVNARHVKNVPGRKTDVKDSEWLAQLLECGLLRGSFIPPKEIAAIRELTRYRKKTIQARTRELQRLSKVLEDAGIKIDSVASSITTLSARDMIEALIAGERDPRVLANLARGTMRTKIPDLTMACAGRFADHHALLARMHLDHIDHLTSMIDGLDQRIEQVLAPFAEQLRLLRTIPGIGDRAAQVLISELGIEMSRFPTAAHLASWAGLCPGNNESAGRRLSGRTRKGNAEVRDILTECAWSAGKTGSYVGAQFHRLHRRFGKTGGGKAAIAVAHTLIVIIWHVLHDQSEYRDLGNDYFTRRDNPEAAKRRLIHNLEALGYRVELTATA

SEQ ID NO: 358089 - protein, 421 aa, unidentified
MKAKQREKGKPAAPARRCKWHEMNRKQRREMMRKLQSEDLSMEVIHPDAAGIDIGNEFHYVAVPQKRDSEPVRRFGCTTAELKTMAEWLQQCGIRTVAMQSTGVYWIAVYDVLEEAGLEVYLVNARETKNLPGRKSDVQESQWLMKLHTYGLLRNSFRPVQEIRTMRTYWRQRNDLVRSATRHIQRIQKVLTQMNIQLANVLSDISGKSGQAIIHAILAGERDPYELAAMCDVRVQASEEEIAQSLEGHWQPDLLFVLKQEQDGYEFCQKQIAQCDGQLEHYLQQREDRSHGAPLPEEKRKVRLKKKYGNRPQFDLRAELFRMTGTDLTRIDGIDVTTAATILSEAGYDMSRWETENHFVSWLRLCPDNRISGGKIIGQGRLPTNNRATIALKMAASALRTSQTYLGAQFRRFRTKLGGSS

SEQ ID NO: 358090 - protein, 354 aa, unidentified
MSNKSTPTVATMGIDIGKNSFHVVGLDQRGAIVLRQKWSRSQVETRLANMPPCLIGMEACVGAHHLSRKLQSQGHDARLMPGKYVRPYSKGQKNDFRDGEAIAEAVQRPTMKFVATKTVEQLDLQALHRVRARLVSQRTGIINQIRAFLLERGIAVRQGLRFLRTELPNILATRGDVLSPRMVGVIADLAGDWHRLDERIEGVSAEIEALADQDPACERLMTVPGIGPIISSATVAAIGNGAAFSKGRDFGAWLGLVPRQMSTGDRTILGRISKQGNRYLRALFVQAAWVVLIKPNTWERHGLKSWIESAKKRMHHNVLAIALANKLARIAWAVLNKENNFECTRTNALASRPA

SEQ ID NO: 358091 - protein, 415 aa, unidentified
MAMGYETITVVGIDVSKGSSVIAARRPGGEVVLKPFQVKHTKGELEHLADRLRELKGEVRIVMEHTGMYWRPIAHTLKKAGFFVSVVNAILIHNFSDNSLRKVKTDKADALKIANYGLTFWAELRDYTMEDEARQMLKTQSRLYERTLETGVILRNGLISLLDQTFPGINVVLKGEYRTKKGHYKWVDFVRRFWHKDCVAEGSLKTFSDAYRRWCKKEGYRFSEMMAKEIYELAGNAVSTFPKEQSTKLLITQAVDSLNAIYDSLQILRGEMHRLASILPEYEAVMEMYGVGEITGPKLMAEIGDVRRFTSKNALVAFAGMDAPPFQSGTFEAKSRHVSKRGSPLLRRVLFQIASVLLVTANPDDAVYRFMDKKRAEGKHFYVYMVAGAAKFLRIYYARVKEHLASQEVELAEAA

SEQ ID NO: 358092 - protein, 419 aa, unidentified
MMNNFMHPRMTRTYAGVDSHKDSHTVVFLNCFQERLGEITIGSAPSEFPTFIKNAKKYLQPGTTFAFGFEDTSAFGRAFVKFLVEKDYLVKHVDASKVATERGQVLHKTDSYDAECAGRVLINRFDELPNANPEDKYWVLSTLVTRHNALTKINVMVKNSLHHLLAHHYPHYKKFFNKLTTKSGLAFFERFPSPYHLENISVFELAIFIKNVSKQPSIKKAELILETVQRDNVPKAEYQDTKDFTVRSLLRQLRNGLDELTAINSEIEKILTHFDYPLSTMKGIDTVTSASLIAEIGNINRFKNASALAKYSGVAPVTYASGMTAIQMANARGNRKLNGLIHQIALCSVSPKGPKGALVNPIFYEYYQKKLSEGKTKTQALKCVQRRLINIIYNMMKHKRPYTNPENGYLQTEEITKTV

SEQ ID NO: 358093 - protein, 348 aa, unidentified
MSPLPSAEYLLFVGIDVASKSAQVRWLTATGVSVEGISIAQTPSGHAALCAQLLTLCPQPAQVHVTIEATGSLYVHLAHALHAAGFAVSVINALRVRRFAETWLQLDKTDDLDALIMARFGLAIRPALWTPPSEIYETLFQLIIQRRNLVRMHAQTVNRQHALKQRIHTVAGVETRQDALHKFIKAQIHQIEREIAKTIKADPAWQATLTHITSIPGVGLSTAAWLMMLTHNFTTCQNAKQLAAYIGLIPRRRQSGSTLNTYRSVGHVGQDDARQHLYNATLCCLRYNPRIRAYYDHIKHKRHKHKIAAVAATHKLLDIIFAVATSDQDYDPDYTAHARDEVASLGGA

SEQ ID NO: 358094 - protein, 354 aa, unidentified
MKKRDKYMGMDVHQATTVVSVIDSEGKPVLETTVETVAGALIRLLESISGPLHVTFEETTQAAWLYEVVRGYAAEVIVCDPRRNKLLSEGSKADKVDARKLAELLRGGLLRSVYHGHEATRRLKELVRAYETLSEDVMRTMVRIKAGYRSRGIANRGRGVYQPNQRKQWLEKLTEPGARQRMEWLYEELDQLRPLRRRAKQAVLAESRKHRAISLLRTIPQLGPLRSALIVATVDTPYRFRTKRQLWSYSGLAVVTHMSSEYEIREGRVVRSRKPIATRGLNRNCNRRMKDVFIGAATGGSQRDPYRTYLQRLERSGMRSEMARLTLARKIAAIALRIWKKGETFDSKKLNLAT

SEQ ID NO: 358095 - protein, 360 aa, unidentified
MIIIGCDFHPEFQQVAMVDTESGEYRQARLQHQEQARAFYAALVGKPVRVGFEACGYTQWLEPLLSAMGHQWRRGDAAQIRACMTRRQKTDQRDADPILTLLLENRFPAIWVPSPAERDVRQLLMHRHKAVQRRPRVKNQLQALAINQGLRLRHQLWTQSGQKRLQALELLPYAAQRRQELLALLGTMERVLAPLAAAVARQAAARPAVVRLMTHPGVGPVTALAFVLTSGDVTRLPRARPVASYLGLIPCADSSAGKQRLGRLSKQGNALLRFLRVEAAHHARRGDAELRRCYARRLHRPASGVAKVAIARKLAVRLYWMLRCDLEYAPLKVVRMPASPSHPGVARKIDRLSGPPASRP

SEQ ID NO: 358096 - protein, 413 aa, unidentified
MRVHHTVCCGIDVHKKSVTACLMWGPADQEPQCEIRRFGTMTSQLKALGEWLKQAHCEMAAMESRGAYWKPVWNVLEGEVPLILANAKHVRALPGEKSDHKDGKRLASFVRHGLIRASFVPPRDVRELRDLTRYRTKLLANGSAERNRIQKVLEDANIKLGSVLSDVFGVSGQKMLHALVDKPALNVEEVAALAHWRLQPKIEQLKLALEGRITAHHRFMVDLSMGHMQYIEQQILRLDEEIARHIAPYQQQFELLQTIPGIGETASASILSEIGPDMSPFDDDGKLASWSGICPGNNESAGKKFNTNTRKGNRHFVSTMVECAWASTRKKGSHFKARYYRVRARRGSQRAILAVGHGLVRTVFVVLKTGKPYQEPIRPLLTEKQRHRKAERLSRELGQLGFAVTLKPKTAQP

SEQ ID NO: 358097 - protein, 310 aa, unidentified
MENTKKFNTFIGIDVSKDKLDIFNSSTGEFCQVKNDKKYIKNFIKTLTFTRDTLVIIDLTGGYEAVCVNEFCFAGFNVHRAEGRLVKSYAKASRQLAKTDKIDAKLLANYGCKMWEQLDLYIPYENKLKPYIMRLSDLKDIMQREKNRVKAPNQNPLVLKSLKRHIVVLEKELLLFEKELDALIKSDEELSAKYEIIISQKGVGNKSAYVLLGLLSELGHINRRKIAAIAGVAPYAKDSGTINGYRFVKGGRKDVKKALFMCALVAVRYDPKMKEFYEKLLAAGKKKMVANTAVMRKIITIINAKCKILY

SEQ ID NO: 358098 - protein, 350 aa, unidentified
MDTTVAPLASIGIDIGKEVFHLVGFGTDGKIAFRRKIKRLALTETFRKLPPCIVGMEACLSAHFVSRALRQLGHEPRIIPAIYVKPFVKGQKNDYNDAEAIAEAALRPNLRTVREKSQEQLDLQACHRVRSRLVSRRTATINQIRAFLIEQGIAVRAGANALRNSLFDILKNREDEISPRMSDLIVGLYEDWLWLDERVETITKEIEEISQREGNCLRLMSVPGVGPLISTAVVAAIGTGEAFDRGRDFGAWLGLVPRQYSTGGRSILGSISKRGSRYLRTLFIQAAKVLLMRPQNWSKFSFGPWLTNAAPRMHRNKLATALANKLARIAWSVLSTGKAFDTHKLEIEAV

SEQ ID NO: 358099 - protein, 327 aa, unidentified
MNQSASNLSILGIDVSKGKFDVALLREEKYKHKRFLNNLEGFKKLGEWLAEYKVERLHACMESTSTYGEALAEYLHDRGFMMSIVNPARIKGFAQSELIRSKTDKVDASLIARFCAAMKPSLWTPESKEIRELRSLVRRVDALIEMRQQEINRLDVSDAVIKKTIENHIDYLTKQTDSIKEQINKHIDRHPQLRDKQKLLQSIPGVGEATIHLVLANFANTEKFSNAKRLSAFLGIAPREYQSGHSVRGRRRMSKVGRSSLRKAFFMPALVALRYNPIIVEMKRRLTEAGKPKMLIVGAAMRKLIHIIYGVLKHGKPFDSNFALKNT

SEQ ID NO: 358100 - protein, 447 aa, unidentified
MVPDGRQVEVDEHEQIVERVAAIDVAKASGMVCTRVPHPTTAGKRLTRVWEVAATTNAIIELADQLAGQGIERVVVESTSDYWRGFVYLLEARGLSVWLVNARDVKQVPGRPKTDKLDAVWLAKLNERGMLRPSFIPPAEIRQLRDYTRLRSDLTQERARHVQRLEKLLEDALIKLSTVATDIMGASGRDMVEALIAGQRDPKVLAELARGRMRGKRAALVQALTGRFNDHHAELARMLLDQIDALGVQIDRLTSRIEELIGAIPAAQPPPEKASHTGEDTYQPSLPAVSRLDEVPGIGVKAAQVIIAEVGLDMGQFPTAAHLVSWARLSPRTIQSGTKQRTGATGKGNPYLKGVLGEAAAAAAKTDTFLGERYRRLVKRRGKLKALVAVARSILVIVWHLLADPTARYHDLGSDFYASRIDTDRKTRTHIRQLQALGFTVTLTPAA

SEQ ID NO: 358101 - protein, 385 aa, unidentified
MTNQDQETTFIPRDYDIFGGLDVDKKSIAVTFKDHGTMRKSLRLPYSANQLLNYTRKHFPGQRVAFVYEAGPTGFGLHDELTAASHPCLVVSPSMVPTVARKRVKTNRLDSNKLSDGLRGGQLRGIHVPPPSYRELRHLVQLRDTQVAQLRASKCRIKSLLLYEGIPFPAVNGKWSGQVLRQLEALPCNATVRFKLDQLIDAMQFHFLAAAKVQKQIRHFCQNDPELRRCISFLVSLPGVGTITATHALARLGDWRQIKDVRQIAGFLGLVSSEHSTGDKENRGEITRIGDSRLRNKLIQCAWTAIRKDPELRAFYRRIYERQPKKVAARKAIVAVARKLTTRMYAVLKEQRPFVIRADSSIAPLTAEETGGPRERLDAAQNEQP

SEQ ID NO: 358102 - protein, 401 aa, unidentified
MLNLPSLQLRVGVDVGSRCHSVAVGLTDGSLLEEFEIPHTAAGFGDFFARIERHAKRHPYPIAVAMEGYNGHVRPLDSLVKARGWRLFNVNNLKLARFKEIFPAAAKSDRIDSAKTLELFQLRDHLPMAGEVLQEVMATPEENNVLKRLSRRRRRLVNERGRVASAMQADLQAVCPGLLEITRSAGNLWFVNFLTCRKGLRKLARIRRDSLLKVPGIGATYANSIAAWQGRAYFAPDADLVGEMIQQDAARMLELKRHIKALEGQMAQVAENSAIAGRLVSIPGFGAICAAELAGEIGTLERFRSEASLALYLGMATLDNSSGKSRRSKAPRHVNTRAKRAMMIAVDKHRKLVPQSQRYYEKKRAEGKRHNQAIRALGRHLCRVIFKILAQDRSYRIDPLP

SEQ ID NO: 358103 - protein, 312 aa, unidentified
MSNPVCYLGVDVAKNSLEVAFDRHRWKFSNSKEGHLKFIAQIQKLPTSMHVVCESTGSYHIEMGLALQDAGIAVTIANPARIRYFGKSEGTLAKNDPIDAKLIERFANSKRPPADPPLCRKHLAFSEMAAHRGHLVEMVKVLRTHREQAREPALVKAIDKSIAVLEKRLSLVEDQLRQTMEANPVWKRKFDELTAVKGVGFVTALVMLVKMPELGTLNRSQCAALGGLAPYDNDSGEHQGKRSIRGGRHEVRTALYMAAISVIKFNPILKAFYERLIAQKKLFKVAITAVMRKLLIYLNGLLKTLSEQTSPA

SEQ ID NO: 358104 - protein, 346 aa, unidentified
MEHYAGLDVSLKLTSICIVDRTGKVEREGVVASDPEAIATFIKLHAPHVVRIGLESGATSTWLWTELNKIGLPVICIDARHAKAVLKMQINKSDRNDAAGIARIMQCGWYKEVCVKDLDSHATKALLVSRALLVKIKRDIENQIRGLLKNLGLVIGRAKMNMFAVRAAQLAEDRSELFAAVDPLLKARGAVEQQILDLDRKVLRLARNNAQVRRFMTAPGIGPVTALCFLATIDDPTRFKRSRSVGAYAGLTTRRYASGEIDWTGRISKCGDKMLRSYLYEAANVLLTRVAKWSALKAWGIRLAKRSGLRKAKVAVARKLAVILHRMWIDGTEFRWSSKNTADQPA

SEQ ID NO: 358105 - protein, 426 aa, unidentified
MNEDLYYERCCGIDVHKKFLMVCLRIGRKTEVKKFGTLTHELRDMVAWLKANGCQMAAMESSGSYWKPVYNIFEQEGVPVMVCNAYHIKNVPGRKTDVNDAQWIAKCLSQGMLNPSFVPDREQRELRDMTRFRKSQIEERSRNINRLQKFLEGANIKIGDWLSDVEGKSATQLLELVIGKPDFTVEDVAIRMHGKMKATAEELFRSLEGYMTPMQREFFAHIMSIIREQTAQIEKTDAMIKRNLNENYKAAVAALDEIPGIGEISAEQIVAETGIDMSHFRNQNSLSKWAGVCPGNNESAGKRKTGKTSPGNKTLKSTLTQSAKAAKNNKDSFFCAQYNRLVSHRGKNRATMAVAHSILIAVYFVLSGNPFNDLGADYYNQFNREKKINSHIRQLSKLGVVVSINNPDDAACEIKPPSLNPRARPA

SEQ ID NO: 358106 - protein, 413 aa, unidentified
METGSKGRIDTRKENIIYVGIDLHKETHTAVMLDCWNQKLGEITFDNKPSVFHKLTRKVSRFVTKEKTAVYGLKNAYGYGRALAVWLLEKGCAVKDVNTALSYAQRKSVPMYQKNDSYDAEAVALVLINMLDKLPDAVPDDAYWTLGQLVNRRDNICSHQQRLKKQLHEQLCVAYPSYKGFFGDISRATALYFWLNYPSPEHLRGKTAEELASELRPISHNNCSIKRAEKILERVRTDGQTAREHQASRDAITRSIAGDLEHYREQLKIVESAIDTMLPSFRCTLMTMPGVDVTTAANMLSEIGDIHRFPNADKLAKFTGICPINLSSAGKGKDMCPKQGNRRLQSIFYFMAIQIIQVSTNGTPRNKVFREYYLKRVAEGKNKQQALICIARRLVNIVYGMLKNHTEYREPEQ

SEQ ID NO: 358107 - protein, 340 aa, unidentified
MSEVTTIGLDLAKHVFQVHGIDAQGATVLRKRLRRGQVLAFFSRIPRCLVGLEACATAHYWGRELAALGHEVRLMPAQYVKAYIKRNKHDAADAEAICEAVQRPTMRFVPVKTAEQQATQLLHRGREQLVRQRTMLVNALRAHLAEFGMVAAQGLRNVGELIAIVRDDGDTRLPDVARQVLQVLANQIEQIEMAVTALERQLLAWHKTNPVSQRLASIPGIGPIIATAIATTVADAGVFRSGREFAAWLGLVPRQNSTGGKTRLGGITKRGNRYLRRLLINGASANLLRSKATKADPWVIGIRRRRPPLVVAVALANKTARIAWAVMLRQKEYQPRAVAA

SEQ ID NO: 358108 - protein, 428 aa, unidentified
MNTTPIPDFAATIGLDWADLKHDLWICPASQAKAEHLRLEQTPEALHEWVAKLRERFPNQRVAIAIETSRGPVISALMAYDFIVLFAVNPKALKDYRAAFCVSGAKDDRTDAMLLEEFVRLHRDKLQALEPDTELTRKLAGLVANRRHLVDERTRLVNQLHGLLKTYFPLARELLEQQINKPMAAEFLLRWSTLEALKKEKIKTLRAFFYQHHSRSAKRIEQRLQALQSAKPLTTDPAIIEPTSELVSALAGMLRPLHKAIQRLDQTIAAAMDQHPDAIIFRSFPAAGPALAPRLLVAFGTNRQRFGSAAEVAQFYGIAPVVQQSGNSKTVHVRHRCPKFGRQSFHENAACVTQKEPWAKAYYAQHKKKHDDKHHQACRALAFKLIRIYFACWRDRKTYQPDRYLQALEKNGSPLHKILELQSTTPGE

SEQ ID NO: 358109 - protein, 344 aa, unidentified
MYFIGVDHHKQVSVMTVLDEEGREKKNGRVLNLRKNVGGFLEGYRPFTAVVEAGRSSYMMADLLRELGGEVKMANALQVKAIAHARIKTDKRDSRTLAQLLRADLIPEIYQRGECNRRAQRVMRIRAFWTRKQTEVKNKIRALLAQQREEVRLEVEKRESGLFGLRGLEFLAKLPLEGQDKMVLDDLLQGYQEAKAHIKKSDGLVQMLYGEIEEASRIDSVPGFATTLSVLVAVEIADVKRFSSSAQLHSYAGLIPSTYSSGERTFHGRITKQGSSWLRWAALEAVWPAIKKDHGLRVLYTRLAKRKGPNVAKIAVARRLLTIIYRLLIEKREYIPDMMKQSAA

SEQ ID NO: 358110 - protein, 338 aa, unidentified
MGKVTLLGVDIAKNFFQLHGVDDKGNPMLTKKLTRSKFVETIAQMELCTIVMEACGGANHWYRVFSQMGHKVKLISPQFVKPFVKTNKNDRNDAEAICEAASRPSMRFVSPKTVEQEDMQAVHRVRSRLVEERTALVNQIRGLLAEYGVIVPQGITKIRKLLPEILEDAENELSVIGRELFSDLKDELIEIDEKISRYDVKMKTIFNSNEDCQKISAIEGIGIITATAVVAAVGDPKVFKNGRHFAAFLGLVPRQSSSGGKERLLGISKRGNTYLRTLLIHGGRTVVRHVGSKKDNRSIWIKELSKRRGANRAAVAVANKNARIIWALLAKNEAYKVA

SEQ ID NO: 358111 - protein, 343 aa, unidentified
MEAYAGKQFVGIDLHRRRTVIVRITEAGEVLEAVRIVNDVQRLASVMARAGDCPEVVLEATYGWYWAVDALQAGGASVHLAHPLGVKAFEYRRVKNDFRDAQDLADLLRMGRLPEAWIAPPPTRELRELVRHRAKLVGLRSRCKAEVHAVLAKCGVQVLMSDLFGVWGTELLDRLELPAPYAARIASLRRVMDDLDFEINLFAGIIRGRMAHEPGYTAVQKIPGIGPTLGAVLVAEIGDITRFASASKLTCWAGLTPKHHESDTHVRRGRITKQGSRLVRWAAIESVKTVSKTSEVGVLRERVADRRGRNIGSVAAARRQLELVFYALRDGHVRALEHLPRVA

SEQ ID NO: 358112 - protein, 424 aa, unidentified
MDKEIDPLKKNSKSPRKKEQTSKRTRLERPVQRKTKEVLAELVDKLRGKLERKATSASPGEAGPRAELRPNLDRLTVGVDLGDQKSQYCILGLEGETLSEGQVGTRQADVAEFFGAIVAARVVIEVGTHSAWVQEIIAGCGHEVLVANPRLMEGSRRRKRKNDRIDANKLARLGRVDPQSLHPIKHRSREARQDLVLLRARDALVAVRTELINTTPGLVKSMGTRLPRCSSRSFGHKAGAAIPEAVREALQPLVQLAEGLSACIAGYDRRIEELASQKYGHTKMLRQVKGVGPLTALAYVLTLENAERFSKSRSVGPYLGLVPKQEDSGESQPQLGISKAGDTMLRKLLVGSAQYILGPYGPDTDLRRYGLRLCERGGKNAKKRAVVAVARKLAVLLPRLWVTGEVYEPLDYRASGTMTQPAAA

SEQ ID NO: 358113 - protein, 391 aa, unidentified
MSMYFVGIDISKYKHDCCIISAADQKVLSKFTIKNDKSGFEQLITTFNSLSNTEDIKIGFESTAHYALNLELFLEYANHSFMEVNPVLIKEYKKSTSLRRTKTDSVDCESIARWLMTVEYKPHSKGFYHAYSLKSLTRLRDKLIRQRSFYLVKITNVLDHTFPEFKPFFHERFSKTALYLLENYGSAEKMARMNSASYEKLRSLSRGRFSPQQFLTLKDLANNTVGVNNSIFDVELNSLLTLYKSLVKEIDTLEKEINRLIEEVHPHYMSVPGIGPISAAVIYSEYGNLSNFSNPGQMLAFAGIEPGINQSGTESHGGRMVKRGSSQLRYTLINCCLPLIRFDMTFASYYAKKRAEGKPHRVAITHVAKKLIRVIYALERQDIDFSPQKLR

SEQ ID NO: 358114 - protein, 375 aa, unidentified
MKSITKFIGLDVSKDKIAAAVAENGTGQARYLGVYPNTLEAVRKLFNRLGRPGELYVCYEAGVTGYALARFLKGLGIKCIVIAPSKIPQTPGPRVKTDRKDALMLAEKLRMGELVPVWVPDEADEALRDLVRARKARMEDLKRARQRVSMLLLRLGITKPEKMTLWSERYRAWLRSLELPQKNSQAVLQEYIIAVEETEQGVRRLEQLIQESAADSPHAPVMQALQALRGVQVIAAATIVAEVGDFTRFAHPEQLMAYAGLTPREYSSGGKVRRGGITKTGSPDLRWICTQIAHSYRYAPRVAGNLAKRLEGASPQIQAIAWKAQVRLHRKLMKLIARGKSRPVAVMAIARELLGFVWAIAQEANCEMAMGRRSA

SEQ ID NO: 358115 - protein, 315 aa, unidentified
MHDVPCFIGLDVAKAQLDIAIRPSGERWAVPHDAGDIMTLVERLQALHPALIVLEATGGWERAVTSALATAGLPVVVVNPRQVRDLARATGQLAKTDALDARALAHFADVIRPTPRPLPDAQTQEWRALLGRRQQLVVMRTAEQNRLTGPSTRLITDIEAHITWLNASLATLDNDLEILLRASPVWRANDDLLQSAPGIGPVCARTLLLELPELGTLNRQQIAALVGVAPLNCASGTLRGRRTIWGGRAHVRTVLYMGTLVATRYNPRIKAFSQRLLAAGKLKKVALTACMHKFLTILNAMLKHRTPWQTQEIQG

SEQ ID NO: 358116 - protein, 342 aa, unidentified
MNHYAGIDVSLECSSVCVVDANGKILREARVASEPEALIAWFRLSGSDLERIGLEAGPLSQWLFAAMREAGLAVELLETRHVRKAFEAMPVKSDRNDARGIAQLMRLGWFRPVHCKSMSAQETRTLLTARKLVQSKLHDVENSLRGILRGFGLKVGKTTELKFAGRIEELVAGHPHLQVIAKALLAVRAVLRTEFAVFEKQTRKLARSDMRTRLLMSTPAVGPIVALTYASAIDDPARFKSSKQVGAHFGLTPKKYQSGETDYTGRISKIGDSSVRTVLYEAAHVMLTKPVKGCSQLKSWAMRIARRAGMSKAKVALARRLAVIMHRMLADATPFNAAAAAA

SEQ ID NO: 358117 - protein, 348 aa, unidentified
MRFYTKQHKYYCGIDLHARSMYICIVDEQGKTVFHRNRKASPEALLKAIESFREDIVVAVECMFVWYWLADVCAKEKIPFVLGHALYMKAIHGGKSKNDKIDSKKIATLLRGGNIPMAYVYPRKMRSTRDLLRRRNHLMRKRSELLAHIQNTNSQYNLPEFGKKLAYKANREGVAEHFPDPSVSKSIEVDLQLLDFYDQLLNDLELYIVKKAKVDDAYSWYRLRSIPGVGKILGLVLLYEIHDIKRFPRVQDFVSYCRLVKCPRESAGKKFGTKNSKIGNAHLKWAFSEAACLFLRGNEQAQHYHTRLVSKYGKGKALSILAHKIGRAAYFMLKRKEPFSMKVFFNQT

SEQ ID NO: 358118 - protein, 400 aa, unidentified
MKDSGKRYIGLDVHKHYLIALGVDEDLHVVLPARRVELSHLESWMKKTLTKQDDVVLEMTTNTWQLYDELCAYAGSVLVVHPPHVALITRSQVMNDKIAASILARLLAKGLLVGVWVPPQEIRELRGLVAQRKKMTELTTQAKNRLQAVLQRHHLVPPTGNLFHESRQPWWLALPLATLEKVNVQSDLETLRFAQAQQVRLTSIMEEIANQQEQVTRLLQLPGFGVVTAVTVWAAIGDIQRFADPQHLVGYAGLGTKVHNSGMTTRSGRITKAGRRDLRLVLIEAAQVAANSHPHWKAELARLQPRLGRNKAIVAIARKLLVTVWYILAQHKTDRFAQPEAIAQKFLKFAYQLGKENRPAGQPAAHFVRQCLDTLALGQELTSIAWGSKKPIPLPPSTKK

SEQ ID NO: 358119 - protein, 430 aa, unidentified
MSYRIAGIDVHKKVLAVVVSNVEIEGEYQFERRMFGSSPDQLRSLAAWLLEQEVEEVVMESTAQYWKPVWETLERYWKPIREKREGAGRRSGTLHLAQAQSNRGPRGRKKDFRDAERLAKRLVARELTLSFVPDAEQRLWRTVTRKKNQLRRDRVRLHNQLESLLEEAHIKLSSLVSDLLGASARRMLKALADGETNPAALAALADQKLRATPEQLCDALGACAELKPVYRRLVKMALEQLQFLEQQIGQLDQELATLLHPHQDAVERLAEVPGLGVDSAQQIIAEVGPTAATFPSAKQLSSWVGVCPGDEESAGVNYSHRSPKGNRQMRRILNQTANAATKTKGSIFDIVYRRSVTRLGHNQAIGLIGHRQCRLIWLILHQGVRYEERGPAVTKESKQRRTSKMIRQLRSLGYRIQPPNPQQPSQAQGQ

SEQ ID NO: 358120 - protein, 347 aa, unidentified
MVTFGGDSHKRTHTLVAVDGNGRQLGERTVAATSSGHMEALGWAHQWPERRWALENCRHLSRVLERDLLRAGEAVVQVSPKLMGSARRSGRELGKSDPIDALAVARAALREPRLPVAQLEGRSREVKLLVDHREDLVGERTRIQNRLLWHLHELEPGYQIAASGLLRNVVLAEVSIRLDDHTGVVAEIARELIDRLAELSQSIKRLERRIQGLMGELSPALLSLAGCAALSAAKLVAETADVSRFRSSGAFAMHNGTAPIPVWSGNHERHRLNRGGNRQLNVALHRIAITQMRLGGAATAYIARRLTIGNTKTEAIRALRRQISDEVYRRLRQDHSQRATAPIAAAA

SEQ ID NO: 358121 - protein, 403 aa, unidentified
MEGPLISLDVSKGKSNYRFFENGTDRKGKKGVIRHDIRGFDSIRDEAEKMEERLRIKPSVIFESTGVYSDVVEKYFTDKGFDVYVISPLLSASMRKEGVRPAKNDLLDTLSIAKVFYSRDDLRKCSEKDKKAERLREMSYELDMMNRRIRPMKCQFLRLLDKVWPCLDEVSDYSSRFMPDFIIAFGHPENIKTVKGVLSVIRKSEMGTAGRKDKIAQDLFDYCHTHLSAVSKDSSYVELLKRMAIELKAMAKKKSELIDRMAEEARNKDEFVRLLTIPAVAKTTALKIMARVGDISRFRNAEALVAYCGLDPRVYQSGKMTGEHRTITKKGDCILRSTLFLAVKLMVMLYPDTKVARFVAAKAKNGLSYKQAVVAGSAKLARIIYSMLTHHENYVEFNADIVA

SEQ ID NO: 358122 - protein, 357 aa, unidentified
MRFYTNAHTFYCGIDLHARSMYVCIIDHQGEVRLHRNMKAEPEPLLDALAPFRDDIVVGVECIFTWYWLADLCDQQAVPFILGHALYMKAVHGGKAKNDRIDSRKIAALIRGGTFPTACVYPAAMRATRDLLRRRNNLTRKRAELISHVQNTNSQYNMEPFAGKIAYAADRDGVIERFADPNVRMSVTVDLELISRLDAVKKKLELHILHNARRHDPQALHLLRTVPGIGPIISLVILYEIGDIDRFERVQDFASYARLVKCAKESAGKRHGTGGAKIGNARLKWRSPRRPSCSSGAIRRGWRSRRSWRRSTARPRPCRSSPTSPAGPSTTCCGAARRLIWRGFWAHEREGAVQPHV

SEQ ID NO: 358123 - protein, 302 aa, unidentified
MSKRRLDAHVEPLGTFASFDNDAAGIAELAIFCRRHGVQLVVMEATGGYERTAFLLLWEAGIACGLTNPRSVRRYAEAMGFLEKTDRLDARIIARFAIAKDLKPNTPPTPGQQRLNALVARLCQITDDLVVQKQRRSSAMNSEMVTSIDEVIALLKRQTRTLEGEIASLIDDDPLWARLDEALRTKGVANRTVARLLAQLPEIGIYSNKAIAKLAGLAPLPDDSGTRIGKRHIRAGRAGVRSILFLVADIARRYDPSLAAFHQKLIKAGKEKMVVRIALARKLLVRLNARAREARESYALAT

SEQ ID NO: 358124 - protein, 417 aa, unidentified
MRIVRPICCGADIHKDLIVATIAATNQDGITEYIQSSFSSQNFDLVRLKAWLIEHHCFEIAMESTGKYWIPVFNVLEGEIKVFVVHPKYTKAIKGKKTDKKDSKWIADLFKHDLLKFSFIPPKEIRELRELSRYRIKLIAMRSSERNRYQNSMTISNIGLASILSDPFGKSSRAVMKEVIRSSSVTEEKISKLLERNAKKKVKEVLQSLVGSHIESDQRLKMNIASQHMDQIDSHVRRLETEMAIRCIPYATLINLLLDIPGISYLSAMTISAEIGTDMSVFETSKQLSCWAGLAPANNESANKKKSVRISKAGSYLKPLLVQCALAAINSKSNPYYRIKYNRIKKRRGHKKAIIAIARMILVNIYHILSTGEVYSPCDMEQIINPKPVKKVMTIQNAIEFLQSQGFDTSKLISSSS

SEQ ID NO: 358125 - protein, 449 aa, unidentified
MSNGSGVSRGDRNRNVRLARLREAVPVTNAVVGIDLADRKQVLVVCDHDSKVLARRTFRCKAWDLGVALDWAGERARLAGFSGVTVSCEPTGHRWRVLGQLAADRGMSFVCVQPAASAYARRTEDLTSDKTDDKDAVLIARLTAQLRCYLPEPVDPTWGRLRHLGARREQLLETHTRCVQQIRDLLECVWPAVLDAAAQPVKSTTWVAALAVVVARDDGNLARTRRLGLDRFTRLVRAEVVRRGRAKPCLRIVRKVFAALSETAGVVEHRQAALERIGWILTDWERARADQIVVEARMVAVLGQLELTDLVCSIDGLSPVGAAAILAETGDLSRFTSARAVVKLAGLAPRERLSGTFAGKARLSGAGRPRLRAAAWRAVWGCLQNNRVYAARYRHLTSRETNRLSAQPTVVAAAILRQLHAVVTTGQAWDPDIAAHGLRLANHVGVVAA

SEQ ID NO: 358126 - protein, 415 aa, unidentified
MKYAPVSRPGPHPGGVTAGIDWASADHAVCVVDRAGEVVSRFSVEHSAEGLRALVSRLARAGVREAAIERGDGPVVDALLAAGVTVVVITPRQIKNLRSRYGSAGNKDDRFDAYVLADVLRTDRAWLRPLIPNSPATVTLRQACRARQDLVRHRVAVTNQLRAHLLCVFPGAVGLFCRLDSAISLAFLARFGCQDRAGWLSEKRLAAWLKGAGYRGRISPAVLYERLRSAPGGATGEQGAASAQVTRALAAVLASLNTQIKALEAQIAGQLAAHADGHIFTSLPRSGTVRAARLLAEIGDCRARFPGPQALICLAGAAPSTRQSGKHKAVTFRWAVSKQLRDAVCDFADGSRHASPWAAQIYNDAITRGKDHPHAVRILARAWLYVIWDCWQHHAAYDPAQHRALQRLLATGQAA

SEQ ID NO: 358127 - protein, 333 aa, unidentified
MTETTSIKFAALVGIDWADRKHDICLQVADTGEREFSVLEHGPEAIGEWANALRVRFSNQPVAVCLEQRKGALITALLKYEHLVLFPVNPRLLAGLRRAFSPSGAKDDPTDAEIAVDILLQHRDKLRAWTPGDPRTRQLQVFVEARRRLVEQRVRVTNRLTANLKGYFPQALDCFESLDSVLACDFLTRWPSLGEAKRARAETLRAFFLKHNVRSQELIAARIALLKSAMALTSDAGVIVPALLATRTLVAELRTLIAGIEQYDVAIAKVFNAHPDAFIFRSLPGAGPTFAPRLLAALGADRARFESVRAVQEYLGIAPVTERSGRSEWVHWR

SEQ ID NO: 358128 - protein, 372 aa, unidentified
MKKRCSSRQNPKPEMKAKRENQSVTIGMDLGDKTSRYCLLSDKGEILREGQLATTKAGMTGTFGRIGRARIAIEVGTHSPWVSRLLRSLGHELIVANPRQVKLITESSRKDDRLDAQTLARLARIDPQLLRPIQHRSEQAQAALMVIRVRAALIAVRTSLVNTARGLAKSLGERLPTCDADQMGVQRAESLPPKLRQVLEPLLKEVESITEKIKDSDREIEQIARNDYPETALLQQVGGVGPLIALTFVLTVEDKDRFEKSRDIGCYVGLRPRRSDSGQSQPQLRISKEGDPYLRTMLVQGAHYSISRRGPDTDLKRWGLHLAQSGGKRGKKKAVVAVARKLGVLLHRLWVSGEVYEPLRNQKLRMAQKKAA

SEQ ID NO: 358129 - protein, 439 aa, unidentified
MPDVPWARRKKGGGSMSKKKSSLAGLQALFARVCGLDVHKKLVVACVRILNSKDGTVQSTLRKFGTMTADLLELRQWLGEAKVTHVAMESTGVYWQPVFNLLEGHFQTWVINAQHIKKVPGRKTDMKDAEWIAQLLQCGLLRPSFVPERQQRELRDLTRQQTKLVQQRNAVDNRIQKVLETANIKLGSVASDVLGVSGRKMIEALMAGEKDVTVLAELAQRKLRDKIPELQRALEGELTEHHRFLLRQLLGQYDFLEKEIASVSERLGAVAPPSFRAAVEQLDAIAGVGERGARALLAETGTDMSRFPTHKHLASWAGRCPGNHESAGKRRSGKTPAANRHLDAVLTEMAHAAVRTKNSYFKAQYHRLAGRRGKKRAIGAVKHSLLVTVYFMLRDNKPYKDLGADYFDKLNPQQRIRYHVRRLQELGQEVELSPMADAA

SEQ ID NO: 358130 - protein, 312 aa, unidentified
MAKLVSKITLGADVSKVKIDICHWETQELVSLSNESPEIRSWLKGLHGPVRIAIESTSDYHLALVDEAQALGCEVYLVNGYQLSHYRESLNVRNKTDPKDAWLLARYLAHEGSQLRLHPPRCRKAQELWNLVKRRAKVVEVRKEMQQSLANVSVSTKAFFTCLKQLLQYFDKRIKTLIQELGWWDDYQRCQSIPGIGPLNAAALITAYHRGAFASSNAFVAFIGFDVRLRESGKYKGKRKLTKRGEAELRRLLYCAAKPAQSYAPFDQYLKKQLDKGLPKIAAKVCLARKLARIAFSLIEKQQSFKKLQIAC

SEQ ID NO: 358131 - protein, 356 aa, unidentified
MSHDVKYIGMDVHKEAIVIAVQNESGKLVMESVIETKASSILQFLHGLRGELHVTWEEGTWAAWLYDLLQPQVQHMVVCNPRRNALLKEGSKSDKVDAGKLADLLRTGMLRPVYHGENGLRTLRELGRSYQTISKDLTRVMNRLKALYRGWGIPCAGTQVYAARAREKWLSKIPHTGVRRRAELLYQQLDGLQALRREVRPELLAESRKHKAAKLLRQIPCIGPIRAARLIGLMQTPHRFRSKRQLWTYSGLGIETHDSAQYRFVSGQVQRSKKPQQVRGLNRNHNHEMKEIFKSAATRASCGRGSFHDFYTGLLAKGMKPEMARLTLARKIAAITLTLWKKEERFDVEQLKTQAA

SEQ ID NO: 358132 - protein, 456 aa, unidentified
MKQKTTSQSSRTLPIVGEVEPHAAGLDVGARKVYVAVPADRDAQPVRSFDTFTEDLERMANWLRECGITSVAMESTGVYWIPVFDILERKGLRVCLVNAHHVKHVPGRKSDVQDCQWLQYLHSVGLLRGSFHPEDQVRALRAIMRHRGSLIEMAAAHTQHMHKALTQMNLQIHHVLSDITGVSGLAIIDAILKGERNPEVLAGLRDGRVQASEEIIRKSLVGNYRREHLFTLEQSLKAFRQYQALITACDQELAQYVNDFPSRIDGDQPPLAKEPNKHRPRKNELRLELRSELYRLFGTDLTAVPGISTLTWFTLLTELGPEMGKFPSSPAFTSWLCLCPNNRQSGQRILSTQTRRSKNRINHALRVAAQTLHHSNSSLGAFYRRLCARLGAPKAITATAHKLARILFHLITTRQPYDESVFALADQQQQQRHERYLRKQAQAMGFSLVRTEVQPA

SEQ ID NO: 358133 - protein, 350 aa, unidentified
MCSLPVFVGLDYHDASVRVCVLDTDGRELANADRCNDWKAIAEFADRFGRPVRAAIESCCGAADLAEELVSCAGWSVDLAHPGYVQRMKQNPDKTDYQDAQLVADLERIGYLPRVWLAPQHIRELRQVVRYRLQLTEQRRATKLRVRALLREQRCRAPQGVNAWTKAWDHWLRHSAELSAEGRWVANQHLQELACLVTRIRQVEKRLERLTANDVEVQRLQQQVGIGPVTAWTIRAEIGHFDRFRTGKQLARFCGLSPRNASSGQRQADAGLIRAANPALRTVLIEAAHRLVNYDRYWQKFAQRLRAAGKPGSVVAAAVANRWIRRLYHEMKTPSGELAVAVRSARSEDS

SEQ ID NO: 358134 - protein, 379 aa, unidentified
MIATTRPEMSVNEPTLYVAFELGKKEWKLAMTSGFGVTPWLRTVASGDLRGVERALARGRERFGLPPSAAVVSCYEAGRDGFWIHRALTQLGVRNRVVDSSSIEVNRRARRTKTDRIDALKLVTMLVRVCCGEQRVWHEVRVPRVDDEAARHVSRERTALTKEQTRLSNQIAGWLATWGCIVPARARRAAGWWTRARDWNDAPLPAAVQARIARADERLTMLATQVAALETQQAATAQAADRDSALGRLVQLKGVATTSASVLLDEGLVWRAFRNRREIGGLLGFAPAKYDSGDSEHDQGISRAGNAHLQAISIQLAWNWVRWQPTSALTRWYREHFGPRRRARRIGIVALARKLLIALWRYVTTGAVPTGAILSGSRA

SEQ ID NO: 358135 - protein, 412 aa, unidentified
MQTLVERGCGLDVHQATVVACLLIVRKDGRVQKQLRTFGTTTRELLSLREWLLSEGCTHVALESTGVYWKPVYAILEGAFQIVVANAQHVKKVPGRKTDVKDAEWIADLLCHGLLRSSFVPPQPIRELRDFTRYRRKLVESRSAERNRLLKVLETANIKLASVATDVFGTSGRLMLRALIEGKSTPQEMAELAQKRLRSKIPQLELALEGKLEEHHRFLLKLQLDRLERVESDLAALEQRIQEKLQPYAAQLALLHEIPGVERTLAAVIIAELGVDMSVFQSVSQLASWAGVCPGNNESAGKRKSSRIPKGNVYLKTALVEAANSAARAKGTYLRDKFYRLKARRGYKRAAVAIAHKILVSIYHMLSQNVSYNDLGDRYLDNLNKHHLTRNLVHRLERLGYSVTLTLQQEVA

SEQ ID NO: 358136 - protein, 343 aa, unidentified
MDHFAGLDVSVKDTSVCIVDGTGEIVRELKVASEPEALLGVLRNAAYHFKRIGLEAGPLSQWLFSALGEAGLPVICVETRHMRAVLRAQINKTDRNDARGIAQMMRVGLYRPVHVKTLRSQKLRMLLTHRKLLQSKAIAIENDLRGTLRNFGLKVGMVGTVKFEARIKELVENLPDLAVLVEPLLVVRRVLREQTAVLHRRLRAIVRDDEVCRRLMTTPGVGPVVALTYRATVDVPARFRKSKAVGAVLGLTCSKYQSGEIDRNGRISRCGDEMMRVMLYEAAQSMLRSKKWSWLKAWAMQVARRRGMKKAIVALARRLAVIMHRIWVDGTEFRWTREAVTAA

SEQ ID NO: 358137 - protein, 358 aa, unidentified
MIVIGADSHKRSHTVVAVDQVGRRLGERTVKATSDGHLELLRWSAQWPQVRFALEDCRHLTRRLEQELLTAGQQVVRVPTRLMATARRGGRQPGKSDPIDAEAVALAALRHHDLPVAELDGPTREVKLLVDYRRDLVRQRTRVANRLRWHLHELDPELRVPSRGLRRYKVLDELAARLAGMEGTVARLARRLLARCRELTREINALEAELRPLVRQLAPTLLAVPGCGVLGAAMILGETAGVGRFRSKDAYARFTGTAPIPVWSGDRRGKVRLNRGGNRTINTALHMIAVTQIRGAGPGQAYVDQLIARGKTRTEAVRLLRRRLSDVVFRGLRADEQARPSATQTRSAATAAASARAA

SEQ ID NO: 358138 - protein, 317 aa, unidentified
MSKRAWFAGIDVAKDSLDVALVRGEEEVVWQLPNAPDGWAALVTACQERATERIVLEATGGYERRVAAELMTAGLPVVVINPRQTRDFARATGRLAKTDRLDARGLARFGEAIRPPVRPLPDEKAAELQEKLARHRQLIQMRTAENNRLGHARSKPVRQGIQSLLNVINQQLEALDKDIDQRIEESPAWHEKDRLLQSVPGVGPQTARTLLSGLPELGQCSRQQIAFLVGVAPLNRDSGKMRGTRAIYGGRAHVRQALYMATLVATRFNPLIRRHYQHLLQVGKKKKIALIACMRKLLCILNAMLRDHETWNFAFST

SEQ ID NO: 358139 - protein, 425 aa, unidentified
MNYKQNEKINQVKESTLVVGIDIGSTTQYARAFDWRGIELGKVFPFSNSREGFESFKAWMQHLQDKYKKLDAIVGIEPTGHYWFDLGAYLEDEGILLVMVNPYAVKQTKELDDNSQSKNDRKDPKVIAKLVTEGRYSAPYTPDGVYADLRIMVANRKRLIREMTQIKNRFARWFAIYFPEYTDVFGDYEAQSSMLLLKKVCTPEAIVELGAEKINQIWRDAKLRAVGMKRATTLCETAKRSIGLKKGSSAARYEMKLLLEDYEYKKAQLDAVMEEIEKLCRKIPESEQMFAIKGIGVITVAGFLAEVGDVRRFESPRQIQKLAGLSLRENSSGKHKGQTSISKRGRSKLRAVLFNAAIPLIAKNPEFKSLHEYYTTRANNPLKKKQSVIAISCKLIRVFYAILANGVTYDAQKMLSDIHRQPQAA

SEQ ID NO: 358140 - protein, 320 aa, unidentified
MDGKRLIGIDIGKYWLDVAREGVAKVERHPNTVQAIAALLRSFDPARDIVVFERCGGYERALEAALADAGIAWAVVHSQRVKAFRQAQGIKAKTDSIDARLLQAFGRDRLKVGALRLGRASDVRLDALMARRRQLKAMLHAERCRLETAAIDIAAASITRMIAQIEAELAAIEADLARHEAADPRLARKQAILCARKGIGRDTARALLAELPELGQLDRKEITALAGLAPRVHQSGTIRKRRGLAPGRAAIKVILFNPARVAMRWDPDIRAFCDRLRARGKPGKVIMVAVMRKMLVRINAALREALAFEAQAGVAARAAA

SEQ ID NO: 358141 - protein, 390 aa, unidentified
MRFAGIDIASETHWVSVVDEKGEVGTKPTTFGEDATGYAKLFGLLGSPADLLVAMEATGHYWKNLFAALATQGYPVALINPLRTHRFAAEDLERTKTDAIDALGIARFAAQKRPAATRLPDSATEELRELVRLRDRLVQDFGDRVRQLHRLVDLGFPEFTRYVKTLDSELASSILHDYPTAQAFRGISAKRLANLRYDGRHKVGPELARDLIEAAQRSVGSCHTEPYRIQVRYLCEDLDTLRRRLRGLDRDIDGKLAQHEVGSLLTSIEGIGSQTAARLIATLGDPADFHSAAALASYVGVIPGLKQSGKNRNPRAALTPLGNARLRAALWMPTLTAVRRNPWLRAHYERLRARGKLPKVALVACMHKLLIAVHAVARHRQPFTSRPKPA

SEQ ID NO: 358142 - protein, 391 aa, unidentified
MESAQMLQPVFVPREFEVFAGLDVDKTRIAVTFTDHNRLLKSLQMPYSSQHLLNYTRKQFADRRVAFVYEAGPTGFGLHDDLLAAGHRCLVVAPSMVPRAPGQRVKTNRIDSRKLSEGLRGGQLNSIHVPSLAYRHLRHLVQLRDSHVRQMMAAKYRIKALLLYEGIPFPEAPASNQWSARVLHKLGTLPCAAAVGFKLNSLVASLYFHKLEAAATQKQIRRFCQQDPELSRSIQCLTTIPGIGWIVASHLVARLGDWRQIRNVRQIASFLGLVSWEHSTGDQVQRGSITRTGDVRLRNKLVETAWTAVRKDPELEQFYRRIYQRHPRPIAARKAIVAVARKLTTRIYSVLKQQRPFRLKTGVAQAPLTPEETTCPRGRLDQPQNEGTHGS

SEQ ID NO: 358143 - protein, 371 aa, unidentified
MDERIKFFVGLDVHGDSIAMSVCEAGREPGRFVSTLTPDVQALLKILSKYGAARQVSVVYEAGPTGYGLYRALIDRGYRCEIIAPSLTPRRPGERIKTDRRDSLRLAELSRAGELKAIWVPDQAHEALRNLWRAREDAVNLRLQARQQLKAFLLRQGRRYPGKTSWNKTHQRWIAEQHFDHPADYIALAEYQLAVQAAQDRVQRLTTALEHAIEGWRQEPTVAALRALRGIDTVSAIGLVCEIGDIARFGSARQLMGYLGLVPSEHSSGNSVRRGSITKTGNAHARRLLTEAAWNYRFPARMSQALRDRSATLSPGIRTHAWKAQVRLCSRFAHLSARGVQANKVCVAVARELTGFIWAIARQSLPDNTHQ

SEQ ID NO: 358144 - protein, 401 aa, unidentified
MNSVRIDVSKGKSTVAALRPMGEVALPPTEYLHTELELEKLAYTILALGEDTRVVMEATGRYHKPVAKALHEYGIYVCVLNPILIHQSGGGSVRKVKSDKKDAIKIAKYGLDNWVDLREYTPVDALRQQLKLFSRQYNLYMKNSVALSNNLISLTDKFFPGVNELFSSPEKADGHRKWVDFVETFWHCDCISLVSEKAFIERYRKWCKRKGYHFSVEKAFNLYASSCGNTVTLSKNDTTKRLITTTAKQLTSFNCQLAVFRNEMISIARQLPEFDTVLNMFGVGEISAVNLIAEIGDVRRFPNRNSLVGFAGVDPCVDQSGKHFSKSNPTTKRGSAILRKTLFQVISTYVKRSPVDEPVYQFICKKRAEGKPYYVCTTAAANKFLRIYYARVKECLNDYLF

SEQ ID NO: 358145 - protein, 326 aa, unidentified
MKKKTLGVDVSKDKLDFCTLQDLKQGVLERGVTPNDQKSISKWLDSIDLENTVIAMEHTGHYSAMLAWLLSERNACFYMINPLELKRSMGMQRGKSDAVDAYRIASYTIRNYDRLEPFKLPTEKLRKLKALMSARRRYVKIATQLKNAHKANLILNKTIDIKDIIRQEKKHIQSIEKSKKQLERQMIEIIKSTEDLKKTYKKITKVIGVGPITAMMCIIETDNFLKFPNGRKFSCHCGLAPFPHQSGNSVKGKSKTHPFKKKSMKAILFKAAKVAKRHDPQLKAYYDRKIEKGKNKYSVLNAVAFKLVQRIFAVAKRDEPFVKLAA

SEQ ID NO: 358146 - protein, 422 aa, unidentified
MNSLTDDVFTAYVGIDWADSKHDICVQASDSQQRDFDCISHQVDRIEQWAQSLHKRFGGVIAVALELSKGPIIYALQKYDFFVIFPINPSTLAKYREAFQPSRAKDDPTDAELALDLLLRHPDRFNPLRPQSVEMRTLIVFVEQRRGLVNDRIRITNRLRNTLKQYYRQTLEWFDRIDTLLFCDFIARWPTLIQVKRARKTTLERFFHQHSMRFSHVLDARLKAIKVAQALTLDEAVITPYRLHALVLAEQLRVTLQSIRRFDNEIAELAPKHPDYGLFSALPGAGPSLAPRLLVAFGEQRERFASAADVQKYSGIAPVTERSGKKHWVHWRWQCPTFLRQTFVEWAAQTINKSYWAGAYYRQQREKGCSYQAAVRALAFKWIRILYRCWQSGTPYNETTYLNALKRRGSPLLNPATDAEMT

SEQ ID NO: 358147 - protein, 458 aa, unidentified
MAAQKTKTKVKIKIKASKNQPALTITYPNAAGIDIGCSSHYVAVPPDRDEEPVREFPCFTADLNALADWLSACRVDTVAIESTGVYWIPLFELLDSRGFKVLLVNARHVKNVSGRKSDVLDCQWLQQLMTYGLLSGSFRPEDQICVLRSLWRQRDMLLKNQARSVQHMQKALTQMNIQLANVISDVVGETGLRILRAILAGERDGYVLAALKHARIEASAEEIAKSLQGNWRSEHLFALKQALASFDFTGTQVAEVDQEIERQLKSLETHDGDPGKPRRRGRTRNSPKFDLRAHLFRICGVDLTRIDGIDVTTALAVISETGTDMSRFPDAGHFASWMGLCPGTKITGGKVMSGKTKRCANRAAQSLRMAAAALRTSQSALGAYFRRLCARMDKPKAIAAAAHKLARLIYAMLTKGEEYVDQGQEYYEKRYRDSMVKNLTQRAAKLGFTVVPAEQAVS

SEQ ID NO: 358148 - protein, 352 aa, unidentified
MKKNIISVCEVPERTIGIDLSDRTFRFCALNQEGNIVEEGERKLNPDSLGKFLAAQPAARVALETGAHSAWVQALARQLGHEAMVANARELRAVTGRSRRSDSQDARQLARLARVDGELLNPVRLRGAEPQADLFVLRARAMLVEVRTRLINFARGITKTTGRRLPSADAKRFSERARQAVPEALRPALLPLLNVLDQVARELDGYDENVQALAEERYPETRWLRQVPGVGPITALTFVLTLHDPARFARSRDVGPYLGLVPRRRQSGEQDPHLGITKSGDRYLRQLLVQCAHVVMGRFGPDGALRRWALEHAGGSRSAKKRTVVAVARKLAVLLHRLWLRQEEFRPCPAVG

SEQ ID NO: 358149 - protein, 343 aa, unidentified
MQTVSTIGLDIAKSVFQVHGVDDAGQVVVRRQLKRRYVLTFFQKLPPCLVGIEACASSHHWSRQLKGLGHTVRLMAPAYVKPYVKRQKNDATDAEAICEAVRRPTMRFVETKTLEQQSCLMLHRTRHLIIRQLNAITNALRAHLAEFGIVAPVGRRGIEELLQIVADANDQRVPEVARACLAPLGEQLRVLKAHVLKFDRLITAWHRSNETSGRLDALPGVGPALATALVASVGDPKAFRSGRHFSAWIGLVPRQSSSGGKQRLGSISKQGDRYLRSLFTAGALAVIRYAKIHGAGHRPWLTALLTRRSTKVAAVALANKIARMAWAMMAKGERYREPVALAA

SEQ ID NO: 358150 - protein, 341 aa, unidentified
MTTATIIGLDLAKNVFHAHGASEAGAVVFRKKLSRSQVLPFLSEQPKCIVAMEACATAHGWAREIERLGHSPRLIPPQYVKPYVKRQKNDMADAEAIAEAGSRPTMRFVQPKPEDQQISAMAYRTRQMFIGQRTQTINALRSHLAEHGVIAATNMCGLKKLSAMIEDETVSMPCKVRELAHVYVDHIAQLTAQIAEMTGEMREMAKKSAVVKRLQTVPGVGLQTAMAVETFAPDPGCFSRGRDFSAWLGLVPRQNSTGGKSRLGKVSKMGQVDIRSHLIRGAMSVISAATRFGIKKGSWLERLLARKPKLVAAVTLANRMARAIWAMLTKNEDYKNPEAVA

SEQ ID NO: 358151 - protein, 343 aa, unidentified
MDHFAGLDVSVKETSVCIVDDTGKIVREVKVASEPEALLAVLTNPAYHFRRIGLEAGPLSQWLYSALAEAGLPVVCVETRHMRAVLKAQINKTDRNDARGIAQMMRVGLYRPVHVKTLRSQKLRMLLTHRKLLQSKAIAIDNDLRGTLRNFGLKVGMVGAAKFEARIRELVEGLPDLAVLIEPLLVVRRVLREQIGVLHRRLLAVVRDDEVCRRLMTVPGVGPVVALTYRATVDVPARFRKSKSVGAVFGLTCSRDQSGERDRPGAISRCGDEMMRAVLYEAAQSMLVRSTRWSWLKAWAMQIARRRGMKRAIIALARRLAVILHRIWVDGTEFRWTREAVAA

SEQ ID NO: 358152 - protein, 324 aa, unidentified
MSKHSMIYAGIDTGKHKLDVAIKGSREQLQVDNTADGHAVLLAWLKRHKVQRVGIEASGGYEQHVVARLRHDNQFVVVVFQPAQVRAYAKFVLQRAKNDKIDAALIAECTAATKKIHSPPDPRLVPLAARMTLIDQLTEAVARFKNYREGSRDAELRQFWKEQIDHLNKELRARLKELAAAIRAHRDLAERLELINSVDGIGLKTAVAILVRMPEIGCVTREQATALAGLAPYDDDSGTHVGIRHIAGGRQRLRGSLYNAALCAAFHWNPQLMAFYGRLTAAGKPHKYALVACARKLLIFVNTVVARGTPWVSSRTASQARAAA

SEQ ID NO: 358153 - protein, 302 aa, unidentified
MGEVSTIGLDIAKSVFQVHGIDCDGTTVIRKRVTRAKVLELFAALPRCLVGMEACPTAHYWSRRLQALGHTVRLMPPSYVKAYLKRSKNDANDAAAICEAVARPSMRFVSTKSEQQQSALMLHRSRQLLVRQRTMLSNAIRGHLAELGIISAKGRNGTAKLLAIIANEEDDGIPAAARVSLAVLARQYAAITTEIAVIERHIHAWHRSCEESRRLEEIPGIGPIIATALVAEVGDWTAFSSGRSLAAWIGLVPRQHSTGGKEDSAGFRSKAIDICDGCSLLALWRLSAMRASTAQNGSGWLA

SEQ ID NO: 358154 - protein, 340 aa, unidentified
MEKRYIGIDLHRNRFTCCIRLENERTYVTEWALEALPRFVKKLRASDEVAVEITSNTRLFFDAVAARVKRVVVVDTNQFRVISQSVKKTDPNDARLLSLYLSKNLLPEVRMKDKDLAQLASLTQTRDTLVKQRSALKNKVNNILSARGLNLAKEALSSEKKLTEVLELPFDEIVRVELRVIVEQIRSLNKSIAELEKTIGEEGSKLEGHKGLSSIKGIGKITGAILLSVIGNVNDFPDEGRLASYFGIVPRVSNSNETERNGRIHKRGTKLGRTALVQSALIAANYSPYLKRFYNQVKARRGAGKAIIALARKFLGIIYRTLRNKWVFEDFPNFVLAEES

SEQ ID NO: 358155 - protein, 343 aa, unidentified
MQLTTVIGLDTAKSVFHVHGIDADENVSVSRQLKRQRVLPFFKKLPPCLIGIEACSASHHWSRELQALGHTVRLIPPRYVKPYVKSQKNDARDAEAICEAVTRPNMRFVPTKTREQQCMLMLHRTRQLFVRQRTALINAIRAHLSEFGIVAGVGRNGVEALLKVIADQKDDRVPDVARDCLIALGTQLQTLKARVLEFDRKILAAHRASEVSRRLEAIPGVGPQIATALVATIADPKSFRSGRDLAAWIGLVPKQNSSGGKPKLGGVTKAGDRYLRSLLMIGALSVIKRAKQLGYTNRPWLSQLMARRPTKVAAIALANKIARMAWAMMVRGEKYREPIALAA

SEQ ID NO: 358156 - protein, 345 aa, unidentified
MTIVEAARAVTGGVDTHLDVHVAAALDPVGGLLGTEGFTADPAGYKAMLSWLEGFGEVAKVGMEGTGSYGAGLARFLRHQGIEVVEVDRQSRQARVRHGRSDPIDAVEAARATLAGRAGQPKSMDGAVEAIRVLVVAKRSARQARSKALTQMRHLSYTAPDQLRCQLKGLTIPALVAEAASLRPTRSPDPVTAGTKASISSLAHRVRFLDVEIAGLDELIGPLLFATAPELLALKGVGPDTAASLLITAGDNPERLRSEAAWAHLCGVSPIQASSGKVTRHRLNRGGDRQANSALWRIVMVRIAHDPDTKAYIERRVKEGRTKREVIRILKRYVAREVYRHLPRG

SEQ ID NO: 358157 - protein, 401 aa, unidentified
MESPIVSIDVSNGNSHYMCFIKNNKRFGKVKKIDHDIEGFKRLLEDIQKLEAETNEKVCAVFEATGVYTKPLERFLSKNSIKTYIINPLESARKRKEEIHNKKTDKLDPISISKVYYDKEEMMELKKKDETHNWLRKKNRLYEDQLNHLRKYKVTFQNQLSICFPGYLDLFKDGYSDIPMIILKKYPHPDLLKNKKAETVARYLEKNTCHTHKVSLEYALKIIEFAKKTYPGCEKDDVEVEIFKILLDKVIETQRECEKTLNEMITVASTLEEYRYISSIDGIGPNLAARIIAEIGDIEEFKSREALVAYAGLDPHIYQSGDQDGKHLKISKKGNKYLRCLLFLAVGCSIRGAKDNPVNRFYQKKKQQSNPLNSKAAKTACTAKLLKIIYGICKNKTTYER

SEQ ID NO: 358158 - protein, 349 aa, unidentified
MKTKTDSTPIIGLDLGDRRHTVCVLDHAGEIIAETTIPNTREQLEGLSRQYPGAVIAMETGSHSPWISRLFEARGHRVYVANARKVRAISQSQTKSDKEDARMLARLARVDPKLLSPIRHRSEGAQRALVRLKVRDALVRSRVNQANSVRFLLKSLGVVVPSAVKATVFVRRVRETLDAETLQLVTPLLTVLDGLNAQIKQLDKDLEELAATQYPATARLQQVPGVGPLTALCFVLTVESPQRFGCTRDIGPYLGLVPRRDQSGETDKQLPITKAGNAQLRCLLVNCAHYILGPFGPPSALREAGQRIAVAGGSAAKKRSVIAVARKLAVTLMALWKSGAEYHALSAAA

SEQ ID NO: 358159 - protein, 331 aa, unidentified
MVKKQIMTDKLSCCGIDVSHLTLDVTYQNNLGELFYLQVGNNNAGFKKLLEHTGQNCHFVMEATGVYYIRLAFFLDSLGCRLSVVNAMSIKRYIQMHLERNKTDKKDSRWICQYAIEQRPPFWEMPDSAYFECKQIYNTIREYAEQVKRFNNQLHSLKLLPFPSKETIKSIEKMKSYLEKEMDHLEVKLQVLLKKWQPEQYKSINSIKGLGKRATALLIIFTQGFKHTTNHRQLISFAGLSPTEYSSGTSIKGSNRIYKKGGKPIRDVLYMCAMNAKQTNEACKQLFDRLKANGKTGKQALIAVMNKLLKQVFAVVKNNSLYQPNYCSTLH

SEQ ID NO: 358160 - protein, 407 aa, unidentified
MFVGIDWASTEHAVCVLDQAGKTVRAFGIPHSAAGLDDLVARLRRLGAPAGLPVAIERPDGRLVDRLLEAGHPVVPVRSNAIKAWREGEVVSGAKSDTGDAKVIAEYLRLRHHQLRTLTPFSDATRALRAVVRARGELVRQRVAAINQLTATLDAFWPGAKAVFPDVEREIALAFLERYPTPESAAGLGERRMAAFLTRHRYCGRTPAAELLARLRAAPAGVAGGAEATARRDAVLAFVGVLRALNQAIRDLDRSVVARLGEHPDSKVFASLPRSGQINAAQMLACWGDCRDAYDGPEAVAALAGIVPVTRQSGKHAAVSFRWACNKRFRNAMTTFAHNSRLASPWAAKLYADAIARGHDHPHATRVLARAWVRVIWRCWIDQVPYDPVKHGAAQRLAEEAAAAAAA

SEQ ID NO: 358161 - protein, 350 aa, unidentified
MMIIGCDLHTRYQQIAMLDRETGELVERRLEHESGEARAFYAALMGPVRVGIEATGHTHWFEAMLAEMGHELWMGDAAKIRAAVVRKQKTDARDAAHLLELLCSERFPKIWRPAPAERDLRQLVWHRQKLVWMRGAVKNQMHALAMGEGVCRKKKLFTAKGRQELEGLALGPWASYRRQELLRMFDELQASVARLDQAVEQAAKSQPLAVRLMTHPGVGPVTSLAFVLIIGPIDRFQRSKQVVSYLGLNPQEHSSGGKQRLGSISKQGNPMLRSLLVEAGHTAARFDPQLRRVYQRLKFRRGASVAKVAVARKLAVRMYWMLRSTADYAQLVRMQGSPWATLVEKDSSLG

SEQ ID NO: 358162 - protein, 403 aa, unidentified
MISGFDVFLGLDVGKGEHHAVALDAAGKRLHDGRLPNSEPKLRAVFDELAAHGPLLVVVDQPATIGALPVAVARAGGHQVAYLPGLAMRRIADLYPGRAKTDARDAFIIADAARSLPHTLRQVEVDVGDDALAELEVLIGFDDDLASEATRISNRIRGLLTGIHPALERTIGPKITHPAVLEILSRCGGPAGIRTAGERKLTSIATAHAPRMGNKLVTAILTALDEQTVIVPGTAAADTVLPRLADSLKTVLQQRKTVATEVEGILDAHPLAGVLTSMPGIGVRTAARILLEIGDASAFKSSAHLAAYAGIAPVTRASGSSIKGEHPARTGNRKLKRAFFLAAFAALHDPVSRAYYDRKRAEGKKHNAALICLARRRCDVLYAMLRNKTNYRQPQPRTIPAAA

SEQ ID NO: 358163 - protein, 347 aa, unidentified
MLYAGLDLSRKRLDFCLLDEAGELIERGAVPPDRDGLCSLAERVAAQQRQRVVAAVESMTGARFVHDQLESHGWQVQVADAARVRGLAPLACKTDRIDAWVLAELCRRELVPAIWLPDGEVRGARERARFRLHLVKHRTALKNRIHQTLVGFGTPCPVSDLFGERGRRLLARLELPQPWAGSVAASLRLIDELDREINEIEAELRRLGASHRYVPLLLTVPGIASILGYTIAAEIGDINRFASPAKLAGYTGLCPRVYQSGEHDRRGPLSKHGPRYLRWALLEASIHACRHPLYAQRYQHTKKRLGRQRGPRVAQVDLARRLSEAIWHMLTRNQPFAPAGASQVLAA

SEQ ID NO: 358164 - protein, 396 aa, unidentified
MPATTRHARVPALPESTTGQARLLYLALDLGERHWTLAFTVGRGQRPRVRTIPAGDLERLTTELAAARRRFGLPPETRVVSCYEAGRDGFWLHRAFLAAGVTNVVVDAASIEVPRRARRAKTDRLDARKLVTMLVRYIEGERPVWHVVHVPSEADEDRRHLERERETLVADQTGLVNRIQGLLATQGVRLALRGDVPAQLAAVRRWDGTPLPPELRARLEREWMRVEAVRTALRALTTARHRRVTTPTPPATDAATVHLTRRLAALAAVGETTAWLLATEMFSWREFRNRRQVGSFLGLTGTPDQSGDRIREQGLTRNGSVELRARVIELAWGWLRYQPASALSQWYRQRYGGGNARLRRIGVVAVARRLLIALWRYAMGGPPPAGAHLKDDAMVA

SEQ ID NO: 358165 - protein, 409 aa, unidentified
MRYYLGGDWADQTHAVWVVDERGTKMAMHTVAHTAEGLTEWGRELNEWRAQGIELWAAIERPEGRVVDFLLDHGVRVYAVNPKTLDRARDRFRQSAAKSDPFDARVLADFLRTDHMHLRAVQPSSEAAQELKLLTDDYQRQIRQQTRLVNQLTTTLKAYYPRALEVVELTTTLAREFLQAYPTPASLTALTARQWQRWARAHRLSEARTQELWTVLQRPQLPVPPHVVRAKARLMQSLVAQLTVVLEGVDAYREAIEDFFAQLPAAQWIRTLPIGDHGITAPTLWARLGDAPGRWESFRHLQAQAGTVPVTIRSGKQQVVRFRFACDKSLRYIIDHVAFLSLRWSEWAQAYYAGQRARGHSYRQALRALSAKWLKIIFVMWERQIPYDEQYHLAMMTRQQLRQRQEKVA

SEQ ID NO: 358166 - protein, 368 aa, unidentified
MSQKSSKVYIGLDVHKESIDIAVGEEGGEVRHHGQIGGDMNALWRAVRKLESLGRELVFVYEAGPCGFGVYRGLIARGHACWVVAPSNTPRRVRDRIKTDRRDSVKLAGLARAGELTPIYVPDVRDEAMRDLVRAREDAVVMQRQARQRLTALLLRNDVRYAGKTAWTAAHRRWIADVRLAQPAQRLAFEEYVQAVEEATVRVERLTGYIAQEVAQWRWLPVLNALQACRGIQLLHAVRIVAELGDLSRFNHPRQLMSYLGLIPSEDSSGERRRQGCITKAGNGSARRALVEAAWAYQYMAKVSGLIARRQVNAPKAALDIAWKAQVRLCARFRRLAARGVSRNKIVVAIARELAGFVWAIGQQVKPV

SEQ ID NO: 358167 - protein, 380 aa, unidentified
MGWPGRAQRPRTTVVPDGEASKLKELTMHTHQQSTEPVATIGLDIGKNTFHLVGLDRRGAIAMRIKVSRNQLVRRLVNLPPCLIGLEAGSGSHHIARQIQSLGHDVRLIPAQYVKPFLKGHKNDYRDAEAIAEAVQRPTMNFVAIKTPEQSDLLSLHRVRSRLVRQRTAIINQIRGFLIERGITVRQGPGPLRKVLPEVLSSPPEALSPRLLRLISELDHDWRHLDDRLEVLSGEIESLSENDAACQRLMTVPGIGPIISSAVVAAIGTGSGFKQGRDFAAWLGLVPKQESTGDRTKLGRISKRGNKYLRTLFVQAAHVVLERRPAAAMRALWPWIAQASKRLAHRNLLAIALANKLARIAWAVLARGRDYEPRITPNAA

SEQ ID NO: 358168 - protein, 460 aa, unidentified
MKNNKQSKQVKSKRISKHLEQVNLFAAGIDIGSQSHYVSVPEDLSTESVREFSCFTGDLNRMADWLVEIGIQTVAMESTGIYWIPVYEILEERGLVVLLVNSRHIKNVPGRKTDVLDCQWIQQLHTYGLLEGAFRPEEETVALRTYMRQRETLTQQSSDQIRRMQKALRQMNLLLDNVVSDIDGVTGMKIIRAILEGEQDPIILAKYRDGRCKKDEKIIAASLEGHYREEHLFSLKQSVELYDIYQTKITDCDKAIQAQLDKMDNKGDKKDLPPSKKSKSKNAPKFDVRGDLYQMTGVDLTRIDGLNESSILKILSETGSDISSWPTEKHFCSWLGLSPGNKVTGGKILSGKTKPSANRAAAAFRLAAFGLLNSKSALGAYCRRQRTRLGAPKAITATAHKLARTFYSMLKNGTEYVDKGQDYYDKQYQERIVNNLKKRATEMGFDLVAKEVEIPELSNA

SEQ ID NO: 358169 - protein, 358 aa, unidentified
MRTKSKNISFKEQNIYIGIDVHLKSWVVTIMVEDIYFRTFSQNPKAEDLKKYLNNNFPEANYYSVYEAGFCGFSVHRELEKYGIKNIIVNPADIPTTDKDKRQKEDKRDSRKLAKSLKNGELTSIHILQIETEELRSLVRYRKTIVKELGRHKNRIKSILKFYGKEIPKELDTASKYWSLNFIKWVKQIQTSTKEGSLVIQETVDTVEYLRKKQLRINKELRNLSKDPRYSKEIQLLTSVPGIGIIISFIFLSELETIKRFKNLDKLSSYVGLIPSTNSSGEKDRIGNITRRSNKILRTSLIEAAWVAIRQDPALLLKYAELKERMSPNEAIIRIAKKVLNRIRYVLKNEQEYVNAIV

SEQ ID NO: 358170 - protein, 316 aa, unidentified
MKKHSTVCAGIDTGKRKLDVALAGADERLELANTEQGHGKLTAWLRQHQVRRVGIEASGGYEQAVVSRLRRAGFVVIVFQPMQVRAYARFHGLRAKNDKIDAALIADCTAAAKKIHAPPDPRLVVLAAHQTLIDQIIDQIARCKNYRESSRDAQRQFWNDEIKRLRGLFKQQLKNLVAAIRRYRDLAERLDLIASIDGIALRTAVAILVRVPEIGRISRQQIAALAGLAPYDNDSGDQSIARHIEGGRQRLRNNIYNAAFAASFHWNAELAALYQRLTAAGKGHKVALVACARKLLIYANAVVARGTPWVSRAVAP

SEQ ID NO: 358171 - protein, 416 aa, unidentified
MSDEDKVASIDIHKKVLMVVVGSREAEAIGSQSELERRRFGTMTSDLRRLSAWLRERGVKDVVMESTAQYWKPVWWELEPYMRLHLAQAFSNRAPKGRKHDFRDAERLLRRFLAGELILSFVPGPEQRAWRTMTRMKTRLARHRVRLYSHVEDLLEEMRIKLSCVLSDLFGASGLRILRALAKGETDPKKLAALRDNRLKCTEEQLVDALTGNVQAMQRELLELYLQQLRLIDEQMEKLSGMIAEALKPHEEAVARLAEVSGFGPDSAQQVIAEVGVRASTFPSAGNLASWVGTCPGENESAEENHSSRSPKGNRYMRRVLAEAAQAAVKAKGSHFQAVFRRLLPRLGYNGAIWAVAHRLCRLVWKILHDGVRYIEQGACRDPRAKKRRARSLIRALRKLGYNVELTPIEPATVPA

SEQ ID NO: 358172 - protein, 343 aa, unidentified
MKNTIVGVDLAKDVIQVCIYTNKKVRSNIEMTPPEFIEFLANNTSLTIVFEACGTSNYWKQKAISLGHDARLISAKLVSVVRQNQKTDKNDALAIIQAALLPDVTFISGKSIEQQQLQSIMRLRELCVKQKTAAGNQLTSLLLEFNIKVSSRNSGLKGAVESTLEDAENGFSFEFRKALSEAWQLYLSVIKSIHTYDECLECAIEGHTDCKKLRQIEGVGTLNAINLYIALGCADLGVFNKGKDASACIGLTPIQYSSGGVTKLGSIGKYVKSSVLRSQLITGAMSAVNHATRRKAKTKKDQWIQEMVERRGKKCTAVALANKTVRTAFAMLTQNTEYKAELI

SEQ ID NO: 358173 - protein, 352 aa, unidentified
MSEYIGCDMHKNYSVFVSMNEAGKAQPAVRVDHHDRQAFRQYLKSLPQGTPVAVETTGSWYWLVDELEAAALRPELTNAKIAKHLMGGRNKTDKLDAKGLATLLRNGTLPTVWMATAEVRDLRELTRTRMALSGMRTKLKNRILADFAKYGIGLEGYRDLFGQGGRRLLGRSLEALPEHTRQAVEDQLMVLDAVCERIAAIEPRIEKLIQETPMLMLLRTLPGVGKILATVIGLEIGSIERFATAERLCSYSGVVPTVRSSGGRTRHGRTAVDVNRYLKWAFIEAANLVVGNRERWNYPSLRQLYERVCRRKNHPIATMAVARQLTESAFGVLRKEEPYREPCLVRGSSSPR

SEQ ID NO: 358174 - protein, 332 aa, unidentified
MIALDLAKNIIQVAKVTKHGEIVFNKAQSPAKVRQILANSPPSIVAMEGCGSFHYWGRIAQSFGHEVRGMSPKHVKPFVSKQKTDANDAIGIAIATIQPNMPLSPVKNIEQQILQTLTVSRKLLDKQLTQLGNHIRALFYEYGITIVRSKKALKEALIEHNDLPEVLLPMLNILKVQYKQIEQSLKQVTKNLELLVAQNEQCQRIMALEGVDTLGAAGLISNLSQTGHFKNGRCASVYLGVTPKQFSSGGKIVMLGIDKFAGDKQLKSCLFLGALAYISNLPEEPSTLKQQWLLRLVARSGVKRACIALVNKNIRTAWAMLKSGTSYQPIMI

SEQ ID NO: 358175 - protein, 408 aa, unidentified
MQVTFGIDVSKSTSTVCELIGESKNELTITNDRPGFIQLLHELAAFSKHPQIIFEATGVYSRRLQAFLEDYGYDYVILNPLKAKKEMNMGLRYNKTDKTDAYHLALIQRLYHHPINQLQSQTYKQLNALSRFYDQLTADLVMAKNRLHQALQSTFPEIENLFSSAKGKNYWQIVVRYPHCDLVRRENKKQLINWLMSLKGIAFKHALRTADKLIELAYQAYPVVSCSSIEVEQVQYYAHRLLNLSDQRENLIARMVKLAKSLPNHDLENIESIPGFAQTTAVRVLAELGDLRRFSNPNKINAFIGIDPGRYQSGEMDSNLSITKHGNAVARKLLYRAIGQIDNAAKTNPCHIADYYESKKLSSQTKGFKKIAIASIHKLIRTIYALIINDQLYDYNVATHNQKDFSRN

SEQ ID NO: 358176 - protein, 419 aa, unidentified
MKNMTSEKSFAAFIGIDWADEEHTYSLAVAGSSRIERGRLQHTPEALHAWAEQLHKRFAGRPVAILLEQKRGALVWALQEHPFITLFPINPLTSAKLRQAFFPSGAKSDPLDSDLLLDILRHHRDRLRPFQLDEVQTRLLERLTQDRRGAVEQRKSCVQQITAALKEYFPLALEVLGKLECNLAARFLLKWATLEELQAAQPHLVRKFFHGNNGRFQIEQRLKGIKQAQPLTSDPAIIEAGRRKVQMLAQLIITLNQYIADYQKRIETLFQRHPDRHIFQSFPGAGAALAPRLIAAFGMDRSAFADALSVQNRSGIAPVRVSSGKTAIEKMRVACPKFLRQTFHEFAATSVRYCAWARTYYQAKVAAGKKHHTIVRALAFKWIRIMWACWQNQEAYEETRYLRALSRSGSPFAVTLKKT

SEQ ID NO: 358177 - protein, 316 aa, unidentified
MQNLYTNFIGIDIGKDEFVSFLNNDDKTNCYKNSSKGFQKFLNDHKEYISSSLVVLETTGGYESACLDYLQDNNFAVHRADTRKVKNFIRSFGQHAKTDKLDAKALSLYGYERQERLSLYQKLDKNDEELKLLIERRQDLKHMLTQEKNRFQAPLNKPIQAGIKAVITCLEKQINNIEESINKIIDENKDLARKKEILMTVPGVGSITAVSLLGLLPELGQLNRKQVASLCGVAPYAKQSGEKSGYRRTFGGRRNLRPILYMAAMGARRRKESELAAFSERLTQKGKKPMVALVAIMRKIVVIANARIKEEFFGAN

SEQ ID NO: 358178 - protein, 386 aa, unidentified
MQDHEPEGQTAIRTDLGAIFVSLELSRSSWLITSLSPGGGEKMSKHSVPSGDISGLSMLFLRFRERARKRTGKDFPIIVIQEAGLDGFWVHRVLEQEAIESHVVDAASVMTSRRRRRAKTDRIDGEALLRALMAYKRGEPRVCAMVRVPTAEEEDRRRISRERKILTAERVAHVNRIKGLLFSQGIAYEPLHGNRRARLEQLRTGDGRALPEHMERQISRELDRLELLLEQIKAVEAERNTMLAVSEGEKIPTPAKMLMQLRGIGSESAMVLWSEGLFRHFDNRRQVAAYAGLAPTPWQSGTIDREQGIGKSGNHRLRTTMIQLAWLWLRHQPDSALSRWFHQRVERSGGRFRKTMITALARKLLVALWKYATAGVVIEQATMKTA

SEQ ID NO: 358179 - protein, 421 aa, unidentified
MDAEFSLYVGVDWATQTHRVCVMDAQGTILLEQALKHDGEAISSFLQALESITRGGGQRVAVGIEVPRGPLVEAFLERNYAVFSINPKQLDRFRDRHSIAGAKDDRRDAWVVADSLRTDQRCFRRVALDSPAIIRLRELSRTEEDLQGDLRRTVNQLYQLLLRYYPQLLQLASVPDEPWLWALLELAPTSPPGAKLTTARLQQLLDKHRIRRWSAEQVREILASPPLPLAPGSAQAVSEHALLLLPQLRLLYNQRKQVADQIQRLLAQMTASELDHPDRQAQPDVSLLLSIPGVGRIITATLMAEGSDPLAQRDYHALRAYAGIAPVTRQSGKSKQVIMRHSCNPRLRNAFYHWARTSVQNDERSKQHYARLRHAGHSHGRALRGVADRLLAVLIAMLKSGKCYDPNRRSATSTATPAAQS

SEQ ID NO: 358180 - protein, 397 aa, unidentified
MYIVGIDIAKRKHEAAVIDGDGAVIIKPFSFTNNCSGYNRLLAMLAKAKLPLDEVSFAMEATGHYWLALFTRLQKEGFRVQVINPVQTNSIRSFYIRQAKTDPRDALLIAEVIRFGHFSESTLHPENIYELRELCRGRHAIVSMQADVKRKVVALLDQVFPEYETAFTNMFSDTSMAILQTCPTPKELSEMPLEELCHLIEVSSHKRFRMAKAQELQALARNSFGFAMAGDVFSTMIRLYAKHLDFLKQQVREMDRKIAEIMDTLDTPITTITGIGPTLGAYILSEIGDISRFSSAAKLAAYAGIDPTMRQSGEYNGVRNRMSKRGSPYLRHAIWLAASSAVLHDPALKLYFKKKRDEGKPYMASVGHACRKMVSIIYAVMRDNKAYTPCIPNEISA

SEQ ID NO: 358181 - protein, 412 aa, unidentified
MDTIVAYIGLDWGDERHSVHLQTAEGAIEHFELEQKPAVLHEWVAQLQRRFGRGNIAVALEQRKGAVIHALLMYDCFILYPINPKALARYREAFRTSGAKDDPLDSALLLDLVVRHRDQLRAWVPDTVESRTLQALCEQRRKLVNQRVALTNRLTSLLKQYFPQALEWVGDVASVQACDFLTQWPTLAAVQRARPKTIQQFYRAHNCRKADVIEARLAAIASARPLTTDAAVVEPLSLSVQTYATQLRALIAAIQTFDDRIAQVFAAHADHDVFTSFPGAGDVCAPRLAAAFGTDRSRWESAADLQAHSGIAPVTERSGKTIWVHHRLACPKFVKQTFHEFADQSIRFSRWARAYYDQQRARGNHHHAALRALAYKWIRILFRCWKERRPYDEATYIDALCRHGSPLATHFA

SEQ ID NO: 358182 - protein, 416 aa, unidentified
MNAVGIDVSSRKSTVAVLRPLGEVVCLPFDVTHDIAGLASLVEKLKALDGETRVVMEHTGRYYEAVAKALHEAGFFVCAVNPLLIKEYGANSLRRVKTDKADAIKIARYALDNWADLRDFTPMDAIRYDLKTLNRQFQLASKQRTASANNLIALLEQSFPGIRKCFDSPVRSDGTQKWVDFAHSFWHVDCVRKQPFAAFCERYRKWCKLHAYFFKLRNAEKVYALAKSAVVLTPKAKVVKVLVQEAANQLISISRSVEVYRAEMDRLAAMLPEYPVVMAMYGVGKSYGPQLMAEIGDVRRFERKQALVAFAGIDPMPNQSGDKNVRSNKSSKRGSPYLRKTLFNVIRTYLQCAPQDEPVFQFLNRKRAEGKPFYVYMLAAANKFLRRYYAKLRDYFASLDTLQPAAPIPTILKAAL

SEQ ID NO: 358183 - protein, 389 aa, unidentified
MKIFVGIDIAKLNHFAAAISSDGEILIEPFKFTNDADGFQLLVSKLESFDKNSIIIGLESTAHYGDNLVRYLVAEFYQVCVLNPIKTCQMRKNNVRKTKTDKVDTFVIVKTLMMQDDLRFITFFDLDMMDLKALGRFRQKTIKQRTRLKIQLTTYVDQVFPEIQYFFKSGLHQHAVYALLKEAPSPKEIASMHMTHLANLLKVNSHGHFTKEQAKELRVLAQKSVGANDSAISIQITQTIQQIELLDSQLEKIEAEMTDIMKFNDSVIMTIPGIGYINGGMILGEIGDIHRFSNPNKLLAFAGLDPSVYQSGNFQAKTTRMSKRGSRVLRYALVNAAWNVVRNNATFKAYYDAKRAEGRSHYNALGHCAGKLVRVIWKMLTDEVEFNLE

SEQ ID NO: 358184 - protein, 377 aa, unidentified
MSKVLFVGLDVHAETIAVAVAEQGGEVRSLGSIPNRLESIRKMVHKLGAVQHLRVCYEAGPTGYVLYWQLTQLGVACEVIAPSLVPTKAGDRVKTDRRDAEKLARCHRAGELTAVGVPSAEQEALRDLVWAREAAKRDQLKARHRLGKFLLRHGRQRPDGVKAWTKKHREWIKSHVRFEEAALEATLADYVEEVDHVGGRIVKLEKAIDEAIQQAPPQIRAVIEALQALRGVAQTTAASIVSEVGSLSRFPTAPQLMGYSGLVASEHTTGNRVQRGSITKTGNGHLRRVLVEAAWAYQHRPNVIGHLLRRQKSLAISDEVKNIAWKAQQRLHKRYKAMSARGKNKNQIVAALGRELLGFIWAIGIKTEQQQKLIKAA

SEQ ID NO: 358185 - protein, 429 aa, unidentified
MDEVDDADLVVERVAALDLGKAGLEACVRVPHPQRPGRRMQELRGYATTTAQLLAMAGWLRHWHVQRVVMESTSTYWKGVYYLLEAEGFDCWLVNAREVKNVPGRAKTDRADAVWLAKVAERGMCRPSLVQPPEIRRLRDLTRYRRALVQDRTREQQRVEKLLEDAQIKISAVLSNLHGVTGRAIMDALIAGERDPRTLAGLAKASARKKTDRLEEALRGFFTDHHATILQMMLDNSDRISAQIAALDARIEEAIGPFSRPAARLADIPGVSTVAAAELIAEIGVDMTRFPSAAHLVSWAKFCPQIHQSAGKSISKGRAKGNPWLAGTLGRIAFVNSRTDTFLGARYRRLARRRGKQKALVATGNSVLTVIYHLLSDPDAIFCDLGPGYYESRINKHRRARDLATQLQALTGQHIAIRNGKAVITDTAA

SEQ ID NO: 358186 - protein, 342 aa, unidentified
MDRLSPVTRIRKVGFTMENELYFIGIDVAKAKLDVDILRPDGRHRGKKFENTPSGHEALVRWLRSHDVNHAHVCMESTSTYMEEAAAYLSDAGYTVSIINPALSAAFARSEGLRSKTDKVDARMLAHFCREKRPSAWEAPHPTERALKALVLRHQALTEMQTQEKNRQETAPEVQLASIDVLLECLSAELKRIEKQIKDLTDNDPDMKQRWKLLNSIPGIGEKTAAVLLAYTGLKLRFATARQFAAYAGLTPVQHESGSSVMRASRMSKAGPVQLRRALYMPAISALYHTAWGKAFRKRLEGNGKRAKVIIGAMMRKLAQVAYGVLKSGEPFDASQHGIAVA

SEQ ID NO: 358187 - protein, 405 aa, unidentified
MKLYIGIDWSQGKHDICFVNTKGVIQSQLVIPHSQTGFWKFEQRRKKLGVPAENCLVGLETSYSILVDFLWDRGYANIFVLPPTLVKGSRTRMRSSAAKDDPGDAYLIADILRTDHGRLQAWQPDSGLTRQIRTKVRFISFLTRNIVRMTNRQRAVLLRYYPVAAELFSSLSTLISQHFILAYPTPQAAAALDLDSFRKFARQHRYTHKSKLASILAKLDQDDPRADMDIIVACQDEAQGLAHVLLDMIRLKRDNLKQLQQLLDLHPDQNIFASLPGTGVYLQAALISKFGDDRGRFPTPGRVQAIAGTSPVTIRSGKSKYVRFRKSCDYEFRHIVQQWAKQSLRSSVWANAYYARVRPNCDSESHAFRCMANRWLAILWRLWQDHTLYDETYHLKQRALRSQPR

SEQ ID NO: 358188 - protein, 343 aa, unidentified
MTKDTMIGVDLAKNVFQLHAASMTGQPQFCKKLSRQSFTRFMAEQPPAVVVMEACGSAHYWAREMIRLGHEVKLIAAQYVKPFVKRQKNDAADAEAIVIAAQRPEMRFVEPKSAEQQSRAILLRARERLVHQRTELVNALRASLYEYGHVVPQGIRQINRIAEILDAPGSDLPDLMREECRDLLEQITEQTERINARTAKIKALAAETDTARRLQAIPGVGPLTALAVEAFAPPMENFRCGRDFAAWLGLVPRQFSSGGKERLGRISKAGQSDIRRLLIIGAMSRLNWLGSKSIPEGSWLARMAARKPRMLVAIALANKMARTIWALMTKNEDYRAPAQAVAA

SEQ ID NO: 358189 - protein, 367 aa, unidentified
MAIVAHTHPFVIGVDAHARNHAVAILACPIGEIVDQAQFPATVAGLQRAVSWVARRTGGDLDGLWVIEGVGTYGARLARVAADAGYPVVEAGRMNARANRGVGKSDPLDAHRIAQSVMAIDVAKLRRPRADDGVRAALRVLVAARDQISGERTTAVNALTALVRVADLGIDARRPLTAGQITAMAGWRTRAEDLATAVARAEAVRLAKRVIAADRELAANTKQLTDLLNRSPARVLLDQPGIGPVTAAVAFTAWSHLGRIRSEAAFASLAGVNPIPASSGNTVRHRINRGGDRRLNRALHMATVTRIRMDPRTHAYVEKRTAEGRTPKEIRRCLKRYLARQIYRQLNAAQTRQTGQSLQSVETLPSG

SEQ ID NO: 358190 - protein, 358 aa, unidentified
MKKSSRRAERMERPSITVGIDLGDRFSSYCMLNEDGEEIERGRIQTTEAGLSRHFENVGKYRIVMECGAHSPWVSRLLKKLGHQVIVANSRKIKAITQNESKNDDNDAEGLAHLGYCDPFLLSPIRHRSVERQQDLNVLRARDTLVRARTMIINSVRGLVKSAGARLPKCSTEAFADKVRDSVPAELDELATPLLQQVQQLTDQIKVLDRKIEKLDERYPEIKVLRTAPGVGPVVAAGYVLTLQVEALQDSRQAGPFLGLRPRQGQSGNSDPQHRISKTGNGYLRHLLVQAGQYILGRFGPDSQLRRWGLKLAGSGGKRGKKRAVVAVARKLAVILHSMWRHQAVFQAFPEMGAGPAV

SEQ ID NO: 358191 - protein, 350 aa, unidentified
MIYVGIDVAKDKHDCFITNSDGEVLFKAFTIKNNLDGFDELYQKIESVMEDASKVKVGLEATGHYSYNLLGYLLDKGLATFVINPLHTNLYRKSLSLRQTKTDKVDARTIASMLMSDVNLKSYSDTSYHNEELKSLTRYRFDKVKERAKLKTSISRLVCILFPELEKLVPTLHQNSVYELLYEFPGAKQVANAHLTRLSNLLETASKGHYTKETSIAFREAARTSIGSNMPAKSLELKHTIKLIRELDSEIEEIENEIKVIMDEINSPILSIPGINYRMGAMIIAEIGDFNRFDSPDKILAYAGFSPSTYQSGQLDGAYSHMEKRGSRYLRYALYNAAKYVCCFLSSTFP

SEQ ID NO: 358192 - protein, 394 aa, unidentified
MSYRSDPYIRVTKIVLLPFDVEHTAEGLKKLITKLRQLDGEIRIIMEHTGMYWRPIAMTLKEAGFYVSVVNAILIHNFSDNSIRKVKTDRADAMKIANYGLTFWIDLQEYAGEDENRQLLKIQSRLYERTATTAGMLRNGLISLLDQTFPGANKLFRDDSRNSKGHVKWIDFVLRFWHKECVAALSLAAFTDTFQKWCKRTGYKFSASDAERIHAIARNAVATLPKNDSTKLLITQATNSLNAIYDSLQAIRTEMDRLASMLPEYELVMGMEGIGKVTGPQLMAEVGDVRRFSHKGALVAYAGVDASPYQSGSFDSKSRHVSKRGSPHLRRVLFVIMSMTLIRANTANPVFCFMDKKRAEGKHFYVYTVAGSAKFLRIYYAKVKEYLNALEETA

SEQ ID NO: 358193 - protein, 399 aa, unidentified
MITCGVDPSRANLAVSVLNDGEEVDYFEVINDNRGHRAFLKRVKKHDAQPIVCIEGHGDFAKRFAMFLSKHSIKLYEINPLKANKFKEGFSNEKTDHIDAFTAGYMVFMNSDMDTLVLKDTFEGLKKLTREHDKITKEITRVKNRYHAYMHASFGPLYKKIFKDLNKTSLNLFKHYPTPELMKKAHTTDLKKCIRAAGSRYYAGKKCDEKVKTIKKILKDYKQDSDLFTEVTASLIRQLSELLIVLLKAKKNLKKKIEKYLQKHFPEYIGCFGDELDCVKVVSLGNLLAEIGDILNFKTDKHLASYAGQAPKNAQSSGKRWRKRSKNYNRYLAKAIHMIALNNSKKGKPFHEYYLKKKKRYSKKLRALKSVKRIVCKIIHQSFTKVREKQIRRLERDIA

SEQ ID NO: 358194 - protein, 322 aa, unidentified
MSKHSMICAGIDTGKYKLDVALNGCAEQLQIDNAADGYAALSVWLKRCRVKRVGIEASGGYEQEVVAWLRRDGFVVVVFQPAQVRAYAKFLLQRAKNDKIDAALIAACTAAIKKIHAPPDPRLAPLAERMTLIDQLTDQIARFKNYREGSRDLRMRQLWKEQIAHFNKLLRAELKELVAAIRQHRDLAERLDLIESVDGVGLKTAVAILVRMPEIGSVTREQAASLVGLAPFDDDSGMHAGIRHIAGGRERLRGSLYKASLSAAFHWNPQLVALYQRLIAAGKLHKVALIACARKLLIFVNTVVERGTPWVSSRSPAVRAAA

SEQ ID NO: 358195 - protein, 349 aa, unidentified
MDENEVILGVDTHLDTHVGVLINTNGNLLGCLAVTTDTSGYLKLVTWANSFGMLKRAGVEGTGTYGAGLARVLRDHGIEVLEVNRPDRSKRRLQGKSDPTDAESAARSVLSGNATAIAKTQSGVAEAMRVVSVARRSAVRAKTQAINQLRALLVSAPQDIRERLWKTKPGDCAKGCARLRSRSATEFLNILTTSLCLLGKRWLALAEEVEKLDVILENLTRQHARRLREQFGVGPQTAAVLLSTAGDNPERLKSEAALAALCGVSPLPASSGKTVRHRLNRGGNRSANNALWTIAMVRMRGDPKTQSYVARRSAEGLSSKEIQRCLKRYIVRELYPLILADLADSARSC

SEQ ID NO: 358196 - protein, 342 aa, unidentified
MIYVGIDYHKKYSQVEAMDKEGKTLSRARLSNDAETLRRWFASLPEPCEVVVEACRNWQVMYEMLEDMDEVKMIHIANPCKVRAIAEAKIKTDTIDAHTLTHLLRCNLIPTIYVPSKETRDIKDILRQRMFLVRTSTRIKNRIHALLDKHRVSMPDLSDPFGKKGLAFLKKLSLPHPANLLLRQDIELIEALNTCIKEAEKEVMDILNTDERYNLVRTLPGLGPILAGVVTLEIDKIERFPHTKKLLSYAGLVPSTYASGGRHYYGSLIKQSNKWLRWAMVEASWTAQRVSPYCQYYYRRYLYKGHNTAICVLARRLLEILWSILTYRRPYEERSPYALTKS

SEQ ID NO: 358197 - protein, 343 aa, unidentified
MAIVTGYDVHRNQITFDALDTESGEVSRGRIDATPEAVRAWVGRFLGQEVHVAVEACTGWLFVCDALAEAGAVAHLAEPAETAARRGTKRRAKTDRADARHLRELLALGRLPEAWIPPAHVREWRTRTRLRKTLVDERNHWLQRIQATLFHHGVPAAALPARLLTPAGRDVLDQIALPAAARERVTVALALIDAIDTQLAPLEREIRQLARRQTGCKALMRIFGIGELTAPTILCALGDVSRLSASRKAVRMVGLDIGVHRSDRRSRPGKLTRQGPPEARWALYEAAQSACRASSPDHAAYLELRARGLSHTRASLTIARKLTRRCFHTLQELGPAALEPLID

SEQ ID NO: 358198 - protein, 370 aa, unidentified
MKDHREVFVALDVAKKKNAVAIAEGGYAGEVRYLGEIANTDAATRKLVTKLATKYGRLTFCYEAGPTGYGLFRLIKSLGHECIVVAPSLIPSRPGERVKTNRRDAVGMAKLLRAGELTAVWVPDDRHEAMRDLTRAREVAQKDLRSKRQQISGFLLRLGLHSPGKKTWGKAHMNWLGSLKLDHREQRIVFEELMLAMRQAKEPSERIEQAIRDSVPDWSLAPVVVALQAMRGIDLITAVGFLAELGDLSRFESPRQLMAFLGLVPSERSTGDSVRRGSITKAGNVRARRLLVESAWSYRYPARVSKEKLAKVEAAPRAVREIAWKAQTRLCGRFRILARKGKRSTIIATAIARELSAFIWAIHREVAGAQ

SEQ ID NO: 358199 - protein, 421 aa, unidentified
MKVVRKICCGMDVHKDIIVATIASTDGNNVTTYLQKQFSTFNYDLLNLLNWLKQNNCYDVCMESTGKYWIPIFNVLETELNVFLTHPKYVKAIKGKKTDKKDSKWIADIFKHDLLKFSFIPPKHIRELREISRYRIKLVGMRASEKNRYQNCLTVSNIGLGSVFSDPLGKSSRAVLEEVMHSDIITEENIKKLLLKSASKKSEQVMQAIQHSHIETDQRFKLEHAMKHLENLDKYIQDCEVEMIKRCAPFIDIVKHITQLPGISFVSAMIILSEIGIDMNQWASDKEVASWVGVTPQNNESANKKKSVRISKAGQYIKPILVQCALAAIKCNSEPYFKIKYNRIKKRRGNKKAIIAIARMLLVSIYHMVKTGENFNPSDYDSFKNPKQNQSKITTKQALEHLQSLGVDISQIQIPEIQQDS

SEQ ID NO: 358200 - protein, 449 aa, unidentified
MHGVHIGGQRAGAFLDLVGGVDPKRVLLVGIDVAKATWFVVASNLLGEVVVDGVRLVADRAGLAELERVLGAASARVNAAMVVVGIEAAGHQHQTLTAHLLDRDELVVRLLNPAQVAAVRKQQGNRRRKTDWLDAAAICELLARGEGALVHLDGSAAAALRPLWSGRKDLVDTRSRLRQQAGALVDCLWPGCSAKDTVAGVTPVLCDLFATKAGRVLLELLAQGWTPARVAATSVAALRGLFAVRGCRLTRPLATRLIGRAQAALPAHPAATAGKAVTLAALLGTIDTLDHQIACLEAAMAPLLAHTQGAKLTQLRGVGVVAAAGFVAFVGSTDRWAEWSKVWRAAGLDPARSQSGPADARLGISREGSAWGRRAILDLAAAVCQQPGPWRDRLRTRTTQQHKPAKVALTATANAIGRTLFALMASGADFDPGFEAKRAAARKAGGQAA

SEQ ID NO: 358201 - protein, 351 aa, unidentified
MPSKKDAAVIRAIGIDTGKNTLHMVGLDEKGAIVLREKVSRNRITARLVNMPPCLIGIEAGMATHYMSRELVALGHKVKQVPPAYARPFRQGHKNDFRDAQAVAEAVQRPSTRCVPIKTDDQLDLQALHRVRSRLIGDRTAVINQIRGFLLEHGIPVRQGPRFQRQQLPQILATRTDVLSPRMVRIIGEIVDDWENLDERIERVTDEIEGLARADVSCGQLMTVPGIGPIIASATVAAIGNGTAFAKGRDFAAWLGLVPKQMSTGDRTILGRITKRGNRYLRTLFVQGARAILLHPASWAKHSFGPWLTSAARRLHRNVLVIALANKLARIALTVLVQGRSYETRVEPAAV

SEQ ID NO: 358202 - protein, 410 aa, unidentified
MKLFIGIDSSQKNNQCCIVDHNGNKVSELRVSNDLTGAQKMQSLLEHKASELYVTELKAATEASSMYDFHILEFLSGSQTLTKYNLKLYRFNPRLIKAFKQSLKIRDKTDPNDAYAIAEYLRFQSEKAEEYRAKLDHLPLQRLTRFRCHLVSQLVRERNYFLNQLFLKFSAFSKVKPFSNTFGATALAVIEESMTPDAIANADDEELIQFVIKHGKNQSPNPEEIVKELKHVARESYRLRPQLAESVHRILCLSLSNIRALKSSLKELDDTISKQLNAFSITLTSIKGIGTVYAAGIFAEIGDINCFSSESQIARLAGLAWIRHQSGNFEAETRRLDKQSNKYLRYYLVEAADSLRRHNPEFSAYYQKKYAEITKNQHKRALVLTARKLVRLVDYLLRTNKLYQPNIILT

SEQ ID NO: 358203 - protein, 320 aa, unidentified
MSASSVVVGIDVAKAHVDVSVLGAQLDAQRFDNQAEAHSALAAALKPLHVALVVMEATGGYETELACALQAAGLAVAVVNPRQARDFAKSMGRLAKTDAVDARMLAEFAAVLLRREDLARFLRPLADPQQQWLAALVTRRRQLMAMLLSERQRLQITPKGLHPSIEAIVAAIKAQLDDIETQMVGHVREHFTELDRLLQSASGIGPVASATLIAELPELGRLNRREIAALVGIAPMANDSGSSKGRRRIQGGRFDVRRVLYMAALTASRRNPVIRAFYDRLIAAGKLPKVALVACMRKLLTTLNAMVRTNKHWDSSLHGA

SEQ ID NO: 358204 - protein, 393 aa, unidentified
MSSRVVIGMDPHKRSATIEAMDEDEAVLGKGRYGTDPEGFVAMLAAAARWPDRVWAVEGCEGIGKHLVLRLLERGEAVVDVPAKLSARMRVYATGQGRKTDETDAHSIALVGVRMTGLREVVNDETLEVLRLLVDRRRRIGEDHTRMVCQLHQLLLELLPGGAKKDLSAAQARRLLETVRPKDVAGKTRKRVAMELVVDLERVYARKKAANKELIELVKQTGTGLLDLHGIGPSGATRLLVEVGDVTRFPTKGHFASWTGTAPIDASSGDNVRHRLSRGGNRQINKALHMMAVVQLRNATEGRAYYDRKVAAGKTANEAMRCLKRRLSDIAYRTMLDDLVATKAAGARTGPGGHRGNVSDSSAAGSHPHTDSSDKSLPGPAKTKPKTPLRRAS

SEQ ID NO: 358205 - protein, 365 aa, unidentified
MNCVGIDVSHGKSIIVVMRPFGEVVVSPFEVLHTDSELSKLAGLLKSLDGETRVVMESTGYHHTPVAWLLHDAGLYVSVVNAMLVHDYGNNSLKRAKTDKKDAVKLANCGLDHWLTLPRYVPEEDTRLMLKTCYRKYQQYSKVQTMLKNNLISLLDIAFPDANRLFTSPPRADGSEKWVDFVAAFWHCECVCNLSEKAFTAKYHKWCRKHRYKFCEDKTLDIYSSACGHFGVIPKTDTSKLLVEQAVFQIRATSTTLAALKQEMQSLAASLPEYPVVMGMFGIGPALGPPLMAEIGDVRRFHSKKALVAVAGIDAPPYQFGQMDVRSHSISKRGSASLRRTLFLVMSVILQHAPMNEPVYQFMNK

SEQ ID NO: 358206 - protein, 359 aa, unidentified
MANNEDGTRHVVGGVDTHKDLHVAAVVDGQDRVLGTACFATTRQGYRQMLVWMRSLGDLRRIGIESTGSYGAGLLRFMQQAGIDVLEVTAPDKHDRRRRGKNDDLDAQNAAHAALAGRRTVTPRSRDGMVESLRVLTVCRKTAVAARRVAIQIIQTTIVSAPDGLRDTLRSMTRMQLVRTLAAWRPDLTAYREVEAAYRISLKSLARRYLELHDEIADLDAMISAIVDDLAPELIARNSIGYTGAAQLLLTAGDNPERLRSEASFAALCGVSPVPASSGKTIRHRLNRGGDRAANSALHIIAIGRIRTDSATKAYVARRTSGGHSKLDAIRALKRYIAREVFHIITRRHREINQTCIAA

SEQ ID NO: 358207 - protein, 389 aa, unidentified
MKDLLEISCGLDIHKEKIVACILTGPLGKPTHSEIREFTTLIPDMLALRDWIISENCHHIAMESTGIYWIPIYEILEDAFSGDITLLVVNARHMKNVPGKKTDMRDSEWISTLLRAGLLNASFIPEKRIREFRDLNRYRKSIIRDITSQKNRVEKFLQSSGFRLSSFISDIFGASGRNIILHLMEHGQIDKISLDSYLKTKTRKRIDEILMSVNGTLSEHQKSFLKILMCHYDSMKEHLIEIETHLQEDMLPFALQIEQLNTIYGISTTASCAIIAEIGTDMKPFKTAEHICSWAGLCPGNNESAGKRKSTSITKGNPYIKSMLCEIAWVIAGKRNTYLSAWYWRIKQKKGARKAIVALARKLLVIIYTMLKQGTNFDENCFEVRRKKL

SEQ ID NO: 358208 - protein, 405 aa, unidentified
MGKVFVGHDWAETHHDVHVQDTLGKRLAKARLPEGVEGLARFHELVAPFVDDPADVLIATETDRGLFVGAMVAAGYEVLAVNPMSASRYRERHSTSGAKSDPGDAYVLAELARTDAHNHRRVAGDSELAEAVKVLARAHQSMVWTRMRQTNQLRSALREFYPAALVAFEELASGDAVAVLAVAPTPALGRRLSKAKIAATLRRGGRQRRVEERAEEIHAALRTEQLEAPPVVAEAMGASVSALAAVIGELLTQIGRLEAELAERFERHPDAKIIRSLPGLGMILGARVLGEFGDDPNRYADAKSRKNYAGTSPITRASGKHRVVLARYARNTRLADACYRWAFSAVSASPGARAFYDQRREAGDTHHRALRALGNRLVGILHGCLRHGTLYDEHIAWGHRMTAAA

SEQ ID NO: 358209 - protein, 316 aa, unidentified
MDVHSKTYTLCAMEPMIGAEDRILANIQVTADYKNILLFIENLKAKLGSQDTYDIQCGYEAGCLGYSLYNQLTEVGVNCVILAPSTMLTPQGKRIKTDKRDAHVIAQCLSYGTYHPVYVPTEDDDSVKEYIRMRKVHKDKIKEMKQRIGAFCLRKGLKYDGTNWSLKHLQWLRNLKLSALNREILNEYMATFGELTAKVERFDARIEELAAQERYQEKVKRLGCLLGIQTHTALSLIVETGDFHRFAKGNIYAAYLGMAPGENSSGDKVKRTGISKAGNNHLRKLLIEASQGICREASGTNQRCCVHGRREISQKS

SEQ ID NO: 358210 - protein, 338 aa, unidentified
MIHVGVDLHQRFCYMTALEARGKTIQAGPVNNERLALRRYFRQFRGQAVQVAVEACGFWPAFREVVEPEVERLVLVHPQRVKAIASAKLKNDRVDSATLAQLLRCDLLPESWKADRETQGRRQQVRLRATLVRQRTRLKNQVHAVLHQQGLRSPVSDLFGKRGRQWLAQVKLPAAARESVAVCVRLIDGYTQEIEEQNRQLSEKAQQDGRARWLRTIPGIGVYSAMLLLAEIGDIGRFPDKQALCSYAGLVPRVRESAGKRGRGGITRQGSPWLRWIMVEAAQVATRCSPAAQSYYQRLRRKKPAHVAWVALARKLLVAVWALLHDGVVFDETVFAAA

SEQ ID NO: 358211 - protein, 403 aa, unidentified
MNAVGIDVSKGKSMVTILRPFGEIVSSPFEIKHTSSDIHSLIKLIHSIEGESRVVMEHTGRYYEALAHQLSAADLFVSAVNPKLVKDFNNDSLRKIKSDKADSVKIARYALDKWQSLEPYSITDELRAQLKVMNRQFHFYVKQKTAMKNNLIGLIDQTYPNANTYFNSPTRSDGSQKWVDFVSTYWHVDCIRKMSLNAFVEHYQNWCKRKKYAFNKSKAEEIYTKTKELVPVFPKNEITKHIIRQAVDQLNSTSVTVETIRTLMNETASKLPEYSIVMQFKGIGPSLGPQLMAEIGDVTRFTHKGALTAFAGVDPGVNESGSYAQKSVPTSKRGSSNLRKTLFQVMDVLIKTMPQDDPVYQFMDRKRTQGKPYYVYMTAGANKFLRIYYGRVKEYLCILSESS

SEQ ID NO: 358212 - protein, 348 aa, unidentified
MNHYAGTDVSLEYSSVCVVDASGKIVREGKVASEPEALIAWLGSLGFEITRIGLEAGPTSQWLYAAMREAGLAVELLETRHVHDAFKAMPVKTDRKDARGIAQLMRLGWFRPVHCKSMEAQETRAMLTARKLVQSKLHDIEMSLRGILRGFGLKVGPTTTKRFEGRIQELVSGHPSLQVIADALLAVHAVLLREFNGFEKRVRIMARSDRQAKLLMSTPAVGPIVALTYASAIDDPARFKSSKTTGAHFGLTPKKYQSGETDYSGRISKIGDAAVREALYQAAHVMLTKPLKGCSELKSWAMRIAKRAGMNKAKVALARKLAVIMHRMLADAKPFNPTARTKPVAAAA

SEQ ID NO: 358213 - protein, 327 aa, unidentified
MTSRQLGVDVSKAKLDVALLQVNGKFKSKVFENTVQGIEALMRWLSEHLAGRLQDVHVCMESTGNFHEELACRLTDQGLMVSVVNPLLVKRFAESEGLRNKTDAGDAKCLARFCREKAPSRWEAPSLGVRTLQALVGRLQTLQAMHQAECNRRDVAHASVADSLERVIADLDKAIEQVRAQIAKTIDDDPDLRERARLLQTIPGLGDKTIPQLLAFIGRPQRFKSVKALIAYASLAPSIEQSGTSVNRRRSTHPMGHQDLKQALYFPALVAGRYNPVIAAFWKHLSAQGKPGKVVVVACMHKLLAIAYGVLRTGKSFDPEYSGASTA

SEQ ID NO: 358214 - protein, 391 aa, unidentified
MISVGIDVAKDKHDCFIINSEGEVFADVFTIPNSLGGFQHLLQRIRDCSSHQGKIKVGLEATGHYSYNILGFLLNNGLATYVLNPLHTNLYRKSLSLRKTKTDRVDARTIAAMLLSDVGLKPYTDTAYYNEELKSLTRYRFDKVKERGRLKQSITRLVCILFPELEKLVPTLHIVSIYALLEEFPGAKQIAEANLTRLKTLLYNASKGRYGQDMAVKIREAARKSIGSVMPAKSLELRHTIHLIRELDAEIDEIETAIQKIMNELHSPITTIPGIGSRMGAMILAEVGDFSRFGSPDKLLAYAGLSPSTYQSGQLKNCYAHMEKRGSRYLRFAIFNAAKYVCHWDRIFAAYLAKKRAEGKHYNVAISHAAKKLVRLIYALEKSGEPYRLAA

SEQ ID NO: 358215 - protein, 422 aa, unidentified
MLEETHDNDQIIQRVAALDVGKAELTCCVRVPGQGSSGRRLQEVRTYQTMTRWLLVMTDRLAELGVTRVVMEATSDYWKGVFYLLEAHGFEVWLVNARDVKHLPGRPKTDTLDAVWLCKLAERQMLRPSFVPPRPIRQLRDVARYRADLVVARTAEKQRVEKLLEDAQIKLSVVASDIFGVSGRAMLAALVAGERDPKALAQLARTRLRAKLGPLVEAFTGFFTDQHAFLLAKMLARVDALDADLAELDAKLAELIAPFAEAVDRLDEIPGIGQLAAHLLIAELGVDMTRFPTAGQLVSWAKFAPGVSESAGKRKGSGSTGHGNPYLARVLGEAAVAASKTETFLGERYRRIARRRGKKRAIVAVGRSILVIVWHLLSDPTLRFHDLGAGFYDTRIGPERAKRNHIRQLEALGYRVTLEPAA

SEQ ID NO: 358216 - protein, 343 aa, unidentified
MQAITTIGLDIAKSVFQVHCIDAGGQVLIRRQLKRRYVLAFFQKVPACLVGIEACASSHHWSRELRALGHTVRLMPPVYVKPYVKRQKNDATDAEAICEAVTRANMRFVETKTPEQQSCLILHRTRHLFIRQQTSVINAIRAHLAEFGIVAPVGRNGVEELLNVVADSTDNRLPEVARACVAALGIQLRTIKAQILEFDRNIMAWHRSNETSRRLDDIPGVGPALATALVASVADPKAFRSGRNFSAWIGLVPKQHSSGGKDRLGSISKQGDRYLRSLLMIGALAVIRYAKIHGTKHRPWLTALLARRPTKVAAIALANKIARMAWAMMAKGERYKEPVALAA

SEQ ID NO: 358217 - protein, 339 aa, unidentified
MNYTTVGVDIAKNVMQMHWIDPDTGEVVNRSIKRTAFLEHFVNRTPCLIGMEACGGAQHWARALTKMGHQVKLMPAKFVKAFNIGNKNDPADTRAIWMAAQMPRKSVAVKTEGQQAVLAMHRMRQQLVKFRTMQINSLRGLLTEYGEVMGKARSALNKAIPDVLARLSERLPAMLIDTLREQWKGLTKLDEQIVEIERRLQTWMKEDKASRAIAQIPGVGLLSATAAVATMGDPGSFKSGREFAAWLGLVPGQTGTGGKVQLLGISKRGDTYLRTLLIHGARSVLCNTKQPGIWLEQLKKRRPLKVAAVALANKMARIIWAILAHDRPYSKDHVSIKPA

SEQ ID NO: 358218 - protein, 367 aa, unidentified
MKKHTTVKQSLSSTDLSTCTTVAVDLAKQVFQIAGENALGQVLYEERIKSREAFHTFLRQLPPTIVVLMETGPGAQAWARQLQAQGSLARILPAQLVAKHRSGAKNDRNDALAILRAGRDSKIAAVPIKSATALAMQALHRARQGYVRRRTAMSNQMRGLLMEHGITLAQGDAAINQILPRVLEDATQPLPDMLRELVDELLGEWRQLGERINVLSGRLENAANEDKTARRLMSVRGIGPIIATALLAKQTDPERFANARQFAAYFGMVPEQNSSGQRVRLGRMSKRGDSYVRSLMVQGAHAVLRHLRPDSEQPDDRRLQRWQERLGRKEAAIRLANRNLRIVWVLLQNDQTYRSQPADGRPAAPSH

SEQ ID NO: 358219 - protein, 334 aa, unidentified
MDNAPSSSSNLRFSLGVDVGKTALELALRDDGETFARTTVPNDPEGRENLVSWLEDRGASPEETCVCMEASGDFQKAVALHLHEEGYRVSVVNPRRIKGYASSQLQRTKTDSADAALIARFGWREDPRPWTPPSAAESRLQELTRARQALKKEKTRAQNRLEEAEDEAVRNAHRELLDEIERQVEELEEEIEGHVQENPELNDQCSLLETIPGIGLQTAAIVTSELGSPERFENARQAAAYAGLVPRHRESGTSVRGNPRMSKVGNGRLRRAMYFPAMTALRFNPAVKAFGDRLKERGKEKMVVIGAAMRKLLHICYGVLKSGRSFDPSLHPGA

SEQ ID NO: 358220 - protein, 338 aa, unidentified
MTILYVGIDLAKNVFAVHAVNEAGKPEFVRPNVARAKLLELIAELPPCVIGMEACSGAHHWARLFMSHGHTVRLMAPKFVSPYRLSGKRGKNDAADAAAICEAVQRPNMRFVPIKSLEQQSQLSVHRVRQGFIDQRTATINRIRGLLSEFGLVLPLKASTVRSQAMACLEDLPGWSNTVIGDLLSELTHLDERIALYDRHVAQLARQDTRAQQLMRLHGVGPTTATALLAMIGNGHEFKCGRQFAAWLGLVPSQYSSGGKARLGHITKAGDPYMRSLLVLGARAILNSAKNKTDSVSQWAAALAERRGYWRAIVAIAAKNARMAWAVLSRGEQFTMPA

SEQ ID NO: 358221 - protein, 413 aa, unidentified
MENPFLFFVGIDWGTENHQVCVVDRDGTTIAERQVAHSGTGLQQFLTWLQQQIPVAAERVAIAIEMPAGAIIETLVEHNYRAFSLNPKQLDRFRDRHTVAGAKDDSRDAFVLADSLRTDQPCFHPIYLDDPEIIRIRTLSRLEDSLVQDWSRLTSQLREQIHRYFPQLLQLSPAADEAWIWDMLEAAPLPILASQLKHQQVQKILSQRRIRRFSAEEVLQQLRTLPLPVAPGTAEAASEACLLLIVRLRLLLQQKKEVERRIQKQLTQFCAEEERMEHRDVQLILSIPGIGRVITATMLAEASQPLAQRDYHALRAYCGAAPVTHQSGKRKRQVLMRYSCNQRLRNAFYHWARISVQQDSRSRAHYHRLRSQGHSHGRALRGVLDRLLVMLISILRHQTKFDPAIRKSIPVAI

SEQ ID NO: 358222 - protein, 361 aa, unidentified
MKRTTQNAEMATIIRVGLDTSKKYVQLHGVNAAEQPALRKQLRREEVLAFFANMAPCLIGLEACSSSHYWTRELGKLGHTVRMMAASFVSPYRKNRAGKNDANDAEAICEAVGRPTMRFVSLKSEEQLAILALHNVRHGLMEERTAVINRLRGELAEFGVWFPLSPQQARQGATLLLAQAECRLPPLLKILVHDMLEHIRYLEERIGNYDRQIAEQIKHNEAAQRIRALVGVGDLTTSAALAIIGDARLFKNGRQLGAYLGLTPRQASTGGKAKLGKITKQGNTYLRTLLIQGARSALQSALKRAPDKQTRLGHWIIGLHARVGYHKTLVAIANKHARMIWAMLAKGEQYNPDAWKVYAAA

SEQ ID NO: 358223 - protein, 331 aa, unidentified
MSVHVGLDVGSRTTAMGWRDKGRAAGSWDIAQTPKGRKAAVKKLLALKPLSVVMEATGIYYLDLALELSTAGLPVSVINPKSSRNFARLILQHSKTDAIDAQLLAEYGERMTPRLWTPPSPAQLELRAIGRHINRLTCHCTRAKNELHALQATETTSAMLIEDEEEAIAMFGRRIERFRRAGRDIIASCPILQEQFDHMMAAPGMGEVSTFAVLAELTTLPVTLKSPQISRYAGLDVRLTQSGTSIDKPGRLSKGGNAYLRSAMFMPAMSAIRCDPYVKAFYDVLVGRGKRKMQAICAVMRKYLTGLWACIRAGEDFDTAKLFSEKRLLKA

SEQ ID NO: 358224 - protein, 355 aa, unidentified
MNQEKYIGMDVHTATISVAVMNAQGKLLMECILETKAATILEFIQGLRGTLALTFEEGTMATWLHDLLKPHVSRLVVCDPRKNALMRDGNQNDRVDACNLAELLRTNQVHAVYHEKHGTRALKELGRSYLTLTKDSTRVMNRIKSVYRSWAIPCAGTSVYSRRHRAEWLAKLVEPGVRIRAQHLYEQLDSLQPVRQAARRELLRESRKHAAVKLLHQIPAIGPIRSALLVAILQTPHRFRTKRQLWAYSGFAVQTYDSGEYRFVRGKLQRNRERITVCGLNHNHNHDLKNLLKGAAITAIERPGPLQDFYAVLVKKGMRPSMARLTLARKIAAITLTMWKKGVSFDPKQLQRQAA

SEQ ID NO: 358225 - protein, 406 aa, unidentified
MIFVGIDWSEQHHEVELQAGSGKVLKRLRVSADIAGLSRLQEAITDAAEEPSQVVIGIESNHGLLVNALVAGGYRVYPINPLTSARAREGEAPSRSKSDPGDAHVLANLVRTKRQDLRPLAGDSEQAQALQVRARSHLRAIRVQQRLRSQLRSTLAKFFVGALPLLGDESEDLRDALAVLSLAVSPEQGRGLSLNKLRSSLARHGRQRNLEVKAAEIQAQLRAPQLELNAPKVVSAYSDEVSHLVRSLLQARSEVAQLEAQLAADFREHPDAEILLSQPGLGLVLSARVLGESGDDPTRYVNAKARKNYAGNAPVTKRSGKWKMVSRRLARNRLLADASFLWANSALSASPGARRYYDQLRARGKTHNQASRALANRLVGILHGCLRRRCLYDDAVAWPQPLKEAA

SEQ ID NO: 358226 - protein, 344 aa, unidentified
MGEVSTIGLDIAKSVFQVHGVDSSGAVVIRKRVSRLKLLEFFAALPPCLVGIEACPSGHHWGRELQGLGHTVKLMPPSYVKAYLKRSKNDANDAAAICEAVTRPSMWFVPIKTKEQQAALMLHRTRQLLVRQRTMLSNALRGHLAELGIVSAKGRNGTSELLRIIANDADKRVPPDARGILDVLARQYSAISAEIGSIDKSILAWHRSCEASRRLEEIPGIGPIVATALVAEVGDWKTFRSGRNLAAWIGLVPKQHTTGGKDKLGSITKQGNRYLRWLLVAGAMAVIRYAQKHGTERRPWLGRLMERRPTMVAAVALANKIARMAWAIMVRGERYKEPTLLMAA

SEQ ID NO: 358227 - protein, 460 aa, unidentified
MNRNRSKSRVDRTMPMVHPNAAAIDIGATMHMAAVRADRAPEPVRSFGTFTADLHRLVDWFTECGVETVVMESTSVYWIPIFELLDARGFAVFLVNARDAKHVPGRKTDVSDAQWLQRLHSFGLLRASFRPKGQIAELRAYVRQRERLLEYAASHIQHMQKALTEMNLQLHHVVADITGATGLRIIRAILAGERDPEALAGLRHYSCHSSAETIAKALTGSYRTEHLFALEQALSLYDAYHEKASACDVRIESVLKELIIHRGHDHGSAPPVSRRRNRTDQANALAFDVRAALFGLLGKDVTTIDGLGPYLSLKLIAECGDDLTSWPSAKHFTSWLGLAPSNKVSGGKMLSSRTRRSGGRAAALLRLAAVTVGRTDTALGAFYRRLSSRIGKAKAVTATARKIAVLFYNAVRHGMDYVDPGASSYETRYRTRVINNLHRRAKAFGFVLQPLEPKAGAAVS

SEQ ID NO: 358228 - protein, 353 aa, unidentified
MTTMTPPPGTVTGGVDTHSDVHVAAAVDHLGGVLGSQQFRTTPTGYRQLLRWLASFGPIYKIGVEGTGSYGAGLARLLAENDVKVVEVARPNRQVRRQHGKSDVIDAIAAARAVLSGEATATPKTHDGPVEGIRALKVVQRSANKSRTQAINQLRALIATAPAELRERLRHLKAEELVITCAAFRVRTDDDSLPALIRLSMRELAQRIEHLDTQLETVTHRLARVTKTIAPKLVAVFGVGPDVASSLLVTAGDNPHRLHGERSFAALCGSSPIPATSGKIQQRHRLNRGGDRQANSALWRIAMVRLSHDQRTKDYLAKRMSEGKSKAEAIRCLKRYIAREVFNALPREALGLT

SEQ ID NO: 358229 - protein, 373 aa, unidentified
MENNITYVAMDTHKKEHKIALHYPGQQEIVNLTVRNASSEISKMVKRILRKSSGEVRFCYEAGVCGFNLKRKIESLGCKCAVIAPSLTPTKPGDRIKTDRRDAVRLLAMFKAGLLTEVHAPDPQQEVARELTRLRQTARVNLMRIHHQLLKFLTRHGYIYTEGDHWTQKHLRWLRSLEFEEPLLTEVFDSYFTQMQHCKQRLDSLNKRIEQLAESEPYKEVVGFLKCFHGIDTLTAISIITEVFDFGRFSNPRELMSYLGLTPSESSSGEKQKKGPITKSGNKRVRRLLIEVSWHYRHPYHISKALRQRRKNQPQWVIDIADRAGHRLRQRYWYLVNRGKMPCKATTAVARELSGFIWSVFKEYLVRNMDKAA

SEQ ID NO: 358230 - protein, 347 aa, unidentified
MDLYIGFDVSVASSAMCGLSEKGKLVKETTCPTEPEDLVKMLNALPGRVVAVGLEAGPLSQWLYQHLTEAGFPTVLMETRQVKGALQAMPIKTDRRDAEGIARLLQMGWFRPVHCKSLSAQEMRALLSSRKAIQQATLSLELSIRGVLRNFGLKMGQVAKGRFEQRVLELVEGNPMLEAAAKPILSARRALRQELAGVEKILRDHAKSDPVCRQLMTMPGVGALVALTFKAAIDDPERFSSSRDVGPWVGLTPRRAQSGERDIIGGITRAGDGGLRTALYQAATVMLHSGRPNWLSAWAWAVAKRRGKKRATVALARRIGVVLHRMWQDSTEFRFTRADTAAATAAA

SEQ ID NO: 358231 - protein, 449 aa, unidentified
MSRPQVIDDEQHERVHDRVAAIDVAKDSGMVCTRIPHPSRPGARRSTVWTVQARMNAVRALGRQLRKDGIEIVTLESTSDYWRIWFFVLEGCGLAVQLVNAAQARNLPGRPKTDKLDAQWLARLTEMGLLRASFVPPKAIRDLRDYTRARTRLVRERTRCWQRLEKLLEGALVKVSSVASKLTTVSAQDMIKAMIAGERDPRVLAGLARTRMRAKHDDLVAALDGTFDDHHGELAGMLLDQIAFLDGRIAQLGARAAELTAAMPGAWGVNSDGTTGPDAGATPDAPALNAVARLAEIPGISPDLARAIIAETGLDMSRFPTAGHLVSWAGLCPSARQSGPRTRAGKKGQGNGYLRGSLGRAALGAARTATFLGERYHRIARRRGKARAQVAVARSILVIIWHLLSDPAARYADLGPGYYQARLDTDRKLRNHIRQIQALGFDVALTKTA

SEQ ID NO: 358232 - protein, 347 aa, unidentified
MNQIIRIGMDTSKHIFQLHGVDGAENPVLRKRLGRRAMVDFFAKLPPTVIGIEACGAAHQWARVLVPLGHQVKLIAPQHVKPYVKRNKNDGRDAEALCEAMSRPTMRFVAVKTAEQQAALMLAGIREQMIARRTQGSNMIRGYAAEFGITAAKGLNQIEPLLARLAQDESVPKLARDLFATQGRDYAQLQVELKAIEVKLRVWHRANDDSRRLAKIPGVGPIGATTLVMKVPDPRAYPSGRHFAAWIGLTPKDHSTAGKTRLGKITRAGDERLRSVLVAGATAVIQQAKHGRGHPSPWLIALLKRKPPKLAAVALANKNARIAWKLMVTGESYDGARMPEASVAAAA

SEQ ID NO: 358233 - protein, 392 aa, unidentified
MTCFIGLDLSKFKHDCFIMNEHGEVVRNAFSFTNDQEGFNTLLNVLNDLDPFQEKRIGFESTGHYGSNLKLFLEANGYSFMEFNPLLVNRFFKSESLRKTKTDKVDAQKIALYLYSRDYKPNPNSSYHLQCLKSLTRLRESVVDERSLQLVRITNIMDKMFPEFKPLFDKQGLKAATAMYLLENYGSPSKMANMTLASYHKMASKLRRTISYAKFCKIKELAKSTIGNENEVLSFELEVCLELFKELDQKVLQLDNKIIFELSLLNTHISSIKGIGDVLAAGILAEYESIDKFDNPAQLTAFAGIEPSENQSGTHDGGGRMVKHGSPHLRRYLIQAANNMLVHNPVLYEYYLKKRSEGKSHNVAISHVARRLTRIIFYLEKNNVDFDINKMR

SEQ ID NO: 358234 - protein, 353 aa, unidentified
MSNYITIGMDLGNRKHTVCAINGAGELLWRTEVINTPEALKPFFEENAGATVAMETGLCCRWISALAKRCGCEVLVGNARKLAPIWQSMQKSDENDAFMIAKLARFDRGLFHPVSLRDDERHEMVQILELREVAVSQRTQAVNSIRGLCKAMGVFIPDCDATRFHKVAKDAIPRDLSWKFLPMLRQLKETAETIRQYDAMLKRYASGHFGEEVALASSIPGIGPVTSCAFVALVGDAKRFGKARDAGVYFGLTPARDQSGDRDAPKRVTKAGSKMMRRLLVTAANYVMRTSSPDTAIKRHGMRICARGGKIAKRKAKVAIARKLAVVMLAMLRSGRPYEDGLAANVPAKPDAA

SEQ ID NO: 358235 - protein, 347 aa, unidentified
MNTTTVGLDIAKSYFQVHGVDEHGKATLQKQLRRAEVLRFFANMPACLIGMEACGSAHHWARKLGELGHQVKLMPAQFVKAYVKTNKNDARDAEAICEAVSRPNMRFVAVKTVAQQELLMLHRVRQRLVMDRTAKANQLRGLLAEFGIVMPQGLHRLRHLMPEVLADAENGLSCRLRERFSDLFGHLRELDVTVIEWERQIVAWHRENPLSRRLDKIPGIGPLGASALVASMGDVRTFKNGRQLAAWLGLVPRQDSSGGKTRLLGISKRGDRYLRTLLILGAQSVLRQMQRHPPRAQSWLGRLTARSHPHIAAVALANKNARIAWALLAHEREYQADYRGRVALAVA

SEQ ID NO: 358236 - protein, 291 aa, unidentified
MNVVALDAHSRSIAAASLDLGARGARTVVRRFSTDPTGIQKLAMQLYPEDVLLLEASTNSFWLHDQLSGHVNRCHILNTRKVTLQGNKSDSLDAKRLVQLLATHVTLATEDEMPTVYVPKAEIRELRALFAGQRSYRKVITQTKNRLHSLFRQCGIVFPRARMSTSAKWHAAIESHPLPSGLDFIARGLLRQLRVAEMESQSLLQQIIRKGLATYGQEVRLLMTIPGFSATTALTVLSDIGDIQRLAGVKQFSSNLRTCPSLHASNRTVHLGGINKASPHCNSLDPECESP

SEQ ID NO: 358237 - protein, 339 aa, unidentified
MKPTVIGMDIAKHVFQLHAVMAQTGEIQRIKLKRNQVIEFFTRREPSLVVMKACGSAHCWARQLMSLGHDVKLIAPRSVRPFVLRNKTDAADARAIWIAAQQPDARFVAVKTEAQQAILALHRLRAQLMKFRIMQTNALRGLLYEFGEVLPEGYRAFADNISACLARVADRLPGLLVDSLREQWTRVQAIDGEIAVLERRLAQAFRNNEDCRKLSDIPGVGLLTATAMAAAIGDARNFKSGREFAAWLGLVPRQIGTGGRVRQLGLSKRGDTYLRTLLMHGARSVVLRGKHSDWVDALLSRRPFNVAVAAVANKLARTIWAVLAHTDRYQSIQAAGLTN

SEQ ID NO: 358238 - protein, 342 aa, unidentified
MEISTVGLDLAKSIFQVHAIDAAGTAVVRKALRRAQVVPFFAKLPRCLIGMEACGTSHHWARELARLGHEVRLMPPAYVKPYVKRGKTDAADAEAICEAVTRPSMRFVPVKSAEQQAALALHRTRDLLVKQRTQLVNMVRGLLAEFGIETARGLHHALSLAARLSAGDAPEVPALAQRVVKGLADQIGALQVQLDLLEKDLLAWHRSNELSQRLATIPGVGVISATALAASVTEPERFRSGRQFAASLGLTPLQNCSGGKERMGRISRMGDRYLRRLLVLGMTSLVRRARSTPDAVDPRFVAMLQRKPVRVVTVAAANRTARVAWAIMTHGGTYRTPPAAAA

SEQ ID NO: 358239 - protein, 338 aa, unidentified
MMCYAGIDLHATNSVLVVIDEADRVLYQKRLRNDLAVIFTALTPYQTTLQGVVVESTYNWYWLVDGLMEAGYRVHLAHAPALPQYSGLKHVDDQHDAQWLAHLLRLGLLPTGYIYPKAERAVRDLLRKRSQLVRHKTMVVLSLQSLLTRLTGNRLSLPRLRQLTPEGIQALVPFPEHVQSVSSSLAVLQCLEHEIHTIEGTVREAGRTQPGYVLLQTVPGIGPILAGTILLEAGDLRRFATVGHFASYCRCVGSEHVSNGKRKGAGNTKNGNKYLSWAFIEAAHFAIRYEAVIRPSYQRKQARTHPLVALKAVAHKLARACYHMLRAQVPFDLSRAFG

SEQ ID NO: 358240 - protein, 321 aa, unidentified
MEQEKVYVGIDIAKASMDVAVHQSEQQWSFSNEDRGIIQAVSCLHELAPALIVLEATGGIEMPLVAALAAARLPVVVVNPRQIRDFAKATGKLAKTDILDAKVMARFAATVKPTPRPLPDEQAHEFADVLARRRQVVEMITAEKNRLSSARNKVVRRHIKDHIAWLERALVDTDNNLRRSVRESAVWREKNDLLRSVPGVGPVLSATLLADLPELGTLDRRQIASLVGVAPLNCDSGNFRGKRAIWGGRAKVRTTLYMATLAATRYNPVIRAFYQRLCSAGKDKKVALTACMRKLLTILNAMIKHRTPWRYGSAYIIGPCS

SEQ ID NO: 358241 - protein, 340 aa, unidentified
MSKIYVGIDLHSNNSYFAVVDESGKRLFHKRFSNNKVDILKAMKRIEEFGDVLEIAIESTYNWYWLNDFLEDHGYKVSLANPAAMTPYTGLKSTNDKTDSFFLAEQLRLNVLPKCWKCPKDDRPVRELLRARSFLVEKRTSLKNSLVLLFQRYTGNRYSFQKIESLLPISQFELAEDSLFRVNQLLKLIHEMSKSINEFERRAMGKLQLKPEYKVLRSIPGVGPVLALTIMLETGDINRFAKSGKYTSYCRCVNSHKISNGKNKGINNKKCGNRYLSWAYAEAAVNAKRYCTEANGYWQRKVAKTANKVLAYKALSAKLTKACYYMLKNNEEFDRKRIFS

SEQ ID NO: 358242 - protein, 401 aa, unidentified
MDAIDHYETVDVFIGVDVGKGEHHAVALDRAGKRLFDKALPNDESRLRALISGLKEHGQLLLVVDQPATIGALPITVARAEGILAAYLPGLAMRRIADLHAGEAKTDARDAAIIAEAARSMPHALRSLRLDNEQLAELTMLCGFDDDLADQITQTSNRIRGLLTQIHPALERVLGPRLNHPAVLDLLQRYPSPTKLASLTEASLANRLRKLAPRLGKALAHEIRQALSEQTVVVPGTNASTIVLPRLAHQLAELRRQREEVALEVEDLVHAHPLYSVLTSMPGVGVRTAARLLTEVAAKAFASAAHLAAYAGLAPVTRRSGSSIRGEHPSRRGNKVLKRALFLSAFAALRDPVSYSYYARKISQGKRHNQALIALARRRCNVLYAMMRDGTLYQVKPITNP

SEQ ID NO: 358243 - protein, 356 aa, unidentified
MSSDIKYIGLDVHKEAIAITVLNGAGNLVMESIIETKAATLVQFLQGLRGELHVTLEEGAWAAWLYDVLQPRLHELVVCNPRRNALLKEGSKSDKVDARKLAELLRAGMLRPVYHGENGLGTLRELARSYQTISKDLRRVMNRLKALYRSWGIPCSGTRVYAQRDREQWLNKIAHAGVRRRAELFYQHLDGLQVLRRQARGEFLAESRKHKAVKVLRQIPCIGPIRAALLLALMQTPHRFRSKRQLWTYSGLGVKTHDSAQHCYLDGRLQRSKRPQQVRGLNQNHNHEMKEIFKSTAMSASRCGGPFVDFYAGLLAKGMKPEMARLTLARKIAAITLTLWKKGGRFDADHLKAQAA

SEQ ID NO: 358244 - protein, 400 aa, unidentified
MISVGIDISKGKSTICILKPYGEIVCRPFEMQHVEKDLEAFHGLLQRLDGEIRIVMEATGIYHLPILTFLHDKGYFVSVVNPFAMKKYAKDNSIRGAKTDKLDSMMIANYGIEKWFKLQKYEGAEETYAELKLLGRRYRYYMDLHVKALQELTHLLDYVMPGIKKMFNSWNEANGKDKLSDFVERFWHFDLITSMSLEKFTEEYIAWAEEKKYHRSRSKAEAVYELSSSGIPTLSSGTPSTKMLVQEAVSTLRTVDSSLSLILTRMQTLAKSLPEYSTVREMGGVGDVLAVKLIAEIGDVRRLHSAKALIAWAGIDPPPYESGQFIGSKRKITKRGSSTLRKVGYEVMRVLKSHPAPKDDAVYNYILKKESEGKSKKHAKIAGLNKFLRIYYARVTEIYQ

SEQ ID NO: 358245 - protein, 379 aa, unidentified
MSRQQTALAVKLSALMNKTITGHSISQASLVNDVNRVLNLGLDVHYRQVTVAMQEDGGRIKAAGKMGYVDFLNWVGKKLAEGWEIHSCYEAGASGYWLHRDLAKLGIKNLVVVPKAMGQGGKKQKTDKRDAGELCDCLDRYLRGQDKALSVVRVPTEEQEQKRALIRYHRQIMADRGRCEARGKGLLCAQGIQVDGRWWHDNGWLAVQSDPRLKDWMKEQLSAWRQKILSTDEEQGALRERIAALAPAILPKGVGAYSAAVLHYEMRGFERFSNRRQVGSMTGLCPGIHQSDGRGKEGSINRCGIGIVRWTLVEMVWRLMIWQPQYPPVRRLAAGLVKGKRARKRLVVQAARRLAIDLWRLSTGQTTPEKLGLIMHCAK

SEQ ID NO: 358246 - protein, 322 aa, unidentified
MTSVADTPTSYLGIDVSKDKLDLAVEGQPDVLAFANDAAGITRLIEQVRPLRPILIVVEATGGYERPILNAALDAGLPIARMQPGRVRHFAKAQGLLAKSDGIDARLLALYARCLQPAVSEKRSKNQLELHALLVLRRQLIETRTALTHQMQMADSSFVHSTLAKLLRQIHDRIKLVEKRIARLIDSDDDLSGRRDLLLSVPGVGKTTAATLAAQLPELGKINRCQISALVGVAPYNRDSGKWAGKRAIFAGRAAVRSVLYMATITAIRCNPVIRLFAERLQKAGKLPKVVIIACMRKLLTILNAMARDGLTWSPKCQLQRA

SEQ ID NO: 358247 - protein, 393 aa, unidentified
MICVGIDVAKDKHDCFILSSEGEVLAGVFTIPNNRDGFETLLQRIRSCAFPADKIKVGLEATGHYSYNILGFLLDCGLATYVINPLHTNLYRKSLSLRKTKTDRIDARTIAAMLMSDVNLKSYTDTAYHNEELKSLTRYRFDKVRQRAKLKQSVSRLVNILFPELETIVPTLHMASVYALLSEFPGAQQIADTHLTHLKTLLDDASKGRYDREKAVEIREAARRSIGSRMPAKSLELRHTIQLIRELDREIAEVEDSIEEIMNSIQSPITTIPGMGLRMGAMILAEVGDFANFDSPDKILAYAGLSPSTYESGKLSLAGAYSHMEKRGSRYLRYAIFNATKYVCHWDSTFAAYLAKKRAEGKHYNVAISHAAKKLVRVIYSLQKSGQAYQTAA

SEQ ID NO: 358248 - protein, 297 aa, unidentified
MSGSIKTFANDDAGFDTLLANLAEQAVDLIVMEATGGLESNLACALQAAGFAVAVINPRQARDFAKAMGYLAKTDRIDAKALAELAQVLARSPERDRVVTALPTPEQQALQALVARRRQLVAMQVAERQRLSVSHAAARKSIEAMIMAIRTQLDEVETELAKHIETHHAGLALRLSSVRGIGPTTVATLIAEVPELGQLSRREISALIGLAPFNRDSGQMRRKRAIFGGRGQVRRGLYMAALAAIRFNAVIKQFYDRLVSPGKPKKVAIVACMRKLLTILNAMVRTGKAWDDSLHTA

SEQ ID NO: 358249 - protein, 424 aa, unidentified
MKVTYQTCCGVDVHKSFLVATIVKTTGGIEPSYQKKRFSTFNNSIFEFKQWLLDNDCRDVCMESTGKYWVPVFNLLEDEINVVIANPKWVKAVKGNKDDTKDSKWIGDLFRLGLVKGSYIPCKIVRILREYTRYRCKLVSCRSSEKNRYQNALTVCNVALDSVVSDIFGKSSTSIIDYLLEQSGTSINHEEIASKLLRSLKSKEDAVIESVEGYQMTDAQKYRMRLVRAHMDYITAEIKDVDKMIENMISSNPDFENAVQFLCTIPGVKCDSAITIISEIGTDMSQFSSSKRLCCWAGLTPGSNESAGKKKSVRITRAGVYLKPALVQCAHAAVKSDQSPYYKKKYESLVKRRGKKRAIIAIARMILTAIYQMLSTGEQWNPSDLYKIDVPEALIEKQKAKAIKQAKKLLQREGLLPPDEPAAS

SEQ ID NO: 358250 - protein, 346 aa, unidentified
MEEQIVFGVDSHVRSLAVCGVDGAGRRRCAREFANSGVEHQELLAWARRQAPWGRRFGIEGSGGYAFALAQFLVAAGELVVEVPVSLTQRERSHQRSAGKSDPSDALAIARVTLREEALPRLRRAGAARDLKLVYDYRRALTVERTRTANRLHADLLALAPGYRDQARHLASPRMLAVAARIVRGDERMQAQLARRRIARIRELDREIKQLEREIKSLVEASGSGLPRLCGIAHLNAARILGEVGDVRRFTTRDAFAAANGTAPIPASSGQTRRFRLNRGGNRRLNYVIHIMALTQLRVDPRARAYIARRRAEGKTTTEAMRSLKRHLSDVIYRQLRNDANDASLT

SEQ ID NO: 358251 - protein, 416 aa, unidentified
MKVVYQTCCGVDVHKSFLVATIIKTTSGVEPSYQKKRFSTFNNSILQFKEWLVKNQCRDVCMESTGKYWVPVFNLLEDEINITIANPKWVKAVKGNKDDTKDSKWIGDLFRLGLVPGSYIPCKPIRILREFTRNRYKLTSCRTSEKNRYQNALTVCNVALDSVVFDIFGKSATSVIDYLIEQPDNSINHEEIASRLLRSLKKKSDSVIESIEGYQMTDSQKYRMRLIRAHLDYITSTINDIDTMLNSLIAPYENAVQLLCTIPGVDRNSAITVISEIGTDMTPFSNSKRLCCWAGLTPDNNESAGKKKSVRITRAGVYLKPALVQVAHAAVKSDKSPYYKQKYERIMKRRGKKRAIIAIDRMILTAIYQMLSTGEAWNPTDLYKTDMPEPLKEKQKEKAIKQAKKLLIREGILSES

SEQ ID NO: 358252 - protein, 399 aa, unidentified
MAQVIIGVDPHKLSATIEVVDRREKLLGSGRFSTDQAGYTAMRTYAKAWPDRVWAVEGSNGAGRPLAQRLLEAGEHVVDVPAKLAARVRLFDTGHNRKTDARDAHSIAIVAVRTTTLRVLRRDGELEALRMLCDRREELTRLRVQTVNRLQRLLAELVPGQAKKDLTAPQAKAILATVRPRDIAGKTRRKITAEELADLVAVETKMKKATAELKVLVAARGSRLMDLPGVGPVVAARTLADVGDIARFADRNRFASWTGTAPLDASSGEQNRHRLSRAGNRRMNHMIHIAAISQIRLDTPGRAYYRRKQAAGKTKLEALRCLKRRISDAIYRQLLADAELAAGTGPGGHCGASKESSAVDLPPHIDTSDQPLPGPANPTLQPAQPTRKTSRPRSPQTTG

SEQ ID NO: 358253 - protein, 407 aa, unidentified
MDLLKTVFGIDVSSRKSNVCIMVNGQKVDDYAISNDMVGFNQLLDDLKQVTKPQIIFEATGVYSRRLQAFLDMHELRYVMMNPLEAKRKTKDDLHQNKTDKLDALYLAKLQSEHPQRLTYVQSKEYQELMANNRIYEQASHDLITNRNRLHKAIQLTFPEIEHLMVNPRGKNYWSIVLRFPHPDIVLETKEADIIDFLKGLSGIGKKRANDIMQSLIRLAKVACPAVKKDSAHIRGLEMAINNILSAEEACQTALKEMTKLAPKRDLEILTSIPGIGENTALRIISELGDIRRFNNPSQLNAFVGVDPQVYESGNLTAHLSISKRGTAIGRKVLYLAINQIQSAKKAGNPSHIADYYEKRKRSSETASHKKAAIASIHKLLRTIFALIKNDQLYSYDVAKHNQRLLS

SEQ ID NO: 358254 - protein, 400 aa, unidentified
MLLFFEVITMIFVGIDVAKDTHYAAVSDDSGAVLVKPFAFQNNAEGFCLLLKKLSEFDRSKLLIGLESTGIYSENLICFLYESGFRLAVINPIQTATLRKTAIRKTKTDKVDTMLIIKSLMVNSYRLYSLRDADSLKLRTLCRFRQNLKKSKARLKIQLAGYVNLVFPEFGKFFKSGIHIAASYALLKKYSSPKEIAALRTSTLCTLLSKASHRRFGKDTAEALKSLAISSVGVKNPYISIQIAQTIAQIELLEQQIKDLNSAIEEAMESINSVLMTVPGIGAVNAACILGEIGDIKRFSKPCKLLAYAGLDPTVRQSGQFTAKSTRMSKRGSALLRFALINSAWQLTLNDTTFKAYYDLKRSQGLNHYGALGHVAHKLTRVIFKLLTSDTPFNPAKLVA

SEQ ID NO: 358255 - protein, 346 aa, unidentified
MKITTIGIDLAKEVFQIHGVDVHGKAVLRKRLRRSEMVRFFVNLEPCLIGMEACGSSHYWARKLCEFGHTVKLMSPQFVKPYVKTNKHDMADAEAICEAVSRPNMRFVPIKNVEQQAILSVHRARQGFVKARTAQANQIRGLLSEFGIVIPQGIRSIHKRIPDILGDAENGLPGSLRPLLEKLNDHLKELNRQVEELELQIRLWHKENEASQRLEAIPSIGPITASAIVATVGDATEFKNGKQLSAWFGLVPKQRSSGGKQKLLGISKRGDTYLRTLLIHGARAVVRFAENKAESESWLRKLIIRRNKNIAAVALANKNARIIWALLARDTKFHPDHTLALVAARA

SEQ ID NO: 358256 - protein, 355 aa, unidentified
MEKIYIGVDFHARQQTICYLTTNTGEILFHQLLHQDKAAVRAFYAQFSGHVIVGLEASGYSPWFERLLEELDCEIWLGHATAIRQRARCRHKNDRRDAELILDLMLHDEFPRLYLPPLQSREVLRMLRYRQKLIKIRTIGKNSLQALALQAGLAKGPHLFTKAGLQEFRQAPMSPAMQWQREQWLQLLESLNQRLLETMLWLKQQSQADERISRLRTHPGVGLLTALCLVHSLEPVSRFRNTRKVTAYVGLDPLERSSAERQRFLGISKGGSRVLRFLLVEAAHTAIRKDAALKRFYQRLAERRGRPKAKVAVSRKLLVRSYIMLRDEIDYAEFQRRAVAARPARPAHGLQCPAP

SEQ ID NO: 358257 - protein, 350 aa, unidentified
MPQRNMPRPAAVYGIDIGKNIFHVVGPGNDGVPVQKVRFRRDTLLQFFERAAPAIVGMESCAGSQWIARKIQALGHKVRLIPAQFVKPYVKSNKTDIIDAEAIAEAATRPTMRFAALKSEEQADLQALHRVRDQMIGTRTRLINQMRAFCLEYGIALRQGAGLFKVDLPHAVEDQSNDLSSAMRKLLADLFADLRQLEQRIGDVTCEIEAVASREDVARRLMTIPGIGALGATALLAAVGSGKQFHKARDLAAWLGLVPREYSTGGKQKLLGISKRGNRYVRKLLVHGARSCFRHLDRTKDRLGNWLDGLQARMHPNKAVVALAAKMARIVWVVLTKPGALYERRDPAFT

SEQ ID NO: 358258 - protein, 319 aa, unidentified
MHCIGVDVSKQELVTFDGKKERIFPNSRSLPEFRRFVKRTENAFIVFEPTSTYSRRLETFCRMQSILCCQLNPRVVPHLRQVGRGRSKTDSSDAELLYRYGIERGHNEASELSHDPLSESIQARLACYRVAQKARVAYQGLYEALENDPATSRTLLAELTTEIAELKNREQRYLVAAQLTVEEDEQARRQLTALLSIPGIGPITALTLLALFGKYPGANRSQIVALAGLDPIQFQSGTSVHGKTRISKRGNRELRKRLYQATLSAARYNPTVKALHHRLKVQGKPDKVARIAAARKLLLIAHAIYKSGESFRDPNQKEA

SEQ ID NO: 358259 - protein, 331 aa, unidentified
MSFKAYVGIDVSKLKFDVYIKEKESYKQFKNDKSGFIAMVKWLQKLIEPGLVETFICFEHTGLYSLPLALFLSEEQIPFAMVAPLEIKRSLGITRGKNDIVDAKRIADFAYRFHDKINVTKLPASDLNKIHLLLTLRDRLSRNLGSYVASKNETERALGEQYLPELFTSYDTIIATIKAEIKRLENEIKEIIEQNEKLATSMQLLTSIKGIGVLTAAYLIVYTDNFTKFDNWRKFACYSGIAPFDYQSGTSVRGRTKVNSIANKQMKRMLSITAICAIRFDTELRDYYHRKQAEGKPKMLVINVIKNKLIARAFAVIKRGTPFVNTKKYAA

SEQ ID NO: 358260 - protein, 455 aa, unidentified
MAKQKIHKTPAIETVNVGAAAVDIGSREHMAAVNPEVTDAPVRAFGTFTHDLHDLANWFKSHGVTSIAMESTGVYWITAYEILEQQGFEVILVNARYAKNVPGRKTDVSDASWLRQLHSYGLLRGSFRPTAEIATLRAYLRQRERLVEYAAAHIQHMQKALMEMNLQLHHVVSDITGVTGMKIIRAIVAGERDLDVLASHRDVRCRVSTETIKAALNGNDRAEHIFALTQSLELYDFYQSKMLECDRRLEATLAALGADTAHDPSELPRPRTKTKQVSTPSFDVRAALYGVLGVDLTQIHGMGPSLSLKLVGECGTDLRAWPSAKHFTSWLCLAPGNKISGGKVLSSRTRRSSSRAAALLRLAAVTIGRSDTALGAFYRRLAARAGKAKAVTATARKIAVLFYNALRHGMTYQDPGASHYEERYRDRVLGNLKRRAKSFGYDLRELPPEEQMTVS

SEQ ID NO: 358261 - protein, 354 aa, unidentified
MSAKYIGLDVHQATTVAAVRDGQGKLVMECIVETKAATLLEFLHGLRGELHVTLEEGSWAAWLHDVLEPHVQRLVICDPRKNALLRQGNQNDKIDARKLAELLRVGMLSPVYHGDNGLRTLRESARSYLTLTEDVTRVMNRIKAVYRSRGIACTGQKVYSAPHRGAWLVQLREPGLRRRAERLYQQLDQLQPLRLAARREMLQESRRQPANRWLKEIPYVGSIRAALLIAFMQTPHRFRSKRQLWAYAGLAVVVQSSADHRFVNGELQRTRKNSTVRGLNDNRNPQLKNLFKSIALGASVRSGPWHDFYETLLHRGMKPALARVTLARKIAAITLTVWKKGEHFDPKKLNLQAA

SEQ ID NO: 358262 - protein, 387 aa, unidentified
MTQVDNLSRSVDAFDQNASLTVVVEMSEARWLVTGMVPGVDRRPLKKLEPDPDALLRLVERWRSEAEKTGRTIERVALAYEAGRDGFWLARWLRVRGIEVHVIHSTSVAVSREHRRAKTDRLDTAMLMRVFLGWLRGERGHCGMVAIPTLEEEDAKRPSRERESLVGEHTRIVNRMKSALARLGIRGFKPKLRKAPERLAALRTPEGSAIPANMLDEFRRDMARLAVVREQIEEIEQARLERLEQAPAARPNAMVHLLARIIGVGIETADMLVREVLSRNLRDRRAVARYAGLTGSPDESGSKRREKGLARAGNARVRRGLIQLAWRLLMFQKDSALARWYRARTEGPKGARKTTMIVALAQKLLIALWRMVTTGVVPEGFVLRQIA

SEQ ID NO: 358263 - protein, 415 aa, unidentified
MALKIVYKICCGIDVHKTFVVACIASTNDKGITSYESHRFSTYTSGLKTLLQWLLDRNCKDVCMESTGKYWIPVYNILESDCSIVLAHPKYVKAIRGKKTDKKDAKWIADLFKHDLVAGSFMPPADIRQLRDLMRYRFKLTCFKSSEKNRLQNCLTVSNIQLGNVVSDTFGKSAQAILDKLLENPADTSFDLEPLVYKSLKKKLPELRDAIDGYITPEQAGKLKVIKAHYENLESRKAELEELILALAAPYQQELAILQTAPGISSDFTAIGIISEIGTNMEAFPSAKHLCSWAGLTPTNNESAGKKKSVRVSKAGCYIKPLLVQCANAAIKSKKHPEIRDRYLRIKKRRGHKKAIIAIARMLLTALYHMLKNGENYNSDLYKKSDILPTTREITVEQAILMAQFQGYRIKSATE

SEQ ID NO: 358264 - protein, 268 aa, unidentified
MTFRPHALHLKAELFVKSSRVHVRDDGFTRCNFHLKFFIMVSRGIDISKSSFVAAYPSTNGNPTKTFPNTTARMRELIGTLAVAEHHCVMEATSNYGCCCTCYIRTVLPSVLPPKKQIKHFSRMMMPVTKTDEKDAYMIAMYGEKMNPPIYKMPSQATIRILTTEGFTYFDNAKQLSRFIGICPTYQQSRTSVNIREHINRNDDERLRSLLYIAFWTALRYNSRECYIRLKANEKPFKVALIAVTNKLVRPVLTITTINSIYRWICPG

SEQ ID NO: 358265 - protein, 376 aa, unidentified
MGTPSAQTLDDVGVREIFQELEEVPLMTMVGGLDVHRAQITFDYVDDDGLVHWGQIRAATRKTLRGWLAEHCPDGDAEFALEGCTGWRYVSEELAGAGVGVHLGDPAEIAVLRGPKKRAKTDRADARLLRTLLLQGRFPESWIAPAHVLEIRTLGRLYCTLMDERRAWQQRIHAQLFHQGCPPVRALLSVTGRAALAGAELSAVGGQYVDTALGRIDELSTEIEPLRAQLVNFARHQTGCQALPRHYGIGWLCAAIIWAEIGDARRFSSSDQLVRFAGLDVTVYSSDGKRSPGHLSRQGSPELRWAAFEAAKCAARRGSPDYGYYRKLAAKRDGHNGKNPTLAVERKILRRCHHTLRELGDAAVALPVAEPQEVAA

SEQ ID NO: 358266 - protein, 318 aa, unidentified
MAQQVWTAGIDVGKARLDVALWPRAPRTEWFARDAEGFGLLIDWLREHNVVRVGLEASGGYEREVLDALEDAGFVAVLLNPRQVRRFAQAKGRLAKNDRVDARTLAEFVAKMVDEDPVRRDRSRDRLIEHLSFRRRIQDWIHDCDDLLEHLRDPALRKTTRARRTGLARELARQDARIAALIAGQPDWAETARRLRTVPGVGPVLAHTLIGLLPELGRLSGRAIAALVGVAPFDDDSGKRSGARKIHGGRKVVRDVLYMAALSGKRHNAVLAAFAARLKGKLNKVIIVACMRKLIVILNAMSRDGCDWRAPGQTAVAA

SEQ ID NO: 358267 - protein, 322 aa, unidentified
MGHVLTKQKLTRSQLKQFISTTPPCRVAFEACPGSQYWGRLFQQAGFEPKIIPAQFVKPYLKSNKNDFNDATAIAEAGSRGTMRCVPLKSHEQLALQATHRVRQRFIVERTATVNQMRALLLEYGLTVPVGRKVFERALPAILEDAENGLPDFIRALVLRLRERWQQLDIQIDEMSLMLGQASSASSLCQKVSTVPGIGPIVSTALIAAIGNGSQFKKARDLSAWLGLVPRQYSTGGKSSLGGISKRGNSYLRQMVIQGAKALKIHMKRDKSSLGEWVARLEVGHHHHMVLIALANKIMRICWKVLTSGRDYQPYPNASAAV

SEQ ID NO: 358268 - protein, 347 aa, unidentified
MVIIGCDFHPGFEQIAMVDSSTGEIRHLRLAHKEEARQFYAGLVGQEVLVGVEACGYTQWFEQMLEGMGHRLQIGDAAAIRASYVRKQKTDRRDAGHILRLLVEGRFPSLWVPSSVERDARQLVVHRHKRVQMRTRVKNQLHALAINQGLRLRWQLWTRGGRQQLEALELLPYAAARRAGLLRQLEEMDGEIARLDEAVRKEAEARPAAVRLMSHPGVGPVTALAFVLTIGDVRRFEKARQVASYLGLIPSERSSGGKQRLGHISKQGNPLLRFLLVEAGHSAVRGDAELRRCYVRLQHRHSTGVAKVAVARKLALRLYWMLRNQTDYAQLQVGPYAGKPGSSCGRK

SEQ ID NO: 358269 - protein, 345 aa, unidentified
MSIVGGLDIHRKQVTFDYLDTATGEVKRGQITPADRKHVRAWLARFAGRGDVAFAVEGCTGWRYIAEELAAAGLEAHLAEPADTAAARGRKRHAKTDKTDARHLRTLLAEGRLPECWIPPEHILEYRALLETYHDLRAEHTAWVQRIHAVFFHQGAPRLGEGALRTEQGLAALRAAAAAHLSPAGQLQVATALDMLAATEARLQPLRHQLREAARHLTGAKVLAARLYGAGPVTALALTCWLAGAGRFSSSRKAVRFTGLDVTVWSSDRKGPPGRLSRQGPPVLRWAVYEAGKTHGRAAAPDHAYYAAVKDRKNGKRAALSEARKIVRQACHILAELGDDALTAT

SEQ ID NO: 358270 - protein, 357 aa, unidentified
MENRKYVGMDVHQASISVAVRDETGKLIIESVLETKASTILEFLHGLRGSLWVTFEEGTSAAWLYDLLKPHVARVIVCDPRKNALLNAGNKNDRVDARKLSHLLRAELLTPVYHGESGVRALRELARSYLTINKDLTRVMNRLKALYRSWAIPCAGQKVYSPRHRSAWLEKLPDGGVRRRAEQLYQQLDILVQIRRQARKELVTESRKHSVEPLLRQIPRLGPIRVALLIALLQTPHRFRTKRQLWAYCGLALQTRSSGEYRFTGGQREPTKKAPALRGLNVNHNHDLKNLLKSAATHASTSTDALGEFYRNLLAKGMKPAMARLTLARKIASIVLTIWKKGARFDPGQLKPQQVRA

SEQ ID NO: 358271 - protein, 347 aa, unidentified
MIEGRKQTVSTGEQRPGGALELVLGVDTHLDAHVAVALDQLGRRLGAAILPTTAKGYEELLSWAEGLGPVRRAGVEGTSSYGAGLARYLSSRGIEVLEVERPKRRWRGTRGDGKSDQADAEAAARVVLAGEAAGVPKSSDGEVEMIRVLRAARRAAVKARTQAANQLKTLVVTAPDGLRGRLRELSTKALVATAVRLRPGERPDNPEEATRFALRSVARRYRALSEEIAELDAQLARLVAEASPGLVALPGVGTDHAATLLVAAGNNPERLRSEASFASLCGVSPVEASSGKVVRHRLNRGGNRDANRALHSICVVRMGWDRRTRAYVARRTTEGKSKREVMRCLKR

SEQ ID NO: 358272 - protein, 340 aa, unidentified
MRVLYAGFDLHGNSNYLGIMDGEGKRVFRKKLLNDLPWIREVLVPFKEELVGIAVESTYNWYWLVDGLMEEGYRVHLANPSAIQQYSGMKHSDDRHDAFWLAEMLRLGILPEGYIYPKEERPVRDLLRKRGHLVRLRTSLVISLQNILSRNLGRKVNVNDVKALREDRVVPLLEGHEDLALAGRVSKEAIDFLTHQIRRVEGVVLKKITLREAYRYLLTLPGVGKILALTIMLETGSIGRFATVGDYVSYCRKVPSQWTSNGKRKGSGNRKNGNKYLSWAYSEASELARRYDLEPRAYYHRKMQKSNAAVAHSALAHKLARAGYYVMRDQVPFDPGKLFK

SEQ ID NO: 358273 - protein, 357 aa, unidentified
MWAGIDTHKDTLAVGVIDEVGRALAVREVANTTAGFVSLERLFAEHQVVRVGIEGSGNYGRAVAAHLVIAGGVEVVEVPPALTFRERGGAPGAGKTDPGDAVAIARITARELRLPPVRLTIGAAADLRALLDYRQQLIDERIRIANRVHVELGGLRPGYQSQLPSLIGRNRVATARRLLRGDTNTRAELTRRRLDRLSRLDVEIAALKTRIAVLVTASGTRLSSLFGVGPLVAARIMAEVVDVRRYRSPDAFAAANGTAPIPASSGRTVRHRLNRGGNRQLNKSLQIIAVTQLRGDTEGRRYYDRKRAAGKTRREAQRCLKRRLSDVVFHLLREDLHALQAQPQPTQTGQPSSSAAA

SEQ ID NO: 358274 - protein, 341 aa, unidentified
MFGIGTVNTYHEGMMSDYTYIGIDVAKNTLCCSIPDRKPFNISNNVKGIKSLVSRASAIDDPANLLFVMESTGGYSEFTADALDDLADAKSSIVPPARIVGFRQAEQINTKNDPTDAGIIRKFALKHNPQPWLQPTQAQRHLRRLNTQMENLTKAIAQQKCVREKLEFAYRPDEFAIASVDRVIRFLNEEIDRLQAEFDRTVADDEAMATDAANMLSIPGVGPKTCNMVLTLLYPHLREKSDRKLLKQCGMEHKDHQSGIHKGYTRMSKAGDGRVRRALILAARGTVRKGGIYHDYYQRQKASDKEGMVIMVNVMRKLLYLIKGVVRSGKPFDMQVILNGG

SEQ ID NO: 358275 - protein, 341 aa, unidentified
MKNKSFIGIDISKNVIDASIFCEGAPIKDFPHAVFNNSRKGFGEMCTWLKKNHVVLSNCLFGMEFTGSYSMELEKFLTARKYQFCMLSTHTVKHYPMGPKDKNDKIDSAKIADFLYRYNGTECVKPYKMPDKTMQRLKTLMNERKFLVEQRTCFMNRRQLCTTKEDTQLYDGYIKKLSRDIENIELEEQKLLATDESLLTTYRNLLTIPGIGSVNAINVIVITRNFTAFETARQYASYVGVAPHFRTSGTSVRWRPRPSARCDGQAKADLSMAALITVQYDAELQSFYNRKLGGKQDSDTKRKALNAVKFKLILRMFAIGKQNRKWETLDSMSNNEILAIS

SEQ ID NO: 358276 - protein, 430 aa, unidentified
MKSNTQNAKIEAITEKTLVLGIDVGSEMHYARAFDYRGIEYSKKPFKFSNTEAGFVTFKEWILDLKERHEKDKVVPGMEPTGHYWFNLGKFLQDNEMKPVLVNPHHVKKSKELDDNNPTKNDRKDPKVIAGLVREGRYMIPYLPDGVYADLRTASNIRFQLQAELTRIQNRISRWFNIYFPEYKTVYGKPDAKSGMLILKAAPLPEDILTLGIDGVNQIWRDAKLRAVGKARAKTLIEAAEHSVGSKEGAVSARMEIRMLLEDYESRSIRLQEVMTLIEGLVKQIPMAEKLLEIKGVGIRTVSGFLAEVGDISRFNNPKELQKLAGLALVENSSGKHKGETTISRRGRKRLRYLLFEVAMSLVAKNPEFRELHNYYTTRRLNPLKKMQSLMAIAAKLIRVFYAMLTKGVDYDPKKMVSDIKRPAVYLQAA

SEQ ID NO: 358277 - protein, 343 aa, unidentified
MKLFIGLDVSLAKTAVCVINEYGKIAKEAQVPSDPQAIVDFANTLEGAVAIIGLEAGPLSQWLHRGLADAGLDVVLMETRQVKGALKAMPIKTDRRDAEGIARLLHMGWFRPVHCKSVSAQEVRALLAARKAIQQGMIALELSLRGLLRNFGLKVGAISRGQFDARIRELVDGNAMLQAAAGPMLRARASLRQELAGLERQVRLLAKDDAVCRLLMTMPGIGAVVALTFRSAVDDPARFSSSKKVGPWVGLTPSRNQSGERDVIGGITRAGDANLRRALCQAATVMIHRGRSTWLRSWAAQVAKRRGAKRAMVALARRIGTILHRMWRDGTEFSIVPLIAKSA

SEQ ID NO: 358278 - protein, 449 aa, unidentified
MTMPAALPVLDPLAAFVDVGSEQMYVSIAGGPPAVFGAVTAELHRLRDWLQEREVKSVAMEATGVYWLPLYGVLEAAGFQVVMVNGKHTRNLPGRKTDMKDCQWGATLHAHGLLRAGFVPPAHIRRLQDYLRLRTDHLTSAAASVQHQQKALERMNVKLHDVISSLVGASGQKVIEAILAGERDPDRLLALCDVQIQKKKAERVKESLRGTWAEEHLFALRQAVEDWQHFQRQIGACDRQIEAVLRQINGPGDTPPAAGPKGLAAKRPGVNAPQIEGLHGLLVRLCGGKDLTVLPAHTDYSLLQLLGEVGTDLSKWATEKHFTAWLGLAPGSHQSGKRKGSVGRKRNRAGRLFCVMGRSLARSKHIALGGYYRRMAGRRGGLVANIALARKLAEWFWRVMVKGVGYVEQGLAQYEQQVLETKRRALQRLAKQLGQVVLPSLAELQTAQP

SEQ ID NO: 358279 - protein, 409 aa, unidentified
MEVIYPRCCGLDVHKREVVACVVTTESDGMPSKTIRAFGTMTPDILALADWLAAHEVTHIAMESTGVYWKPLWNLLEESFALLLVNARHVKAVPGRKTDVRDCEWLADLLRHGLLTGSFVPDRSQRELRELTRYRTSLVRERTAAANRLQKTLEGANIKLASVATDILGKSGREILAALVAGETEAAQLAQFAQGRLREKIPQLERALVGCIGTHHRFLVAEQVAHVDFLEESIARVNAEIAERVRPDEDAITRLDTIPGVGRAVAEALVAEIGSDLTRFPSAKHLASWAGLCPGNHESAGQRHSGKTRKGSPWLRACLVQAAHAAARTKGTYLAAQYRRLAARRGRAKAAVAVAHSILIIAYHVLTEGTAYRDLGGNYFDERDRQGVERRLVHRLEGLGYTVSLHLAT

SEQ ID NO: 358280 - protein, 343 aa, unidentified
MQTITTIGLDIAKTVFQVHGVDAGGQVIVRRQLKRRYVVPFFQKLSPCLVGIEACASAHHWSRELQALGHTVRLMPPAYVKPYVKRQKNDATDAEAICEAVTRASMRFVPTKTLEQQSGLVLHRTRHLFIRQRTSVINAIRAHLAEFGIVAPVGRHGVEELLTVVADPSDKRVPDIARACLLALGDQLQSIKKQILEFDRLIRAWHRSNEMSMRLEAAPGVGPVLATALVAAVADPKSFRSGRNFSAWIGMVPKQHSSGGKNRLGNISKQGDRYLRGLFVAGALSVIRYAKIHGTKHRPWLTSLLARRPTKVAAIALANKIARMLWAMMARGERYKEPVALAR

SEQ ID NO: 358281 - protein, 433 aa, unidentified
MLKLNYMSTLFVGIDVSSKTNAVYAMDFEENKYLSTSFGNNQPGADELVNRIAACMQKHKNLDTLLIVLESTSVYSVHISNFLASSEVLMPYKPYVFCVNPKATANYRKSYIGMEKTDPTDAYLIADFARVGRTKKLEPWRGGQFIALKRLTRHRMHLSECITREKTYMVSNLYLKFSELQLLEGDDKPFGSLYGATSSAILTEFLSPQEIIDMPEEDLLAFLAQRSRNRICDLSKTSELLRKAARDSYRLDKCMYEPLNISLASSFNCIQAYQKEIRLIEQAIEKCINGMNPNALLILQSIPGIGPIWASGILSEIGDITVFHSSDALAKYAGLYWPKGDSGDFTSEDNKMSKAGNPYLRCYLGEAANSVRKHIPEYADFYARKYAEVTKHQHKRALALTSRKFVRLVFGLLAKNQLYTGEKLDTEHNTESN

SEQ ID NO: 358282 - protein, 430 aa, unidentified
MISAAVERCAGIDVGKMFLAVCLLIGLLDGEPRMVKRRFGTTIAELERLRDWLKQEGITHVVMESTGSYWKPVFNVLEGTVKVYLANPQEVKNRKGHKTDDKDGWWLAHLLRHAMIHPSFIPPRPIRELRDLTRRRKRLLSDATSEKNRVQKILEDANVKLGNVLSDVFGVSGQLMLDALLKGEAQPEEIAQFAKRNAKKKIPEIIQALAGHRMSDHHRKMIRYSLKHLEFLEGQIGEMDRDIASKIREAGLVQEWELLQTVPGIQERSAAAILAETGPDMDQFPSSKDLSSWAGVCPGNNRSAGKNKSSHTTGGNPWLRGALTECAWAAAAKKNCFIKEKFWRITSKSKGKKAPAVVAVAHTLLVLIYQVLRTHQPFQDRQAPPLDERQRQRLIRHHIRRLGKLGISVPHYVVSAPLEEKTSRRCRPGS

SEQ ID NO: 358283 - protein, 408 aa, unidentified
MNTLYVGIDVSSKSNVVYLMLPNGDKHSNFSVANSHEGSTLLVKKIYSALTSHSLDTVLIGLEATSVYGDNLVYFLREDATLAPFNRKIHVLNPKQVKKFHDTYNDLPKNDYVDSFVIADCLRFGKINKEVYMGEYRYKALQNLTRARFFAVQNLVKEKQRFMNVLFKKYSTMTQEKVFSDAFSTTALAVYDEFESAEALANMDLHELTDFIIEKGKNRFPDPDAVAKAIQKAARSSYRLPKTVNDSVNQVLSISITSMKALESQIKEFDKAIKAQMELLPNVLISIPGIGPVYSAGIMAEIGDINRFNSQAALAKYAGLAWKQHQSGGFESEVTRLIPSGNRFLKYYLCEAAFSLVRCDKEYSDFYRLKYKEVNRCQHKRALALTARKFVRLVFRLLKDNRLYCPAK

SEQ ID NO: 358284 - protein, 412 aa, unidentified
MRWKSCSTGSPGLDVGKETVTVCLRTPGSKGRRHAETRTFKTMSGSLRVMRDWLVGAGVSIAAMESTSTYWKPAFYCLEEVMEVWLLNAAHMKAVPGRKSDVRDAEWIAQLLEHGLLAPSFVPPPEIRRLRMLTRYRVQLMGDRRRDIVRLELMLEDASIKLSSVASSLKTVSARAMLTAMINGETDPLRLADLAKGRMRRKIPDLAQALTGHFDANHARLARSMLRRLDLVEQAMAELDQVIVEACQPWARQIELLQTIPGVGEKVAQVIIAETGGDMSRFPTAAHLAAWAGLAPAMNESAGRQSPAGKRHGNKWLTAMLVEAAGSVGRMHGKNYLAAQHARLMKRRGMGRAQVAVAHSMLVSAYWMLKRDEPYHELGADWHRRRSEEAHTRRLVAQRERLGHTVIIDPAA

SEQ ID NO: 358285 - protein, 345 aa, unidentified
MIIGCDFHPSWQQVSWMDTETGETGEKKLVHATGDAKTFYQQLEAPVLIGVEATGNSQWFVELVEDLGHAIWIGDAAQIRASYVRKQKTDKRDAAHILKLLVEGRFPRLWTPDREQRDLRQLVLHRHKLVEIRSRVKNELQHLSMNKGMQRKGKLWSQTGQKLLRELPLKPWAACRREDLLGLLAMLDQQVGKLDDAVQQAAGQHPQARLLMTQPGVGPNTALAYVLTIGDVTRFPRGKQVASYLGLIPREESSGGRQKLGAISKQGNGLLRSLLVEAAQIAVRYDPGYRKQYLHRCHQKPKGVAKVAAARKLAVRLYWMLRTQTAYPEIVRIESSPRVPLVGAS

SEQ ID NO: 358286 - protein, 449 aa, unidentified
MSKSGKVIGLPIVNVRAAGIDIGSRIQVAAVPPELCDNPVRTFQSFTADIEQMANWLVSIGITTVAMESTGVYWIPVYEILEAHGLTVVLANARDCKAVPGRKSDVNDAQWLQRLHACGLLRASFQPAREIAALRAYMRIRDRHLEYASAHMQHMQKALTLMNLQLHHVISDISGVTGLRIIRAIVAGEQDPDVLASMRDVRCHESLQTIRSALVGNYQPEHVFALSQALGLFDAYQARIADCDKQIESSLRVLNADRPQLETPLPAPRTKTKQANAPKFDVRSMLCQLTGTDLTVIHGIGPSIALSLVAECGTDMSKWPTEKHFASWLCLSPGCKISGGKVLSAKTRKSSSRLASQLRLAASNVGRTETALGAFYRRLAGRIGKAKAVTATARKLAILFYRAMRFGMRYEDPGVDQYEQRYRERVVKQLQRRAAHFGFSLQPTEVGVS

SEQ ID NO: 358287 - protein, 415 aa, unidentified
MRVHHKCCGLDVHKKMIAACLLTEDAEGNSIAEKRLFGTMTRELHALAQWLCAAQVTAVAMEATGVYWVPVWNVLEHYGLQLLLINPEHYKAVRGRKTDLKDGTRIAELLQDGRLEGSYVPPVAIRVLRDLTRYRIKLVQYQSALANRIQKLLEQGNIKLASVASDALGVSAMAMLRALAQGETDAVRMAEMAKKQLRKKIPQLQLALEGCLLPHHRLLLRELIEDLDHVAAKITRIEATIEQQMRPFQEAVNRWLTVPGIKHRLAWSLVAEVGPTVEAFPSAADIVSWAGVCPGNNQTAGKRKSGTTRAGNPWLRRALCEAAWAASKSKGTYLQAQFRRLAALRGPKRALIAVANSILTAGYYMLQRATTYQELGPDYFDKRNTLRATHRLVKRLEALGHRVILEPRFIAVPSS

SEQ ID NO: 358288 - protein, 338 aa, unidentified
MGQYVGIDLHRRSTTIHRMTEDGETLGVEKILSQPFELAQAIAAAGPEPEVVLESTYGWYWAADVLKDAGAHVHLAHALGNNWGNRRVKNDKHDAQDLALLLRIGRLSEGWIAPPEIRELRELVRYRHSLGRHRTSAKAQIHGVMAKNGILPVVAELWGPIGQAQLDGLELPEAYALRMRSLRELLAHIEREITKIDAQLHHRLKSDPGYQALVRLPGVGKVLGAVFVAEIGDISRFDSAKKLCSWAGLTPKHKESDEVVRRGAITKQGSRLVRWAAIEAVGNYRAKGNEKIRADYRRIAERRGKYKARVAVARKMVTLVFYALRDGEVRCLETATAA

SEQ ID NO: 358289 - protein, 337 aa, unidentified
MKYSGIDLHSNNSMVVVSDEADRVLVRRRMPNDAAAILALLAAHREELVGVVVESTYNWYWLVDALQAAGYRVHLANTAAIKRYEGLKHSDDEDDAAYLAQLLRLEILPSGYICPPAWRAVRDLARKRMQLVRSRTAQVLSVENMLSRETGAGMRSYAVQRLTSHAVASFGFHQDVGRALCANVAVIQTLNREIDKLEQRLRQCVGLRPEFRLLTSVPGIGQTLATLIMLEVGTIERFAAVGNFASYARCVDSARLSNGKKKGQGNVKNGNAYLAWAFVEAANFARRYCVEARRFYERKKARTNGVVATKALAHKLARACYHMLKENTPFDVKRCFA

SEQ ID NO: 358290 - protein, 355 aa, unidentified
MTTSEKRNTLFVGIDVHKDTHTAVGVSPFGEKLFEIKIGNYEKDFVTLSKKVEENRGTLSPYFGLEDVHGYGERLAEYLCNDGQKVFQVSSILVDRQRQNNTHPEKSDSLDAYGVAEVMIKKIDTLPIYTITEESEKAKRVKDVSHDREYLAHERTRLKNNLHNILHKIWNTEYREKFKNPFSKKALTYWLKTKVPCDPFTLRTMKRKVKRLISVNEEVRELEKDLKELLEGYTIQTASGCGTVVAGVIVGEIGDIARFDSPASLAKYAGCSPRECSSGKRNHHTKTKSGNRRLNCAFHYMALSQISRSGNDKAKLYFKRKVSEGKSKSQALVCLRRQIVNIIWNMMKKNEVYRP

SEQ ID NO: 358291 - protein, 308 aa, unidentified
MELFVGIDVAKETLDVCVRPDMIRKQFLHNEQGRSNLARLLSRLKPVLIVLEASGGYEIPVVEVLALRTLPVVVVNPRQIRDFAKATGRLAKTDTIDAEIIARCGEVLRPEIRPLKDTDTRRLQALIARRRQLVGMLTEEKNRLQIAPSWTKADIDAHIAWLTECINKAGKDISDAIKKSPLWREKENLLRTFKGIGQVNASTLLARLPELGRLDRKKIAALAGLAPINRDSGKYRGRRTIFGGRADVRAALYMAALTAIVHNPTIKAFYQRLMHAGKLPKVALTACMHKILLILNAMVRTNTPWCAA

SEQ ID NO: 358292 - protein, 339 aa, unidentified
MELKRVGLDLAKNVFQVHGVDGQEVVRCRRQLRRSELLKFFADRPPCLIGMEACAGAHYWARELTKLGHTVKLMAPQLVKPYIKSQKNDANDAEGICEAVGRPNMRFVPVKTVAQQEVQSAHRIRSELIRQRTAKANQIRGLLAEFGVVVERRIEVLRRALPKLLEAEAGNGLSEPTRRLLEGLRGDLVQLDERVGALDTEIKRVAKEDAACVRLQTIPGIGPLTASALVSAVGDGRQFKNGRQLAAWVGLVPKQDSSGGKTRLLGISKHGDTYLRTLLIHGARAVQRTCATKTDARSHWLRELGTRRHRNIAAVALANRNARIAWVLLTRDEVYEAPA

SEQ ID NO: 358293 - protein, 451 aa, unidentified
MSPRKSDATLSLAHPDAAGIDIGSASHFVAVPSDRDEQPVREFKSFTADLYRLAQWLKDCGITAVAMESTGVYWIPLYELLDSQGFTVYLVNARHVKNVSGRKSDVLDCQWLQQLMSYGLLAGAFRPSDEICVLREFSRQREMLLASQVRHVQHMQKALAQMNIQLTHVLSDVVGVTGQAIIRAIVEGERDPHVLARLKKRQVKASEDDIAAALQGNWRHEHLFALRQALALYDTYQQLLNECNQHIQAELQKLHRHDGDPGKSQRRWPKKAMAFDLRTHLFAMCGVDLTRINGIDEMTAFTVLAEVGPDMSRFPSAKHFASWLGLCPGTRISGGKVLNGATKRSPNRAAQALRLAAMALRHSQSALGAYYRRLCARLDKRRAITAAAHKLARLIYTLLAKGAEYVDQGELYYEERHRQRVLHHLTKRAETMGYSLVPLATPEKANEISTA

SEQ ID NO: 358294 - protein, 378 aa, unidentified
MTQKRCENKTQSRNVLRALMAEVRPKRRYARMKVLIGVDPHKASLAVAAIDEATGELLERASFPQDCTGLRCLDRWAKRFPERRWAVENAGGLGRHLAVRLAASGESVVDVPPKLSARVRVLSTGNARKNDRLDALATALAASRTERLASVDPEAASEALRLLSERREDLVAERTRALNRLHALLRDLLPGGVAGKLSADRAARILRGIRLKEGASARLRRGLASEVLRDIRTLNRKIADLDVRIEAEVQASGTTLTEVFGIGPILAATIIGAVGNVERFPSKGHFASYAGTAPVEASSGEVVRHRLSLAGNRKLNYALHMVATCQARSEVRGGSYYRKKMAEGKSRKEALRCLKRRVSDAVFRSLLADSRAHSQSAA

SEQ ID NO: 358295 - protein, 407 aa, unidentified
MEVVYRCCCGIDVHKKVIVACLVNGGEQELREFGTTTSEIKTLANWLTESGCEMIAMESTGVFWKPLYNLFELMDLDAMIVNAAHMKALPGRKTDVKDAEWIADLLRHGLLKASYIPNREQRELREITRYRKSLTEERCREVNRLQKILEGANIKLDSVVKDITGKSARKLLQRIIDDDIPDSDEVSKLVHGRMRPKLDQIVASIEGITTPLQRKLLAQIIDHIDDLNRRIGELDKLVQEYMAEYEAAIEAIDEIPGIARRSAEVILAEIGLDMGRFPSVAHLCSWAGVCPGNYQSAGRRKHGKTTKGNKALKTILTQCAKSAKTVKSSYFFAQYQRISARRGKNRATLAVAHSMLIAIYHILKNKTAFHDLGSDYYDSFNRDRKINSYLKRLKALGWEPDAIPSSA

SEQ ID NO: 358296 - protein, 338 aa, unidentified
METYAGIDLHSSNNYIGIINEQDQRLYGKRIPNELDRVLMALEPFKKELSGVVVESTYNWYWLVDGLKDNGYKLHLANPAAIKQYEGLKHTDDKWDSFWLAHMLRLGILPEGYIYPKEGRPLRDLLRRRLLLVKQKTTHILSLQSMINRNLGVRMSGNAIKKLKEADAEELFNQTHLLLTAKSSISVIRFLKEKISIIEKEALALLKPHHGFNYLQTIPGIGNILGLTIMLEVGDIDRFPTVGDYSSYCRCVKSERFSNGKKKGNGNRKNGNKYLAWAYVEAANFAIRYCPHAQKFYQRKKAKINGIVGIKALSNKLARASYYIIRDQVPYDAKKLFG

SEQ ID NO: 358297 - protein, 349 aa, unidentified
MEHYVGIDVSLELSSVCVVDVGGKIVAEAKIESHPDAIVNFLRRLGLSIERIGLEAGPLSQWLHAGLTKGSFETVLLETRHVKAALSAMTVKTDRRDARGIAQLLRMGWFRPVHCKSPGSQEVRALLVARKQLLGKLLDVEFSIRGILRGFGLKMGIVTRTGFEGRVRELCAGQAMLEQIAEAMLAARAALRKEYSKLHKAMLALVRRDAICRRLMSAPGVGPLVAITFKTAIDDPARIRKSKAVGALLGLTPRKYQSGETDVTGHVSCVGDTMARTALYEAANAILSRVTRFSALKRWGMDVAKRRGMKRAKVALARKLGVILHRMWMEGTSFRWTKEASQAPQIARA

SEQ ID NO: 358298 - protein, 341 aa, unidentified
MRSYLGIDAHSNTGLELAALSEDGKLLWRDRCSLDSEQVVQVAQRAPRPCTVVFEQGELATWLHLTLRNACDEVLVANPRHNRLIATSPDKDDPHDAFVLAKLAAGGYLREVFQPAEKFTVLRLRVRHHYRLGRHLTAVKNQIKASYRTQGIRVSGTSVYSAASRDQWLQRLPGPAHLPAEDLYAVLDVVQARKDAALRALARAVRQFAPAKRMLQVPQIGPVTAATFVGYLVTPERFPSRKHLWSYCGFGLMARKSGHRAEPTRLRTAYNRHLKRVIKSTVERQIARSPTSPFAAAYQTRVQRGMLPTRAKLTVSRKLIDVLCVLWTDQEDYDPDRINID

SEQ ID NO: 358299 - protein, 362 aa, unidentified
MAKCIMVGCDLHDKTMLLKIAVDRGQAVTQGWSTGASSRRAMMADLRRRAEQAQARRMVFAFEACGFGFRLHDELTANGIEAYVLAPSKIERSPRQRKRKTDERDAQLLLDKVRAYVLAGVEMPSVWVPDVCTRDDRELVRMRLAVAEDAAAAQTRIRWLLKRNGIESAPANPWTGSYCTWLTGLGEHGLAEGAAAALASLLRQVEWLWSEIERLDTQVLALSRTERYAALVAALSAQKGVGVLTAMVYLTEMGDLSRFANRQQVGSFLGLVPSSFESGVADDRKGHITRQGPARVRKVLCQSVWSRLNCLASERIAYDRIVARNPKHKKIAIVARMRALGVTLWHKGLAVQRAAQAVATPR

SEQ ID NO: 358300 - protein, 454 aa, unidentified
MIAAVVERCAGIDVGKRFLKVCVMVGPLSEEPRYEIGKVDCTSTALEGLRQWLKAEGVTHVVMESTGPYWVPVFNVLEADVKVVLANPAEVKNRKGHKTDAQDCWWLAHLLRHGMIRPSFIPEKATRDLRELTRRRKNLVQQVAQERNRVQKQLEYGNVKLGNELSDVFGLSGQLMLKALVDEKRTAEEIAELAQGSLKKKKPAIAEAVRGNRLSDTQKEMIRSSMRHMTFLELEIEQLDELVAGLIRESGQQKPHELLQTIPGIKQEAAGNLLAETGSDMKQFPDAGHLSSWGGICPGNNESAGKHKSRHTTHGNPWFRATLTECAWSASRTKGSAFEAKYESLKPKIGHKRALVAVAHLLTHAIYYVLSRGEAYRETKPKELNEIQRHRIIRHHTRRLRRLGCWLPAEKLTPLQEWYVTHRIPEMDPPLPKRRGRKKGQVLNKGTEAGTVNP

SEQ ID NO: 358301 - protein, 314 aa, unidentified
MTARWVGIDVAKAELEVAVWPPSGEHLSVPYDEAGCDTLLAAVRAWQPAGIVVEATGGLEVRVGSVLAAAGLPVIVLNPRQVRDFARGLGHLAKTDRLDAQLLAEVGAKVQPVRRPLPDEATRELQALVARRRQLMEMLTAEKNRLGSAVRQIQPQIRKHIRWLEAQLQQSDRDLDGALRHSPVWQEHLELLQSVPGVGPVVSRTLLAYVPELGTLTRKTAAALVGVAPFNRDSGTWRGTRHIAGGRAPVRAQLYMATLAGLRCNPLLRAFYARLVAAGKPRRVAMVACMRKLITLLNAILKHRQKWVAPPAPC

SEQ ID NO: 358302 - protein, 343 aa, unidentified
MEIHTIGIDLGKSLFHLVGVDSCGSVVIRKRCSRSQLLAYTANLRVQRIGMEACSGSHFLGRALRDQGHDVRLMPAQYVKPYVKTNKSDYIDAEAIAEAVQRPTMRFVPIKTEDQLDLQAVHRVRERWVMRRTAVVNQIRGLLLERGLTLPKGRCYVDQALPDILEDATLRLSDSFRLLLAQLKLELDQLTARIEQMDAVLQHTAKDNEACQRLTTIPGIGPVTATALIAAIGNGSGFRRGRDLAAWVGMVPREYTTGGKQKLLGISKRGNSYLRKLFVQGARAVMQRRHNQAPELSAWLAQLLVRTHQNVAIVALANKLLRMAWAVLCKNETYRPPALVPSS

SEQ ID NO: 358303 - protein, 424 aa, unidentified
MNFTQNEKLNQVTADTLIVGVDIGSQTHFARAFDWRGVELGKRVFKFSNTGVGFLTFMKWLYEMQQRTAMKKIIVGCEPTGCYWLTFQSFLEKQGIKLVTVNPYSVKKSKELDDNSPEKSDLKDPKTIAGLVKDGRYSISYIPTGVYAEIREASVCRDQIMKQHVRLSNQIQGWLQKYFPEYLECYSDFDSTSGLMLLQYAPLPHDIVKLGAGGINEIWRNAKVRAAGLKRAQTLVEAAGNSVGLDGGEAAKLEIWILVNDYIAKKQQMERLDEYLAQKVMEVPNVEKLLAIKGVGLSTVTGFIAEVGDIGRFTDPKQIQKLAGLEITKTSSGKKKGQPGISKRGRSKLRRTMYESAKALMNWNPAFADVFLYYRNRTRNPLGGMQAKIAVACKAIRVFYTILKTGCDFDEMKFREDIIRPEAA

SEQ ID NO: 358304 - protein, 390 aa, unidentified
MIYVGIDVAKDKHDCCVLGSDGEILFSPFTIQNSLQGFDELYEKIWSLTSDLTEIKVGLEATGHYHLNLLRSLLDNGLPSFVINPLHTNLYRKGLSLRKTKTDKVDAASIAMMLLTDRTLKPYSDTSYHNEELKSLTRYRFDKVQERARLKTSVSRLVSILFPELEKLVPTLHMPSVYALLSEFPGASFIASTHLTRLKHLLYDASKGHYGRDMALTIRDAAASSIGSVMSAKSMELKHTIHLIQVLSAEIDEIEHAINAIMDTLDSPITTIPGIKNRMGAMILAELGDVSRFDNPDQILAYAGLSPTIYQSGQLTSSYAHMEKRGSRYLRYALFNAAIYVCHWDPTFKAYLAKKRAEGKHYYVAISHACKKLVRVIYRMQLTGEPYRVA

SEQ ID NO: 358305 - protein, 312 aa, unidentified
MDAIAVGIDVAKDQLDVCVRPSGESFVVDRSGAGIEALTERLKRLRPRVIAVEATGGFETVVAAGLASADLPVVVVNPAQVRAFAQALGKRAKTDLIDAAVIAHFVEATKGEPRSLPDEMTRLLADLVARRRQIVEMMAAEGQRARRITDKRLKKSIARLRKALEKELAEIDGEIDDNVRGSPVWAEKEDLLASVPGIGPVIARTLIAELPELGSLDRRKIAALVGLAPWTRQSGQWRGKSFIGGGRKSVRSALFVAAMVASRHNPTLKAFRDRLDAAGKPKLVALVAVARKLLTILNAILRDQRPWQPQTA

SEQ ID NO: 358306 - protein, 350 aa, unidentified
MLHAGLDLSRKRLDVCLITEDGEIAGRVAAPPDADGLRGLVRRIAPCGEPVHAVIESMTGARFVHDTLEELGWEVLIADAQKVKGLAPLACKTDMIDAQVLAVLSHRDLVPAIWLPDPRVRREREQARFRLHLVKHKSSLKSRIHSTMITFGHPCPVTDLFGVAGRELLDRLEVPQPWRGTIDASLELIDDLERQIAQINTQLRAGGADHPYVPLLLTVPGIGWVLAFTIAAEIGDITRFPSPKKLCGYTGLCPRVHQSGERDRRGPLTKQGPKYLRWAMLEATMHALRHPAYNERYQRNKQRLGKQRGAKVAQIDVARKLTEAIWHMLTNNESFAPTTAPRGAAFRLAA

SEQ ID NO: 358307 - protein, 333 aa, unidentified
MNYIGLDIHKKNTQACVKNDMGKVLMNVRFPSDSKDINEFLDKIEPLGAASIVMEATGFCMYIYDIIEARGHDVKVAHPFKVKALTAGRAKTDKNDAEMLAELLRLNAIPESYIPPKELRELRELTRFRQSLVRSSASIKNQVHAILAMRGIKTPPPLRSHFSKKHVKWLRSLEIVQLDDFLDIMALIDTKTAKADEDIGRICHDDEDVQRLKTIPGIGDVTATSFVAEIGDIHRFDSPEKLASYAGLTPIVRQSGEKTWAGPISKRGNATLRYLLIEAAYSHVNSSKESKLTRFFERKSQAKGRKKAIVATSRKMLEVIYYMLKRGEAYHAH

SEQ ID NO: 358308 - protein, 479 aa, unidentified
MGSRRLVGIDLGIASDHTVRVLAEDGREVCRRRCRPTVESLTLIEQAALAGADPGTRLEVVFEPTGPAWLPIAVFFTARGHLVFRVSSAKAADLRRFLSRHAKSNGIDADTLARLPLVAPDAVRPLQLPDVEVAALDRRVRAVDRLTRLASEHKVRIKDLVRQLMPMTPLTGDLGAADLAVLERWADPRALLKVGRARLTAVIVKASNNHLGVARAEQWREAAAAAVELYGDHPAIAWSDLAAEVVTEVALLRAVQTQLAQHAAACEEAYRWVDVGQLARTLPGVAEVSGPVLAAAIGDPRRFPSGRHFKSFAGLAPKASETGETDRKGQPMSKAGSSLLRVTLIRAADHARKHDPQLARVYYQQMVERGADHLKANCVVAGHLAERFWAVMRRGMPYVICDTDGTPVTAAQAKQIIAQQWTVPPEVRSRRRSKKAGKAPHQAPAGHAKPDTQRRRHTRRPSPPTILTTGIDDVKQPAT

SEQ ID NO: 358309 - protein, 418 aa, unidentified
MHEIQTWFAGVDWASQKHDVWLTDASGKRLGKRTFAHSGEGLAQMCDWLIATSGGKPEDIHVAIEVPHGAVVETLLERGFKVYSINPRQLDRFRDRFSPAGAKDDSRDGETLSSSLRTDRRAFHQVALAGPAIIELREWSRMADDLSADKIRQANRLREQLQRYYPQMLQFDSDLAEEWVLKLWETAPTPVKAARLRQTEVAELLKRHRIRRISAAEVLAILKQQALVVAPGVTEAAVAHIRMLIESIRLFTQQLKEAHRQLDRLCKLLAEPITSETEQTGQEREQTLVAILQSLPGAGRIVLSTLLAEAFETLQRADYAILRLLCGVAPVTRRSGKSCAVTRRLACNPRLRNAIHYLADAARRCDEKSKAKYLALKARGCSHARALRTIGDRLLYVACTMLKNGTLFDPCLESQKCA

SEQ ID NO: 358310 - protein, 419 aa, unidentified
MSFKIIKNNCCGLDVHKTWIFACIGITDSNNRTEYKQARFSSFTKGLNELCDWLAKYNCNDVCMESTGKYWIPVFNILEQRSLWVTLSHPKYTKPMKGNKTDRKDAKWICDLYMCGMVKPSFIPPADIRELRDLVRYRFKLTCMITGEKNRAQNCLTVSNLKLDDVFSDVFGKSSRSITEQILQHPGETFDVAPFVNSRCKTPIVEIQAAIDGAISKEQAVKLRQCLDHIDELNKHISEVEQEILRLSDKYEVALNLIRTVPGFDKNPLTAIQVLSEIGGDMSVFPTAKHLVSWAGCCPRNDQSNQKIKSTRISRAGSYFKPVLVQVANALIKSKKHSEFTNRYKRIKARRGHKKAIIAICRMILTAIWHILSDLKPYTPEGFLESRPVKEEKVLSTSQALNLLKQRGYIIKDEPLAVS

SEQ ID NO: 358311 - protein, 308 aa, unidentified
MTTIYTGLDIAKLNLQLHLLGRRHDLPNTAAGHRRLVKLLAALPGAHVICEATGGYERDLVAALHDARIPVSVLNPARVRHFARATGQRAKTDPLDAAILTAYGQALQPPPTAPRTPQEHHLSELIRRRVQVLALLVAQRQQAQRLTVPALRRQAQSLVRRLERDLKQIETQLGQLQAQAKALDERVQKLIAITGVGTITALGVLAELPELGTLNRRQAAALAGLAPHPRESGQWHGRRRIGGGRAPVRRALYMAALVAARSNRQLKAFYQRLRAAGKPAKVALTAVMRKLIILMNHTLKNPNFVPQN

SEQ ID NO: 358312 - protein, 350 aa, unidentified
MELATMNTEYVCGIDLHSRSMYICVMNQKGDIQLHRNIRNNFQFFKSLIDDYSGNISVGCESMHSYYWLADGCIQNNIPFYLGHAYYMKTIHGGKKKNDKLDSKKIADLMRANHLPVGYVYPKIFRPTRDLLRRRIRFMTIRAEAYAHIQTTFRQNCLIISPKDVKNKKTRRELIIKIQNKDIQKSIELDLDVIDNFDSLLKPIEAEIRAQAKLHDRTSLNLLLTIPGIGNMMSLVILYEIGDISRFNSPQNFSSYCRLVICDRESGGKKSRGGFQKIGNPYLKWAISEIIIHAPSTSPVIKNYYEKLIDKSGKKRAQRIMTHKFGVAIYYILKNKQGFNEQKFIQSDMK

SEQ ID NO: 358313 - protein, 377 aa, unidentified
MSCFAGLDVSIDETAICVVDGTGAVLLREQVATDPATIAQVLAPWMADLCRVGHEAGSLSLWLHPELKRLGLPVVCVETRHVRAAMSAQRNKTDAADALGIAQLMRTGWFRQAHIKTEASYRIRLLLTQRRNLKRKFLDLENTIRHSLKAFGVRLGSVGRGGFAQAVRDAVARDPMIAGLMEAMLRARDALWAEYLILNKLAVQLAMGDALCRRFMAIPGVGPVTALSFSSAIEDPKRFRRSRDVAAYFGLTSKRWQSGTSIDVKGRISKVGDSDVRRALYEAASALLTRFKGADRIKSWRLKLAKGKCHPKARVAVARKLAVVMHAMWRDGTAYVGELTAGTQENDAWLAAKVQRLSFTRSQDDEFASRLMCSRRR

SEQ ID NO: 358314 - protein, 373 aa, unidentified
MKTNITHVAMDTHKKQHQVAWVHPDSGEIQEFTVANTAREIERMVKKIRKQAGGEIHICYEAGVCGFVLKRRLETLGCVAKVIAPSLVWRKPGDRVKTDRRDAKKLLAQFVAGQLTEVFAPDPAQEADRELTRCRESAQTDLKRARQRWNSLLIRHGYIYREGTLWTGKHSEWLKALVFDEATLRTVVEEYSSEVAHCLARVQSLDQQVESLAQSPRYRAAVGVLRCLRGIDTLTAITLLTEIFEFGRFDSPRALMAYLGVTPSEASSGESRRPGAITKTGNRRVRRILTEAGWHYRHPYTVSKALKARRKDQPAWAVDLADRAAKRLYRRYRHLIERGKAAPVAIMAVVRELAGFIWAMLRQLQPPTDSQPG

SEQ ID NO: 358315 - protein, 346 aa, unidentified
MFLIGCDFHPSWQQVCWLNRTTGETEENKLVHAPGEVERFYRQFPAPARIGMESTGNCQWFVELVTALGHELWIGDAAKIRAGDSRQQKHDKRDARLLLRLLMEQRFPRIWTPSSQQRDLRQLLVHRYKLVLLRMQAKNGLQHLALNQGLQKKRRLWSRAGQKLLSELPLRPWASRRREDLTSIVKLLDQQIQLLDLAVIEAAQKDANARLLMTQPGVGPITSLAFVLTMGDISRFRRGKQVASYLGLIPREYSSGGHHRLGSISKQGNRFLRMLLVEAAQGAVRCDPQFRSEYLHRCHEKPKGVAKVAAARKLAIRLYWMLRTQKGYPEVVSIESSSRVPLVGAS

SEQ ID NO: 358316 - protein, 353 aa, unidentified
MVVVKDHQQREPSMGDITTIGLDLAKSVFQVHAVDEAGTVMMRKRLRRSQVLAFFAGIPSCLVGLEACATAHHWARELISLGHEARLMPPNYVKAYVKRNKHDVADAEAICEAVRRPSMRFVPVKTAEQQSALMMHRARDLLIRQRTMLVNALRGHLAEFGLIEAQGLHKVARLIAIVMDETDGRVPDIARQVLKMIVNQIEDTQTRIAGLETQVLAWHKSNPVSQRLATIPGIGPIIATAIAATVADPNIFRSGREFAAWLGLVPRQNSTGGKARLGGISKRGDSYLRRLLVNSAHTVLLCSKQAKTDPWLKSLLGRKPRLVVAVALANKTARVAWAVMSRQGIYRHAPAAA

SEQ ID NO: 358317 - protein, 339 aa, unidentified
MLIIGCDYHPSFQQIAFLDTETGESGECKLVHKEETERYYRALQRGSVRVGMEATGHGRWFERLLAELNFELWIGDPAEIRAKRVRKQKTDRQDAEHLSRLLVESRFPRIWVPSPEDRDLRQLLWHRHRLVQMRTRVKNQLQAIALNEGVRRKKGLWSKQGRAQLEALVLAPWSSRRRQDLLELLDRLNPKIDQLSAAIQQAAEQRPEVQKLMTHPGVGPITALAFVLILGVPERFGCGKQVGSYLGLIPCEASSGGRQRLGHISKQGNTLLRFLVIESAHAVVRYDPDWRGQFLRLALRRGRAIAKVAMARKLAVRLYWMWRKGWDYQQMAKFGSHVG

SEQ ID NO: 358318 - protein, 347 aa, unidentified
MTMLADLVDVVIGVDTHTDTHTAAVVLAGTGAAVAELTVSTDSAGLRSLLLWAQLQPGRRCWAVEGTGSFGLGLTELLEAHNEDVIEVERPHRAARRHGAKSDSIDAVRAARDALTLEHRIVPKHGPERAALAALLTVRRSAVDAVREAHQQLGALILTAPQALREQFAKATTDHKLAIATALRIPPRADVRTRATITALRTLARRAISLTKEAKTHEKALLAIVKSWRPELLDQYGVGAIVAATVLCAWSHTGRFRSDAAFATLAGAAPIPADSGKRSGKYRLSRYGNRDLNSALHIIAITRIQRDPTTRAYVERRRAEGKTDREIRRCLKRYIARQLYKLLETAP

SEQ ID NO: 358319 - protein, 425 aa, unidentified
MNSPLEIAAFIGLDWADQHHVVRLRAAGSAQIEARVLDQKPESLRAWIQELRQRFQGRPVAIALEQSRGSLLYALMNVDFLRLYPVNPQNLAKYRKAFCSSGAKDDPQDAQLLLEMLEKHRDRLRVWVPDEASTRCLRLLAEHRRKLVNRRTALTNQLTSLLKESFPQALDWAGPLDRLRACDFLEQWPSLEALQKASPAKLRRFYQEHSREDSDSIRLRLEQIRQAQPLVSDPALLTASTLMIQALVGQLRSLIESIRQFDQQLKERFQQHDDYTLFHSFPGSGPVFGPRLLSAFGSDRDRYQCAAEVQNLSGIAPVTEQSGQSHWVHWRLACPTFLRQSFHEFAAQSVHHSLWAQAYYHQLRAHGSDHHAAVRTLAYKWIRIMFRCWKDRTPYDEARYITSLKRRGSPLFRVLSSQLQEVPCE

SEQ ID NO: 358320 - protein, 461 aa, unidentified
MGRNKSKDKDRRTMLVVHPNAAAIDVGATMHMAAVNADCTPEPVRSFGTFTTDLHRLVDWFAECGVNTVVMESTSVYWIPIFELLDARGFAVFLVNARDAKHVPGRKTDISDAQWLQRLHSFGLLRASFRPKGQIAELRAYVRQRERLLEYGASHIQHMQKALTEMNVQLHHVVTDITGATGLRIIRAILGGERNPAVLARMRDRRCHATVETIEKALAGNYRAEHLFALEHALALYDTYQEKASACDSRIEAVLKELSICRGREAGPLPSPRQRMRRQPNGMDFDVRAALYALLGKDLTQINGLGPHLALRLIAECGDDLSAWPSAKHFTSWLCLAPSNKISGGKVLSSRTRRSGSRAATLLRLAAATVGRTDTALGAFYRRLSARIGKAKAVTATARKIAVLFYNAVRHGMEYVDPGASSYETRYRTRVINNLQRRAKAFGFVLQPTEVTPGPAVSAVS

SEQ ID NO: 358321 - protein, 331 aa, unidentified
MIAYFQVMGFTSTGKTVFNKRLNRTQLRHLMQMQPPCRVVMEACYSSHYWGRTFESMKHTVHLIPAQHVTPFVRGNKNDPNDTVAIYEASSRPHIRFVPIKTEAQQEVLLLHRLRERLLSTRTAATNQLRGLLADFGIIFPLGKASFIEKMKTLSDDSTLSARLTWLIKDIYEEYKTLTLRIKTIEKTLSAEVEANPLGQILLSMPGIGYLNASAFVASIGSGQAFASAKEFAVWLGITPKQFASGNKSVMGSISKRGDQYLRKQLIHGARAIISHAGKKNDALSLWITQLRARKTFNCTAVATAHKLARIMWTLLQKQCHYTPQMVKGMA

SEQ ID NO: 358322 - protein, 346 aa, unidentified
MTYSTTVGVDLAKNVIQISVVSSRGKELSNRSLTRKKFAEFLGKQKPSLVAFESCATSHYWARAAKRHGHEARIIPAKAVAPFRQGHKTDSNDALAVAEAARRPKIKEAPMKTVEQQGLQAIHRSRELLIQECTALSNHVRSLLMEFGIVIKRGFASLLRAVPEILEDGDNELPDLYRPTLQRMYTRLLELREDIEAMTGEVECLAKSHPICSKLMALEGIGPIGALLLYATMGSGVAFSSGREFAAYLGLAPKQYSSGGKTTIVGLSKKIGNSRLRSVLILGARAYVYKLKEPKSSKDRWLKAIIERNGESRAAIALANKNVRTAWAMVTQGTEYQRREQLPMAA

SEQ ID NO: 358323 - protein, 418 aa, unidentified
MERVVADIINPIACGLDIHSAVVVACLVRPGPRGGPSYEERSFQTSLRGLRELRDWLLAAECQAVGMEATGVFWIPVYAVLEGHVPMVVGNPNHMANLRGHKTDRKDAKWIAGLTRHGLIRPSFVPTAEFRDARELTRSRRQFINARTGIRNEITRLLAHQGLPLGVKGLLSDIFGVSGMGILEALAEGRNVLEELPKLLYRSVKGKTEAISAALEAGLREPLRPLLAMHLARLEAVEEDIQRVERLIAEHLSPYKDRLDLLKTIPGVSQIAACVIIAELGIDMSQWPTPKHLSAWGGVAPGCRESGGKTKRARVRKGNPYVCTTLVECAGAAVKKKTCQFDRLYRHLCARTGSKMKARMAIARKLLVIIHSVLTTLKAYEEPEAKAPSARSREKSIRRHILELKKLGIEVPLSAATA

SEQ ID NO: 358324 - protein, 350 aa, unidentified
MMIIGCDLHTRYQQIAMLDTDTGELVERRLEHESGEARAFYSGLQGQVRVGIEATGHTHWFEAMLAELGHELWMGDAAKIRASVVRKQKTDARDAEHLLDLLRQDRFPQIWRPSPAERDLRQLVWHRQKLVWMRGAVKNQLHALAMGEGVCRKKKLFTAKGRKELEGLALGPWASYRRQELLRMFDELAAATAKLDLAVEQAAKNQPLAMRLMTHPGVGPVTSLAFVLIIGPVERFERSKQVVSYLGLNPQEHSSGGKQRLGAISKQGNPMMRSLLVEAGHTAARFDPALKRMYQRLKFRRGASVAKVAVARKLAVRMYWMLRSTADYAQLVRMQGSPWATLVENSPSLG

SEQ ID NO: 358325 - protein, 370 aa, unidentified
MLDTTTFVGLDVHARSIKAVSLDVMTGEVRCATFGYDAGAVAEWVRSVDPGARCVYESGVTGFDLQKRLSGLGVDCVVGAVSKMIKPSADRRRKNDRNDAEFLARMLSVGNVVEVWVPDDECEAARDLTRALEDARDDLSRSKQRLSKFLLRHGLAFDERTPTGRRKGNWTRAHWSWIESIRFAEGADNDALAYYVDAVRRAAEEKARLEGLVEAEARKPRWRKRVDSLRCLKGVDTASAADLVFEAGEFSRFRNARSFAAWVGLTPSEHSSGESDRRGAITKAGNKHLRKTLVEAAWHYLTCSGRPKDLAKGQAPDRGARRHAAKGVRRLVERREALLARGVHGSKANVATARELACWVWAVGLMAEGA

SEQ ID NO: 358326 - protein, 422 aa, unidentified
MRYIGLDVHREFCEVAISEEGRVRSAGRVRTRRAELELFAQSLGKDDEVALESTGGAEAIAGILRPHVARVAVVNTKKLRQISEAKAKTDRLDARRLAELLAAGFLAEVWCPDEGTRALRRYVARRAQLVRQRTRAKNEIGAALKRNLLDRPPVYDLAGVKGRRFLEGLELPADERDTVEGCLRQITFLDEEIAEVDRALSQAALGSAEMRRLMTVPGVNLHTAATFMACVGDIGRFPSPRKLVSYLGLDPKVRQSGEEPARHGHISKEGASEARHMLCEAAWIVVRSPSPLRAFGERIRARRGAGIATVAVARKLGVLFWHLLTSEQDYAFGRPTLARKKLRQLELLAGAPRGKGQPGVWGANKARRQAELELARQAETAYRRLVADWQPKKGADATPGRASLRRQSGKQRGRASVPDPAL

SEQ ID NO: 358327 - protein, 297 aa, unidentified
MRTIGIDVSKATLDVALRDEQGIALEKQVKNSPAALRALLRGWVKRGLCQKSTLVCLEPTGHYSLGVIKTLLDMGQPTWMAHPNDIRLSIGMQRGKSDKVDARRIAEYAHRYSDKARLITPAYLGFAELRSLLALRQRMITQRSGHRVQLKDNALYQGKSIKTLVKDELERQVKSLERSLKKLEAAIAALIAADEVVQRKKALAQTVSGIGPVLASELVAHTEGFTRFTTPRQMVCYVGCAPFERTSGSSVRGRTATSPCANKRLKSLLRLAALAAVRTQETFAITTNGKSSRANAP

SEQ ID NO: 358328 - protein, 339 aa, unidentified
MKFCGIDLHSNNSVVVVTDETDRWLVKRRCRNELTEVVAVLAPHRAELVAVAVESTYNWYWLVDGLLAAGYEVKLANTVKMKRYDGLKHSDDADDAAHLAHLLRLGILPTGYIHPPAERALRDLGRKRCQLVRSHTAQVLAVETILARAQGQRLSSNAIGRLAVADVDGLGLVDDVALAVKASVAVLRTLSEQVAALERRLLAGVRPRPEYELLKTIPGIGTVLATVILLETGDIGRFATVGNYASYARCVDSAHYSNGKKKGSGNTKNGNPYLVWAFIEAANFARRFCTEAQRFFERKQAKTNRVLATKALAHKLARASYHVLKEGKPFDVSRCFSGG

SEQ ID NO: 358329 - protein, 412 aa, unidentified
MQVVYARCAGLDVHKKTVSACVSVCAAEGGKQQRMRVFGTFTSDLLALADWLKEQGVTHVAMEATGVYWRPVWAVLEGQFELMLVNPQHVKAVPGRKTDAKDCEWIADLLQHGLLKGSFVPPTPIQDLRDLTRYRAELRQSQNRVANRIQKFLEQANIKLSSVASNALGVSGRQMLEAIIAGQDDAEQLAKLARGKLRNKVAELEQALEGRVRDHHRFLLAEYLDEWEAFGQRITRIEAEIDKQIRPFEQAVALWQTIPGVDRVTACNLVAEVGVDMNQFPTAQHLASWSALCPGNNESAGKRKSGKTRDGNKWLRRSLCQAAWAATRKKNCYLSAQFKRLAARRGVKRAVMAVAHTMLIIGYHMLKTGRGYHELGGNYLEQINKDQLQRYFVKRLQRLGLKVTVEPVSEAA

SEQ ID NO: 358330 - protein, 329 aa, unidentified
MHYLYYVGLDVSKVVAFEDANEMAHRKFANSRKGICSCLHWVEKRHGIRLDDVIFCAEDMGSYISEMAVCASDRTLNFNFSLISPLVIKYSMGIARGKTDRVDARRIAEYAITHYRKIALYLPAEKELCQLRTWLILRAHLAKQRVAKLVLLEKLDYKEKFADVSIQRSMLQEEIAYAETHMKTIEREMKELIAADSNICRNYKLLTSIKGVGPITAIVMLCSTLNFTKITDHRKFACYCGLAPFEHSSGTSVRGGCHTSSMANRDIKVQLNRSALIAIRCDPQLKAYYERKAAEGKHKFSVLNAVRAKIAARCFAVVRRGTPYVALQI

SEQ ID NO: 358331 - protein, 312 aa, unidentified
MEKIICGVDVSSETLDGRIGQSGPFVKVSRTPEGICDLKTFCAGHGVELVVMEATGGYEKLPFGLLWSQGLACAIVNPRSVRRFAEAMGFLEKTDRIDAGIIARYAQVKRLVGQAPASAAQERLRALVTRMRQLTQMKVVQINQRRLIGDPTVLASIDEVTAVIRRQIKAFEADIAELLGADPLWRALDEAFREVKGVAGRTVARLAAEMPEIGTLTGKASAKLVGLAPLAKDSGKRHGKRSVRGGRAHLRSILFVVAAVVCKHEPEFAAFRERLLAKGKTKMAVRIAVARKLLVRLNAKARDARTALAMAA

SEQ ID NO: 358332 - protein, 357 aa, unidentified
MRFYTKQHQFYCGIDLHARTMYLCVLNQDGEILMHRNMPAGPEPFLKAVAPYRTDLVVCVACLFTWYWLADLCAREGMPFVLGHALYMKAIHGGKAKNDKIDSQKIAVLLRGGMLPQAYVSPAEMRATRDLLRRRMHLMRNRAELLAHIQNTNRQYNLPEIGKKLAYKGNRDGVAERFLEPAVQKSVEVDLALIDHYDRLLSDVELTIVQTAKQHNAQALYRLQSVPGIGKILSLVVLYEIHDITRFPRVQDFVSYCRLVKCAKESAGKRYGTSGKKIGNAYLKWAFSEAAVLFLRNNAQGQKFLARLEKKHGKGKALTILAHKLARAVYYMLTRDTVFEMDIFLNGYGSRAGEPAA

SEQ ID NO: 358333 - protein, 354 aa, unidentified
MNTTQNSTKSKIVKVIGVDLAKDHCDVIGYDENGIICLRLDGCSYAKLQEILANLPQAVVLMEACKGSMFHARSIADLGHEVRLVKGTDVKALRNVNHKNDLRDAAYIANLYFVPGIKYVYIKSQQQQSLQFLQNEYKSLQELRIQVGNQIHAGLEEFGCPVRKSSKFIKTRMVAHLEKHAELIPEDVMASFKRRREIWLNLLQQEEEAKRRLEQVAATDANAKRLMTVPCVGPQTAVGLLVHVGVDFGRFKNSRQFAASLGLVPKQNSTGGNNTLNHITKCGPKSLRSNLVQCAQLVLMYAEKWKGNFGDWVRKMRDSGKKHGVIVCAIAAKLARIIYRLMKDKVDYTPILSC

SEQ ID NO: 358334 - protein, 339 aa, unidentified
MQEKKKMIWAGFDVGKETFSASLDQVTENGKAKITSLPCRDFKRTPEGLTKFFQWAAGFVSGKDLHIVMETTGCYSQQLIDWINLSHPEVKVTIENARNIHAFIESLNLPHKTDKLDAQAIARFGTERQPHPTKRPSKTILTIRELSRERTALIKSRVELQNRRDTITSSVVRTINAQTIATLTIQIKKIEQEIKACIVEDEEILTEIHIMTTMPGVNFVSAYNILAEIGSLKQYSVKELSAISGLAPRIRQSGSSVHSSFMSRRSSGRLRQILYLDSLPGVPKIPVLQDFQQRLLAKGKKKMTVRCACMRKMLMMMRSMVVHNSPFDENFLKNFSTRT

SEQ ID NO: 358335 - protein, 399 aa, unidentified
MNAVGIDVSKGKSTVAIMQPFGVVVASPFEVSHNGQELKELAERVKLLPGETKVVMEYTGNYYEPIAQYLHNEGIYVSVVNAMLLHNYSGNSIRKAKTDKKDAVRIAQYALDRWLDLREYIPDDEIRRSLKLLNRQYTTLCKVKTILNNNFISLVDQSFPGVNKLFTSPQRVSDGHFKWVDFMIKFPHCECVSGIPRSAFKDKYYRWCNKNGYYYSDSKADSIYDYSKTLVPTLPNSDYIAALLAQSAAQLNCACETLAELQKQMTELSEQLPEHDVVMEMYGVGKVLAPQLIAEIGDTRRFHSRKAITAFAGLDAPPYQSGNIDVKSRSISKRGSPHLRKTLFQVVDVILKNSPEDEPIYQFLDKKRAEGKPYKVYMMAAANKFLRIYYARVNEVLNA

SEQ ID NO: 358336 - protein, 343 aa, unidentified
MQAITTIGLDIAKSVFQVHGVDVEGNVRIRRQLKRRYVLAFFQKLPPCLVGIEACASSHHWSRELKALGHTVRLMPPAYVKPYVKRQKNDAADAEAICEAVTRANMRLVETKTPEQQSCLMLHRTRHLFIRQQTSVSNAIRAHLAEFGIVAPVGRKGIEQLLDVVADASNQGVPELARACLATLGVQLRRLKAQILEFDRRIMAWHRSNETSRRLDAIPGIGPALATALVASVADPKAFRSGRNFSAWLGLVPKQHSSGGKDKLGSISKQGDRYLRSLFTAGALAVIRYAKIHGTQHRPWLTALLARRPTKVAAIALANKIARMAWAMMAKGERYKEPVALAA

SEQ ID NO: 358337 - protein, 350 aa, unidentified
MSQTPKTVGIDIGKNSFHVVGHDERGAIVLRQKWSRGQLEARFANMSPCLVGTEACVGAHHLSRKLKALGHDARLMPAKYVRPYSKGQKNDFRDAEAIAEAVQRPTMKFVATKTADQLDLQALHRVRERLVSQRTGITNQIRAFLLERGIAVRQGQRFLRAELPRILATPPEVLSPRMVRMIEGLTGDWRRLDERIDGLSGEIEAIARRDAGCERLMSVPGIGPIISSAMVAAIGTGDAFSKGRDFAAWLGLVPTQMSTGDRTILGKISKRGNRYLRVLFVQAAWVVLIKPKIWERHGLKPWIEAAKKRLHPNVLAIALANKLARIAWSVLARGRGFETSVITNATAQTA

SEQ ID NO: 358338 - protein, 347 aa, unidentified
MSIVEVARPVVGGVDTHLDVHVAAAVDASGGLLGVRSFPTTPAGYHALSSWLTSFGTVERVGVEGTGAYGAGLARHLAASGMTVIEVDRPNRQERRRNGKSDELDAIEAARAVRSGRALGHAKSGDGNAEALRALLVAKRSARSIRIATAGQLRHLVVSAPDDLRVRLSGLTTKALIAHAGALRPGAASDPVRHATKTAIVTLARRAQAVNAEIATVDRHLEALIRQQRPRLLEIYGVGVDTAAILLVAAGDNAGRIHSEAAWAKLCGVAPIPAGSGKTNNRHRLNPGGNRQANHALWRIVITRLGQHDPRTVTYMQRRLAEGRTKPEIIRSLKRYVARETYPHVIA

SEQ ID NO: 358339 - protein, 437 aa, unidentified
MSRRLQVGLDIHQKHNHVCLMTQDGQIVNPHQRFDNNWPGFQELIEMLVGALQEGPFEGVDIAGEATGLLWFHPFYHLAQADELAPFDSHLYLFNPRTIKHFKKVLAERDKVDPKDAQAVVERLRFGGRMPHEVTFDERYLPLQRLTRYRYHLSHALAQEKVYARMVPIYLKASDYTRKPKPFSNVFGATSRHILSEYATIDEQAALPLDDLAEELDRVGHHRFKEATNNARRLQRAAQHSYPLAPCLVEPVNVILDSLLAHICFLEELLQNLDPLIEATLLDVPGAPYLRSINGLGLVYSAGLLAEIQDLSRFMQGLKRDKQGHLRPKTQHDGQAALARFTGLWWPRGDSGDFQAEDRRLPKTGNHYLRYYSIEGANSLRRHNAEYAAYYQRKFDESLKHKHWRATVLTARKLIRLVFALLHDEEMYQPPEVRYRR

SEQ ID NO: 358340 - protein, 377 aa, unidentified
MKKELYLGLDVHKECIAIAVAEGGRKGEVHELGSISNGLHAVEKLIARLRKAHGKETRFYACYEAGPCGFGIARRLRQLGVECEVVAPSMIPTRSGDRIKTDKRDARKLARLLRAGELTAVYIPEATDEAMRDLCRARTDAVDDRNRSRHRLKGFLLRHGYRYQGKSSWNAAHERYLRELVFSHPAMKVILEEYLQGVTAAGERIARAEAAMHELLENWRLVPAVRALMAMKGFQTVAAMILVSELGEVHRFVHPRQVMAYLGLVPTENSSSDRRRQGHITKCGNAHARWLLVECAQHYATPPKVSAHLSRRQEGQSKEVRAISWRAQLRLHSRYNRLLGRRLLRNKAMVAIARELCGFVWELLRTQPCYQAQSTLH

SEQ ID NO: 358341 - protein, 444 aa, unidentified
MAMRKRDDEVFPNAAGIDIGASSHWVAVPRHLAEQSGCEPVREVGAMTDDLNALADWLLACGVDTVALESTGVYWIPVYEVLEQRGLKVWLVDARQMKYVPGRKSDVQDCQWLQKLMSLGLLRAAWRPASEVCVVRAIARQREVLITEQASWVQRMQKALVQMNIQLTEVITDVMGQTGQAIIRDIVAGQRDPRVLARHRHRRVKASEDDIVKALTGNWRDEHLFVLGQALAMYDDIARHLQTCNAKLDELLAQRGAASVDIGKAPKVGSKSRMEFDVRQALANWAGVDLTRINGLGVTTVMKLITEIGPNVSHFANVKHFCSWLGLCPGTKISGGKVLSSGTKRSANRARQALKMAAMNLSHSDSALGAFYRRLCTRMDKPRANTATAHKLARMVFFMLTRGEAYVDKGQQHYDEQQRQRSIAALQRRAAALGFQINPVMVAA

SEQ ID NO: 358342 - protein, 496 aa, unidentified
MGCCALEGGDAVSAIPIRNLMNCAAQPFRWHQQEELEMNPKRSKSRHGRKMPMVHPNAAAIDVGATMHMAAVRADRTPEPVRSFGTFTADLHRLVDWFTQCGVETVVMESTSVYWIPVFELLDARGFTVFLVNARDAKHVPGRKTDVSDAQWLQRLHSYGLLRASFRPKGQIAELRSYVRQRERLLEYAASHIQHMQKALTEMNLQLHHVVADITGATGLRIIRAILAGERDPEALAALRHYSCHSSAETIAKALTGSYRAEHLFALEQALALYTAYREKASACDVRIEAVLKELSIHRGRDHGAVPPPRRRHRTDQVNALAFDVRAALFALLGKDITAIDGLGAYLSLKLIAECGDDLSSWPSAKHFTSWLGLAPSNKVSGGKMLSSRTRRSGGRAAALLRLAAVAVGRTDTALGAFYRRLSSRIGKAKAVTATARKVAVLFYNAVRHGMEYVDPGASSYETRYRTRVVNNLHRRAKAFGFLLQPLEPKAGATVS

SEQ ID NO: 358343 - protein, 376 aa, unidentified
MEKDIRHVGLDVDSEKLVVGVAEPSGEVRSLGSIPYTSEGVGRLVKKLGPASRLRICYEAGPHGYGLYWELTALGVHCDVVAPTLVPVKSGDRVKTNRRDAEKLARCYRSGDLTPVWVPDAEHEALRDLVRAREAAKKDQLRARHRLGKFLLRHGLRAAAGVKNWTLKHLLWVRTLHFEHPAQEATFLDYLHEVEHAAERVARLEKAIDQAVEGLPQEMKAMVAGLQALRGIKQVSAVTIVAEVGPLSRFERPKQLMGYSGMVSSEDSTGNRVRRFGITKTGNAHLRRVAGEAAWAYQYRPAMSAALKKRQEGLSEEVKEIAWKAQHRLCTRYRRLLARGKIKQQVTTAVGRELLGFIWAIGVQVEKEQQRRSRAA

SEQ ID NO: 358344 - protein, 346 aa, unidentified
MTSNAQKYIGLDIHKKFLFAAVLDSKGDLISEKKIKNDPNELDKFFKGFDEDSKIALESCSCWEYVYDYLTDKGFTNVVLANPSRVRLIATSKKKTDSHDARILADLLRVNHLPTSYAPPTVIRKQRQITRHRASLGRLKGVIKNKIHAILIRNGINQEFSDVFGQEGINYLMSLDLSDIDRYQMDQYLELIRHYDVQIKKTEERIEDYVAYTPQVKLLMSIPGISYYSGLTIAGEIGDIRRFNSMRKLTSFAGLNPSVSQSGDKCYTGHIAKQGDKHLRWMLNQCANVAIMHDSTLAKIYHRIKKRRGHNISITAVSRKMLCFIYTMLTHNIEYHALQIHKAKAS

SEQ ID NO: 358345 - protein, 318 aa, unidentified
MTNKTYQFNIGVDIAKHKLDVSFSDQRVVSFENNQSAFKLLLKEIENKSQTRVVMEATGGYEKPLAHFLQDHGVAVSIINAKRVRDYAKALGLLAKNDVIDAKVIRMFADAVNPKLLPAANDTQQALDAQVHRREQLVKQRAMEKQHLETVGNKDAVRSIKRTITFLDKEIERIEKAIKALIKTDSTLTEKVDRLSAIKGIGDITALTLIADLPELGQLSNKEISALVGVAPFCRDSGTQKGKRTTWGGRIQVRSILYMAALSAVQYNPPLKAFYNRLLMKGKTKKVALVACMRKLLTVANSMLRNNTEWNPNHGNLA

SEQ ID NO: 358346 - protein, 478 aa, unidentified
MASQTHRETSQGQRLTRKERKILGRQIWSGSPGLEVVHRDAAGIDIGSREHYVAVGPDRDGQPVQNFGCFTTDLHRLAAWLTQCGVKTVVMQSTGVYWIPVFDVLEQSGFDVWLANARETRNLPGRKSDVQESQWLLKLHTYGLLRKSFRPTAEIRAIRTCWRERAEYVEQAGTSIQRMQKALTEMNVQLATVLSDLSGVTGMKIIRAIVAGERDGRKLAEFRDANVKASQETIARSLEGTWLPEQLAILRRQLADWDHVQRQMAGCDEDLAARMKDLPAAEVQPGEPGPPAGRTGKRQRKKSSRNQPNFDLGAELKRVAGVDLTRIDGIREMTVQTVITEAGLDMSQWPTEHHFVSWIGLAPRNDISGGKVLKRRTRKVVSRLATALRMAASTLRESDSYLGAQFRRLRSRLGPPKAITAMAAKQARLVYRMLKYGQEYVDKGTAQYEKKYRLQRIRLITKQAAQQGFALVPLVSPV

SEQ ID NO: 358347 - protein, 353 aa, unidentified
MQRFIGIDVHGQSCPLVVMGPSGRRLGEYVVETNAKVLIERMRGIAGDKYVCMEEGTQSEWLCEILNAHAKEVVVTQPLRRAGSKNDAIDAWALADLLRRDAVERSVFKSPRTLTQLRQAARGYVAMRQDMIRAKCRLNALYRSRGIQPTAEIYDPDARETWLSKLPPSHRPLGELLSEQVDRLSQSHQTAETWLLEQAKLTPVTHRLATAPGIGPIRAALLAAIVVTPDRFRTTRQFWSYSGLGIVSHSSSDWMRDKTTNTWARKPTVQTRGLNRNRQPELKAIFKGAATTIIQQMPNHPLHQDFQRMTDAGIKPNLAKLTLARRIAAATLAMWKHQEDYDPSKTRRIPQSQ

SEQ ID NO: 358348 - protein, 417 aa, unidentified
MDEFAAFVGWDWADKEHQICLCKAGSANNEQRAIKATPEALHEWAAQMRLRFGGKPVAVGIEMGRGGVIWALMAYEHIVLYLINPCASANFRRAFHVSGKKDDPVDADTLCEMVQKHHHKLRAFAPADAATRELGLLGENRRKFVNDKTRVINREGAHLKTYYPQALELAGDLGRPMACAFLERWPTLEAAKRARPATIRQFYLDHHCRSQEKIDKRLELIKQSVPLTQDVAVVEAGRVQTLALVGVVSALIESIALLDERMETVYRDHLEHDWIESFPGVGPVMGPRLLAILGVDRSRFATANELQCFTGVAPITVSSGGTDGSKVVIRRLRRSKFVHQTVVEWAGLFCQFSEWGRAYYARESEAGRPRWAILRSLGFKLLRILFRCWQSRTNYSEETYQTALKLRGSPIAAQLAA

SEQ ID NO: 358349 - protein, 312 aa, unidentified
MSKEKVFIGIDVSKDKLDVAVRPSGEFMVFSSTEDGLSVMTEFIRSKEPELIVLEATGGFEMGALRSLALARLPVVAINPRQVRDFAKAMGILAKTDKIDAHVIARFADSVRPKVRAFRTPEEEMLDAFNARRFQIVEMITAEKNRLVSCSKWTKKDIQGNIRGLEKRLAKLNKDLDDLIKKSPIWRQKDKILQSIPGVGPVMARTILADLPEAGMLNRKEIAALTGVAPLNCDSGKYKGKSAIWGGRAKVRSVLYMCVLTALRRNPKIKAFYDRLIRAGKKPKVALTACMRKLLVIINTVLKNGTCWEPNC

SEQ ID NO: 358350 - protein, 371 aa, unidentified
MTASVIYVGMDVHKDSIVIAVAEEGRRQAQKLAEIPNDWAKLHKLLKNLQKNGAELHVCYEAGPTGFGLCRRLREVGIDCIVVAPSLVPHKAGDRVKTDRRDAAKLAHFLRSGDLTEVHVPDEAIEAIRDLERARDDAKRAELVAKHQLSKFLLRHDRRCAHKAWTRKYMDWVRTQKFAYPAQQIVLNDYVKTVEDLGERVERLTKAMEELVESTVLAPLVKALQAFRGISLVSAVTIAAEVGGDLTRFATPQRFMSYVGLVPSEDSTGRRRWQGSITRCGNSQLRRILVESAWHYRHWPSLSTELRRRNQGVAEGVRKIAWKAQNRLHKRMLHLLKAGKNSQKTVTALARELAGFIWAVGQEKTLLEGVT

SEQ ID NO: 358351 - protein, 387 aa, unidentified
MPKAFAQPEVPAAIQINLTAIFVSLELSRSTWVVTSLSPGAGEKMSKHTVPAGDVPALLLRFDELKRKAKARTGTSFPIITIQEAGLDGFWLHRLLKSEGVESHVVDPASIATSRRRRRAKTDRLDGEALLRALLAFKRGEPRVCAMAVPPNPEEEDRRRLSRERKTLVAERVEHVNRIKGLLFSQGIASYEPIGRDRRKRLDELTTGDGRPLPDNLKSAITRELDRLELLLDQIKTVEAKRDALLAELRTDTPPLAGKMLLDFKGVGPEFAAVLWTEGLFRHFDNRRQIASYAGLAPTPWQSGSVSNEQGVSKAGNPRLRTTLIELAWLWLRNQPTSALSLWFKARVEGGRGKKTTIVAMARKLLVALWKYVTFGVVVEGAVMKNA

SEQ ID NO: 358352 - protein, 340 aa, unidentified
MIITTLGIDLAKSVFQLHGVDADGAVILQKKLRRGAVLDFLSKLGPCLIGMEACATSHYWAREIAALGHDVRLIPPAYVKPYVKRQKNDAADAEAICEAVTRPNMRFVPMKTEEQQGVLVLHRSRDLLMRQRTMILNAIRAHFAEFGIIAAQGPRKVAELCMRLRDDGTLGLPEVARSALLALAGQLDNLAAEVRNIEQQLMVWHRQNAASQRLETIPGVGLITATALAASVPDPVAFKSGRQFAAYLGLVPRQNSSGGKDRLGHISKMGNGYLRRLLVVGATSVTRRAPATDTQSGAWVRSLLERKPTRLVTVAIANKTARTAWALLAKGEDYKAVTAI

SEQ ID NO: 358353 - protein, 325 aa, unidentified
MDKTVKDTHFLGVDIAKHKFDVALILNGKFKNKVFENNQTGFAALIHWLTSHQVNHAHACMEATGVYWEALATCLADAQHQVSVVNPAQIAAYAKSTLQRGKTDEQDARLIARFCERERPTLWQPAPANQRELLQLVRQLQHLNESYQAEQNRLKTSTGDVHTSIADTMNFLSEQIKQLSAKIDQHIDQDPSLKQNHALLDSIPGIGDKTAPWLLAYLGTGERFGRGKQAAAFAGLTPRPWQSGSSIHGKSRISKTGHTDLRRVLFMPALATYGRKKAFVAFVERLKASGKTPKEIVVALMRKLITIAQAVLRTQTPFNAELHAN

SEQ ID NO: 358354 - protein, 345 aa, unidentified
MPIVGGLDIHRKQITFDYLDTATGEVRRGQIAPADRKHVRAWLARFAGRGGVAFAFEGCTGWRYLAEELAAAGLRAHLGEPADTAALRGRKRHAKTDKTDARHLRALLAEGRLPECWIPPPHILEYRALLETYHDLRAAHTAWVQRIHAVFFRQGAPPLSDDALRTEQGLARLQAAAATHLSPAGQLQVATALDMLAATEARLGPLRQQLRETARHLTGARVLAERLYGVGPIAALALTCWLGGAGRFSSSRKAVRFTGLDITVWSSDRKGPPGRLSRQGPPVLRWAVYEAGKTHGRAAAPGHGYYATVKDRKNGKRAALSEARKIVRQACHILAELGDDALTAA

SEQ ID NO: 358355 - protein, 410 aa, unidentified
MELLHPHCAGLDIHKETVVACIRHLRRGKVTTEIRTFKTTTEELIALSDWLATEGCTHIVMEATGVYWKPVWHILSDGEFELVLANAAHVKNVPGRKTDVNDAVWLAELMAHGLVKASFVPDRPTQQMRDLLRTRKQFVRERSSHIQRIQKTLEDANIKLDLVVTDILGLSGRRILQALIAGQTVPRTLAALADRRIHATSTQLEAALHGRVTDHHRFMLKLHLDQIDAQDAAIARIDKEVDGNVEPFRVALEMLNGIPGVSSLSAEVIIAEIGIDMSRFETAGHLISWAGLCPRNDESAGKRRSTRMKKGAPWLKTTLVQCAWAAARTKDSYFHAQYHRLRSRRGPKKAIGAVASSLLTTAYHMIKSGTLYQDLGANYFNHHAKDKQALHLIHRLKNLGFNVQITPSTA

SEQ ID NO: 358356 - protein, 334 aa, unidentified
MEKIIRIGLDTSKKVFQVHGVDDAGRCVLKEKLQRRELLKFFRKLESTLIGLEACGASHHWARELRALGHEVRLLSPSYVKRFLVRQNKNDARDAEAICEALGRPSACFVPIKSETQQADLMLHSIRDLLTKQRTMLINAIRGHAAEFGIVGALGTANVPGLLDKIRSSAIPALARDLIELLAGQVELLDAKVSQIDRRLRDWFRASPEAQRLATIPGIGVVAASALAMKIPDPSVFQSGRHLAAWLGLTPRQNSTAGKSRLGKITREGDETLRNFLVVGATSVIRWAKPGRTSPWLLELLKRKPRKLAAVALANKNARIAWARGETYRRPMPA

SEQ ID NO: 358357 - protein, 340 aa, unidentified
MGEYIGLDVSLKETAVSIRRDGKRVWRGKCLSDPTVIAALIRKHAPSAERVMFETGSLSVWFYHALTAEGLPAICIDARHAKAALDMAANKTDANDADGLAHLAEVGFFREVRVKGFDSMLSRTLIAARTKLVRATLDIASQIRGLMKTFGLIVPRGIGGKFERNVRSLLIDHAELARIILPLLEAWRGLRIQAAELSRQLLAEARRSQPCQLLMSIPGVGAITATAYLTAVEDPANFSRSRSVGAWLGLTTRRYQSGEVDYDGHISRRGDTHVRSLLYEAAVVILTRSHADSDLRSWGMRLREKIGFKRAAVAVARKLAVIMHAMLRSGELFTRKVAAA

SEQ ID NO: 358358 - protein, 352 aa, unidentified
MKISILGIDIAKTVFVLVGLDENGHEVLKKKLSRSQLKQTLMNLPPCKVAMESCGSSHYWGRQIEAMGHAVVLVPPQYVKPFVRTNKNDTNDARAICEAALRPSTPTVPVKTEKAQDIQSLHRARQLLIGCRTATINHLRGILLEYGILLGKSPKKVKEEASRWVEDPETGLSPSLRNTLRTMVSELSSLEEKLADFDSWIEALAKMHPVCKRLMRVPGVGPLTATVLLAFVGDATRFRNGRHFAAYLGLVPKQHSSGGKNVLLGISKRGDTYLRTLLIHGGRTMVRSAMKTAASKQEPKGRNAWILSLLERRGYNRTAVAVANKNARILWVLLTHEDAVYSTIGSKTRAAS

SEQ ID NO: 358359 - protein, 349 aa, unidentified
MSQPVKPVVVRMGIDIGKSAFHVVGLDFAGKPVFRSRFTRERLIEFLARASPTVVGMEACPGSNWLARKAALSGHEVRIVPAQFVKPFVKSNKTDMIDAEAIAEAISRPTMRFAQPKTEAQLDLQALHRVRQRLVSNKTSVINQARAFLLEYGLTISVGAAYFVRDMPSILSDDQNGLTPSMRRLLEELWQEYRSIEARLLQLRQQIESIASADDAATRLTSVPGIGQLTATAITAFAGTGTQFKSGRHLAAWLGLVPKEFSTGGKQCLLGISKRGNPYLRKLLVHGARSCVLHLDRTKDHLGAWIARMEARGIHRNKIIVALANKLARIAWAVLTRQGAFYLRQPKQQ

SEQ ID NO: 358360 - protein, 366 aa, unidentified
MGLDVHKDTIAVAVADAGRTGEVRFWGEIANTPDAVASMLRKLGGRHPLMHFVYEAGPCGYGLHRQIMATQHHCEVVSPAQTPRKPGDRIKTDRRDAIILARLSRAGELTSVWVPDTIHEAMRDLIRLRQAMVKDLRAARQRTKSFLLRHGRVFKGTSWKRSHRIWLGNQSFAHPAQQIAFQSYLNAVDQAQARRDEVDVQLHHFTADWSMAPVVEALQALRGVAFITAVTVVCEVGDIRRFAKPRQLMAFLGLVPGERSSGETRRQGGITKAGNVLARAVLIEAAWSYRTPAKIGAQMMLRQEGIPQAAKDIGWKAQVRLCGRYRRLMARGKKSALAVTAVARELVGFIWAIAHIAEPTGAEGVA

SEQ ID NO: 358361 - protein, 406 aa, unidentified
MKVLYERCCGVDVHKKSITACTITPEGKEIRTFGTMTDELLEFVNWLKEKGVTHVAMESTSVYWKPLYNLLELEQIETLVVNARHIKAVPGRKTDMKDAEWIANLLRHGLLKGSYIPDRAQRELRELVRYRRSLIEERARELNRIQKVLEGANIKLSSVVSDINGASARKMIRALIEGKNDPMVIAQLAKGKLKQKVEELQRALHGVIGPHQRMMLAEQWRHVEYLDEAIARLDQEIEERTRPFEEALELLDTIPGVGRKSAEQILAEIGTDMSRFASASHLASWAGMAPGNYESAGKRLSSRTRKGNKKLRACLVECARAAARKKDTYLSAKYHRIAARRGANRASMAVGRTILEIIYYLLTRKEPYKELGADYWDRQREAKIVRQTVKKLEGLGYEVKLEKVGA

SEQ ID NO: 358362 - protein, 316 aa, unidentified
MQTFPNIGVDVAKDAVVVACAAQSFSTHSVTNQRTPLLAWLKSLPTGSRIGLESTGGYHELLADLAHAQGHVVFLLNPLDTKHYARAMGNRAKTDRVDAELIARLIAQEHTRLRPYTPPTADQRKLDRMIRRRANIVRIKSSLTLTMSNLSGFTAELKAVSNKLDALIAKIDSTMTAIAAHSPQHKEAQQRLQTIAGVGPVVGMALTNTLERVPFRNADAFVAFTGFDPRANDSGNKIGRRRLSKRGPAELRRLLFNAAMAAAKSKAWKPIYAHYRAQGWSTTAALVIIARKIARAAWSIHHYNSTFDPERITKNA

SEQ ID NO: 358363 - protein, 408 aa, unidentified
MEILYPRCAGLDVHKDVVVARVRCVSEPRVEETRSFATTTAALVELQEWLTAHGVTHVAMEATGVYWKPVWHLLEEHLELVLANAQHIRNVPGRKTDVNDAAWIADLLAHGLIRSSFVPPAPIQALRDLTRTRKQLVREIAQHTLRIQKTLEDANLKLGSVLSSILGASGRAILTALIAGQSDPERLADLAQGTARRKRAALIEALRGRITPHHRRLLKLHLELIGALERALEEVDADVGKLLAPIRQSARLLTTVPGVSDLTAQVVLAEIGADMARFPSPGHLLSWATLCPRNDESAGKRRSTRTRKGSPWLKTALVTAAWAAVRVKGSYLQAQFLRLRARRGAKKAILAVAASMLTAIWHMLKNGVEYHDLGADHFARRDRTKAIRRLVHRLNDLGCNVQVTLQAA

SEQ ID NO: 358364 - protein, 450 aa, unidentified
MGQGSGVSRGDRNRNARLARLRALVPSTNAIVGIDLADTKQMVVVTDHDSKVLARKTFRCRAWSLGTALDWAAQQAVAKGFTGVTVACEPTGHRWRVLGQLAADRGMPFVCVQPMVTSWSRRTEDLTFDKTDEKDAVLIARLTAQLRCYIPEPVDETWGRLRYLGARREQLIVERVSQVQQIRALLECVWPAALDTARQPFRSRTWITALSVICERDSGDLQQTRRRGLAHFEQAVRREITRRGGQKPSLRIVRHLFTALTDQTGVLAHRRGALERVQFLLRDWQHTEHQLADTEARMINILDELQLTELVTSITGLSAIGAAAILAETGDLTRFATARAVVKHAGLAPREKLSGTFTGRTKLTGQGRPSLRLAAWRAVWGAQRNNPVYAARYQHLTSRQDNKLTPTQAQAAIAAAILRHLHAVITTGQRWNPDIATHGTRTTTTATVAA

SEQ ID NO: 358365 - protein, 361 aa, unidentified
MAQAKTWVAFDVHTSGVVAAVLQRESGELRVQRLPAGSEAVTAFALGLPGPVRATYEAGPTGFVLARRLEAAGIECLVCAPGLIPRGATDRVKTDRRDAERLVRLLVAGELHRVVVPSVEEEAVRDLVRAREDLRGDLMRARHRLAKLLLRHEVRFDGPQANWTQAHLGWLAGVRLDQPASQRALEDYRGAVAALMIRREQLEAEIARALPLSPWAQTARRLMCLRGIDTLTAAGLCAEIGHFDRFRHPAQVMSYLGVTPSERSSGERRRQGPITKSGSQHARRLLVEAAWHYRRPPRVAGSLARRQRDGEPEVIAISWKAQRRLHHVWSRMEQRNKRRTIIAVAAARELAGFCWAVATTD

SEQ ID NO: 358366 - protein, 343 aa, unidentified
MKLHVLGIDLGKTVFHLVGLDSTGRVVIRKKCSRTQLLAFTANLQVQLIGMESCSGAHFLGRALREQGHEVRLMPAQYVKPYVQTNKSDFLDAEAIAEAVQRPRMRFVPIKTEEQLDLQALHRVRERWVMRRTAVVNQIRSLLLERGLTLPKGRGYVDRQLPRILEDGELRLSGCFRVLLAQLKIELEQLTARIEEMDRVIQKTAKENEACQRLTEIPGVGPVTATALIAAVGNGSTFQKGRNLAAWMGIVPGEYSTGGKQKLLGISKRGNKYLRTLFIQGARSVLQQRDKQAPGLSSWLAQLLARAHQNVVIVALANKLVRMAWAVLCKNERYRAPVLAMSA

SEQ ID NO: 358367 - protein, 353 aa, unidentified
MTFYIGVDLHPHQQTVAWCNTETGETQTKDLKHDPEEVRNFYSSLPEPAIVGIEASTRATWFENMLFETCHKLFVGNPVLIRKRATSRHKNDRRDAELILQLLLHDEFPKIWRRPIESNRILEMVRLRQSLVRQRTQICNRLQAIAHDLGLPKGRVRGVAFQAILKAAPADETTSIRRSHLFSMVGTLNEHIQKLDKWLEEKAAEDSNVQLLLTQTGVGYLTALVTVHTLGDVSRFTRLSKQVASFAGLDSMERSSAGKVRFGRVSKAGSPLLRYQLGVAAKMASRSDARLKSFYTRLAKKKPKAVARMAVSRKLLIKLSIMLRDKITAEEFDQRGRTVGNARVLQGSERTVV

SEQ ID NO: 358368 - protein, 332 aa, unidentified
MFVGMDVHRNRTQVCVLDRKGNEVRNRNVTNDRQALRKELAGLRRGTPVAFEAAYGTGWIAELLGDLGFEAHLAHPSGCRAIADAKLKNDRVDARTLANLLRTGYLAEAWLAPKEVREQRLLLRERARLVRIRTTAKNRIRAQIADEGVPAPSHGLWTKEGATWLDSLDLSPMHRWVVTDCQALIDVLQSRISLLEAEIRRQAKPDKRIDALTAIHGIGLLSAMTLVSEIGDISRFATARKLCAWAGIIPSMRNSDRTVHHGHITRAGPSAVRHVLAEAAQVAIRKEPYHSDYLATKQRRGTGIALVRVSRKLLTEAFYVLKALEDEQRQCS

SEQ ID NO: 358369 - protein, 387 aa, unidentified
MDDRHYVGIDVHQGKCVWCLMDGAGAVVGEGAVRTDLAGLDLMAREWRRLGSREIRVGLEASTAGKAVARHLRSAGSDVWMAHPRALKAITASETKTDRNDARRLAHLVRLDYFPRAYLPSEEVERLRDLVRMREDQVDKFRRTKQHLRALLVGHHLNHEAAKYDDLFGVQALHWLKGIELTEPIEQQRMAMLLEEGALYQRQVEGLTDELAKVGADRQAVRILQSVPGIDYVLALTILAEVGDVQRFPNRKKFAAYAGLVPKNRDSGEKVGVHTKLRHGSPRLKWAFSVAVQSLLKTRRGRFVVLFRRLEKRLGRPKALMAVAHRLAFTVYGIWKTGRLYEEGSPSLYERKRAQLARRAAKRTPLPSRDELLDKLIRRATMPRRAT

SEQ ID NO: 358370 - protein, 413 aa, unidentified
MDIIHHRCAGIDISKADAKVAVRIAQSGVNAKEEVRTFGSMTRQVLMLRDWLIDEQVTCVVMEATGDYWRTFYYLLEDAGFELLLANPRDVRNRPGRKSDVSDCKWLADLGAHGLVGGSFVPPPPIRDLRALTRLRTCIARDRGIAAQRLEKVLEGAGIKLSIVTDPTNVSSRRMLKGLAEGMAVEDLAEMAYGALRRKKAELAEALTGQFSEHHTLMVNILLDRIDSCNCDIEQLSERIDVLMQPYQRAHDLLVTIPGVSDIVADVIIAETGADMSVFPTAKHFASWAGVAPGLNQSGARTKPSKKRPGNTHLQAALGIVAFAATKTRKTYLSAQYRRITAHRGPMKAMVAVENSAITAVWHMLTNDKEYVDLGPDYFAQRRPDTTRNKAIQQLENLGYQVTLTTPKEPETS

SEQ ID NO: 358371 - protein, 344 aa, unidentified
MVERFVGLDVSQRSTSVCILDAQGKRVWRGKCATDPAMIDEVIRARAGGPVRVGLETGPLTPWLVHELRGRGLEVVCLDARQARAALALRPNKTDANDAEGLAQILRLGWHRSVHVKSYAAHRLRATLGARMQLVNMVTELSNHVRGVLKVFGLVVEGARGGVFADRVEALVADRPEVAAVVRPMLEAWRGLRRQVAAYDVALRAEAKERAETRLLMSVPGVGVITALAFAGAVEDPARFGSSRDVGAHFGLTPRRHQSGEVDRVGEISRWGDGLVRTHLFEAATVLLRRVKRWSSLKAWAVRLAQRAGATKARVALARKLAVVMHAIWRGGEPFRWTAEPRAA

SEQ ID NO: 358372 - protein, 345 aa, unidentified
MDHFAGLDVSVKETSVCIVDDVGKIVREVKVASEPEALLAVLKNPAYHFKRIGLEAGPLSQWLYSALAGAELPVICVETRHMRAVLKAQINKTDRNDARGIAQMMRAGLYRPVHVKTLRSQKLRMLLTHRKLLQAKAIAVENDLRATLRNFGLKVGVVGTVKFEARIKELVEDVPDLAVLVEPLLVVRRVLREQISVLHRRLLAIVRDDAVCRRLMTVPGVGPVVALTYRVTVDVPVRFRKSKSVGAVFGLTPSRHQSGKSDRPGAISRCGDEMMRSMLYEAAQILLVRSTKWSWLKAWAMKIARHRGMKKAIVALARRLAVIMHRIWVNGTAFRWTQEQAAAAT

SEQ ID NO: 358373 - protein, 340 aa, unidentified
MELNIIAMDIAKKVFQLHWVDRETGSIEQLKLRRAQVLPWFANREPSRVVMEACGGAHEWGRELIKLGHDVRLLAPKMVRPFVQRNKTDAADAHGIWTASQQPGMKFVPVKNDAQQVVLALHRLRAQLMKTRIMQTNELRGLLYEFGVVLPEGHNALLKELPAALREAQNRLPAMLIESLDEQVRRITQLMTDIGTIERRLSQQLRETPACQSIAEIPGVGLLTATAIVASMGTPTAFKSAREFAAWIGLVPRQTGTGGRVRQLGISKRGDAYLRTLLMHGARSIVARSASAASWPWLVELLKRRPYSVVVAAVANKLARTIWAVLARGQAWRPHAWQSA

SEQ ID NO: 358374 - protein, 328 aa, unidentified
MSNITAVVGVDIAKHVFQLHEISKETGEIISAQLKRKTFLAHFANRSTCLIGMEACGGAQHWARKLISLGHVVRLLPAQQVKAFVCGNKNDFADARAIWMAVQQPGIKTAAIKTEAQQAVLAMHRIRQQLVKFCTAQINALRGLLTEYGEAMPQGRSGIARRLPGIFANLIDRLPTVLIDTLREQFARIGRLDEEVFEIERRLRDWYRQDDACRRLAEVPGVGLLTATAVVAAVGDAKTFKSGREFAAWLGLVPRQTGTGGRVKLLGISKRGDTYLRTLLIHGARSVLTHSKSPPEWITKLVRRRPINVGDRGDSKQDCAHAVGASGP

SEQ ID NO: 358375 - protein, 424 aa, unidentified
MKVTYQTCCGVDVHKSFLVATIVKTTGGIEPSYQKKRFSTFNNSILEFKQWLLENDCLDVCMESTGKYWVPVFNILEDEINVVIANPKWVKAVKGNKDDTKDSKWIGDLFRLGLVKGSYIPCKTVRILREYTRYRYKLVSCRSSEKNRYQNALTVCNVALDSVVSDIFGKSSTSIIDYLLDQSGTSINHEEIASKLLRNLKSKEDAVIESVEGYQMTDTQKYRMRLVRAHMDYITAEINDVDKMIENMISSNPDFENAVQLLCTIPGVKRNSAITIISEIGTDISQFSNSKRLCCWAGLTPGSNESAGKKKSVRITRAGVYLKPALVQCAHAAVKSDKSPYYKKKYESLVKRRGKKRAIIAIARMILTAIYQMLSTGEEWNPSDLYKIDMPVALVEKQKAKAIRQAKKLLQREGILPPDKPLAS

SEQ ID NO: 358376 - protein, 342 aa, unidentified
MQITTIGLDIAKNVFQVHGIDASEKVVVRKQLRRSQVLAFFKALPRCLVGMEACATAHYWARELTKLGHRVRLMPAKDVKAYVKRNKNDAADAEAICEAVRRPTMRFVPVKSAEQQSRLMLHRTRDLLMRQRTQVINALRAHLGELGIAAAQGREGLKELLKIIASEEDARLPVDAHTSLVVLAMQLQAVQTMIGSIEKRIMVQHRSSEASKRLETIPGIGVIGATAIAAMVTDPKVFRSGRDFAAWIGIVPRQDSTGGKQKLGPISKQGDRYLRRILVVGAHAVLKQARRQPEKYPWLTQLLARKPFKVVAVALANKMARIAWALLAKGGTYRAPKLAAAA

SEQ ID NO: 358377 - protein, 331 aa, unidentified
MNYSHFVGLDVGKKTFDASLMSAAEKELSHKSFDNTPEGIQSLLDWIAGYHLSLSKLLFCAENMGSYVTELSVSSVSMGFSLALVCPLTIKKSMGLQRGKNDRIDAKRIANYAVLHYRKLELYKLPNKDLVRLRGWIIIRDNLVKQKVSSIKLLETFSQMAKLADVTESISFLEEQLKSIKEKILEVEEDMEQLIAASTSLYTNYLLLRSIKGIGIINAIVLLCVTDNFQRFDTPRKFACYCGVAPFEHTSGISIRGKTQTSSLANKEVKVYLTRAAITAISWDPQMKAYYKRKIAEGKHKASVINAVRAKIIARSFAVIRRQTPFVALAV

SEQ ID NO: 358378 - protein, 385 aa, unidentified
MGTQTFIPRDYDVFAGLDVDKKSISVTFTDHQGFLKSLNMPYKVEHLVNYVRKHYPEKKVSFAYEAGPTGYGVYDGVGAQAYPCLIASPSMIPKAPGQRVKTNRLDSRGISENLRGGQLKGIHVPTPLYRELRHLTQLRDTLVSEMVRMKQRIKSLLLMEGLEFPPAPAGSQWSFLVKKKLRELPCSTTVRFKLDRLLDSLEFDEKQVLKSTREIRRFCQTDPELSQCIEYLRTLPGIGWIVASQLLARVGDWRQIKNIRQLPAFLGLVPTENSTGERTERGSITHTGDGRLRSKLIQASWSAIRQDGELREFFRIVAKKHPRHLGARVAIVAVAHKLSVRASVVLMKQRPYEVRQKVQSAPLTQEETVPQGTTRRLTVPGETNS

SEQ ID NO: 358379 - protein, 370 aa, unidentified
MKYTTYVGIDAHKETLAVAKIHLEATEADFLGIIPNTADAVKSLVKKLGNPQKLCFCYEAGPCGYVLYRQLVRLGAACIVVAPSLIPTKPGERVKTDRRDAKKLARLLRNGDLTPVWVPGPEQEALRDLVRLREDANIDRLRKRNQLGKFLLRNGIHPSQKTRPWTVKYWQWLKALHFEQYAHQIVVSESIQTIERAEALVNRLDKAIEEAASHLTNPKLFQALQGFKGIGLITAATLVAEIGDITRFKTAKQFMAFVGLVPGESSSGGTRRQGRITKTGNAHVRSVIIEAGWHYLKKPVVGKALQKRQANLSEAVITIAWKAQQRLNHKYRKIAAKGKPRQVAVVAVARELLGFVWAMANQVAKENSVA

SEQ ID NO: 358380 - protein, 362 aa, unidentified
MATITIGIDLAKLVFSACELDAAGHVRQRRDLRRDALGSWLAQLPAGTVVAMEACSGAHHWARYCLSLGLVPKLIAAQFVTPFRKSRTAKNDRNDAEAIATAARQGNMRFVPVKSIDQQARLAVHRVREGYKVEALATSNRLRGLLAEFGVVVARQDQALRHAVGDLAIRDQLPGALLHLIDDLALHWKTVIERIVACDAAIASTASKDIRCVRARQVIGVGALTADALVATVGDAREFKNGRQMAAWLGLAPTQHSSGGKSRLGTISCRGDSYLRTLLIQGARSSLQRAKAVAIEKATPEQLWIRDLVARLPFGKVLVAIANKHARQLWAMLAREEDYDAHAWLKHPMVQRPRSTRPFQTA

SEQ ID NO: 358381 - protein, 355 aa, unidentified
MNQEKYIGMDVHAATISAAVRNAEGKLLMECVLETKAATILEFIQGLRGTLALTFEEGTSATWLHDLLKPHVSRLVVCDPRKNALLRDGNQNDRVDARNLAELLRTNQVKPVYHENHGTRALKELGRSYLTLTRDSTRAMNRIKSVYRSWAIPCAGTSVYSRRHRAEWLAQLVEPGVRIRAEHLYEQLDSLQPVRQAARRELLRESGKHAAVKLLRQIPAIGPIRSALLVALLQTPHRFRTKRQLWAYSGFAVQTYDSGEFRIVRGKLQRNRERITVRGLNRNHNHDLKNLLKGAAISAIQRPGPLQDFYAALVEKGMRPSMARLTLARKIAAITLIIWKKGVSFDPKQLQRQAA

SEQ ID NO: 358382 - protein, 339 aa, unidentified
MNAVGIDVSKGKSMVAIMRPFGEIVSAPFEIKHTASDINSLVKLINSVEGESRIVMEHTGRYYEVLAHQLSEANLFVSAINPKLIKDFDNDSLRKIKSDKADAVKIARYALDKWQNLKQYSVMDELRNQLKTMNRQFGFYMKHKTAMKNNLIGILDQTYPGVNTYFDSPARSDGSQKWVDFASTYWHVDCVRKMSLNAFIDHYQNWCKRKKYNFSQSKAEEIYGKAKELVPVLPKDDITKLIIKQAVNQLNSAAATVESLRTLMNETASQLPEYPVVMAMKGVGASLGPQLMAEIGDVSRFTHKGAITAFAGVDPGVNESGSYEQKSVPTSKRGSSDRS

SEQ ID NO: 358383 - protein, 355 aa, unidentified
MHKQSIDYTNQEFFLGIDVHKKSWKVTVRTNGMELKTFSMDPSPEQLYRYMHKRYPGGKYYSVYEAGFCGYWIDRELKRYGFNNIVINPADVPTTQKEKSTKTDKVDSRKLARELENGSLTGIYIPDEFHQQLRSLCRLRFRVVQSQTRLKNRIKGYLAFYGYVIPGHDEMSHWSRGFIEWLKTLEFSYGMGRDYLRLCLEELESHRRRLAEVVRLLRRYCREYGIGEEVKNLRKVPGVGFVTAMTLYGELMDMSRFGSVDHLASYVGLVPSISASGERESSLGLSFRRNRYLRYLLIEGAWVAIREDPALGYVFSQLIKRMTKQKAIVRIAKKLLNRIRYVWKHKGVYACGLLS

SEQ ID NO: 358384 - protein, 390 aa, unidentified
MAKKVRSWAGLDVHAAKVVACVVDAESGEMTLHRLAGDTAKVVAFCAALPGPTRVAYEAGPTGFGLARALLAAGVECVIAAPGKIERPAQDRVKTDQRDAERLVRLLMINALHAVRVPGLAEEALRDLTRAREDLRGDLMRARNRLGKLLLRYDVRYEGTWDRWTERHRAWLAKVELPERGAQATFLDYLGAITALEIRRGTLEATIAELAPASRWAGDIARLRCLRGIDTLSAVGLCAEVGDFARFERPAQLMSYLGLVPSERSTGEARRQGAITKSGSSLARWLLIEAAWHYRHSPRVGTKLARRQHGQEPAVIALSWKTQQRLYQLWRGLDHKRGKRRQLVAVAIARHLAGFCWAIVTLDPHTTRGGNTTASDTPELTPALAPSTPD

SEQ ID NO: 358385 - protein, 320 aa, unidentified
MAEITNSTNVGIDVSSGWLDIVVTPSGETWRTENTEEKADVLVKKLEELKPERIVIEATGGYEQMITAKLYQAKLPVCRVNPRRVRYFARSIGQLAKTDKLDAKVLARFGEMTQPPLTQLPSEDEQLLSVLLTRREQLLNILVAEKNRLGLAPTKVKPSLDEHITWLKDQIKALDQEIDTFIDHSPELKEKDELLQEVEGIGPKTAAKLIADVPELGNCDRKEIAALIGVAPYSQDSGKKKGQRAISGGRPDVRCILYMATLTATRCNPVIKECYQRLVKAGKKKKVAIVACMRKLLTILNAILRDRKPWNPVAHSPSAA

SEQ ID NO: 358386 - protein, 295 aa, unidentified
MADCSEVFVGLDTSKLRNAVAIAEGGRNGEVRYLGEIENAEAATRKLVRKLAASHQRLTFCYEAGPTGYGLHRQIKALGHECVVVAPSLIPKKPGDRVKTNRRDALNLAKLLRAGELTAVWVPDARHEAMRDLVRAREAAVDDLKSKRQQVLSLLLRLGLHYTGKRTWTRTHMRWLVGQKLAHREQRIAFEEMLLAVRQAEERVIRLEQAISAAVPEWSLAKVVTALMAVRGLNLISATIFLAEIGDLSRFASPRQLMAYLGLVPGEESTGDRVWRGGITKAGNHRARRILVECS

SEQ ID NO: 358387 - protein, 357 aa, unidentified
MEKCLKQSLGIDVSKLNLSLSLGFLSEGLVKEFKSHPDVSNDVSGYKVLLQWLSKSVDSNVELLVVMEATGVYHQGIAHYLHKQGYAVSVMQSGRVKRYAQSLDQRSKTDALDSKMLSMLGLERSIRLWQPPSKELQQLKALSRERSSLLKDRTIENNRQGAIESSVYSNSKALKRHKNRLKLFNSQIELIEQEMQELTSKNDVLKRKLGFMISIPGISYISAATVIGETLGFESIVNAKQLTSYAGYDVVLRESGNFKGKTRISKKGNSHIRAALHMPSMTCVRCNPTLKQFYNRLKPNKAKPLVALVAVQRKLLILMYTLWKNEENYDAEFEIKKQQKYEAFAAQDNNLINQLVS

SEQ ID NO: 358388 - protein, 412 aa, unidentified
MEVLHRHCAGLDVHKDTVVACVRHMVDGTGKREVRTFKTTTKDLVALSEWLSAEDCTHVAMEATGIYWKPVWHILADGEFTLVLANAAHVKNVPGRKTDVNDATWLADLMAHGLIRGSFVPDEPTQEMRNFLRTRKQFVRERSSHVQRIQKTLEDANIKLDSVITDIMGLSGRRMIEALIAGETDPFALAVLAHRRIRASQAELEAALRGRVTDHHRFMLRLLLQHIDAIEAAIGQIDQEVDAHVEPFRTAIEILSSIPGISDLSAGVIVAEIGIDMNRFPTEGHLISWAGLCPRNDESAGKRRSTRMRKGAPWLKTTLIQCAWAAARTKGSYLQAQFQRLRARRGAKKAIGAVAASVLTAAYHMLKNGTLYQDLGAHHFDSRAKGKQVLRLVSRIQNLGFAVQITPIGAAA

SEQ ID NO: 358389 - protein, 310 aa, unidentified
MERYVGIDVAKASLAVATWPDDVQWTTTQTEADLSALVTRLHALAPRLIVLEATGGYEALVAGQLAAAGLPVVIVNPRQVRDFARALGQQAKTDPLDARLLALFGARVRPDVRPLADAATQDLLAQITRRRQLIEMLGAERNRLGLARRPVRKPLQAHIAWLERQLTTLDDAIAAAIHDSPVWRAREDLLRSVPGIGPQTARTLIAHLPELGHLSHRALAALVGVAPFACDSGRQRGVRTIRGGRAAVRAPLYMATLTATRYNPIIAPFYERLVAAGKPKKVALIAAMHKLLTLLNSVVRHDRRWDPHIA

SEQ ID NO: 358390 - protein, 370 aa, unidentified
MAHKLNEFAESTKLFKKIEKKEGGKISFALEGKNGYSNPLDRILLDKGFTLYNVDNLKLKRFREAFAGEWRDDHRDSLMLSKMLKLKDYINSKREKVFIKIEKPSLVTESLKLLSRHQQTLIDEKVRLISRLGKKLLEVCPQILELSKLKNKKIIAILAKYPDFSKYKRITLKSLLKIKGIGKRQAPFLLKRLNHIEYMSGLTDIYKTIILSFTKRILVLQKEVEDIDKKLDEIGEKSKSVKHLKTIPGVATKLSSRLIGEIGDINRFPSEKQLAVYCGVACVNNDSGKVTKAKAVYKANKICKQTLITMAGGSIRFSFQCKAYYLKKRAEGKAHNHALRCMARQLIKVIYKMLTEDRNYMIRKELKKVA

SEQ ID NO: 358391 - protein, 355 aa, unidentified
MDDKKYIGLDVHQATISVAVLDASGKLAMECVIATQAVTILEFLGGLRGSLCVTLEECTQAAWLYDLLRPHVAELVVCNPRKNALLKEGNKSDRVDARKLAELLRAGLLSPVYHGENGVRRLKELARSYLALSKDLARVMNRLKALYRSWAIPCSGQTVYAPRQRAAWLAKLPESGIHRRAERLYEQLDQLRKLRLQARQELVAESQKQGAAKWLRQVPYIGPLRAALLIALLQTPQRFRTKRQLWAYCGLALRTRSSADYRYQAGQLQRSQKPPAPRGLNANHNHDLKNLFKATASAAVGGNGPFQEFYAALIATGKKPTLARLTLARKIAAITLSVWKKGARFDPGQLKRQAA

SEQ ID NO: 358392 - protein, 467 aa, unidentified
MTPPKDFCLDPGPPAPTPTFPPSPVLSDALQICHPHAAGIDIGEAEHWVAVPPGCDPQPVRRFGTFTVDLDALADWLIDCGVTTVAMESTGVYWIPLFELLEARGVQVLLIDPRQAKRAPGRPKTDRLDCKWLQRLHAYGLLAGAFRPEDQVCVLRSYLRHRQMLLTSAAQHIQHMQKALQQMNLKLTQVVSDITGVTGMAILKAILAGERDPVILAKLRNSHCQHREDEIAKALQGTWRAEHLFTLQQAVALYDFYHQQLALCDRQIKAHLETFADKSAGQPLPPKARRHKKTNEPRFDARTPLYRLAGVDLTTIEGIEENTALIILSEIGTDMHRWPSVKHFCSWLGLCPQHQISGGKVLSRRVRPGAHRVTVALRLAARTLHHSQSALGAFFRRMKARLGTPKAITATAHKLARLVYSLLQHGSAYVQQGLDAYEAQYRERKVTTMAKQAKALGYTLVPLAAQG

SEQ ID NO: 358393 - protein, 354 aa, unidentified
MIIIGADYHPGFQQIAFVDTDTGELQERRLEHREDAEKFYRDLAAQELKVRVGMEASGHARWFERLLGELQFELWIGDAAEIRTKRVRKQKTDRQDAQLILRLLLEDRFPQVWVPSWENRDLRQLLWHRHRMVQARTRTMNQLQAVALNEGLRCKKKLWRDAGREQLESFRLAPWASRRRRDLLELLDRLTPTIAELTQAIEQEAEKCPAARRLQTHPGVGALTALAFVLIIGRADRFECGKQIASYLGLVPSEESSGQRRRLGHITKQGNSLLRFLLVEAAQVTVRSDQEWRNRYFHLVLRRGRKIAKVAMARRLAVRLYWMWRRGWDYQQLKKFGSHAGEPGNPDGVQSSTE

SEQ ID NO: 358394 - protein, 365 aa, unidentified
MNTTTTATGLVGVDLAKNVFSICEVDGGGRVGRRQDLTRDAFGVWLVQRPAGTVVAMEACSGAHHWARRCEEYGRVPRLIAAQFVTPFRKRRTSKNDRNDAEAMATAARQGNMRFIPVKSVDQQARLSWHRVREGYKVESLAIGNRLRGLLAEFGIAVAKSESALRTALADLARNTGLPLGMKELIGDLTDHWKQIRDRIAACDARIEAHARADERCVRLRSIIGIGPLTADAMVASVGSARDFKNGRQLAAWLGLVPTQHSSGGHTRLGTISCRGDVYLRTLLIQGARSSLQRAKAVSTEKATPEQLWIGQLAARMPFGKVLVAIANKHARQLWTMLARDVDYDPSASLRHTMRSTTQPAIAAM

SEQ ID NO: 358395 - protein, 344 aa, unidentified
MSNLDTCGIEISAQELVVRLRRQGDWEPLRTFTNTPEGREMVLRYLRQAGRVVRVCLESSGLYGLDLALALSAAPGIEVMVANPRAVRHFAMALMKRGKSDPLDAGVLEEFAARMPFRVWKRPSVRALGLHALARRLHELVEIQTAEKSRRHAAGLSETTPAVVRRDLARSLRAQERAIERLTRQARKLIAQDPELTERFELLDSVPGIGETSAVQLLGELAVLAPDLEARQWVAYAGLDPREHTSGTSVHKKPRISKSGNAHLRHALFMPALVAVPHDPCLGGFYQHLLAKGKFKMQALVAVMRKLLHALHAMFKNHQPYDGSKLFRIPSIPAQEVPRAAVAC

SEQ ID NO: 358396 - protein, 416 aa, unidentified
MPLALPDALFFTGIDWAAETHAVCMLDTAGKIAAEFTIEHSADGIAALLRRLARYGDPGGMPVAIERPDGRLVDLLLEAGHPVVPVKPNAIKAWRDGEVLSGAKSDAGDAVVIAEYLRLRAHKLTVAVPCSDETRALRTVVRTRGDLVEMRVAATNQLSALLEAHWPGARAIFADVESPISLEFLTRYPTPAAAAHLGEKRMAAFCVKHGYCGRRSAAELLARLRAAPAGTGLESLAEALRDAVLAAVGVLRALNASVKNPGRSIAAHLGEHPDGAIFTSLPRSGQVSAAQVLAEWGDCRQAYEHPDSVAALAGVTPVTKESGKHRAVHFRWACNKRFRVAITTFADNSRHASPWAGKTCNDARAAGKDHPHATRILARAWIRVIYRCWIDGVPYDPARHGAAAALAEQSAKQIAA

SEQ ID NO: 358397 - protein, 323 aa, unidentified
MSNTNPVRHVVGIDVSKRTLDVCLLPADAPHGESFRLSNDQEGIDELLSYLEVASPELVVLEATGRYERLAATSIAAAGIAVAVINPRQARDFAKATGRLAKTDQIDAFVLARFASAIAPSPSVIPDEEAQFLQHILARRRQILSMLTAENNRLQMAPKALQKRIRAHIKWLEKELSRTDGDLDEAIEASTTFKENEALLKSVPGVGPVLARTLLAELPELGTLTHKRLCALVGVAPFNRDSGDRRGKREVWGGRAPVRAALYMGTLVATRYNPVIREFYERLLAAGKPKKVALVACMRKLLSILNALMRDRAIWRCPHVLNP

SEQ ID NO: 358398 - protein, 341 aa, unidentified
MDKELYFGVDVSKKTLDLAYYDGEAIDWKNAHIKVSNDDAGFKKIGSWIAKVGKDFGTFLFCMEYTGLYNQDFRLWLESKKYIYGMVEPRKMHHFEPDLDDDQRSLDRIKTDELDAFRIAIYCEQNHKKILRNPSKLPSPVYFKLKRLLAERKQNTKQSTLYKQQLHDICAYDTDLSVERKKLQLKNMQENQKAIDREIDSYMNEDASISKNYDLLTSIPGIGRIIALETIVLTENFTAISNSRKYACYIGIAPFKKESGTSVRKRTSVSKKGFSEAKADLSIAVLSAIKNNPSIRDYWIRKRKEKCGGIVLNAVKFKLVLRMFAVIKRGTPYVETDAYKN

SEQ ID NO: 358399 - protein, 348 aa, unidentified
MAHFVGLDVSVKKTSVCVVDAADRVILEQTVPTEPADIIALLTSLGVSFCRIGIEAGPLSQWLVNALTAAELPVICVETRHMKALLTAQQINKTDRNDARGIARMMRVGLFKPVHVKTLVAQEQRMLLTSRKLLQRKLLDLELELRGTLRNFGLKVGIVSGSRYEARVRELVVGFPRLAAIAEPLLNVRRVMRQQLAVLHKMLLDTVRDDPVCRRLMTAPGVGAVVALTYRATVDQPQRFVHSRAVGAHVGLTPKRYQSGETDYDGGVSKCGDALMRTMLYEAAHSLLTHSRKWSWLKAWGIRVAQRRGMRRAIVAVARRLAVVLHRMWVDGSEFRWSKHSVAVPPVA

SEQ ID NO: 358400 - protein, 338 aa, unidentified
MNKFNHFVGIDISKKTFDAALIIGSDTTNIKHQIFKQNAEGFSEFLDWLAYYKITNDEVLICMEHTGLYTYGLIDFLVAAGLKLWVEMPLRIKRSMGLLRGGDDKAAAIQIALYTYRYKDQVLLWKPEQAIVLQLRQFSGQRDRLKQALNQLMIPLQEIAECYHDAAIIKVQLKLQAPVIKAIEKSIASIETQIDKVIAAEPAIQATIARVSSIKGVGKQTAIHVFIYTKGFTTFSSGKQLASYCGVVPFTKTSGTSVRYKTGVSPFANKHLKKLLHLCAMAAIQHNDELKHYYYRKILEGKNKMSVVNAVRNKLVQRIFAVVRDGRNYVENYQYQRA

SEQ ID NO: 358401 - protein, 404 aa, unidentified
MLNVGIDWGLSGSYYVILSDDGEIVKDDPVGSSFEDIMDFADMLLKMAPETEQIRVGIDRKRCPLVSVLLSEELTVYALNPKSTDRARDIFQPAGEKDDGGDAFVHAQMVRMSHRRLSALEKRDDLHAKLSCLLRTRRAQVKMRSKLYQMLNSMLADWARGLYRLCPALQRTWVQDLLAEFPLDQDLATVHGNALNRFIRNHRMAPETERKIREFREQPYSEYDEQMAQFRRKQIRSHLDLIQTISEKVKEAESQIADLLEGSPEAAIFRTLPAQGDLTVAALVVLFGTDRTTDRNWRQYASFAGVSPITKESGNTRKIMMRKACDEMLRDALIDLAFATYRKDDCWASDYYRRKRDEGHSHHSALRRLAHRWVKILYFMWKRQADYDEDYHRRRRRERGGIAA

SEQ ID NO: 358402 - protein, 404 aa, unidentified
MFYLGIDVANKSHRFLIVNEQGEKPTNSFSLENSQDGFNLLLARLKTFSVVKENLLVGLEATGNFWENIYEFLSSLGFKVVLLNPFYTNKFREALRKKAKTDDIDALVIAQLLRTGEYGNCLVPDELVQTIRELVKLRYEFIKDLLNYKRQALALLNLVFPEFHKTAVKNPFAVASLKILQQFPTAKHLAKVKVSHLEKIVRHIQGNNFNCNELEKLIAEAKNSCYSGKAQIARGENLKMILCLVESLSNNIQNLDEQIQEILSPKDPDDSFPGENLLSIDGVGKKTLAAVLSAVGTDGKSFPDAKSIIGHIGFFPKIYQSGETQRDNRISNRGPKYLRWHLYMAAVASLKHNKEMQTLYHNKISQGKSSKQALICVAKKLAQMMLAMLKSGQPYNPARVFVNA

SEQ ID NO: 358403 - protein, 418 aa, unidentified
MNATEWNQQPYFAALDWARAHHDVVVMDRLGQVKDMIRFEHTAEGWQRFQELARRYPALPVAVETSQGTVVEQLFAAHVRVYPVNPKAAERYRERQAPSGVKDDQRDAWSLADALRLDGHTWRALSPQDPIVTELQLLCRDEIALIEQRTAFVNQLQQALHEYYPAALQVFDDWTCPAAWELVLSFPTPAALEQAGRRRWEKFLHTHRLWRKDTAEERMGIFARATALSGTAPTVAAKSLLAVSLVWLLRTLETQLASYRERITTVFARHPDHHLFGSLPGVGPKLAPRLLAEIGDDRTRFADAEGLQCVAGTTPVTFQSGKLRFQKVRYACNDTLRATVHLWVDHSREQCAWAKAYYQEHRQNGQSHACALRCLGQRWLKILWKMWQTRTPYDEALHTRNQTQHGSWLLTMKPAPFS

SEQ ID NO: 358404 - protein, 394 aa, unidentified
MVDEDHPQQAREQQKFATNGSDLKHLAVWLDSQGVSLVVMESTALYWRPVWLALEEQYVLHLAQAQSNAAPRGRKSDFADALRLARRFLAAELRLSFVPDAEQRTWRCVSRNKHQKRQRRVQIQNQIEALLEECQIKLSSVITDLLGLTGYRILKALAKGETDPAKLVELAAVNLKASKEQLAEAVSAPMQSRYRSILALQLEELDLLDKHIAELSRLLGKALQSHQDAVLRLCEIPGVRQDASLQMIAELGPAAMAFETAEQMASWMGVCPGREESAGKSNRNRSPKGNRTMRRVLNQVAWSAVRTKDSFFRELYHRLIPRLGVHKAIWAIAHRIAKVVWKVLHEKVRYIERGPLALDPAAMKRRVTRLARQMRRLGYTLELKPVVVAATGQA

SEQ ID NO: 358405 - protein, 348 aa, unidentified
MNYAGIDYHKRYSFVSIQDEGGQTLLERQVPHNDPRVFAEIFRQAGGDTAVVYECGLNWTWLYEVLEKIGNVKRIVLANAYKVRLIAEAHIKTDKLDARKLAMLLRLGVVPSCHIPSRETRKRKEVLRQRAYWVRRRTGLRNRVHRLIDRQHGLVMPQVSDLFGRKGKEALRKAILPDPDAMLLTQNLDVLDQLDAVIKADEQRIQSESKPDECMKRLLSVPGLGLITASIISTETEDISRFLRRERYTAYAGLAPTTYSSGGKTYNGRMMPGCNKWLKWAFIEASWVAVGCSSYFGGLYRQHRARGKKPTVAITIVARRMCHIVYQLLTEERFYEERTYPPAALGGD

SEQ ID NO: 358406 - protein, 429 aa, unidentified
MNCTQNKKIEQVKETTMIVGIDVGSEKHYFRAFNWRGIELTRKPVAFSNSMEGFNSFYNTIVELMQKSELEEALVGIEPTGHYWFDLGQFMGEKDIKFVMVNPHHVYKTKELDDNSPSKNDRKDPRVIAGLVRDGRYFYSYMPTGVYAELRNASNRRFVLVEEQTRAKNRLQKWIAVYFPEYKGIYTHIDAKGGMLVLKKAPTPEEIVRLGVEGIIKIWKDAKLRGNGHKKAMLILAAAMRSIGLKAGLTEARMEIQDLIEDYELQTKRLERVNDLIKGLCQQVRYADKLLEIKGIGITTVAGFIAEVGDITRFDSTKELQKLAGLELVADSSGKHNGKTKISKRGRKRLRYLLFEAAISVVGKNEEFKEIHRYYTTREKNPLKKMQSLIVVACKLIRVFHAILTKGIRYDASKMLKDIRHPGEQLKAA

SEQ ID NO: 358407 - protein, 440 aa, unidentified
MSELPVLDPRAAFVDVGSEQMYVSIAGGAPEVFGSVTGELHRLRDWLLAHEVRSVAMEATGVYWLPLYGVLEAAGLEVLMVNGRQTRNLPGRKTDMKDCQWGATLHAHGLLRAGFVPPAHIRRLQDYLRLRAEHVGSGASHVQHMQKALERMNVKLHDVISSLTGTSGLAVMRAILEGQRDPQRLLALCDVKIQRAKAQRVKESLRGTWAEEHLFALRQALASWEHYQRQIAECDRQIEALLGENGSADAPPDAPASARARKRPSPNAPEIPKLREILMHMCGGQDLTSLPAHTEYSVLQIIGEVGTDLTKWATEKHFTAWTGLAPGSHQSGKRKGSVKRKRNRAGRMFCLMARALARSKDIALGGFYRRLAARRGGLIANIALARKLAILFWRVMVKGIDYVEHGLAHYEAKVLQTKQRALRRLARELGQQVVPMSVVS

SEQ ID NO: 358408 - protein, 356 aa, unidentified
MSRDVKYIGMDVHKEAVVIAVLNSGGKLVMESIVETKASSILQFIHGLRGELHVTWEEGTWAAWLYDLLQPQVARVLVCDPRRNALLKEGNKSDKIDARKLADLLRTGMLRPVYHGEHGLRTLRELGRSYQTLSQDLNRVMNRIKALYRGWSIPCAGTQVYAPRYREEWLNKIEHAGVRRRAELLYQQLDGLQGLRRTLRPELLSESRKHKAAKLLRQIPCIGPIRAARLIALMQTPHRFRSKRQLWTYSGLGIETRDRAQYRYVQGQLQRSKKPQQIRGLNQNHNHEMKEIFKGAATRASCGVGPFHDFYVALLAKGMKPEMARLTLARKIAALALTLWKKEERFDAGQLKPQAA

SEQ ID NO: 358409 - protein, 399 aa, unidentified
MIENYDSVDVFVGVDVGKGEHHAVALNKMGKVVFDKALPNDEGKMRAVLQTLKQHGTVLVVVDQPATIGALPIAVAQAEEVLVGYLPGLAMRRIADLHAGEAKTDARDAAIIAQAARTLPHALRSIQLADESVAELSMLCGFDDDILGQMTATSNRIRGLLTQIHPALERVVGPHLDHPAILDLLQHYPSPAAMKAAGTTRMATRLLKLAPRMGRRLAEEITQALSKQTVVVVGTNAAATVLPRLAEQLAALRRQRTEIAVVVEKLVEDHPLSPVLTSMPGVGARTAARLLTEVAGKHFQSSGHLAAYAGLAPVTRRSGSSIRGEHPSRRGNKILKRALFLSAFAALRDPVSRTYYDRKIAQGKRHNQALIALARRRCDVLFAMLRDGTLYETEHRLTA

SEQ ID NO: 358410 - protein, 315 aa, unidentified
MEQPLATAPYVGIDVAKDRLDVHLRPSGQTLAIAYTEDGLDQLVATLQPLAPQLIVLEATGGFEVTVAAALAAAGLPLAVVNPRQIRDYARATGRLAKTDRLDAEAIALFAERVRPEPRPVADADAQALAELVARRRQVVAMITMERNRHRQARTLRVQRMIDATLKTLQTQLQRLDADLGDTVRHCPVWRAKEALLTSVPGVAAITARLLLAYLPELGRLDRRRLAALVGVAPINRDSGQMRGHRAIAGGRTPVRNGLYMATLAAVRFNPILRAHYQQLVERGRPKKVALVACMRRLLSILNAILRTGTPWQTA

SEQ ID NO: 358411 - protein, 328 aa, unidentified
MKKIRFVGLDVHAETITVAVAEPDGEVRSLGTIPNREESVRKLVNKLGPPQQLRICYEAGPTGYVLYWLLTSLGVQCDVVAPTLVPVKAGDRVKTDRRDALKLARNHRAGDLTAVWVPDEAHEALRDLVRARESAKQDQLRARHRLSKFLLRHGRRFAEGGKAWTLKYMVWVKQVRFTQPAQEYAMLDYLHEVEHMNERVLRLEQAIEEAVKLSPSWMQEVVQALQSLRGVAKISAATLVSELGEISRFENPRKLMAYSGAVPGEDSSGERVRRGAITKTGNAHLRRVVIEAAWSYRLRPGVGPGLRQRQKGVSEEVKDRMEGSAPAA

SEQ ID NO: 358412 - protein, 411 aa, unidentified
MQNRQNYLYVGVDLHKQHHTAVMINCWQEKLGEIQFDNKPSAFSKFLLKVETYVCDGITVVFGLEDVGGYGRALAKYLVDHEQVVKEVNPALSFLERKSQVMIQKNDSWDAECVARILINKFNQLPDAKPNDLLWSIQQLVSRRNALVKAQSALKNQLHIQLNHHYPSYKKFFSELDGKTALAFWEQYPSPSCLEGTNIKRLTTFLLDVSNNTCSVKKASDILKLVKEDGHTMKEYQDTRDFLVRSIVREIEFKKKEMKYIEKELKQLVNLLDYQLETMPGIELVTASALIAEIGDIRRFLNANKLARFAGIAPVYFGSGGKGKTHKSKQGNRALHALFYNLAVQQVQVAKGSKLPRNPVFHAYYQKKLKEGKTKGQALVCIMRRLVNIVYGMMKYKTAYELPVVEEKEVV

SEQ ID NO: 358413 - protein, 331 aa, unidentified
MDTTMKAWIGLDVSKDTIEVCVLRGNGKEHFKRFTNNESGYLKLLSWVQHLAPDAGVHFCLEATGSYSNGIALFLAEAEQTVSVLNPARIYYFARSQGQGNKTDKADARMIALFCCKEQPDLWRAAAPEVRQLVALVRRYHAVQDLLTQEKNRLQAPAQSKAVLTSLRSTVRFLEKEVERLKKQIREHFNHHDSLKQDAKLLQSIPGIGELTAWDILAELPDVSQFDSAQAVAAYAGLAPREHRSGSSVFKKTRLSKQGNARLRKALYFPAMNALTWNPLVKAHYDRLRAAGKIRMVALAACMRKMLMICYGVLKHQKPFDAQWQNTPQAA

SEQ ID NO: 358414 - protein, 364 aa, unidentified
MKEDGSIGEQYEIRNEEESWNEFKKRYLSVKPEIALEVSTTGKYVARLLRDYGFSIHLADPVKLALIFNTSKKNDREDSYKLAKLLRLNELPEIHLPSRESDDLRSLVRYRKSLGEEITRIKNRIHALLSVHGISLKQTDIFGRSGLIEIERQSVKLSPAERIVLDHMLSSVIQLRKNAMEIEDEMARSGHERYDVRLLMTIPGINVYSAVAIVSEIDSITRFSSKEKFASYTGLTPKQDQSGSRDIRGHVSKHGPSMLRFVLVTAAHSVIKYSRKMKQKYMHIVRRTGMKRAIVAIARILAETVYTMLSRNTEFMDSIDSLTERKITAMSVRAKKPAHITDISDTARLLRSQKFRKMSEEPFS

SEQ ID NO: 358415 - protein, 348 aa, unidentified
MTTAYIGIDLHRTVIQICVLDARGERIAEERIRYERLEEGLQAVVFVQRFAPDCRIAVEALGLNRWFVNACRNAGLDVLVCDPRKLDLKKLGKKTDRRDAREIARRLWLGDLDRMARTYYPSDEEYGRRKLLRVRHRLVQMRQQTINQLRALLNAYRLPAPRGVLYTRPSRQRLATVQLPVPELQQAFEALLAVLEGLQEQIDGLNRRVRQLPREEATVAVLVTQLPGIGAQSAATLLAELGDPQRFAGPRAVAAYAGLVPRVSQSADKAHHGRLTKQGNPELRWILSQWAVRLIKDNPLVRAWAQRLRRRVHKNKARMALARRLLVGLWMMLTRGEAFDLQRCLGQA

SEQ ID NO: 358416 - protein, 418 aa, unidentified
MKDIKTEKGKKINRKTLIVAFDIAQEKHMVYIRCPDGREEKPFVVFNRREEYEQMWERISQTREAYGAEEVVVGFESTGPYAEPVVHYLMKKEVKLVQVNPMHTKRVKELRGNSPNKTDEKDPQVIADIIELGNYLTVVIPEGTSAELRRLTQARERAVGRRTMLVNQVHGLVSVIFPEFLMVMKDIKTKTAHYLLKHCPRPQDIVGLGYERLVETLKKISRGRMGKERAEVLYEAAVSTVGVREGQGSIVFEIKQLVEGIEETERLIDETEEKMREYLKEIPYSRCMLSIQGVGEVTVAGLIGEVGDFTKYKTAAEITKLAGLDLFEVSSGKHKGERHISKRGRPLMRKLLYYAAINVVRKGRIMHERYERYLQRGMPRMKALIAIARKLLGVLFALVRDQSEYVRNSEETPLKKVA

SEQ ID NO: 358417 - protein, 338 aa, unidentified
MNYHNLIAIDLAKNVFQVCTMSTNNHVLMNKSFNRQGLTEFMLNQPTSVVAMEACYSSHYWARLFKSFGHQVKLLPAQHVKPFVRGNKNDHNDALAIAEASQRPGIKAVPIKTVAQQDIQSLHRLRERCVSQRTSLSNQTRGLLSEYGIVFPAGFKSFKQTLAVLLDPTNTQLTAPLKQQLRYVADEFDRMSARLTELNQVLAQIAQTNPHCQRLMSIPGIGYINATALYSAIGNGGQFNNARELSVWLGITPKQYASGNKQVMAGITKRGNRYLRKQLIHGARALMRYCKKRDDQLSQWLQAVEQRRGKNKACVALANKMARLCWTLLQTNQMYRSR

SEQ ID NO: 358418 - protein, 340 aa, unidentified
MVYGAIDLHSRFRQIRIVTADGAVVRERRVVTSRSPLRNAFAAVGAVRIRVEASTESEWVAQVLEAAGYEVIVADPNSASMDGTRHRRIKTDTRDVAALSDACRLGVFRRAHRVAAAQRTLRQELAVRRQLVRRRTGLIAHLRARLRQDGFRLGSGSRTTVHERVARLERPASLRGSLTPLLETLAALTPIIATTTRRLTTTANADPVAVRLHTVPGVGPLVALTDRATVDVVTRFPSAGHVSSALGLVPREDSSGERRQRGHITKVGPSEARTMLIQAAWPCWRSRTARTTPLRQWADRLAARRGARIAVVALARRLSRILYAVWRDDTVFRVTPARAA

SEQ ID NO: 358419 - protein, 375 aa, unidentified
MKEKLRFLGMDVHAETIAAAVAEPDGELRSLGTIPNRMESIRKLIKKLGPVEKLRVCYEAGPTGYVLYWQLAELGVQCEVIAPSLVPVKAGDRVKTDRRDAEKLARSYRSGDLTAVWVPDEGSEALRDLVRAREAAKQDELRARHRLGKFLLRSGHRPPTGVRAWTHLHLIWVSQIRFTQMAQESTRLDYLHEVEHMRERVLRLEQAIAEAVKLASPALQEVIKDLQALRGIAHISAVTIAAELGQVSRFAGARELMGYCGAVPSENSSGKRTRRGGITKTGNAHLRRIVVEAAWSYQRPPAIWAGLRKRQQSASEEANEIAWKAQHRLHKRYARLAAKGKDKRKIVTAVGRELLGFIWAIGTKAEATVRQRIAA

SEQ ID NO: 358420 - protein, 391 aa, unidentified
MICVGIDVAKDKHDCCILDSEGTTLADCFTIPNNLDGFKRLLQTIKDCTQKSDKIKVGLEATGHYSCNILGFLLDNDLPVYVMNPLHTNLYRKSLSLRKTKTDRVDAKTIATMLLSDVDLKSYTDTAYHNEELKSLTRYRFDKVQERAKLKQSVSRLVTILFPELEQLVSSIHGTSIYALLSEYPGAKQISEAHLTRLANILVKTSRGYYRKDKATHIRDAARTSIGSVMPAKSLELKHTIKLIQELTSEINEIEDAIRKIMDELKPPILSIPGMGFHSAAMILAEVGDFSNFNSPDKVLAYAGCSPSTYQSGKLTNCCAHMEKRGSRYLRYALYTATKYVCYWNPVFTEYLTKKQAEGKHYNVALSHATKKLVRLIYALQKSGKAYLAVT

SEQ ID NO: 358421 - protein, 316 aa, unidentified
MNTEPVYVGIDVAKASLEVAVHQSADRWRVEYTDPAVATLVARLTALTPSLIVLEATGGLEVPLVGVLAAGGLPVVVVNPRQVRDFAKATGRLAKTDTLDAAVLAHFAAAVRPPVRPLPDAATQGLAALVTRRRQLVDMLTAERNRLSCAPKVLHKELQAHIRWLERRITGVDADLEQAVRTSPVWRAQEDLLRSAPGVGPVVARTLLAQLPELGTLSHKTTAALVGVAPLNRDSGRFRGRRQVWGGRAAVRAVLHMGTLAAVRCNPVLRAFYLRLRAAGKLPKVALTACMHKLLTILNAMMKHQQRWDSTHAQTT

SEQ ID NO: 358422 - protein, 452 aa, unidentified
MLDKPQEIVDEEHEQVCERVAAIDVAKATGMVCVRVPDDARPGRRVSRVWEVQATTRAVIELGDHLACEGIEKVTLESTGDYWRIWFYLLEAAGLDVQLVNSRDVRNVPGRPKSDKLDCVWQAKLTERGMLRPSFVPPAEIRQLRDYTRLRTDLIQERTRHWSRLEKLLEDALIKVTAVASKIDTKSVRAMLEALIAGERSPRVLADLALGKMKAKRAALIEALTGRFDDHHAELARMLLDQVDQLDRQVDRLTGRIEELIAAIPAARGVDADGTAGPGAGAGPDAAVRSAVARLDEIDGIGPRGAQVVLAEIGLDMSRFPTAGHLVSWAKLSPRTIQSGARSRSGRTGKGNPYLKGILGEAAAAAAKTDTFLGERYRRLVKRIGKLKALVAVARSILVIIWHLLADPTARYQDLGAGYYASRTGKDRKLNNHIRQIEALGYTVTLMPAQAA

SEQ ID NO: 358423 - protein, 400 aa, unidentified
MVLTKQGEAQEQSTERGRVAVGIDPSRSALQIALLFPERGSPRSHRLPLEPASVNKLDELLEGRKATFAIEGAASVGQLFLLELLNQGHDLREVHPKVSKSVREMFTEDHTDKKDASGLAYAVRFVPSLPSIGLSSEQAAAKRLSRLRERLVRDRTRHINRLHACLTETYGAVYHQFFRELSSKKALCFFKQYPSLNDVLANPEEVRKKIGYKAWQAVKTIGKWTDGAYMRVLRREVAVLVDVILELKRQVDEIEKEMEAPPWGKDIEVLASMPGLGTIIAGTILGNTGDLSRFKNQDTYAAYCGLAPASWQSGASETRSKRRSRYNRHLKRAFLCLALTQIRVSPEAREYYSRKRKEGKTHWAALRALARQLCRIVFIMLRRAQPYSHQTTNTSLPLDI

SEQ ID NO: 358424 - protein, 355 aa, unidentified
MNDAKYIGMDVHQATISAAVRDSNGNLVMEATLETKAETILEFVHGLRGSLRVSFEEGTCASWLHDLLKPHVSEVLVCDSRKNALLRVGNKNDREDARKLSELLFLNKLHAVYHGETGIRTLKELARSYLTITRDLTRVMNRLKAIYRGWGIACAGQQVYAPGYRAEWLAKIAEAGVRRRAEVYYQQFDVLAALRQEVRRELLAESRKHPAMRLLRQIPSIGPIRAALLIALMQTPHRFRTKRQLWAYCGLALRTYDSGEYRFVSGQLKRSKKAVTIRGLNKNHNHDLKNIFKGAATRAAATAGPFQKFYEARLASGMKPPMARLTLARKIAAITLLVWKKGVRFDAEQVKQQAA

SEQ ID NO: 358425 - protein, 358 aa, unidentified
MEIKRSDVRFDGQEFCVGVDVHHRTWKVTIRTRGMEVKTLAMPPDPRGLHTYMVRNFPGGRYRSVYEAGFSGFWAHRQLTDLGIANSVVHPADVPTSDKERRQKEDARDSRKLARSLENGELKPIHIPDPGIEQLRSLCRLRGRSTSHIHRLKNRIKGHLKYYGLPMQEDSAYRHWSGPFIDRLQALCAEPGPRSDYLSITLDALREESCRLALITRKLRAHCREGEGARITSLLRSISGIGPKTAFALYTELQDIGRFPNLDKLDSFLGLIPSTDSSGEDETTTGITPRTNRGMRALLIEASWVAIRHDPELLRAFSVLSCRMKKQAAIVRIARKLAARVAYVWRTGTPYKRAVPTA

SEQ ID NO: 358426 - protein, 366 aa, unidentified
MAITHVALDDSKRVIVAGILRADAVQPELREIPNEPRQVRRLFERLLHEAPVRACYEAGVSGYDLYRQLTALGVDCAAVAPALTPRKPGERVKTDRRDAAKLVRLFRAGELTAIHVPTEAEEGVRDLTRCRDDVRADIVRWRHRVLKLLARHGRIYQAGKNWSQAHWTWIRAQRFEDAALARTLEAALEALDQAMRRRADLDRAIEDIATEPPYRDAVGALRCFRGINTLSAMILVAEIVDFERFRRPRALMAYLGLVPSEYSSGDRHRRGALTKAGNTHARRVLVEAAWHYRHRPALGPRLARHTADQAPAVVAEAWRAQHRLHRRYRHLVGHGKRPTVAVAAVARELAGFIWAAMTQAPRVRAA

SEQ ID NO: 358427 - protein, 346 aa, unidentified
MNSVGIDLHRKRSFVAVIDDHGELALSRRIVNDRATFLELLGGLEGESQIAVEATYGWEWLAELLEDAGYDMHLAHPLRTRAIAAARVKTDAVDAKTLAHLLRAGLLPEAYIAPRELRDVRDLLRHRAALVAMRTALKNRVHALLARHGIHHQHSDLFGKAGRVFLDELELRDASRRRLSSLLSLIDDFDREIIATSHEIDQQAKVDERVTLLCQIRGVGRYTAMLIIAEIGDIRRFPTARHLCAWAGLTPSVRSSDTKTRLGRITKQGSHLLRWALVEAAQKTPTGGGPLREQYERIAKRRGAKVARVAIARQILTLSYYGLRDGEIRRLKPPAPASPMKVSATA

SEQ ID NO: 358428 - protein, 357 aa, unidentified
MGKSIRNLAAVTRVGLDLAKRVFQVHAVDAKGEIIVARKLTRSQLVPFFAALPPCVVAMEACASAHHWGRALMELGHEVRLLPPAHVKPYVRRNKSDQVDAAAIYEAMSRPGQRFVPVRSIENQAALMRHRARELLAGQRTAALNALRGHLAEIGLVAPQGAQHAYGLKRMAADGFNENGEIVVPDCVRGALGPVIGHIDALDEAIGAIDSELAASVKADETAKRLMTIPGVGPVTASAIVATIQDAGAFASGREFAAFLGLTPRQNSTGGKTRLGRITKMGDRYLRKLLVVGACATLRHRRGHNDALRLWASGMLECKTVKYKFNLTAVALANKVARIVFVLMTRGGQYDGRPVAA

SEQ ID NO: 358429 - protein, 340 aa, unidentified
MNIKRIGIDLAKNSFSICAVDANDKIVRERTLKRKDLLAFFADIPPCMIAMESGSGAHHWSRTLIAMGHDARIIDPKFVIPYRTGGKHRKNDRNDARAICETAGRPHMRFVPVKSESQQAILVIHRRRRQVVAEHTRTANQIRGFLAEFGVIAAKGVNTLKREWARLRMEHAEHLPLLAWEELDALYSQLLSLHQHILSYDRKINHLNKEDQRTQRLMKISGVGPVTASAIVATVGNATVFKNGRQFASWLGLTPREHSTGGKPRLGRISKRGDVYLRTLLVHGARSELMLTHKRPDAKSQWAEYLKLNKSWNKAAVALANKHARIIWALLAKNETYHLV

SEQ ID NO: 358430 - protein, 384 aa, unidentified
MDALYQSCAGIDVHQANIVVCILHGPLTSTRPKREVATFDTTTKGLRACHDFLSQFHVEAVGMESTGVYWRPVWHALCDDFELILAQPAHMKAIPGQKTDKKDARWIAKLTRIGLLPRSFVPDETIQELRELTRQRKHYVESRNRETNRIHKILQSGGIKLTTYIEDIMGLSGRNLLQLLVDGTPIAPRIVHQSVYTSLKKKVPQLLEALDGYFSDHHRFMLKQSLEIYDFYQKQIELLEERMNVYLSQYENHVEILDSIPGIDVITASVIISEVGVDMSQFPTSGHLASWAGLCPGNNESAGKKRSTKIRHGNSYLKKCLCQAAFAIKKQKGSPLADRFYQIKSRRGSQKATIAFAHQLLKIAYTQLKSKIAEVQSLSTIDLS

SEQ ID NO: 358431 - protein, 344 aa, unidentified
MQITTIGLDLAKSIFQVHGVDAAGQAVVRKSLRRSQMLPFFAKLPPCLVGIEACGTSHHWARELIKLGHEVRLMPPAYVKPYVKRGKTDAADAEAVCEAVTRPTMRFVPVKSPEQQAALSMHRTRDLLVKQRTQLVNMIRGLLAEFGVDIPKGLERALLMARQIVDGKAPEVPTEAVKIVATLSQQALDTHVRLREMDRDLTVWLRGNDVARRLMTIPGIGPIGATALAASVTDPHQFRSGRQFAAWLGLTPLQKSSGGKERLGRISKMGDKYLRKLLIVGMTALVRRAKYNPGKIDPRLADLLARKPTRVATVAMANKTARVIWAILARGETYRTDHQPALAA

SEQ ID NO: 358432 - protein, 463 aa, unidentified
MRPVQRSQKPQPELPTELQQVNLHAAGIDIGATSHFVAVPSSGDPQPVREFGAFTRDLHQLADWLQSCGVETVAMESTGVYWIPVFEVLEQRGFVVKLVDPRQLKRAPGRKTDVLDCQWLQQLHTFGLLVGAFRPPDQVCVLRSYLRQRENLVRSATREIQHMQKALTQMNLQLHHALTDVTGATGMAIIRAILAGERDPRALAKLRDYRCKNDEATIAKALEGTWREEHLFALQQAVELQDIYQEKIKACDTRIQATLGTFADRSEGAPVPKRSKDKGRKRRALAPAFDLHPELFRLTGVDVTSLDGIESLTALQILSETGIDVSPWPTEKHFASWLGLSPGSKKSGGKMLSSRTKSSANRAAAAFRMAAQSLHRSRSALGAYYRRMRARLGGPQAITATAHKLARTFYALLKYGHAYVDPGQDAYQRQHRDRAVKALRRRARELGFDLATNQGKLSAVAPA

SEQ ID NO: 358433 - protein, 391 aa, unidentified
MHKDSIFCAIYNGKDYTEVKEYETTTPKIYQMGEYLLSEGVCQVAMESTSTYWVPVWDLLLEMGFDLMLVNPFLIKQMPGRKSDVKDAQWIACLLHKGMLRGSMIPSPAIQELRTYSRKYTKLQEQKTRSLQKMDRIMVMCGFRIGSCMSNLGTKSVLLVIQALIMRETNPEILERLVYGNTANKTSGKLREALTGNLKEHYRQQLEWEKQEYDLFEIQTEQCLTQMRRICQEHYSREMGLIRTIPGVSEISAMIIIAETGGDMSVFENSGKITGWTGLRPRNDESAGKYKSTATTKGNKYLRSVLVQVSWAASRIKNGWFKEKFNRLAMRKSRKKALIAIARKLLTITWNVLYYKTPYNPQWVHIYDPIKVEAKINYHQREMERMQNLLK

SEQ ID NO: 358434 - protein, 368 aa, unidentified
MKRDFVGGNVGLLINHRQEAGKMLYAGLDLSRHRVDVHVLDEDGRTVEVTAVRPDADALRTLVSSVARHGHDVSAVIESMTGARFVHDQLELSGWDVEIADAARVKGLAPLAAKTDKIDAWVLAELARRDLVPAIWLPDPSVRAERERARFRLHLVRLRTALKNRIHATLTSFGHSVAVSDLFGVTGRELLSRLALPEPWLTTLATSLRIVDQLSAEIDACERDLRTLGREDRAVTLLCTMPGISWVLASTIASELGDIGRFATPKKLAGYTGLCPFVRQSGNRDLRGPLAKNGPKYLRWALIEASLGASRHPQYRDRYERTKRRLGRQRGAKVARIELARDLCTAIWHMLTRDQPFAPAGPAIHLVA

SEQ ID NO: 358435 - protein, 347 aa, unidentified
MSESYEGRQFVGIDLHRRRSVLVRMTETGERLETVRISNDPEYLRQVMARAGEHPEVVLEATYGWYWAADCLAELGARVHLAHPLGVKMFSLRRVKNDERDSADLADLLRMGRLPEAWIAPPATRELRGWVRHRAKLVGLRSNLKCQIHAILAAAGVQVPMSDLFGAAGQQLLATVGLAAESRARIDSLLRLITALDFEVELFAKLVAGRLRTHPGYQAIQAIPGVGPVLAAVFVAEIGDITRFHRPAQLASWAGLTPKHHESDTTVHRGRITKQGSRLVRWAAVEAVQRVGAHTGLGQVREQVGARRGRNIGVVAAARELTELVFYGMRDGRIRRLAPPPSRTPAA

SEQ ID NO: 358436 - protein, 439 aa, unidentified
MTSKHPFDLVIGLDRSDRKADLQLIDTRTAQTQKQTVATSPEALHDWLAQLRQQHPQSCIAICLEQPAANLILFLETYQWITLYAINPITLQKFRESFVTSRAKDDGKDAQYLAELLLTHHGKLKPWQPDDSQTRQLQQLVSHRRAVVDERTGLSNRLKALLKQYFPQALELCGEDLWRPLATAFLLRWPTLQALQKARKESIKQFYHLHGSRSQKRIAHRVELIEKAVPLTDEPAVLHSHTLRVRLICQELQLLRQALEQFDRQIAEVFGQHPDREIFAALPGAGPVLAPRLLASMGSERERYGRAASLSCFSGIAPVTKQSGGKRHVHRRYRCPKFCKQSFHEYARESILHSRWAAAYYGQQRAKGCSHHTAVRALAYKWQRIIWRCWQSRATYKEEVYEAALKRSGSPLVALLDGIELGKSPVKNPKKSLAGLPQR

SEQ ID NO: 358437 - protein, 320 aa, unidentified
MLSFCGIDVSKDRLDVMVLPDEYSSSVPNDPAGWAILVEQLRGFSITAIGIEASGGYERGAVRSLQAAGMPVRQVNPFKLRQFAKASGVLAKNDPLDARMIASFVGIMPTRPVQRTTPAAEQLVEMLAVRRQLSAEKTAAENASRLLEDLMLQRLSRRRIARLAADIELLDKRLVESVATDATLAHRYRLLTSMPGVGPVLACTLIALLPELGGMSRKQVAALVGVAPYAFESGTLKGRRCIWGGRANVRQVLYMAAMSASNWNPVLKLFHDRLKGAGKLPKVVIVAVMRKMITTLNAMVRDDIAWADRLSGRHSVTTAR

SEQ ID NO: 358438 - protein, 428 aa, unidentified
MDAWDRSRVEQFRQLKKEIRGSEDHLIVGIDVSKDRHHAFLGTATGKPLLKRLVFENSAEGVEKLLNQVERLRSEGGFREVVFGLEPTGNYHKPLAEFLIRKFAQVVLVSGVAAKENRKTLDGRWDSNDGKDAANIADLLSQGKFLFYEYPDPRLRELRSFLTLKRRLKRQEHGYRVRIRNSLVAKYFPELDGYFDQSEKYALAIVRWCLDPRSLSAYRFDEFVQMVASGKRGGQQHNRLRRVLEMARGSIGCEMGPAVKFEAELMVEGLRQIRQMIDDVESQIGRLCQEFPEYDYLLSIPGFGPDVSSKVLGAVGDPFRFQNEKQVLKLAGWDLNAERSGKSSDSVRPVISKKGKADLRYALYQAAMIASIKDPHFIVYYTNQLRGREREPGIKTKRRVKLAAKLLVIAWTLMKKKEPFNPDYLKSE

SEQ ID NO: 358439 - protein, 426 aa, unidentified
MKKYTQNDKIEQVTEKTLVVGVDIGSTKQYARAFDYRGRELDRVYSFMDCRNGYELFLDWMQGLRSANGMDKIIVGAEPTGHYWFGLRDFLDAAGIPLVLVNPLHVCRSKELDDNNQTKNDQKDPKVIARLVTEGRYSIPYIPHGVYAELRGMWFLRQRVVDEEVKLRNRIARWFKIYFPEYTQAYHSFAAKSSIALLKAACLPEDILQLGADGIVELWRAMKLRAVGKKKAESLLAAAARSTGQKDGAGAARMEMEMLLEDWESLRKRHEKIDEKLGELCEQIPESKNLLAIKGIGLATVAGFLAEVGDIKRFDSPKQIVKLAGLALRENSSGKHKGKTTISKRGRARLRRLLFAGVMPLLATNDAFHSLHVYYTTRKQNPLKKKQSVIAICCKLVRIFYALLTKGTAFDSSKMLGDIHRPPMAA

SEQ ID NO: 358440 - protein, 342 aa, unidentified
MNYYAGIDVSLEASSICVVDASGKIIKEAKVLSEPEALIAWFKALPFTLARIGLEAGPLSQWLYAGLKDAGFAAELLETRHVRDAFKAMPVKTDRKDARGIAQLMRLGWFRPVHCKSAPAQETRALLTARKLVQAKLYDVQMSLRGILRGFGLKVGRTTPVGFAVRIRELTEHHPALSAIAKALLAVHEVLLRELNGFEKQVRKQARCDSRVRLVMTAPGVGAIVGLTYVAAIDDPERFSSSKTVGAHFGMTPKKYQSGETDLTGRISKSGDKGVRAVLYEAAHIILTMPVKGGALKSWAAKLAKRAGMQRAKVALARKLAVILHRMLADGAPFDAAKAAAA

SEQ ID NO: 358441 - protein, 353 aa, unidentified
MAQPVRALVEGVDEFIGIDHHKKRCQVMVKDRQGHVLRRGNIPTQRQALERFLGERNGAVRMAVFEAGPRYRPLYRWLVGLADEVVMANPGRLKIISETAYKDDEIDAEKLADFGMLGMVPEAYVCGDEAWDHRQWLRQRAALVKMQTSVKNRVHALVDQHPDALPARPEATDLFGSLGRAWLGEVALPEADRKRLDQLLEVYEFLHGQVRRSDGGVRRMVKADVRCQHLATIPGIGDFFAALILAEVDDIRRFPRSKDFVSYTGLVPGRDRSDEVDKPRRIHKRGSKWLRWALVEAAVPATRSNLALKNLYDRVCRKKGPLAGPNVAKVAVARKLAEIVYRILVEERPYEVR

SEQ ID NO: 358442 - protein, 319 aa, unidentified
MGIDVSKQTLDVSVMIGGKPLGKQVPNNDEGYRALVAWLQHRKVAVAHAGLEATGHYSLGVALALHAAGHTVSIVNPAQIRDFARSRLGRNKNDRVDCTHIREYVALFAPPAWRPPSPALRQLCALQTMRAGFVASHVEWRNRLGSGGTDAAALALARTTIAHFEAQIAAVNAAIAQVIDDDDELRGKRDLLLSVDGVGETLAAIMLAEMPGPDVIASSAAAVAYAGLNPRQFQSGSSISHPTRISKIGNATLRTALFMPAMVAMRHNPAVAALVARLRKRGRLKGKQIVVAAMRKLLVICFGVLKSGKPFDAALAMPA

SEQ ID NO: 358443 - protein, 355 aa, unidentified
MDSKKYIGMDVHKESISIAVMNGAGKIVMESVIETKASMILQFIDGLRGDLQVTFEEGTSAAWLYDLLKPRVTKLLVCDPRKNASMREGPQSDKIDARQLAELLRLNHLHPVYHGEHGLRSLKELVRSYLTITKDLGRVMTRVKAIYRSWAIPCSGKQVYAPRHRAEWLAKIGEPGVRRRAEFYYQQLDALRTVRQQVRRELLAEGKKHKAWKRLCQIPSIGPIRSAVLLGILQTPHRFRTKRQLWTYSGFGIETQSSADHRRVDGQLERAKKQISIRGLNRNCNHDLKNLFKGAAIVAASKPGPFQEFYTTLLTKGLRPEMARLTLARKIATIVLIVWKRGACFDAQHLKPQTA

SEQ ID NO: 358444 - protein, 316 aa, unidentified
MTTQTETFIGIDISKATLDVAIWQSEQYRKFSNDAKGMQILIEWLSVLTPTLIVLEATGGYERLAVADLVFAGFPVAVVNPKRVRDFARSTGLLAKTDKLDSHVLAHFAAAVRPTVRPLHSKEEERLAALVSRRRQLIEMLTMEKNRLSNSHSTMRTHIQTHINWLIDEQRTLEAEIDQFIQGTPLWKEKDELLRSVPGVGNATSITILAELPELGTINRQEIAALVGVAPINKDSGIKSGKRRVFGGRGSVRSVLYMAALSATRFNSTIKIFFNRLIKAGKPFKVAITACMRKLLTILNAIIRQHQPWKEPLKVV

SEQ ID NO: 358445 - protein, 430 aa, unidentified
MNCNTQNAKIKSITEKTLIVGIDVGSETHYARAFDWRNIEFSKKPFAFSNDEAGFASFKAWLEDIKEKFGKTIVLPGMEPTGHYWFNLGAFLQDNGMKPVHVNPHHVHKSKELDDNNPSKDPKTIAALVNEGRFNYSYIPTGVYAEIRSLYGLQVMTQEALIRVKNRIARWLSIYFPEYKDVYRSCDAISGVMVLKVCPLPADIVMLGADGVNKIWRDAKLRAAGMKRARPLVEAAKHSVGSTESPEAAKYEMELLLGDYEVYTKRLEELTEKIEVKLEEIPYVDKLLEIKGVGKKTVSGLIAEIGDISRFDNPKQIQKLAGYAIVACSSGKHKGESHISYRGRKRLRYVLYEAAISLIGQNAEFKEIHRYYLTRQNNPLKKMESVIAVACKALRVFYAILTKGVSYDGKFMLESIRYPENQVLGNRIAA

SEQ ID NO: 358446 - protein, 343 aa, unidentified
MTYIYGIDLGKNWFHLVAMDRMGHVLTKQKLTRSQLKEFISTTPPCRVDFEACPGSQYWGRRFQQAGFEPKIIPAQFVKPYLKSNKNDFNDATAIAEAGSRGTMRCVPLKSHEQLALQATHRVRQRFIVERTATVNQMRALLLEYGLTVPVGRKVFERSLPTILEDAENGLPDFIRALVLRLRERWQQLDIQIDDMSLMLGQASSTSSLCQKISTVPGIGPIVSTALIAAIGNGSQFKKARDLSAWLGLVPKQYSTGGKSSLGGISKRGNSYLRQMVIQGAKALKIHMKRDKSSLGEWVARLEVGHHHHVVLIALANKIMRICWKVLTSGRDYQPYPNTSSAV

SEQ ID NO: 358447 - protein, 356 aa, unidentified
MTSTKYVGMDVHKESISIAVMNSAGKIVMECVIETKASVLLQFFNGLRGDVRVTFEEGTWAAWLYDLLKPRVSEVVVCNPRKNALLKDGSKSDRIDAHKLAELLRGNHLKPVYHGEHGLRTLKELGRSYLTITKDVTRVMNRLKALYRGWGIPCAGHEVYVPRHRSEWLGKISEAGVRRRAEHCYQQLDVLRLLRQQVRRDLLLESRKHPAWRLLGLIPGIGPIRAALLIALIQTPHRFRTKRQLWTYSGLGLETHDSAQYRVVEGQLQRSKKSVTLRGLNQDHNRDLKDIFKGAATKVSSSNSGPFHDFYEHLLAQGRKPTMARLTLARKIAAITLIVWKKEVRFDASYLKSQTA

SEQ ID NO: 358448 - protein, 270 aa, unidentified
MTFRPHALHLKAELFVKSSRAHVRDDGFTRCNFHLKFFIMVYRGIDISKSSFVAAYPSTNGNPTKTFPNTTAGMRELIGTLAVAEHHCVMEATSNYGCCCTCYIRTVLPSVLPPPKKKQIKHFSRMMMPVTKTDEKDAYMIAMYGEKMNPPIYKMPSQATIRILTTEGFTYFDNAKQLSRFIGICPTYQQSRTSVNIREHINRNDDERLRSLLYIAFWTALRYNSRECYIRLKANEKPFKVALIAVTNKLVRPVLTITTINSIYRWICPG

SEQ ID NO: 358449 - protein, 415 aa, unidentified
MALKIAYKICCGIDVHKTFVVACIASTNDKGVTSYESHRFSTYTSGLKTLLQWLLDRNCKDVCMESTGKYWIPVYNILEKDCKIVLAHPKYVKAIRGKKTDKKDAKWIADLFKHDLVAGSFMPPADIRQLRDLMRYRFKLTCFKSSEKNRLQNCLTVSNIQLGNVVSDTFGKSAQAILDKILENPADTSFDLEPLVFKSLKKELSELRDAIDGYITPEQAGKLKVIKAHYENLESRKAELEELILALAAPYQQELAILQTVPGISSDFTAIGIISEIGTNMEAFPSAKHLCSWAGLTPTNNESAGKKKSVRVSKAGCYIKPLLVQCANAVVTSKKHPEIRNRYLRIKKRRGHKKAIIAIARMLLTALYHMLKNGENYNAELYRKSDLPPVDREITVEQTLMIARNQGYKIKSATA

SEQ ID NO: 358450 - protein, 362 aa, unidentified
MTNFIFAGCDLHEETLVNRIAIGQEPSERKTVGNSRAGREKLIAALKRESDKHGGARIIFGYEASGQGFGLHDQMVEAGIECYVLAPTKMESSVKQKRNKNDDRDAERILKRLRAHKLAGEELPSVWVPDLQTRDDRETVRARQDLGDKLSSVKVQLRSLLQRHGIEKPTGVGKPRTKSHQQWLEQLSCDSQQGIGVRTALGSLLRQVRHLEQEIQQVDEAVDQLSRKPHRQAVVDALDQETGIGRLTATAYAVEVADFTRFRRGRQIGAYWGMAPSSDESGEVNDRKGHITRQGSPRIRKLLCQATWYRVQKDPQVRAIYQRLVIRNPKKKKIAVVACMRRLAVRLWHIGRQAQLAMKEAK

SEQ ID NO: 358451 - protein, 440 aa, unidentified
MSTQRTRCDHASGNSSYGNALLPPERQTPMDVVNARCAGLDVHKATVVAGLRVPGPQRGERCGETKTFATTTRGLRELIDWLMAHGVTAVAMESTSVYWRPVHAVLEGHVQLVLVNARHVKMVPGRKTDVRDCEWLAQLLECGLLRASFVPPRAVRDLRDLTRLRKTLIRERGHHVNRIEKTLELAQIKLSGVVTDLMGKTGRAILQALSAGLKDPVQLAEYAQGLLRKKRAALREALVGRLTPHYAFLLQQHLSLIDAVNAHIATLDARIETAMAPFAESAAIVQTMPGVGARATQAILAETGVDMSCFPTPAHFASWARLCPGNHESAGKRQSTTTGKGAAWLRATLQEAAWAAVRSKKSYYRALYHRLKARRGAKKAIVAVQHAMIVALWHMLKHGVAHHDLGADYFERRNTARVRRHHVRRLEQLGYDVTLTEKAA

SEQ ID NO: 358452 - protein, 367 aa, unidentified
MKKVSTATRCEFGKFAGQRLTIGLDLGDRSSWYCILDEQGELLLEQKVATTPKAMKEVFGAMPRSRIALETGMHSPWVSRLLSELGQEVIVAHARNVRLIGESRRKDDRFDARTLARLVRIDPQLLSPVQHRSRKAQADLTVIRARAGLVRARTALINTARGLTKSYGERLRGCSPRKMNGELAQGLSPELQSALQPLLEEIGSLSERIREYNEGVKQIAQESYPEVARLEQVKGVGTLIALTYVLTLEDAHRFGKSRDVGCYLGLQPGRRNSGQSEPQLHISKQGDPYLRTLLVQGAHHILGPFGADSDLRRWGLKLAERGGRNGKKRAIIAVARKLAVLLHRLWVSGETYEPLRNSSRPMLATAA

SEQ ID NO: 358453 - protein, 412 aa, unidentified
MQIIHECCSGLDVHAKTVVACLIKQGKKQTRTFSTMTDDLLRLSDWLVGEGCTHVAIESTGVYWKPVFNILESVLEVILVNAQHVKAVPGRKTDAKDCEWLADLLRHGLLKASFIPPLEIRELRELTRYRQSLIREQTALSNRVQKLAESGNIKLSQVASDALGVSGKLMLRAVAEGETDAEKMAQLARRRMRGKIPELRRALEGRMTKAQRWVLGELLTRYEEIEQAIERVERQIDEEVSQGPDPFVGEAVTLLQTIPGIGESVAEVIVSEIGVDMSRFASDGHLASWGGMCPGNNESAGKRKSGKTTKGSTYLRAALTQAAWAASHTKDTYLAAQYQRLAKRMGKKKALVAVGHSILVIVYHVLKNQASYQELGGDYFDRQNVTQQRARLIRKLEALGVKVTVEELPIAA

SEQ ID NO: 358454 - protein, 342 aa, unidentified
MEHYAGIDVSLECSSVCVVDANGRIVREAKVASEPQALIAWFGSLGFGLERIGLEAGPLSQWLFAAMKVAGLAVELLETRHVRKAFEAMPVKSDRNDARGIAQLMRLGWFRPVHCKSMSAQETRSLLTARKLVQSKLHDVENSLRGILRGFGLKVGKTTGQKFAGRIEELVASHPHLQMIAKALLAVRAVLRTEFAAFEKQTRRMVRSDMQARLLTSIPAVGPIVALTYASAIDDPARFKSSKQAGAHFGLTPKKHQSGETNYTGRISKIGDASVRTALYEAANVMLTKPVKGCSQLKSWAMRIKKRAGMSKAKVALARRLAVIMHRMLADGTPFNAAAAAA

SEQ ID NO: 358455 - protein, 427 aa, unidentified
MSYRIAGIDVHKRMIVVAVADVDVAGDYQFERRQYGSNPAQLRLLAAWLVEQQVQEVVMESTAQYWKPVWAALERYWQPICQKQEGAGPLSGTLHLAQAQSNRGARGRKNDFADAERLVRRLVAEELTLSFVPNAEQRLWRTVMRTKNQLRCNQVQLQNRLEALLEEAHLKLSSLVSDLLGKSARRMLQAIAEGETDPAVVAARADRRLRATPEQLCDALGACRELHPVYRRLLKTALEEWERTEAQIAQLGQEMASLIGPHQEQVQRLAEVPGLGVDSGQQILAEVGASAATFPSGRALASWVGVCPGEEQTAGVNRNRRSPKGNRQMRRILNQAAHAAVKLKGSIFALLYHRYVVRFGHNQTIAVIAHRLCRLIWKILHEGVHYEERGPAVSQRAKQRRTARMIRQLRSLGYSVELLHAAAGVPA

SEQ ID NO: 358456 - protein, 342 aa, unidentified
MPTITTIGLDLAKKVFQVHGVDAEGKVVVARKLRRKEVLAFFAKLPRAVIGIEACGTSHHWARVLSALGHEIKLLPAAYVRPYVKRNKTDARDAEAILEAMRSPSMRFVPVKSVERQAARGIETGRELLVRQRTQLMNAMRGLLAEFGIIAAQGTNGFQALCLKIDGADPAIPEALLLALKAMLLQWRAAGEAARDLEMQLVARAKPDPAMRRLMKAPGIGPLTAHAIVAAIGDGSQFGSARDFAAWAGLTPREHQSAKRRRAGSISRMGDPGVRRLLTLGASAVIRQIKAKPERATAWQRGILQRRPVKVAVVAQAAKTARIAWAMLRSGEDYRASCALAA

SEQ ID NO: 358457 - protein, 402 aa, unidentified
MPMLSIGIDVSKGKSTVCGMKPGGEIVYAPFEVQHTREGMSELVSLLRGSGEEVRVVLESTGSYHCPVVAALLENGIFVSIVNSLRMKRFCSQSIRKVKTDRIDAMQIALYGLAYWQELQPARLPEDTYRELQLLARQYYQMTSMLIKAKVDFNAICDQVLPGMQELMSDHAGRHKLSDFVLRYHHTTHILEMGETRFQKDYCKWAEKKGYRNCERMAAHIFATAQNGIPVLPNAPSTQIVITEAIRVLHTVEVSRDAILTQMQALAKTLPEYSLVREMPCIGDTLAPRLIAEIGDVRRFHSKRALIAYAGIDAPPYQSGKFCANNRHISKRGNRYLRKTGYEVMQSYVMHKPANDPIFTFIEKKRGEGKSGKLAMVAGLNKFLRVYYGKVTELYRSSSAIE

SEQ ID NO: 358458 - protein, 360 aa, unidentified
MTSQPGFRHIVGGVDTHKLTHHGAVLDAGIGKLLADKEFPATRTGYRQLLSWMSSHGTVLKVGLEGTGSYGAGLQRHLRAQGITVIEVSRPNRQARRARGKSDPIDAINAARAVLSEEAATIPKVRDGYVEAVRQVRATRRSAVKARRAALHQIHGLLWCAPEELREKLSSYDRAALVARCARLRVPAAGAPGDPVVTARRMLRRLAKRIQMLDVEIADANRELDAILARRAPNLLAVNGVGTEVAGQILTTAGENIDRLKSEASLARLCGVAPIPASTGNTARHRLHRGGDRDANSAIYLIVVNRLRWHEPTKRYLERRTQEGKTKKEIIRCLKRAVVRELYRALQADLNRQPEVLDAA

SEQ ID NO: 358459 - protein, 351 aa, unidentified
MGKITTVGLDLAKQLIAMHAVDARGQVVLRKVLRRDALLRWSATLPPCEIAMEACGGAHHWARELTQQGHSVRIIAAEFVRPFRKSGKNDANDAEAICTAMRQANMRFVTIKSVEQQAALCVHRLRQGLVEERTALINRMRGLLTEFGVVAPLSPEKLRRELRLCLDEEKTHVPLMVRQLVTDELAALDALEQRIADYAAQIAAQVRDNVSAQRLQGIAGVGALTAAAMVATVGQPQEFRNGRQFAAWLGLVPRQHSTGGKSRLGRITRRGDAYLRTLLILGAKSALQAALRKPPPLRHRLRRWIVDVFTRIGYHKTLVAIANKHARIIWALLVKGEDFDVQRLTLTAVAA

SEQ ID NO: 358460 - protein, 456 aa, unidentified
MANKNKKSTKAPTTLSPVHRRAAGIDIGSTFHVAAVPSDVDEEPVRSFRSFTSDLNRLADWLVQVGITTVAMESTSIYWVPVFEILEARGLEVVLVNARDAKNVPGRKTDVNDAQWIQQLHTYGLLRASFRPRAAIVALRAYLRHRERMLEYAAAHVQHMQKALMQMNLQLHHVVSDITGVTGMKILRAIVGGERDPNVLATHRDVRCKASVATISEALTGNYRPEHVFALRQAIELYDAYQAKVQDCDAEIEQCVRALPTDSDATPLPAARTRTSRQQKNEPRFEIRAVLHALLGVDLTQINGIGPYSALRIVGECGTDMTRWPTAKHFTSWLTLAPGSKISGGKVLSARTRRSTNRAASLLRLAAVSVGRTSTALGAFFRRLAARTGKAKAVTATARKIAVLLYNTLRHGTAYVDPGANYYEERYRERAVRNLRRRADALGLTLVEGEAIEGAS

SEQ ID NO: 358461 - protein, 340 aa, unidentified
MGNVTTIGLDIAKSVFQVHGVDAAGEVVVRRKLTRGRVLAFFEKLSRCLVGIEACSTSHYWARELTARGHDVRLLPAQYVKPYLKRQKNDAADAEAICEVVTRPTMRFVPIKSPDQQSMMMLHRVRLMLSRQRTQISNALRAHLAEFGVVAPIGRNGIEQLLHVINDEHDTRIPADAQVCLRMLEAQLKVVKEQILENDRRILARARETEVGRRLMEIPGVGPLLASAFVATIADPHAFKSGRCLSAWIGLVPKQNSSGGKQKLGSISKAGNRYLRQMLVVGAMAVIRFAERNGTKRPWLVQLLARRTTKVAAVALANKTARMVWALMTSGERYREPIVA

SEQ ID NO: 358462 - protein, 342 aa, unidentified
MIASTIGLDLAKHNFHVHAVDAAGLVIKTAALRRSEMIKFFQSAKPCLVGMEACATAHYWVRELTKLGHEVKLIPPSYVKPFVRRGAKNDAADAAAICEAVRRPDMRFVPIKSEANQGFLMLHRARGLLVRQRTMAVCAIRAHLAEFGIIFGQGRQRIETIMPSIEEDAASLPEHARFALNSLMRTVGELNTQIEGIETKLAEVGRSDPVSNLLSSIPGVGPITSTAIAATVPNARMFRSGREFAAWLGLTPRQNSSGGTTRLGGITKQGDAYLRHLLVIGARNIVRYPKARAKVGGAWIDALLQRRRPMIVAVAVANKLARIIWAMMTNGEMFREAHVKAA

SEQ ID NO: 358463 - protein, 350 aa, unidentified
MIIIGCDYHPGFQQIAFVDTETGDYGEQRLGHSEGAEKFYRDLAAQGKKVRVGMEASGHARWFERLMAELNFELWIGDATEIARKRERKQKTDRQDAQHILQLLMENRFPKIWVPSGENRDLRQLLWHRHRMVQMRTRIMNQLQAVALNEGLRCKKRLWRQHGREQLESFRLAPWASRRREDLLQLLDRLNPTITDLTQVIEQEVEKCPEARRLRTHPGVGALTALAFVLIIGRTERFQCGKQIAAYLGLVPLEDSSGNRRRLGHITKQGSSIVRFLLVEAAQVTARSIPEWRNKYVHLTMRRGRKIAKVAMARRLAIALYWMWRKGWDYEQLRKFGSHAGQPGNRDGVK

SEQ ID NO: 358464 - protein, 337 aa, unidentified
MIAVGVDTHKQRHFAAAIDGLGQVLGELSIEANRAGYAQLFAWATQLGERVVFGIEGAGSYGAGLCESLQLAGQTVLEIERPRRTERRAGKSDRIDALLAAKRVLASDGTSTPRSGATRRALQVVLVAQRSCVSEHTRVLNQLQALHVIAPLALRERIGAGDGKRLAARVAGMRERPLAPVDERTTLAMMRDLARRARTLTDLAQRYERELALHVRTLHPTLLDEPGIGPISAAKLLASDPLRFKHEAAFARCNGTAPIPASSGNTIRYRLNRGGDRQINNAIHIIALSRSVHHPETRTYLQHKISQGKTRREAMRSLKRHLSRRLYQQLTNPPLTS

SEQ ID NO: 358465 - protein, 338 aa, unidentified
MELYAGIDLHSNNSVVSVLDEHDRTVFAKRLPNDLAAIIEALRSCAGTLHGVAVESTYNWYWLVDGLQDAGFTMHLVNTAAVKQYDSLKYSGDFSDARHLAHLLRLGILPTGYIYPREQRAVRDLLRKRGQLVRQRSTQILSIGNLLARNLGSHASGNEIKRWQPEHIDAMPLLDEQRLALKANLAVMRCLDVQVHALERSILAKAKLREDYLALKTVSGIGEVLALTIALETGDVARFDSAGNFASYARTVGSRRESNGKKKGEGNAKCGNKHLAWAFVEAAHFAVRYDAAIKRWYQKKCASNLAVVAIKAVAHKLAKACYHVMRDGKPFDVARAFG

SEQ ID NO: 358466 - protein, 339 aa, unidentified
MDRQYVGIDFHRRRSVIVRKNAAGEKLASVRVANDPMVIAAAIAEAGPEPEVVIEATYGWYWIVDLLQAHGASVHLANPSGLNWGQRRVKNDERDAIDLIDMLRLGRLPEAWIAPPATRELRELVRYRAKLVALRSGLKAQVHAVMAKEGVLPTVTDMFGPRGNVQLDAMPLGDAYTVRVESLRDLIEIYDREVAMLERHIRQRVRSDPGYKAIQAINGIGPTMAAILVAEIGDVARFRSAAALCSWAGLTPKHHESDTTVRRGAVTKQGSRLVRWAVIEGAARYHGGPKLAGDFRRIAERRGKNKATVAVARKILTLVYYGLRDGEIRCLAPADPEAA

SEQ ID NO: 358467 - protein, 310 aa, unidentified
MSSSVYVGIDISKHRVDVATEPATPPTHFPQTEAGIGALVTHLQPLGPALIVLEATGGFETAVVTALAAADLPVVIINPRQVRAFARATGRLAKTDAIDAAVLALLAARLQPPQRPLPDAALQDLKARVARRRQIREMITAEQQRLPQTRGRIRADIEAHIAYLKARSDEIDTDLRTLIAESPHWRATDDLLQSVPGIGPTTAAALIADLPELGRLAARPLAALVGVAPLNHDSGTRTAPRITWGGRAPVRSALYMATLTATRYNPIIKAFYQRLLAAGKPRKLALIAAMHKLLTILNAIVKTQKPWAHA

SEQ ID NO: 358468 - protein, 326 aa, unidentified
MSNFSNFVGIDVAKKDFYACFDEQSESRKFNNTALGINSFIRHLSKSNFQNQDTIIGLESTGSYHLRLCLQCSALGFQTKVINPLIVKKQNQTNLRRVKNDRQDASLIRYCLTTGVGYPFAETADTLLLKSLVRQRNSLANMRLKNKRQQDDVNYKEDCLKTKFNPVYKEIGAILSQKIKKLEKHLKTLRKPEQKLLQTIPGVGPITAVSFISEINDIKRFKQSKQLTAYIGLDSRVHQSGTSIRGKGYISKRGNKILRTRLYNAASVAILHPNLFQSFFQKKRAEGKPYKVALVAVMHKMTNVIHSVWTNNKPFFDYTADNRKEA

SEQ ID NO: 358469 - protein, 320 aa, unidentified
MLSFGGIDVSKDRLDVVVLPEEECSSVPNDAAGWAELVERLRGFSITAIGIEPSGGYERGAMRALLAAGMPVRQVNPFKLRQFARASGVLAKNDPLDARMIASFVTIMPTRPAQRQTPAAERLAEMLAIRRQLSAEKVAAENASRLLEDAMLQRLSRRRIVRLAADIDLLDKRMVEIVATDDALVHRYRLLTSMPGVGAVLACTLIALLPELGRMSRKQVAALVGVAPYAFESGTLKGRRCIWGGRAHIRQVLYMAAMSASNWNPVLKAFHDRLTAAGKLPKVVIVAVMRKMITMLNAMVRDDVVWADRLSGRHVLPTAR

SEQ ID NO: 358470 - protein, 462 aa, unidentified
MTKRRKKAKSRSFQITKLPAQLQHINLNAAGIDIGSERHLVAVPEGRDEVSVREFGTFTVDLEALAAWLKTCGVTSVAMESTGVYWIPLFELLERRGFEVKLVDARHVKNVSGRKSDVLDCQWLQQLHTYGLLAGAFRPPDEVCVLRSYLRQREMLRQVASQHIQHLQKALQQMNLLLHNVVSDITGVTGMKIIKAILAGERDPRVLASNRDDRCKQSRATIAKSLVGNYRAEHLFALRQALDLYAVYQAKIADCDEAIIKQLEKQPDLSDEQPPNGDRYVQARDRVRGGIDVRELLFKKSGVDLFAIPGLAADHLLTLASEVGFDMSPWKTEKHFSSWLGVCPGTKRSGGKTLASKTKRNPNRAAQAFRMAAASLSRSRTALGAFYRRLKARRSGAQAVTATAHKLARIYYAMLTKGANYIELGQQAYEQRYKERRIAQLKIQAKSLGFQLVACTADESSF

SEQ ID NO: 358471 - protein, 351 aa, unidentified
MPRASTVHAVIAIGIDLGKSTLHMIGLDSCGAIVLREKVSRGRIASRLANLPPCLIGIEAGMATHYVARELTALGHDVKQVPATYAKPFRQGHKNDFRDAHAVAEAVQRPTTRFVPAKTDEQLDLQALHRVRSRLVSERTAVINQIRGFLLERGIIVRQGLRFLRQLLPDILAKRADVLSPRMVRIVTELSGDWRRLDERIETVTDEIEALAKSDDSCRRVMTVPGIGPIISSAMVAAIGNGVAFARGRDFSAWLGLVPKQMSTGDRTILGRISKRGNGYLRMLFMQAARVILLRPANWPKHGFGAWLTRAAQRLHPNVLAAALANKLARIAWTVLAQERAYESRITKAAA

SEQ ID NO: 358472 - protein, 315 aa, unidentified
MEGEVMVGIDVSKARLDVAVLPGEEIFREEHDSRGIAALIERLKKIAPALVVLEASGGLETGLVAELVAAGLPAAVVNPRQVRDFARATGQLAKTDKLDTRTLARFGDRMRPQLRKLPDQQELALKASVVRRRQLVEMMVAEQNRLDRAPKVLHRQLRRHVDWLRKQIHSLDRDLDHELRNSPVWREKETLLRSVPGVGPVVCSTLIAGLPELGTLSRRQIAALVGVAPLNRDSGTLRGRRMVWGGRGQIRTALYMSTLVAVRFNPALKSFYLRLRAAGKPPKPALIACMRKLLTILNAILKNRKPWSPQCLNLT

SEQ ID NO: 358473 - protein, 350 aa, unidentified
MLIGVDYHPSFQQIAFFEEETGECGEQELNHSDGQAEKFYRDLKERGICVRVGMEATGYSRWFERLLAELDFEIWMGDPAEIKAKRVKKQKNDRNDARLLLRLMRENNFPQVWVPSPENRDLRQLLWHRHRLVQMRTRIMNQLQALAMNEGYRWKKKLFSEQGRAQLEKLPLAPWASRRRQELLELLDRMNPTIEELTGAVEREARKRPEAMRLMTHPGVGPLTALAYVLIIGTPMRFERGKQIGTYVGMIPSEDSSARKQRLGHISKQGNSLLRFLLVEAAQAAVRIHPHWRRRYIHLAMRRHKSIAKVAMGRRLAVRLYWMWRNGCEYSPSLEFGSYAGQLGTGHGVK

SEQ ID NO: 358474 - protein, 400 aa, unidentified
MASMTSPIPTTQAARMLFGGIDTHKNIHVAALLDSDGGLVGSASFPTTVAGYRQLLGWMRSFGTVARVGVEGTGSYGAGICRQLTSVGVEVVEVNRPDRSQRRRRGKSDVLDAAAAAEAARTGNRISIPKSRDGQVEALRMLRLTRASAVQGRTKAFQQLDQLIVTGPEQLRAQLRDLPKMGLIRRCAAWRSNSHNVADPMVAARIGLKKLARRYLALDEEITDLDKLLAPLVAELAPQLVAVRGAGTETAGQILVTIGGNPDRVHSEAAFAMLCGVAPLPASSGKTQRYRLNRGGDRQANRALHVIAITRKRCEPRTQAYLNKKIAEGHSDREAIRSLKRLIVREVYYLLRPDLTAAPVPPSRPASRRAGAVKVEPPTRGTTLTAPSTGTPSKMEESAP

SEQ ID NO: 358475 - protein, 377 aa, unidentified
MSTVRFIGLDVHADTIAVAVAEPGGEVRSLGIVPNRPKSIRKLVKKLGAVESLRVCYEAGPTGYVIYWQLTALGVPCEVVAPTLVPTKAGDRVKTDRRDAEKLARSYRAGDLTAVWVPDAAYEALRDLVRAREAAKKDQLRARHRLGTFLLRHGRRPPTAMTAWTQRHLTWIQQVQFEQPAQEATRLDYLHEVEHVVGRIERLEHAIDEAVKTAPPSMRAVIEALQALRGIVLVSAVTIVAEVGALSRFARAPQLMGYSGMGAREDSSGPRTRRGGITKTGNAHVRRIAIEAAWAYRHRPAVGGALRKRQATLSEEVKAIGWKAQIRLHGRYRKLLGRGKCPQQVVTAVGHELLGFIWAIGVTVERQQRKTSSSIAA

SEQ ID NO: 358476 - protein, 428 aa, unidentified
MADTIAGIDVHKRMLAVVVSDLAADGEDAFKRRQFGSTPAQLRLLADWLSEHQVDEVVMESTAQYWKPVWAALERHWTPRAQARAGAGPMAGTLHLAHARSNRARRGRKRDFADAERLVKRLVAQELILSFVPAPEQRLWRTVTRTKVQLTRNRVQLQNRLEALLEQAHLKLSSLVSDLLGVSARRMLEALADGATDPGALAALADHRLRATPEPLRDALEACQELSPVYRRLLKMALEELPLLDGQISRLDQEMAELLRSYQDQVQRLAEVPGLGVDSAQQILAEVGPTAATFPSAGQLASWVGACPGENESAEVNYSHRSPKGNRQMRRLLNQAANAAVKAKGTLFELLYRRYVPRLGHHQTIGLIAHRLCRLIWMILHQGVRYEERGPALSQKSKRHRTARMIRQLRSLGYRVELASAQSAVVPA

SEQ ID NO: 358477 - protein, 432 aa, unidentified
MEVVHPQVAGIDVHKKVIWVAVRLPGQGPGQRQLTVRRFKTFWRSLQKMAGWLAELGVTDAALESTGVYWWPVYHALAGAGIEVCVCNAAHMRNVPGRKRDITDCQWIAELHEYGLLRPSFIPDAQVTALRQRTRYRKKLIEQRTSEGQRLAKALEDAGIKIDSVASRLLGKSGRAMIEALIAGERDPARLAGLALGVLRRKTDELQMACDGRFTAGHAQMCRLHLDAYDRLTAQIAELDTLVADAAAPFERLIARLITIPGVGQRTAEIIIAETGGDMTRFATAARLAAWAGLAPGDNESAGKRKKAPTRQGDRQLRTAMVEAAWATWRTATRPGARFRRLARRFGKGNEKKAAVAVAHTLLCIAWAVMRYDADYVDAGTDYYERRDQRNREHLVRYHQNALARLGVEVIVTPPGDGAPPPPTPDNPGQAA

SEQ ID NO: 358478 - protein, 348 aa, unidentified
MRFYSKLHKYYCGVDIHAKSLYVCIIDQEARIIKQKNIKSNPAAFMKVTGKYRDDIVVSAECMFTWYWLADLCAKESITFILGHALYMKAIHGGKAKNDRIDAYKIAYLLRGGNIPMAYVYPPEMRATRDLMRRRNYLVRKRAELLGHIQNTNHQYNLPPLPKNIRFKGNRDGLNEHFRDECVQKSMETNLFLIDHYNSLLLKLENYICKKAKVHDHEALLRLLSVPGIGRTLALIILYEIHDIRRFPRVQNFVSYSRLVKPSKESAGKIYGHSGKKIGNAHLKWAFSEAALSMLRGIPDVKKYKEKLARKHGKAKALSILAHKIGRATYYILKRKEVFTIEKFLVKT

SEQ ID NO: 358479 - protein, 347 aa, unidentified
MSTTTYGLDVAKRVFQLYWIDGETGEIANRRFGRDELIQFLSRRSPGRVALEACGSAHWWARKIQALGHEVVLLHAKFIRPFVQTNKTDAADARAIWTAVQQPGMRTVAAKSAEQQAMLGLHRIRSLLVKFRTMQVNQLRSLLYEFGASFRAGRVAGLAEIRSRMAELEEMLPGSLLCCLQDQLTRIDGLQAEIDQLELRIAAWQKQDAACRAISEVPGIGRLTATALVATMGDASTFKSGREFAAYLGLVPRQSGTGGKVRLGNISKRGDSYLRTLLIHGARSVLCHTKVPTPWQSAIQERRPANVAAVAVANKMARTAWAILAKGQAYRRDYVSVRPACADAMAG

SEQ ID NO: 358480 - protein, 455 aa, unidentified
MAKKQKIRKSTKSSGLEITHPDTAGIDVGKDLMQVSVPSDRCEESNRCFGTFTQDLQKIVEWLKTCGIKRVVMESTGVYWISIFLMLQEAGMEALLVNAKEAQNVAGRKSDVSDADWLRFLGSCNMVKPCYQVEAVSRRLRVYNRLRMTATRDMARDMQHMLKSMEQMNIKLGSVLSDISGESGMKIIHAILGGERDGQRLAALASSRCKKSKQEIAMALEGTWDPEHLFGLRAAMDSYEFHRRQADACEREMETFLNSYPMESVIDGKDKPLERSGKQVTRKSRVCFDVEAAAYLMYKVNLMLIPGVSHLTLLTFMSELGPNFVSKFATPEKFCRWLNLTPDDKVTGGAVKSSKVPKRKNPVGQALRQCALCVQRREVPLGQYYRRMKGRLGPAQAVVATAHKIAKIIYLMVQRGEEYREEYMAKSEKAVLEKKLAKLEKHRQYLEKQLTKVAG

SEQ ID NO: 358481 - protein, 441 aa, unidentified
MTVRKRVFEVAYPNAAGIDIGAKSHFVAVPADRDELAVREFTSFTDDLVRLADWLQACEVDIVAMESTGVYWIPLYELLSSRGLVVHLVNTRQVKNVSGRKSDVLDCQWLQQLMSYGLLSGAFRPDDAICQLRALSRQQQMLTHYQSRHVQHMQKALAQMNVQLHNVISDITGETGLRIVRAILDGERDPTKLAKLRHRGIRASEADIVRSLQGNWRQEHLFALRQAVVLYEAYTQLLQECERAIMQQLEQLNRAEVEEPAMPKRGRRPTAHAHRVRLALHRALGVDLTRIDGIEIGTALKVLAEVGFDLSRFKSAKHFASWLGLCPGTRISGGKVLSGASKRSANRLAQALRMAAMALRRSRSALGAYHRRMLSRLDKAKAITATAHKLARLIYTMITKGTAYVDQGQAYYEERYRERVVHHLHKKAALMGYALVPIDAE

SEQ ID NO: 358482 - protein, 340 aa, unidentified
MQLTQKNYLGIDVSKPWFDVSLLVVADHVKQPIITERFDNSIEGIKRFKKWLTAKGVGFNENSLLVIENTGIYHRLIWTFCSKHNLPLHIGNAAHIKWSLGITRGKSDVIDSVRLCMYCCRQAEELKATPPLNPVFMKLKDLMSSRSRLVTQLHSTKNYIKEIQCTNDKELLATLDKAHKAAIEGIKKSIAHLEILIDKIIKEDTAILANYQLIKSVPGIGHLTAVYIICCTNNFAAEVSGKQLASYAGVVPFEHSSGISIKGKNRVHKMANKELKKMLHLCALTAIKYYPEFKQYFDRKKAEGKNGMLVLNAIRNKLILRVVAVVNKQQPYVDNYKIAA

SEQ ID NO: 358483 - protein, 428 aa, unidentified
MNVDESIRLEEFRQLKKEIRGSEEYLVVGIDIAKDKHNAFFGTATGETLLRRLVFENNIEGFGRLRARTEAMKVQHCLDKVVFGLEPTANYHKPLAEYLIKCGRNVVLVSGMAVNKNRELLDGRWDKHDTKDSANVADLISQGKCLYYDYPSMPLRDLRSLLSLKRRLKKQEHGTGVRIRNHLLAQYFPELDRYFGKGCSESLPIVKWCLNPAMIAAMEYDEFVQLVAPRLKSIGQEKRLRSIWEMAIDSIGCEVDHDIDFEAKLMVEDLQRLRDTIHAVDEHVEDICSAFPEYGYLLTIPGFGPDVSSKVLGAIGNPFRFNNGKQVLKLTGYDLSASRSGKTSDTSVPVISKRGKAYLRYALYQAAFVASTSNPHFIMYYTNKLRGRHNERGIKTKMRVKLAAKMLIIAWSLMKKKEPFNPEYLNSQ

SEQ ID NO: 358484 - protein, 395 aa, unidentified
MDGPIISFDVSKGCSHAQGFLSLGRPLGKAFRFEHNREGYGKISELASRLAEKTGVNPSAVYEFTGVYAMPLTAFLVDSGFTVYQISPLESAKMRKAEIRPTKNDSLDCSTIAKVYYGRPLRPLSVPDRTYSDLKEMSRQYQYELGVAVEEKNRYRRCLDAVWPLFDQVAAYDSGASLDIVIKFGHPSNVRTRRGVASAIAGVLLGSHTTKDGLIEKVIEYARTHNSGCTPDSYLVRETVEMAKRVRREKERLRDVLGRMLETAARLPEFQLLESIPGIRDTSALRLIAEIGDISRYNDAKAFVAYAGLDPMVLQSGKNAGEHMHITKKGNKFLRCTLYLCVTNILTHYPDSKVGRFVIRKKNDGLCQKAAKIAGCAKLARIIYSMMANGECYSE

SEQ ID NO: 358485 - protein, 423 aa, unidentified
MKIVYPICCGVDVHKTFLVATIITTNGIVPHYQKRRFSTFNNQIIAFKQWLLENNCRDVCMESTGKYWVPVFNLLEDSINVVIANPKWVKAVKGNKDDKKDSKWIGDLFRLGLVPGSFIPSRDIRILREFTRYRFKLVSCKSGEKNRYQNVFTVCNVALDAVVSDMFGKSAASITDYIVNSDTFDPEHCVSLLHRSLKKKADEVVASIEGFQMTEAQKVRARMVLEHYDFLLEQIQKLDERIDSLAAPFESAIRLLCSIPGIDRNSAITVLSEIGTDMSQFGSSKRLCCWGGLTPGNNESAGKKKSVRITRAGVYLKPILVQIAHAAVKSKESPYYRIKYERISKRRGKKRAIIAIARMILTAMFHMLSTGELWNPSDLRQVDMPPELQAQQLQKSLFKAAKLLVAHGAVAPDTIQIPMAVPA

SEQ ID NO: 358486 - protein, 355 aa, unidentified
MMNHEAELVYAGVDTHADTHHVAVIGAHGRELDDTQVPATAAGYRQALAFLARWPDVVEVGVECTGSYGAALTRELRAAGHRVVEVNRPNRFDRRAHGKTDTFDAYSAAEAVMTGRAHSAPKGADGLVEALRALRTTRSSALRERTATINQIKAMLIAGPERLRSRYRGLSNIRLTAALAASRPSARPVSAEEATAYALRTLARRHQLLTEQITDLTGHLRRLLDDHAPQLMGVFGAGPDTVAQLLITAGDNPERLRSERHFAALAGVCPIPASSGKTTRNRLNRGGDRQANSALYHIVIVRMRYDEQTRSYVVRRTGEGMSKMEIIRCLKRYVARQIYPIICDTLQSAGADLAA

SEQ ID NO: 358487 - protein, 369 aa, unidentified
MNEIITSYVGLDAHAESNAIGVAEAGEITAPRFLGTVGAKFSELTKALGKLGKPSELQIVYEAGPCGFAMVRRLRQAGYRCEVVAPSKIPRKPGDRVKTDRRDALNLAGLARAGQLTFVTVPDERDEAMRDLSRARTDAVRARLKARQQLKALLLRHDRRYTGRSSWTAAHERYLSEVSFDHRPQDIAFVEYRRAISETQARVGLLTEALSQELEHWRMRPLVQALMTLRGVDQIVATSLVGELGELKRFAHPRELMGYLGLVPSEYSSGQKRSLGAITKTGNSHARRMLIEAAWNYRFPARISLPLQKRQEGQPAVIREIAWKAQLRLTQRYRRLSARGLLYNKVCVAIARELAGFIWSIGQQVSIVA

SEQ ID NO: 358488 - protein, 451 aa, unidentified
MANSKTRADRIISRQLSHCTVEAAHLSAVGIDVHHDQLICCFQKLDPIAGELTSEHRSFGTTIPQLLEFAAWCRVRESSVILMESTGVLWFSPYRSLEDVGFDNDTLALVNARDVKAAVGRKTDAQDAKRLAEYARLGKFHKSFVPSRPFRDMRMVSRDIIRLSDDISRQKNRYNKNLNSVGCRATSVFSDVHGKAAGKILDAYIRGDRDFEEIVRSARKQLRTTQQEILEAINFAMSDALRELLRSSYEHLQYLIARRDSQIALLERMQAPYQEYIDRLMTIPGVKELSARLLFCEFTNEQQSFPDAAHFASWLGLCPGNNKSAGKSSSGKTPKGNRWARKTLTEVAHGIGLMKRGALKALFQAFKERRGARRAVVAIAHKVAMIMFAMIWDGSEYVETTCSALRDTRVKRLLQTSKNLREQRTVITLSGQIVDKDTGELIGQLSVDAAT

SEQ ID NO: 358489 - protein, 406 aa, unidentified
MRDYIGVDWADAEHAVWSEDEAGAKVMSRAVAHTAEAFAEWGRWLDERRAAGIELWAAIERPDGRVVDFLLDHGVVVFPVNPKALDRARDRFRMSGAKSDPFDARVLAGFLRTDHGHLQPLRPNSEAAQELKELTRDYARQVRQQTRLLNQLTITLKEYYPRALEVCEDLKSRWAQEFLRAYPTPDALRALTERQWQRWARSHRLSAERTAALWSTLQRPQIAVPPHVVRGKARRLAVLLEQFVLTAGAVETYRQAVEDFFASMPAAKWAGSLPGGHSGTTVPAVWAELGDAPGRWQTAQHLQGHGGTVPVTEKSGKAHVVKFRFACNTHLRAAIHQLAFLSLRHSEWARGYYDRARRRGQSHHHALRALAAKWLKIIFAMWTRQVSYDEQYHLANMARHQLRQRA

SEQ ID NO: 358490 - protein, 387 aa, unidentified
MQKPHDNSKASPAAFIQDNTLIAVIELSLSNWLVAGLIPGVSREPLKKLEPNPEDLLKLLHGWRDEAIKAGRPITRIAVAYETGRDSFWLARWLRERGIDAHVIHATSVAVSREHRRAKTDRLDTAMLKRGFLGWLRGERGHCTVAIVPTMEEEDAKRPHREREGLVHEQTRAVNRMKSALIQFGVRNFNPKLRKASVKLETVRTPEGKSLPPNTIAALRRDMERLKIIKEQIKAIEQARLQQFEQKPEALANRMVYLLVRIYGLGLETADLLAHELLSRTLRDRKAVARYAGLTGSPDESGSKRREKGLSRSGNARVRKIMIQLAWRMVKFQPDSALVQWFKQRTENAKGSRKPMIVALARKLIIALWRYANDGVIPEGFRLHSAA

SEQ ID NO: 358491 - protein, 355 aa, unidentified
MTIVSHAHPFVIGVDTHARTHTLAIMVASTGEQLGSEQFPATPAGMDRAIGWASRRTGGDLATLWVIEGIGSYGAKLAHTVAEIGYLVVEAPQMNARSRRGVGKSDPLDALAIASAARSTDVTALRRPRLEKGIRAALRILVAARGQMTTERTANINALIALVRTVDLGIDARRPLSSVQVKEISRWRARVEELAVAIARAEAIRLATRVVALTEELECNQARMTELLQDSTAAPLLEETGIGPVIAATIFTTWSHPGRVRDEAAFASLAGVNPIPASSGNTVRHRLNRGGDRRLNRALHQATIVRMTHDPDTRAYVERRQAEGRTNREIRRCLKRYLARHLYRTLNTLYANPAP

SEQ ID NO: 358492 - protein, 340 aa, unidentified
MSEITTVGIDLAKNVLSVHGVDGHGKIVLRKSLTRAKLLELMVQLPACRVGMEACSGAHELARTLTSLGHDARIMAPKFVAPYRKNQKNDGNDAEAICEAVGRPTMRFVPIKSAEQQAVLVVHRVRSELVASRVGLINQVRSLLTEFGIVLPQGRFSFRHNIGTALDDARLPILARQVLHEVNARIRALDEDILAYDRRIEAMVRDSALMQRIVQVCGVGPITASAIVASVGDAKLFKNGRQFAAWLGLVPRQYSTGGRAILGRITKRGDVYLRTLLIHGARSALITLSRHTDRLSRWAAALTERRGFKKACVAMAAKNARIIWALLAKGEDFRLERAAA

SEQ ID NO: 358493 - protein, 366 aa, unidentified
MKKTSTVRVNGSMIFKGQKLTIGLDLGDRWSFYCVLDEAGQIILEQKLPTTPEAMKQTFGKIPRSRIALETGTHSPWVSRLLSELGHEVIVAHAQKVQLITKSNRKDDRHDARTLARLARVDPELLGPVRHRSAKAQIHLTVIRARAELVSARTALVNAARGLVKSYGERLPKCGTYQVSEKLAEGVSAELREVLVPLFREIESLNERIKEYDERMEKIAKEVYPEVFLLKQVKGVGTQIALSYVLTIEDPYRFPKSRQVGCFLGLRPGRRNSGESEPQKGISKEGDRYLRTMMVQGAHYILGPFGEDSDLRRWGLKLAERGGKNAKKRAVVAVARKLAVLLHRLWVGGEVYEPLRNSQKAMREVA

SEQ ID NO: 358494 - protein, 428 aa, unidentified
MSYKIAAIDIHKRVLMVVVATTSNEVEEPAGAAMEFVCRKFGAGASERQQMVSWLQSQQVCEVVMESTAQYWKPVWLDLEPHFGKLHLAQAQSNRAPKGRKNDFKDGKRLGRRLLAGELMLSFVPEPEQRTWRMMTRGRLQLVRERVRLQSQLESLLEEARIKLSSVISDLFGGSGRRILEAMAGGETDAAKLAELGDDRLKCTKPQLADALSGSLGAVHRELLKLHLRRLQLLDRQIDKLSEMTARALKKHQEAVVRLAKVPGFGAESAQQMIAEVGVEAEAFASAGEFASWAGVCPGSNVSAEENHSSRCAKGNRYVRRILAEAAQAAVKKKGCHFQHVFRRFLPKLGWSGAIWVVAHRLARLVWKILHQGISYIEQGQDTTPMARKRRAQKLAQALRKLGYRVTLAEMHVSPMPGDAGFPVRSAA

SEQ ID NO: 358495 - protein, 386 aa, unidentified
MKRNDLSRSLVAFDQNSTLVAVIELSLKSWLIAGLVPGLARRPLKKQSADAEAIVKLLYGWREEAVKAGGKIERIVIAFEAGRDGFWLARWLRERGIEAYVIHPTSIPVSREHRRAKTDRLDTALLMRAFLGWLRGEAKHCSMAAIPTLAEEDARRPNREHEHLVGERSRIINRMKATMIRHGIGNFNVKYRKAAERLEEVRGPEGMPLAENTLAELRRDMARLALVRAQIKEIEKTRLERLKKAPQEGSHPMVLMLAKVMSIGIETADMLVHEVLSRGLRDDRAVARYGGITGAPDESGSKRREKGLARAGNARVRRGMIQLAWRWLMFQKDSGLAQWYRARTASARRDVRKTMIVALARKLLIALWRYVTTGEIPLGARLRPAQ

SEQ ID NO: 358496 - protein, 350 aa, unidentified
MNVNHYIGFDVHKKTVSYCVKIADGTIVEESKLGATHQALRQWAEKRREPWHGAMEATLFSGWIYDTLKPYAAELQMGHPAMMKAIGASKKKNDKLDARKIADLVRCNLLPACYVAPAEIRELRRLLRYRNLVVTQAVRMKNRMSGLLMEVGAEYNKQQLHGKQYFTELLDTVEEVPESVKDLLRLSRGAMETFEATQRQLLVRLQKDPLLAKRVILLKSIRGVGEVTALTWALEVSDPHRFSSVANAVSYCGLTSALVSSADKQQRGPISKQRNAHLQTVLIEAAKVAPRWNPQLAAVHEREVQRGNRNRATLAVARKLVAYLLAVDKSRQPFQVRNPATPETEVQKVA

SEQ ID NO: 358497 - protein, 330 aa, unidentified
MKNYKEVVGIDVSKKKIDAYCYHAQSHKEFKNDIVGYKSLIKWVLKATKGVDVFYCFENTGYYSLKFALYLHSQKIVYVEESPLKIKRSSGIVKEKTDRLDASLIARYGWIYREELSPSTVKSTAHLELGRLLALRDQLVRNNAGLKETLKEMKVFLTSATTDAGCISLKRSIDYLSKQVKSIEIRIEELIFEDSSMYKNYELLSSLKGVGFVVACQLIYHTGNFTRFDNWRSFSSYCGTAPFAHESGTSIRRRKQCHYLGDRKMKSLLSMASVSAIQHDSELRMYYKRKLAEGKDKMLAINNVRNKLISRAFAVVKRGTPYVVLQQHAA

SEQ ID NO: 358498 - protein, 455 aa, unidentified
MQGCLTFFLSGCSDSFCLKGCVPLSQFLNDFVVGIDVSSEFSIVAMLAPTGELIRKPFRIDHNPAGFHKLLDILQKEEERLNRKPIYFVESTGIFHLPLFFFLKSNDLKGFVLNPLVVHSTKNFDLRKVKNDNKDSEAIARIAKYQDIKVSMMPEPQILALRMMTREYYAVSDMLTEMKNRLCTDLYLLFPGFLNVFSGPFGKTALAVLRNYPSPRAVREADTDVLTLLISKTSRKGLKWASNKVALLRDCAQLASSMPSEFSLLDTKIKFHIDGIEHMQASLNGIEAQIHKMIDSDEFPAKAKRNVELLDEIPGVGFLTAATLIAEIGDFSLFNSPKALTAFFGLDPSVNQSGKFNGDRNKISKRGTRIGRRILFTVAMASIRTTRNGMEINPVLREFYKSKCVSKKKKVALVAVMHKLLHYIFAVLRDQKPFVIKRPEDHQTWRTTKPQPAAA

SEQ ID NO: 358499 - protein, 343 aa, unidentified
MKLHVIGIDLGKTVFHLVGLDSTGRAVIRKKCSRKQLLAFTANLEVELIGMESCSGSHFLGRALREQGHEVRLMPAQYVKPYVQTNKSDFLDAEAIAEAVQRPRMRFVPIKTEEQLDLQALHRVRERWVMRRTAMVNQIRSLLLERGLTLPKGRRYVDQQLPRILEDAELRLSGSFRVLLAQLKLELEQLGARMEEMDRVIQKTAKENEDCQRLTEIPGVGPVTATALIAAVGNASTFRKGRKLAAWMGIVPGEYTTGGKQKLLGISKRGNKYLRTLFIQGARSVLQQRDKQAPGLNRWLAQLLARAHQNVVIVALANKLVRTAWAVLCKNERYRAPVLAVAT

SEQ ID NO: 358500 - protein, 343 aa, unidentified
MQTISTIGLDIAKSVFQVHGVDAVGQVVMRRQLRRRHVLAFFQKLPPCLVGIEACASSHHWSRELQALGHTVRLMPPAYVKPYVKRQKNDSTDAEAICEAVTRPNMRFVPTKTVEQQSCLMLHRARHLFIRQQTAVINSIRAYLAEFGIVAPVGRKGVEQLLEVVADTADHRLPEVARACLAALGSQLRALKSQILEFDRRIIAWHRSSLTSKRLDAIPGVGPALATALVASIADAKAFRSGRDFSAWVGLVPKQNSSGGKDKLGSISKQGDRYLRSLFTAGALAVIRYAKIHGTDHRPWLTRLLARRPTKVAAIALANKLARMAWAMMARNERYNEPAALTA

SEQ ID NO: 358501 - protein, 340 aa, unidentified
MTAIGLDTHKDSLAACAVDALGAVVAEATFANDVAGHASLAEWARRMAPGAVLGFEGSSTFGAAAARTLAAAGFAVREVPPHLSRRERGRTRRAGKSDPGDALAIARVTAREPDLPPVRGIDPTTELRLLLAARDDLVAEATRVRNRLHADLVVLVPGYGARAANLVAERHLATVGRTLRRTAGVHAELARERLVDLRRLHARIRLLATRIGRLVAGHPLLELAGVGRLTAAALIAQAGDIARFRSADAFAMLAGVAPIPASSGQTHRMRLNRGGDRQLNRALHVVDTVQARTSPLAKAFIARKLSEGHTWRDAIRSLKRHLARVVFRMLAAGRTSAAAV

SEQ ID NO: 358502 - protein, 413 aa, unidentified
MIDCPDKAGGIDVHSRTLVATIVNDREEYVTQNFLATSSGHEALLKWFLDNGCSRVLFEATGVYWYPLYLAVFQSLKVVVANPWHVKCHYKVKTDKRDSRWLARLCLKEAVNPSRVFVGDRHEFRELSRHRETLVKMRTALKNRVHRQLVLCNVKLGSVFTDCFGKKGRHILEALLGGTPLESILEDKKLRLGEDRKRKLREAVKNELDPLSVEAIRRNLEMIDFLDGQIRIVEARLGEQGSRWKKQLRLIASIPGVGVLSAHLVLSEIGDIDDFETGEQLASYFGIVPFVSESGGKPFTGHITKHGSPHMRRVLIQIAHVIGRMKCKMGRYYNRLKERKGAGVAAVATARKLLCLIHHLLKNDEEYEEEGHKKKPVRKMPMVQTETSLEHAIEIVQKAGFSLRRDKRRRTTT

SEQ ID NO: 358503 - protein, 395 aa, unidentified
MYNLLVGVDVSKDFFSAAGLDEEGKEHFSGTYEMNSHGFSEFLKALSSHGERLDQMIVAMESTGCYHINLFSFLSSQGIRTVVVNPLLISNFAKLSLRKTKTDKKDALTIARFLLDHHEEISQLSISQDHQDLRDLSRERESLCHLIAATKVEIKRVLRTTFPELESIGNLYTGAMLRFLQQYPSARLVRGAKRVAIAKALRGPYVGDKLTFTAEDIIKAAQSSVAVVSPAKEIIVQGKIATLLHLKERLEELTKLLTDLCKATRVEDLKILQSIKGVGPNTAVPFLAEVGEVKHFTSSKKLIAFAGLDPSIHQSGKFLGASKLSKRGNRHLRRAIYLMTTSVVSQNVFFKAYFLKRKKEGLPPQKALFAVAHKLIRVIFAMLSNRTYFKVKEAI

SEQ ID NO: 358504 - protein, 367 aa, unidentified
MHSTTKFIGLDVSKETIAVAIAEVGQEAPRYYGSIPHTPAALRKLIRALGSVETLSFCYEAGPTGYETYRLLRSMGAQCVVIAPSLMPKRPGDHVKTDRRDAEQLARLFRAGELTAVYVPEREDEALRELVRAREAAMEDAHRQRQRILKFLLRHQIEQPATLKRRWTKKYRVWLGQLTFPFATMQVAFTEMLHALQEVEQRIQRLEHALLEQAATGTKAELIQVLQSLRGVGLLTAMTIAAEIGSFARFRSPAQLMAYLGLVPREHSSGPRTCRGGMTKAGNGRLRRSLIESAWSYRHRPAVKGDLARRLEGLPADVQLLSWKAQERLNKKYRHLVFGLNKHKNVAIGAVARELVGFIWAAARTVA

SEQ ID NO: 358505 - protein, 400 aa, unidentified
MMTPDDIDVWVGLDVGKSAHHAHALDHDGNTLYDKPLKQDEKAIRTMLGKLSKHGRVLLVVDQPNTIGSLPLTVARNMGIAVAYLPGTAMRRTAQLLPGDAKTDRRDAHVIAWAALKLPETLGDAGPDDETLAALKLLAGHDEDLAHESTRHVNRLRSLLLQTHPAFERALKGERITRDATLALLERYGGPMGVKRAGIEDVKDWAKSNGLRAGRIIDDMFKAIGEQTVTVPGTLMAETIIPSIAHDIKTIRDRRREVGRQVEKLLEDHPLLTVLTSMPGIGVRTASNILLGIGGDIANFKSSAHLAAYAGISPVTGQSGTSIKGERPSRRGNKRLKNALWQTAFVASTKHPPSVAYYKRKREQGKHHNAAIICLARRRCDVIYSMLKNGTLYQEPALVA

SEQ ID NO: 358506 - protein, 415 aa, unidentified
MLKIVYPICCGLGVHRDFVYACIATTVNGVTTYKSHRFSTFTKGLRELLSWLLASNCKDVCMESTGKYWIPVYNILETDCKIVLAHPKYVKAIRGKKTDKKDAKWIADIFKHDLVSGSFIPPADIRQLRDLVRYHAKLTNFTTGEKNRAQNCLTVSNLKLDSVFSDVFGKASSKIISHILANPSEKLSDVSAFRTKGMKATDEEILEAVDGEIYPEQAEKLRIIRDHMSSLDLCKANLQSLILSTAEKYIPEIDLVCTVPGIATFSAISVIGEIGVDMSVFPTSKHLCSWAGLTPQNDQSAGKKKTTRISRAGAYIKPLLVQCALAAVKSKNKHPEVYNRYSALKKRRGHKKATIAIARMLLTAIYNILKKHEPYNAEIYRKSDAPPEHRNVSVEEAIFILQRQGYLISSPVSIE

SEQ ID NO: 358507 - protein, 409 aa, unidentified
MFGGIDWATADHAVAVHSDDGMKRWRYALPHSRDGFDRLVGWLARFGDPAGLPIAIERPDGRLVDRLLEAGHPVVAVKTTAIKAWRESEVPSGAKSDPGDADVIADYLRVRHQQLRVLAPFCDATKALRTVVRVRDDLVDQRVAAINQLAALLDAFWPGAKAIFADVESPTALSFLERYPTPASAARLGDKRMAAFCAKVRYSGGRTPAELLERLRGAPAGIADAAGTAAGGDAVLAMVTVLRALNAAIKDLERSIQARLAGHPDGEVFTSLPRSGMVNAAQMLAEWGDCRGAYTGPESVAALAGQTPVTKQSGKHTSIGFRWSCNKRFRNAMHTFADNSRHASPWAAGVYADAKTRGHDHQHALRILGRAWIRVIYRCWTDGVAYDATLHGATRRLAAAAVADQQTAA

SEQ ID NO: 358508 - protein, 356 aa, unidentified
MAVYVGIDVHKHYCQATLISEQGRLTHELRFDNTTEEASNLVDLAKTVDTQIKAVLEPSTNFWIRIYDTLEEEGVDVKLSNPLRTKAIAEARIKTDRIDAKTLAYLLRGDLVAESYVPTRKNRERRALIRHRANLIQMRVDIKNRIHALLDKHELTHTYTDLFGKQGLEWLRNLQLPTPDQEILQSNLQLVETLTEQTRSMDIQIAKDATSEEKAKLLMTMPGVDYYAAMVLLSEIGDVHRFNSDEKLVSWVGLAPQTHQSGETQWTGHITKKGSKRARWILGQCAQSARQHDPRMREFYERIERKHGPQKAIVAVARKMLAIMYVMLIRNEPYHGENPELTEQKHKRLDTLANTA

SEQ ID NO: 358509 - protein, 390 aa, unidentified
MLPSIHHASTEQTATVRPDLTLYASLELSRATWLVTCLLPERDRMSKYSTPGGDGGALLGLLERMRARAQQLTGRPAKVVVIQEAGLDGFWVHRLLEANGIESHVVDPASIAVPRRRRRAKTDAIDGETLLRTLLAWTRGEPRVCAMVVPPTPEEEEEDRRRVCRERAILLQERIRHTNRIKGLLAGQGITDFNPLHKDRRQLLDAARTGDGRPLPPQLKAEILREIELIELLLRQIADVEAAREVLAGPKAAKAPSPVVLLKQLKGIGPEIASVLYFEGLFRSFGNRRQLAAYAGLAPTPWRSGTVDQEQGISKAGNPRLRSTMIELAWLWQRHQPASALSRWFHTRVGNERGRIRRISIVALARKLLIAVGRYVTQGEVPEGAVLKAA

SEQ ID NO: 358510 - protein, 342 aa, unidentified
MKNTIIGVDLALKAIQVCVYANNKVQSNTEMTPKQFSAYLSTFLPSTVIFEACGESNYWSQLANTYGHKALLISPRLVKVVRQNQKTDKNDALAIIQASLLPDINFVSSKTNHQQQVQSMLKRREQCIKQRTTLKNQLMGLLREFNILSGRSLSSLISTIESLLEDGDNGFSMPFRKMLRTSLDLYLTLCDAIDCYDDMLNAWVDSTPECKKLLKIEGIGKLNAIHLYVGLSTDELGQFKAGKDAAACIGLTPLQHSSGGKVKLGSIGKRKNTSLRSLLITGAMSVVQQVVKREQKTKKEAWLKALIERRGKKCAAVALANKNVRTAFALLKTQSEYQVVLV

SEQ ID NO: 358511 - protein, 370 aa, unidentified
MSVRRILAKTIDTDLEYEAIGIDLAKNCVSAALLTTDGEVVCIDRLDYSELEKSAQALSPTTFAMEPCTEMNYLVQKLEAWGHRCLVIGGKNVQNYVENHYSGQKTDLNDAQALAFLAQDTQLRTIKAKDIEQQKYASLTTLREQYIKQYRQTIVSLKGICQAWGLNISKGISGKAQLKNLIENHAAFPEELRESLVDMVTHAQTTQKVLNKITKTLEVLAKNDKVCQLIQTIPGLGTICSCRLRATIGDIKRFKNPKDFPAYYGLVPRSIATGHNEKKGKITHRGDRTMRSLMVQGAGCVIRLATCGKLKSKQLTKWILKKQKEKMPWGKLVCAVAAKLLRIVRAILISSKPYNPKIAGVAKCSLSKGS

SEQ ID NO: 358512 - protein, 425 aa, unidentified
MSCKEPSPNRFVGLDVHKHYLIAVAVDADRNEVMSPCRVPLERLDSWVRKALTPQDAVVLEMTTNAFQLYDDLLPHVHSVTVVHPPHVALITRAQVMTDKIAARTLAKLHAVGLLPCVWIPPFEVRDHRALVAQRTKMVCLSTQAKNRLHAVLHRHHLLPPAGTLFDSHDRPWWLTLDISALELARVRCDLDTLVFAQAQIDLLEKTMLGLAVQDCRVVLLLQLPGVGLITAVTLLAAIGDISRFCEAKNLVGYAGLGARVHDSGQTHHTGHITKAGRRDIRAAMVEAAHVAVRTHPYWHAELARLEPRLGKNKAIVAIARKLLMAVWHILTNDCADRFADPERVARKLLCLAYRLGRARQPQGLSAAQFVRHHLDRLGLGAELTSISWGNRRHIDLPLSQREVQVNPSAELLAARCPQPKGQLP

SEQ ID NO: 358513 - protein, 345 aa, unidentified
MTNILKQVVGMDVSQNELVVSMGRMTSSLDQEVYAFKTFANKPSGFTALEVWVKKNTDQQVPVRFVMEATGVYHEKLAYYLSERNQLVSIVLPNKICNFAKTLEIKTVTDKSASQAICQFGLGKKLNTWQPPKKIFRDLKQLTRERDQIVVERTVAKNQLHAEKAEAFPNKGSIARLNERIQLFNRQEKEIRYEITEIIKQDDELIEKIKNVTTIPGVAKLTTVIVLAETNAFDMITSRKQASSYGGFDIIEKQSGTSVKGKPRMSKRGNRHLRKAMHMPALAAIRHDERFKAIFVRLVSKHGIKMKAAVAVQRKLLELIYTVWTTNTGYDPNYLQRIIENDKAA

SEQ ID NO: 358514 - protein, 430 aa, unidentified
MDEVNRNRLEEFRQLREEIRQSGEHLIVGIDIAKDRHHAFFGTATGKALLRRIVFSNDHEGFRKLLDQTEALRVQHGLKKVVYGMEPTANYHKPLGEYLIKLGKTVVLVSGVTVARNRESLDGRWDKHDVKDSANVADLISQGKCLYYEHPLAELRGLRGLLSLKRRLKKQEHGYRVRIRNHLIAQYYPEMDRDYERLGAEGLSIVRWCLAASDIAQLDVDPFIERVTSRRITREKRRRLEEIWEKAAGSIGCDGVPGVGHEAKMMVEGLRQIREMIKETEQKIEELCEAFPAYEYLLTIPGFGPDVSSKVLGAIGDPDRFQNGKQVLKIGGLDLSADRSGKGSDSANPEISKRGKADLRYALYQAALIASFKNRNVMIYYTNKIRGREREKGIHVKMRVKLAAKLLVIAWTLMKKKEPFNPVYLKAELN

SEQ ID NO: 358515 - protein, 428 aa, unidentified
MNTPTSNPPVVAWVGLDWADQRHEIRLQAAGSPRLESFSVEQKPEAFQAWVAELRARFPQGRIALALEQSRGAVIYALMNYDFFLLYPIPPKTLARYREAFASSGAKSDRSDADLLLELVRTHGDRLRAWQPDDALTRQLRLLVEYRRKTVADRTRLTNRLTDLLKTYFPQALDWLGDLRSLAACEFLGAWPTLEAVQGANRPALRRFFHDHRRLSAEEREKLLDQIRHARPLTQDRAVLEASELMTQTLVEQLRAVISALARLDQALEELFGQHPDQQLFDRLPGAGEALGPRLAAAFGTDRDRYQSAEEIQQFSGIAPVTAASGKMRWVHWRWACPKFLRQTFHEFADASRKKSLWARAYYQQQRQHGVSHHAAVRALAYKWIRILYRCWKTRTPYDEALYLRALQRRHSPLWLAAASLSTQEAHP

SEQ ID NO: 358516 - protein, 409 aa, unidentified
MNKVDIAPFEVFCGIDVGKSLNHIVALDRYDDKPLINRKVPQEEAEIRAALEEAVDFGLALVIVDQFGAFGRLVVGVAKSMDIPVAHMPPRRFRQVAETYGEDKFDEKDAFILADASRTTPRNIEFVGNRAESMAEIKVLSSRRDDIVEERTRCYNRLHDFIHQVSPPLEELFSKRKLHNDLEIRLIARYGGPIGFRQAGRARASTWAAELKYHCVDGPKKVEQVFDVLDRQTVMLPGAAVIEEQIRSIASRIIELLAEEKRLNLMIEQRAKMIPEVDLLQSIPGVGPVYAALIAVEIGDIGRFRDSNHLASYAGVAPRKEESGTSVHKRRKRKGGNRRLKNALMQSSQRSVQCDPLARAYYERKRAEGKKHLQALRALARHRVTVIFAMLNEGTFYEPPVEVDENGSG

SEQ ID NO: 358517 - protein, 349 aa, unidentified
MLADEVDYVIGVDTHRDHHTLAVIVAPAGAVLAQTVVDANTRGYGASLRFVDKHAPGVRAWAVEGAGHYGAGLARYLAERGETVLEVGRQSRSERRLRGKDDPLDAIRAARAGLAAEAVTLPRSGERQEALRLLLLARRSAVDVRRVALVQLRSVIVTAPEHLREDLRRLPLTQLIRRCSRFRRSHSRTPDELALVLALRSLARRIEAATAEADELEREIIGHVRALVPELLNESGVGPIVAAQLIVSWSHRDRVRSEAAFARLAGVAPLPASSGQTIRHRLSRGGDRQLNRALHTAVLHRRQHHAATRDYIARRVAEGKTSREATRILKRYLARHLYRVMQNASPMTT

SEQ ID NO: 358518 - protein, 364 aa, unidentified
MEAAGRFVGIDLGKRTYEMCLVDRKGKITRTNGKTDFKGLGKLCEKLSAEDLVAIEACNLAMRIERQIRQTVGCKVLVLNPGKLAIIYMSTRKTDKEDSLKLAKLLKNHDEDELPIVTPPTDEEWERRKLLSEYKSLKGMRTKEINKLHAIFEHAGFTQFKRKDMCCEKNRANILPLLKGYEKEEAERLVERLTLLERQIGLLAQKINAEVESDEKAQLAMTVPGIGPITALAYVAYMGDLSRFDNPHQVSNFIGFVPKVDNSCTIRHSGRTTKNGNALLRSMLVQAAWGAVRSKDGGALRDKYKYMSQTKGIGKGKSIVTTARKLGELLYMLLKTNTEYKPQKFILPEVQISKLADEALAVNL

SEQ ID NO: 358519 - protein, 369 aa, unidentified
MNKTVKYVGMDVHKKTIDIAIADEGRDSEVRHYGTINNDTDSINKMVRKLISTGCELRFVYEAGPCGYHIYRYLTGSSLDCSVVAPSLIPKKSGDKIKTDRKDSISLARLHRAGELTAVHVPAADDEAMRDLTRAREDAKIAERKAKQHLSAFLLRSGNIYSGKSAWSKAHFNWIADLKMAHPAQQIAMQEYVRSVTEGSEQVARLLAQIHILLEQWHMAPVVKALQALRGVSTIVAVTTIAELGDLGRFDHPSQLMAYLGLVPSEYSSGDSKKRGGLTKTGNGHVRRALIEAAQAYRLPARVSRVILGRQKELPSEIRKIAWDAQLRLCTRYQRLVARGKKINIVVAAIARELAGFIWAIAKQVSQPA

SEQ ID NO: 358520 - protein, 466 aa, unidentified
MKRHRRRHAPKPRVSPSVLDHINPHAAGIDCGSAEHFVAVPPDRDPTPVRSFATFTGDLQRLADWLTACRVTSVAMEATGVYWIPLYEILDARGFTVLLVNARHVKNVPGRKSDVSDCEWLRDLHIVGLLRGSFRPTDGIVALRAYLRHRQTLIETAGSHVQRMQKALVQMNVQLPLVVSDITGVTGLRILRDIVAGRTDPPALAQHRDYRCHASEAEIVAALTGNYRPEHVFGLRQNLEAFDHVQQQIAACDTAIEAHLQTLAAHATPATTPLPPARPRQKPRDNEPRFELRTPLHQLTGVDLSQLDGIGPYNALRLLSEIGTDMTRWPTDKHFTSWLTLAPKNRISGGRLLSSRTQPSANRAAAILRLAAMNLGRSQTALGAFYRRLAFRVGKAKAITATARKLAILVYRTLKDGLVYRDPGADAYDAQHRTHVLRRLRQRAENLGFALVDLKTGEVADGTTVS

SEQ ID NO: 358521 - protein, 340 aa, unidentified
MQVTTIGLDLAKNIFQVHGVREDGSVAFNRPVRRAQLLQFFKKRPPCLVGMEACGSSHYWGRELTKLGHDVRLMAPVYVKPYVKRGKSDAADAEAICEAVTRPTMRFVPIKSVEQQGVLTQHRVRELLIRQRTQLSNTIRALVGEFGYIIRKGVNYIRDFAIDMRAGGTEGIPSMARSAITALCRQFLELNEKLIKVEKEIVRVARKDKRVQLLQTIPGVGPINASAIVATIGSGEQFKTGRDFAAWVGLTPINKSSGGKERLGRISRMGNKYLRKLLVIAMTSRVSAAISRPDRVDPWTASILAKKPVRLATVAMANKTARIIWAVLSRGEPFRHTTTA

SEQ ID NO: 358522 - protein, 412 aa, unidentified
MHVVHRQCCGLDIHKKTVVACVLVTQEDGSVQRTVRTFGTMTGELLALADWLDTHGITHIAMESTGVYWRPIFNVLEDEARTVVLVNPQHVAQVPGRKTDVRDSEWLADLLRHGLLRASFIPPVPVRELREFLRYRKTLVQERAQEVNRLQKLLEGANIKLAAVATDVLGLSGRDMLHALIAGEQDPEVLADLARGKLRSKLPVLRQALQGRVKPYHLSLLMRILAHIEFLEESLTQLQQDIEQHLAPFADAVTLLQDIPGVGPVAAATIVAEIGIDMSRFPSAKHLASWAGVCPGNKQSGGKRLSGAATKGNPWLRAVLGEVATAISRSRNNYLSAQFHRIARRRGKHKAILAVAHSVLRLVYYMLRDHQPYSDLGADYFDKLDSARLERHHVRRLERLGYTVTLTPKEAA

SEQ ID NO: 358523 - protein, 346 aa, unidentified
MNQIIRIGMDTSKHFFQLHGVDAAERPVLRRKLRRNEVLVFFAKLPPTVIGMEACGAAHYWARELRKLGHEVKLMAPQHVKAYIKRNKNDGRDAEGLCEAMSRPTMQFVPVKTEEQQAALMLAVVRQQLIARRTQLGNAIRGYATEFGLITAKGLDKLEPLLARIAQDESLPVLAREIFAMQGRDYARLQVELKAIDARLMAWHRANPDSRRLAKIPGIGPIGATALVMKAPDPRLFPSGRHFAAWIGLTPKDHSTAGKTRIGKITRAGDEMLRSVLVAGATAVIQQAKNGRGHPSPWLLALLARKPPKLAAVALANKTARIAWKLLTTGESYDGARMPVASALAA

SEQ ID NO: 358524 - protein, 343 aa, unidentified
MKLSYVGVDLAKNVFQLHGVDRFGKAVWRRRLRRHQWMRVLLETVEPGCVVGMEACTGAHHWARELQSRGYTVKLIPPQFVKPYVKSNKNDANDAEAICEAMSRPHMRFVTVKSVEQQDIQATHRVRTELKDHRNAKANQIRGLVAEYGLVAPQTLPALRRAIPDWLEDAQNGLTDYFRSLLHGLWDDLLTLEDRIKELDKEITRLANSNEVTRRLQQLRGVGPMVATALVATVGTGEQYRKGRQMAAALGLTPRQSSSGDKYRLLGISKRGDAYLRTLLIHGARAVVSQAKHRDDPLSRWATDIARRKHTNVAAVALANKTTRMAWAMLRNDTDYDPNLAVG

SEQ ID NO: 358525 - protein, 386 aa, unidentified
MKIQNQLSPIMTVENNATIYVSIELSRKIWLTAVHTPLADKIGLHKVEAGDSTELLALIRRIMKKVERTMDGPVKVLSCYEAGYDGFWLHRVLAEAGIINHVIDPASLQVNRRARRAKTDRIDALGMLRALMAFERGEDQVFSVVRVPSVEGEDARRVHRERERLIKERIQHVNRIKGLLATQGIYDYEPLRRYRHKRFEALTTAMGTPLPRHLRDEITRHLQRLELVIEMISAVETQRDAVVEADPAGDENGRKIQLLVRLKAIGPQFATVLVGEVFHKQFANRRQVASYAGLTPSPFNSGSMVREQGISKAGNPRARTTMIEMAWLWLRYQPHAALSRWFHERVGTGTGRVRRIAIVALARKLLIALWRFVETGLLPDGAELKA

SEQ ID NO: 358526 - protein, 366 aa, unidentified
MKKNSTIAVGRKQIFKQARLTIGLDLGDRSSHYCMLDEAGNVILERSLPTTSNGIRQAFGRIPRCRIALETGTHSPWVSRQLSQMGHEVIVAHARNVRLIGESSRKDDRIDARTLVRLARIDPGLLGPVRHRSAQAQIHLTVIRARAALVSTRTALVNAARGLTKSYGQRLKKCGTEQMNRDSSKGLSQELREALDPLLREIESLNERIAEYNGRIEQIAKEVHPEVARLKQVKGVGTLIALSYVLTLDDPQRFRRSRDAGCFLGLRPGRRNSGQSEPQLHISKEGDRYLRTLMVQGAHYILGPFGQDSDLRRWGLKLAERGGRNAKKRAVVAVARKLAVLLHKLWVSGEVYEPLRNNHKVARAVA

SEQ ID NO: 358527 - protein, 369 aa, unidentified
MNSQYPVVIGLDVGKTGHHACALDPDGSKLFDKPLPQHEAKLRELFMGLQKLGDVLMIVDQPNTIGALPIAVARDCGCAVAYVPGLTIRKAADLYPGRSKTDARDAFIIADTARTMPHTLRQVDRDSEVLSAVKVLAGFDEDLAHETTRALNRIRSLLTQIHPALERVFTGGSLSTALVLDLLEKFGGPTRLKTAGRGKVLRFARSHSRRDPEPLVDRIFTALGEQTVIVPATAAVELVIPRVAGQIKELKAQQATVARKVEGVLEGFPLGAVLRSMPGIGLKTAAQILLAIGDGSAFQTPGHLAAYAGITPVTRRSGTSIRSEFPARSGNKRLKTPCSTLPGSPRTTTRSRRPTTTTNAPRASATTPP

SEQ ID NO: 358528 - protein, 465 aa, unidentified
MRAVTRRCFGLDVHRDFAQVAIWQDGLVRQAGQIAMTAEALRVFADSLAPTDEVALEATGNTNAIVRALRGRVARIVVGNPQKTRAIAEAKVKTDKVDAAILAQLLAADYLPAVWVADEATQARRRQVARRAHIVRQRTRLKNQVQAVLHRNLIARCPAADLFGHKGRAWLAEQPLPADERQAVSALLRQLDFHGEELRLIDRELARVALGCQDTKRLMTIPGVDVTVAMSITAAVGDFKRFCSPNKLVSYLGLNPRVKQSGGQPASHGRITKQGRAHARGMLVEAAWVAVKTPGPLRAFYERVRARRGMQIAVVAAARKLTVLCWHMIARGEDYAFARPSLTAKKLRALEPQAGMPPGAARRATPPATRSGRARPREADGRARRACLSPARRRLAGRGPRSQGGRGRRQRDATLKALRRGNSCAAGLSPRTCASLGGRPRPPPRLTPTEHPVDAPRPSNLSSVV

SEQ ID NO: 358529 - protein, 355 aa, unidentified
MKYYTSTTQFNCGIDLHARQMYVCLMDRDGKILLHTNVRHNDFAFFLKLVAPYRHDLTVCAECMFGWYWLSDACQEAGIHFVLAHALYLKAIHGGKNKNDRVDSEKLCHLLRTNLIPPAYVYPADKRPLRALLRQRLLYVWNRSELLSRIQSHQLAYNRPTCRQNPGNRESWGEQLLAAEPDAVRQLALQNDLALVGHYDAQLATLEKELLKLTKQTASRDFTLLQTTPGIGDYLGLTLLHEIGDIARFPTVKNFLSYCRLVKGTVASAGKIKGLRGAKLGNPYLRWAFGEAAVIAKRDPLVIGPLAQRLEARMGGNKFKANTVLAIKLARAVYFMLKNKTVFDSERLVAALSKN

SEQ ID NO: 358530 - protein, 418 aa, unidentified
MQVTEATLVLGVDIGNQWHYARAFDWREIELTRKVFRFSNDLDGYVAFEEWVQNVSEKSAKMAILIGCEPTGYYWFTFAKYVKERGMKLAFVNPYHVKQSKEMDDNSPRKTDQKDPKTIAKLVTEGRYSFPHIPEGIYAELREAISVRDQIVKALNATSSRIQRWLKIYFPEYLEVYKVFDSVSGLAVLKKVPLPKDVVELGVDGIVTLWREKKLRAVGKKRALTLVAAAKRSIGLAGGNCARLDLQLLLEDYSEKKEQLDRITAALQEETLKVPNVEKLLAVKGVGIITVAGFLAEVGDIGRFTSPKQIQKLAGLEPKENSSGKHKGRSSISKRGRRKLRRLLFQVVLPLIRSNEDFREVYTCYTTRKDNLLKGMQAMIAVSCKVIRIFYALLTRGMDYNSTRFRADITRPEPAKAA

SEQ ID NO: 358531 - protein, 399 aa, unidentified
MLEQAWAGVDVGKEHHHCVVIDAEGRRLLSRRVANDEAVLLALISDVTGLAGQVRWAVDISTGEAALLLALLAAHDQQVCYLSGHQVNRAAGGYRGSGKTDAKDAAIIADQARMRRDLAPIRVPDEVIVELRMLVARRRDLQSDRVRAVNRLHETLLTISPALEKALDLTNQGPLILLTGYQTPAAIGQLGVTELTAWLRARKVRRAGELATRAVAAANAQQIALPGEALAAHLAGQLAEGVIALDEQIKHTDKLIEGRFHRHHAAPVILSMPGIGTLLGAEFLAATGGDTAAFATPDRLAGYAGLAPAPRDSGRISGNLYRPKRYNRQLQRVFYTSALISIRCCPESRTFYDRKRAAGKRHNQAVIALARRRVNVLWALLRDHRPYQASRPVSAAAAA

SEQ ID NO: 358532 - protein, 341 aa, unidentified
MKKFIRIGVDLAKNFFQVHGIVREGAEAVSRKFTRTKFREFFLSVAPCRVGMEACGSAHYWARELRSMGHDVVLIAPAYVKPYVKRGKNDAADAAAICEAMSRPDMRFVPIKSADQQAALMLHKTRELLVKQRTMIVNALRGHLSEFGLIAAKGIQRVHELVALALGEEGLPEAARQAAALLAEQSEQLEGTIDTLEKKIAETSAKYPMVRLLKEIPAIGPLISSAMAASYPDPDVFASGRDFAASLGLTPSQHSSGGKEKLGSITKKGNRYLRKMLVVGCTSVLRVAHKYKGALAEWIVAIKARKPERVAAVALANKLARICWAMLSTGEGFREELYTRA

SEQ ID NO: 358533 - protein, 372 aa, unidentified
MKQNIIHIGLDVDDAQYHGAAFNKETGEVIEFKSRPTLKGLLQQLDRMARHFKGHKIKLCYEASYIGYCLQRDLISNNIHCDIVSPSSIPSPRGKAIKTDRIDAGYLAQFYANDLLTIVHPPDEEQEQDRDLLRSRQKVMQQRNQLRKHLQAVLRRSGLHYKAETQYKTHWTKHHYCWLVRTIDGLPGSLKVNLELLLRQLKALNEVLTDYGQQIEVLASSPRYQPAVHSLTCYKGIKNIFALTMITEIGDIKRFSHPRKLVSWIGMDIREYSSGGKHNRFGITKHGNRYLRTAFVEANQRGYRTARIGKDVKARRKNIAPELIHIADRCLRRLNKKGNRLLLAGKHPNKVKVACAREMVGFVWESLNKVAA

SEQ ID NO: 358534 - protein, 368 aa, unidentified
MDRLFVGLDVHKLSISVTTAEDGRDGAVRFCGEVAITPEQVRKLADRLSRSDSRLEFCYEAGGCGYGIYRQLTEMGHGCLVAAPTLIARKPGDRIKTDRRDSQMLALQHRAGGLTAVWVPDEVHEAMRDLVRARGDAMMALMRARQQLLAFLLRHGRTYPVGKPWTLRHRRWLAGQAFEQDAHRVVFQDYVEAVWASQDRRDQLEARISAMLAGWSLAPLVEALRALRGLDTISAVSFVAAVGDLGRFENPRRLMAYLGLVPSEHSSGERIRRGGITKTGNREARRMLVEAAWSYRYPPRVSTGKTDLVSRQPKVVRDVAWKAQVRLCDRYRRLSAGGKRPTVVIAAIARELSGFIWAIGQEVRPAAP

SEQ ID NO: 358535 - protein, 367 aa, unidentified
MKKISTAAAKPSRNFSQQKLTIGLDLGDRSSWYCVLDETGEIVLEQKVSTTPKAMREIFGAMPRSRIALETGMHSPWASRVLTELGHEVIVAHARNVRLIGESRKKDDRMDAQTLARLARIDPQLLCPVKHRSAKAQADLTVIRARAGLVRARTALVNTARGLAKSYGERLRGCNVRNMNPEKAEGLSPELQRALQPLLVALESLSEQIREYNEQIEDLAQKSYPQVALLKQIKGVGTLIALTYLLTLEDPHRFRKSRDVGCYLGLQPGRRNSGQSEPQMHISKEGDPYLRTLLVQGAQHILGPFGVDCDLRRWGLKLAERGGKNGKKRAIIATARKLAVLLHHLWVSGEVYEPLHNSNRPALPAAA

SEQ ID NO: 358536 - protein, 359 aa, unidentified
MKKSIRTVCEVTTGTLTVGLDLGDRNSYAVVLDEAGEVIVEGKLRTRDQDLRRHFGGLRPMRVAIEAGTQSMWVNRVLGELGHEVIVANPRRLRLISENPTKQDRVDAEYLARLARMDPKMLHPIRHRGEDRQRDVQLLRSRQALMQCRTALINHVRSAVKLFGERLPSCSADAFAARAVPKIPELLTGSLLPLLQEIARMTRQLKRYDRKVEELCAKKYPETRHLLQIRGVGPLTALAFVVTLEHPARFRTSRSVGPFVGLCPGRKQSGDRDPERRIHKKGDRYLRQLLVTCGHYILGPFGKDCDLRRHGEKIARQGGKKAKKRAVVAVARKLAVLMHHLWATEEMYDPLYNARKRAA

SEQ ID NO: 358537 - protein, 432 aa, unidentified
MRSTKMAKQNEETIAAYIGLDWADSEHEVTMLVVETGEVESRKLKQESEALAGWVQSLRERFSGRKVAIAIEQRKGALIYALMCYDFLILYPVNPKTLARFREAFNTSGAKSDPGDSGLLLDLIRLHRDKLRPWVPEDADTRLLQMLVEERRALVDDVTGLTNRLQSTLKQYFPQALEWAGELDSRQALDFLTRWPTLESIRKAGAVAVEKFYRQHSMRNQDKIEQRVKAIKEARALTTDRAVLAASRMKALAIVRQLRALGKSIAEMEARIQELFEQHRDHEVFSSFPCAKKVLGPRLLAAFGGDRTRYESALDLQSFSGIAPVTRASGKSKTIHKRMACPKFLRQTFHEYAAQSIKKAGWARVYYRRHRDKGVKHHAAVRALAYKWIRIMFRCWQEQEPYDEVKYIASLKRRSSQLVPGLPPAPGSLVEV

SEQ ID NO: 358538 - protein, 400 aa, unidentified
MTAVWAGIDSGKRAHHCVVIDTTGRLLLSRRVVNDEAALLELIAAVLAVADGDPAVWATDLNAGGAALLIALLTERGQQLLYIPGRIVHHAAQTYRGDGKTDAKDARIIADQARMRTDLQPVRGADQISTDLRMLTSRRTDLVYDRVRTINRLRATLLEFFPSLEAAFDYSKKAPLILLSGYQTPEAIRRIGAVRLAAWLKKRGCRGSTSVSAKALAAANAQHTVLRTQAMGAQLVAQLAEQIGVIDAAIAALDEQICERFDQHPDAPILLSMPGFGTVLGATFIANTGGDLRAFETVDRLASVAGLAPAPRDSGRISGNHHRPRRFNRRLMRTCYLAALSSLKNSPASRAFYDRKRAEGKNHKQALIALARRRITTLWAMLRDRTTYQEPPRPALAPAA

SEQ ID NO: 358539 - protein, 334 aa, unidentified
MARLGQEGRIQQRQIWHQGGMTLSTFAGIDVSKQHLQVGLAPGGENWEVTNDDTGIAAVVERLGNEAVSLVVVEATGGWELPVVAAAAAAGLPVVVCNPREVRDFARALKRLAKTDRIDAAVLAEYAQRVQPQVRPLVDAATQELQALVTRRRQLVGMLTAEKNRLGAAPPRICANIQANIDWLERCLAELNQDIEDTIRSSPIWRAKDRLLQSVPGVGPVLSMTLLASVPELGTLTRQQLAALVGVAPFNQDSGQFRGRRAIWGGRAPVRATLFMATVVAVRRNQVLQGFYARLRLAGKPPKLALTACMRKLLSILNAIARTNTPWQPRFIQA

SEQ ID NO: 358540 - protein, 346 aa, unidentified
MLYAGLDLSRKRLDFHLLDGEGATVDVGAAPPDADGLSGLSRQLERHGEPIRAAIESMNGAQFVHDRLELHGWQVEIADAQKVKGLAPLACKTDRIDAWVLAELARRDLVPAIWLPDPLVRAERERARWRLHLVRHRSSLKQRVHAVLLTHGKPCPVSDLFGVRGRQLLAKLGLPEPWQGTIEASLRLIDELEREISDCERELRRLGADHRYVPLLCTVPGISWVLAYTIAAEIGDIGRFPSPRKLAGYTGLCPRVYQSGERDLRGPLSKQGPRYLRWALVEAATHACTAPVYRDRYQHTKARIGKQRGAKVAQIDLARRLSEAIWHMLSRAQPFAPKGATDPLAA

SEQ ID NO: 358541 - protein, 355 aa, unidentified
MNQEKYIGMDVHQATISVAVMDSSGKLIMECILETKAATILEFIAGLRGTLSVTFEEGTSAAWLHDLLKPHVSHLVVCDPRRNALLKDGSKSDRIDARKLAELLHGNKLHAVYHGEHGMRTLKELGRSYLTITKDLTRVMSRIKALYRSWAIPCNGATVYAPRHRAEWLAKILEPGVRLRAERLYQQLDLLQPVRQEARRDLLVESHKHHAVKLLRQIPSIGPIRAALLVALLQTPHRFRTKRQLWAYSGFAVETHDSGEYRFVRGKLVRNRERITVRGLNRNHNHDLKNLFKGAALSASTRPGPLCDFYVALIEKGMRPTMARLTLARKMAAITLTIWKKGVEFDGKQLDRQAA

SEQ ID NO: 358542 - protein, 387 aa, unidentified
MYFVGIDISKFKHDCAIIDELCDTVMPSWSFSNDREGFSHFKALLDSLEGEKKIGLESTGHYGQNLKQFLESNGFAFMEFNPLLVSRFVRSKSLRNTKTDSIDALSIAQYVMAVEYKPYPSSFYHLDKLKSLTRFRNSLVRQRSRQLVELTNVLDKLFPEFKPFFKDKFSVTALYILAHYQTPERIANMNARSYEALRKLSRGRFTLSNFTQLKALAKNTVGTQSDYLLDQMNILLELYSQLDSKVDEFDAQIKECVRGIDPPCLSIPGVGELSAAMILSEFGDFSKFQNPSKMLAFAGLEPGYFQSGQSEYTGHMVKHGSSRLRYALMNCCLPLISNEPVFAAYYTKKRSEGKPHRVALTHVAKKLLRVIYTLQTKNIRYDPTMMH

SEQ ID NO: 358543 - protein, 337 aa, unidentified
MEQSTQYVGIDLHRRRSVIVRRNHAGETLETVRIDNDSRALAAELAKAGERPEVILEATYGWYWAADVLQECGANVHLAHPLGNNWGNRRVKNDERDATDLVDLLRLGRLAEAWIAPPPLRELRELVRYRAKLVHLGTSLKAQVHSVLAKEGVAVPMTDLFGSKGQRLLDGLALGDAYRIRVTSLRDLIEVVGREITMVEAEIAPGLAGDLGYQAIQAIPGVGPILAAVFVAEIGDVSRFKSARHLCSWAGLTPTHHESDEKVRRGHITKQGSRLVRWAAIEAVVRQHGWTAVSKHHRAVAERRGNKIGRVAAARKLLILVYYGLRDGEVRCLAEPG

SEQ ID NO: 358544 - protein, 346 aa, unidentified
MLIIGCDFHPGVQQISFVDRETGEYGQMRLDHKKGEAERYYRSLAGCSVRVGVEATGRMRWFERLLEELGFELWGADPRKVRAAAAHQAKTDKKDAELLLRLLLEDRFPRLWIPSAEQREARQLVLHRHRRVQTRTRAKNQWQALASNEGRRRRVWSQAGQAELKKLALSPWGQVRRQDWLELLAELNQRIDPLDEALVKQAQQRPEIQLLMTHRGVGPVVATALVVTLGDPRRFASSKQVAADLGLVPQENSSGQGRQRLGHITKQGNNLLRGLLVEAAHVAVRWEPEWSRKYARLAIKKNRSIAAVAMARCLAVRLWWMWKLGLSYEQRKAQKQESHSHAELLG

SEQ ID NO: 358545 - protein, 359 aa, unidentified
MEQILSKKQNWLKQVHLAEDDDLYVGIDSHKKSLHVALWLNDSPAIDFVMPPDSAKLIDILNKLRPALRMVVYEAGPTGYSLARTLQQADIPVSIVAPSKTPRQSAPDSKTDPLDARKLTEYAAKGPLRHIAIPTKYQETQRQLTRLRQQFVEKQTRVKLQIKSFLLQHGIDQPQGLSHWSGSAIEKLKIIRLSELLRYCLDMLIEELYFIAEQLKLTEQKIKEVFSEKPICTTVKLLVTHPGVGQTIATQFAAEIFNPKRFKDKTQLAKYVGLAPSIRQSGQTLRDGPILKTGRPQLRCSLIQGAWIWIQNDRNAYKTFCRLIHNTGHKNKAITAMARKLAVHLWMMARDNKPYDSAA

SEQ ID NO: 358546 - protein, 331 aa, unidentified
MNFKEFIGIDISKLTFDVRIHSNQIASVFENNKSGYLKMVKWVSKNSPFKKEEMLFGLEHTGIYSLPISIFLSEGKYFFSLISGLEIKRSLGIQRGKNDKIDAKRIAEYVSQKRDKIKPSVLPFKIILELRRLLSLRERLVRQRVGFIKDKKENKRFLKQSENKMLFDVIDKMILQFDKQIKNIEDEFDCIIKRDELINKQYYLITSIKGVGKQTALTIIAYTNCFTLFDNWRKFASYSVTAPFSYRSGTSIKGKAKVSHLANKKIKTLLNMCARSAIVYNQEIKLYYQKRKNNGDNGMSAINIIRNKLISRIFAVVKRGTPYVNICNYAA

SEQ ID NO: 358547 - protein, 297 aa, unidentified
MQTQTKRETADFCNQNIYVGFDVHLESWKVTIMTEQLIHKTFSQPPKPELLHQYLTTNFSGGIYHSAYEAGFCGYWIHNKLKSLGIKSIVVNPADIPTTDKEKVQKEDARDSLKIAKSLRNGSLTPIHVPSLKTLDDRSLLRTRATIVKDLVRNKNRTKSFLHFHGIDIPEQFSKQTVWSKAFINWQQHIEMTEQSGKDALNTIVGTSIDMRASVLRVTRQINQLSKTNEYKENVTLLLNIPGIALLTAMTVITELETINRFKRFDQLCGFIGLISSTSSGGERSHRRYYTPRTQRT

SEQ ID NO: 358548 - protein, 411 aa, unidentified
MNNTLFVGIDISKRSNVATFMNCEGKVVGRLTFSNNGPGADRLVAKILSYYEKEDFEAIRIGLENPSVYSKNLVWFLYEHEALNEHKLSIIPLNALMVANYKKSFLDMDKDDITDSFAIADFIRIRPGLLPFKLDDRQEALKIMTRSRYNYVQALSRMKSQFLTRLFLSFSEMEAGKPFYSIFSKTSLSLLEEAFTLDELAEKPIPELVEFLQEKGGGKFQNPEEIAKVLKKAASSSYRVPAMVRESLNRTMASDMEIMRILENEIHNCDKNIEKLMKSVPAILVSIPGIGPVLAAGIMSEIGDIIRFQKQESLGKMAGFKWKRNQSGKKESENKAAVLSGNKKLRYYLVEAANRVRIHDPVFEAYYRKKYAESKTHAHKRALILTARKLVRVIFYLLKENKLYKPDVGIS

SEQ ID NO: 358549 - protein, 365 aa, unidentified
MTVIHYIGFDVHKKTISFCVKTAAGQIVEEGRLEAERTVLRRWAAARKRAWRGAMEATLFSAWIYDTLKPYAQQLSMGHPAKMKAITAGKNKSDQIDARTIADLLRCNLLPACYVLPPQLRDLRRLLRYRNLVVQQSVRMQNKVAGLLMESGTPFNKQKLHQKKYFSDLMKSLEEVPESVKDLLRMSRGSMEMFQSTQKQLVKRLLSEPALEQRVERLMRIRAVGPITALTWALEIADPHRFASIADAVSYCGLSAAFRSSAGKQQRGPISKQRNAWLQPVLIEAAKLAPLWNPQLAAVHARALERGHANRATLQVARKLVAYLLAVDKSGQPFQVHTPPPPASTKARKKPPRRSKKTVALAPAA

SEQ ID NO: 358550 - protein, 397 aa, unidentified
MVFIMIYVGIDIAKNKHDCVILSDHATCLRPCFSLKNNSQGFALLINAIKEACGGDFNHGEVKAGLEATGHYAHNIVAFLNSNGIDTTIFNPFLVNQYRKSRSLRKTKTDKADAMLIAELLISTAANPAAPSYHNQEMKTLCRYRFSLVKQRSKLKADMSRYVDLLFPELGSLGLNPTSSSVMAMLKELPGASYISICNISQLTDILSSSSRGRYGKETAEQVKAMAKESIATANKALSYIMSDTIEQICLLNKRIAKIDGELKNEVEKSGTKLTSIPGIGFCIASVILAEIGDINLFSSADKLQAFAGLDPSTFQSGNFTASHTHMVKRGSAYLRWAIMQGARLCSLNNLKYKQYLDKKIKEGKHYNSALGHLSKKLIRLIFHLLKENEEYDPKVA

SEQ ID NO: 358551 - protein, 464 aa, unidentified
MPRGRKTSKNSTGKTTQSLPVLQPDAAGVDIHPRSIYVGVPQDRASVTVRSFGSYTPDLMEIADWLAECKIRTVAMESTGVYWIPLYEVLEDRGFEVLLVNAHHIKNVPGRKSDVADSQWIQFLHAVGLLRASYRPPKEICALRAIVRRRAVLVRDAARCVQHMQKSLDQMNLHLHHVISNITGLTGLDIIESILEGEHDPAQLSKLRDPRVKASEQEIGKALTGNYKQEHLFTLRQALATYRHFQAQIDECQQEIDRQVKELKSREGVSDQQPDGTDAEPTKMRRRGKIVTSVISKELERVLGVDLTRIPGIQTDTAEAILSEAGPNVPADFSSSGAFANWLQACPRTNKSGGKDLYVKAKKGRPRLHTVLRTAANTLHRSQSALGARFRRLKARLGVPKALTAMVHLYARIIFHLLKTQQQYDESVFAELEQQYQDRRLNNLKRTAQSLGYALNPIEPLAIG

SEQ ID NO: 358552 - protein, 411 aa, unidentified
MSGVDNIVENGFDVFCGLDVGKSVHHACAVNRVGQRLHDKPLPNDETALTEVFTHLTGHGRVLVVVDQPASIGALAVAVARSLGIEVAYLPGLAMRRIADLHPGQAKTDARDAHVIADAARTMPHALRRVGTDDETLAELTVLAGYDDDLAAQSTRLTNRLRDALLHVHPALERLLGPRMDRGGVLDLLAAAPTPQALRDLGEDGIAAAMRARSPRLAKTLPATILAALVTQTVVVPGTTAFGRVIAGVAAQLREVRIERDTLAAELEDLLEAHPLARVLTSMPGLGFRTALKILTIVGDGAAFPTAGHLAAYAGLAPVTRRSGSSIKGETRSQRGNHALKSALFLSAFASLADPTSRAYYDRKRANGKRHNAALICLARRRTDVIYAMLRDRRPYAPPSVPTLPPAAAAA

SEQ ID NO: 358553 - protein, 379 aa, unidentified
MDRSENIVAWVGIDWADEGHQVCEYEVRNGSKQKYALQHSAESLQEWVTQLRTRYRGNRVAVVLEQARGGLIYALMSADFIEIYPVNPQSLAKFRQALYPSGAKSDPCDADLLEEMVRQNPGRFRAWKPGDEQTRSLQLLTEGRRKFVDDMTALTNQLTSSLKTYYPQALDWAGELHSEQAGAFLERWPTLADLQKSRPFRIRKFYQKYGRPKREVLDARIQQMQNARPLTSDAAVVMAGVMMVNALVDQIRPLRAAIDKYDREIERIFQQHPDRAVFESFPGAGRVLAPRLAAAFGADRDRFTAALEVEQFSGIAPVTERSGKQIWVHRRWACAKFVLQTFHEFADQARKFLRMVQTLLSAAARRRQRPSCRCPGTRL

SEQ ID NO: 358554 - protein, 388 aa, unidentified
MTTQIDDLSRSLVALEQDTTLIAAVELSQSSWLVSAIVPGLERQPQKKLEPDPSALLKRLERWRDEGVKAGRTIRRIVLAFEAGRDGFWLARWLRKRGIETHVIHSTSVAVSREHRRAKTDRLDLAMLMRVFLGWLRGERKHCSMVAIPTLEQEDAKRPSRERESLTSEKTRVVNRMKSALARLGIRGFKPELRKAPQKLAALSTPEGVGLPPNTRAEIERDMARLVVVRGQIEAIERTRLERLQQAPADDPNAIVLLLARVIGVGVETADMLVQEVISRKLRDRRAVARYAGLTGAPDESGSKRREKGLAKAGNARVRRGLMQLAWRFLRFQRDSALAQWYRARTDGATGARKTTMIVALARKLLIALWRMVTTGEIPAGVALRPAA

SEQ ID NO: 358555 - protein, 367 aa, unidentified
MNDTTIFVGLDVHKDSITAACVDAVYDAPVIDLGTVGTQQYAIDRLLKKLAGRGRLKLVYEAGPCGFWLHRYLTGKGLACVVAAPSLIPKKPGERIKTDRRDARNLALSLRAGTLSTVHVPTPDQEQFRDVVRAWQQTKRDVSGARQRLKSFLLRHDIRYTGTANWSAAHRRWLSEMVLPSAPQQIVFQELVDAINERERRRDRLEQQLDELAPHWSGFALAQALLAFRGIQKTVAYTIVAEVHDLSRFAHPRHFMAWLGLVPGEHSSGATRRQGPITRCGNRYARTMLTEAAWAYRYAPKVSRIIEVRAQEIDPQVRNIAWRAQIRLHHQYKKLTARGKHKNVAVTAVARELAAFIWDAARLVPLR

SEQ ID NO: 358556 - protein, 409 aa, unidentified
MQETTQHDAVDVFVGVDVDVDVGVDVGKGQHHAVALDRNGKRLYNKALPNDEVKLRALIAELKTHRRLLFVVDQPSTIGALPVAVARAEGVLVAYLPGLAMRRIADLHAGEAKTDARDAAIIAEAARSMPHTLRSLRLADEQLAELTMLCGFDDDLAAQVTQTSNRIRGLLTQIHPALERVLGPRLDHPAVLDLLERYPSPSALAAANEKTLANRLTKLAPRLGKNWAAEIVQALNEQAVIVPGTQAATIVMPRLAQQLAALRKQRDEIAAEVERLVLAHPFWPVLTSMPGVGVRTAARRLTEAAPKAFATAAHLAAYAGLAPVTRRSGSSIRGEHPSRRGNKVLKRALFLSAFAALRDPVSRAYYSCKIQQGKRHNQALIALARRRCDVLFAMLRDGTIYPPKSAPNA

SEQ ID NO: 358557 - protein, 378 aa, unidentified
MKNRTNQRLEEITAGTLIVGVDVAKSLQWARFVDYRGVEQGKALSFPNNRKGFESIVAKIWEIRNMKILRYPIETVMIGMEPTGHYWKPLANYLMNLGYRVVGINPYHTKKAKELDDNSPTKSDKKDAITIARLVKDGRFFNPYLPQEEYGELRGLTNARVSVMKRSSAVKNTITAILDEYFPEIRTVFKYPLKGKASRQILRSCPFPALILAMGEAGILFQIKKAVKKTVGMKKVRDLMDAAKDSIGVQNGLNAAKMRLGWLLDELELMEKQLAEVEQAMETALRNTGYAEQMLGIKGVGVVTAASFLGEVGDPLRFQNARQIARYAGYKPKAGRNHGEYADCRRGCSKIIAMGKVCRLSGDGNRESVIVPQQPQGL

SEQ ID NO: 358558 - protein, 344 aa, unidentified
MDHFAGLDVSVKDTSVCIVDDTGKIVREVKLASEPEALLAVLKNPAYHFKRIGLEAGPLSQWLYSALAEAGLPVICVETRHMRAVLKAQINKTDRNDARGMAQMIRVGLYRPVHVKTLRSQKLRMLLTHRKLLQSKAIAIENDLRGTLRNFGLKVGMVGTVKFEARIKELVETLPDLAVLVEPLLVVRRALREQFVILHRRLLAIVRDDEVCRRLITTPGVGPVVALTYRATVDVPARFCKSKSVGAVFGLTCAKYQSGEVDWDGRISRCGDEMMRTMLYEAAQAMMRSKKWSWLKAWAMQIARRRGMKKAIVALARRLAVIMHRIWVDGTEFRWTREQAAAAA

SEQ ID NO: 358559 - protein, 389 aa, unidentified
MKIFVGIDIAKLNHFAAAISSDGEIILEPFKFTNDADGFQLLVSKLDSFDKNSIIIGLESTAHYGDNLVRYLVAEFYQVCVLNPIKTCQMRKNNIRKTKTDKVDTYVIAKTLMMQDDLRFVSFYDLDMMDLKALGRFRQKTIKQRTRLKIQLTTYVDQVFPEIQYFFKSGLHQNAVYALLKEAPSPKEIASMHMTHLANLLKVNSHGHFTKEQAKELRVLAQKSVGANDSAISIQITQTIQQIELLDSQLEKIEAEMTDIIKFNDSVIMTIPGIGYINGGMILGEIGDIHRFPNPNKLLAFAGLDPSVYQSGNFQAKTTRMSKRGSRVLRYALVNAAWNVVRNNATFKAYYDAKRAEGRSHYNALGHCAGKLVRVIWKMLTDKVEFNLE

SEQ ID NO: 358560 - protein, 344 aa, unidentified
MKVTQCGLDIAKQVFQVHGIDERGKPQVRKRLARAKVLEFFAQLPSCLIGIEACSSSHYWGRELTKLGHTVRLMAAQFVVPYRKRGKNDANDAEAICEAVGRPNMHFVAIKSEEQQAVLMVHRARTLVVANRTAQVNQIRGLLGEFGLVVPKGVARLRRDLPGILEDAENGLPALAREVLAGLLEQFHAFDARVTVYDRQIRAIAEASEPARRLMQVEAIGPQTATALIASMGDPRVFSSGRSYAASLGITPRQQSSGGKDRLGRITRHGDGYLRTLLVHGARAYLRVVDKRTDAKSEWAQRLKERRHVNVAAVAIAAKHARIAWAILAHGAEYRRAVAEVVAA

SEQ ID NO: 358561 - protein, 413 aa, unidentified
MLDRWVGRAIGLDVHRDFCVIAICDSGVVRSGGRVPSTPEGLELLIESLLPSDRVALEVTASCWEVSRLLGPHVDRVIVVSPDDTGIANARAKTDKLDAKTLAVLCWKGELDAVWMPDERRQILRRRLQRREQLVHARSRFKNEISAVLQRRLIQRPGFADLFGVSGRQWLADVELPLEERESVDAGLRQIAFVDTEISAVEKLIAQQALGWEEIRRLMTVPGVNMICATTFIAAIGHADRFITQGKIVAYLGLDPKVRQSGETPARSGRITKRGSASARWALVEAAWSVVKQPGPLRAFYERLRGRLGHGKAIVATARKLAILFWCMLRRRQDYAHQRPALTKKKLRELELTAGAKPRTKDAAGIWSTNRAIRDAERALTEQAEVSYKRMVSDQQAGRPSRKVGASATVERA

SEQ ID NO: 358562 - protein, 374 aa, unidentified
MKNVSIFVGLDVHKESIDIALVESDRSSAVRYYGTIGGDLADLEKAVKKIKKAHPEASLHFVYEAGPCGYGIYRYLTKAGHECMVVAPSMIPKRSGNRIKTDRRDSIMLASLHRAGELAPVYVPREEDEAMRDLVRARQDAVKAGRVSKQQLKGFLLRHGIKFIGKGDWKQTHMVWLAGLAMPIPAQQIVLQEYINTVKDCTARIARLTSQIQEVLPSWELAPVVKALQAMRGVSLQVAVTTVAELGDLKRFDSPRKLMSYLGLVPSEHSSGGSRRTGSITKAGNSHVRKALVEAAQTYRLKARIGKELLARQEGLSKQICDIAWKAQVRLCSRFRKMEARGKKHQTIICAIARELCAFMWAIAKEVKPITACN

SEQ ID NO: 358563 - protein, 344 aa, unidentified
MQITTIGLDLAKSVFQIHGVDATGQVAVRKSLRRSQMLPFFAKLPPCLVGIEACGTSHHWARELLKLGHEVRLMPPAYVKPYVKRGKTDAADAEAVCEAVTRPTMRFVPVKSPEQQAALSMHRTRDLLVKQRTQLINMIRGLLAEFGIDIPKGLERALLMARQIVDGKPPEVPFEAAKIVSTLSQQVLDTHVRLREIDRDLAIWLRSNDVARRLMTIPGIGPIGASALAASVTDPHQFRSGRQFAAWLGLTPLQKSSGGKERLGRISKMGDKYLRKLLIVGMTSLVRRAKYSPGKVDRRLADLLARKPTRVATVAMANKTARVIWAIMSRGETYRAGHRPTLAA

SEQ ID NO: 358564 - protein, 409 aa, unidentified
MEVQRNKVCGVDVHKRFLVATILSRDGTKQTQRFRMNPDELSKFRTWVVENSCEQVAVESTGIYWIPVLNAVEGYVDLILANAYKIKNTSRPKTDLTDSEWMAELCLNGMIKPSRIFPRDDRDLRSLTRARERYVNDTTREKNRIHKLLDSCNIRLSSVLSNMFGKVGRYVLEGLLDGKDIDDIIEGIPVKRLMKKADQIRKAVKNGLDITKIQLIRGSLELIAALEKRVDELEAEIRRRVVHKKENIRILMSVPGIGFISAVTILAEIGDFRDFEKLAAWCGLVPSVYQSADKLITGKITKHGSKHLRWILVEAAQTIARCGSPKLKRFFLRIMERKGFKVAIVALARKILCILHHLLMNQETYEDEVTKKEARIKLAAPETSMSIEEMIEYMIKAGYEVKKKSGVGG

SEQ ID NO: 358565 - protein, 366 aa, unidentified
MKKISTVVIEGMPIFKDKQLTIGLDLGDRTSRYCILKEAGEIIWEQELPTTAKGIEPVFGKIPRSRIALETGTHSPWISRQLSQYGHEVIVAHVRNVRLISESSRKDDRLDARTLGRLARIDPALLCPVRHRSAKAQIHLTLIRAGAALVSTRTALVNAARGLAKSYGQRLRKCGTEQMNWEIAQGLSQELREALDSLLAEIESRNERIAEYDGRIEQIAREGYPEVARLKQVKGVGPLMALTYVLTLDDPHRFRRSRDVGCFVGLRPGRRNSGRSEPQLPIRKEGDRYLRTLLVQGAHYVLGPFGQDSDLRRWGLKLAERGGKNAKKRAVVAVARKLAVLLHKLWVSQEVYEPLRNKRKGMAQVA

SEQ ID NO: 358566 - protein, 350 aa, unidentified
MQIEDKAVLTTWVGIDVAKETFDAAIYLPVEFGQTPRSIMDLPKESFPRSLAGVKAFNTWSYIIRDKAGLDGGNMRIVMEATGRYSLELHRWLSKELPFTCPAIEDPKTINNFIKSLKVRNKTDQIDAAAIARYGTERMPEPFHELPEDYQYLRELSRQRLATTVQLVAAKTRLLELTKFKELIKIQKGVVKSLEAAIEKLEKEMKNCIKNSPDLRESMEYAMSVPGIGFISAVTILAECGPLYMHKSRQLGAYSGLSPQIRNSGTSVRGSRISRQGPKDLRRVLYMASISATASNPRMMALHKRLVEKGKKPLQARCAVMRKLLILVRAVVVNRTRYSEKYLENSILNA

SEQ ID NO: 358567 - protein, 360 aa, unidentified
MERTTENEGHLVVGGVDTHKDLHVAAVVDEQDGVLASRCFPTTRHGYKQMLAWMRSFGVLQRVGVEATGTYGAGLLRYLQRAGVEVLEVTAPDTQDRRRRGKNDDLDAQNAAHAAFAGRRTVTPKSRDGMIESLRVLKACRKTAVAGRRVALQMIHNTIVAAPDELRETLRQMTRMQLIRTLAAWRPDLTDYRNVVSAYRIALRSLARRYLELHDEIADLDTMIIAIVDELAPALLARNSVGHGSAAQLLLTAGDNPQRLRSEAGFAALCGVSPVPASSGKTTRHRLNRGGDRAANSALHIIAIGRLRTEPRTKAYVAKRIAQGHSKLEAIRCLKRYIARELFTLMRQRAREINQAAVAP

SEQ ID NO: 358568 - protein, 343 aa, unidentified
MSNVTRFVGLDYHLDSVQVCVMDASGQVLRNRKVANDTAEIRQAVCGTFRLDEQGRVLAAVESCAGAAHLAEELMQDTTWTVTLAHPGIVSRMKQNPDKSDHADSFILADLMRLGYLPKVWLAPEEIRQLRSLVRYRAQLVKQRTRVKLRVRAMLRERRLKAPEGLRGWTVGWLSWLKQLEMDEISAFLRDEHLEEMGRLSQKITAVEKKLKALTADDAMVKKLQQLEGIGVITAITMRAEIVRFDRFDSGKQLSRYCGVTPRNASSGQKQSDAGLIKAGNPGLRVVLIQAAQRLINYSARWHAFADRLKGQGKPHNVAVAAVANRWLRCLYHQMQPDQLVAA

SEQ ID NO: 358569 - protein, 452 aa, unidentified
MKVMHERVAGIDVHKDMVKVAIRSPGEKRWARKTEVLTFGTFYGVLREMARELRRRGVTHVAMEASGVYTEPVYYALMEEDFDEVLVVNPAHVKAIKGQKTDAKDCARIAELLECGLLQGSYLPPPELKEMRDLTRYRIKKVQARTSEIQRLGKTLESAGIKLGSVASDITGTGPLEMIESLVNGERDGAVMAGLARGRARTPQKMASLSMALEGRFTRHHAAMCRLIIDQVNALKAAVAGVEMQVAAKAAAWEREIALLKTIPGFGDATAWTWIAEIGPAPHQWFATHEKLACWAGLAPGNHVSAGKRRYGRVSDAGTYIKPALVQAAWSAVRVKGRLQARYNKLVRRMGGPKNPAARKKAIVAIAHTMLKIAYSVLKSGRPYQDPGADFYARRESPAQRQAYHQQQIQKLYPGCTVTVTITPPPGGSTDAPPGAGQPGAPPSPGHVPEAV

SEQ ID NO: 358570 - protein, 336 aa, unidentified
MNGSIERWVGIDVAKSKLDVAMLDEHGKLKSHVFVNDAKGHAALMAWLSQRGSSQQQIRVCMEATGCYGEALAISLVDAGWCVSVVNPARIKGFAQSELVRNKTDRADAALLARFGQALRPAPWVAPSLEVRQLRALVDRLHSLKEMHQQEANRLEAAMNQTGMRESIESHMQWLQASISQLERQIDDHIDGHPQLREDAKLITSIPGVGNTTAAKVMAYLGDVRRFKNAKALAAFIGVTPRLKLSGSSIRGRSMISRSGHAAIRHALYMPALVALKHNPIVKIFGERLKNGGMAPKAVVAACMHKLVHLIYGILKSRTAFNANFVVVQLDSKDGI

SEQ ID NO: 358571 - protein, 379 aa, unidentified
MNRILKIGLDVHTKNITMCALESKFGEEDVILAVVTVSPDYKNVLDFIQKVKYKMDPQGRDIIHVECGYEAGCLGYSLYHQLTACHVKCRILAPTTMLSEKGPRIKTDRRDAKLIAACLSNGGFHSVHIPSKEDNAVKEYIRMRDDHVLELKRTKQQINSLCIRFGQVYDGNKWMGPHLKWLRELKLPELIQETLNEYLATYDTMIDKIARFDKRIQEIAAQSEYYEKVKKLECFLGIKTHTALSLIVETGDFIRFRKGNIYAAYLGLAPGEHSSSENGGKLGITKAGNSHLRSLLIEAAHGICRGVIGYKSKELKSRQSGNSPEVIAYADKANTRLRSKYYRLTRHGKKKNVTLAAVARELACFVWGMMTDNIYGSAT

SEQ ID NO: 358572 - protein, 389 aa, unidentified
MKTQATLAGETNACGQVLYMVLELSALRWKVLLVAASGRRRERSVVARDLAGLMREMAEAKRKLGLAPEARVVSCYEAGRDGFWLHRALQAAGVENLVVDSSSIEVPRRARHKKTDRIDLGKLMALLVRFMAGERRVWSVLRVPDEEVEDVRQLSRSIERLKRERGAHRVRIKSLLAKEGLVLERIGGSDWAERVGKLRRWDGSGVPANLKRDLLAEGERLALVERQLALLKAEREALVACSPSKIAGATRALRQLGAIAEESSFVFSTESLGWRTFANRRELAGSVGITGTPYQSGEADYEQGVSKAGNKRMRAMLVEIAWGWLKHQPQSALSLWWQRRFANGNKRTRRIGIVALARKLLVALWRYLEDGLVPEGARLKQLKPRRAVA

SEQ ID NO: 358573 - protein, 389 aa, unidentified
MKIYVGIDIAKLNHFAAAISSNGEIILEPFKFTNDADGFQLLVSKLESFDKNSIIIGLESTAHYGDNLVRYLVAEFYQVCVLNPIKTCQMRKNNIRKTKTDKVDTFVIAKTLMMQDDLRFVSFYDLDMMDLKALGRFRQKTIKQRTRLKIQLTTYVDQVFPEIQYFFKSGLHQHAVYALLKEAPSPKEIASMHMTHLANLLKVNSHGHFTKEQAKELRVLAQKSVGANDSAISIQITQTIQQIELLDSQLEKIEVEMTDIMKFNDSVIMTIPGIGYINGGMILGEIGDIHRFSNPNKLLAFAGLDPSVYQSGNFQAKTTRMSKRGSRVLRYALVNAAWNVVRNNATFKAYYDAKRAEGRSHYNALGHCAGKLVRVIWKMLTDEVEFNLE

SEQ ID NO: 358574 - protein, 412 aa, unidentified
MEVLHAHCAGLDVHKDTVVACVRHMVDGAVKREVRTFKTTTKDLMALSGWLSAEGCTHVAMEATGIYWKPVWHILADGEFNLVLANAAHVKNVPGRKTDVNDATWLADLMAHGLIRGSFVPDQPTQEMRNFLRTRKQFVRERSSHVQRIQKTLEDANIKLDSVITDIMGLSGRRMIEALIAGETDPFALAALAHRRIKASHAELEAALRGRVTDHHRFMLRLLLQHIDAIDAAIGQIDQEVDAHLEPFRTAIKILSSIPGISDLSAEVIVAEIGIDMNRFPTEGHLISWAGLCPRNDESAGKRRSTRMRKGAPWLKTTLIQCAWAAARTKGSYLQAQFQRLRARRGAKKAIGAVAASVLTAAYHMLKNGTLYEDLGAHHFDSRAKGKQVLRLVGRIQNLGFAVQITPIGAAA

SEQ ID NO: 358575 - protein, 412 aa, unidentified
MDANMEVVYGRVCGIDVHKKEIVACLITGQRTAVTRKYGTLTKDLRELVVWLKDENCQIVAMESTGSYWKPLYNIFELEDMEAIIVNPQHMKAIPGRKTDVNDAQWIAKLLRHGLLKASFIPDKDQREYRELTRYRNSRIEERSREINRLQKMLEGANIKLSNKISDVTTLTATNLIKLVIQEDELTVEGIARVRNKRCNSTSEEFLDAMTGIISPLQRELFSEVLRVIEEQTKQIERIEAMVQAFTSNAYDEAATALDKIPGIGRTSAEQIIAEIGVDMARFPTAHHLCSWAGLSPGDNESAGKRKSGKTRKGNKMLKKTLVQCATSAVKNKDSFFHAQYQRLVVRMGGKKASVAVAHSMLIAIYYVMSGEEFKDLGADYYTQFNKEKKIQSHLKQLKKLGWEPPCPAAVS

SEQ ID NO: 358576 - protein, 337 aa, unidentified
MQVTTVGLDIAKNAFQLHGVDARGRVVLRKRLARQKVLAFFANLPRCLIGLEAGGGAHYWARELQALGHDARLMPPQYVKPYVKTNKHDAADAAACCEAVQRPSMRFVLVKSAAQQATRMLHRARDQLVGQRTATINALRGHFAELGIVAAQRQAGLRQLLAILGELEEARIPPLAREILQTLAAHLRDLEDKIAGLDRRLVALTRHDPTCRALCAVPGVGPVIATAVAATVPDATSFRSGRHLAAWLGLVPGQHTTGGKERPLGLSKRGDAYLRRQLIHGARALVKVSPGRSGQLWSWINALRARRPFNVVVAAVAHKLARILWAMLSRGEPYRAP

SEQ ID NO: 358577 - protein, 369 aa, unidentified
MNTTTFVGLDVHARSIKAVALDAMTGEVRSATFAYDAAAVAEWVGSLDPAAKCVYESDVTGFDLQKKLTALGVDCVVGAVSKMIKPSADRKRKNDRNDAEFLARMLSVGNVVEVCVPDDECEAARDLVRALDDAREDLKRCKQRLSKFLMRHGYVFNEATPTGRRKGNWTAAHWAWIRSIGFPERADNDVLAYYVDAVRQAMEDKKRLERLVEAEASKPRWKKRVDSLRCLKGVDAMTAADIVFEAGEFSRFKNARSFAAWLGLTPSEHSSGESARQGGITKAGNKHLRRVLVEAAWHYISASPHPKDLAKGQVPDPAARRHAAKGIRRLVKRREEMLGRGVHKNKANVATARELACWCWAVGRMIENG

SEQ ID NO: 358578 - protein, 385 aa, unidentified
MGSQAFIARDYDVFAGLDVDKKSISVTFTDHQGLLKSMRMPYSVDHLVNHVRKHYGDKKVAFAYEAGPTGYGLYDGLVVQQYPCLIASPSMIPKAPGQRVKTNRLDSLGLAENLRGGQLKSIHVPTTLYRELRHLTQLRDALVSEVVAMKQRIKSLLLMEGLEFPPAPPGSQWSFLVKAKLRKLPGSSVVRFKLDQLLDNLEFGEKQVLKVTREIRRFCQNDPELSQCIDYLKSLPGIGWIVASQMLARIGDWRQIKNIRELPAFLGLVPTESSTGERTTRGSITHSGDPRLRSKLIQASWSAIRQDGELLKFFRTVAKKHPRHLGPRVAIVAVAHKLCMRAAVVLMKQRPYEIREKVQSAPLTQEETVPQGTTRRRRVPGEKIS

SEQ ID NO: 358579 - protein, 470 aa, unidentified
MKKSTRTTPLVSKGISKTKPIPKHLEQINQWAAGIDIGATSHFVAVPEGCTTTSVREFKSFTPDLYSLAEWLKECGIQTIAMESTGVYWIPVYELLEEKGFEVKLVDARQVKNVSGRKTDVLDCQWIQQLHTYGLLNGAFRPDNEICALRTYVRQRSMLIRSASRYIQQMQKALTQMNLQLHHVITDITGDTGMRIIRAIINGEREAAILATNRDPRCKSSKEDIEAALTGNYREEHLFSLKQSLELYDYFQEKIKACDDEIEKCLSGFSTNTLGKDFSVEKPKSNKKKVSKNAPAFNLGGELYRLTGVDLLAVPGINNISALQLLSEVGFDMTRWKNSKQFSSWLGLCPGNKVSGGKRLSGKTKPSNNKAAATLRMAASTLYRSQTSLGAYLRRLKSRIGPMKAITATAHKLAIIIYNMLRHGVDYIESGQDYYDEKYRKRMIKNLKRKAAEFGMSLIENQINFTPNIN

SEQ ID NO: 358580 - protein, 375 aa, unidentified
MFTPTVLGPKEAEIRIIGCDLHARQQTLAMLDTATGEVVNKTLAHEGHSVREFYSTLPGPVRVGIEATGSMQWFLQLMEELGIDCQVGHPATIRAAEPRRQKHDQRDAELLLKLLVENRFPSIWQPSQELLDLRGLLLHRHQWVRLRTRIQNALQAIALANGLRRGSSLWSASGQRAIASLPLTTHTAQRRSELQAMYARFEVEIEQLNQRVLEQAGQRPTAGLLMTHPGVGPITALATDVFLGDAKRFRDGKALASYIGIIPREHSSGGRQRLGGLSKQGNPLLRFLWCEAAVHAVRRDPELRRFYRRKLVQKGLGKARVAAARKLGIRLWIMLRDQIDYQEFCRRGQRQQRSGGACAGMPGRRYGAKSHRLID

SEQ ID NO: 358581 - protein, 416 aa, unidentified
MNAAGIDVSSRKSTVAVLRPFGEVVRLPFDVAHNTEGLASLAEQLKALDGETRVVLEHTGRYYEPVAKALHEAGLYVSAVNPLLIKEYGANSLRRVKTDKADAVKIARYALDNWADLRDYTPMDTIRYDLKTLNRQFQLASKQRTASANNLIALLEQSFPGIRKCFDSPVRSDGTQKWVDFVHTFWHVECVRKQSLNAFSERYRKWCKRHGYIFKQGNAVEVYSLAKNAVVLVPKSEVTKVLVQEAANQLTSISRSVETYRAEMERLASTLPEYPVVMAMYGVGKSFGPQLMAEIGDVRRFERKQSLVAFAGIDPMPNQSGDKNVRSNKSSKRGSPYLRKTLFNIMGIYLKCSPQDEPVYQFLDHKRSEGKPFYVYMTAASNKFLRRYYAQVRDYLSTLDDLPPVDMDSTGLKPSD

SEQ ID NO: 358582 - protein, 516 aa, unidentified
MPEQFDSHNARAAFDHDSTLVVALELSGKSWQVGAVVPGVARRPRRRLEPRDMAGLLKAIERWVAEASAAGRAVRRVALIYEAGRDGFWIARYLLAQGVEVQVVHPASIPVERPGRRAKTDRIDLDMLLRTFLAWLRGEPRVCSMVRIPNEAEEEMRRPGRERERLVSERLQLENRIENLLCLHGIAGFRPRLKKAAERLEALRSFAGTPLPAKTMAELRRLMARHALLSEQLQEIEAERDRVATVAQPDPAEQMIQHLALLVGLGLETATLLVREMFCRSFRDRRAVAGFAGLTGTPFRSGGIEREQGIGKNGNARVRRIVMQLAWRWLRFQPQSALARWFAARTGGAKGRIRTVMIVALARKLLVTEAHRPRATGAKEPAPRSETNLGGRDAVPGYGWKTPPSRLVPPSQAPKRPRGWGTVVRSQQVPPDTSLQARGSEHRGAAQDGNRTRPPLHRRSAKTRQTPPVTLTRTDRYPMQMHPLDNQIPIRARPRRNWGGDSFPSGSATVTPDSPA

SEQ ID NO: 358583 - protein, 323 aa, unidentified
MTVYIGIDIARKKFDAAELCDGAYRCKTFENTPAGFTALYDWLKAGSIPDIHVCLEATGNYGTALATFLYEKNLKVSVVNPARIKGSAASELTRTKTDKADSRLIARFCKAAQPDPWRPVPAPVRKLQALVRRIGALNGMLRMECNRRENADIDAQESVERMINHLKMELESVRRAIKEHISNVPELKKQNDLLLSIPGIGTVSASLILSFMASKEFTKAKEVTAFLGLNPRHHQSGTSVRGKTRMSKMGDAKLRCALYMPALVALKHNPDIRAFGLRLLTAGKPRMLVVGAVMRKLIHIIFGVLKSGTGFSSRVAVNAGMNQ

SEQ ID NO: 358584 - protein, 341 aa, unidentified
MAGVGQQGQRVVIGMDPHKRSVTIEVMTGDETILGGGRYATDEGGFAAMRGDVAGFGDRVWAIEGCRGIGRHVAQRLLAVGEEIVDVPPKLSAEVRVYATGQGRKTDATDAHSIALAGTRVAGLRPVVADADLDVLRLLADRRRQLGEEHTRKVCQLHALLLELIPGGAKKALSAAQAKQLLAKVRPRDVAGKTRRRLAAELIGDLEQIYARKKDADKELRELVAATGTGLLDLHGIGPSGAARLLVEVGDITRFPDRNHFASWTGTAPIDASSGDHVRHRLSRGGNRQINRALHIMATVQLRNATDGRAYYDRKKAGSKSSMERCGASNDDCPTPAVPRR

SEQ ID NO: 358585 - protein, 343 aa, unidentified
MQTIKTIGLDIAKSVFQVHGIDAAGSVTVRRQLKRRYVLAFFEKLAPCLIGIEACASAHHWSRQLQALGHTVRLMPPAYVKPYVKRHKNDATDAEAICEAVTRANMRFVPTKTAEQQSGLVLHRTRHLLIRQQTSVINAIRAHLAEFGIVAPVGRHGMEELLHIVADSNDKRLPEVARACVAALGGQLRMLKAQILHFDRMIIAWHRGNETSKRLDALPGVGPALATALVASVADPRAFRSGRDFSAWIGLVPKQNSSGGKQKLGGISKQGDRYLRGLFTAGALAVIRYAKIHGTGHRPWLTALLVRRPTKVAALALANKIARMAWAMMARGERYREPVALAA

SEQ ID NO: 358586 - protein, 394 aa, unidentified
MKLIGIDIGKNKHFFCVMDQQTGEIISQPVSFSNDKEGFDFLVQKIKSYPKDSILIGMEDTGHYHFALLKYLLDLQYTVALINPKTTDFNRKIQGGITKNDKLDTINICDVLDTPERKKQYRITKVNSFDLYEQKQLTRHHHNLKEEENVYKNRLQKCIDIVFPEFNKLFNSKYGIVYMNILKMFGSAENIANTDIRTIRKCFEIEGRGNRISLTPERLKECARSSIGISSSAEVIQIKHLTAQIELIEEQLTEIDKKIEEFSIQNNSPILSIPGISHFSGTSILAELGDISNYSKPSQIIKFAGVAPLHYESSQFNAQHTAITKKGSKYLRKTLYQIILPVIRHNPVFNKYYQLKISQGKGHRCAQGHCVRKLLRIIYHLLKTNQQFDPQLLR

SEQ ID NO: 358587 - protein, 410 aa, unidentified
MELQMKCACGLDVHQATAVACLLTVQGNGKVKKQIRAFGTTTRELVGLREWLQAEGCTHLAMESTGVYWKPVYAILEGAFDLLVANAQQIKNVPGRKTDVKDAEWIADLLLHGLLRPSFVPPKPIRELRDLTRYRRKLVESRSAERNRLLKVLETANIKLASVASDVFGVSGMQMLAALAEGKAKPAEMAEMAKGRLREKIPQLEPALEGRMEERHRYLLRLQLRRMRELNQALAELEELIRQKLQSYQKELQLLIEIPGVDWTLAAVIIAELGVDMKVFQTASQLASWAGVCPGNNESAGRRKSGRVTRGNVHLKTALVEAAQASTRAKGTYLGDKFYRLKARRGSKRAVVAIAHKILVAAYHMLSQQVSYNDLGDLYLDKLNKQHLTRNLVRRLERIGWRVTLEQAAA

SEQ ID NO: 358588 - protein, 343 aa, unidentified
MKIYALGIDLGKTVFHLVGLDASGQVVIRKRCSRTQLLAFTANVQAQLIGMEACSGAHFLGRALRAQGHDVRLMPAQYVKPYVQTNKSDYIDAEAIAEAVQRPRMRFVPIKTEEQLDLQALHRVRERWVMRRTAVVNQVRSLLLERGLTVPKGRRHLNQALPRILEDAELPLSGSFRVLLAQLKLELEQLAARIEQMDAVIEQEARENEACQRLTTIPGVGPVTATALIAAIGNGSAFGKGRDLSTWMGIVPGEFTTGGKQKLLGISKRGNKYLRRLFVQGARSVLQQRDKQAPGLSLWLAQLLACKHQNVVVVALANKLVRIAWAVLCKNESYRAPVLAVST

SEQ ID NO: 358589 - protein, 344 aa, unidentified
MLYIGLDVHCKWVTVVGFDPASGELLKRDRVANNPDALVELFSGLEGPLHGIMESGINSWAIYRQIRPFFDELVVAEPSKLWDRRRDRRAKTDRNDAIRMAEMLYRGEVEGLYIPDDQTQDLRVLVRSKVRASRWVTRLTNEIGSLLKSWGYVGHRSLLTKGGKHDLDSAQLPARSERVLKLWREMLEKAQQIEDEIQAAIEEEAAKDSDCALLQTIPGVGPFTALLVKSEIGDIRRFKHSSQLISYAGLAPRVFQSGESCSYGSLGRWGNRWLRYALGLLAQRTSHSKQDNALRRTYWRVQFKNHTNAAKMAVARKAVRVIHQMLTFGIAWDNSRATPRKTAA

SEQ ID NO: 358590 - protein, 392 aa, unidentified
MYIVGIDIGKNHHEASIVSPEGKQIGRSLRFATTHKGADSLMSFIFKNIGNSPCVFGMEATGHYWYPIYSFLKAKGYTIYVINPIQSDSLRKMYIRQTKNDSIDSFLIAEVIRFGQFGTTSMADENILAMRQLCRYRDSVISSRTEIKLRIGTIMEQIFPEYEKQFSSLWLSTSMGILEKYLTPENIENAPIDELFEIIKDKSHNKLTIKKAVSIKDAAADTFGIKIAQDAFAFQLKQLIDRLNFLNEQLEALDHEILSYYEKFDCYLHTIPGIGMIAAATILAEIGDIHRFKNSSALVAFAGIDPTVRQSGEFNSIHNHMSKRGSPYLRHAIFLAATTCSFHNSPLNAYYKKKREQGKHHLTATGAVARKLTTVIYAVLRDGKPYEPKSFC

SEQ ID NO: 358591 - protein, 446 aa, unidentified
MFKHSRLWLRRSVNAVFPYNSLNLTVLKRVPMALKIVYKICCGIDVHKTFVVACVASTSDKGITSYESHRFSTYTSGLKTLLQWLIDRNCKDVCMESTSKYWIPVYNILEKGCSIVLAHPKYVKAIRGKKTDKKDAKWIADLFKHDLVAGSFMPPSDIRQLRDLMRYRFKLTCFKSSEKNRLQNCLTVSNIQLGNVVSDTFGKSAQAILDKLLENPADTSFDLEPLVYKSLKKKLPELRDAIDGFITPEQAGKLKIIKDHYDNLESRKAELEELILALAAPYQQELTILQTAPGISSNFTAIGIISEIGTNMEAFPSAKHLCSWAGLTPTNNESAGKKKSVRVSKAGCYIKPLLVQCANAVVKSTKHPEMRNRYLHLKKRRGHKKAIITIARMLLTALYHMLKNGENYNPELYQKTDLPPVDREITIEQALMLIRNQGYKIKSATT

SEQ ID NO: 358592 - protein, 354 aa, unidentified
MYIVGLDIAKRKSQVCVTKEDGTIIEERSLVQRPEELSAFFARYPGSRILLEASTSAEWVARHLESLGHEVVIADPRFRLMYAAGDKKIKTDRRDARALAVALRVNAYRPAHRKSDEARALALKVKLRAGLVRARTRLIQQVRAACEYEGVIIPQCNTRYFVDVARETRMRDDLATVLAPTLWQIESIHEAIEALDAEIEELGKSDATVARLKSVRGIGALTATAFRAELDVVERFRSAKEMTSYLGLVPSQNSSGDVKGRLGRITKTGDGLLRSYLVEAAHVIMSCRSPDSPLKRWALSVAARRGKKKAAVALARKLARILFATWRDGSDFDTAKTNAPVAALDERQAEAPTS

SEQ ID NO: 358593 - protein, 323 aa, unidentified
MSAFVGIDVAKNSFDIATPLDRGKFRTKAKLPNNVKGYEVLQAWLDTHSEPGAWVVMEATSVYHQGVADFVHALGYRVCVVNPAVIHQYGKEELRRVKTDKADAKLIASYAQDKHARLREWVPEPAPRRHLRALVRRLEDLQEIQQMESNRLDVAEDKVKESIESVIRHVKNQIAETKKAIKDNIDDDPDLRQKRDLIVTIDGLGDISAALILAELGDPLEYKGPKSIVAFAGLNPLRSSSGESSGPTHISKIGSKRLRTGLYMPGMVGLKHNAVLRELKTRMQVGGKAPKEIICAAMRKLLHLVYGVLKSGKPFDAKIALAR

SEQ ID NO: 358594 - protein, 391 aa, unidentified
MKQSSYFCGVDVAKDSFVASIKNGRLLMKNRVFTTNRAGFRDFERVIRDFGTKVVVGMEPTGIYHYNLLNFLVSTGYNSVVVNPYMLHQFFKFTSNKPTKTDKKDSRTIAEFLEFKQDELKKSPVDERFSVRYFVREKERLTQDIARTKTEIKRMLSLVFPEAEKLSGVYSQEFLSVLLEFGGAAKIRRIPKTKFIRLANQFSDKGRGRKSKFSSEKIYELASSSIAGEWPDYEELLKIKIKRLNSLLEEKEHIGKLIEQKAEKLFKREIEILCSIPGIGQESAIYLMAELVDIKRFEHYRKLIGFCGLDPIIKQSGKFKAGWRISKRGNAHARRITWIMAGCVKRSCPYFRDYYLKKRSEGKSYKEAVIATSTKLLRTIYALLNENRVFN

SEQ ID NO: 358595 - protein, 477 aa, unidentified
MKTPKNDDLQPQEAKSKRRRRNKGMCLEDRPVLEPNAAGIDVGAREMFVAVAPGRDENPVRVFATFTEDLQRLTSWLVQCGVTTVVMESTGVYWIPLYEILEQRGIRPCLVNARHMKNVPGRRTDWHECQWLQFLHSVGLLRAAFRPEQDICAVRTLLRHRNELVMAASQHVQHMHKALTQMNLQIHHVISDITGLTGLAIVDAILAGQRNGTELAQLRNPRIKVDAETIRKSLEGNWRSEHLFTLGQSRDLYRIYQQQIVNCDLEIEKMLQQFEPRTEPAERPLPPDRKRNRDGRKKRKKNGHPHPEFDLRTETYKLFGVDVTQIPGLDENALSLFSEVGRDMSRWPTAAHFVSWLALCPDNDISGGRVLWRGARRIKNRAGHLFRLAAFSLHHSPTPLGNYLRRMKAKLGPKAATMATAHKIALIFYTMVKNHVEYDETIWATRDSQREKRLEAKIKRQAKQLGYELVPIEPKAA

SEQ ID NO: 358596 - protein, 369 aa, unidentified
MKTNTTPSVVPTSPAAAVSSGFTIGLDLGDRSHHVCAMDASGQIVREGSLLNTRPALAKLMAEFPRATIAMEAGTHSPWLSRYLTELGATVLVANPRKLHAISRSERKCDRRDAQMLARLARVDPALLHPIQHGSAQAQHDLLGLKLRDALVRTRVNLINTIRFTLKSLGHSVRNPSSESFHKTVLADSPADCLPVIQPLLTVLAQVTEQIKGMEHDLVQRSKKDYPATQRLQQIAGVGPLTALCFVLKIGDPQRFSRGRDVGAYLGLCPRRDQSGGTDKQLRISKCGDGLLRRLLVSAAHYVLGPFGPPCALREHGQRLAGTGSAREKKRAVVAVARKLAVLLLSLWKHGTDYEPRVSASPALAMTPA

SEQ ID NO: 358597 - protein, 343 aa, unidentified
MKLQVLGIDLGKTVFHLVGLDSTGRVVIRKRCSRTQLLAFTANLQVQLIGMEACSGAHFLGRALREQGHEVRLMPAQYVKPYVQTNKSDYLDAEAIAEAVQRPRMRFVPIKTEEQLDLQALHRVRERWVMRRTAVVNQIRSLLLERGLTLPKGRSHLDEQLPRILEDAELNLSDSFRVLLAQLKLELEQLAARVEEMDRVIQKTARENEACQRLTEIPGVGPVTATALIAAVGNASAFRKGRNLSAWMGIVPGEYSTGGKQKLLGISKRGNKYLRRLFVQGARSVLQQRHKQAPGLSSWLAQLLGRAHQNVVVVALANKLVRMAWAVLCKNERYRAPVFAVTT

SEQ ID NO: 358598 - protein, 383 aa, unidentified
MKKTQETLRKDDTTKQAVLYIAFELSNKTWKLAFSNGSKVRYVSTDARDLNKLQAQIALAKKRFGLNEDVRVVSCYEAGRDGFWLHRYLLSLGIENLVVDSASIEVNRRKRRTKTDRIDAGKLLVMLMRHYGGEKKMWSVVRVPREEEEDARNLGRELEVLKRERTMHSNRIKGVLIQQGLEIKGLNVKRFLSELEGMRTWDDKELPVDFKTRMEREHQRLKMVDEQIRGLKEERKKRVESGDKACYRQVAQLMKLRGIGQENSWDFVMEFFGWRNFRNRKQVGALAGLTPTPYDSGGSLREQGISKAGSRHIRTRSVESAWCWLRFQPQSKLSRWFNKRFAQGGKRMRRIGIVAVARKLLIELWRYLKDGVVPEGAGLMKGI

SEQ ID NO: 358599 - protein, 415 aa, unidentified
MTEQQWYAGVDWASESHHVFLTDGAGHKIGEKIFKHSGEGLAEMAAWLLTASGAARSSQIYVAIETPHGPVVETLIERGFTIHAINPKQMDRFRDRFTLAGAKDDSRDAEVMASALRTDPHCFRLLAALDPTVIELREWSRIASDLGTERNRLTNRLREQLWRYFPAMLELESDLGAPWLLDLWDLAPTPDKAARIREATVAKLLKRHRIRRFDAAHVLDVLRKPAVQVAGGTVEAASAHIKTLVARIRLVNGQVKEAHRRLDALTARLIPAEEAQAGQQKQHDVEILASLPGVGRIVLATLLAEAWDGLKRRDYAALRSLTGVAPVTKKSGKSCIVIRRQACSNRLANVMYHWARVAIRLDTASKAKYATLRGRGHSHGRALRSVADRLLSVACAMLKNGALFNPSFTAQNTPC

SEQ ID NO: 358600 - protein, 422 aa, unidentified
MTVRSVGIDLSITGAHRAEAIDETGQRCGDLSFRTTPEGLAALADLCFSGDSVPTIVLEPTGLVWLPIVLFLKARCPRSVIVRAKEQKVAALRRVLREHAKSDRIDALALARLPSVDPEHLEPIVLAGPEMQRLDRLSRRRDLLAASVGSRKARVSSFLMGIFPGLRECFEDSFSSRARWVYRHCLNPFLMERLAPGRLEDTFKKLTPNGTSAVIEREVTALLAVSRRLAALYRLSHGAKLVTEASFQAWTQEISMELELMEMEEKQISILEEQIDSTYRLVHPHDYLRTIPGIGDRVAPLLLAAVGDIMRFRDAKALCQWTGVIPRSHQSSHTRLKGMGMTMSIVDAPEVNWNFEVTRETIWRNIREIFNRLNIKVYIFNDRVEIRGHIPTEIIDVPQETTRPRREPIIYSGRGLGGWIRN

SEQ ID NO: 358601 - protein, 385 aa, unidentified
MKPNSQVTLGEFFRQCVGIDISKNKFTACLYMYDRASDVGCCTKSIDFDNTKSGFNQMVKWSRKEAVKDYPLTYLMEPTGVYYERLAYHLYKIGQTIYVVLPNKARKFCESEGIKTKTDAMDARCLALMGCASRKLKPWSPPAAIYRELRQMTRFHADLCVIRRSVANRMEALDHMESVSKTVRKHCEKLIKEIDTLTEKNDKDIIRKVAEDKELLAKVKRIATARGLGVTTIVCVIAETEGFHLIENRKQLTSYAGLDVKARQSGKEDPKHRISKEGNAHIRAALYMPALVAVRHNRQIREAYGRICQKHPKEKMIGVAAAMRRLLMLIYTLWKNGEEYDETRDKTHTPRKKELEPEYGPEHCIETNQESIDWNAVDENGKPPF

SEQ ID NO: 358602 - protein, 408 aa, unidentified
MEIVGIDWGRKKHYCYLLHQGKKLVLKNKEEDFAKLLKIKEAVYVIEDGNNRIVDYLLRNNRQVYILPSRRSSEARSFFVIEGKSDFIDSKVIAMTYEHNPEWCLQVKREGIAFELDVLVEENAVINVSMMQDIGRLDAYLERYWPEVKEVFSGTSARKLAFISICPTAKDFLSMSDKEILQKLKEMGFLINSNLKSKLKELRKIALERYVPASIRTLIVAFSRYAMEKKVMKEEIGKQMKEIIEKSEFSVLLTLPGVGVIIASQLIVAYLTHKFSSYRDLQRYAGTTPTYYGSGNKNTTKMRSNCNHYLRGTLHIASLAATNSSKWMKRFYDNKKSEGKSSAHALRALANTILKIAFAMLRDLTPYSEEKFFKRNPLSDYTPSKKEGEQKPEYSLKVSSVATCRSTA

SEQ ID NO: 358603 - protein, 427 aa, unidentified
MNENKRSKIDEFRQFKKQIRGSTEVLVVGLDIGKRKHHAFLGSANGQTVLKGLIVENSAEGFAHLLTQVGFYMQRDGFKRVVFGLEPTSVYHKPLAEHLIAQGHLVVYATNEAIKKNRSLLDGRWDKNDTKDSANVADLVAQGKCQYYDLPDQRLRELRSLLLFRKRLKKQQHSCRVRIRNNLVAQYFPELDRFWNNAEAENLSIVRWFLDPARIRALSCEQFIAKVTNHNGGDRQQRRLRQIWETAGNSIGCRPGPGTQLEAQLMVESLQSIQDQLARVEQAIQELASSFAEYEYLKSIPGFGPYVSAVTLSAIGNPDRFENRSQLLRLAGFDLSASRSGEKSKSAVPVISKKGKADLRYALYQAALVASSLTRHFRAYYNRLLDGRQREQGIRTKMRVKIAAKMLVIAWTLMKRKESFDPAYIQS

SEQ ID NO: 358604 - protein, 313 aa, unidentified
MSQNNPPILYVGLDVAKLSLQLHLAGRFHSLANAAKGYVQLLKHLRGHPAAQVVCEATGGYEQAVVRALQTAGIPVSIVEAGRVRYFARAHGQRAKTDPIDAAVLSAYGATFQPAATAPASPQQQQLAELSQRRRQLIQLLVTERNHAEHYTDAFRVRQSRQLRKTLDQQIEQCDEAIATLIAQDAELARKAKRLDAIPGVGPVVAATMLAEMPELGTLTKQTAAALAGVAPYNRDSGDQRGLRHIGGGRSAARHALYMATLSAVRHDHILKAFYLRLRAAGKPPLVAMTAVMRKLVILMNRLLKNDDFQLAI

SEQ ID NO: 358605 - protein, 362 aa, unidentified
MFRPHTLYIRIRIVRKVSEPAFAMKDQDVTDVIRRKQQTAMRYIGIDVSKATFVVAYSSDKGGEIRTFNNTTTGIKQFIGALPKDSSIHCVMEATGNYSALLLYMLNVAGITVSMENPLKVKNFARAMLSTVKTDKIDARLIALYGEKMNPQPFKIQGEAILRLRQKRTVIRQLTKQITAMSNLRGSLACLPVPDKGATHTVDETIEFLEKRRDRLQSELTDLVEVEFSRQLALLTTIKGIGITLATALIITSGGFTYFQNAKQVSRYIGICPTYEQSGTSVNIRGHINRNGDAYTRGLLYVAAWTASRFNTKCGETYTRLRQNGKPGKLAMIAVANKLVRQAFAVVTHDKEYVDGFVSNRP

SEQ ID NO: 358606 - protein, 349 aa, unidentified
MSIIGGLDVHRAQITFDWVDRDSGEAHRGRIAPATRAGMGAWLGELPGAEGAFAVEGCTGWRFVVEELKAAGLVAYLAEPAETSSLRGPKRRAKTDRTDARLLRELLEQGRLPSSWIPPTWILDLRTTVRLRKTLVDQRTAWQQRIHAALFHHGLPRPTQELLSRGTRAWLEQVALPPASRQALAVALRQIDGLDAELDPIDQWLRTLARRQLGCRALMTHHYGIGAITAPTILAELGDARRFAGGDQVVRATGLDITVYASDGKRSPGHLSRQGPEVLRWALFEAAKAAARPSSPDYAYYQQVKACQGGNRATLAVARKLARRVRHTLLRLGDAALAPVEDLPVAEVA

SEQ ID NO: 358607 - protein, 289 aa, unidentified
MERGSLMLNTTTFVGLDVHARSIKAVALDAMTGEVRSATFAYDAAAVAEWVGSLDPAAKCVYESGVTGFDLQKRLSSMGIDCVVGAVSKMIKPPADRKRKNDRNDAEFLARMLSVGNVVEVWVPDDGCEAARDLVRALDDAREDLKRCKQRLSKFLMRHGYAFSETTPTGRRKGNWTAAHWAWIRSIEFPEKADDDVLAYYIDATRQAMEDKKRLEKLVEAEASKPRWKKRVDSLRCLKGVDAMTAADIVFEAGEFSRFKNARSFAAWLGLTPSEHSSGESVCLWQAKC

SEQ ID NO: 358608 - protein, 422 aa, unidentified
MEGVVYPRSIGLDIHQKMIVCCFTAVQADRTIIKETAEFETFKRGLKALASWCRERVPDVVLMESTGIYWKAPYAYLERAGIVPAVVNARHIKNLEGKKTDMADAEWLAVVASAGMFCRSYVPKEAYRNMRVLSRHVLGVTRSRQQYKNRISKILADAGARLNVVFSDISGVNAQRCVKGLIAGMNPEDIAATLDYSHLKATREDIAAAMECDLTPAHLAALEALLEIVDFLTKQIDKGRKALLDMLPEGDREMLMILQTIPGIQETAALELLVELGGDNLEPFANADRLASWVGLCSGNKESGGKRRPAHTRKGNMYLRRILCEIAHAAVKTKGSTFQSKYKSLRIRKGAGKTIVAIACKIIKLVYTLVKKREGYRDPHIDYEKMRLQKNPKRHIQNLFKLEDWKIRAVNTKTGEVLESTH

SEQ ID NO: 358609 - protein, 405 aa, unidentified
MKLTRIGMDIAKQMFDLHGVDRRGQVVLRQRLRRERVLAVLAQVEPCEIGLEACGGAHYWHRELSRLGHTVRLLSAHKVKPYVDGNKNNRHDAAAICEAMSRPAMRFVQPKTTAQQDLQTLHRARALLVRDLTALSNQMRGLLQEYGIVMRKGAAALRGALAELLAGDDERLTAVLKAVVAEQFERFKYLAQRLESYDRQIGGLCRQDPRCRRLLQVPGLGPLSATALVAAIGNGHEFSNGRHFSAYLGLVPGHRNTGDKTVMLPITKRGNRYLRTLLIHGGRSAVYAARRHSDPRSRWLNRLRETRCHNLAAVALANKNARVAWALLRYGEDYRAPRAPRPPAAPAAARSARPANNTLALAPHGARPAVQRSEHFSAPPSAQTKGGTKKMPGQNQTKAKAALKP

SEQ ID NO: 358610 - protein, 347 aa, unidentified
MENRTVVAVDIAKSVFQLAISESPDQPVRDRRLRRSEFFAYFEKLPPAIVAMEACGSAHYWARRIQALGHTVELIPPHLVRPYVTRNKTDRADAHAILESRRNRAIHLVPVKSEAQQALGAIHRFRSGWMAARTAQVNTVRGLLREFGFLIPVGVENVVPQVRLLVEDADSKVPDPLRSLLHAACCEIEALDQRIKQAGKQLEIEAEGSPAARLICSAPGVGLITGTALLAFVGDVGRFSSGRHFASYLGLTPRERSSGGTRRLGGTSNTGARYLRTLFIHGAPSVLCHAKRAKTHGRLRAGALALQSRSRHNKAAVALANKIARIVWAILKNGRAYDSTSSLPAAA

SEQ ID NO: 358611 - protein, 310 aa, unidentified
MSTLPSSILSIDISKDHLDTDAWPNPWRRHVGNDDVGIGMIVAEARKRNAFVVFEATSVYDREVIEALNKAEIAYHRANPRKARDFARSSGFLAKTDQVDAAMLAQYGRSVPLPATEPVAPERQALRTLIARRTQLVTIAKQEKTRIQQIKDAAIRDEMEAFIAAIEERIAAYDERIRSHLKAHPLLDGVARILMSAPGIGLITAASLLAFLPELGRRNTKAIAALVGVAPLARDSGRLRGQRRIWGGRRTVRCLLFLASRHAQKNSAFAPFAQRLRDAGKPIKKIRIAVARKLLLALNTMVAQQRPFHP

SEQ ID NO: 358612 - protein, 324 aa, unidentified
MIDGILGIDVSKNTLDASLSSRNRVRARSVANSSDGWRDLLDWLTSEKIRRVHGCMESTGRYSLGIACALYEAGHIVSIVNPAQIRDFARTKLGRNKTDEVDAAHIREYCELFKPQPWAPPSEAHRRLAELQTIRSGIVAGLTEWKNRKGSGMVDSVAQSLADVTISHFSSQLEAVDEAIAQTIDNDSGLRRKRDLLLSISGVGETLAGVVLAELPGPDVLRSSAEVVAYAGLNPRQHQSGTSIDRVTRISKIGNAVLRAALYLPAMSAMRYNPAVVALVARLKSRGRLKPKQIVVAAMRKLLVLCFGVLKTGKPFDPAIAMGC

SEQ ID NO: 358613 - protein, 353 aa, unidentified
MKCDKYIGCDLHQATTVVTVLDAEGKVAMETIVATEAAAMIRFLKSLSGPLHITFEETTQARWMYDVVRGYVSEAIVCDPRRNKLLGEGSKADKPDARKLAELLRAGLLRPVYHGHEATRQLKELVRGYETLSVDTQRMMVRIKSIYRAHGIRTSGSAVYQQKQREQWLQLLSEPGTRQRVSWLYEELDHLRPLRKQAKMAMVAEGRKHQAFRLLRTIPQLGPIRCAMLVATVDTPYRFRTKRQLWAYSGLAIVTYMSAEYEIKAGRVVRNRKAVATRGLNRNCNRRLKDLFIGAAVAGSRSEPYRSYVEGLQQKGIRAEMARLTLARKIAAVALRVWKKGETFDPKKLNSTI

SEQ ID NO: 358614 - protein, 363 aa, unidentified
MDKYIGFDIDSNKTVACVVQKGQKDQFATLKTDIEQMKKFLQSQRRPGEKLHLTFEISGEAGYRHDQLADTVDTITVSNPTKMTWIYKTAKKTDRIDARKQAVLLSIGEVPKVYIPSKEIRQWRVTIQHRRKIVNRITAVKNRIRAFLKANGFVQPAQRGSWWKLSNQAWMRQLAEESEVASERLWRMSLADMLDELELLDGQLARVTRYLDSYLKSKAGGRLLMSVPGVGPRTAEAVLAYTDEVRRFSRSKQYGAYFGLTPKLDESGSTRRLGHISKQGPSVVRFSVVESAWRAIKKSKALKEFYERVRAGQNTRKKIAIVAVARKMLSIMRAMLLTGELFNEQLVVKECWFGGTVEVKRSA

SEQ ID NO: 358615 - protein, 413 aa, unidentified
MKSSAITAVGIDVSKHKSMVAVRRPGGEIVMHPFEVCHTSDDLRRLASTLKKLGGDIRVVMEHTGNYWRPLALTLKKAGFFVSVVNAMLVHDFSDNSIRKLKTDRADSLKIANYALTFWSELPPFDDEEETRLLLKTQSRMYERITTTSTALKNGLIALSDQTFAGVNLAFDNATKSTEGHLKWVDFFMHYWHRDCVCKLTLETFIESYRGWCKRKKYGFRSETARKIYELAKKSVSTLPKCESTKILITQACKSLNAICEAKQACQCEMQRLASLLPEYDVVMSMEGLGPVTGSTLIAEIGDVCRFKNKNALVAFAGVDAPPFQSGTFESKSRHVSKRGSPHLRRTLFTVSGIILQLSHGGNPVFCFMDKKRSEGKHFYVYMVAGAAKFLRIYYATVTNYLRTIETPDLASN

SEQ ID NO: 358616 - protein, 405 aa, unidentified
MEIINPLCCGLDIHKKTIAACFISPGGKEIRSFGTMTEDLLELADWLLQNKCEIVAMESTGVYWKPIYNVLEATGMKILVVNAHHIKAVPGRKTDVKDAEWIADLLKHGLLQGSFIPDRDQRELRELVRYRTKLTQERSREVNRIQKVLEGANIKLGDVATDVMGKSGQDMLRALISGDQSPQDMAQLARGKLKCKKDLLEKALTGLIGAHQKMLLRTQLQHIDFLNEQIEVLGQEIKERMRSFEEAIEALDGIPGISRTNAEQILCETGIDMSRFPTHRHFASWAALCPGNNESAGKRKSGRTRKGNMSLKAALTQAAISASRTKGTYLNVMYHRLAARRGKNKAIVAVAHAILVTIYHMLKNGSSYHDLGVNHFNEINHQATVKRSIKRLESMGYKVTVEPAA

SEQ ID NO: 358617 - protein, 391 aa, unidentified
MGRVVIGMDPHKRSATIEVIDAHEKVLARSRYGTDTDGYQSMLAAGRRFPDRVWAVEGCAGIGRHIAQRLVADGETVLDVPAKLSARVRVFDTGQGRKSDPVDAHSVAVAGLRSPGLRQVLVDDATVALRLWADRRAELGRARTEIVNRIHQLLLELIPGGAKKFLSRGQASYLLRTAPAPVGIVAQTRHQLAGELIEELTVIDAKTRAADKHLRKLVTATGSCLGQLNGIGPSGAARLLGDIGDIARFATAAQFASWNGTAPIEASSGDQKRHRLSRAGNRRINRVLHIMAVVQLRHDTAGRAYYRRRLAEGKATMEALRALKRHLSDVVYKQMVRDTQRTPSGGAGPAGHSGATLQSGAVSPIPTADSSDKSQPGPPPASVEQSLPRPP

SEQ ID NO: 358618 - protein, 419 aa, unidentified
MNTDQKRAFAATFPVHVGVDTAKTFHKLVVRGPDGQRGKAYKVMVGRAGFEAADAHLRGLFPGVAPRQMLVGLEFAGHHGFTFAHFLAQRGYAVVNVLAAHTKASKEIEDNNPRKDDAKDAAQICRLVGDGIYVRFPFLTHPYVELRLLTVHRHRLTVEATRYKNRLQGLLDLAWPEFMGQFSNLHKATPRAILERWPLPQDLLAASIRTVRKEIHAASRGHVSREQVDALVASARTSIALPDAAPERRLEIQSLLARWALVRQQLAVLEQRITTLVEACPEAKILTTLPEVSAVCAATIVAELGTPKDYAHYRQVLKLAGMNLASRSSGQSEGRKWQSKRGRPMLRRQLFLLAGRWCLTRGLYHQDYLALKTRNGGVGTKAVCTLARKLVPLLLKVMQTGEPFDKQRWLENRRVKLAS

SEQ ID NO: 358619 - protein, 350 aa, unidentified
MVVVGADVHKRTHTFVAVDEVGRKLGEKVVAATTAGHAEAVMWARERFGTEVVWAIEDCRHLSARLERDLMGFGQAVVRVAPKLMAQTRASARTRGKSDPIDALAVARGFLREPDLPVASHDEVSRELKLLVDRREVLVAQRTATINRLLWRVHELDPDHAPKAGSLDLAKHRRILGEWLVTVPGLVAELARDELADITRLTETINALAKRIGERVRVVATVLLSLPGCAELTAAKLVGEAAGVTRFKSEAAFARHAGVAPIPVWSGNTAGRVRMTRSGNRQLNAALHRIAVTQIRLDGLGQTYYRHRIAVSGSKTEALRCLKRRLARVVFNHLHTDHQNRIQPCQPAAA

SEQ ID NO: 358620 - protein, 410 aa, unidentified
MEVLYERCAGLDVHKDTVVACGRIAASGGEVKREVRTFATTTRGLLELSGWMTEHGCTHVAMEATGVYWKPVWHVLEGAFELVLANAAHIRNVPGRKTDINDATWIADLLAHGLIRGSFVPPAAIQHVRELTRTRKQLVREVAQHTQRIQKTLEDANIKLTGTISDVLGLTGRAILDALVAGETDPERLADLAHRRIKAPRIKLVETLRGRVTEHHRFLLKLHLGQVDALRTAIAEVDEQLGKALGEATAMAKLLTTMPGVGELVAQVIVGEVGTDMGRFPSAAHLVSWAGLCPRSDESAGKRRNTRIRHGAPWLKTTLVQAAWSAVAKKKSYHRAQFQRLKARRGPKKAIIAVAASMLTAAYHMLRDGTAFEDLGPDHFDRQDRTKAAQRLARRLEQLGYVVDLRPAAA

SEQ ID NO: 358621 - protein, 326 aa, unidentified
MKAVTWIGVDIAKDSCVVAQRCPEGFQTEEFPITPQGLKALGNWLPQQPRLQIVLEATGPYWRAFTSGFNSVAPEIPIAVVNPRRVRDFAKASPHASKTDLLDAQVLVHFAETFQPALMEASANRADRQLRALTRHALQLTQQRDQVRDQMEKATADPDTPKFVLRSLKRHLQHLEKALKLCWSQARVNLDQDPQLTQTSRLLLSIPGIGEKTALTLISEYGAGLLQVGPKQLTRYAGLDVVFFQSGSSVYRLPRISKQGNWRIRRALYMAALSAIRHNPIVRSYYLKLVANGRPKKSALVAAMRKLLHQCYGVLKNQSPFDPAYA

SEQ ID NO: 358622 - protein, 322 aa, unidentified
MASFLGIDVSSRSLDGWVRPQAVRIAVSNNPAGFEELERTLRKFSIKRILLEATGGYERDVLRFLQDAGYKVIRVNPARARKFADSMGVKAKTDAIDAEVLAHYAEVIPDQPTLQISPDRALLRELLMQRDRLVQQRDDDRRRLKQAQSLVVANFLKANLQHFRSQIRLVEQEINQQAAKLNDERIARLTQVKGIGMVTAGKLVALLPEIGRVESREIASLVGVAPFNHDSGKSLGKRSITGGRFEVRRTLYMALLVAVKYNPALKARYEALRGRGKLAKVALVACMRTFIVRLNAMIKTGTPWRDLILPQPAGTTQVEKAA

SEQ ID NO: 358623 - protein, 412 aa, unidentified
MDRLVERCAGLDVHKDSVAATVRVPRKDGQRLQETRTFPTTTRGLLTLADWLASYGVTLVGMESTGCYWKPVYYVLEERFECWLLNAQHLRNVPGRKTDVADSAWICQLLEHGLVRPSFVPPKPIRELRDLTRYRKAQIEERVREVQRLDKVLQDAGIKVSSVAAETLGVSVRRMLDALVAGTHDPEVLAELARGRLRQKLPALQDALTGRFRSEHHGLLVSQILAHIDYLDETIATLSARIEHVIAPFSRERELLQTIPGVARLGAEVLIAEIGVDMSVFPSDAHLASWAGQCPGNHESAGKRHSGKPRKGSKWLHKTLTESAKAAARSKGTYLSAQYGRLRGRRGPGKATGALRHSILIAAYHLLEQKVPYQELGADYFDRRRSTEQRTRRLVRQLEQLGHTVTLQPLAA

SEQ ID NO: 358624 - protein, 352 aa, unidentified
MKINERISYRDKKVFIGVDVHRRHYTVCICDDELVKKCQIVAIPEQLLCLIKKYFSEAKVKVVYEAGFSGFALYRHLEQHKIDCIVVNPSSIEISSRDRVKTDKRDSLRMATQLANGRLRGITVPSKKRENQRLITRSREQLLKERTRIKNQIRFKFHQFGLFPLEFQTRLTRNQVILLLKKDLSEELRASVNLYIEIWDILDTEIKKLDKELQKQADDDPLEMVYRSACGVGAVTSRTLANELGDMSQFANEKALFSYTGLTPAEYSSGEHRRLGHISRQGNARLRRVLIECAWSAIKKDKKLNEDFVRISSKAGKKRAIVAIARKLIGRVRAAVRKGEMYEPGHNSAILK

SEQ ID NO: 358625 - protein, 348 aa, unidentified
MGLDLGDRQSRFVVLDADGQEVEEGRVATRDSALRQRFSGCERMRIALEAGTHSPWVSRLLTECGHEVIVANSRKLRLIYENRRKDDRVDALYLARLARLDPQLLWPVEHRGPQAQRDLTLLRSRDAMISARTQLINHTRGLVKSLGHRLPRASSRAFPKRVLEAIPESVQPALLPVLEIVTSINDQIKALDHKVETLSRESYPETKLLRQVTGVGPIASLGYVLILEQPARFAKSRAVGPYLGLVPGKKQSGNSDPQMRITKEGDSLLRRLMVNSAHYILGPFGPDSDLRRFGLKVAQRGGKNAKKRAVIAVARKLAVLLHHLWRYAEVYDPLYQETRKASRRGKAA

SEQ ID NO: 358626 - protein, 317 aa, unidentified
MPREDGWVGVDVSKATVDGYLSPPEQARRLTYDPTRTTTVITTWREATPTLVVLEATGGLERVVGAELLVAPLPVAVVNLRPVRRGVEAIGYLAKTDRLDARVLAPVAAALQPPARPLPEVETRALADPLPRRRQLVDMRTLAKHRRQPAQPAAGRHDSQAHIDWLPPRLKTTERGWRQAVEASPAWPAKAALWRTVQGLGEVAILTLLASLPELGTLNRNPIAALVGVAPLNRDSGTRRGRRCGWGGRAEVRQTLYLATLSAGRYNPIRKAFDTRWRDVGKTAKVALVACLRTRLTIIKAMRRDRTHWDDHDGKTA

SEQ ID NO: 358627 - protein, 408 aa, unidentified
MRAICGIDWASEWHDVRIAEHQSGQLICQRRFSHDEAGVCALVDELVAHDVERVAIERPDGLLVGRLLAAGLRVLAIHPNQVKAARDRFRAAAGKTDAFDSFVLCELARTDAHRFAALAPSGDETLALRALVRTREDLVRARVGLANQLRAQLDAFWPGAAGVFADVDSHIALAFLERYPAPSDAHGLGPKRLQAFLDRHAYCGRRPVEQLLERLRNAPRAVVGELEADARRAAALGLVAALKPIVAQISELTSQIRGAIRTHPDGAIFTSVFRDPKSVITAAGLLAEIGDNRARYPHRDALAADAGQAPVAIESGKRKSAAFRWACDKRLRNHIAVLADSSRHHHPWARDIYQRARDRGADHPHACRILGRAWTRVLWRCWQDGIPYDPTRHQAATHHLNPDKPGKG

SEQ ID NO: 358628 - protein, 408 aa, unidentified
MYNAVGIDASKLKSTITIVQPAGVVIRKPFDVLHTSDELNTLVTYLKSLEGETRAVIECTGRYHEPVVKSLSEAGIFISAVNPKLIKGQKQNTLRKVKSDPADARKIAKYALDNWAELREYSSMDTTREQLKTLNSQFTFFMKQKVAAKTNLISLLDNTYPSVNKLFDSPIRDDGSEKWVDYAYSFWHVDCVRKIGLKTFTERYEAFCKKHHYNYQKNKPALLFENSKQLVAVFPKEKSYKLLIQQSIQQLRLASEHIEIIRKEMNVLASTLPEYETVMSMYGVGETYGPQLIAEIVDVSRFTHREAITAFAGVDPGVNESGQFKQRSNRASKNGSTRLRNTLFQVMPTYLQNKPVNEPVYQFLDRKRAEGKPYLVYMTAGANKFLRIYYGKVKECLRNLEQSQIEES

SEQ ID NO: 358629 - protein, 351 aa, unidentified
MSQKTDAVVASTIGIDTGKNTLHLIGLDDQGTIVLREKLSRSRIVSRLANVPRCLIGIEAGMGTHYVARELIALGHDVRQVPPVYARPFRQTHKNDFRDAYAIAEAVRRPSTRCVPVKTDDQLDLRALHRVRSRLISERTAVINQIRGFLLERGIPVRQGLRFLRQQLPEILAKRIDVLSPRMIRIIEDLSGDWRHLDERIEHVTKEIEVLAYGTESCRHLMTVPGIGPIIASAMVAAIGNGVAFAKGRDFAAWLGLVPKQMSTGDRTILGRISKRGNRYLRMLFMQGARVILLRPANWTKHSFGPWLTAAAKRLHPNVLATALANKLARIAWTILTERRSYETRVIADAA

SEQ ID NO: 358630 - protein, 368 aa, unidentified
MGEPITYVGIDAHKRELQLAMLIGDAEQPRCWTSPTEAGALARLRRRLERDAPGAIECCYEAGPSGYALQRQLGSERIRCRVIAPSLIPRKPGDRVKTNRRDARKLAGFLRAGLLTEVRPPTLAEEAVRDLGRARDDARVDLLRSRHRLGKLLLRRGLIYHGRNWTKRHREWLDQHQWPHVAERHVVMDYRLAISQIEARITEVDRLLEQIASQAPYGAAVAALRCFRGFDTVTAMMVLAELHEVRRFPSAPSLMAFVGLVPSEDSTGDRRRPGAITKMGNGLVRRLLIQAAWHYRHEPRLAAPLQRRRAGQPLAVLAIAEKAEQRLCRRYRRLCARQKPTPLVITAIARELVGFLWAVLQLPECDMK

SEQ ID NO: 358631 - protein, 461 aa, unidentified
MESVYRVAGIDVHKKMLAVVVADVSEPGEYQFERCTFGAGSAELRRLADWLNEQGVREAVMESTAQYWRPVWQALEGVCQLHLAQAHSNRAPKGRKRDFEDAQRLVRRHVAGELILSFVPGEEQRLWRIMTRTRQQLTRDRIRLRNQLEGFLEESRIKLSSHVSDLLGVSGRRILQALAQGATDPASIAALAGPAIRASQEQLADALNAAATVLPLRRQILRLFLERLELIDSQREALAKSLAESLQEHQNAVTRLAATPGLGVDSAQQIIAEVGPQVASFDSPGQLASWVGCSPGREESAEVSKSDRSPKGNRQMRRLLNQAANAAVKAKGSVFQDLYRRLVPRLGHPKAIWAVAHKLCESYGRSCTMVWSTRSAASGLIPRLSDGALTRWSAISEVSDIKYSYPLHRDRPGVFQRCHASLDDDALYPQTPHSLDSGGDGCLRDLALSGLPPASSTGSGR

SEQ ID NO: 358632 - protein, 342 aa, unidentified
MQVITIGLDIAKNVFQVHGVDNAGNAVLRRKVRRDQLIPLLRDMQPCLIGMEACATAHHWARELIALGHVVKLMPLAYVKAYVKRNKNDAADAEAICEAVTRPTMRFVAVKSADAQSILMLHRARHLLVRQRTAQISAMRAHLAEYGVVAPKGRAHVRGLIEALDKGDGPLPAMARQVLILLARTIEGLGAQIRKIEIELLAWYRTNQVCRRLSTIPGIGFITASALAATVVDAKVFRSGRQFAAWLGLVPKQHSSGGKDRMGGISKMGDRYLRHLLVVGATAVIRYTRRKATTVSTWANQLLERKPARLVTVAVANKVARIAWAVMAREENYRATPSMARG

SEQ ID NO: 358633 - protein, 484 aa, unidentified
MAAKNKDPKTDTDGKSAGAAPEHSGDGAEVAEDRVQVVERAAAIDVAKGSGMVCTRVPGSRPDRRRQKVWRAEATCGEVTALMDHLRCEGIQRLVLESTSDYWRIWYYLAEAAGLEVWLVNARDVRHLPGRGKSDRLDCVWHCKLNERGMLRRSFVPPQETRDLRALTRTRARLAQDQARHQARVEKILEDALLKISVVISDLFGASGRRFLDALVAGERSPKALAALGDTRLKATRRELEAALTGRFRDIHAFEISTHLRLIDAINEEIALLDEKIAQQLALVPRTAPACVACGLAGGGHVPGCPDEGAAVLGLAGRLDEITGVGECNARVIIAELGTDPSQFPTPGHAAAWARLTPRSRQSGETARPGRTGKGNRYLRGALGQAAMAAASTDTRLGALYRRIARKRGKQKAIVAVSRVICEIAWILICDPGARYEELGPDYYSPRSPARQTRDKIREIERLNPGKKVILAPADPGAGAGQAA

SEQ ID NO: 358634 - protein, 322 aa, unidentified
MQKQEICFPQMLEIGCGIDVHQSLIVASIRKSSAEVETREFEAYTKSLTDLRDWCKNEGVTHVAMESTGIYWKPVFNILEEDFEIILVNARHVKNVPGHKTDKKDSSWLSKLLLSGLLKGSFIPPRPIRELRDLVRYKKKIIGQIASEKNRIIKVLEDANIKLSSVLSNVDGSVGTKIINDIINNPKTSLESLQQYYHGKIKAGKEEFCQALNGHITEHHKNMLRLHKSSIQDKENQIQNIDKLIDEATKSYIVEVDLLQTIPGVGRESAISIISEIGTDMSQFPDATHLSSWAGMSPGNNESGGKKKIVEQSMATHICKRP

SEQ ID NO: 358635 - protein, 415 aa, unidentified
MQHVSKFKKLTAKTLIAAVDFSKSKHSGYFTTYTGEEIAPFEFSNTLKGFEKFWSRLQKFKSKYELEDVVVSFESTGSYGLPFIHYIENKGVRMLQVNPKHTKRAKEITDNSPNKTDKKDPRTIANLILFKNGLTVNIPKGQISELRNLVNCRETLLVEQNKLNNQLESTLAIYFPELLTFFKSLLTKTGLYVLKHYPTPYDIQIADPDKLHRELKKVSKGRVAEGRTNKLINMAYQSIGIKEGRESYKTIIKFYLQQIELISEQKKQTEKQIENILESIPQGKLILSVKGLGKISAAAILSEVIDFNSFRTIREINKYTGYNLYEISSGKHFGKRRIAKRGRALLRKTLYFACLNMIKEGGIFHEQYQRHIEKGMPKMKALIAISRKLLRIIFAMFRDNREFEIQKIKTIKKAA

SEQ ID NO: 358636 - protein, 359 aa, unidentified
MSESIISPNLKKIYVGIDVHKKTYAVTVLGSDIVKKRVSMSACPKALISFLKNNYQNSEIYSVYEAGFSGFHLHRKLLDSGIKNIVVNPSSIEISANKKVKTDKKDSYKLAEHLSLGRLIGINIPSLDQEYKRLLSRTREQLMIQRVRTGNQIKNKLFQFGYIDFSEEKVMSRKYISNLVYLELKNELKITINCLANIWLYLQSQIKELEKELKKQAENESHIELIYQSVPGIGEVSARVLANELGDMLQFKNEKSLFSFVGLTPVEYSSGENIRQGNISRQGNSRLRKILVECAWTTISKDPEMEESFNRIAAKRGKKRAIVAIARRLIGKIRACFKDKSPYKINISKIRSIKSEEKY

SEQ ID NO: 358637 - protein, 366 aa, unidentified
MKKTSTVRVNGNMIFKGHQLTIGVDLGDRCSCYCVLDEAGEILLEQRVAMTPEEMKQIFEKIPRSLIAMETGTHSPWVSRLLTELGHQVLVAHAQKVNLISKSTRKDDRHDARTLARLARIDPELLGPVRHRSAKVQIHLTVIRARAELVRARTGLVNAARGLVKSYGQRLPKCGTQQVSRELAAELNAELREVLEPLLKEIESLNERIKEYDVRMEKIAKESYPHVELLKQVKGVGTQIALTYVLTLEDPHRFPKSRDVGCFLGLRPGRRDSGESQPQMRISKEGDRYLRTMLVQGAHYILGPFGEDSDLRRWGLKLAARGGKSAKKRAVVAVARKLAVLLHRLWVSGEVYEPLRNSQKAIRAAA

SEQ ID NO: 358638 - protein, 374 aa, unidentified
MSNHSEAFVAFDTSKLRNAVAIADSGRAGEIRFLGEIDTTPAATAKLVKKLADKYQRLTFCYEAGPTGYGLYRQIKGLGHECVVAAPSLIPKKPGDRVKTNRRDALSLARLLRAGDLTAVWVPDERHEAMRDLTRAREAAMMDLRSKRQQVSAFLLRRGLHYEGKNTWTKTHMRWLASQQLAYPEQRIAFEEMMLAVRQAQERLERLEQAIRAAVPDWSLAEVVTALMAMRGIDLIAATTLLAEVGDLSRFQTPHGLMDYLGLVPSEASTGDTIKRGPITKAGNRRARRMLVECSWSYQHPPRVGRDKQQKVDAAPPAVREIAWKAQCRLHRRYRALIRRGKLKTVAITAVARELAGFIWAVGREITTTRAAAR

SEQ ID NO: 358639 - protein, 448 aa, unidentified
MSNGNGVSRGDRNRNARLNRLRELVPVTHAIVGIDLADNKQMVVVTDHDSKVLARRTFRCRAWDLGLALDWAGQQASKAGFAGVTVACEPTGHRWRVLGQLAADRGMAFVCVQTLLTSWARRSEDLTFDKTDEKDAVLIARLTAQLRCYVPEPLDETWGRLRHLGARRERLLAETVSQVQQVRDLLECVWPASLDTAKHPFRSRTWLAGMSVILARTGGDPPRLRRLGPARFEAAVRREIVARQGKKPCLRIVRLLFAAATDPRGVTTHRPGALERVQFLLDDFRDTGRRQGETEARMVEVLDELQLTELVCSIVGLSALGAATILAETGDLTRFASARAVVKHSGLAPREKSSGTYTGRTKLTGQGRPGLRRAAWRAVWGAQKANPVYAAKFTHLTTRTENKLNRGQAHAAIAAAILRQLYAVVSTGQRWDAAIAAGGRCGVIEPAA

SEQ ID NO: 358640 - protein, 341 aa, unidentified
MREVSTIGLDIAKSVFQVHGVDAMGSVVIRKRVSRAKVLEYFGELPPCLVGIEACPSAHHWGRELQGLGHTVRLIPPTYVKAYLKRGKNDANDAAAICEAVTRPSMRFVPIKTKEQQTALMLHRARQLLVRQRTMLSNALRGHLAELGIVSAKGRNGTAELLRIISDGRVSPAVCGILKVLARQYGAIGTEIASIDKSIMALHRGSEASRRLAEIPGIGPIGATALVAEIGDWKTFSSGRSVAAWIGLVPKQHTTGGKDRLGSITKQGNRYLRWLLVVGAMAVIRYARKHGTQKRPWLGRLMERRPTKVAAVALANKIARMAWAIMVRGERYKEPKLLLAT

SEQ ID NO: 358641 - protein, 384 aa, unidentified
MKVVCGLDVHKDSVFCCILCANGEKIQHKFGVLTEELVTLRDLMVSEGVEECAMESTSIYWIPIWRVLEGSVKLHLVNPYFIKQLPGKKSDVNDAEWIATCLSKELIASSFVPDDKIQRLRQYDRRIFDLNASISRNLVKLDQCIQRCNIRISNYISTTDSKGYRSIVKLISQGVTDAEVLVKELHGRTINRHGRETLVKALTGVVSETDIDIIKQLVEEIELQQRHKDEAQQKMTALCMEWFPQKVENLQTIPGVKERSATSIIAEIGTDMTHFQTPKKLVSWVGLRPRNEESAGKIKARGITHGNRFVRKTMIECSWGAARMKDSFFAEFSYRQCIERRKNKMKVQVAIARKILVAVWYVLSQGTQYIKPTDHYTAAHMTAV

SEQ ID NO: 358642 - protein, 387 aa, unidentified
MQPAHIQDFTLDDQTLTASLELASKNWKMALQDGMHRSPSEHKAEQEGAAARLEEAIGLIETTRREWGLPPSCRVVIVYEAGQDGFWISRALQKRGYEVVIVDPASIPVERQARRAKTDRLDAIRLLCCLRGWLRGERDRLHAVRVPELEAEEMRHLMRDRGLLQKEVGQHRDRIRKLLRTVGCWVRVGPPFAGQLERGEVVCHDGAALPPCLRQRLMRECERLDLVTRQLKELEAALPEQLPEATAQSVATLQRLRGVGQIGAHRLVLELFWRRFDNARQVGSCVGLVPQPYDSGQSRVDQGISKQGNRRVRALLIEMAWMWLRYQPDSALTHWFARRTTTGAGDPSAGKRGKRVAIVAVARKLVIALWRYLKDGVIPDGAELKYG

SEQ ID NO: 358643 - protein, 416 aa, unidentified
MKTYSELSYFGGLDWAKHHHHVCILDPQGQKVEQFCFEHSGPGWAEFRKNIQKYPALGIAIETSQGAVVEQLLGSGVTVYPVHPKAAKEYRKRQAPGGTKDDELDSWSLGDALRMDGGQWRALSPQDPMIAELRLLCRDEAELIEQRTALVNQLQAALQEYYPAALEAFADWTVPYTWEFIAHFPTPQELAGATVHRQRVFLHTHKLWRPGTADQRLAIFARADQFCGGEAVTRAKSRLALSLVKLLQALERQLDEYRAAIEQLFAEHPDHDVFGSLPGVGAKLGPRLLGSVGADRGQYPDAQGLQCVAGSAPVSFKSGQMRRVKIRWHCDRFLRHTVHLWANCSLKTCTWAAAYYQAKRAAGHSHACALRCLAQRWLKILWKMWQTHTPYDPEYHARNQQRHGSWVLQLNPKRLN

SEQ ID NO: 358644 - protein, 361 aa, unidentified
MQSTTIIAFDQHAATTMAAVLLPSQRTPALHPLSSEVATIRRFVKRLRHQGGVTCCYEAGPCGFALQRALTVEGIPCEVIAPALIPRRAGDRIKTDRRDAGQLAVLYRAGALTAIHIPTEQEEAARDLLRCREDIRADLLRARHRLSKFLLRHGRRFTGTKQAWTKAHDHWLRTQTWPLAALDQTHGAYLRAVDETLARLWTVEDDLRALLTLEPLQARVQRLRCFRGIDNLTALTIAAELGDARRFATAPRTMAFVGLVPSEHSSGAKQARGAITKTGNAHLRRVLVEAAWHYRHPPFVGATLRARQRGAPADVIARAWAAQQRLYRRYQRLAARGKPRPSINTAIARELTGFVWAALTQ

SEQ ID NO: 358645 - protein, 427 aa, unidentified
MKKADLLSTLFVGIDISSRNNVVALLDFESQKTLQSFAVGNNQPGAVELANRLADYLRSRKDLTKLVVALESTSFYGIHVANYLSTCDVLAPFHTAVYCLNPKAIKNYKKSFIDLGKNDYVDAFVIADFARANRITTKPWRGSQFLALQRLTRHRLHLAKALTREKAYMLSNIFLKFSEFSLLDAEDQPFSNSFGATASSVLTDFLSMEEIIEMPTEDLISYICEKGHNRFPNPEKTASLLQQAARNSYRLDKCLYEPLTVSIASSFTLISTYETEIKAVNKAIEKTLKGIDPNAYQSLLSIPGIGPVMAAGILSEIGYIDAFKNQEALAKYAGLVWRENQSGNFQADDTPLSKAGNAYLRYYLIEATSHVKNHCGEFAAFYQKKYDEVKIHQHKRALALTARKFVRLIFGLLANHQLYSSDRVVQA

SEQ ID NO: 358646 - protein, 361 aa, unidentified
MTGTMTWAAMDVHARSIHAASLDVMSGELSRRRFDSGAVEPVVAWLAGLPAPVRACYEAGPTGYGLYRAATGVGGVCCEVIAPSKTPRASGDRVKNDRKDTEHLLRQLMAGALTAVVVPTATAEAARDLARAREQVRGDLMRCRHRLSKLLLRYGRVWDATTWTLAHRRWLGAQQFEQVNTELAFLDAVAACEGLETRRAALDERLSRVARDPELWPVVSRLRAFRGIDTLSALVIALEVGDFARFPRATQLGSWLGLVPSRQQSGESDTHGPITKTGSRYARRILVEAAWHYLRQPRIGATLASRHQDLPDHVLQIAWRAQHRLLRVHRRLRAAHKPPNVVNVACARELACFLWAAATSP

SEQ ID NO: 358647 - protein, 341 aa, unidentified
MQSVTLVGIDLGKHSFHLHGQDQLGRAVFRKKVSRKQLVEFFATFHPCTVVMEACAGAHYMARKLAGLGHQVKLISPQFVRPFVKSNKNDFVDAEAICDAASRPSMRFVTPKTESQQTLSALHRVRESLIRDRTKTTNQMHGFLLEFGISLPVGQAVIARLPAVLADHSLPARLITILERLHAHFKYLSEQIGEIDREMVRQLADDDLGQRLLSIPGVGPVTASVLAAEMGDGKQYACSRDFAASIGLVPRQYSTGGRANLLGISKRGDKNIRRLLVQCARAYMLRLERQSGRLAEWVRAMLARRHSNVVACALANKLARTAWALATRHTTFNAEADPMSS

SEQ ID NO: 358648 - protein, 351 aa, unidentified
MRNLTIGMDLGDKNHVITILDKDGAIVKSCSLDNVRASIIKFFKKYKGSTVAIEASSHSPWISRELKALGCNVLVGNPRKLRSIWNSDDKTDVHDSEMLARIARFDSELLYPITHRSEQAQADLELLKARDMLVKTRTGLINHVRGAVKSFGERLPKCSAESFHKQCRDFLPEDLKAVLQIILEMIEHITSRIKEFGKRIEEINRDVYPETELLKAIGGVGPLTALAYVLILEEPKRFGKGRQVGKFLGLTPRLDQSGETDKQLRITKAGNRFLRRLLVGAAQYILGPFGPDCNLRRFGLRLAERGGKTAKKRAVVAVARKLAVLMHHLWRNGEVYDPFYESHRVVMKNAA

SEQ ID NO: 358649 - protein, 351 aa, unidentified
MPRKTDTAVVRTIGIDTGKNTLHMIGLDERGAIVLREKVSRQRIAARLVNVPPCLVGIEAGMATHYVARELSALGHDVKQVPPAYAKPFRQGHKNDFRDAHAVAEAVQRPSTRCVPIKTDDQLDLQALHRVRSRLIGDRTAVINQLRGFLLEHGIAVRQGHRFLRQQLPQILATRTDVLSPRMVRIAGDLVGDWDYLDERIERVTDEIESLAKTDVSCGQLMTAPGLGPIIASATVAAIGNGAAFAKGRDFAAWLGLVPKQMSTGDRTILGRITKRGNRYLRMLFIQGARAILLHPASWVKHSFGPWLTAAAKRLHHNVLTVALANKLARIALTVLAQGRNYEPRVTPAAA

SEQ ID NO: 358650 - protein, 450 aa, unidentified
MAAKKKTYQMMKVVQPNAAGIDIGAKEIYVAIPEDRSKDSVRRFDSFTDDLHNAAKWLKQNDIESVAMESTGVYWIPVYQILDLYGFSVYLVNAKHVKNVPGRKTDVKDSQWLQYLHSVGLLESSYRPAQAVCAIRSLLRHRSGMVRMASSHVQHMQKALTQMNLQLHNVISDITGETGLKILDSILDGNHNPKKLAELKSKRIRASKSTIVKSLSGDYRTEHLFTLRQSLESYRFYQDQIHTCDLEIESLLKDFESNLKSENDAGEKPQGTKKPSTGNSPRFDIQGEMYRVFGTDLTRVDGINSSTVLTLFSEIGPDLSKFPTDKHFCSWLGLSPNNKISGGKILSSGTKKNSNKAAHAFRLAANALFRSKSYLGDYYRSKRARLGAPKAITATAHKLARIFYHLVKHRKSYDDSVFAVAEENHRKRKLRNLKKQAEAFGLQLVEGISA

SEQ ID NO: 358651 - protein, 390 aa, unidentified
MNAGGDKLAEQRFDEGIREIAMFHGLMAEFVSDPCDVVIGVETDRGMWVEALIAAGYQVYAVNPRSVSRYRERYCVSGAKSDRGDAKVLADMVRTDRHMHRQVAGDTDLGHDIKLVARVHQTLIWDRHRQRSRLRAALREFYPQALVAFNDCASRDALAVLEIAPTPHTGAALSIAQIVTALRDAGRCRYLDVTATKIHRALGEQHLEASPGVVAGLAVTTSATVALLVVINEQILAVETELAPRFEQHPDAAIYLSMPGCGVTLGARMLGEFGDDPERYSDAKARKNYAATSPITIASGRRRSVHARWIRNERLHDAVTQWARLAVNNSPGARVFYDEQRDKGAGYHTAIRALGNRLIGCLHGCLKSGTLYDEDTAWAHRQTEQTSKAA

SEQ ID NO: 358652 - protein, 359 aa, unidentified
MPHPETGRRITIGVDTHADTHVAVALDQLGARLDELHIPTTQAGYADLEQWAAALGPINAFGVEGTGSYGAELARILRRRGHCVIEVNRPDRATRHRLGKSDPIDAEMAARAVLSGVAASTPKNADGEAEMVRMLKMAKDSAVKTRTQALNQIKAILVTAPAQLREALAGLAVGKLLERCAAFEPGELTSPTAVAQHTLRLLARRNLQLRAEVKELQADIARLTTHAAPTLLEVFGIGPDGAATMMVTAGDNPQRLRSEAAFAALCGSNPIPASSGKTNRHRLNRGGDRQANATLHRIAVVRLRWHEPTQEYMARRQAEGKSKAEIMRCLKRYIAREIYQVLCPTPRHGNAGKNLAQTA

SEQ ID NO: 358653 - protein, 342 aa, unidentified
MDHYAGIDVSLECSSVCVVDASGKIAREGKVASEPEAVIAYFGSLRLSVVRIGLEAGPLSQWLYAAMKEAGLAVELLETRHVRRALETMPVKSDRNDARGIAQLIRLGWFRPVHCKSIGAQETRAVLTARKLVQSKLLDVENSVRGILRGFGLKVGKTTNRSFAGRVEDLVVNHASLHMIAAALLSVHAVLLRELKAFDKQVRSMARVDVKAKLLMSAPAVGPIVALTYASAIDDPGRFTSSRRVGAHFGLTPKKYQSGETDYTGRISKIGDATVRTALYEAAHLMLTKPIKGCAPLKSWAMRIARRAGMNKAKVALARKLAVILHRMLANATPFNAAMAAA

SEQ ID NO: 358654 - protein, 336 aa, unidentified
MWHIGLDVHQMQSTICILDKNGKRIRRQTIRGRWDILIAELRKIKKPFAICFEASTGYGYLFEQLSKIAKRVLVAHPGQLRLIFRSKRKNDRVDAEKLAKLLYLDAVPTVYVPSVDIRSWRSTIEHRQQLIRERTRTKNAIRALLRTHGIASPRRLWSKSNLKWLSALTFPTSLYALQRDMLLERYHSLAPLIERTEAALEKIANAHPGVNLLMTIPGVGIRTAEAVVAYIDKPERFTKNKAIGRYFGVIPSQDASAGANRLGHITRDGPSTVRKVIAEAAWQGIRRSSHIRAYFERIQQKKKERRKIALVATAHYLLRVMLAMLQTGETWRYTAA

SEQ ID NO: 358655 - protein, 344 aa, unidentified
MMAIQLKNNEPEVNPIHQAGIDVGAEELVLVVRKNSKLFNPQTFTNTRADRTRLVNKLVKLPGVIVCMEATGIYHFDLAVALHDAGVLVMVINPKSSHNFAKVLMKNSKTDAVDANTLAEYAARMDFVAWTRPSDETIAVRCFSRRITALTTQKAAAKNHLHALTATQETPKAVLRDAKLAITQLQKRIDSLTTEALLLIAKHPKLERTLTLLISIKGIAQTSAISLMGELLLLPPDLSHREWVKFAGLDPKAFDSGKSVHKKSRISKAGNRNIRAALYMPALSAKQHDPHVRAYFQHLVANGKKPLQAVCAIMRKLIHAIHGMLKNNEPFDNTRFYKIPTTVV

SEQ ID NO: 358656 - protein, 417 aa, unidentified
MTSLYPRCGALDVHTETVVACARVQKGTRVNRDVATFATTTAGLCALADWLAARRCSPVAMEATGVYWKPVWHVLEGRCELVLANAAAVRNVPGRKSDVTDAVWLADLLAHGLIRASFVPPAPIQALRDLTRTRKQLVRQVAQHTLRLQKTLEDANLKITGIVTDLLGPSGRAILRALIAGETDPERLLAHTTGRLRAPRARLLAGLHGAVTAHHRFLLHLHLEQIEALQRAIAQLEARVAELIAPVHESVARLTTIPGVSHLVAHVLVAEVGLDMTHFPSPAHLRSWAGLCPRLDESAGKRRSTRLRPGAPWLKTTLVQAAWAAVKVKQSYFRAQFLRLRARRGPKRAIVAVAASLLTTVYCMLRDGTPYRDLGATYFDQRDRSHTLRRLTRRIEALGYHVAVRPTASARGLAISS

SEQ ID NO: 358657 - protein, 461 aa, unidentified
MRLFAGDDWAEDHHDIEVMNEHGSVLARKRLPEGVAGMARLHELVGRQLGEDAEDAEVVVGIETDRGPWVAALIAAGYTVFPVNPLQASRYRERHGVSGAKSDGGDAHMLADMVRTDSHQLRPAAGDSPQAEAIKVVARTHKTLIWERTRHVQRLRHQLREYFPAAVEAFEDLDAPDTLELLGKAPDPARAAKLTRAQVSAALKRARRRGIAGKTDAILAALSGEQLGQPPALTAAYAATARSLIAVIITLNEQVKVLQAQVEAHFGQHPDAEIYLSQPGMGAILGARVLGEFGDDPHRYADAKARKNYAATSPITRASGKKKVVAARFVHNDRLVDALNAQAFAALNASPGARACYDDLRDRGIEHNDALRRLANRLVGILHGCLKTRTLYDEATAWSHRQNLLVSPAEPPPIRGRSLTSELLGCLSRGQRRRHRCAAAAGRRRFRGYPGSLTGAGWGAG

SEQ ID NO: 358658 - protein, 410 aa, unidentified
MRIIALDVHRSFAQTAILENGKLRDAGKIDLEYSRLLRFARKLKPDDEIVIEATGNTSAIVRVLLPFVGRVVIANPILVRAIAWAKVKTDKIDAAVLAKLHASGFLPEVWMPDEETEARRRVVAERTQLVSQMTRLKNRIQSVLHANLIPPYKGVLFSQRGRAWLEAQPLAEDQRRVIVRHAGELDRLGAELAEVDKSLAQAALEEPRVKRLMTITGVNSTVAMSVLAAIGDIHRFSSPEKLVSYFGLNPRVRQSGDKPAYHGRITKQGRAHARSMLVEAAWVISGAPGPLRAFFIRIRDKRGKHVAAVATARKLAVIIWHILSKDEDYTWNRPALLQWKLRKLELKAGHPSRRGGRQKGSAAAYSNKSVRDSERETIASAKDEYRRFVATWKQQSPKGRSGATKEVRRS

SEQ ID NO: 358659 - protein, 342 aa, unidentified
MQITTIGLDIAKNVFQVHGIDAAEKVVVRKQLRRSQVLAFFKALPPCLVGLEACATAHYWARELAKLGHQVRLMPAKDVKAYVKRNKNDAADAEAICEAVRRPTMRFVQVKSAEQQGRLMLHRTRDLLMRQRTQVINALRAHLAELGIVAAQGRDGIKELLKIIASDADERLPADAHASLVVLAAELRAMQTLIGSIEKRIMTQHRGNEASKQLRTIPGIGIIGATAIAATVTDPKAFRSGRDFAAWIGLVPRQDSTGGKQKLGPISKQGDRYLRRILVVGAHSVLRRAKLNPQKYPWLTQLLARRPFKVVAVALANKMARMAWALLAKGGAYRAPALAAAV

SEQ ID NO: 358660 - protein, 322 aa, unidentified
MNKYNETFGIDISKDVFDCYGSTQGHLQFKNTESGFKKFQKLLRKDSLVVMEATGYYHYRFAQFLYHQGFLVSVVNPLSVKRFIQMKLAKVKTDKSDAKAICNYGLSQEVPLYNALTEVQSECLQLFRLLDSYLKKRTMTKNKLHGEDVLGIPSKHVYRSLKRNRKHLDTEIASIETKLLSLVKQDQQAQLTLLKSIPGLGVKTALFLIVITDGFTKFETAAQLCSYVGITPTIRQSGSSVRGRSSISKVGNKKLRNLLFLCSFSACKHNKSCREIYERIVNKGKSKKLALIAVSNKLLKQAFAIAKSGNPYDETHVSLLSK

SEQ ID NO: 358661 - protein, 366 aa, unidentified
MKKTSTVRVNGNMIFKGHKLTIGLDLGDRWSYYCVLDEAGEVLLEQKLATTPEAMKQTFERIPRSLIALETGTHSPWLSRLLKELGHAVLVAHAQKVELISKSNRKDDRHDARTLARLARIDPELLGPVRHRSAKAQIHLTVIRARAELVSARTALVNGARGLVKSYGQRLPKCGTEQVSRELAAELSAELREVLEPLLKEIESLNERIKEYDERMEKIARESYPQVALLKQVKGVGTQIALTYVLTLDDPHRFAKSREVGCFLGLKPGRRDSGESQPQMRISKEGDRYLRTMLVQGAHYILGPFGEDSDLRRWGLRLAERGGKNAKKRAVVAVARKLAVLLHRLWVSAEVYEPLRNSHKAMRAAA

SEQ ID NO: 358662 - protein, 309 aa, unidentified
MFIGIDVSKKKLDVAARPSGEQWSVGNDEKGVVELCERLRQLSPTIVVLEATGGLELPVATALAVTRVPVAVVNPGQVRHFAKALNRLAKTDAIDAQVIAQFAEAVRPEPRPIADMEAQRFSELLTRRRQLVEMLVSEKNRLAVATTKPVKQRISYHLHFLKEELKSLDQEIDTQIRASAVWREKDDLLQSVPGVGPTVSRVLIGELPELGTLTGKEIAALVGVAPFNHDSGNLRGQRHIFGGRAYVRTMLYMAAVSAARCNPVLKRFYAKLRAAGKPAAVALTACIRKLLVILNAMVRDQRPWAPEAA

SEQ ID NO: 358663 - protein, 523 aa, unidentified
MAHSATRKRSRVRRVDVVQKPSGTFHPRVQKVGPEHFGIVAIDCAKARSKWMLADFYGNVIVRPTLLAHNRPALEAALDQLRQAIRERDLKDVLIAVERTGRYHRTVQRAFANAGFDTRVVHPFATKQFRQPADPGNKTDDTDLAAVHRAAVSGFALVEAELDEAWVTLRLLIRHRRELVRKSAMLRSQIREHLDAAFPGFAANFADLWDRDCAWHLIRHFATPADIQAAGLDGLSRSLDAADVRFQRRTLETILTWAEQAAAPDLATAARRRFALALDDDLVQKAREIQAIERDIAAALGRTPYVLLLSFPGVNVVSAADFAGEMGPIEHYANSRAITGRAGLRPSRYQSDAVDRPNGPLVRCCNRKLRAAILRVADNLIKCNHHFNILAHQWRELKKDPRHTHVKVALRFCRIAYQIVAGRQVFHHPCRQERHYVLAKLMAFQREHDTGSAESLRDLQAALEQVPVREHRAEAKPLHEELNTIQRGGRRGPQLLGDILPIVLARLGVGDVQSRASGEEDPA

SEQ ID NO: 358664 - protein, 349 aa, unidentified
MTELSLIGIDTSKSWFALHGVNSAGEPVLHLNLRRGQVVAYFRKLPKVVVALEACGGSHHWARQLRVLGHEVRLIPPQYVKPYVKRGKNDRVDAAAICEAAGRPGMHVVPIKSKQQQADAMVLKLRDTLVDQRTQLINALRGHAAEFGVIAGKGSAKIATLRAAIAADPEIPDTGKEMLALLGAQIDHLDEQIGDLEARLTRMHKATPLSRLLTTAPGIGPITALTSVLTVDPAAFDSGRHFAAWIGLTPQQHSTGGKTRLGGISRAGNERLRTLLVNGATAVIDAVLRRGSKLATPWLLKLLARKPKKVAAVALANKNARILWAMMTTGEAYRRPGGAVPAAATAEVS

SEQ ID NO: 358665 - protein, 313 aa, unidentified
MPVALSNPIVGVDVAKNELVIYQADSDLLEAIPNTKTAIKQWLKALLGPVSIAIEATNIYHLEFADLAYAAGCTIYMVGGYELKHYREGVKIRAKTDALDAKLLARYLKNEAEELRPWTPPSPLYRQLLSLFRRRAALVQARVGLVQSWSNEPLLKAAFAEQIKSMQRLETMIEKTINDQLKQAGLLGQLKRCLKVEGIGFLTGARLLTAFQRGEFSNADAFIAFLGMDLRVSKSGQKDGRRSLTKRGDPEARRLLHNAAMSASRTKAWKGFYEAQRARGFSTTQALVMLARKLARVVFALLKGQSEYQTKVS

SEQ ID NO: 358666 - protein, 480 aa, unidentified
MAPARNPLMNRKRRKELARQLRSEDPGLEVLHPNAAGIDVGNNAHYVAVRPDRDPQPVRRFECFTADLHRMADWLHRSGVTTVAMQSTGVYWIPLYEILDARGFEVYLVNARYTRNLPGRKTDVQESQWLLKLHTYGLLSNSFHPTAEIRTLRIYWRQRGDHVAAIGTCIQRMQKVLTQMNVQLANVISDLSGRTGQAIVRAIVDGERDPEKLAALRDSRIRASHQEIAKSLEGTWRPELLFVLKQEVDMYDTYLRRLTECDRELEAHLQRFAAKLPPTPSSPTPTATPTGPSNTPTRRTKRNKKPQGHAPQFDLGRELQRISGVDLTRIDGIDVVVAQTIISEVGVDMGPWKDEGHFASWLGLSPDNRVTGERIIGKGTRQVVSRAATALRMAASTLLKSQSYLGAQYRRFRTKLGAPKAITAMAHKLALLVYRMLKFGHEYVDKGASYYEERHRQQQIALLKKRAAKLGLQVVQPQAA

SEQ ID NO: 358667 - protein, 331 aa, unidentified
MKIRETVGIDISKKTFDAYLHVNRKYKQFSNKPKGFISFIKWVERCSGLSINEVGICFEHTGLYSLPLACHLNDREVTYSMVPAMEIKKSLGLIRGKNDKVDAQRIAEYAYLRRDVLEPYKLPSTQLLKLQKLNALRARMIKQRSGYKASLTEYKTLLVRKDNLILFQEQERMIQHLDKVLKRLNNEIQNIIDQDKQLSHHNKLITSVKGIGPVLAAYFLVTTNCFSSFNDGRKYACYAGVAPFAKQSGTSLNSKARVNHMANKKMKALLNLASGSAIQADPELKAYYKRRTEAGKSKMSTLNIIRNKLINRVFAVVKRGTPYVPLHQFAA

SEQ ID NO: 358668 - protein, 418 aa, unidentified
MKPWNEITHYAGLDWARDHHAVVIVDQTGKIVSEFEFSHNLKGWKTFSEKTSAFANLAVTLETNQGIVVAQLLQRNYLVYPINPVAAESYRKRKVPSGTKTDFFDAWSLAEGLRMDGSNWKGLQPSDELTVQLRLLCRDEITLIENRTQLVNQLQQALVEYYPAALEGFNDWTMPSTWDFIIEFPTSEVLVKAGKRRWEKFLHTHKLWRPDTAANRLEIFARADQFQGSPAAIKAKSQMALSLCKLLRTLQQQLDEYRRPIETLFESHPGHELFGSLPGAKKMLAPRLLAAIGTDPNRYGNEAGVLQAFAGTAPISFESGQISKVRIRRACDTFLRHTMHLWADCFRHASAWGGVYYQNKRKAGMSHACALRCLGQRLLKIVFRMIETKTPYDAELHARNQQKHGSWILKLMDKPTAA

SEQ ID NO: 358669 - protein, 355 aa, unidentified
MTATIVGEARPVTGRAASTGGAGTHADTHVAAALDPVGGLLGVREFPAAAAGYARLLGWLGGFGTVCLAGIEGTGRYGAGLARHIGGAGIRVAGVDRSDRQDRRRQGKSDPLDAVSAARAAQSGRARGAPKGRDGAVEAIRTLMVARRSAAGERTRTINQARALLLTGPDDLRVRFARHTAAALVTGLASLRPRAGGVAGHATRIALRELGRRAQFLDGQLGRLDELIVPLVTARAPGLLALFGVGPRTAALLLIAAGDHPGRLRSEAAWAHLCGAAPIPASSGKVTRRRHCPGGDRQANHALRRIVFTRLGSHPATRAYAERRTAEGKSKAEIIRCLKRYVAREVYPHLRPAGG

SEQ ID NO: 358670 - protein, 334 aa, unidentified
MDKVTTVGIDLAKRVFALHGVDASGRVVLRKTIRREQFVETVAKLPPCLIGMEACSGSHEWARRFQALGHTVRLMAPVFVVPYRKSGKNDGNDAEAICEAVSRPNMRFVPVKSAEQQALLALHRVRQGFIEERTALINRLRAVLTEFGVVLPNRTQWVRRDAVAVAEPLPVLARQAVEDLRAHLTQLDERIGAYDRQLEQQARQSEAAMRLMQVRGIGPLTAVAIVATVGSARDFTSGRQFAAWLGLVPRQNSSGGKARLGRISRRGDAYLRMLLVQGARSVLNTAARHTDRLSLWALSLQARRGMHKALVGIAAKNARIAWALLSKDQTLRTA

SEQ ID NO: 358671 - protein, 358 aa, unidentified
MSQRNEISFKGKNIYVGIDVHLKSWTATILSESIHLKTYRLDPSPDVLYAYLSRTYPGAIIHSVYEAGFSGYSAHWRLKELGIDNMVINPADVPTTGKEKLRKTDAVDSAKLARSLRNGELKPIYIPSRTAQELRSLTRLQASVTKDQTRIKNRIKGYMHFLGIDIPPRFSGAACWSHAFTSWLSSVATVTPHGKYVLNSHIGQLKTLREERLSLLRQMRSMAKVDPLASQVALLRSIPGIGDITALRLIAEIIDINRFKDSNHLAGFVGIVPMCDKSGDDSAEDNGGITIRANRTLRGAIIEASWVAIKKDPALTYAYENYCKRMKGTNAIIKIARKLVNRIYFVMKHQAVYVPSIL

SEQ ID NO: 358672 - protein, 312 aa, unidentified
MTDIICGVDVGAATLDARIGRHGPWRQVANTPDGHAELATFCREHGVGLVVMEATGGYERAVFGALWAEGLPAAIVNPRAVRRFADGMGVLEKTDRIDCGMIAWYAQTKAVRPTPLAAPTQARLTALVVRLRQLTALKVAQANQARLVTEPAVLASFTAVLAAAAGQIRALEAHIAQAIADDPVWAALDRTFHTIKGVADRTVAHLMAEMPEIGTLSNKAVAKLAGLAPIANDSGRRAGKRPVRGGRAGVRGVLFVVAEIVRRYEPDFADLHHRLSQAGKPKKLIRVALARKLLVRLNAKARDIRRDLAIAP

SEQ ID NO: 358673 - protein, 419 aa, unidentified
MSFKILKFNCCGLDVHKTWIYACIGITDPNNRTEYKQARFSSFTKGLNELCNWLAKYNCTDVCMESTGKYWIPVFNILEQHNLWVTLSHPKYTKPMKGNKTDRKDAKWICDLYMCGMVKPSFIPPADIRELRDLVRYRYKLTCMRTGEKNRAQNCLTVSNLKLDDVFSDVFGKSSRSITEQILQHPGENFDVTPFIHGCCKTPIEEIQAAVDGAISNEQAVKLRQCLDHIDELNKHISEVEQEILRLSDKYEAALNLIRTVPGFDKNPMTAIQVLSEIGCDMSVFPTDKHLVSWAGCCPRNDKSDRKIKSTRISRSGSYFKPVLVQVANALIKSKKHPEFITRYKRIKARRGHKKAIIAICRMILTAIWHILSDLKPYTPEGFLESRPVKEEKILTTSQALNLLKLRGYVIKDDPLPAS

SEQ ID NO: 358674 - protein, 370 aa, unidentified
MNEDSVVYVGVDVAKAKHAIAVAESGRSGEVRYVGEIETTSAAVERFVRKLAHKHPRLHFCYEAGPTGYGLYRQLVALGHACEVVAPSLIPKRPGEHVKTNRRDAVTLARLLRAGELKGIWVPDAVHEAVRDLVRAREAAGEDLRKKRQQLQSFLLRHGRTFTGRKAWSPAHSRWLAAQKFEHPAQQIVFQDQVDVIADASKRLERLDAQLVELVPTWSMAPVVAAYQALRGVSFVVAVTFVSEVGDVRRFDSPRQLMAFLGLVPSERSTGETVRRGGLTLAGNRRARRVLVEGAWSYRHPARVTETIRVRLEGLPKEVREIAWKAQTRLCARYRRMTAAGKKAPIVIAAIAREMAAFLWAISRQVEPVR

SEQ ID NO: 358675 - protein, 427 aa, unidentified
MSYKIAGIDVHKRMLAVVVSEVEVHGEYGFERRPLGTSPAQLQALAAWRLEQQVEEVVMESTAQYWRPVWGALERYWQPGCRKREEAGPTSGGLHLAQAQSNRGPRGRKNDFADAERLVRRLVANELRLSFVPDPEQRLWRTVMRTKYQLRCNQVQLHNRLEALLEEAQIKLSSLVSDLLGTSGRRMLQALAEGESDPAALVALADRRLRATREQRCDALGACRDLHPLYRKLLKAALEEWQRIETQIRQLEEEMATLLSKQQDQVRRLAEVPGLGVDSAQQIMAEVGAQAAAFPSAGDLSSWVGACPGKNQSAGVNTSSRSPKGNRHMRRILNQAANAAAKLKGSIFALLYRRYVTRLGHNQTIGILAHRLCRLLWKILHQGVRYQERGPAVSQKSAQSRAKRMIRELRSLGYRIELVTSPAGVAP

SEQ ID NO: 358676 - protein, 409 aa, unidentified
MRLLVGDDWAEDHHDVEVLDAAGRRLARARLPEGVAGIARLHAIIGELAGQDVEDEHVEVLVGIETDRGPWVAALVAAGYQVFAVNPLQAARYRERHTVSGAKSDTGDAHVLADMVRTDAHQLRPVAGDSAQAEAVKVVARTHKTLIWERTRHTQRLRHALREYFPAAVQAFEDLDAPDALELLAKAPDPASAARLTRAQIRAALKRARRRDIGAKTERIWAVLHAEHLGQPEVVTGAYAASVRSLVAVLRVLDQQIATLQRQVVAHFGRHPDAEILASQPGLGQILGARVLAEVGDDPTRYATAKAGKNYAGTSPITRRSGKTKLVTARSIHNDRLIDARMTQAFAALSASPGARASYDQLRARGAGHNAALPQLANRLVGILHGCLKTRTRYDEATAWSHHSQTLAA

SEQ ID NO: 358677 - protein, 400 aa, unidentified
MSVEYAVFLGLDVGKGEHHACALDPSGKKLHNKALPNDEQRLRTLFTQLGRHGRVLVVVDQPASIGALPVAVARDQGCQVAYLPGLTMRRLADLHPGNAKTDARDAYIIADAARTLPHSLRRVDTGQEALAELEVLVGFDDDLAGESTRLVNRIRGLLVTIHPALEKALGPRLHHPAALELLITYGGPDGLRAAPADDLLATTKPLAPRMAGRLVEAVKTALDAQTVVVPGTTAAVTVLPHLARSLRSVHDQRDQVATQVEEILDAHPLAKVLISMPGLGIRTSARILLEIGDITAFATPGHLAAYAGLAPVARRSGSSIKGEHPPKGGNKALKRAMFLAAFASLSDPLSRAYYDRKRAEGKKHNAALICLARRRSDVIYAMLRDKQPYQPTRKLTAQAA

SEQ ID NO: 358678 - protein, 400 aa, unidentified
MISVGIDVSKGKSTVCILKPYGEIVSKPFNITHTQKDLSELSSMLFRLNDEVKIVMEATGIYHLPVLTYLQEKGFFVSVINPYLMKSYRNESLRKAKTDKIDSRIIANYGIDHWFKMKEFQTSGEIYEELKLLGQQYRHYMKLHLLSLAELTHLLDLTMPGIKNLLASWNETNRKDKRSDFVERFWHYDVITSTSEQEFTEEYILWAKEKKYVPSQEKAKVIYTLAQESIPTLPSETSSVKMLVTEAVRVLKEVDATLGLILSRMQEIAKTLPEYSVVREMGGVGNTLAPKLIAEIGDVRRFRNGKALVAFAGIDPPPYESGQFVGCNRKISKRGSASLRKVGYETMRSLKMRSRPEDPVYRYVVKKESEGKSKKSAKIAGLNKFLRIYYARVTELYKNI

SEQ ID NO: 358679 - protein, 353 aa, unidentified
MNSRGCLYVPGIIVGVDTHKDEHVAVVVDKLGVRIGQRSLPTTNMGYVSLERWASGLGEIDAFGVEGTGSYGAGLARFLRGQGHKVLEVNRPDRSTRRRLGKSDPTDAEMAARSVLAGVARDQPKSGIDKVEMIRMLKRTKDSAMKSRIQAINQMKALIVTAPVELRAVLRGLITNQVVARCARWRHGQLGTPAAAAKYTLRSLARRHIQLTQEIEALDAQLARLTTAFAPALMESFGIGPDTAAALLVTAGSNPERLKSEAAFAALCGVSPVPASSGKTNRYRLNRGGDRKANAALYRIVIVRLRYHDRTKTYFQRRMEEGKTKTEVIRCLKRYVAREVFSILHDIGKRCMA

SEQ ID NO: 358680 - protein, 371 aa, unidentified
MDHSTFVGLDVHKKRTSVALAEAGRGGEVRFHGEIPSTPDAMRRLVEKLGRPGRRLAFCYEAGPCGYGMHRLLRGLSQDCIVVAPSLIPSRPGDRVKTNRRDAVALAKLHRAGELTEVWVPDDAHEAMRDLVRARATARRVLGKARQHLQGFLLRHGRVYSGKRGWTQAYRRWLTTVRFDHPAQQIVLQDYIHAVEDGEVRLACLEQQIEELLPSWSMAPVVEAVQAMRGVGLIVAVTVVAEVGDFSRFANPRQLMAYLGLVPSEHSSGASVRRGGITKAGSALARRVLIEGAWTYRMQARVSRKLLDRIEHLPKEVRDTAWRAQQRLCNGYRRLAAAGKPKVVVTTAIAREMVGFIWAIACMVQPRPAIR

SEQ ID NO: 358681 - protein, 321 aa, unidentified
MNASIFVGIDIAKFSLQIACLELKLETQLPNSLVGWNRLVKLLKIHGAIVLLICEATGGLERGLVDQLQKADLKVCVLNPRQARDFARALNRLAKSDKIDAAMLAEFGRRMEPRPAAKVAPWVRTLAALVGRREELTAMRTAENNRLEQNLLSFVAKQLNASIKRFTKDIQALEVQIDRLMESSPELKTKHQLLCEVQGVGSITASTLLATMPELGSLESNQVANLLGVAPLNCESGQWRGKRRIYGGRRFARRVMYMASLSATRHNEILKTFYRRLVLAGKPKKVALVAVMRKLIIYLNRVLQPKHIGTFPPPTAQAPCF

SEQ ID NO: 358682 - protein, 340 aa, unidentified
MTQYKRIAIDTSKAVFTLHGIDHQDRVILQRNLRRAQFLPFFEKLPPTEIVLEACGGAHHWGRELTALGHSVRLLPPQYVKPFVKRGKNDRNDAGAICETGARPGIHPVPIKTVEQQAQGMMLKVRETLIGQRTALSNTLRGLAAEFGITTAKGLGRLAELLATIAADPALPVEAKDSFIILGEQLGRLDEQIKMLEKKVAAAHKANPLSTRLATIPGLAAIGSLMVATRVNADDFASGRHFSAWMGIVPKEHSTGGKQRMGGISRAGDERLRQLFVLGATSVIKAVTRPGGSKLASPWLLKLLERKPRKLVAVALANKMARTAWAMMKSGEVYRRPAAA

SEQ ID NO: 358683 - protein, 375 aa, unidentified
MKEKLRFLGLDVHAETIAVAIAEPDGEVRGLGTIPNRADSLRKLIKKLGPAEKLRVCYEAGPTGYVTYWQLAELGVKCEVVAPTLVPVKAGDRVKTDRRDAEKLARCYRSGDLTAVWVPDEGSEALRDLVRAREAAKQDQLRARHRLSKFLLRSGQRPPSGIRPWTRPYLIWVAQLRFTQMAQEATRIDYLHEVEHMRERVARLEQAIAEAVKLASPALQQVINDLQALRGIADISAVTIAAELGQVSRFDGARQLMGYCGAVPSEDSSGKRTRRGSITKTGNAHLRRIVIEAAWSYHRPPCIWYGLRKRQESISEEAKEIAWKAQHRLHKRYMRLAAAGKDKRKITTAVARELLGFIWAIGTRAETVARQRIAA

SEQ ID NO: 358684 - protein, 419 aa, unidentified
MSFKILKNNCCGLDVHKTWIYACIGITDSIKRTEYKQARFSSFTKGLNELCDWLAKYNCNDVCMESTGKYWIPVFNILEKNNIWVTLSHPKYTKPQKGNKTDRKDAKWICDLYMCGMVNPSFIPPADIRELRDLVRYRFKLTCMITSEKNRAHNCLTVSNLKLDDVFSDIFGKSSRSITEQILQHPGETFDVTPFVDGRCKTPIEEIQAAVDGAVSQEQAVKLRQCLNHIDELELHKAEIEREIFRLSENYESVLNLIRTVPGFDKNPLTAIQVLSEIGGDMSVFPTAKNLVSWAGCCPRNDQSNRKIKSTRISRAGSYFKPVLVQVANALIKSKKHPEFATRYRRIKARRGHKKAIIAICRMILTAIWHILTDLKPYTPEGFLESRPVNKEKVLTTSQALNLLKQRGYTIKDDAIPVT

SEQ ID NO: 358685 - protein, 338 aa, unidentified
MNKITVIGLDLAKNKFHYVGCNRQLKIVQRKQLSRSHVLSHFANLPRCRIGLEACASAHYWARELESLGFEVKLISPQFVKANLRGNKNDYNDALAIAESAVRGEMRFVPIKTTAQQDLQAVHRLRARRIAERTALCNQLRGLLAEYGLILPQGVSTLRNRLPGILEDAENSLSQLIRPMFWQGYHHLLWLDEQIEVFTTQLKQISQQDDSIRRLQTIPGFGQVVSSAFAVAIGNGSGFQRGRDVSASIGLVPRQHSTGGKNTLLGISKRGDKYLRSLLIHGARAVVSRAKNKDDRLSQWINRIRERRGFNKAVVAYANKMARMGWAVSVQQSNYRTI

SEQ ID NO: 358686 - protein, 371 aa, unidentified
MGKHRLAYVAFDSAKNKHAVAIADSGRGAEVRYLGEIDNSPDAVRKLVAKLTRQYERLHFCYEAGPTGYGLHRQLTELGHVCDVVAPTMIPKRSGDRVKTNRRDSVALVKLLRAGELRAIWVPDSVHEAVRDLTRARETAMVDLKTKRQQLLSFLLRHGRSLPDGRNWTKTYERWLAKQTFAHPAQQIVFQDQLEAITSAQARLAGLEQQLREIVPTWTMAPVVAAYQALRGVSFLVAITFVAEVGDVRRFATPQQLMAFLGLVPSERTTGDTVRRGSITKTGNHRARRVLIEGAWTYRFSARVGETLRTRLKDLPSSVRAIAWKAQVRLCGRYRRLIARGKKTPVVTTAIARELSAFLWAIGQQVAPQTG

SEQ ID NO: 358687 - protein, 426 aa, unidentified
MTYRIAGIDVHKRMLAVVIADVGADGEYQFERRKVGTSPSEMCRLADWLVAEQVEEVVMESTAQYWRPVWATLEQRWRPKRLQEGGGARSGQLHLAQAQSNRGAAGRKKDFPDAERLVKRLVAQELTLSFVPDGEQRLWRTIMRRKHQLTRNRVQFQNRMECLLEEAHIKLSSLVSDLLGKSARRMLQAVAEGATSPEAIAALADQRLRAPAQQLCDALGACRDIHPVYRRLLKMALEELKLIEEQIDKLDQEMASLLSAHQDVVQRLAEVPGLGADSAQQIIAEVGPAAATFPSAKHLASWVGVCPGEEESAGVNYSHRSPKGNRQMKGLLNQAANAAVKTKGSIFEFIYRRLVVRLGHAQAIGAIAHRLCRLIWMILHRAIRYQEHGPAVSRSKTERRAAKMIRELRRLGYQVEPMGGQTGASV

SEQ ID NO: 358688 - protein, 364 aa, unidentified
MLIIGCDYHPGFQQIAFVDMETGELGERRLAHREEAEQFYRELKQRNLSVRVGMESSGHSRWFERLLQELGFELWIGDPAEIRTKRVRKQKTDRQDAQLLLRLMMEDRFPQIWVPDAANRDLRQLLWHRHRLVQMRTRVMNQLHVVPLNEGLRRKKALWRPAGRKELESIALAPWASRRRQDLLDLLDQLTPKIQELTRALEEEVEKRPVTRLLMTHPGVGPLTALAYELVIGTPERFHCGKQLASYIGLVPTEESSGDRRRLGHISKQGNVLLRFLLVEAAQVTVRSQQEWRNKFFHLAMRRGRKIAKVAMARKLAVHLYWMWRQGCDYDQTQKLGSHAGEPGHLDGEQSITDVMIGHPAPSK

SEQ ID NO: 358689 - protein, 338 aa, unidentified
MKITTVGVDLAKSVFTVYGVDEHGKPALRKTVRRGKLLELFAQLPACVVGMEACSGAQHWARELRELGHTPRIMAAEFVEPYRRGGKNDTNDAAAICEAVARPQMRFVPIKSVEQQAVLAVHRLRQGLVEERTALANRIRGRLTEYGLVIGVGLDRLRKALPSILEDAENGVPGIAREVFADATRQLIELDARIGEYDRRIAALARASEPAQRLMKMEGVGPVTATAIVASVGDAKMFRNGRQFAAWLGLTPRQHSTGGKQRLGAMTKHGDVYLRTLLIHGARAVLRVTPTHSDAKSRWAESLRHRRPDNVAAVALAAKHARIIWALLARGQHYRPAV

SEQ ID NO: 358690 - protein, 352 aa, unidentified
MRQAKHADFSGQNIYAGVDVHKKSWRVSIYTEAFEHKTFTQPPDAKKLVAYLERMFPGGDYHAVYEAGFSGFWTHDELARMGVNCTVVHPGDVPTTDKERRHKTDSRDSRKLAKQLRSGTLEAIHIPSVLQRENRCLVRQRKTVSRDAARVKTRIKHFLHFHGINIPPRFNSGYLSANYLNWISQRSLSCDAGQATLISLLRQYKSHRKELTMLNREIRSLSRTPAYQEDVNHLISVPGIGRLSAMIWLTELGDIHRFKSFDKLCSYIGLIPIEHSSGETVHTGSLDHRGNKILRTLLIENAWVAVRSDRELIAAYHQYIGRMKGQMAIIRIARKLLARIRYVLMHKCDLDG

SEQ ID NO: 358691 - protein, 372 aa, unidentified
MVVIGTDTHKETHTCGAVDALTAAARAELTAPARKGSFGKLLRWARGIDSERVWAIEDCRHVSGAFERFLIARGERIVRVAPKHMAGARRSSRERGKSDSIDAFSVARAALKEGLENLPGAHLDGAALDIRLLVDHREDLIAARTSDQQRLRWHLHDLWPEFEIPVGALDTTKWLGKAARRLSRAQQTARVRIARELVRQITARTSRIRELETELTALVESYAPQLLTERGCGPLTAAKLIGEIAGADRFATDAKLARTGAVAPIPASSGTTNRHRLDRGGNRQLNCALHRLAVNKGNWDPDAAAYLARKQTEGKSRKEALRCLKRHLARRVWKLLHTPGANQDPRSDNNLNTNNNPAPITGTAPMIMRCLT

SEQ ID NO: 358692 - protein, 357 aa, unidentified
MTQTIAVSQFTLALDLGDRRTRFCVLDASREEVAQGVVATTSAQFESLAAKYPGARVILEAGSQSPWVSRLFQRLGHEMQVADPRRVQLISMDPRKCDRRDTELLARMGSAMPELLGSIHHRGEQAQAHLSIVRARDLLVRMRGTAVQQVRSICKAFGVRLAASSTSCFSTRAAAAIPALLQPALAPILEVVAELSQRIRAFDRTLAKLAKEHYPEVQHLQQIDGVGPVISVAFVLSVEDPKRFRSSRKVGAWLGLCPRSHASGDSNPQLRISKAGDARLRRLLVQGAQRVLGRFGADCDLRRYGLAIAARGGKTAKKRAVVAVARKLAVLMHQLWTTSANYDPLHHAKRRAAAAAI

SEQ ID NO: 358693 - protein, 419 aa, unidentified
MSKQPVELAAFIGLDWADEQHAVCLQEAGTTSREPSKLDQTPEALQAWIQQLRTRFGGRPVAIAVEQARGALIYALMHVDFLQLYPVNPQTLAKLRQAFYPSGAKDDPGDAGLLLEILLNHRDHLRLWVPDDVLTRSIHLLTEGRRKLVDERTALTNQLTAALKMYFPQALDWFGDLHTARACAFLQRWPSLQQLQGATTSSVRKLYQRQGYRGEDKLKKLIQNIQQAHPLTEDPAVVLASTMMVHALVKQIPSLTDSIQEYDRQIASLFKQHDDSTLFGSFPGAGPTLAPRLLAAFGSDRNRFEYAAEVQQLSGVAPVTEKSGKACWVHWRWACSKFLRQSFHEFAGQSILKSVWARAYYQQQRQRGKSHHAALRALAYKWIRIIFRCWKDRTPYDEATYFKSLQLRGSSLASALKTT

SEQ ID NO: 358694 - protein, 394 aa, unidentified
MKLIGIDIGKNKHFFCVMDQQTGEIISQPVSFSNDKEGFDFLVQEIKSYPKDSILIGMEDTGHYHFALLKYLLDLQYTVALINPKTTDFNRKMQGGITKNDKLDTINICDVLDTPERKKQYRITKVNSFDLYEQKQLTRHHHNLKEEENVYKNRLQKCIDIVFPEFNKLFNSKYGTVYMNILKMFGSAENIANTDIRTIRKCFEIEGRGNRISLTPERLKECAISSIGISSSAEVIQIKHLTAQIELIEEQLTEIDKKIEEFSIQNNSPILSIPGISHFSGTSILAELGDISNYSKPSQIIKFAGVAPLHYESSQFNAQHTAITKKGSKYLRKTLYQIILPVIRHNPVFNKYYQLKISQGKGHRCAQGHCVRKLLRIIYHLLKTNQQFDPQLLR

SEQ ID NO: 358695 - protein, 407 aa, unidentified
MVDTTAIDLFLGLDLGKEFHHAHGRTRDGRTVHDKRLPNTEPRLLELFTRLVAKFGTVLVIVDQVANIGALPLTVARAAGCRVAYLPGLSMRRAADLHPGEAKTDARDAFVIAETARTMPHTLRAVDRDDEVLAELTMLTGYDNDLAGEVNRTTNRLRGLLSQIHPSLERVLGPRLAYPYIQALLQRHGSPARLKKLGRARCESLLKAHGSRKAHHLTAEIFDALAEQTLVVPGTEASALIVPGLAAQLAAAHTQRRQAEQEIAALLEALPLFHLLTSLPGLGVRTTAAVIVAIGDGTGFPSAGHLASYAGLAPATKSSGTSIRGEHAPHRGNRLLKRALFQAAFAAIGCKTDPSSRTYYDRQRARGKTHTQAILRLARQRVNVIHAMIRTGALYEARTPGDVDLAA

SEQ ID NO: 358696 - protein, 345 aa, unidentified
MSQQYVGIDLHRQYVGIDLHRRRSVIVRTDAVGTVLGEARIENDPLALAAEIAKAGPAPEVALEATYGWYWAADLLAECGARVHLAHPLAIKAFEHRRVKNDRIDATLLAELLRMGRLPEAWIAPVPVRELRELVRYRHKLVDIRSGLKSQVHAVLAKEGVRVPMSDVFGVAGTQLLDDLELGDAYLVRVESLRDLIIGLDAEVTMLDRRIHERLATNPSYRAVQQIPGVGPVIGAVFVAELGDVTRFRHANQVASWAGLTPRHRESDTKIRRGQITKQGSRLVRWAAIEAARAPRAHSWLKTHYHHLAQRRGKNIAAVAIARKIVTLAFYALRDGELRCLTRTA

SEQ ID NO: 358697 - protein, 366 aa, unidentified
MKKVSIVRTEQSRNIWQQRLTIGLDLGDRNSWYCVVDEAGQIQLEQRVRTSAKGLQEVFGAMPRSRIALEIGTHSPWISRLLRELGHEVIVANARKVRLIGESRKKDDRLDAQTLARLARIDPELLYPVKHRSAQAQADLAVIRARAGLVRARTGLVNTARGLAKSYGERLRGCNVRNMDPEKAESLSPELQAALEPLLAAIESVSERIVEYNDRIEALAQQRYPQVELLKQIKGVGTLIALTFLLTLEDPHRFRKSRDVGGYLGLQPGRRKSGQSEPQMHISKEGDPYLRTLLVQGAQHILGPFGMDCDLRRWGLKLAERGGSNGKKRAIVATARKLAVLLHHLWVSGEVYEPLHNSARIVAAAA

SEQ ID NO: 358698 - protein, 331 aa, unidentified
MSFSKIVGIDVSKLTLDVHFLPDRQVFQAENDTKGIKRLIRTLVKECRINPSDTLFAFEFTGFYSYRLAVCLQELGYPIVMLPGLELRRSTGISRGKSDPVDAEMIAGYTYLRRHKIVPMQMIEKEIEQMKRYLSLRDRLVRQRAGFKSTLSEAKRAIGRKEDPLYFKIQEEMVKDLTLQIKHLDKQLKQLVENNPELKKLFNLIVSIKGVGSQTALYMIALTHAFRKFPTSRKFACYAGIAPFPYQSGTSIRGKTKISHLANKKIKSLLGNITGCAIQHNTEIRLYYQKRIKAGKNKMSTQNIIRNKLLARIFAVVKRETPYVDIMKHAA

SEQ ID NO: 358699 - protein, 374 aa, unidentified
MADYNEVFVGIDTSKLRNAVAVAEGGRNGEVRFHGEIENTEAATSKLVKKLAAQHQRLTFCYEAGPTGYGLYRLIKTLGHECVVVAPSLIPKKAGNRVKTNRRDALNLAKLLRAGELTAIWVPDARHEAMRDLVRAREAAVDDLKSKRQQVLSLLLRLGRHFTGKRTWTRAHMNWLASQKLAHREQRIAFEEMLLAIRQANERVMRLEGAIAAAVPDWSLAKVVTALTALRGLDLISTTIFLAEIGDLSRFASPRQLMAYLGLVPGEESTGDRVWRGGITKAGNHRARRILVECSWSYRHPPRVGKKKLAKVEAAPPTVQEIAWKAQARLTARYRALARRGKRPTLVVTAIARELSGFIWAASRAAGAPATSTM

SEQ ID NO: 358700 - protein, 407 aa, unidentified
MDVHRDFLIACIAATNTQGVTEYQSRRFSTYTGSLRELRDWLLANDCKDVCMESTGKYWFPVHNILEESCHVVVSHPKFVKAIKGKKTDKKDAQWIADLFKHDLVRGSFIPPKDIRQLRDLCRYWVKLSSYMTGEKNRAQNCLTVSNFKLDDVFSNVFGKSASAITTQLLEHPGEQFDVAPFVDGRCKTPIAQIQEAVDGIFTYEQAEKLKIIRGHMDSLERHKAELESLILEIAQNYLPQIELLLTVPGIHDAFTAIRILAEIGADMTVFDTSKHLCSWAGLTPQNAESAGKKKTTRIGKSGAYLKPLLIQVALAASRGEKHPEIYGKKQALQKRRGKKKAIVAIARRLLTAIYHILSKNEPYNPAAYIQEDKNPMARQISQEKAFEMLARMGFIVSNPSPLSSSG

SEQ ID NO: 358701 - protein, 355 aa, unidentified
MNDAKYIGMDVHQATISAAVRDSRGNLVMEAILETKAETILQFIRGLRGILCMTFEEGTWAAWLHDLLQPHVTRVLVCDPRKNALLKVGNKNDRIDARKLSELLYLNKLSPVYHGEAGIRPLKELARSYIAMTRDLTRVMSRLKAIYRSWAIPCAGKQVYATRYRAEWLAKISEAGVRRRAELFYQQFDALAALRQQARRELLAEARKHPAMRLLRQVPSIGPIRAALLIALMQTPNRFRTKRQLWAYCGLALRTYTSGEYRFVGGQLKRSKKVLAIRGLNINHNHDLKNIFKGAATRAASTVGPFQDFYQACVARGVKPHLARLTLARKIAAITLLVWKKGVRFDAEHLKQQAA

SEQ ID NO: 358702 - protein, 481 aa, unidentified
MKAKPQEKIQKATDPSTRGHWNEMNRKQRREIMRKIQSEDLSLEVVHPHAAGIDIGNESHYVAVPSTRDSQPVRRFGCTTVELKVMAEWLKQCGIRTVAMQSTGVYWIAVYDILEAAGLDVYLVNARDTKNLPGRKSDVQESQWLMKLHTYGLLRNSFRPSQEIRTIRTYWRQRNDLIRAAVSHIQRIQKVLTQMNIQLANVLSDVSGVTGQAILKAILAGERDPHKLAAFRNPRVKASEEQIARYLEGNWQEDLLFVLKQEQEGYEFCQQQMAECDRQLEQYLQRRDDRTQGASLPKEMRKGRLVRKKGNKPAFDMRAALFRITGTDLTQVDGIDVTTAATILSEAGWDMSKWEDEDHFVSWLRLCPDNRISGNKVLGKGRLPTNNRASIALRMAASTLRVSNTYLGAQFRRFRSKLGAPVAIKAMGAKLARLVYRMLRYGMKYVDQGAKFYEAQHRERQIGQLKWKAAKLGFRVVEAAA

SEQ ID NO: 358703 - protein, 447 aa, unidentified
MKQNKPSRKKNPKFPKHLQHLNQYAAGIDVGSRSHFAAVPEGADEQPVREFSTFTDDLERLAKWLISCGVTTVAMESTGIYWIPVFEILERYGLEVRLVNARHVKNVPGRKSDVLDCQWLQQLHTYGLLRGAFRPTDQICTLRAYVRQRATLVRSSASHIQRMQKSLAQMNVQLHNVVTDITGVTGMGIIKAILSGERNPNTLAAMRDKRCKNSKETIARSLQGNYRPEHLFSLQQAVELYEFYLQKIADCDQQILAQLKHFDSSDGSDPDSKPPRSVEEALQRMSGVDLSGINGISTNTALKVIAEIGIDMSRWKTEKHFTSWLGLCPGSKISGGKVLSSATKPVANRAAAALRMAAMTLFNSKSALGAYLRRQKSRLGAPKAITATAHKLARLVYSMLKHGTAFADAGQEQYEERYRSRIVQNLKRRAQEMGYKLVSIQEEPQTV

SEQ ID NO: 358704 - protein, 339 aa, unidentified
MKLYTGLDLHSSNSYLGIIDETGKRVYKQKLPNDRERILAALNPYKNNIAGIVVESTYNWYWLVDLLNGEKYHVHLANPAAIKKYTGLKFADDQHDAFWLAEMLRLGILPEGYIYPKEDRPIRDLLRKRMHLVRLRTSLIVSLQNILSRNNGFKLKTSDIKALTDDRVAPFLAGSEDLALAGMVSKESIDFLTRQIKKIETVIETRVELKPPYEKLQSVFGIGKILALTIMLETGPVSRFAKVGNYVSYCRKVSSKWLSNDKVKGKGNKKSGNKYLAWAYSEAAEHARRSYTQARTYYNRKMQKTNFMAAHNALAHKLARAAYYVMRDEVNFMPEKIFV

SEQ ID NO: 358705 - protein, 375 aa, unidentified
MKVYVGIDAHSTNFTLATRKEGTFNAENVSTYSPKVTNIVNYCNSIRKEHGNDCDITVGYEAGSLGFKLKRDIEEAGIRCIILAPTSIPGTQLNRKRQKKTDKRDAIAIANCLINHDYSEVYTPDEDDEAVRDYIRMREDHKKQLKVIKQQIGAFCRRHGYHYEEGKNYWTAKHLKWLKSLSMEGILKETLDEYLFSYETVSDRLDLMDKKIKEIAETDKYRESVHKLICFKGIKILTALALIVEIGDFTRFLKAKNFAAFLGLVSAEDSSSDDRNLYGITKQGNRFLRRLLTEAAQCFSRATLGKSKVLKEKQSGNTAETIAYADKANERLRKRYYHLVIRNRKCHNKATIAVTRELACFIWGMMTGNIHTALA

SEQ ID NO: 358706 - protein, 333 aa, unidentified
MPILKCVVGIDVSMETLETRFGTTDTDQHVILSPSKTFSNRLTGFKQLLRWATQSNATPEIPIVFVMEATGVYYERLAHFLFLNKRPVAVVLPNKIKNYAKSLQSKSKTDPLDAAAITRFGLDRQLTLWSPPSPTINALHNLSREYHALKATITSIKNQRHALSESFDPQRRSLARKAQLLKFLQHQCDQIQEELHQLIDADPDLARRVAKISTIEGVGFITVISVLAETHCFEHVTSQKQLASYAGLDVVFNDSGLRKGKTSISRKGNIFLRNAVFMPALSATRCNHQMKELYQRLIAKGKNKKLALIAVARKLLLLIYALWKNDSTYCPDY

SEQ ID NO: 358707 - protein, 414 aa, unidentified
MLKIVYPICCGIDVHKSFIVACIASTNEQGVTTYQSKRFSTFTGDLHRCAGWLSENNCKDVCMESTGKYWIPIYNILERTCNIVLAHPKYVKAIRGKKTDKRDAKWIADIFKHDLVTGSFIPPADIRQLRDLVRYRWKLTNFTTGEKNRAQNCLTVSNFKLDDVFSDVFGKAASAITDRILENPTEKITDVSCFRTKGMKATNEQVLAAVDGEMCAEQAAKLRIIRSHMDSLGICKLNLESLILSTAEKYLPQLTLVMTVPGIQSFAAIGIISEIGVDMSVFPSSKHLCSWAGLTPQNNESAGKKKTTRISRAGTYIKPLLVQCALCAIRAKQFPEVRNRYLALKKRRGHKKAIIAIARMLLTAIYNMLKKNEPYNPELYRKGDRPPAHREVSVDEAIFILQRQGYLVTAPPAS

SEQ ID NO: 358708 - protein, 399 aa, unidentified
MFAVGIDISKSKSVAAILNQDGSMHTSPFEFHHTQPELDAFIKYILNSNQSATILMENTGHYHYPVLKAFQEAGLPVCIVNAYQIKKFGDMDLRKAKTDKKDAVRIARYALEKSYSLVPYTSMEQKYEDLRFLARQYNQRMLTLKTNKVFLLNLLDETMPGITNILPLTSRTPETSLSVLFINRFKSYDRIKKMGKNRFLDAFEKIARKSRNRQTKTYGLAIYEAALRNITTRGENEYILAAQDQCLELVCESQKAADSIILKMQTLAETLPEYAVLRSMAGVGDRLGPLILAEIGDIRRFHSGKALNAYAGNDAPPYQSGTFESHNRHISKRGNAALRKYCFEVMQTLKLTRPQDDPVYLFLLKKEQEGKQYNVAKMAGVNKFLRIYYARAMETLKQQ

SEQ ID NO: 358709 - protein, 451 aa, unidentified
MEKVSTPVFDEIRRNVAGIDLAWRSETYVCGPRREDGKYDIEAFGTTTPELHRILMWLKERKVESAAMESTSVYWIPLTDLLEANGIAVVLVDTRMVRMVPGRKSDIEDCQWLQKLHSCGLLRGAFRPPEAVAAVRSILREKENVTAMRTQAIQQMQKSLDQMNIRVHHAVSDIDGKTGTAIVKAIVEGERNPAKLAELRDTRCKKSKKEIADYLTGTWREEHLFNLGQAFKTLQFLDDRLAEYDLKASEMFKALAAASGNPPPPPPDGKLTRKERNNPEGKADLCQIMGFDVTSIDGIEYDTARIIASEVGPKMGDFPTENHFASYLGLAPSLSKSAGKNVRQKKRGKKKSRAGIALRMAASTLHKSQTELGAHLRSVARRTDKKTAIKATARRMAHLIYRGVRFGKEYIDRGAQAYESRIRERSLNTIKKLIKSLNINSSEIAAAFTNI

SEQ ID NO: 358710 - protein, 403 aa, unidentified
MKTIKNNNIANNSLTLQNKTSKRTGTVHPSPGAITPRCSKNVPVPSPKSEQLPEPPSRESSNTQGRIYFTPSLQNKQCIIGIDVSKSSLHIASFPKVFSPFEIPYDSSEHWETLISTLHKFKPLLIVLEASGGYEKPVCKKLKEAGFKVEVVNPERVRYFAKSLGYLAKTDKIDARVIAHYGAVLVENGIVYGKEDKELEKLKELKRRRDQIVEMIVKEKNRLKQTEKGVLGEEIRRSIEKVLEVLEKEKRRLEEEIEKRLNEAKEIKRRVKLLETIPGVSTVTAVSVVVEMPELGKIERRKVVALSGLAPFARESGNLKGKRMIKGGRKRVRQALYMAVLAGIIWNKKIRGYYERLVEEKKKAKKVALTACMRKLLLIMHQMLKNGVGWQENYDGKNLVAAS

SEQ ID NO: 358711 - protein, 371 aa, unidentified
MRDADGVAGIDAHKQVFSVAVLDGRGGRCAVASFATSPEGLAEALALLDSFAFAVGRVGVEGSAGLGRHVTQALVAAGYDVREVQANRTAERRRRRRRHKTDREDAEAIARETLAHPDLPPAGKQRRPDPAWEELVAVRNRRKSLISQRVRLLNEAEAVLTGLPLTVRAVLPQTSRVRPRLRALQRGMASSVQVTAADQVNLAWLTETASDIARLDARVTELAKKIPPLLGRLGSTLTQEHGIAEVGAMDLLVEVGDPTRFATEAQFARWCGAAPVAVSSGEGDQAPTHHRLDLAGNRQVNSVLHLMHVTQVRGYPPARDYLDRKRAEHKTKREARRAHKRHLANVVIRRMWADHARRHATVAEALTAAAA

SEQ ID NO: 358712 - protein, 324 aa, unidentified
MNFIIFGIDTAKENWMSMCCVLMVVIAPKNSLTPTKGHDELVSWLKGHKIDHAHICIEATGTYMEPVAECLYDAGYIVSVINPALGKAFAQSEGLRNKTDTVDARMLAEFCRQKRPAAWEAPHPLERALRALVVRHQALTDMHTQELNRTETAREVQRPSIDAHLLWLEAELKRLEKQIKDLTDDDPDMKHRRKLLESIPGIGEKTSAVLLAYIGLKDRFAHARQFAAFAGLTPRRYESGSSVRGASRMSKAGHVSLRRALYMPAMVATSKTEWGRAFRDRLAANGKKGKVILGAMMRKLAQVAYGVLKSGVPFDASRHNPVAA

SEQ ID NO: 358713 - protein, 426 aa, unidentified
MNCKQNQRINQVEETSLVVGIDIGSTNHYARAFDWRGIELARIFKFSNSGEGFGRLSQWMQGICERHGKAKIIVGIEPTGHYWFTLGRYLRDQGIKLVMVNPYAVKQTKELDDNDPSKNDGKDPKVIAKLVLDGRYSIPYVPTGAYADLRILSADRQRIVKEIGQIKNRFARWFAIYFPEYCEVFGSYESKSSMLLLRVASTPESIVALGVEGICRIWREAKIRAVGTKRATTLYETAQRSIGHDQGTSAAKLEMALLLEDYEAKAKQLAFVMAALENTLREIPEAEKLLAIKGIGIISVAGFLAEVGDLRRFESPKQIQKLAGLSLRENSSGKHKGQTTISRRGRDKLRQVLFNAVIPLLATNEEFRSLHQYFTTRTVNPLKKKQSAIALCGKLIRVFYAIMVHGVEYDGKKMLADIHRKEPMTA

SEQ ID NO: 358714 - protein, 434 aa, unidentified
MIAASIERCAGIDVGKKVLAVCMMIGPLEGEPRIERRRFGTITAQLEQLRDWLKQEAITHVVMESTGSYWKPVLNVLEETVTVYVANSQEVKNRKGHKTDDKDGWWLAHLLRHAMIRPSFIPPRAIRELRDLTRRRKRLLSNGSAEKNRVQKTLEDANVKFGNVLSDVFGISGQLMLEALLQGEANPREIAELAQRSAKKKIPEITAALEGHQLNDHHRRMIGFSLAHMRFLEEQLAELDEAIASKIQEAGLESAWQLIQSVPGVRANSAAAILAETGSDMKQFPSEKHLGSWSGVCPGNNRSADKNKSSHTTGGNPWLRSTLTECAWGASAKKNCFLKEKFWRITTKSKGKKGPAVIAVAHTILTLIYRTLTTGQEYQDKQAPPLGERQKQRLVRHHIRRLGKLGVAVRSCATASGRKPGRPRKRASEDAKPR

SEQ ID NO: 358715 - protein, 356 aa, unidentified
MQTQVTKKIDFSDKDLYIGLDVHKKSWSVTIVVDGIEHRTFTQPPDPNALFNYLQRMFPGGIYNSAYEAGFCGYGIHRELNSLGIKNIVINAADIPTTQKDKLQKRDPVDSRKIARSLEKGSLHAIHVFDRELEELRTLNRTRFYLMRDLRRSKNRIKSFLQYYGEPIPLEFDNNQWTLKFVSWLKQVKMKTGSGQDAFLNLISSYEYHRGQLLTLSRQIRQRIREYDNELYSLLKSISGIGPLTSSALITELGNINRFNNIDQLSSYVGFIPRIRESGETTHTGGITFRCNTFLRTLLIEASWQAIRMDPAMMQYYHKHLVNNKGHKVIIKVARKLLNRIRYVMKNRQPYITGVA

SEQ ID NO: 358716 - protein, 402 aa, unidentified
MNCVGIDVSKGKSMIAVMRPFGEVVVSPFEVRHTANELSELAGLLKSLDGETRVVMESTGNYHAPVAWLLHGAGFYVSVVNAMLVHDYGNNSLRRGKTDKKDAVKLANYGLDHWLTLPRYVPEEDTRLMLKTCYRQYQQYSKVQTMLKNNLISLLDTAFPDANRLFTSPPRADGSEKWGDFVATFWHCECVCGLSKKAFTAKYQKWCRKHGYNFSQDKALDIYASACGRFGVMPKTNTAKLLVEQAISQLQTTSAALAALKQEMQSLAASLPEYPVVMEMFGVGPTLGPQLIAEIGDVRRFHSKKALVAFAGIDAPPYQSGQIDVRSRSISKRGSASLRRTLFLVMGVLLQCAPMDEPVYQFMNKKRSEGKPYRVYMMASANKFLRIYYASVKAYLDSLEHD

SEQ ID NO: 358717 - protein, 368 aa, unidentified
MLYVGIDIAKNKHDVTALNVPGKTVLKPLTFSNNKAGFELLDLSLRQLNQDCLIALENTGHYAFNLLNFLHEQGYKVYPYTPLLIKEFAKSLSLRKTKTNKKDAHGIALKLLSDPNREQFQHDNRQVELKILARHIHRLKKKQSDWKVQYTRCLDIIFPELDKIVEKHSEYTYQLLTCYPNPQKRLEAGFDKLIEIKRLTASKIQDILSVAPRSIGTTSPAREFEIIKHYKRLIDKAETCVNDLMAEFNSVITTVTGIGNRLEAVILAEIRNIHAFDNPAQLQAFAGLDSSIYQSGQIDLAGRMIKRGSPHLRWALIQAAKACPRFSPAFKAYLKTKLEQGKHYNVAIIHLAKNLSEPCFIILKRAAI

SEQ ID NO: 358718 - protein, 353 aa, unidentified
MRKVQNFIVKGKQIFIGLEDSKRTWKLCVRCEGMIIHETSMPAKYDNLRSYLKNRYPGCRIEVIYEAGFGGFWLHDRLESDGVACVVTPAHKVTQEKVSSVKTDKIDARRLARNLEYDDYTRCHVPDRERREDRQISRTLDQIQKDIVVTKNRIRRFLDFHGLNEGFPAGTWTEAAYELLKALQLPVSLQLSLDAYLQLLTELKRIRAALKAQLKALCEKDRYRALVASKAGCVGIGWLSAIRFTLEWGELSRFGSGKQFASFTGLTSREYSTGETIHRGHITGHGNGQVRGWLIQCAWRALSRDPVLLEKFNAVRNNSGSKKKAIVAVARKLAVRMRALELADQPYCVGVIE

SEQ ID NO: 358719 - protein, 438 aa, unidentified
MRRKKNKATKKVHFESLSLIHPNAAGIDVGSKEHLVAVPPDRDPQPVRTFQAFTPDLHELAAWLKRCGIETVALESTGIYWISLYEVLEQYGFEVRVVNARHVKNVPGRSKSDVLDCQWIRKLHSFGLLNGSFRPDQQIRKLRTYMRLEDNLVVESTQAVHHMQKALFEMNVQLSNVISDITGESGLRIIEAILAGERDPEQLADLCSTRIKASRQTVAKSLHGNWDEALLFCLKTALETYRFSQKKIQDCDQCIERQLATFEIKAPLPDSKQNLQTQLHQVCGVDLTKIPGIKEQTAKIIISELGLDMTRWNTEKQFSSFLGLCPNNLITGGKIIRRSTRKVYNRAADALRLCAQSLTHCKSALGAKYRRLRTRLGAPKAIVAMAHHLARLVYRMLRYGQDYVEKGIQQYELKFRLQRIKWLKKEAHSLNLELVADQ

SEQ ID NO: 358720 - protein, 427 aa, unidentified
MNSVMYQPTLCVGADVHLDEIVLRAVDKALGHEVVERFHVTNNLPGAQLAAATIAQAAANVGYTRVEIGWEATGMLWIPFHRYLSTEPLLQPFELELVCFNPKLVAKFKDGLVLRSPKDDERDAFDVAARLRFGELPVSYVPSNFWQGLRRLTRYRYCLAKAMSQEKMRFQSYAFLKCSDWKRVKAFSDIFGATSVALLTEFTVAELQEMTHDHLVDLITRRGHGRFADPSATARAVRQALHTSYPIDPRMDEMVTAALAAEWDHIRYLKRLMKRLDQLIARYIDLVPNPIITIKGLGAVITAGILAEIVDVLRFPEEKHLAQYMGLTWRKSSSGSFVSQNTRLTKVGNVYLRYYFILGANLLRQHNLEYKAYYWRKYQEVSKYQHKRALVLTARKLVRLVHALLTKNEPYVRPRTTRQDQEDDRLQ

SEQ ID NO: 358721 - protein, 343 aa, unidentified
MIWVGLDVHKRFSRMGCFDPATGEVHDLGSVSNDASSLQGALEKLPCPKTVVLEAGRSSYHMAGLLESMAEEVWIVDPGEVRRLQHTISKTDRRDAAALAWWAGKGVLTPQWRPDAQTLDLRELTRGKTALTRMSTQVRTMIRMLLARHGHECPHRDLLGERGQLWLEEVELEGHAGKMLASLREILTVVQAKADDFECMVEQTSRKHPVARRLRTIPGIGPYLGLALAVEIGDISRFPGPAQLRGYSGLVPAVYQSGDKDARGPLTKAGNKWLRYAAVLAAQRIGQMKEPDPRLKRVFLSVAFRHGRNPGKIAAARRLLDLIYYMLKKEEDYRAPRVRKVAA

SEQ ID NO: 358722 - protein, 371 aa, unidentified
MKKSSMFVGLDIHKSSIEIAIADAGRNGEVRSYGGIDGTLDALDKVVRKLVSKGSDLHFVYEAGPCGYEVYRHLTAQGFDCVVVAPSKIPRQSGSRIKNDRRDAQMLARLHRSGELTAVYVPCIEDEAMRDLTRAREDAKAMERNAKQRILAFLLRHGHCYSGKSPWSRAHFRWISILKMPHPAQQIVLQESLDTLAECTRRVDRLTEQIQTLSPQWRLFPVTQALQTMRGVSLIVATTTIAEIGDLTRFKKPTELMSYLGLVPSEHSSGRTTRRGAITKTGNGHVRRVLVEAAWAYRLPARVSRKLLIRQEGVSQEVCAISWKAQLRLCARYKRFTTKGKPHQLVVTAIARELCAFMWAIANEVQGPVKV

SEQ ID NO: 358723 - protein, 359 aa, unidentified
MTATMTYVGLDVHARSTHVAAIDVASGELRRARFGGGSEEVLAWLRSLPQPLQGCYEAGPTGFALYRAAAAAGLRLAVVAPSKTPRAPGDRLKSDRKDAELLARLLLAGQLKPVAVPPPPFEAARHLARAREQVRGDLMRCRHRVSKLLLLHGRVYEASAWTKTHRRWLERQRFEEATTELAYLDALAAVDGLVARKTALDERLSRLAREGEWWPSVARLRCFRGIDTLSAFVLCLEIGDWTRFPRPAKLAGWLGLVPSLDQSGESRRQGAITKTGSGYARRLLVEAAWHYLPPPSVGPALAERRAGQPDHVLQIALRAQRRLHRLYQRLRARGKPGNVTTVAVARELACFLWAAAVAD

SEQ ID NO: 358724 - protein, 407 aa, unidentified
MRPIYERCCGLDVHKKTVVACRLTPEGSQTRGFGTMTGELIQLRDWLLEAGVTHVAMESTGVYWKPVFNLLEDQGMELLVVNARHVKAVPGRKTDVKDAEWLAELLQHGLLKASFIPDRESRERRELVRYRRSLVEQRAHLVQRIQKLLEGANIKLGDAASDVMGVSGRAMLQALAAGVDDPAVVAGMAKTALRNKIPELERALTGSVREHQRFLLRSQFRLLESIETEIAALDAEVAEHMRPFQTALDRLDEIPGVGRRAAEQILVETGTDMSRFPTSGHFASWARVCPGNNESAGKRQYASIGGGNRWLRTSLLEAAWTVSHSRKPTFFTARYSRLAARRGRKRAAVAIAHSLLIAVYHVLKDGVVFNDLGPTHFERRNQEAIVRRSLHRLEALGYKVTVEAMPA

SEQ ID NO: 358725 - protein, 347 aa, unidentified
MNITRVGVDIAKSVFHVHAVDRHGNLVWQAKLKRDQWLAVLTDRLTPGAEIGMEACASAHHWARELQKLGFRVKLIAAQFVKPYVKSNKNDLVDAEAICEAMSRPGMRFVSVKSVAQQDIQAAHRIREELVGQRTAKSNQVRGLVGEYGLIAPVGIRQLRRALPQWLEDAENGLTDDFRVLLADLADDLRHLDDRIANLDERIEASVKKDPVARRLLELRGVGPLTASALAGALGDGKSFSKGRDFAASLGLTPRQHSTGGKDRLLGISKRGDSYLRKLLVHGARAVIRYAKDRDDGLSQWLKALSARKHANTVAVALANKTARVAWAVVHNDTTYDPSLISGGKAA

SEQ ID NO: 358726 - protein, 459 aa, unidentified
MGRAKSQVRAWEGLKVIHPNAAGLDIGSEEIWAAVAPERSAEPVRKFGTFTPDLQALAAWLIACGVDTVALESTGVYWIPVYEILEARGLQVYVVNARHVKNVPGRKSDIQDCQWLQGLHSVGLLRGSFRPDGEIVALRAYLRHRAGLIEHRAAHIQHMQKALAQMNVQLTQAVKDITGVTGLAIIRAIVAGERDPKQLATLRQPGVKKTEAEIAKALTGNYRPEHLFALQQALALYDFYTAQLAACDAEIERQFANLKPLSDDLPPLPPSAKCDSHSKNAPNYDARGYLYRLTGVDLVAISGLNESTVQTIISEVGTDLSAFPTEKHFCSWLGLAPHNDISGGKRLRSRTLKTDNRAGQAFRMAAQSVAKSPDSAFGAFYRRLKARLGAKQAIVATAHKIARAFYHMLKHRTPFHDLGGDEYERRARERELKNLEKRAAKLGCSVVKNPAAVAIAGSF

SEQ ID NO: 358727 - protein, 430 aa, unidentified
MKSNTQNAKIEAITEKTLVLGIDVGSETHYARAFDYRGIEYSKKPFKFSNTEAGFVTFKEWILDLKERYEKDKVVPGMEPTGHYWFNLGKFLQDNEMKPVLVNPHHVKKSKELDDNNPTKNDRKDPKVIAGLVREGRYMIPYLPDGVYADLRTASNIRFQLQAELTRIQNRISRWFNIYFPEYKTVYGKPDAKSGILILKAAPLPEDILTLGIDGVNQIWRDAKLRAVGKARAKTLIEAAEHSVGSKEGAVSARMEIRMLLEDYESRNTRLQEVMVLIEELVKGIPMAEKLLEIKGVGIRTVSGFLAEVGDISRFNNPKELQKLAGLALVENSSGKHKGGTTISRRGRKRLRYLLFEAAMSLVAKNPEFRELHNYYTTRRLNPLKKMQSLMAIAAKLIRVFYAMLTKGVDYDPKKMVSDIKRPAVYLQAA

SEQ ID NO: 358728 - protein, 359 aa, unidentified
MKIQRTSVGLDVHARSVFGCGLDGETGEVFSRRLSTDHREILDWVNGLPGPVAVTYEAGPTGFGLARSLLENRVQCLVAAPSKLVRPSGDRVKTDARDAAHLARLLHLGEITAVCVPSVEREAARDLVRAREDCRADLMRARHRVAALLLRHNIVYSGGPAWTLTHLAWLSRQHFPAPAQAAYDTAVEAMLSCIDRRDRLDAAIAAMAVDSEFTAVVRRLGCLRGVSTLTAFGLAVEIGDWSRLTGRSIGAYLGLVPTEYSSGASRVQGSITRTGNAHARRLLIEAAWHHRRPYRPGVELRRRWQAASPAARRRGQQANHRLHTRWCGFDARAKRPAVANAAIARELAGWCWSLAVLQE

SEQ ID NO: 358729 - protein, 485 aa, unidentified
MKHKNIFSRQNQTILKLFEQAGHPRKVLCVVLDYAKVTHTALCCNGTGKVLKNPFPVKNNPAGLELLLETVGKLCRKHQIGKEHVFFGGEDCGTFTLNMIYNLRSQGFLVVGVNAADAAKQRENHQASTDKLDLLGIANMLINKRGSLAGGNIGAQRALRSLTRHRKQQVKWKTATGNRIHQLVDQLFPGFLDERNSAIPPFSDASLCLMENRFSSRQITRRRDKVLLRQLKAQGLQHAENAVIRLKTYAREVLAHPEELSGLLQTSLASEVRIYRCLLENIHQVNRESAHQLAKTPAAMLTTIRGIGITLAAGVSAEIGPVNTQPSLRRLCSYAGIVPRLKQTGGPEKAAVIGRVSRRSNRILKDYVVQCGNHLGLHGPADLLEDHRRRSAAGQHADFGMARRFLRIAMRLMRTGESYVPPELQSGATMDELREYYLKLWPKLLDKWVKSKAAETAFASENPLGKWRNMIQEMYAIKLPLPAQK

SEQ ID NO: 358730 - protein, 315 aa, unidentified
MVEQVVVGIDVSKAKLDVALLPGGEQFTVSNDRHGIGELLRRVRPLAPSRVVLEATGKLEQLAVSELAAAGLPVVVINPAQVRHYAKARGKWAKTDPIDARLIAEFARDLEPELRPLPDAQTQAWAGLCQRRNQLLEMEQMEKSRLQRAPRANQKSIKAMLRFVRRQVEQVEHQIEHSIRQSPLWQAKRELLESMPAIGKVNSSTLLARLPELGQFTRQKICALVGVAPYNDDSGQWHGRRHIAGGRAGVRQVLYMATLSAVRCNPALRDYYQRLLGRGVEPKAALIAVLRKMLTILNAMVRDNTPWRPPCPTPA

SEQ ID NO: 358731 - protein, 422 aa, unidentified
MLTESHDEEQIIARVAALDIGKAELVCCVRVPAEGSSGKRLQEVSTHSTMTRSLTELANHLVELGVERVVMEATSDYWKPVFYLLEAHGLGPWLVNARDVKHLPGRPKTDVLDAVWLCKVAERQMLRPSFVPPWPIRRLRDLTRYRIDLVGVRTAEKNRVEKLLEDSCIKLSVVASDIFGVSGRAMMAALIAGERDPKVLAQLARSRMRTKIGRLEEAFNGHFDDHHRFLLARMLNRIDGIDVDIAAVDAQIEAHLAPFVAAAARLDEIPGIGPVAAAIIIAEIGVDMSRFPTAGHLCSWAKFSPGINSSAGKIKGNGSTGHGDRYLARVLGEAAVVTGRTDTFLGERYRRIARRRGKKRAIVAIGRSILVIIWHLLADDDARFTDLGADHFGRHTDPDAKKRTHIRQLETLGYTVTLTPAA

SEQ ID NO: 358732 - protein, 330 aa, unidentified
MKFKWFIGIDISKKTLDATMYDKASLKKPKHIKVSNNLKGFRELIRWIRKQGSLIKESLIIMEHTGVYGNDLAVFLDQKRISYSMVSPLHIKRSLGLTRGKNDKVDSFQISRFCYLHREELQLSKFPSITIQKLRGLINERERIVKMQATEKQVLKELKVQSSDSSNKRVKARLAHFSQDINSIEREIEQIINAEPDIQENYILARSVIGIGMVNAVLFIIYSNNFQGFANARKYACYSGIAPFENSSGTSIRGKTKVSHLANKRIKVNLSNGARSAVQNDPELQLYYKRKAKEGKEHGVIMNAIKFKLITRVFAVVNRGTPFVKMRQAG

SEQ ID NO: 358733 - protein, 357 aa, unidentified
MSGEKYIGLDVHQATISVAVVDSRGKVVMESILETKASTLLEFFSGLRGSLFVTFEEGTWAAWLYDLLTPHVSEVLVCNPRKIPLLKQGNKSDKIDARKLAERLRLHDLKPVYHGETGVRMLRELARSYLTVVKDLSRVMNRLKALYRSWAIPCAGRDVYYTHHRNQWLEKIPEAGTRRRAEQLYQQLDMLQHLRQQARRELLAESRKHAITAKLRQIPSLGPIRSALAVALIQTPHRFRSKRQLWTYSGLGLETRDSGEYHYVRGQVRRRKKQATIRGLNKDYNHDLKGLFKGAATRASVQPGPFQEFYQRSLAKGIKPTMVRLTLARKIAAITLTLWKKGAPATPLGWLYDSETE

SEQ ID NO: 358734 - protein, 340 aa, unidentified
MTITTVGIDLAKNVFAVHCVDQHGKTVLVKPKVSRAALPELIASLPPCVIGMEACSGAHYWARLFRQYGHEPRLMAAKFVSPYRMAGKSGKNDAADAQAICEAVRRPHMRFVPVKDESQQAMQCLHRTRQGFIEEKTATYNRLRGLISEFGVIAPQSTDALRHIVFEQKNSLPLQVQQCVDDLLEHVARIEDNIAEYDRILSRMAKTDHRSQRLMELKGVGPTTACALVASIGNAHDFKNGRQLAAWLGLTPSQYSSGGKSKLGRITKAGDSYLRTLLVQGARSVLIGAEKRTDLFSRWVCSLVERRGYWRAVVAIAAKNARLCWASLHYGDDFRLYSAS

SEQ ID NO: 358735 - protein, 324 aa, unidentified
MSKSIVYVGVDVGKEELLVAVAGRRPRSFRHHGHGMRGMLRWLGGVAGDQVLQVCMEATGIYSRRLANRLIREPEVRVSIINPAQIKAYRQVLLNRTKTDSVDAEIILAYATSQHPPVWQPCSAVLEELTALVKQGDRMRRLLVHSRNRREHDDGDPRVVRQSERALQRCLQEELKRIEGAIDRLYRSDDALSEQVTLLRTIPGVGNKSASQILTYGGVALQKRGNRELTAHAGLAPQHHLSGKSVRGRSRLNKQGSRRLRTVLYMPTLVATRCNPVIKAFYERLQQRGKAKKLALIACMRKLLIMCRAILRTKTPFNPKLALT

SEQ ID NO: 358736 - protein, 324 aa, unidentified
MIDAILGIDVSKNTLDVSISSCTKVRTKSFANSSDGWHHLLDWLIAQKIQRVHACLESTGRYSLGIACSLYEAGHVVSIINPAQIRDFVRTKLGRNKTDGIDASRIREYCELFKPSPWALPSEAHRRLGELQTIRAGIIAGLTEWKNRKNSGIVDTEAQALADATILHFTSQLGAVDKAIALTIDNDSDLRSKRDLLLSINGVGDTLAGVVLAELPGPDVLRSSGEVVAYAGLNPRQHQSGTSVDRATRISKIGNAILRAALYMPALSAMRYNPAIVALVTRLKSRGRLKPKQIVVAAMRKLLVLCFGVLKTGKPFDPAIAMGC

SEQ ID NO: 358737 - protein, 352 aa, unidentified
MEIVSGLDLHRSQITFRTADLRTGEVERGKIYPGTREAVREWLDRFEPGTDAHFALEGTTGWRFVVEEIQRRGFAAHLADPAELSERRGPKRRAKTDHADCELMVNLLIEGRLPESFIPPAHILELRTLVRLRKTLVDQRTEWQQRLQAQLFHQGVVPGLKLCRAEDRRRLADVEISQAGRQMIETGIVMLDGFDAKLKPLSAQLVALAKAQPGCRGLQRGLYGVGWLTAVAIVAELGDCRRFHSADQAVRASGLDVTVYESNGKRPGGHLARQGPQVLRWALFEAAQCAARKSSPDHADYRSVRDRIDHNRACLSVSRKICRRACHILKELGDAAMAPPEPASASRRPKAA

SEQ ID NO: 358738 - protein, 332 aa, unidentified
MKKKQIIIGIDVSKATLDVFIHDLGYYFVTENNPKGFVVLLETIFKVTNCKQEDLFFCFENTGKYSKMLSVFLHTQAIPFVMEPALKIKKSLGLTRGKNDKVDSRRIALYAYEKRESLVPTVLPDEKIDQIKSLLSLREKLIKHRTAYKNGLTDLFDCYKEGENNMIKEIQQRLISNLNEEIKMIEKQVSDIIKSDKNLSKNFRLIMSVKGIGKIVGFYLIAFTANFTLFANARAFACYIGIAPFAYSSGTVKGKSKVHQLANKYLKSLFNLAAMSAIQIRGEFQLYYSKRVNELGKNKMSTLNIIRNKLVYRAFAVIQRETPYVDLHKFAA

SEQ ID NO: 358739 - protein, 346 aa, unidentified
MKKIFIGIDFSKEKFDATVIKAEGVEERAERQHEVFDNKVSGFRRLIRWVKSVVDEQDTGLWLFCGENTGGYSRALCNYLYGSGYDMWLENALSINRSSALQRTKSDKADAGIIAEYAMRNYDQMHLYKPLNKNLERLREIFLYRHNLVKLKASMMTRKGEKKLTQEKTDISRFMAMSSKHLISEFNKKIAECDIRIEKIISEDEDLRRNFEIITSVPGVGTQNAVCLMVYTGNFTRFDYNSRKIACYYGVAPFGRQSGTSVNTPPHVSPFANKLIKALLSQAALASIQFCPQMAIYHHRLVEAGKKKPVALNNVKNKLLHIITAMVRNGEKYNPDHDYYAALKAA

SEQ ID NO: 358740 - protein, 400 aa, unidentified
MRVVFGIDVSKVSSEVAILVNGEKVHNYTMSNDAIGFSRLLGDLKTVHKPEIIFEATGVYSRRLQAFLDEHSYAYTRLNPLEAKKQLDSLRVRKTDQIDAEKLAQSQFVLNRKPTYIQEEVYQSLRDLSRFYQNLTEDIVRAKNRLHKVLQVTFPELETILSTPTGEQYWNLVTAFPCKDLVLELSKDELSKSIRLSTSKRISDKRVAYLAEKLTALANQSYCAVKKTSPIMEEVRYYAKELLRLSEQRQAVLDEMVELAQPLPEYDILFSIPGIAETTATSIIGELGDIRRFQSANQINAFIGIDLRHYESGNFIAKEHITKRGNPYARKILFKCIHNIASASHTNPCHIADFYEKRKRQSQTTSTKPHTIASIHRLIRTMYYLITHNKLYDYTLTQNQ

SEQ ID NO: 358741 - protein, 379 aa, unidentified
MRTVSGLDVHKDSIFMCILDEQGKKTEEKFGVTTREIKRLGRVMQSRYVSDVCMESTSIYWMPIWRLLESDFRLHLVNPLFLKQLPGRKSDVKDAEWIATALIKDLVKDSFVADGNIQRLRQYGRRINEINRDLVRCEQRIDTVLQRCNIRLSNHVSRTKNKSYRKVVDALIAGETSCDVLIKLIHGRTVNRCGKSAVHDCLEGCIGQSDRDMLGQYTQMFDMYETQKQQCIEAMIQMCVELYREAFLFLLSIPGIKEISAAIIISEIGDNMELFATAATLVSWAGLRPRNDESAGKIKSRKITHGNKYLRKALMECAWGAARTKGSVFYSRFFHLKGMKKHHNAIIVAIARQMLTIIWTLLTKKEHFDKEYHLKKKSV

SEQ ID NO: 358742 - protein, 430 aa, unidentified
MTASSSTTATTWVAIDVAKVMHQVLIETPNGRRRAMRVANTAPAIERLVTLLRAAPAPCVIAFEPTGDYHRALMHRLGLAGFRLQQVSSLAVARTRDAMYNSWDKNDPKDAQVILHLLKTGTTQRFVDPLVSGHHDLQEMANTYQQISLRKVRVQHAIVTHHLPLYFPEAERYLHSSRADWFTNVLRLTPWPAAVRQYTKPDFIAAARAAVRGHKADKTRWLADFYDTAGESVALPVHPDSAAIRMFRVVLEEYQQLCRRRKALEGDIVTRLAGHPDFERLQTVPGIGPILALLILAEAGDLRRFAHVRQFLKYCGFDLCTEQSGQFRGTTHLSKRGNARLRYACWMAGAVAVRMQQNSFRRKFEDYMRSDPLNRDRRRKAYTAVAAKMARVMYAVVTSGNDYRRFPEAARPGDRIPSPGAVEAHRRPRR

SEQ ID NO: 358743 - protein, 357 aa, unidentified
MNTLPERDGDVIVGVDTHADVHVAAALDAVGRLLATTSVPTTPAGYTQLVTWAGALGSIRSVGVEGTGAWGAGLARFLTGKGHAVIEVDRPDRRNRRRRGKSDTVDAEAAARAVLSGQAVGQPKAQHGHVEMIRALRVARRSAMKARTSAMNQLHGLVVRAPEALRAELRSLSSRQLVERAGALRPGELTTVEAATKMALREVARRHQVLSAEITRLQDAIGPLVAATAPNLLALHGVGPETAAILLVTAGDNPERLRSDATFAHLCGVAPVEASSGRTTRHRLNRSGDRQANHALWRIVIVRMKSHQPTRAYVERRTAEGLSKREIIRCLKRYVAREVYRHLVTHHQPPTLAAQAA

SEQ ID NO: 358744 - protein, 338 aa, unidentified
MGLYGAIDLHSNNSVLVVLDERDQVLYEKRLPNDLGRVLEGLLPYREQLVGVVVESTFNWYWLVDGLMAAGYRVHLANTTAIQQYKGLKYTDDAHDARWLAKMLRLGILPEGYIYPKEARAVRDLLRRRAQLVRQRTTNLLSMTNQFARLTGCGVSVRRLKQLSKAQIDEWVSDPNVASALRANLAVIRVLDREIERLEGEILRQAKIAAQFSPLLSIPGVGEILALTIMLETGDVGRFAKVGQFSSYARCVDSKRISNGKKKGEGNVKCGNPYLAWAFGEAAAFAVRFNPRIKRFFERKRSKASAPLAYKAVAHKLARAAYHVMRERVPYEERRAFG

SEQ ID NO: 358745 - protein, 343 aa, unidentified
MQTITTIGLDIAKSVFQVHGVDAAGQVVIRRQLKRRYVLAFFQKLPPCLIGIEACASSHYWSRELRALGHTVRLMPPAYVKPYVKRQKNDATDAEAICEAVTRANMRFVPTKTPEQQSCLMLHRTRHLFIRQQTAVINAIRAHLAEFGIVAPVGRKGVTELLHVVADPSDGRVPEVARACLAALGTQLLGLKEQIVEFDRLIMAWYRSNETSKRLHYIPGVGPLLATALAASVADPQTFRSGRNFSAWIGLVPKQHSSGGKDRLGSISKQGDRYLRSLFVAGALSVIRYAKIHGTKHRPWLTALLARRPTKVAAIALANKLARMAWAMMARGERYRNPVALAA

SEQ ID NO: 358746 - protein, 342 aa, unidentified
MQIAILGIDLGKNSCSVVGLDVAGRVVLRRRLRRDGVIKLAAGMSGCVMAMEACCGAHHLGRLLRDHGHQVRLMSPEYVRPYVKAQKNDDRDAEAIAEAATRPTMRFVELKSEAQLDMQSLHRARDRLVGERTALINQLRAVLLERGIVVPQGQRKLERHVDALLAEEEIRLSPRTGLLVEDLRAEWRELDRRILAFDDEFAAQARTDQTARLLTSIPGIGPLNATALTAAIGNAETFGRGRDLAAWLGLVPKQVTTGGKPKLLGISKRGNRYLRKMLIHGARAALPTLSKGETPLGAWLRGLLARAHVNTVVVALAAKLARIAWAVIRRGEKFNIKAATAS

SEQ ID NO: 358747 - protein, 355 aa, unidentified
MDSTKYIGMDVHKETVSIAVMNSGGKLLMESVLETKAATILQFIQGLRGNLHVTFEEGTWAAWLYDLLKPHVTKIVVCDPRRDALLKEGNKSDKVDARKLAELLRAGLLRPVYHGENGLRTLKELSRSYLTISKDLTRVMNRLKALYRGWGICCEGATVYAPRHRSEWLGKITEVGVRRRAEVFYQQLDALQALRQQVRRDLLAECRNHSARKLLRQIPSIGPIRAALLIALIQTPHRFRTKRQLWAYSGLAIETHDSAQYRYVAGQLQRSKRPQQLRGLNRNHNHDLKAIFKGAATKASSGAGPFHDFYEALLTKGMRPAMARLTLARKIAAITLIVWKKGAHFDAEQLKPQAA

SEQ ID NO: 358748 - protein, 369 aa, unidentified
MEHCSEIFVGIDVAKARNAITVADGVRGGEVRFIGEVDASAESMRRVVKRLTANGELAHFCYEAGPTGYGLHRLITSLGHSCTVVAPSLIPRKPGDRVKTNRRDAVGLARLLRANELTAVWVPDEGHEAMRDLVRARAAAVETQRVHRQQVSSFMLKHGRVFTRPKAWTMRYLRWLQEQKFDHPAHQIALQEMVEAVRISKERVQRLEAAIEEFVPQWSLAPVVQALQALRGVDLIVAVTFATEIGDLSRFESPRQLMAYLGLVPSERSTGETVRRGSITKAGNGRVRHMLVESAWTYRHPPKVGTKKLYKLEHVSPAVREIAWKAQIRLTSRYRALAAKGKKTTIVCTAIARELIGFMWSIGQQVRSA

SEQ ID NO: 358749 - protein, 320 aa, unidentified
MSQHSLRNEVSVGIDVSKDFLDVDVAPARQPMRVPNTPEGHTTLVNHLKSLKVDIIVVEATGCYELAVTAELLAAGLPVRVMNPRQIRDFARATGRLAKTDRIDAAVLADFGLAVQPEPRPLPDAQTQQMREKLARRRQLVEMITAETNRHHRATAEGVRRSIEVVLNVLKDELRRLDEDLDQAIRQSPAWREKVELLQSVPGIGPQNARTLAVELPELGQCSRQQIAALVGVAPMNRDSGQFRGRRTIRGGRGRVRHCLYMATLTATRWNPKIRHFYQRLLAAGKPKKLALVACMRKFLTILNAMLRERKPWTETAMTT

SEQ ID NO: 358750 - protein, 341 aa, unidentified
MGIVGGMDIHRRQITFDYLDTDSGQASRGRIAPADRHQVRSWLCRFEGRDDVAFALEGCTGWRFVTEELERVGATAHLAEPADTAHERGRKQRAKTDRTDARLLRELLATGRLPESWIPPDHILEVRSQVRLYKALADERRAWMQRIRSTLFHQGVPALSCHLLDSDGQAHLDRAELSSAGRQSVEVALRQIDRLEEELGALRRELVVFGNHQIGCRAIQAHYGIGGLLSVAIWEELGDCRRFHSSSDAVRHSGLDVTVWASDSKRANGHLTRQGPAILRWALYEAGMSAAKRSSPDHDYYSRVRDRLGPSRAALSVGRKLSRRCYHTLRELGDDALAPAA

SEQ ID NO: 358751 - protein, 310 aa, unidentified
MEQITVVGIDVSKDRLDVHVLPSEEAWAVGRDVEGLAELCRRLQGLSGVVALEATGGYENVVAATLSSVGIPLVVVNPAQVRAFAKALGQRAKTDQIDARVIARFAEATKPAVRPLPDQATQILGLLLARRRQIVDMAASESQRLRRSELARVRKSIERLLAALKRELTDIDQDIDDTMRASPVWREKENLLASVPGIGPIIARTLVADLPELGSLGRKQIGALAGLAPFVRQSGRWKGQAHIGGGRPTVRTALFLGAQVAKRCNPVLKAFYQRLLATGKSKMVATIAVAHKLLTILNAILRDKKPWQTA

SEQ ID NO: 358752 - protein, 388 aa, unidentified
MKKNSKNETMKSKRETKKVAELEAGWTRLDEREANTLVIGIDLGDRTSAYCVRTLGQQIVKEATVATTATALLEAFQGLRRQRVVIETGTHSRWVAQLLELMGHEVIVANARKLKLISENNQKSDKVDARLLSKLGCMDVEWLHPVYQRSQAAHSDLLLARARQALVDARTALINHVRGSVKSFGSRVVKCASERFVEVARGALPEALKPALSGVLATLEEINEQIYGYDCQIKHLCNTKYMEAAKCLLQVNGVGPVTTLTFVLTIENKDRFEQSRDVGPYLGLIPKKRQAGQRDPQLGISKEGDEMLRKLLVNCAHHILGAKGQDSDLRRWGLELVRAVERKGKKGARKLAAAAVARKLAVLLHRLWVTGAAYEPLRNRGAQQAPAA

SEQ ID NO: 358753 - protein, 347 aa, unidentified
MTEAYDGRQVVGLDLHRRRSVIVRMTEDGRKLETVRITNSPAALRREIAKAGHHPRVVVEATYGWYWAADVLEEAGAEVHLAHPLGIKAYTYRRVKNDERDAADLADLLRMGRLPEAWIAPPEIRELRELTRYRDKLVKLRTSVKDQVHAVLAKLGIPVTCTDIFGTWGNTWLDGLDLPQPYAGKVASLRQLNAELTGEITLLEQVIGDLLAGHEGYAAIQQLPGIGPVLGAVIVAEIGDIRRFRRPEQLCSWAGLTPRHRESDTKISRGHVTKQGSRILRWAVCEAIQRQPDGTRPQQVKDGIIARRGAEARNTAKIAAARELLTLVFYGMRDGHIRRAVRPGQAA

SEQ ID NO: 358754 - protein, 435 aa, unidentified
MSGRETVQPEVKFVAFVGIDWADQKHVWCLQKASSSEREFGELEQKPETVEAWVGELCRRVGPGPIAVAVEQVKGALVCMLRKYECLHLFPVPSTMSAAMRKALYPSGAKDDPRDAGLLLDILLQHRDRLRHLQPDNEETRRVQNLVEERRKLVDEKTAQVNRLIGYLKIYFPQMLEWFERLDRKLVCEFLERWPSLEELKKVSPAELRKFFRQRRQGRHHELTEERIHGIVQAMPAIQDRAVIEAKGAAVQVIAQLLRSLLEGIANLDRKIAEAAGAHPDFFIFDSLPGAGAALAPRLLAALGSQRDRYGSADEVQKHSGIAPVTEASGKKKWVHFRWACAKFLRQSFHEWAGHSIAQSVWARAYYQQQRARGQDHHAAVRALAFKWIRIVFRCWQDRVAYDENKYLAALAKRGSPLSSVLATTATPLCNPCGC

SEQ ID NO: 358755 - protein, 315 aa, unidentified
MTKDTIGVDISKDHLDAHRMSDGAIRRFANDSVGHGAFMSWLGQLETIHDTRIVYEPTGPYHRAFERRLAAAGAALVKVNPRQARRFAEATGKLAKTDRLDAAMLARMGALLELEARPARSPILNDLKDLHMAREALVKNRTAAKNRAKNLTLTVLKRHNAEQLRQIERQMAAIEREIMMLIKDNLVLARRFESLISIPGISATTAFALLIDMPELGTLAHGQAASLAGLAPVARQSGTWTGRAFIRGGRAKLRQALYMPALGAMRFNPDLKAKYDQLKAAGKAPKVAITAIMRKLIVLANALLRDGREWTATPT

SEQ ID NO: 358756 - protein, 412 aa, unidentified
MGGALLLFIGDDWAEEHHDVELQDQTGRVLAKARLPEGMAGMARLHAMVGEQLGDEDDPTVVVGIETDRGPWVRALVAAGYELHPINPLQVARFRERYRVSGAKSDPSDAHVLADMVRTDRDRLRPAAGDTPLADAVKVVTRGHKTLIWERTRHLQRLRNALREFYPAALVAFDDLTAPDTLELLAAAADPASGAALPIEQIAAALRRARRRNVAAKASQIAAALRTDHLGQPAIVAAAYAVTVRAQVAILTTLNAQISTMEEQVEAHFGQHPDAEIYLSQPGLGVVLGARVLAEFGDDKARYADAKARRNYAGTSPITRQSGKKRAVMARYVHNDRLIDALGLQAFAALRASPGARAYYDLQRARGVGHRAALRQLGNRLVGILHGCLKTRGMYDEAKAWAQHKNDLAAAA

SEQ ID NO: 358757 - protein, 425 aa, unidentified
MFAESRDDEQIIERVAALDIGKAEIVCCIRLPAADGERRAQEVSTHSTMVTSLCELANRLVGLGIERVVMEATSDYWRPPFYLFEAHGLDPWLVNAKDVKHLPGRPKTDRLDAVWLCKVAERQMLRSSFVPPADIRRLRDLTRYRIDLVGVRTAEKSRVEKLLEDACLKVSVVASDIFGVSGRAMMTALIGGERDPKALAELARTRMRTKIPQLEEAFAGLRLGTFDDHHRFLLARMLARVDAVDADIAAVDTQIGQHLAPFADAVARLDEIPGIGPTAAAIIIAEIGLDMTRFPTPAHLASWAKFAPGINSSAGKNKGNGSTGHGNRYLARVLGEAVAGAGRTDTFLGARYRRLVRRRSKKKAIVAVGRSMLVIIWYLLADPDTHFHDLGANHYDRHVNTQTKRRNHVRQLEALGYHVTLEPAA

SEQ ID NO: 358758 - protein, 329 aa, unidentified
MKKNWFVGIDVSKKWLDVAIFVENSDLKGYIHTQVNNDKQGYRELLRWLKENGVDASTCTYGMEHTGFYSDGLQHFLDKKGCKYTMLEPAVIKHYPIQPREKNDRLDAAKIADYLFRFQDTIQLSREPDKTMERLRELHRERKFYVEDRVCYLNRRQVVGKDEAKRLDKMIELLDKQIDTIEEKIRQIIQNDEALMENYLYLDSIKGIGFVNAVNAIVITQNFTVFKTAREYASYIGVAPHTKTSGTTVRWKPKPRKHCDLTAKADISQAAKIAVVHDVELKKFYERKCNGKDDADTVRKAMNAVKFKLVLRMFAVVKQKHTYKQLTTI

SEQ ID NO: 358759 - protein, 344 aa, unidentified
MSTIKVLGIDLGKSSFHVIGRDYSDNQIIRKKFSRTALIQFLHQVQPCTIAFEACGGAHWLGRQCESMGHKVRLIPPQYVKPFVKSNKNDFIDAEAICEASTRPNMRFVSVKSEEAQVISAIHKARHGYIKDRTACMSRIGALLLEFGIALPTGHSVMKQLFNWLAQQRQELPGLLMQELAELHDYYLFLNESIEKQDKKLKQLVESNPIGQLLKTIPGIGDMTASLCIANIGSATDFKSGRNMAAWLGLVPAQYSTGGKPRLLGISKRGNKELRTLFIHAARAVMSRPDKTGKIYGEWLINLRATKPFNVVTVALANKLVRIAWAVMKTKQAFNSKALAPSLQ

SEQ ID NO: 358760 - protein, 388 aa, unidentified
MPKPFDLSKSLAVLDPDSTLIVVIEMSQSSWLVAARAPGLARDPLKKLPPDPEQLFKLIDRWREESRRAGRVVRRVCVAFEAGRDGFWLARLLRQHDIEAYVIHPTSIPVKRDHRRAKTDRLDTELLMRAFLGWLRGEADHCSMAAIPTLAEEDAKRPTRERESRVNARSRLVNRMKGALARLGIRGFNPKLRKAAEKLEELRTGAGEPLPPNTLAELRRDMAQLRFVADQIKQIEKAREARLEKAPREGAHPMVLMLASIKGVGLETAEMLVAEVLSRKLRDRRAVARYGGLTGSPDESGSRSREKGLARSGNARVRRGMIQLAWRFLMFQKESALAKWFEARTANGPRGVRKTMIVALARKLLIDLWRFVEDGTMLVGVELFDSRA

SEQ ID NO: 358761 - protein, 319 aa, unidentified
MHCIGVDVSKQELVTYDGKKERIFPNIRGLDAFVRFLNRATDPMVVFEPTSTYSRRLEALCRTRQIACCQLNPRVVPHLRLVGKGRSKTDSSDAELLYRYGVERGQQEATQLENDALAESIQARLSCYRVVQKSRVAYQNVREALSQDPATSSALLGEVSAEIRELKRKEQRQVDAARKLIEEDPDTEDRFELLLSIPGIGPITALTLLALFRKYGNANRSQIVALAGFDPIQIQSGTSVHGKSRISKRGNREVRRRLYEATLSAARYNPAVRTIYRRLKESGKPEKVARTAAARKLLVIAHAIYKSGEAFRQPNQKEA

SEQ ID NO: 358762 - protein, 393 aa, unidentified
MKIIYPRVCGIDVHKKFIVAVICISESVEPIYLKKRFSTFHNDLIRFREWLIQNDCQNVCMESTGKYYIPVYNVLESHISNIVVANPKWVRAVKGEKDDDKDAKWIADLFKFGIVRSSFIPQKDFRILRELTRYRYKLVNMRSSEKNRFQNALTSGNCKLDMVFTDVFGKSASNIIDLILSDNPYTDEDILSKVHKKCKASPDMILDSVNGTDLTPVQKARIKLVNDHIKQLSSNIQKLDKLIDLMIEPYEDYISFLCQIPGVSRNSAIIILSEIGIDMNQFTTSRRITSWASLTPSSNQSAGKKKSVRISRAGVYLKPCLVEVAHAAVKDKSHPYYANKFNKISKRRGKKRAYIAIARKILVAAYHMLLTGEIWNPADLSEVETPVEQELNT

SEQ ID NO: 358763 - protein, 411 aa, unidentified
MRYIVAGIDIHKKVLMVVVTDAANPELVLYRRRFGTSASEREHLAAWLKDHGVQEIVMESTAQYWKPIWLDLEPHFGKLQLAQAHSNRAPKGRKNDFGDAERLTRRLVAGELVLSLVPDAEQRDWRTLTRGKVQLVRDVVRLGNQLEAFLEELRIKLSSVISELLGLSGRRILRALADGESDPVKLAELGDRRLRCSKEELADALKGQLQPKHRKMLKLFLERLDLLERQILTMDQMTAEAMKEFEPAVIRLAEVPGFGADSAQQVIAEIGPGAKSFDSAGNLASWVGVCPGSNVSAEHNRSSGSPKGNCSMRRILTQAAQAAVKKKGSYFQKTFRRWLPKLGYNEALWAIAHKLCRLVWKVLHDQVSYIEQGQELNPKAKRRRAKKLMQALRQLGYDVTISSPAPQPAHG

SEQ ID NO: 358764 - protein, 322 aa, unidentified
METLGIDISKKDFHAVLLQGNSAAKKSFPNSSKGFEQLDAWLRNRQAGKVSACMEATGAYWRALATHLYDAGHHVAVVNPRRIKAFAESELLRSKTDAVDAALIARFALAHRPKAWKPWPPEVVELQGLSRHLEFLKKSRVQLVNRVQTPGLPRSVVKSSKRIIVELETQIAELERAIKDHIDRHPGLKVKRDLLTSIPGIAQTTAAGILSEMPAIAEFAGTQAVAAYAGLSPRIHESGSSVRGKRRLSKIGNARLRKLLYMPAIVAQKYNPTLKAFAARLEAAGKVPMVIIGALMRKLLILAYGVLKSGKPYDPAFVPANA

SEQ ID NO: 358765 - protein, 404 aa, unidentified
MNQNTCITIDVSQGKSHIQGFFGPNKPLGKSKTMRHTKQGYQQIISLIEIIQSKTNEVPLVIFEYTGIYHKSLEKFLISHKINYHIVAPLRAAKSRNSEIRAQKTDVRDCLSLSKLFYSNNLGEFYYENKTYSKLRKLSHFYDTNMKHLVKIKVNFRETLAVVYPNYKQLFDNPYSIDSFVFLSNFPHPTILLNLSKEKVIETLCEEWDHLKPWSLNKINEIYSFVNNIVSGCDEDDPEVYMILEYLKQIEYYVSQNKTIIVEMIKLAKTTSLYNLVRSLPGIKDILTVKFIAELGDISRFKNYKAIVAYAGTDPMIRQSGDKDGLHLKISKKGNSRLRKVLYLMVNSMIKTNRLNNAIKVKYQKRTQHLNPLKPKVASIACANQIVRIIFYMHKTGSIYNYPG

SEQ ID NO: 358766 - protein, 342 aa, unidentified
MQVTTIGLDIAKNVFQVHGIDAAEKVVVRKQLRRSQVLEFFKALPPCLIGMEACATAHYWARELTKLGHKVRLMPARDVKAYVKRNKNDAADAEAICEAVRRPTMRFVQVKSAEQQSQLMLHRTRDLLMRQRTQVINALRAHMAELGMTAAQGNAGLRELLAIIAGAADERLPAEAHASLIVLAAELQAMRTLIASIEKRIIAQHRSDEASKRLRSIPGIGLVGATAIVATITDPKAFRSGRDMAAWIGLVPRQDSTGGKQKLGPISKQGDRYLRRILVVGAHAVLKLARQKPEKYPWLTQLLARKPFKVVAVALANKMARIAWALLVKGGPYRARALVAAA

SEQ ID NO: 358767 - protein, 381 aa, unidentified
MTGMIIGLDPHKASNTIAVLDRDETLHLRQRFENTAEGMVAMLEAVAGFTTRIWAVEGANGIGRSIAQRLVAAGEMVVDVPAKLATRVRVYSTGHGNKTDRADAVAIGRAALHSKHLRMVRPDDENVALKLLSDRRHELVASRTQSVCRLHRLIRELVPGGTPRALTAERAEALVNGLNVSDTAGLMRIELALDHIDDMKRFDRRIDQITLKIHAAVKESDTTLTRIYGVGPLTAGLILGEVGDVSRFPTRNHFASYTGTAPIAVSSGDNNRHRLSRSGNRQLNHAIHIAAIAQIRYETPGRTYYRRKLGEGKSRREALRCLKRRISDAIYRQLQLDRETDQQQDQTWPRWPSSRRGHPTYRSPDTLRRDGQPMKPRNVPV

SEQ ID NO: 358768 - protein, 334 aa, unidentified
MKNYLFHVGIDISKLKLDVNLLNSQTLQSEYFVIDNNPKSIKEFVKLLIKRKINVKHILFCCENTGIYTNHLSYVLLGLELDLWIVPAIEIKRSKGISRGKNDKTDAKDISYYSFRNIDKLQLYILPEIDIQKLKILYTEREKALKSLLLLETTKENSEFVNKEVYKEVLTINQSLTNTIKKTIDKIEKRIKEIIKSNQELHNQYKLIKSVPGIGEQTSLYFIIATKGFSAFKNWRQFACYSGVAPFEYSSGTSIRGRTKVNHMADKKMKSLLQMCAMTTLKYDPQLKEYYMKKKEEGKNSMLVLNNIRCKLISRVFAVVNRETPYINTYKFAS

SEQ ID NO: 358769 - protein, 340 aa, unidentified
MNLTTLGIDLAKNSFSLVGMDKHGKIVLRKTLKRTQVLPFIAQCSPCLIGMEACSGAHYWGREFTKLEHKVGIMACKFIAPFRKGGKNDNNDAEAICEAVSRSTIWFVPVKTADQQATLCVHRVRQGLIGERTALINQLRGLLSEFGFVLPKGRYPAQREIPLLLEDAENGLPFLARQIISDLWQRINIASSQILFYDRELAKQVRHNPVAKRLLTIPGVGEQVASGVVASAPDPSLFKNSRQFAAWLGLVPRQYTTGGNIRLGRITKQGDRYLRMCLVHGARAVIANLKDKQDKISCWARELIARRGYLRAVVALAARNARLIWTLMVKQEDYKSIPTM

SEQ ID NO: 358770 - protein, 332 aa, unidentified
MAYDFVIGVDVGKYFHHACVLDPQGRQVLSKRINQHEGSLRKLFGKFLTDNASVLVIVDQPNNIGRLTVAVAQDMGADVRYLPGLAMRQLSRIHVGNSKTDVRDAYVIAHAGLNLPDSLRSVDRVEEVFIQLKVLNGIDEDLARAYTRLINQMRSALVGTYPAFEHVLRGQMIHRKWILHLLAKYGDPTKIRRIGKTRLAAFARSHKARNPEPVIDAMLAAIHGQTVSIAGAEYAELGVAMSAKDALAKLEHRKEIEAQVLKLIQDIPQTEILLSMPDIGPRSAAQILMTVGDMSDFPDAAHLASYAGLSPRTNQSGTSIMSNSPNRAGNKN

SEQ ID NO: 358771 - protein, 403 aa, unidentified
MEVTKEHLDIHQFLIVGIDVHKDNHVLVAANGFNQIFFEKEISNQYSDFQQIVDQIQLIARKENLRPLIALEDSYGYGQALARFFFSKGLEVKTVNPVLTRRERGYMTHPEKSDISDAKGVVKATILEGIGRLPTFRITSESEFSKDLRILVYDRDFLIKEQTRLKNQLHRLLHQSYSGYYDKIFKDPFSKKALKLWQEFPSLLELKRTKRRITKPDWLKKINTLTLLSISNLQENQIKRKVRRLLQIREELKEMDQDLEQLLSNSNQYLETLPGCARILAAGTLAEVKDVSRFNSKDAFAKYAGLSPRPWESGKKKRNKKSLSGNRRLNRIIHQIALSQIGNRGYQPAKDYFQKKIAEGKSKKQALRCLKRQISDVIYPVRSLLNSSLKLKLFSNFYNFWSF

SEQ ID NO: 358772 - protein, 372 aa, unidentified
MLVWTAPGGIECARMRSLQLISDRRPSVEQISRIGMDTSKHVFQLHGVNAAEVPVLRKKLRRKEMVAFFQKLAPTVIAIEACGASHHLARLLQSFGHTVKLIAPQLVKPYVKRGKNDAADAEALCEAMSRPTMRFVPVKTTEQQAALMLVGVRDRLIRNRTQLANTFRGYAAEFGLTAAKGMAHLVPLLERIQADESLPALARELFASQAEEYGQLQAQIDEVEAKLMAWHRADECSRRLAKIPSVGPIGAVLLRMKAPDPAQFRSGRQFAAWIGLTPKDHSTAGKVRLGVITRAGDEALRSVLVVGATSVIQHALRGGKASPWLAALLKRKSPKLAAVALANKTARIAWKMMLTGAAYGATSMAADLAGAV

SEQ ID NO: 358773 - protein, 363 aa, unidentified
METTAGIDLASEEHRLVVVDHAGRQLEQRRIKQGELGVQALVPRLRDLQVAQLAIERPNGLVVDRLLEAGISVVPVHPNQLAAVRDRHRSGGGKSEGFDGYMLAELARTDMHRLRAIRPDGDHTRTRLALTRARGLERYPSPDNARSLSDKRLAAFVARHRYSGHRPEELLTRLREPPTGRTGELEHEAPRQIVLGLAAALKPIVEQIKLLSSQIRGALDSHPDGHIFRSLFRDPKSVVTDAALVAEIGDQRDRYDSHDRPEARAGQSPVTIESGKNKVASFRWACNKTLRDAVCVLTDSSRHHNPSAEKIYADAIARGRDHPNAIRILGRAWLRIVWRLWHDRTPYDAQRHGNLSGLLTTQG

SEQ ID NO: 358774 - protein, 339 aa, unidentified
MQLYAGLDLHSRNTYIGIMDKEFKRVFGKRVLNKLPLIVKTLAPFQDQLQGIVVESTFNWYWLIDGLMDAGYDCVHLANPSAMKQYEGIKHTDDQHDAFFLAQMLILGILPQGYIYPKEDRPVRDLARKRLFLVRHKTSHILSLQSLIARCCGQRVSANDIRKFTVEDLQQLLKQEHIVLSAQANLDTIVFLKQQIKRLEKTIQKKVKLNKAFQQLMTVPGIGLILAMTIMLEVGDIGRFAQVGNFASYSRCVSSQRLSDGKSKGHGNRKNGNRYLSWAFTEAAHLSRRYNENFRSYYNRKLAQANTSLATKALSNKLARICYYIMRDQVPFRQELLSQ

SEQ ID NO: 358775 - protein, 397 aa, unidentified
MSVLVTMQSDQDRVVIAVDPHKASWTAAAVDASLQPLATVRVPVSRDGYRALRRFARRWPNAGGAIEGAGGLGAPLTTRLRADEIEVIDVPAKLAARVRVLSTGHGRKSDDADALSIGIAALTSRTLSTAEIDTATTALRAIVEHRDDLVKTRTQTVNRLHVVLTNLVPAGAGRNLTADHAAELLRGVRPHNAPGKTLRALAMDLVSEVRQLDRRIAKAANDIETAVTASDTTLTELHGIGTLTAGKILGRVGAITRFRSPAAFASYTGTAPIEVSSGEVVRHRLSRAGDRQLNFFLHVMALAQIRQDTPGRAYYLRKRTESKSHNEAMRCLKRRLSDIVYRQLLRDATQTGGGPGRTLGGGSTVRRGQLKPRTLTLRTRHFPDPPAATLQPTKTNF

SEQ ID NO: 358776 - protein, 367 aa, unidentified
MSKPIIWVGLDVHKDSITAAVLEGDSTEAEVMRLPPDLAKIRKVFHRLAKRGRVQACYEASGAGYVLQRWLEKAGFHCEVVAPSLIPKKPGDRRKTDRFDAMMLARLYRSGHLTSVRVPTEDQETVRRLVRLRFSYQEQTKDTKRRIHSICLSQGWVYRETKTLWTLKHRSWIDQLQQELSGPMTTVLRTELQHLEYLETQRDSLDSEIDRYARCQPYREIVLALCCLRGVKTLTAMILLTEIGDIRRFRSPRAFMAWVGLVPQERSSGSRERRGRITKTGNSHVRRILIEAGWQQRWRSKADVKLGNRRKGMPPQIVAIAVKAQHRLSNRFRRLERRKDNRVVVAAVARELCGFVWAIMKAVPQPS

SEQ ID NO: 358777 - protein, 337 aa, unidentified
MIIVGCDFHPSFQQIAMLDTETGAIEEHKLMHTSGEAEGFYRKLASPAIVGMETVGNDQWFVQLLQKLGHEVSVGDAAQIRASYVRKQKTDRRDAKHILQLLVEGRFPRIWIPDAEMRDHRQLLMHRHKLVQIRTRVKNELQHLMLNQGMQKKQKLWSTEGRAALASLPLQPRTDRRRKDLLNLLAMLDGQLESLNDAVTRVAREYPGVHLLMSQPGVGAVTALAFVLTLGDVHRFPRSKQVASYLGLISREHSSGGKQRMGGISKQGNRLLRFLLVEAANIAVRFNPELRKECLHRCNQKHFTVAKVATARKLAIRMCWMLRTQIPYPQVLSSRVA

SEQ ID NO: 358778 - protein, 418 aa, unidentified
MIDDVQWFVGIDWATQSHRVCLLDVEGRHVNERDFAHGGAGLTELRDWLLEKTKAAPGQIAVAIETPHGPVVEMLLDHAFLVFAINPKQLDRFRDRFTVAGAKDDSRDARVLGSGLRTDRQAFRRLVVDDPVVIELREWSRMADELQQERTRLANRVRQQLWRYYPQASELTDDVADDWFLALWQQVPTPATAAKVSEQAITRILKDHRIRRLDAATALQTLRKTPLFVAPGTTEAACAHIRNLAARLHLVNQQIKEAHRALDGLCARLEAATENPSGQIREQHDVTILRSWPGIGRIVLATLLTEATEPLRARDYHALRALAGTAPVTRRSGKQCFVIRRLACNKRLQNAVHHWSSVAIQHDTAARRRYDALRRRGHGHARALRTVGDRLLYALCTALKRQTPYNPDCQTAQVTASL

SEQ ID NO: 358779 - protein, 427 aa, unidentified
MSEVESIQPEPEFAAFIGIDWADQKHIWCLQAAGSEQRESGELEHTPEAVESWVAHLYQRFAPRPIAVAVEQSRGALVFMLSKYELFHLFPVPAQMAASMRQALYPSGAKDDPRDADLLLDLVLQHRKKLRRLSPDSEATRRVQNLVEERRKLVDEKTAQINRLTDHLKVYFPQMLDWFGRLDSELVCALLERWPALEELQKVSPASLRAFFRKHRCRDRERLEGRVEAIRRALPAIQDRAVIEAKSAAVKVIVQLVRVLVEGIEDLDGQIEEAAAAHPDFFIFDSLPGAGPVMAPRLLAAFGSQRERYRSAREIQSFSGIAPVTESSGKRKWVHFRWACPKFLRQSFHEWAGHSIVQSEWARVYYQQQRSRGNTHHAAVRALAFKWIRILFRCWQDGVAYDENRYLATLVKRGSPVGARVAIGKTL

SEQ ID NO: 358780 - protein, 400 aa, unidentified
MNPKKRYLRFCGIDIAKNKHVLCIIDKEGRTLVRSRSFTNDNKSYQRLLECLKDTGRAGSLLIGMEATGHYWYGLHDFLTRHGYQVVVLNPIQTAMQAKKGIRKCKTDQIDAFHIATLLKNAEYKTALVPGEFGMTCRQLTRLRYSLIEQGAKLKQLIWSRLHPVWPEFEELFANPFCATGKKLLTIAPTPADVLELGQTELAELIRKTSRGKYGPVQAKKVWQAAVNSAGMRRGLEGTRIGIRTLLHQMETMTPVREKLEAEIRELSQRLPAYIFTLPGINPLRAVSIFGETDPIHSFKNPAKLVAFAGLDLTVYKSGNYDAPHRHISKRGSPFLRHTLWAMAFQAIYREGDLRNYWLRKRADGLKHKAAVTAVAIKLCHITWRILTDERDYLLQGCPN

SEQ ID NO: 358781 - protein, 387 aa, unidentified
MPQPNDLSRSLVALDQDSTIIAVVELSQSSWLVAGVLPGIERQPQKKLEPSAERLLGLLHRWRDEAVRAGKKITRIALAFEAGRDGFWLARWLNARGVEAHVIHPSSVAVSREHRRAKTDRLDTELLKRGFLGWLRGERGHCSMARVPTIAEEDAKRPNRERECLVGERTRIVNRMKATLARLGVRNFKPTLRKAAERLATVHTPEGTPLPRNVLAELQRDMARLGFVVSQIREIEQARQKRLEQETETGPHAMVRQVARVIGIGIETADMLVHEVLSRPMRDRKAVARYAGLTGSPDESGARRREQGLARAGNARVRRGMIQLAWRFLRFQKQSALAQWYRARTADSRLGTRKTMIVALARKLLIALWRFVTTGETLEGVILRPAG

SEQ ID NO: 358782 - protein, 340 aa, unidentified
MHTTIIGIDLAKTVFQLHAEDASGKVLWTKRLRREALEPFLRKQPAALIGMEACGSSHHWGRVISAMGHEVRLMHAKYVKAYVKRGKSDVRDAEAICEAVQRPNMRFVPIKSIEQQTARALERARELLVKQRTQLQNAVRGLLAEVGIIAAASQAGFEALAARIDHGDGAIPAVLLSGLRPLVEQWRGLHAYSDELEARIVQRAKGDERMRRLMKIPGIGPLTAHALVTAIGDPRRFSTGRDFAAWVGLTPLTNNSAEKTRIGHISRQGDHSLRRLMVLGAANMARHTKAKPREARAWLLGVMARRPVKVAMVAQAAKNARIAWALLCSGESYREMAAAA

SEQ ID NO: 358783 - protein, 315 aa, unidentified
MTHLVAAGIDAGQKHLDVGLAPSGRTFRVPNTTTGIARIVERLAALEVRRVVIEAIGPYAQRLVDALGRAGFEVGIVNPRRIKAYRDAEGGRAKTDRLDAGLIARFALKMIDAVRPLPSPAQNRLKALSLRRRQLVEMIAMEKVRLKQALEPLLADSHRTAIADLGVLLARVEAELATDVAADPQRARTLAILTSIPGIGTRIATLLVTDLPELGQTDRKAIASLAGLAPHVSQSGNAPPRAAIAGGRPCVRAALYMAALVAARHNPDLRPEYEAMRRAGKPAKVALIAIARKLVVLANALVKANAMYQNRSAAS

SEQ ID NO: 358784 - protein, 373 aa, unidentified
MHYNTKYVGLDVSKNKIAVAVADEGRSSARYVGKIDYTLEAIRKCIKKLGEPEQLHFCYEAGPTGYGLYRILTGMDMTCEVVAPSLIPQKPGSRIKTDKRDALNLATLLRAGELTPIYVPTEDDEALRDLVRAREDVKEDELRAKHRLSKFLLRHDIKEPAGTKRWTLKYWEWLRQLTFSRAASRVTFQEYVQQLREYQHRLERLEETIKEEAEHGVHAPLIQKLMTLRGIAVLTATSLVAEISTFARFVHPGGFMSYIGLVPSEGSSGDTRKQGAITKTGNRHIRRQLIEAAWSYRHKPTIGRELAKRQKGHSSNILSISWKAQHRLHKKYCRLMARGKESGKAITAVARELAGFIWAIAREPDDKKNEAML

SEQ ID NO: 358785 - protein, 427 aa, unidentified
MTDRVQHTSYGSWMAIDIAKDFNVVMVETADGHTRRFRMANSGQDHQRIVELAHSLPQPCRIGFEATGNYHRTLGYRLVAEGLDVCLISSLASARYREIMFNSWDKNDPKDTFTLLQLLKQGITQKYIDPVASGFHDIQELSKTYWHITMSRTRLQHSILTHYLPLYFPEMGRWWSSTRCEWWIHYLLRFPTPVAITKLDLNSFINIASPIVGRKVNKAVKLIELYRLAQQSIGLPCAEDSLACQTFQLQLQRLLELNQMRQKLERQAHALLSGRCDYQILLSIPGIGPIIALTILAEAGDLRRFNHHKQFLKYCGLDLAKCQSGNARGQDSLSKRGNARLRQAFYLAATIAVRQRENSFRNKFQRYTQQAPNDADRKRKAITAVMAKLARVTYALVKSETLYESYREVLPSGSISLTGAVGAIRTP

SEQ ID NO: 358786 - protein, 499 aa, unidentified
MKPTQTNPAARQRKTVSRVKSPAQAKPRRRGEPAAVGLENLEQINLHAAGIDVGSAENAVWVPRRSLKSGQAHVRLFGVFTQEQDDLVEGLKDCAITTVAMEATGIYWMCLYDKIEAAGMEVLLVDPHSVRHVPGRKSDVLDCQWLQQLHTYGLLRGAFRPEATVRRLRVLARHRADLVAEGGSHLQQAQKALMQMNIQLSLVVSDINGETGLRIIDAILAGERDPEALVKLRDPRIKKSTVAQMAAALTGHYSEELLFVLEQNIQAWRFYQKQIELCDQQIEGVLKAMVSASKAAVPPTPPKPVPVALAGSPGAKPKRQRPLHGNNAPKVDFSEPIRRICGVDLMKVCGLNLLSVLMIMAEIGVDMSPWRSAKAFSSWLGLCPGTKISGGKQLSRRTRHVVNRASGLLPLAALAAGKTDTWIGRFYRRKKAHLGAPKAITATAHKLACVIYHMLKYQEDFKPLDVAVYELKAQERRMRQLRKQVEELGYELIEKQQAA

SEQ ID NO: 358787 - protein, 343 aa, unidentified
MNQVITIGLDLAKNVFQVHGVDAEGNVVIRKQLRRRQVMPFFKKLSPCLVGMEACATCHHWARELSSLGHEVRIMPAHYVKPYVKRNKNDAADAEAICEAVTRPTMRFVAVKGPEQQSLMMVHRTRALLVRQRTMVVNAIRAHLAEFGIVAPVGLRGIAALGEVITDSGDERLPSVARACLVSLARALASIEREAGLCERRIHAWHRSNAESRNLETIPGIGPIIASALVASVADPSVFKSGREMAAWIGLVPKQNSTGGRDRMGRISKQGDPYLRWLLVAGAMSVIRHGRKTGFKDNPWLADLITRKPAMVVAVALANKNARTAWALLARGEAYRRPQAATA

SEQ ID NO: 358788 - protein, 341 aa, unidentified
MKKFIRIGVDLAKNFFQVHGIVRVGAEAVSRKFTRTKFREFFSSVAPCRVGMEACGSAHYWARELRSMGHDVVLIAPAYVKPYVKRGKNDAADAAAICEAMSRPDMRFVPIKSADQQAALMLHKTRELLVKQRTMIVNALRGHLSEFGLIAAKGIQRVHELVALALGEEGLPEAARQAAALLAEQSEQLEGTIDTLEKKIAEASAKYPMVRLLKEIPAIGPLISSAMAASYPDPGVFASGRDFAASLGLTPSQHSSGGKEKLGSITKKGNRYLRKMLVVGCTSVLRVAHKYKGALAEWIVAIKARKPERVAAVALANKLARICWAMLSTGEGFREELYTRA

SEQ ID NO: 358789 - protein, 353 aa, unidentified
MSSLTDLRDVVDVVIGVDTHVHTHSAAVIDARTGGVLGEITVDATADGYEQLVDFADEHAVLRAWAIEGTGSHGAGLTRRLERREEVVVELDRPERAKRRNGAKSDPLDAIRAAREALARPRLGTPRAGGDRQALSVLLAARRSAVNAAGDAQRQVFSLVIAAPEPIRERFRGQKLPAMLKTAAGLRIHASYDVETTTTVTTLRSLARRARTLSDEAADHEKAILRIVRSWRPDLLEQLGVGPIVAATVLCAWSHPGRIHSEAAFAMLAGVAPIPANSGQVTSRHRLNRYGDRQLNRALHTITISRIRYHQPTGDYVDRRTTEGKTPREIKRCLKRYIARDLYRLLEHRPITA

SEQ ID NO: 358790 - protein, 329 aa, unidentified
MAKLTAARDRWAKVSGKAPSIVLCYEAGYDAFWLARFLKARGIECLVVDAASMQVNRRARRAKTDRIDVGMLLRALIAWGQGDRHVWSVVRVPSVDEEDLRRSHRERDRLVRERTAHINRIKGLLFGQGIRDINVKSKYKTLQIDKLVTGEGHPLPPRLASEITREIARLALIQEQIAALERERDQAPTPCKTTERKRVQLMCLTGIGPAIAAVMTREVYYRQFDNRQQVAGFLGLATSPHDSGDVERSQGISRAGRGQVRGIMIQAAWLWLKHQPKSAITRWFVQRTAGQSGRIRRIMLIAVARKLAIALWRFVEQGLVPQGAMLATR

SEQ ID NO: 358791 - protein, 403 aa, unidentified
MFHLGIDVSKKAARYFILDEAGSKLKAFTLDNDKESLESLPGRFEALSISAENLLIGIEATGSFWENIFSFLKNKGFNIVLLNPYYTNKFREALAKKAKTDDIDALVIAQLLRTGEYIQSQVAEEDIQALRELTTLRYEFVKERKNLQRQVCSLLSVVFPEYEKTVITKPFSRASMAILQKFPTAKHLADVKPKKIEKIVRKIVGNNFNIDEIQSLIAAAKNSIYSGRAKEARATTLRMLLGHIDNLANSIEELEAQMKAILSPSGDDDSFPGQNLLSIKGVGDKTLAALISYLGSDGSNFPDSNSVIGYVGFYPRIYESGQTRRANKISKRGPKVLRWAIYMAAVASLKHNKEMRSLYHKKVSQGKSSKQALVCVSKKLLQIALSLLKSGDAYDPARVFVSR

SEQ ID NO: 358792 - protein, 451 aa, unidentified
MPQPILAVGVDPAKRLHRAVAVLFPDEVVLDVELPNAFDAVANLDLRLCELANQHGADLVYGLEDHRRYGRLFCQVLTERGRDVRVVNPLWTNRQRAFYGQDKDDAIDGRSIAAVVLRRHHQLPLASDFGEVAQAIREAERSLQDLGKVRTQLGNRLHLQLSDTYTAAYEEYFGKLKSPLALRFFRRFPLPQDLVGHNVEMLASLLLDLAGGKVGPHKGGNRLIAMRSKAQAILETSGAMRASPRTLALELKAELIRQLCDELLANHDRIIRLERMLREQLLPATKQTITTITGISTILAATIIGETGSITRFRSPAAFAVYNGTAPARNSTGGRDRHKARRDCNHRLKRAFYLAARAAVLHDPIAKAYHQSCKSRGLSYVEALKRVARRMSDVVYALLKSGKAYDRSIIEHAIERRREQAAPAARSHAKQSLVHSRPRKSNSPLSQRQVM

SEQ ID NO: 358793 - protein, 415 aa, unidentified
MEDLGLRALYRRVAGIDVHRMLHVVTVLIEQADGSMQRHTREFGGFRRDCRALAAWLLELGVELVVMESTGIYWKSVHAHLENAGVASWVINAHMIKHVPGRKTDMADSEWLAVLARFGLVRASFIPPKDLRELRLVSRYRRKLSAMCASEVNRLHKILDDGGIKLGGVVSDINGVSARAMVGALIQGQPIEHLLSLARGKLQQKREELSASLEGDLSARHLFVLGHLHAHIDTLQREIAEIDRYLLSAMQPYVWAHQLLQTIPGIDEIAAALILIEIGDDMGRFGCAERLASWAALSPGNNESAGKRKSGRTRHGNSIIRFILCECANAARMTKSTLAAKYRSLMARKSHKRAIVAVAHKMIRLIFLMLTRRQPYIDQAIDYDAMSAKKNAPRWIKQLKTIGRWPAPRPAATSI

SEQ ID NO: 358794 - protein, 483 aa, unidentified
MKPQQLKKNKKATCRPTPSHWHAMNRKQRREITRKIQSEDLSLEVVHPDAAGIDIGNESHYVAVPPTRDSQPVRRFGCTTWELKEMAVWLKQCAIRTIALQSTGVYWIAVYDILEQAGFEVYLVNANQTKNLPGRKSDVQESQWLMKLHTYGLLRNSFRPSQEIRTMRTYWRQRNDLVRAAGRHIQRMQKALTQMNIQLANVLSDVSGMTGQAIVKAILAGERNPYQLAALRNWRVQASEEEIARSLEGNWQEDLLFVLRQEQDGYEFCQKQMAECDQRLQQYLQQQEDRSHGASLPDEKRKERLRKKKKGNAPQFDLRAELFRMTGTDLTQIDGIDVSTTMTILSEAGWDMSKWKTEHHFVSWLRLCPDNRVSGDKIIGKGRLPTNNRVTNALRMAASTLRLSNTYLGAQFRRLRTKLGAPVAIKAMAAKLARLVYRMLRYGMQFVDRGADFYDAQHRKLQINYLKRKAANLGFQIIEAPAA

SEQ ID NO: 358795 - protein, 343 aa, unidentified
MQAVTTIGLDIAKSVFQVHGVDAGGQVIIRRQLKRREVLAFFQKLPPCLVGIEACASSHHWSRELQALGHTVKLMPPAYVKPYVKRHKNDAADAEAICEAVTRPNMRFVATKTPEQQSCLTLHRTRHLLMRQQTAVINAIRAHLAEFGIVAPVGRNGVEQLLGVVADSKDRRLPEIARACVAVLGAQLQMLKAQILESDRMIRAWHRSSEASRRLDEIPGVGPVLATALVASVADPKAFRSGRDFSAWIGLVPKQNSSGGKERLGNISKRGDRYLRSLFTIGALAVIRYAKIHGTKHRPWLTALLARRPTMVAALALANKIARMAWAMMAKGERYKEPAALAA

SEQ ID NO: 358796 - protein, 385 aa, unidentified
MPASNVSTPIAGHSGTIFVSIELSQRCWLVTMHSPDKNRFSRHKLDGGDDTGLIGLIERIRLRAEQALGSLPRVVSCYEAGYDGFWLHRRLEAAGFTNFVFDPASIAVEQRARRAKTDRIHGELLLRTLMAHCRGEPRVVRIVRVPTPEQEDARRATRERERLIKEQTAHTNRLKALLRLCGLAAGNPRRRDWMAWLERQRERNGEPLRPQLMAELGREHARLMLVGEQLKELGRASEAEPVSAAAAEMAQRSTTLQRLKALGPVFTGTLAGEVFYKDFHNRREVAAYVGLAPSPWRSGQTNREQGISKAGNPRARAKAIELAWLWLRHQPESALSRWFHERTGQGRGRIRRIAIVALARKLIVALWRFLTTGLVPEGAVLKAAA

SEQ ID NO: 358797 - protein, 408 aa, unidentified
MNSVGIDISKGKSMVAAMRPYGEVSLTPREIPHTYSTLEKLGYEIISLGEDTRVFMEATGRYHEPVAAALHELGIYVCILNPIVIKQSGGGSVRKVKSDKKDALKIAKYGLDNWANLRQHTPMDTLRQQLRLFSRQYNLYMKTSVALQNNLIALLDKTFPAVNTLFDSPTRDDGHQKWVDFATKFWHCDCITRISQKVFTERYQKWCKRNGYNFSYEKAEDVYFSSAGHFPTLPMNDNTKLLITSATAELTATRKILMTIKAEVIRLAKELPEFNVVHSMYGVGEITAAGLMAELGDVRRFNNRGAIVAFAGIDPGINESGSYQSKSNSSSKRGSSHLRKTLFQVVDTYCKKSPLDEPVYQFLDKKRLEGKPYYVYMTAAANKFLRIYYARVKVFLNEHYPEQGALDI

SEQ ID NO: 358798 - protein, 466 aa, unidentified
MENNYILYVGMDSSKGKADAAILKVSDRRSVKPKFLRKKLSFKFVKSEVTSFLETVRSYSDDNCTSICFALEVTGIYSTNVYNFIKDNLNDNESIKFLNTDFVNQWRNAHNIAKSDPLDAQTISTIIGTDSDVQYVNDNVFENKNGYQDLKALVHRHYQIKKIYSQEINRLIAQCDCLFPELQYVFEPKSAAFIAVLSSYPTTHDIINASRLEVFNVVYEATKHRCSIDKIDKLFDLCHDTLVPDNISSYGRSIILDLVENIKNIKGQLKMIERYIRDVASLNPAYKLLLTITGCGPLTAATVIAETGDIKRFKNADCFVSYSGTSPRNKRSGTSVETMGKISKKGSRYLRHAIYMIAEFARRHNPVLKHQFERIKNGNKKRHKLANIAIANKIARYIYSIMKNESGFVILHEHIMRLPEETQNTFFNSISLDFPENTRKQIYQYSDIDGEVHKFVYTKLEETMII

SEQ ID NO: 358799 - protein, 357 aa, unidentified
MRIIGGLDIHRRQITYDYVDLETGEASRGMIKPVCRSEFRQWLERLELRPAAFALEATTGWRFVVEELRRADIEPHLAEPAETRSLRGNKRRAKTDRADARHLRDLLIQGILPESWIPTDFIADLRTKARLRKALVDQRSGWIRRIKAQLFQHGLPTPPDLQTLEGRAWLARAELPTTARRVTELALSMIDFLTEQIDRLDGELKAIADAQKGCLALRAANYGVGPLIATAMLAELGDISRLSSSRKAVRLAGIDVTVSESDGKQRGRRHLSRQGPPLLRWALYEAGGNAWRRASPDHDYYVQAKEWPRRKAGQARHRASGPAAQLPRPRQSRTRRHRTRVEVDPIGGHDVGAAPIR

SEQ ID NO: 358800 - protein, 343 aa, unidentified
MEHYAGIDVSLEQSSVCVVDAAGRIVREAKVASEPEALIGWFRGLDLELARVGLEAGPLSQWLYAAMRDAGLAVELLETRHVRDAFKAMPVKTDRKDARGIAQLLRLGWFRSVHCKSLPAQETRALLTARELLRSKSHDAEMSLRGVLRGFGLKVGPTTARNFAGRIRELVAGHPTLTAVAEALLAAREVLGDQLRGLEKRLRDQAREDRRARLLMTAPGVGVIVALTFVAAIDDPARFRSSKAVGAHFGLTPRKYQSGETDVTGRISKIGDAGVRTMLYEAANIILTKPVKGSALKSWAARLAARAGMRKAKVALARKLAVVLHRMLADGTPFAAERAAAAA

SEQ ID NO: 358801 - protein, 407 aa, unidentified
MGITCGIDWAEAHHDIAVIDEHGVVLACERIASDAGGYSELLRILAEHADDVAAVPVAIETDKNLLVVALQAAGNPVYAINPRAVARYRERHGQAGKKSDPGDALVLADILRTDRHRHRTLPQTSENGLAIKALARQHQEAIWAMHQTISRLRSVLLEFYPQALQAFPQLKHKAALAVLAVVPTPEAGQRLTARRLVALLHRCGRRNDPALVERILSDLRTPALRQAPSVEQALGRTVVGLVGIVAAMQSAVEELEAALSEEFERHPLAPVLRSAPGLGPVLAARVLAEVGDDPSRFASAQSLRAFAGTAPITRSSGRSRFVNARRVRNKRLGDACHWWAFSMLTKSPGARAHYDRRRAAGDNHNAALRNLANKILGRLWWCLQNETHWDEAAAWPSARPAPLAAAA

SEQ ID NO: 358802 - protein, 424 aa, unidentified
MQYALPRVLPDVPAGGVCAGIDWATADHVACVVDMTGRVTDRFSAAHDKAGIAAMITRLRQSKVTEVAIERGDGPLVDALLAAGLTVVVITSRQVKNLRSRYGAAGAKDDRFDSFVLADTLRTDRARLRPLVPDTPATISLRMAVRARRDLVRHRVAACNQLRAHLAAAFPAGTRLFHDLDSPISLAFLARFGSQDAAAGLDEQAIGAWLATIAVRGRPAPASVLHARLQAAPPGATGADGTAQAGVTAALTATLTALSAQIKALETQIAGQLAAHPDEHIFTSLPRPGTVRAARLLAEIGDCRSRFPDPESLAGLAGVAPVTRRSGTRIAHGFRWSVNRQLRDALCDFAADSRHASPWAAAIYDDARARGKDHPLAVRITARAWSYVIWRCWRDSTAYDPAKHNALQAILAQQAAGSATKDDR

SEQ ID NO: 358803 - protein, 355 aa, unidentified
MTSTKYIGLDVHKESISIAVMNSIGKFVMESVIETKASTILQFIDGLHGDLHVTFEEGTWAAWLYDLLKPHVTEVLVCNPRKAALLKDGSKGDRIDARKLAELLYMNKLATVYHGEQGLRTMKELARSYLTITKDLTRVMNRLKALYRSWGIPCAGNEVYAPRHRAEWLGKISEAGVRRRAEHYYQQLDVVRLLRQEVRRDLLSESKKHKAWKLLRQIPGIGPIRAALLIALLQTPHRFRTKRQLWTYSGLGLETHDSAQYRVVEGQLQRSKKPVTLRGLNKNHNHDLKAIFKGAALRASSAAGPLRDFYEALLAKGRKPTMAHLTLARKIAAITLIVWKKEVRFDAKHLKPQAA

SEQ ID NO: 358804 - protein, 346 aa, unidentified
MEQITTVGIDLAKTVVSVHGVDARGNTVLRKKLSAARLVEFMARVPACRVGLEACSGAHAVARRLQALGHDARIMAPKFVVPYRKNQKNDGNDAEAICEAVGRPQMRFVPIKSAEQQAVLVVHRVRAELVAARSGLINQVRGLLAEFGLVMPKGRFTFRHQVAAVIDDVRVPTLARTVLQEVVARIRALDEDILAYDRRIDAQVRDSESMRRIGQLCGVGPITASAIVASVGDAKLFKNGRQFAAWLGLVPRQYSTGGKPILGRITKRGDVYLRTLLVHGARSALITLAHRHDRLALWAAALIARRGFKRACVAMAAKNARLIWALLAKGEPLRHEPAAELAAATA

SEQ ID NO: 358805 - protein, 415 aa, unidentified
MKPGEKTREIQRYIALDIHKEYVLAGGMNAGQEWILQPRKIEMGKFREWSAANLCAGDAVALETTTNVWDIYDVVAPLASRTVVAHAGAVRQIAEARVKTDKEDVKRLIRLLIADIVPEVWVPPTYVRELRGMISYRNRLVKTGTMIRNRLHSLLHRHNLSLPEEGLANKEWWDQQAISALEKIQIHQEIALLEQITKHKAEVDAELGRQCLGEVWGKSAVRLLQLSGFGVIITMTILSAIGDIFRFESSNKLVGYSGLGAGVHDSGKEHIEKRITKSGRKELRWAMVEAAWCAIRISPYWKEQYEKYLRRMRKPNQAIVVIARKLLVAVWHVLTKEETDAHASEEDLAYKMLVLAWDLDEDVRMGLTYKQFAKYALLKLGVENDITRFVRKDVPRRLAPREEVLARMAELGIPA

SEQ ID NO: 358806 - protein, 418 aa, unidentified
MKIVYPICCGVDVHKTFLVATLITSQGNTPRYSKKRFSTFNSSIRQFKQWLVDNNCFDVCMESTGKYWVPIYNLLEDTIRITIANPKWVKAVKGNKDDTKDSKWIGELFRHGLVPGSYIPEKPIRILREYTRYRSKLVSCKSSEKNRFQNALTVCNVALDAVVSDMFGKSASSITDYLLSSESFDPKHCVSLLQKSLKKKADIVIESIEGYQITTEQKERMIMVRSHLEYVQQSIVKLDEKLDKMITPYKNTISLLCTIPGVDRTSAITIISEIGTDMSLFANPKRLCCWAGLTPSNNESAGKKKSVRISRAGVYLKPALVQVAHASVKSNISPYYKNKYERIYKRRGKKRAIIAIARMILTAIYHMFVTGETWNPSDLFKIDIPQEMLEKQKEKAIKQAVKLLISNGLIKVTDISVA

SEQ ID NO: 358807 - protein, 470 aa, unidentified
MTRRELKAPSPQRAKKRLSRHLEQVNLYSAGIDIGAHEHYVAVPEDLDDGSAVRMFACFTADLERMADWLVAIGIQSVVMESTGVYWIPAFEILEERGLEVLLVNARHVKNVSGRKSDVLDCQWLQQLHTYGLLRGAFRPPEQVCALRAYLRQRAMLTNAASTHIQHIQKALRQMNLLLDNVVTDIMGQTGMRIIRAIIAGERDADTLAQHRDPRCKSTVAMIVQSLKGHYRDEHLFSLCQGVELHDIYRDKIRACDSAIERQLGAFEDRGDPEHRLPTPKRKKKTKNAPNFDVRGHLYRITGVDLTRVDGIDESTALKVVSEIGTDVSPWKSEKHFSSWLCLSPGNKVSGGKVLSTRTQPSANRVAAALRMAAFALANSKSALGAYFRRMRARLGAPKAITATAHKLARLVYSMLKHGTEYVDCGQDEYERQHQQRLVKNLTKRAAELGFTLLPTALEQPTSLNNAAVT

SEQ ID NO: 358808 - protein, 360 aa, unidentified
MRKRVSKKVSWFKENNLTAQDDIYVGIDVHKDLYHVAIWHNGHIGCVYSMSSDNNKLLQDLRRIRNSLKNVVYEAGPTGYGLVRLLRSADLPAKIIATTKTPRMTDSAAKTDRLDCQQLAEYAAKGLLTFVAIPTEQQEADRQVVRLRDQLVAKRKRVMQQIKGFLLQHSMVWPGGYWSKITLERLRQLDIAGELRFTLDQYLDEYDFLVRKLTEVRAKLRQIFSSERHSAAIEIFKSHPGVGNIVAWEFQAEMFDITRFRQPKQISKYIGLCPRISQSGKTCRQGPITKTGRRQLRAMLVQAAWAWYRRDPHARQIYNRLLHNTGNGKKAIVGLAKRIAIHLWRMLCDGCLYDAKVVRA

SEQ ID NO: 358809 - protein, 350 aa, unidentified
MYFAGLDAHLKYVTVAVLDRLGTLVLETTVPTREPERLLAVLAPFRPLEVVVETCPFWPWLYDLLVPAGIGFHLAHAKRLRAIATAPQKNDRVDARLLARMLLSGLIPEAYPRPGDQRELLRLLRHRTTLVRYRTRLAGRIHSQLHQQRLMLSREKLLRQATRGWLRETAWPRLTAEQQAIVTTHVELIDHLTPLIQALERRIDTAAGANPTAALLATIPGIGPYRSLLLAAELSPLTRFPRVEHLASYAGLAPVTRSSGGHTRHGSIPQGANRWVRGALVSAIPSHVRSAPHSPVSRAYAQLTARLGWRVARVAAARKLLRIVYIMLRRGEAWRSEPVAGADVRDEVHV

SEQ ID NO: 358810 - protein, 356 aa, unidentified
MRNLAAALVTPTADLNASLRDRRATPAPFTLHLTEVDMQSKLTFGMDIGKNEVVVACHEGAFAILKMANAVAGLRRWLGSVPAGSRLGLEATGGYHEPVAELAYSLGFTVYILNPKDVHFYARALGARGKTDRLDAQIIAAYVAEHCARLHPFTPLSADEKLLRELARRRATLVNAKSMLQQSLRVLPGFEREGRELLRAMGSFADRLERKLAQIAARSSERATLVKRLQTIDGVGTLTSIRCATLFTRVPFHSSDAVVAFFGLDPRPNDSGQHRGRRRLSKRGPSEDRRLLYNAAMSAIRTPAWRPLYLHLRNRGLASTEAIIIIARRIVRIAFAMYRNHSDFNPRLVPRPCCAA

SEQ ID NO: 358811 - protein, 396 aa, unidentified
MISVGIDVSKGKSTVCIMKPCGEILESPFDIGHTADELDSLISLIKSFDEETRVVMEDTGHYHLPVATYLSSHNIFVCCVNALRMKKFCSQSLRRAKTDKIDSIKIASFGITYWNELVKAYPSNVIYDELKFLARQYYQVTGMLVKSKVNFSNLLDQLMPKINDVLSNQGENHKLTEFVSRYIHFQNILDMGEMKFTSDYCKWAKKKGYRLNERKAAEILALAQNGIPTLPNSQSVKIAVSEAVKLIHSIEESRNTILAQMQDLCNTLPEYSVVKEMDCIGDTLAPRIIAEIGDVRRFKNKHSLIAYAGIDAPPYQSGAFHASERHISKRGNSYLRKTGYEIMQSLIKHKPADNAVYNFIQKKRSEGKCGKEAMIAGLNKFLRVYYGKVMEFYSEH

SEQ ID NO: 358812 - protein, 411 aa, unidentified
MDLYCGIDWAEDHHDIALVNDDGKLLARRRISDDAAGLAALIGLLAEHGDTAADPIPAAIETPRGLLVAALRATGRKVYPVNPMAVARYRDRHSVSGGKSDPGDAVVLASILRTDLHIHRPLPQDSELAQAIAVLARAQQDAVWDRTQAHNKLRSHLREYFPGFLHAFTSKQDGIMRPEARVILAAAPAPAAAAQLTEDQLRGLLKQAGRQRGINAEAARLRNAFHLRQMRQLPLVEDAMGKQTQALLRQLDAACTSADDLEQAATQSFNQHPDAEIITSFPGLGALTGARVLAEIGDDRSRFTDAKGLKAYAGAAPITRASGKKRSVTHRRIKNNRLNATGYLWAFSALTASPGARAHYDRRKDDGDRHAAAQRNLFGRLLGCLWHCLTTGQHYNENTAFPARTNLPAAA

SEQ ID NO: 358813 - protein, 343 aa, unidentified
MEKITTIGLDLAKSVFQVHAVTETGHVVVRRALRRSQVLEFFGNIEPCLVGMEACGSAHYWANAIGDFGHTVRLMPPAYVKPYVKRSKTDAADAEAICEAVTRPTMRFVPVKTPEEQAAGVVLKTRELFVRQRSQTANAMRAHMAEFGIIAATGMTSIAKLTAILRNDEDNRLPPSARAALLEMADQIEKLTDRINALDTKIVAAVKADEAARRLMTIPGVGPIIAATVRAAVHDPAAFRTGRDLAAWIGITPRANSSGGKERLGRISKQGNKQLRTLLIVGAISILKQARRGVKLPAWVVALIARRPYKVAAVALANKMARTIWALLVKGGTYQSPTMSVTA

SEQ ID NO: 358814 - protein, 356 aa, unidentified
MTKVTASFKDETVYVGLDVHKRSWNAALYLNDQYLRNIHQPPTPQALYHYLQHNYPQAKYVCAYECGKFGYWIQRKFKEFGIECLVLNPADIPGTQKDEVYKTDCRDARGIAQALSSGQLKTIFVPGEDQEADRQLVRQRKKIWSDLVRTKNRIKGFLDYKGIIVPAQYDNANWSRNFINWLTKLEFEHSSNRITLNYLIAEMELLRKELLNISNQIRKLMRSKKYKKLYYLLRSVTGIGPLTAASLITEIGDMKRFKNFYHLNSFIGLLPMEHSSGEREQKGRITVRKHRQLRSDLVECAWTAKRTDPALALYYGGQIKKGKNGKAAIVKVARKLLSRIRYVWLSGEPYQTAVVK

SEQ ID NO: 358815 - protein, 336 aa, unidentified
MTILTVGVDVSQQTLEVALCPSREQVVALGSFANAPDDFEKLQGALHRALDTYRAREIHLVLEPTGGYEQPLALFAYRQGWKISLPNPKQVREWARGCGIRAKTDRVDAAILARYGAAQTPPLWKPLPEEVAQLEALLERQEDLTEMLRQERNRRHALQAQEKYQGVVAQSIEGSIAHLQREIAAIERAIQAHLKAHPHLRELARRLRTVPGIGKRNVLFVLVLLYRWSTLTDGQGSPKGLTAYVGLDPLPYESGRSVRKRRKISRQGNRRMRRKLYMGALGGVRGRNALREFYQRLVGRGKKLKLALMAAARKMLVWAWAVFRDQTVFQPQQAAL

SEQ ID NO: 358816 - protein, 407 aa, unidentified
MRPIYERCCGLDVHKRTVVACRITPDGTQTRTFGTMTDELVRLREWLLAAGVSHVAMESSGVYWKPVYNLLEDQGIELLVVNARHVKAVPGRKTDVKDAEWLAELLQHGLLKASFIPDRESRERRELVRYRRSLVEQRAHLIQRIQKLLEGANIKLGDVASDVMGVSGRAMLQALADGVDDPAAVAGLAKNALRHKIPELERALTGTVREHQRFLLRSQFHLLESLETEIAALDEEVAQRMRPFQVALERLDEIPGLGLRAAQQVLVETGPDMSRFPTVAHFVSWARICPGNNESAGKRRSTSIGGGNRWLRTSLLEAAWTVSHSRKPSFFTARYRRVAARRGKKRAAVAIAHSLLIAIYHVLKDGVVFQDLGPAHFEQRNRDAIVRRSLRRLEGLGYKVTVETMTA

SEQ ID NO: 358817 - protein, 420 aa, unidentified
MTRKNNNKIISVVHPICCGLDVHKDMVSACIIITEADGQERFVVKEFSTFTDDLYRFKAWLLRHACQVIAMESTSVYWRPVHNILEDSLEVILVNAKHVKNVPGRKTDISDSMWLASLLRIGVLKASFIPEKRIRQIRELVTLRKSYTKSLADYKRRVHKLFATANIKIGSVVSDLFGKTGRNLIGKLIDTDTELKIEHVEQCAEGSLKQKVAELLRAIQGFFEAHHRFQLKIMMHTIAHLESEIEAITKRLDRILIPNQALMDQLDEVPGIDKKTAQSIIGHIGDTLTSFRSDKALASWAGLCPGNNQSAGKRKSGRSPVRKHPFKELMIEIAWAAVRTKGSYYKDKYYRLKSRRGTKRAIVAIAHRITKAIYYIIKHNRSYVDLGEAYLMSKSKEKRIKKLKMNARHLGFSLVPADIN

SEQ ID NO: 358818 - protein, 333 aa, unidentified
MKNYLFHAGIDISKDKLDICILDSSTLQSQHLIIKNDMKSISDFVKILKQKIDINNTLFCCENTGIYTNHLSFILLNNELDLWVVPAVEIKRSKGISRGKNDKTDSKDISYYSYRHLDKLNLFTVADVDVQKLKILFTERTKMIKALLILETSKENKEFTRKEIYKEISGVNRALIKQIKTSIKKVEFKIKELIKSNEQLNKQDQLARSIPGIGAQTSTYLIIATKGFSSFDNWRKFACYCGVAPFEFSSGSSVRGKTKVNHMADKKMKSLLQMCVLTAIKYDPQLKEYYYIKKAEGKNSMLVMNNIRCKLISRVFAVISRGTPYINTYKFAS

SEQ ID NO: 358819 - protein, 348 aa, unidentified
MDRYIGIDAHAISCTIVVVGQSGRKLSEQVVETNAKALIECIRSIPRPRHVCLEEGTQSAWLYEILSPHADELVVAAITESKGPKSDQRDALARAQQLRLGAFDKLVFKAPTQFAQLRELARSYDAMTCDVVRTQCRLKALYLSHGIHTPGQTVYAAPQRSEWIDKLPMSCRASALLLYGQLDAMQQLKKDAQRQLVAESHRHPISKLLETCPGLAQIRVAQLIPVVVTPHRFRTARQFWSYCGLGITMRSSSDWVRQDEHWMRAQVNKTRGLTRTFNHTLKHVFKGAATTVITKLPDHPLRQHYERMLKAGTKPNLAKLTLARQIAATSLAMWKHEEQYDPARHHKQ

SEQ ID NO: 358820 - protein, 370 aa, unidentified
MAEPTILFVGLDVHKESIAVAHASADRASDIVYVGQVGTREADIDKLVRRLHSHASELIVAYEAGPCGYGLYRTLTRRGITCLVVAPSLIPKKPGERVKTDRRDAAQLARLLRAGDLKSVYVPTVDDEAVRDLSRAREAAIGVLKDAKLRLKSFLLRHGLNYSGRATWNEAHLRYLAKVVCPTPAQQIVFQESLRAVSEQTERVRRLEDELVEIAATWRLHPIVEAFQAMRGVQEHTAVTLAAELGDLTRFDSPRQLAAFVGLIPSEYSTGESRRLGPITKAGNGHARRALVEAAWAYRYPAKVSAHLQRRLEHCATPIQDIAWKAQVRLCKRYRRLVARGKNANVVVTAIAREILAFLWAIAQEVPVTH

SEQ ID NO: 358821 - protein, 353 aa, unidentified
MQNDHQSSESVILGVDTHLDIHVGAVISQAGKLLGTHIIQTNQSGYLELLDWARSFGILERAGIEGTGTYGAALTRYLIKNGIYVVEINRPDRSKRRLEGKSDPLDAENAARTVLSGSSKAIPKMQSGACEALRIISVARRSAVKARTQAINQLRALLVSAPQDVRDKLWKSKPRECVAACINSEVSEYSPLRIALCSTLRSLAKRWMALTEELNELDESLDKLTRKYASHLRSQFGVGPQTAATLLAVDPERLKNEAALASLCGVNPLPASSGKTVRHRLNRGGSREANNALWTIALVRMRSDPRTRIYVDRRTGEGLSTKEILRCLKRYIVRELYPLILSDLAYANRPLLT

SEQ ID NO: 358822 - protein, 397 aa, unidentified
MIAVGIDISKAKSTVAVIDSDGTVLASPFTMAHTQPEMEAFVTYLKGLGEPTTILMEYTGHYHYPVLKKLQDEGFPVCIVNPYQMKKYGDVEIHKAKTDKKDALRIAAYALEKSYKLVPYSSMEQKYEDLKFLSRQYSQRITYVAKLKVQLIALLDQTMPGITRILPLNSRNPEKCALLLFIKRFKSFDEIQRIGKARFLASYDVLAKKASERSASSKGLSIYELAVDSITTRGEDPYIWLSQNQCVDLLSTTQNAADEIISQMRNIAETIPEYKVLRAMHGVGDRLGPIILAEIGDIRRFHSGKALNSYAGNDAPPYQSGQFESRNRHISKRGSSTLRKACYEVMQALKLTKPQDDPVYLFMLKKEQEGKPFNVAKMAGVNKFLRIYYARAMELYK

SEQ ID NO: 358823 - protein, 392 aa, unidentified
MFFVGIDIGKNNHVASMMDDSGKVVFKAFSFPNTSDGGHALFSKLTSYSSSTDDFEIGMEATGHYWLSVYSFLFEKKFLLHVINPIQTDGWRRGTEIRKRKNDIIDSVLIADLIRYGQFVETRLADEDLFSLRTLTRFRTYLVESISNLKRKVVCVLDQVFPEYQSIFSDIFGKTSKEILLQFSSPIDFESVSSQTLAELLAKLSRKQVGPAKAAQLKAAASCSFGVTFAKSSFTFQLKALIEQISFIEKQVKETETEIAGIMEKLESPITTITGIGNVTGAAIISEIGDISKFDSPRKLVAFAGLDATVTQSGEFEAAHNVMSKRGSPYLRKAIFQAALVAAFKDPVLSAYYQKKRAEGKHHLTCIGAVARKMCNIIYAVVKNNQPYVPKA

SEQ ID NO: 358824 - protein, 343 aa, unidentified
MNISRVGVDLAKSVFHVHGVDRHGQVQWRGQYPRHRWLKALLTRVPKGTPIGMEACASAHYWARALQQYGYPVRLIAAQFVKPYVKSHKNDRVDAEAICEAMSRPQMRFVPVKTVAQQDTQASHRIREELVGQRTAKANQIRGLVGEYGLVAPTGLAQLRAALPQWLEDADNGLTEAFRGLLAGLAGDLRHLDARIAALDAHITQHLQHDPVARRLLAVCGIGPLTASALASALGDGQAFSRGRDFAASLGLVPRQHSTGGRQRLLGITKRGDGYLRKLLVHGARAVLQHAAKKSDPLSQWLNTLALRKHPNVVIVALANKMARLAWAMTRHQTPYNPDLAAG

SEQ ID NO: 358825 - protein, 375 aa, unidentified
MIAPTRPEMSVSEPTLYVAFELGKKDWTLAMTCGFGIQPWLRTVASREWGAVERAIAQGRAHFGLSTAARVVSCYEGGRDGFWIHRALTARGIVNRVVDSASIEVNRRARRAKTDRLDALKLVTMLVRVWAGERRVWSEVRVPTVAAEAARQVSRERTALTQDQTRLVNQMRGWLATWGATLPVRRRGEWWTTLRDWAGAALPVEMQARLARAEARRQSLAAQIAELDAQQQAAVMAAPAPAALRRLVQLKGVATTSASVLLDEGLVWRAFRNRRQIGGLLGFAPTPYDSGESTREQGISRAGNARLQAISIQLAWNWVRWQPLSALTHWYQANFGKGKRARRIGIVAVARKLMIALWRYVTTGVVPEGAIVKVA

SEQ ID NO: 358826 - protein, 397 aa, unidentified
MHEAQPEVGGGDVVVIGVDPHKASVTLEARDTREILRASGTFPTTTPGYRAMIQVARQWPRRIWAVEGARGVGRALVARLLAGGERVVDVPAKLSARTRVFDTGHGRKTDAHDAHAIVMVALRDHRLREVVIDEDLEVLRLLVDRRDELAAARTQALNRAHRLFAELVPGGAPTKKSVTQYQALLTGIRPRDGAGRVRRRTLAEELTEARRLEVRVKEITAEIKAAVLARGSHLMDLPGIGPAGAGRILADAGNVARFPSRHHFASWTGTAPIDASSGAHQRHRLPIAAALREIRRAKAEHAADAAQRSRIGQVEDEATRAEVEDLVRREQELVAGHGDLRFSGLVTVTASTLDELDAACAATEAAAAQSLCEVRRLVGQQGLAHLAGAVPLARGVL

SEQ ID NO: 358827 - protein, 346 aa, unidentified
MSKQIVAVVQAEISHVKKLFCGIDVGAETLAVAVMDWDHPCIEREFANTVTGHKALLGWLGKMKAQVRVSLEATGIYSMDLALALDATEYVEIAVLNPKRVHDFARTLRRSKTDSADAQVLAEFSLRMPFAAWQKPSQSALAVRAVSRHLEALVVQQSREANRLHAAERSIATPRCVIADLKRSLAGVGRRIVKLRREAMTLIAVDANLKERFNLLTGVPGIAAVSALQILGELVLLAPDMKVRQWVARSGLDPVHQDSGTSVHKPSRISRAGSRHLRRALYMPALAAVRWDPHMKAFYEALLGRHKRKLQALIAVARKLLHAIYGIFRTRTPYDGSKLFPHLKTA

SEQ ID NO: 358828 - protein, 336 aa, unidentified
MNLTQNDRLKQVTSDTLIVGVDVGSQTHFCRAFDWREFELSRRVFKFSNTGMGFITFLRWTEELMNKTEMKKVIVGCEPTGCYWLTFQKFLQDHDVQLVTVNPFTVNRSMELDDNSPEKSDLKDPKTIALLVKDGRFSTSYLPSGVYAEIREASVCRDQIMKQHVRLSNQIQGWLQKFFPEYFECYADWDSTSGLMLLREAPLPQDILKIGAGGINQIWRDAKVRAAGIKRAQTLIEAAQNSVGLEAGEAARLEIWLLVNDYILKAEQLKRLDEYLEEKVKEVPNVEKLLAIKGVGMSTVIGFIAEVGDIGRFTDPKQIQKLAGLEIVKKGTAKNQ

SEQ ID NO: 358829 - protein, 372 aa, unidentified
MSQKLNAAIAVIGIDIGKNSFHIVGHDHRGAIVLRQKWSRGQVETRLANLPPCLIGMEACVGAHHLSRKLQMLGHDARLMPAKYVRPYSKGQKNDFRDAEAIAEAVQRPTMKFVATKTADQLDLQALHRVRDRLVGQRTGVINQVRAFLLERGIAVRQGLRSLRSELPGILATRTDVLSPRMLRIIEDLAGDWRRLDERIEGLSSEIETLARQDKACERLMTVPGIGPIISSAMVAAIGTGDVFSKGRDFGAWLGLVPKQISTGDRTILGNRSRRGNRYLRALFVQAAWVVLVRVKCWERYGLKSWIEAAKKRLHHNVLAIALANKLARIARAVLNKGRAFECVKTEETTSQRRRVWSRRHSSFFPSPEGIL

SEQ ID NO: 358830 - protein, 318 aa, unidentified
MGIDVAKAQLDIALRPSGERWAVPNDASGVATLVDRLQVLSPTLIVREATGGLERLGTGALATAGLPVVVVNPRQARDFARATGQLAKTDALDARALAHFADVIRPTPRPLPDAQTQELRALLGRRQQLVVMRTAEQNRLAGTNGRLQTDIEAHITWLNERLAMLDDDRETLRRASPLGRENDDLLQSAPGIGPVCARTLLLELPELGTLTRQQIAALVGVAPLNCDSGTLRGRRMIWGGRAHVRTVLYMGTLVATRYNPRIQAFYERLLAAGKVKKVALTACIHKFLTILNAMLKHRSIGRPGNLRRSRVKKYTTHP

SEQ ID NO: 358831 - protein, 344 aa, unidentified
MQITTIGLDLAKSVFQVHGIDATGRVVVRKSLRRSQMLPFFAKLPPCLVGMEACGTSHHWARELIKLGHEVRLMPPAYVKPYVKRGKTDAADAEAVCEAVTRPTMRFVPVKSPEQQAALSMHRTRDLLVKQRTQLINMIRGLLAEFGVDIPKGLERALLMARQIVDGKAPEVPIEAAKVVGTLSQQALDIHVRLREIDRDLLVSLRGSDVARRLMTIPGIGPVGATALAASVTDPHQFRSGRQFAAWLGLTPLQKSSGGKERLGRISKMGDKYLRKLLIVGMTSLVRRAKYNPGKIDPRLADLLARKPTRVATVAMANKTARVIWAIMARGETYHADHRPALAA

SEQ ID NO: 358832 - protein, 318 aa, unidentified
MSQPNLQCMGIDVAKLSLDIATTDTIEPFTVGNDEDGFAVITDKLKHTKINLILMEATGGLEAAIACKLQSEGYDVVVINPRQARDFARSMGYLAKTDKLDAAMLAQLAQIIDRHPDRSRYIRALPDEARAVLTAMVVRRRQLNNMLVAERNRRYPSHPQSRKSIDNIINALESELDHISQEMKQHVKVFFMEQAELIGSVKGVGEVTVASLIAELPELGKLNRREISALTGVAPLNRDSGKMRGRRTTFGGRAGVRATLYMAALVATQFNPAIKMFYQRLLAVGKPKKLALVACMRKLITILNTMVRKGEKWDASFR

SEQ ID NO: 358833 - protein, 338 aa, unidentified
MTIATVGIDLAKNVFAVHAVGKSGLVEVRRPEVRRAKLLELVASLPPCLIGMETCSGAHYWAREFEKLGHTVRLMAPKFVAPYRMAGKRGKNDANDAQAICEAVARPNMRFVPVKTIDQQAELFVHRARQGFIEERTALINRMRGLLSELGIVLPQKAAAMRQGVHQVLEDLPGWCNTVIADLLSHLSKLDERVAEYDRHVQQAAKGNERARLLMQLAGIGPTTASALVATVGNGSDFKSSRQFSAWLGLVPGQHSSGGKARLGGITKAGDSYLRTMFILGARSLLMKAAAHTDSVSRWAIKLKERRGFGRAVVAIAAKNARMCWAALRMGESFKVPS

SEQ ID NO: 358834 - protein, 343 aa, unidentified
MEAKRYIGIDLHRDCFTACVRLESGREYLKKWKLEDMPKFADKLRPTDQVAVEMTGNTRLFHDQVAPLVDRVVAVNPTQFKVITHSVKKTDPNDARLLALYLAKDLLPEVRMKDKTQAQIASLTQTRDTMVKLRTALKNKVNNLCSAYGVNLNRESLASEKGLRAVGQMPFDPLVNLELKIIVDQIRSLNRSIAELEEMIGKEGQKLEGHKNLTSIKGIGKLSGGILLSIIGDIGDFADQGKLASYFGIVPRVSNSNETEHSGRITKRGTKLGRTTLIQCALIAQRYSPYLKTYYEKMKARRGAGKAIVALARKFLGIIYRTLKNQWVFEDFPNFVLAEQATA

SEQ ID NO: 358835 - protein, 407 aa, unidentified
MNPLYVGIDVSSKDNVVYLMKPDGTKIKNFSVPNSKDGSKRLVKEVLSALTSFSLTDVIFGLEATSVYGDNLVYFLREDGSLTPNNRKIHVLNPKQVNKFKESYNDLPKNDYVDSFIIADCLRFGRINKEVYLDDYRYKALHNLTRARYVTVQNLTKEKQRFINVLFKKYSSLAQEKVFYDKFGATALAVYEEFDSADTLAYMDLHELTEFLQKKGKNHFSNPEEVAKAIQKAARSSYRLPKTVNDSVNQVLAISISAMRALEAQIKEFDKAIAAQMQLIPNTLTSVKGIGAVYSAGIIAEIGDINRFPDQAKLAKYAGLSWTQHQSGGFEAQNTRLIKTGNRFLKYYLGEAAMSLVRCDAEYSRFYHLKYNEVNKYQHKRALALTARKLVRLVFRLLKDNRLYMER

SEQ ID NO: 358836 - protein, 399 aa, unidentified
MAASRRVVIGADTHLETNHLAVITDAGQPLADAEFPTCPAGYDAAVKWAQSFGSIVIAGVEGTSSYGAGLTGVLQAAGIEVAEVSRPDRAARRRKGKSDPLDAYAAARAALAGDGLAVPKDEHTTALRALLTARRGAVKACSAATNQIHALLVTAPAELRERYRRHSIAALVKVLARCRPATHSDPTTVAVLMAAKALAQRIEFLERQKHDLTAQLDVLVQQINPALRATYGVGPDTAAQLLVTAGTNPHRLRSEASFAALCGAAPVPASSGKITRHRLSRGGDRSANNALYRIALVRMSAHPQTRDYVERQAANGRTKKEILRLLKRAIAREVFRLLTRPYLIDDYTDLRPARQAKNITLATVATHFGVPIITVSRLERGHQRNDTLANNYRQWLTAA

SEQ ID NO: 358837 - protein, 406 aa, unidentified
MFYLGIDVARDSHRLVILDDNGERLSGGISFQNNTADFKKVLSKLKELSINSDNSIAGLEATGNNWENLYCFLTGNNFKTILLNPHQTNKFREALRKKAKTDDIDAFVIAGLLRSNEFASSYVPEDKIQTLRELTKLRYEFIKDHKNYQRQVLALLNIIFPEYKQTALRNPFTIASTAIFKAFSTAKHLSIAKPKHIEKIVRSIKGNNFNIKEIENLISIAKNSVYSGRCQESRALTLNILLTQVENFDKSIKQLEEQVNQILSPTSNDDINSFPGSNLLTIPGVGPKTLAAILSCVGESGQAFSTGVKLIGHVGFFPQIYESGETKRANKLSNKGPAYLRHALYMASVACLKHNIQLRNLYHTKISQGKKPKQALICVAKKLAHLCLSMLHSGQDYNPARVFSYV

SEQ ID NO: 358838 - protein, 428 aa, unidentified
MKNRNIEKLKAITLSTLVVGIDIAKQIQWARFVDYRGLETGKALKFHNDKDGFDSILASVRTICKNKRFDNVIVGMEPTGHYWKPLAYYLIMHGIKVVMVNPYHTKRAKELDDNSQTKNDKKDALTIAKLVRDGRYYEVYMPQDIYAELRVLTNSRISLMKRYNALKNTITAVMDEYFPEIVTVFKNPLKGKASMQILKSCPFPALILELGVDGVLAEIKKAVKKTVGRKKAEQLVETARNSIGVGYGIVSAKLKLELMIEELELLTKQLARIETEMDLALDNTGIKKIILGIPGIGVVTAASFLGEIGNPMRFDNPRQISKMAGYNLVEDSSGQSKSGTVISKRGRKSLRSILYQMAIIMVAVNAEIKTFYQYLKTRQNNPLKKKQALVVISKKIITVIYNLVKKHTEYKAELVLGEFRKNQIKQAA

SEQ ID NO: 358839 - protein, 471 aa, unidentified
MGYRITKRQDKKSPEHGQRYTMGDLQTMPLLYPDLAGIDIGSREHYVSVAADRSVCPVRTFGCTTPDLQDMVIWLKMCGITHVVMESTGVYWVPVATILEAAGLTVALVDAREAHRLSARKTDVRDCQWIRQLYACGLLRNAFRPAAEIQPLRAYWRQRQELVSLCATAIHHMHKALELMNVQLHKAVSDVAGHTGMLIIRAIVAGERDPQAFVNLIHPNCKSSPQQFVKAMTGHYDREQVLALRQALQRHDIYQEQMAELDKELECSLQQAASAHAPKSDTAAAASTGKARRRKNQSHFQLADELKRMVGVDLTRIEGIDALTAFTIITEQGTDMSAFPSEKHFASHLGLCPNNQVTGGRVRKKRTRKVQSRAARALRLAAMSLARSKTALGAFYRRMRARQGAAKAIVATAHKLAKYIYRMLKHGEQYVQRGEDAYEQQYRERLFKNLQRQARILGFQLLEQTTGELLS

SEQ ID NO: 358840 - protein, 400 aa, unidentified
MHLTENISVPQKNFIAIDLHSDSAVICVRRNALNKAGELVGKNIWCGRVSIRDGLDSFVKALLPYCQDFDHVAVVESTYNWYCLADVFEERGWLLSIADPSTVSQANLKSSDDRTDAQYLAERLRVGSLKHYLPLSYSSRALRDLCRYRMAMVQDCASLKIKLINLYRNQLSKNLLVADLLDRCRNHMQSNYRFDPDILEEFKDPNIRLRVAFEVSRIAMLEEMIEECNAEIQKQCKDQELVKLCKTIPGCGPVLSAVICTEIGTMQRFKSAGDFVSYCRLCSTSKLSNGKSKGLGNAKNGNAYLSWAFTEVAQYASRNPVIREILQRLLRKYGGLRVKAIRTQAAKIARVTFYVLKNKQPFNAAKCFGIELTKSIKKKLTHKTLREDAAVVLPTVAGQA

SEQ ID NO: 358841 - protein, 403 aa, unidentified
MNAVGIDVSKGKSMVTILRPFGEIVSSPFEIKHTSSDIHSLIKLIHSIEGESRVVMEHTGRYYEALAHQLSAADLFVSAVNPKLVKDFNNDSLRKIKSDKADSVKIARYALDKWQSLEPYSITDELRAQLKVMNRQFHFYVKQKTAMKNNLIGLIDQTYPNANTYFNSPTRSDGSQKWVDFVSTYWHVDCIRKMSLNAFVEHYQNWCKRKKYAFNKSKAEEIYTKTKELVPVFPKNEITKHIIRQAVDQLNSTSVTVETIRTLMNETASKLPEYSIVMQFKGIGPSLGPQLMAEIGDVTRFTHKGALTAFAGVDPGVNESGSYAPKSVPTSKRGSSNLRKTLFQVMDVLIKTMPQDDPVYQFMDRKRTQGKPYYVYMTAGANKFLRIYYGRVKEYLSVLPDPS

SEQ ID NO: 358842 - protein, 338 aa, unidentified
MVLIGIDPHKATHTAVAVDDKENALGELTVRADRLQVERLLKWAVDFPERLWAIESANGLGHLLAQQLLAAGEAVVDVPPTLAARVRLLGSGKSQKNDPNDALSTAIAALRAPRLRSVAREDHGAILRILADHHHDLGSLRTQAICRLHALIRCVIPGGTATRLTADRAAAVLRKVKPGGAAEAERKRLALGYVMDIRRLDAEIADSKARIIQAVRASGTSLVEINGVGPIVAAFLIGHSGDMRRFKDRDHYASYNATAPIEASSGPKTRHRLNPRGNRQLNHAIHIIAVAQIRHPSEGRRYFDRKVAEGKSNKEALRALKRQISNAVYSHLVIDSSR

SEQ ID NO: 358843 - protein, 330 aa, unidentified
MERQYIGVDLHKQFFQACAVNPAGDRVWEMRFPRTDGGMTLFRARCSPLTSIAVEACGPTWAFVDALGPTGAPVCVVDPRKTRLKAGFAAKTDRLDARRLGDALRRDSVVSIYVPPPAIRESREVCRGRHHVVRLRSRVAQMIRSLLLRSGVADVPVRRVYSARGLAWLETVPLPPEAAASLGRFRHLLVAIHAEATAADATVTGRAAADPVACALDAMVGIGPVFALTIRAEIGDVTRFRRGAELASYSGLVPRVDASGDRYWSGRITREGSPWLRWALVEAAMHAMRRADSLGRWARQLAIRKGAFKARVAVARRLCDEILTVWPRTA

SEQ ID NO: 358844 - protein, 342 aa, unidentified
MINRTVSWTGFPGNLYLQGWFHYGHELHYIGIDTAKEKLDVDVLRPDGRHRTKKFANTTKGHDELVSWLKGHKIDHAHICIEATGTYMEPVAECLYDAGYIVSVINPALGKAFAQSEGLRNKTDTVDARMLAEFCRQKRPAAWEAPHPLERALRALVVRHQALTDMHTQELNRAETAREVQRPSIDAHLLWLEAELKRLEKQIKDLTDDDPDMKHRRKLLESIPGIGEKTSAVLLAYIGLKDRFAHARQFAAFAGLTPRRYESGSSVRGASRMSKAGHVSLRRALYMPAMVATSKTEWGRAFRDRLAANGKKGKVILGAMMRKLAQVAYGVLKSGVPFDASA

SEQ ID NO: 358845 - protein, 377 aa, unidentified
MEIAIGIDVHKEKCAAFAKFAGKGEPRPRHEMFLERFNERFRRFDSDYRGMTELADFVKDHGVHVLIENSTKSQDVYWMLRGLGLEVTVAHATDLKHISESMNKNDDNDAAQLAGYMRRRLWGEIEFAQCYIPMQETLLQRELCRYDLRLRSELTALKCQIHAHMLIRGWKLTREYPNIVCTAALRELNAADIDIFRFDVAKARYLKQLVAETDRALRARMETNRMFEIIWSIPGFGILSASYMACMIDDLSRFRDGKSLAAWMGLTPKLDESADKPKNCGITRRGDPEMRKLICQATFVHIFHSESFISEKYRRLKSRGKSHNEALVACANSMAQMIFAMLRDDTKYSSDPKTLSKTRALADSDEIEDEMEASARA

SEQ ID NO: 358846 - protein, 340 aa, unidentified
MRRFEYNSRGVRKLIKYLTSLNPFIVSMEYTAGLERNLIFALQQHNIPCCCINPYNLKNFTKTMNVRAKTDLISAKLIAQYTKLYKTSPMQKIDKNLIYLKDLVKRHIQLVNILSSEKNRLSGSSLNKKHIMRFIKGVEKSIDENYEEIKKMVESNNEVKKKAEILKTMPGVGEYSSIVLAILLPELGYTTRRQISSLCGVAPYVNQSGKYKGKSYIRGGRKDVRNLVYMVTMAAIRYNPVIKDYYYSLISKGKPKKVAIVACMRKIICILNAMVRDNKVFMADYNKLQKEENKNEGKIIKKVEDQEKHNENIKQSKPLDFNRGVKDVVLVVKSDPNMVT

SEQ ID NO: 358847 - protein, 345 aa, unidentified
MKHCGGLDVSVKETAICIVDETGKLVRETKVTTEPEAIVAVLTEAEVEYTRIGLEAGPMSQWLVTGLLEAGLPVVCVETRHMKAVLKAQQVNKSDRNDARGIAQMMRVGLYKPVHVKTLASQHERMLLTSRKLLRDKLQDVENELRGTLRNFGLKVGVVSTGHFEARVRALVVEHSPLEAIVAPLLAVRRVLREQFAVLHKMVLERIRRDRLCRRLMTVPGVGPVVALTFRATVDQPQRFARSKTVGAHFGLAPRRYQSGDTDYDGRVSKCGDAMMRTALYEAAQVLLTRTQKWSWLKAWGMQVARRRGGKKAIIALARRLAVILHRMWIDGSQFRWRKEVNAAA

SEQ ID NO: 358848 - protein, 429 aa, unidentified
MNYTQNEKIEQVTDSTMVVGVDIGSQIHYARAFDNRGRELTKRIFSFHNDLEGFNSFNLWAETLKTENKKTAVLIGCEPTGHYWFAFAKYVNDHQKRLVMVNPFSVKKIKELDDNSPKKTDSKDPKIIAKLVVDGRYSIPYMPEGIYAEIRDLVYSRDRIMKQHNISANRIQRWLAIHFPEYLGLYTRFDAISGLAVLEKAPLPKDVIALGVNGIRKIWHDKKMRGRGVTEDRAKTLVEAAHNSVGLDGGIGTKSELYMLLEEHRLWTSQLEAVNKVLEEMILKVPHVEKLLAIKGVGSITIAGFIAEVGDIRRFDSPKQIQKYAGLELVENSSGKHKGRTRISKRGRRKLRKILYQVMVPLLARNKEFRGIYDYYVTRVKNPLKRRQAMVAVSCKLIRVFYAVLTKGVEYDRFKMMSDIHRKSDIIAA

SEQ ID NO: 358849 - protein, 356 aa, unidentified
MSHDVKYIGMDVHKEAIVIAVQNESGKLVMESVIETKASSILQFLHGLRGELHVTWEEGTWAAWLYDLLQPQVQHIVVCNPRRNALLKEGSKSDKVDAGKLADLLRTGMLRPVYHGENGLRTLRELGRSYQTISKDLTRVMNRLKALYRGWGIPCAGTQVYAARAREEWLSKLPQAGVRRRADLLYQQLDGLQALRREVRPEFLAESRKHKAAKLLRQIPCIGPIRAARLIGLMQTPHRFRSKRQLWTYSGLGVETHDSAQYSFVRGQLQRSKKPQQVRGLNRNHNHEMKEIFKSAATRASCGRGPFHDFYTGLLAKGMKPEMARLTLARKIAAIALTLWKKEERFDVEQLKTQAA

SEQ ID NO: 358850 - protein, 316 aa, unidentified
MQTPLVFVGIDVSKVRLDVGLRPSDERTSVPYDAHGITTLIAQLTQVQPTRIVIEATGGLERLLLRALVGAALPVIVVNPRQVRDFAKATGQLAKTDTLDAQVLARFAEVIQPSLRVIPDAQTQELAALLARRRQVLAMQGAEQNRLDRAPDRVRKRIEAHLRWLRDELARLDEDLDGLIQQSPVWRAREELLQSVPGIGPVMSRTVLAELPELGLLNRKQIAALVGVAPFNRDSGRLRGHRTIWGGRASVRRVLYMAALVATRWNPMIRLFYQRLRAAGKAPKVALVAAMRKLLTILNAMVHAGTPWQPLVAQDA

SEQ ID NO: 358851 - protein, 346 aa, unidentified
MLYAGLDLSRKRLDFHLLDADGGTVEVGAAPPDADGLRGLTERIDRHGAPIRAAIESMNGARFVHDRLELAGWQVEIADAQKVKGLAPLACKTDRIDAWVLAELARRELVPAIWLPDPTVRGERERARWRLHLVRHRSSLKQRVHAVLLAHGKPCPVSDLFGVRGRQLLARLDLPEPWQGTLEASLRLIDELDREIGDCERELRRLGADHRYVPLLLTVPGIGWVLAYTIAAEIGDIARFPAPRQLVGYTGLCPRVYQSGNSDRRGPLAKNGPRYLRWALIEATAHASKHPLYRDRYQRTKTRLGKQRGGKVAQVDLARRLADAIWHMLTRDQPFAPAGATDPLAA

SEQ ID NO: 358852 - protein, 365 aa, unidentified
MQIIIPTNATADMKNTIPSITIGLDLGDKNHAICVLNAAGEVVEERSITNHRESLRRLSQKYPESRIALEVGTHSPWTSRFLKDLGHEVLVANPRKLRAIYTSVRKSDQSDAHMIARLARVDPILLAPIQHATEEAQRDLLQIKLRDNLVRQRVDIISSIRFTLKSLGVTLASPNTACFAKACRNALATQDPALLAMCEPSLRVVEEITRSVRDLERHIEELCASTYPETAWVRQITGVGAITALCFVLTIGDPARFESSRDVAAYLGLVPKRDQSGNTDKALPISKAGNAYLRRLLVGSAQYILGPFGPDCDLRRQGVLLAARGGRAAKKKAVVAIARKLSVLMLTLWKGKLTYEPLHNISAAA

SEQ ID NO: 358853 - protein, 344 aa, unidentified
MQAITTVGLDIAKSVFQVHGVDAAGQVVIRRQLKRRYVLMFFQKVPACLVGIEACASAHHWSRELQALGHTVRLMPPAYVKPYVKRHKNDATDAEAICEAVGRPNMRFVATKTPEQQSCLTLHRTRHLFIRQQTAVINALRAHLAEFGIVAPVGRNGVEQLLGVAADSTDKRLPEVARACVAALGAQLRMLKAQILQFDRMIMLWHRSNEASRRLDDIPGVGPALATALVASIADPKVFRSGRDFSAWIGLVPKQKSSGGKDRLGSISKRGDRYLRSLFTTGALAVIRYAKIHGTRHRPWLTALLARRRGRRDPADRRERGDFLSLAAGVRWAQERSGEAVEGS

SEQ ID NO: 358854 - protein, 402 aa, unidentified
MNCVGIDVSKGKSMIAVMRPFGEVVVSPFEVRHTASELSELARLLKNLDGETRVVMESTGNYHAPVAWLLHGAGFYVSVVNAMLVHDYGNNSLRRGKTDKKDAVKLANYGLDHWLTLPRYVPEEDTRLMLKTCYRQYQQYSKVQTMLKNNLISLLDTAFPDANRLFTSPPRADGSEKWVDFVATFWHCECVCGLSKKAFTAKYQRWCRKHGYNFSQDKALDIYASACGRFGVMPKTNTAKLLVEQAISQLQTTSAALAALKQEMQSLAASLPEYPVVMGMFGVGPTLGPQLIAEIGDVRRFHSKKALVAFAGIDAPPYQSGQIDVRSRSISKRGSASLRRTLFLVMGVLLQCAPMDEPVYQFMNKKRSEGKPYRVYMMASANKFLRIYYASVKAYLDSLEHD

SEQ ID NO: 358855 - protein, 384 aa, unidentified
MAHGNLPLIIEVTTNLNERKEITMSTQNSNKLSFKGKHFFVGFDVHKTRWVVTIRHSGMHLKTFSMDPYPEGLKNYLEKNYPEGIYHLVYEVGFCGFWIFRRFKQLSVDCIVINPADVPTGHKEKERKSDPVDSHKLARELENGSLQGIYVPTEDEQHLRTLCRLYTTSVQSSTRVKNRIKGLLNFNGIEYPINSSSWPAKFISYLQSLPLDNGPAKKTLSIHLDELRLHRMHTLVILKELRKHVRTTHGGTIIKLLISVSGIGFKSSVILYTEIMDMKRFSNFNKLRTYIGLVPSTHDSGETQSSSGLTVRKNKFLRRIIIESAWVAIRKDPALLAYYNKQRSRMKSQRAIIRVAVKLLSRIRYVWLNERAYVTGIVEGTTVS

SEQ ID NO: 358856 - protein, 410 aa, unidentified
MAERFVGIDVALRAHRIAVLDRDGEAVGPSFTIAASTDGVATLLRTLAARAATAAQTLIGLEASGHLWENLEAALVGAGDRVIVLNPLQTRRYRDVVRRKAKTDDIDAHVIAGLLRSGAAQASYVPDEQIQSLRELARLRARLMADRQDYLRQLVAQLDVVLPEHRTVLGDLLTARARGILAQFPTAPHLATANPRAIRRAAENAGARGFSLDDATGVRDRARRSLYSGKAAAARAHVVRTLVSQLERLTSAIDEVDRAATTLLPPSEPGTGPSDAELLQTIPGIGPQTAATLLGELGAFTRFIDARALVAYVGFYPVINQSGDRVATPRLSRVGSRIARHSLYLAAVNAVRRSGEWRTIYLRKKAQGKTAKQALVVVAVKLLHAVYAMLKHRQPYNPSRLLVAPATIGS

SEQ ID NO: 358857 - protein, 361 aa, unidentified
MDQYVGLDVSLKQTWISVRQNRKRIWRGKCLSHPRVVAEAIRQHAPNAVLVVFETLSTWFHHELTAAGLPAVCIDARHAKAALDTAPNKTDANDADGLSLLAEAGFFREVRVKSWAAMQVRTLVGGRAQLIGISSDLSNQILMRTFGLVVPAGGGRIFEANVRALLEGQVALAGSILPLLEAWRAVRAQATALDRQLVAVARQSPACRLVMTVPGIGAVTALSYTTMIENPANFGNSRAVGAFVGLTTRGYQSGEVDYDGHISRRGDKHVRALLYEAATVMLTRVRSDSALRSWGLKLKEKVGFKRAAVALARKLAVVMHAMWGASLTRQPGRRRNAVPPPFERLRCVLSRCGFASALRMQ

SEQ ID NO: 358858 - protein, 414 aa, unidentified
MEPIHERVAGIDVHRMKHVVTVLISGDGGAVSSETREFGGFKRDMRALVDWLRSHRIQQVVMESTGIYWKSVFSHLEAAEIPALVVNAFHVRNVPGRKTDVGDSEWLAQLARFGLLRGSFIPPKDLRELRVVSRYRQKLTATLAGEKNRLHKLLDDAGIKLGGVVSDIDGVCARKMVEGLIAGSTPEQLSALGRGKLKSTGEELEAAMDGDLSPRHRLVLSMISNHLRYLQQELARLDRYLIEAMKPYAWAWRLLQTIPGIDEIAAAMILIEIGDNVHRFGSPSRLASWAALCPGNNESAGKRKSGKTRHGNPIVRYLLCEVANAARRTKTVFRAKYDSLVIRRGHKKTIIALAHKLIRTIYFVLARRKPYRDSTFDYQAASVAKNAPRWIRALKKYGYWPKASAESTTAAAAS

SEQ ID NO: 358859 - protein, 355 aa, unidentified
MTQTVYCGVDFHARMQTIAYCNSSDGEIHLIQLDHRKDDVGDFYSKLTGQVIVGMEAGGYSSWFEAMLEELGHTVWTGHATEIRRRANWRQKNDRRDAELILEIMLKGDFPHVHRHSRESVEVLRMLRYRARLVKMRTMISNNLQAIAISSGLTERSRMLSRAGQQRLKNARMTPAIKHQSENLITLLEPLNERIGKVDRWLKEQASTDDRVKLLKTHPGVGVLTALGVVHTLEPFNRFKRQRAVVAYVGLEPMERSSAERKRYLGISKAGSRLLRFFLGEAAHVAMRVDPELKQFYERVGKRRGKSIATVAVARKLLIRCWIMLRENIDYTEFRSRGVEARLARNTSRPSVPEK

SEQ ID NO: 358860 - protein, 355 aa, unidentified
MNKIKTNFEGQAIYVGMDVHKDSWNLGIHLNDIFLKNVHQKPNPQIMVDYLHKNFPGAIYKAAYEAGKFGFWIQRQLTSLGVECLVVNPADIPKSQKDSLQKTDPRDARNIALRLQSGFLRGIHIPDEQQEADRIFFRHRKKIWKDLTRCKNRIKGLLAFTGIDIPEPYDNASWSHNFINWLKALDCKQSPRRLALDFQIRQMEFMRKELLSISNGIRKMMREQRYKTNYYLLRTIPGIGPLTAASILVEIGDIKRFDTFCHLNSFIGLLPMEHSSGQSENKMSLTVRKHRQLRSDLVESAWTAKRTDPAMALYFDQQIKRKDSKVVIIKIARKLLNRVRYVLLNQQPYEYGIVK

SEQ ID NO: 358861 - protein, 354 aa, unidentified
MKYFAGMDVSLEETAICVVDDTGRVIKEARAASEPEALHALLSSFNFPFERVGLEACSLTAWLHGELRSAGWPVICVESRHAKAAMGAMPNKTDRNDARAIAQIMRTGWFREVHVKTPICRSWRSLLVARRTVLNEMRTIENVVRAIFRETGLKLGTPARKDFIFRARELATGEEVMSRMIEPLLEILATMLREFTKLTKQVLIIVRDEPVCRRLMSAPGVGPLTALAFRATIDQPERFRKSRDVGAHLGLTPRRYQSGETDIQGRISRCGDELARTALYEAAHSLLIRSKKWSALRAWGVKIAKRRGMARARVAVARKLATILHRMWIEKSDFRFGREHLADSSIKAITIVAA

SEQ ID NO: 358862 - protein, 346 aa, unidentified
MMIIGCDYHPSWQQICWVDTLTGETEEKKLEHASGEAEKFYRELPGPAVIGMESTGNCQWFVEMATAAGHEVWIGDAAKIRASEVRQQKNDRRDAALILKLLLEGRFPRIWTPSGEEKDLRQLLIHRHKLVRIRAQVKNELQHLAMNQGVTKKRKLWSKAGEKVLRELPLKPWASRRREDLFKVREMLNGQVELLDQAVVEVAEKNEKARLLMTQPGVGPITSMAFVLTMGDVSRFQRGKQVASYLGLIPREYSSGGHQRFGSISKQGNGFLRMLLVEAAQVAVRCDPQMRSEYLHRCHKKAKGVAKVAAARKLAIRLYWMLRTNRGYPEVVHVESSSRVPLVSAS

SEQ ID NO: 358863 - protein, 315 aa, unidentified
MLIHYIDIAKRNFVIAVSSLSKTKTETNNPKGIAHTIEYLKKHKVALVVTESTGGLEIPAAKAIHRAGIAVIIANPRQTHQFAQSQSLTKTDAKDAKMPAFFAQMKAQKEDWQTMPYHPPTEAEEVLEALVNRRNQSADMRTAEKNRLHQVHETQVGSVKQLIAHFDRLIDESDKQIDDHTHTHFDGKAQVAEQIKGIGSITTATLMAMLPELGRLSHKRIASLVGIAPHPRESGETKFKSRCFGGRSAVRKALYMATVAATRFEPLIRDFYQRLPSEGKPYKVAVTACMRKLLTISNARMRDYFAENDTAENGI

SEQ ID NO: 358864 - protein, 386 aa, unidentified
MQTLNELSQSRIVLKQDGTLIAVIEMSLSSWLVAGIVPGVERQPLKKLTVDQSALLKLLNRWREEAEKAGRKIERIAVAFEAGRDGFWLARWLRARGIEAHIIHASSVAVSREHRRAKTDRLDTQLLKRAFLGWLRGERDHCKMVAIPTIEDEDAKRPNRERESLVGEQTRIVNRMKAALSRLGIRGFNPKLKKAAERLGDLRTPEDEPIPPNTLAELRRDMERRRLISDQIRQIEDARLVHIEHAPSDGPHAMVRLLARVIGVGIETADMLVQEVLSRNMRDRRAVARYAGLTGSPDESGTKRREKGLARSGNARVRRGMIQLAWRFLMFQKDSALAQWFRARTENARGTRKTMIVALARKLLIALWRLVREGVVPDGIVLRPAQ

SEQ ID NO: 358865 - protein, 346 aa, unidentified
MRYSTTVGVDLAKNVIQVSVVSPRGKELLNRSFTRTKFAEFLGKQKPSLVAFESCASAHYWARAAKRHGHEARIIPAKVVAPFRQGHKTDSNDALAVAEAARRPNIKEAPMKTAEQQGLQAIQRSRELLIGECTALSNHLRGILLEFGVAIPQGFASLLRALPEILEDGENELPDLYRPTLHRMHQRLLELREDIESMTREVDSLVKQHPVCKRLTAIEGIGPIGALSLYAVMGSGKAFTRSREFSAYLGLTPRQYSSGGKTNIVGISKKVGNRRLRSILIQGARAYVYRMKQPRSLKDRWLKDLIERAGPNRAAVALANKNVRTAWAMVTQGTEYQRRLQLEMAA

SEQ ID NO: 358866 - protein, 353 aa, unidentified
MKCDKYMGMDVHQATTVVVVLDAEGRQVLETIVDTEAGSMIRLMQGLSGPLHVTFEETTQATWLYEVVRGYVAEVIVCDPRRNKLLGEGSKADKPDARKLAELLRAGLLRSVYHGHEATRKLKELVRGYETLSADTQRTMVRIKAVYRGRGIRTPGRGVYQEQRREEWLEKLTNPGTQQRVKWLYEELDQLKPLRRRAKQAMLAESRNHRGVALLQTIPQLGPVRSALIIATVDTPFRFRTKHQLWSYCGLAVITHMSAEYEIKEGRVVRSRKPIATRGLNRNCNRRMKEVFIGAATGGSQSEPYRTYLLGLEKKGMRAEMARLTLARKIVAIALTIWKKGETFDPKKLNWTT

SEQ ID NO: 358867 - protein, 337 aa, unidentified
MQFVGLDIHKKHINACIRDDDGNIIAERKFRNDPQWLDKFLTRVNKDDKIALESCICWEHIYDYLDDQGFVNLVLANPCQIRKNGPKTDKIDARKLSNLLRVGMLPLSWPAPKDVRDHRKITRHKASLTRVRTMIKNMVNAILIRNGIHHPYSDVFGKAGVKYLYSLDLPMSERIQMDNYLKLIEFINELIGNAQEVIEDFAQFNYNVKILKTHPGIEYYLASMIDAEIGDVRRFRKISKLISYAGLDPSVSQSGDKCYYGHITKQGNANLRWALIQAAHVAVMHDKKYAKIFHKIKARRNPNIAYVAVARRILKTIYAMLKNNAKYIPNLQERKAS

SEQ ID NO: 358868 - protein, 341 aa, unidentified
MSESALIGIDLGKHTFHLHGQDKSGRELFRKKCSRAQMMQFFASSPSCVVAMEACAGSHYVARQLAAIGHTAKLISPQFVKPFVKGNKNDFVDAEAICEAASRPSMRFVTPKTESQQTLSVLHRMRETLVRDRTRTANQMHGFLLEFGVSLPKGLAIMKRLAVVLAEHELPVRLTVLLQRLHDHFVYLDEQIKELDKEVAGQLADDDLGRRLLSIPCVGPITASLLAVEMGDGQQYGCSRDFAASVGLVPRQYSTGGRANLLGISKRGDKNLRRLLVQCARVYMQHLERQKGALADWVRSLLTRRHSNVVACALANKLARIAWAISAHHTEYEAGPDALNA

SEQ ID NO: 358869 - protein, 372 aa, unidentified
MKEHSELFIGLDVSKLKTSVALAEDGRNGEVRFFGDIDASPAGVAALATKLAKRGRRLHFCYEAGPTGYDLYRQIVALGHDCAVVAPSLIPQRPGDRIKTNRRDALSLAKLHRAGELTPVWVPDVGHEAIRELVRAREGAMEALRRARQQLLSFLLRHGRIYTGRTPWSKAHSSWLCGQTFEHPAHQIVLAEYRLAIEEAEVRLKRLTAQVTETAASWSMAPVVKAYQAMRGVAFMIAVTFVAEIGDVRRFENPRQLMAYLGLVPSESSTGERVRRSGITKAGNSRARRVLIEGAWTYRFPARMSRLIQGRQDDLPKAVREIAWKAQVRLCGRYRKLIAAGKLKAVTVTAIAREMAAFLWAIGQVIAPVLDA

SEQ ID NO: 358870 - protein, 391 aa, unidentified
MRFAGIDIASETHVVAIVDERGEVVCKATSFAEDAAGYDRFVALLGEPADCLVAMEATGHYWQNLFAVLAARGFHIALLNPLRTRRFAEEDLQRIKTDAIDALGIARFAQQKRPAETRLPDSATLELRELVRLRDRLVQDMADRVRQLHRAVDLGFPEFTRYVKSLDSELATAILHEYPTAEAFPVVPRPLAKLCYDGRHKVGSERARALIAAAKISVGRHHGHAYRVQVQYACEDIDLLRRRIRDLGADIEATLDKHEVGKLLTTIDGIGPQTAARILAEAGDLERFRDGDALAAYAGVIPGLRQSGKRTAMRAGLAPVGNARLRALLWMPTLTAVRKNPWLRAYYDRLRANGKLPKVVLVAAMRKLLHAVYSVAKNRRPFVPILAELTS

SEQ ID NO: 358871 - protein, 339 aa, unidentified
MKYVGADLHKKSISLCVVVTASGKRQVVARARFECRDIAGLRRWFEELGPFQLAVEATAAYEWLFLLVEDLADRLVLSHPKKLRVIAESTRKTDKIDAEVLATFLALDMLPQAYRPSPRVRQHRVLVRHRRWIIARITATKSKLRHKLAIYNQEIADLFTRAGREELAKIAMAEADRFEVRHLLQQLDLWQLQLKEVDHELEQFADSAPQPEQEARAVLESIPQVGPVTCDVVLSELGDWRRFRSAKEVAAYAGLAPGLRESGGKRRDLHISKEGSPLMRWALVETAWRLLRLPRWLTIFQRLVNSTGSRKKAIVAVARRVLCVMFSMLRCGKAYRMAA

SEQ ID NO: 358872 - protein, 351 aa, unidentified
MTYIAMDVHKTTSTLAYCDPATGEVGERKIYTKRTELADALEDLTGPWVVAVEAAREAPAVCNWLRECDAEIHLVNPEKLAALGKLQAAKTDLKDAMLMLHALVHDYLPEAYLAPPQVPQRRAISRGRQAMRQTSTQLRNLLRTAFCHIGMQIAVSNLTGKEAREMMPQWLEQLPQSEGFMAAHFWVLLKQVEDRIELVDADIRDHIAADEVGRALCQFSRRSQRRGYFGEVCLPGIGAINAFGIMAEIGEIERFEHYKHLHSYAGLVPQVSQSGERRYVGELPQRCHKPLRTMAIQAAQSAIRSSSNSRAKRAFNRIKPRHGYNTAKVAAARKLLTDVYFTWRRIIGLEP

SEQ ID NO: 358873 - protein, 356 aa, unidentified
MTKRNKLDFTGQPIYIGLDVHKKSWSVSIFTRYGEYKSFSQPPQVETLVHYLRHHFPGAVYYAVYEAGYCGFWIHDQLVRERVHCSVVNPADVPTKNKERKSRRDRVDCRKLSRSLRNGELEGIYVPPRGKVEDRSLIRTRLSMGRKQTRCKNQIKGMLLFYGVEIPEEKQMGHWSRRFIRWIEGIRLERSSGDMALQIHLEELSHLRQIIAKLNRAILALSRTEEYRPWVRLLRTIPGISTLTAMILLTELGEILRFRSIDPLCSYVGLIPDTQSSGEKEYVGGVTQRGHSHLRWLLIEASWIAVRKDPALLMAFDQYCKRMRKSKAIIKIARKLLNRVRYVLKNQAEYVPCVIE

SEQ ID NO: 358874 - protein, 402 aa, unidentified
MNAVGIDVSKGKSMVAIMRPFGEIVSAPFEIKHTASGINSLVELINSVEGESRIVMEHTGRYYEVLAHQLSEANLFVSAINPKLIKDFDNDSLRKVKSDKADAVKIARYTLDKWQNLKQYNVMDELRNQLKTMNRQFGFYIKHKTAMKNNLIGILDQTYPGVNTYFDSPARSDGSQKWVDFASTYWHVDCVRKMSLNAFIDHYQNWCKRKKYNFSQSKAEEIYGKAKELVPVLPKDDITKLIIKQAVDQLNSASTTVESLRTLMNETASKLPEYPVVMAMKGVGTSLGPQLIAEIGDVSRFTHKSAITAFAGVDPGVNESGSYEQKSVPTSKRGSSDLRKTLFQVMDVLIKTHPQDDPVYQFLDKKRAQGKPYYVYMTAGANKFLRIYYGRVKEYLSSLPES

SEQ ID NO: 358875 - protein, 339 aa, unidentified
MEQYVGLDVSQKETAICVIDSAGSRLWEGTCRSTPDVIAEVLKKRAPAATRVGMETGPLAVWHWHALRQLGVPLVCLHARQAKAALSLQANKTDRNDAHGLAQIVRTGWYRAVEMKSLDSHQLRAVLQARQRLVGMRTTLYNQVRGLLKTFGVVLPRGKGSTFVDLVRSRAAQLPALQLVLDALLSAWREVHNQITVLDRSLRRAVKDREVCRRWMRMPGVGPLTAIAFHTAIDTPARFRRSKDVGPYLGLTPTRYQSGEVDHAGRISKCGDRLTRSLLFEAAGVLLSRSRAPSALKDWGQALARRNGYSKARVAVARKLGIIMHRLWIDGTEFTAAVA

SEQ ID NO: 358876 - protein, 316 aa, unidentified
MVGIDVASAHVDVVAIGAELPAALGQVSNDADGHSALADGLAQLKPDLVLMEATGGYEAALACALQAAGLRVAVVNPRMARDFARAMQRLAKTDRIDAATLAEFAGVLAHRPDCERFIRPVSVPEQQDLAALVTRRRQLVTMQLSERQRLRLARPVTRPSIEALLEAIARQLDEVEAEMARHVEQHHAHMAQLLQSVAGVGRVAAATLIAELPELGRLNRRQICALVGVAPYANDSGASRGRRRIVGGRFEVRRALYMATLTATRYNAAIRAFYERLLAAGTLKKVALIACMRKLVTHLNAIARDHLNAQHRSAIA

SEQ ID NO: 358877 - protein, 394 aa, unidentified
MKLVGIDVGKNSHHFCVIDKETGEFNVAPSSFSNNKEGFDFLINSLKPYSKKSILIGMEDTGHYHVALLKFLLSNGYTVALINPKTTDLTRKMEGGITKNDKLDTITICDVLDTPERKKQYRITKVDRFDLYEQRQLTRHHHNLKEELNVYCNRLQKSIDLVFPEFNTLFSSKYSIVYMNLLKTFGSAEAIASTDIRTIRKCFEIKGRGNRISLTPEKLKECAKNSIGISSEVETIQIKHLVSQITLIKEQIAEIDKKIEEFSITNNSPILSIPGISHFSGTSILAELGDIGNYSKPSQIIKFAGVAPYHYESSQYNAQHTGITKKGSKYLRKTLYQIILPVINNNPVFKKYYRLKISQGKGHRCAQGHCIRKLLRIIYHLLETGQSFDPALLR

SEQ ID NO: 358878 - protein, 416 aa, unidentified
MSYEKNAVGIDVSNGRSTVSVLRPFGEVVVLPFNVQHTTEELSALADKLLSIDGETRVVMEHTGRYYESIEKVLHNKGLFVSAVNPLLIKQYGNNSLRNVKTDKADSMKIARYALDNWAELRDYTPMDTIRYDLKTLHRQFNLSSRQKTAANNNLVSLTEQVFPGIRKAFESPVRKDGTQKWVDFITTFWHADCVRKQSLNAFTERYRKWCKRHGYLFKVSNAEEVYALAKAVIVLVPKDSITKTIVQEAARQLTAISRSVETYRAEMNRLASMLPEYEVVMNMYGAGESTGPQLMAEIGDVTRFERKQSLVAFAGVDPVPKDSGDKQSRSNKSSKRGSPYLRKTLFNIMSTILQNAPEDEPVYQFLDKKRSEGKPYYVYMTAGANKFLRRYYAKVTEYLKEKEKTETDSNQSNTD

SEQ ID NO: 358879 - protein, 347 aa, unidentified
MLIIGCDLHTRTQQVAMLDTETGQVVERRLEHESGEAKSFYEGLKEAALVGIESTGYALWFAEMLAELGHELVVGDAAKIRAMDARKQKHDRRDAEHLLNLLVRGDFPRLWLPSPEERDVRVLLEHRHQLVELRTRAKNGLQALALSYGLRRRSRLWSEAGQEALQKLPLREGMARRREDLLRLRAQLDTWIHELDERLKWEAEEREAARRLMTHPGVGPLTALGTVLVLGPVERFPDGKHVTSYVGLIPQEESSGGHQRFGRLAKQGNHLLRFLLVEAAQTASRCDPGLRRTYRRLAFRKGAASAKVAVARKLVIRLYIMLRDQIDYAEFCRRGSHAGMLGDVALV

SEQ ID NO: 358880 - protein, 406 aa, unidentified
MISVGIDVSKGKSTVCAIKPYGEVLMTTRDFKHTKDDLDSLVKQLSRFKEEIHIIMEATGNYHLPVYQYLKSKDYQISIINPLEMKRYRCQGIRNPKTDKIDSMIIAQYGIDYWYRFKPNDDMDEKRQELRLLGKQYTSYMRIRTIRCQDLCHILDRTMPGVYGLLDDFNRNNGQDKLCDFAEKYYHSDNITKYSEKVFTERYSSWLKKKGYRPNEKEARQLYSIAKNAIPTLDSKLPSTKLLVQEAVNVLREVDSSLYDILNQLKDLSKEMPEYETVLSMKGIGTTLAPRFIAEIGDPRRFHSAKALIAYAGIDAPPYQSGQFTGTKRHISKRGSSNLRKLGFELMDSVNKHKSSYTGDPVCEYFMKKRNEGKPYRVAMIATFNKFLRIYHSRVSEVLNEYDNSH

SEQ ID NO: 358881 - protein, 364 aa, unidentified
MTAAVIDSQIEIVGGVDTHADTHTAAALDTAGAMLGCRQFPASAAGYTALLAWLRGLGCVVGVGIEGTSSYGAGLAASLRATGVPVTEVDRPDRSTRRRQGKSDPIDAEAAARAVLAGRASGVPKTHDGVVECIRVLRIARNSARDQRADCMRRLKSLLVTAPEGLRAQLRGLTDTRLVTTCAALRPDRTDAGDPTTATKIALRALARRHTHLTDELADLDEVIHPLVADANPALLDVHGVGPEVAAQLLITAGDNPQRLRSEAAFAMLCGVAPLPASSGKTNRHRLNRGGDRQANNALWRIALCRMKTHPPTRDYVTRRTTEGLSKPEIIRCLKRYIARELFRDIQTIITPLPADAEWPARAA

SEQ ID NO: 358882 - protein, 426 aa, unidentified
MKNRTNQRLEEITVGTLIVGVDVAKTVQWARFVDYRGVEVGKAVSFRNDRQGFEYIVTKMEALYKDKFEKVIIGMEPTGHYWKTLANYLVKAGYKAVGVNPYHTKKSKELDDNSPTKCDKKDAITIARLVKDGRYFDPYLPQDVYAELRVLSNTRVSILKRSSAVKNTITAVLDEYFPEIVKVFKNPLKGKASRQLLKCCPFPTFILTLGADAVLAEIKKVVKKTVGMKKVTQLIEAAKESIGVGYGLESAKLRMNCLISELEMIESNLVEIETSMEKMLEATGYAEKILSMKGIGVVTAASFIGEIGDPLRFNSDRQIAKYAGYNLTEDSSGKNKSGTCISKRGRKQLRSVLYKMAFTMVGQNAEMKELYRYLLTRKNNPLKKKQALVVISKKIITVIYSLLKKQESYKPELVLGTVRREMLLAA

SEQ ID NO: 358883 - protein, 382 aa, unidentified
MEAQAKFVGIDVSKARLDVGVWPGAESFSLSNDERGIAQLVESVRRLAPQAVVLEATGGLESVAAGELLAAELKVAVVNPRQVREFARSLGRLAKTDRLDALVLAQFAQSADSNGRLASMRTLDPAQAELKALVARRRQLMQMLVAETNRRERAPKIIRKSVVQSIKGLKRAIAMVEQQVAEVIANSPVQRAKAKLLRAVPGVGPELTAGLLADLPELGELGRRAIASLVGVAPHAHESGSFHGRRMIWGGRAHVRTKLYMAALSAVRFNPLLRAHYDALLERGKARKLALVACMRKLLLILNAMLRDQQPWRPPLELQHSRLASEQRERSRRISDSFAPAKPVPILRIGVLERWVLFFSEFPTQDTSKNYKLRVSPRLESM

SEQ ID NO: 358884 - protein, 417 aa, unidentified
MLFVGDDWAEDHHDVEVQDEQGKRLVKARLPEGVEGISRLHELLAEHLDEEWVDPDTGVLGSGRVVVGIETDRGPWVQALIAAGYDVFAINPMSVARYRERHSSSGAKSDAGDAHVLAEIVRLDREHHRPLAGDSPAVEGLKLIARTHQSLIWDRTRHLQRLRSTLREFFPAAVEAFTAAGISLADPDALELLGRAPDPARAAALSRSKITAALKRARRRDAEAKAEKIQTILRAPALRQPAAVERAYATITQTHVQLLTSLAGQIPDLEEVVAEGFGQHPDAEIYASQPGLGVILGARVLAEFGDDPHRYADARARKNYAGTSPITRASGKRTVVLARYARNKRLGDAVHQWALCALTASPGARAYYDALRARGTGHHAALRQLGNRLVGILHGCLRHHTPYDETTAWAHHQVTAA

SEQ ID NO: 358885 - protein, 418 aa, unidentified
MTRRDDSKVIRIVHPICCGLDVHKESVSACVIFPDGKGEEQYEIKVFGTFTDDLRRLREWLLEHDCPVVAMESTGVYWRPVHNVLEETVQVVLVNARDMRNVSGRKTDIGDSRWIAGLLRHGLLKSSFIPPQTVRQWRDLTRLRKKYVQSAGDYRKRTHKLFESANIKIDSVVSDLFGVTGRNLMQLLVADRKLTLADIQSCVRGKLKGKEAELFRSLQGFFTDHHRFILKTILETIAMLEAQIETLDHEIRRVMKGHEPLLDRMKGAPGISDVSSCDILAEIGPTLDSFPTDTALVSWSGLCPGNNESAGKRKSGKSPVRKHHLKTIMLEVAWAAVKKKDSYFKDKYYRLKARRGAKKAIVAIAHRILLGIYHVIKDGAEFRDLGEDYLTHRNKSQKVFHLRKQALALGFDLVPQTV

SEQ ID NO: 358886 - protein, 404 aa, unidentified
MYNAVGIDVSKGKSTIAVLQPGGVIVRKPFDVFHTSQSLKELSNYLASLEGDTRIVMECTGRYHESMANSLSNAGFFVTVVNPHLIKNFGNNTLRKVKSDPADAKKIARYTLDNWAELRQYSCMDNTRNQLKTLNSQFSFFMKQKVAAKANLIALLDNTYPGVNKLFNSPAREDGSEKWVDYAYSFWHVDCVRKTGLKAFTVRYEAFCRKHHYIYQPSKPEELFNASKELVAVFPKETSYKLLIQQSIQQLNLASAHIEQLRREMNALASTLPEYEVVMGMYGVGKTYGPQLIAEIGDVSRFTHREAITAFAGVDHGVHHKIKKNTKSNKDSKCGTGRVRKTLFQVMTTLLQNAPENEPVYQFLNRKRSEGKPYYVYMTAGANKFLRIYYGKVKAHLRSLEQNE

SEQ ID NO: 358887 - protein, 335 aa, unidentified
MKHYAGLHLSMETTQVCIVDENGRTLVSEKVESSPEAIMMMLERYGPIERAVIETGRMSPAICLGLRELGVVVVSIDARQAHQSLKAMKANKTDPHDAAGLAQLARTGFYKEVHVKSPAAHGVRSVITARSHPVEAHVRFDNMIRGLYATFGYRPGADQGKAFLERIMQAADIPSLGDAIAFLLSVRAELMEQIKEMDRRLRVIAGQSQACEILMTIPGVGVQTSAAFAAAVDEAGRLRQSRNAGAYFGLVPRRHQSGELDWTDRITKQGDGTVRKLLYEAANSILTRSWETFALKTWAMKIAQRRGLKKARVALARRLAVIMHAMLRDGTLLQA

SEQ ID NO: 358888 - protein, 425 aa, unidentified
MKGTQNQKISQIKFETLVVGIDIGKETHYARAFDYRGIELARLLKFSNTDQGFQLFDQWMRDICKQQEKTEIIAGFEPTGHYWFTLGDHLKRQGYKLAIVNPFHVKRTKELDDNSPTKNDRKDPKTIAMLVKDGRYREVYIPDDIYQELREAVSERERLQEQLTSIYNRVVRWLDIRFPEFTTVFKDWRRNAALITLRSFPTPEKVVKMGVDVIIETWRKQMKRASLKRAERLVKAASRSVGRTSGKVASEASLQNLLAEYDLYCQQYDKQEQLMQDLLMQVPNADKLLDIKGVGLITAATFVGEVGDISRFQDPRQIQKLAGLNLVENSSGKHKGKTTISRRGRRRLRHSLFFSMIAMLGKNQEFRLLHQRNLMRENNPLNKMQSIIALCGKLIRVFFAILTKGVDYSPEKMLGDMEQSIRVAA

SEQ ID NO: 358889 - protein, 416 aa, unidentified
MNPSENAREIERYIALDIHKEYVLAGGMNAAQEWTLPPRRVEMGKFREWSAANLKAGDAVALETTTNVWDIYDVVAPLASRTVVAHAGAVRQIAEARVKTDKEDVKRLIRLLIADIVPEVWVPPAHVRELRGMISYRNRLVKTGTMIRNRLHSLVHRHNLQLPEDGLVSQAWWDQQGKISALEKIQIHQEIALLEQIEKHKAEVGAELGRQCLGEVWGKAAVRLLQLSGFGVIVTMTVLSAIGDVTRFESSHKLVGYSGLGAGVHDSGKEHIEKRITKSGRKELRWALVEAAWCAIRISPYWKEQYEKYLRRMRKPNQAIVVIARKLLVAVWHVLTKEETDVHASEEDLAYKMLVLSWDLDENVRMGLTYKQFAKYALMKLGVENDITRFVRKNVARRIAPREEVLARMEELGISA

SEQ ID NO: 358890 - protein, 465 aa, unidentified
MEKKTKLVDSVSMTVINSHAAGIDVGSREHYVATGQQSSDVCTFGVYSKDNAALVAHLQQKGITTVAMESTGTYWQPLFACIQAAGIAVVLSNNYIKDPQKKTDAKDARWLQRLHTLGLLKTSFIPAAQIEQVRTYHRHRSSLVAQAATCIQKMQKALRLMNIRLDIAIRDITGVSGMAILESIVAGQRDGTFLASLVHYKVKKSKEEIAEALQGQWKTEQLYIVADELESYKHYQLRMVNCDKQIELLLQQMTSAITVKHASEIPAAENVVSPAGAIKPTKIKKNKNSAGYDVSKLSMEYFGIDLLEVEGIGGATVMTFIAEVGSDIIKFPSKKHFTSWLRLSPNNKITGGKVISSRTPKGKNILSNAFRLAANTIAQRKDGVLKKIFSRIAFKKGRAAAITALARRLAEIFWIMTVRKVPYKAQNEKEYDEQTKKSIIKNIQHKMRKMNLTAEDIAMGGLVTN

SEQ ID NO: 358891 - protein, 413 aa, unidentified
MSMLHVGIDPAKTKCVARVVDQSGQSRGQTIAFKPDRPGVEGLIARVQKIDPEAKSHFFIESSGINWYAPAALLQEQGHPVSFINPSCTKAQRNISSRYAKSDAKDAEAIARAPFNMGDRALHPADIPEGPRLNLRLLCRHRHMLQGDATAIKMRVIAWLGLSLPGLTQIIGTDLSALDRELIVRYPVAAKLLRSGKKRLRDLLERVDEDALDDADIEALFDMARKAYSPRDFDDKLMARQFKLEFQRLALIEKQIKELDKEIANLLPECDPEGFARTIPGFGAVVAPIMVAEAGTDVSRFASAPKFAGWTGVVGRAAGSNGKQKDGLPMTKAGRSIVKWALYMAANAAVMHDPETRAFYDRLRAKDKHHNAALGAVANKLARIYWRVMNDQRPFQTRDPNASQEAQKALDET

SEQ ID NO: 358892 - protein, 341 aa, unidentified
MANAALIGIDLGKQCFFLHAQDRRGNQVWRKKATRKQLYELLATCPACVVAMEACAGAHWLARKCQSFGHQPRLIAPQFVRPFVKGNKTDFADAQAICEAACRPAMRFVALKTTQQQTLLALHRVRDALVTERTATSNQIHAFLLEFGISLPASALAITRLPLLLDDPANALPPLMVALLHRLHRRHAQLAQEISELDTQIKRQVIEDDAGRRLLTIPGIGPVTARNLLAMAGDMGGFNRGQDVAASIGLVPRQHSTGGRPTLLGISKRGDKHLRRLLVQGARSVMRVIDRRHDALGRWAQELLRRRHSNVVACALANKMARIVWAILAKGGEYRAQPVIA

SEQ ID NO: 358893 - protein, 375 aa, unidentified
MRDHSEAFVAFDTSKLRHAVAIADGGRTGEIRFLGEIENTGAATAKLVRKLAAKHQRLTFCYEAGPTGYGLYRLIKSLGHDCIVVAPSLIPKRPGARVKTNRRDALSLVKLLRAGELTAVWVPDRHHEAIRDLTRARGTAALDLRRKRQQMSAFLLRLGLHYPENRHTWTKAHMSWLASQKLAHAEQRLVFEEMMLAIRQAQERIERLEQAIRAAVPDWSLADVVTALMAMRGMDLVSATTFLAEIGDLSRFQTPRELMAYLGLVPSEQSTGDKVIRGPITKAGNGRARRMLVECAWSYQHPPRVGKDKQEKVAAAPRAVREIAWKAQCRLNRRYRALVRRGKLKSVAITAVAREFAGFIWAVARAANAARAEAK

SEQ ID NO: 358894 - protein, 400 aa, unidentified
MECVFGIDVSKENANVAVLVDNVVIKQFKIGLDQLGFSLLSDELNSFNAPLIIYEATAMYSRRLRAFLQRDGWKYTELNPLAAKKVMEEFRHTKTDALDAVGLARAMIKNHFRPTYQESPVYTELHDLERTYQQFNKDIVTNKNRLHRALQLTFPEIEHFMSSTDGVLYWHIVQRFPHPAIVLSHEENELTEIILTETSKKIGLKRAIKLANRLLALAQNSAPAKEPQSHAVRAVIALAKEVERINQLKAQIIVEMTTLGENLSEVPLLVSIPGIGIKTALCLIAELGDVRRFHSANAINAYIGIDLIRYESGQYEAKMHIRKRGNPYARKILYRAILNIISVSQYQPTLISANYKRKKQSAQSHGTKKIAIAAMSQFNRLMHHLILNNELYDSTTFMPE

SEQ ID NO: 358895 - protein, 338 aa, unidentified
MAIVFVGIDLAKNVFAMHAVDEHGKPALVRPAVARAKLHELVASLPPCTVAMEACSGGHHWARLFGAHGHTVRLIAPKFVAPYRMGGVRGKNDAADAAAICEAVQRPSMRFVPVKSIDQQARLMVHRARQGYVEARTACINRVRGLLSELGIVLPLKAATVRREAGARLEDLPGWANTVVGDLLSELHHLDERVAMYDRHITAIAREDERARQLMRLQGVGATTASAILAMIGNGHEFKCGRQFAAWLGLTPGQYSSGGKTRLGRITKAGDAYLRTMLILGARAVLAAAKNRTDGLSRWAIALEERRGYWKAVVAIAAKNARMAWAMLARGEQFKLAA

SEQ ID NO: 358896 - protein, 466 aa, unidentified
MTTGKMLWRNRKERKEWARRLQSEDPGLEVVHPHAAGIDVGNCSHYVAVRPDRDEEPVRKFDCFTADLHRLAHWLKSCGVKTVAMQSTGVYWIPLYEILEERGFEVYLVNARHTKNLPGRKSDVQESQWLLKLHTYGLLSNSFQPSTEIRVLRTYWRQRGEHVAGGATCIQRMQKALTQMNLQLANVISDISGLTGQTIIRTILAGERNPLKLAALSDPRVHASREEIAKSLEGNWRPELLFVLQQEVDMYDIYQKRITECDQRLQAQLASLTHPLPAQPPTQKPKTKTKKPAAKNAPRFDLSSELQRVTGVDLTRIDGIDVMVAQTLLSEVGLDMSRWKTESHFASWLGLCPDNRISGDKVLGRGTRRVVNRAATALRQAANTLMRSRSYLGAQYRRLRTKLGAPKAITAMAHRLARLVYRMLKYGQAYVDQGTQYYEERFRQQQIQLLRKRAARLGLRVAEIPA

SEQ ID NO: 358897 - protein, 323 aa, unidentified
MAADQIQFPQLIKVGCGIDVHQNLMVATIRSSNDTYITRSYDGYTSSLTALRDWCKSEGVSHVAMESTGIYWKPVFNILEEDFEIILVNARHVKNVPGHKTDKKDSAWLSKLLLSGLLKGSFIPTQDIRELRDLVRYKKKIAADMASEKNRVIKILEDANIKLSSVLSNVDGAAGTKIITDIIEGNHNPDELLKHYHGKMKASKATLKKSLEGRITRHHQFMLKLIKQSITDKENLITTLDAQIDTASKAYMVEIELLQTIPGVGKSSAISILSEVGGDMEVFATEHHLSSWAGMSPGNNESGGKKKVPEPSTATNTCNQPSI

SEQ ID NO: 358898 - protein, 456 aa, unidentified
MKNKRKKSKPLRTIHTNAAGIDIGAKEIYIAIPEEGCEKSVRRFDCFTDDLHEAAKWMKEHNIDSIAMESTGVYWIPIYQLFESYGFKQYLVNARHVKNVPGRKTDVKDSQWLQYLHSVGLLDSSYIPEDRVVVIRSFLRHRDSLIKAASSHVQRMQKSLTQMNIQLHNVISDITGETGLKIITSILSGNHDPVKLSMLKNKKIKASKKKIIKSLTGNYRDEHLFTLRQSLESYQFCHQQINRCDEEIEKRLKEFESASNTDKDNPQSSSTLGPKQRKAGNSPSFDLQGHMYRIFGTDVTRVDGISAVTAQVLFSVVGANLDEFPTSKHFCSWIALSPQNKISGGRILSSKTKRTNNKAAQAFRLSALSLSRSKSYLGHFYRKMKARNGAPKAITATAHKLARIFYKLVKEKLDYDESVFIKEQKRYQIQKIQYLKKQAKTLGLQLVKADLVQSVT

SEQ ID NO: 358899 - protein, 464 aa, unidentified
MKLPLNHQTNQPLKKKKLSSHLEQINHNAAGIDLGGAEHWVCVRADKTEKNVRRFGCFTPDLMAMADWLIDCGVTTVAMEATGVYWIPVFQILEARGLEVKLVNAHHVKTVPGRKTDVNDCQWLQQLHTYGLLSGSFRPEDQVCILRSYIRQRDSLIKSASTHVQGMQKALIQMNLHLHKVISDLTGLTGMTIINAIVAGERDPQVLAALKDRRIKSSTADIAKALTGDYRSEHLFVLKQEFTLYEVFQQEIATLDVEIEKCLASFIPKTLEAPPTTGKKRRKKPTANHPHFDLHSSLYRLAGVDFTQIDGLDALTVQTILSEIGLNSQRFPTVKHFTSWLGLCPGQKITGGKVKSSQTRKVVNRAANAFRLAAFSLTRSRSALGAFYRRLRSRLGAPKAMTATAHKLARMFYRLCTTGHYSLDPGLDYYEQKYLSLMRKKLQKKAQALGLELVPISSLPAEVS

SEQ ID NO: 358900 - protein, 414 aa, unidentified
MLKIVYRICCGMDVHKSFVVACIASTNEQGVTSYKSKRFSSFTGDLHRCATWLAENGCRDVCMESTGKYWIPIYNILEPTCNIVLAHPKYVKAIRGKKTDKRDAKWIADIFKHDLVAGSFIPPADIRQLRDLVRYRWKLTNFTTGEKNRAQNCLTVSNIKLDDVFSDVFGKAASTITARILENPSEKITDVSGFRTKGMKATNEQVLAAVDGEMCEEQAEKLRIIRSHMDSLQLCKLNLESLILTTAEKYLPQLNLVMTAPGIQSFAAVGIISEIGVDMSVFPTSKHLCSWAGLTPQNNESAGKKKTTRISRAGAYIKPLLVQCALNAIRARKFPEVRNRYLALKKRRGHKKAIIAIARMLLTAIYNMLKKNEPYNPELYRKGDQPPAHREVSVEEAIFILQRQGYLVTAPTTA

SEQ ID NO: 358901 - protein, 395 aa, unidentified
MVGCVRVPRAPRGDRQAETRTFATTLRGLEELRTWLTAHGITHVAMESTGVYWRPVYAGLEGAVQVLLVNARHVQMVPGRKTDVRDCEWLAQLLECGLLRGSFVPPPAVRDLRDLTRLRKALIRERGHHVNRIEKTLELANIKLGTVVTDIMGKTGRAILEALSAGRDAPEPLVALAQGSIRTKKQAALREAVVGRLTPHYAFLLRQHLSLIEALDIHIVTLDARIEAAMAPFAEAAALVQTMPGVATRAAQAILAETGVDMGVFPTAGHFASWARLCPGTHESAGKRRPTTTGQGAVWLRATLQEAAWAAARTKRSYYRALYHRLKGRRGAKKAIVAVQHAMLVALWHMLKRRVPHHDLGADYFDRRNTARLRHHHVRRLQQLGYQVVLVEEAA

SEQ ID NO: 358902 - protein, 309 aa, unidentified
MKEELVYLGVDIAKSYLDAAIGSEKRRFANDAVGHRALIKWIKEIEGLVQVICEPSGGYERALIRALVGTQIRVSLVPANRVRQFARAAGILAKTDRIDAKVLCIFAEAMQPGTISGSQLEQEHLRELESQRRHLTHLLVMEQNRGARVSDVCVRRLNRTLINQIKKQIEQLDLLIKQHIEQSAELSAKAAKLTAITGVGARTAALLLAQMPELGKLNRREVAALVGVAPFNRDSGRMRGTRTIYGGRRPVRHGLYMAALVAARHNPILRAFYQRLRTAGKPAKVALTATMRKLLIVLNSALKSDLSYA

SEQ ID NO: 358903 - protein, 353 aa, unidentified
MNNSRNKAEVILGVDTHMDTHVGVLLNAQGHQLGCLMVTTNTSGYERLVTWANSFGCLKRAGVEGTGTYGAGLASVLRKHGIEVFEVNRPDRSKRRLQGKSDPTYAESAARSVLSGSANAIAKTQSGAAEMMRVVSVARRSAVKAKTQAMNQLRSLLVSAPQDVRERLWKSKPADCAKGCARVRSLGTTELLHTLTTTLCLLAKRWLLLADEVEKLDAMLDALTHQHARRLREQFGVGPQTAAVLLSTAGDNPERLRNEASLAALCGVNPLPASSGKTVRHRLNRGGNRAANNALWTIAMVRMRGDPQTQSYVARRSAQGLSSKEIQRCLKRYIVRELYPLILADLADSARAC

SEQ ID NO: 358904 - protein, 326 aa, unidentified
MHGVDAAGQVIIRRQLKRRFVLSFFEKLPPCLVGIEACASSHYWSRELQALGHTVRLMPPAYVKPYVKRQKNDSTDAEAICEAVTRPNMRFVPTKTIEQQSCLMLHRVRHLFIRQQTAVINSIRAYLAEFGIVAPVGRRGVEQLLEVVADPADRRVPEVARACLAALGGQLRALKAQILEFDRRIIAWHRSNATSKRLDAIPGVGPALATALVASVADAKTFRSGRDFSAWVGLVPKQNSSGGKDKLGRISKQGDRYLRSLFTAGALAVIRYAKIHGTSHRPWLTALLARRPTKVAAIALANKLARMAWAMMARNEPYKEPAGLTA

SEQ ID NO: 358905 - protein, 350 aa, unidentified
MPNAPLQPVAILGIDIGKNSFHLIGLDARGAIVLRQKLSRGQVEARLANMPACLIGMEACVGAHHLSRQLLALGHDVKLIPVQFVVPFRKSHKNDFRDAEAIAEAVRRPTMRFVPTKSVEQLDLQARHRVRSRLVGQRTAVINQIRAFLLERGIAVRQRLRSLRQALPDILAQRTDVLTPRMTRLIEGLLQDWHHLDDRIEAVTEEIQALVAADEACQRLMSVPGVGPIIASAMVASIGNGAAFSRGRDLGAWLGLVPRQNSTGGRTVLGRLTKRGNSYLRSLLVQVARVLLLWPAKRRQHSFGAWLNAASTRLHHNVLAAALANKLARIAWSVLSQNRTYEPRTAAIMG

SEQ ID NO: 358906 - protein, 343 aa, unidentified
MDYFAGLDVSVKDTSVCIVDETGKIIREVKVASEPEPLLAVLSNAGYHFRRIGLEAGPLSQWLFSALGEAGLPVICVETRHMRAVLKAQINKTDRNDARGMAQMMRVGLYRPVHVKTLRSQKLRMLLTYRKLLQSKAIAIENDLRGTLRNFGLKVGMAGRTKFEARIKELVADIPDLSVLVEPLLVVRRTLHEQIGVLHRRLLTIVRDDDVCRRLMTVPGVGPVVALTYRATVDVPARFRKSKSVGAVFGLTCAKYQSGEVDRSGKISRCGDEMMRVMLYEAAQSMLRTNKWSWLKAWAMQVARRCGMKKAIVALARRLAVIMHRIWIDGTEFRWTREAAAAA

SEQ ID NO: 358907 - protein, 354 aa, unidentified
MLIIGCDYHPAFQPIAFVDTETGELQERRLQHREEAEKFYRELAAQGMKVRVGMEASGHARWFERLLAELNIELWIGDATEIARKRERKQKTDRLDAQHILKLMLKDDFPQIWVPSWENRDLRQLLWHRHRMVQARTRIMNQLQAVALNEGLRCKKRLWREAGREQLEAFQLAPWASWRRHDLLELLDRLNPTIAELTQAIEREVEKCPEARRLQTHPGVGPLTALAFVLIIGKADRFQCGKQIASYLGLVPLEESSGNRRRLGHITKQGNSLLRFLLVEAAQVTVRSVPEWRSKYFHLAMRRGRKIAKVAMARRLAVRLYWMWRQGWDYEQLKKFGPHAGKPEYRDGVQSDTE

SEQ ID NO: 358908 - protein, 371 aa, unidentified
MKQYSTFVGMDVHKNSIEIAIAQRGRNGEVRNYGKIDGTLEALDKVVRKLVSKGGLLHFVYEAGPCGYEIYRHLTAKGYDCSVVAPSRIPKKSGDRIKNDRRDACMLARLDRAGELTPVYVPFAEDEAIRDLTRAREDAKIDEKKSKQRLLSFLLRSGFRYTGKKTWSQAQMLWLSDIKMPHPSQQIVLQEYIDTITECTLRVHRLTEQIRQLLPQWRMFPVVKALQALRGVSLIVSATTIAEIGDLKRFKNPTELMSYLGLVPSEHSSGEKTRRGSITKSGNGHVRRVLVEAAWAYRLPARVSRVLLKRQEELPKEICEISWKAQVRLCSRYRRLWAKGKPKQVIVTAIARELCAFMWAIANEIQISAAT

SEQ ID NO: 358909 - protein, 313 aa, unidentified
MIITLRCVGIDVSKHHLDIFDEGIGVSERVANAPHAIAELVARWRCDALVVFEATGVYDLELREALRAAGIRFARINPARARDFARASGQLAKTDPIDARMLAAFARAMRPATEQVSTPARNALARLAKRRDQLVLMRAQEKNRRSEAGDRAMVERICRLIEVLDHEIAEIEADISALIKAEPEISHDAQLMRSLPGVGPVACMQLIAQMPELGHVGPKQAAALAGLAPFNVDSGAYRGKRKIRGGRKRVRNALYMAALNAVRRADRFKAFYAKLRQAGKPAKLALIAVARKLLIILNAIMRDRKAYVPAQQT

SEQ ID NO: 358910 - protein, 487 aa, unidentified
MAKRKMSTFERLQRGEWSREQRKELAQKLHAADPGLTIVHPDAAGIDVGNDSHFVAVPAGREAQPVQEFGSWTADLQRMATWLKACGIRTVAMQSTGVYWIAVQEVLEQAGLEVYLVNARGTKNLPGRKSDVQECQWLMKLHTYGLLANSFRPPEEIRAVRTIWRQRDRLVQDAGRAIQQIQKALTTMNIRLANAISDVSGVTGLAILRAILKGERDPRVLAKLRDRRIQASEEEVVRSLEGHWRDDVLFELKQVVEGYDFYQRQMEACDQELQRYLAVLPDRRRESTALGVDAAPTKRSKKGRRSQAERKSKTRRKNQPGFDLQAELHRTFGVDLTRIDGIDIMTGQVILSEVGPDLSDFPDEDHFASWLELAPRRNITGGKVISQKSRESRNRVANALRMAAESLSRSDSYLGARYRRLRGHKEGKKAVKAMARYLACLVYRLLTKGQDYVDRGAAYFEKKRTEREIVGLQRKAAEHGMRLVPAV

SEQ ID NO: 358911 - protein, 389 aa, unidentified
MTRHSIVRSLLLVGWKVTATSKGAWDVTMIGAGRPDSKVEVILGVDTHLDVHVGVAVDHLLGRSLGELSVPTTANGYERLLCWAESFGPVRCAGIEGASSYGAGIARHLKAQGVEVLEVERPKRRQRSSRRNVKSDPSDAESAARAVLAGETSGVPKSGDGCVEMIRALRAARRSAMKSRTQAANQLQGLRVTAPDELRHRLRGLSSKKLVSVAARFRLGDDPRDVPAATKFALRSVARRHEALSAEIAKLDAQLDRLVTQVAPELVSLPGIGTDHAATLLIVAGDNPQRLRSEASFASLCGVSPVEASSGKVVRHRLNRGGNRDANRALYMICLARMRRDRRTWEYVARRTAEGKSKREIIRCLKRYVAREAYRVLVSCGACSSLMRP

SEQ ID NO: 358912 - protein, 347 aa, unidentified
MRKHNTIGVDLAKNVIQVCVVSVSNKELLNKELTRKKFTELLVKQKPALVAFEACATAHYWARVALRHGHQIKIIPAQAIVPFRQGHKTDRNDALAVAEAANRPNIKVAPCKGIEQQGMQSVQRSRELLVQERTALSNHLRGLLLEFGVVIPRGFAALTQRIPDILEDGENELADIYRPTLARLYERFCRLREDIQFLDKQIACLVKQNEPCRHLTEMEGVGPISAILLFATLGTGEAFKNGREFSAYIGLTPKQYSSGGKTNIIGISRHVANRRLRAVLIQGARAYVHKMKEPQSPKDKWLWSLIQRAGYGRAAVALANKNVRTAWALLTRGTVYDKQYGNELQPA

SEQ ID NO: 358913 - protein, 386 aa, unidentified
MTKSNDLNMSLVPFKQDACVVAVVELSQSNWLVAAAVPGIERQPLKKLEPDEEALLRLLHRWRDESAGKGHEINRIAVAYEAGRDGFWLARWLLRHGIDVQVIHPTSIAVSREHRRAKTDRLDTALLMRAFLGWLRGETGHCRMAAVPTLAEEDAKRPSREHETLAGECTRTINRLKSALVRLGIRDFNPKLRGAQGGLEALLTPEGEPIPPNTLREMNNELARLAFIRAQMKATERARLERIKEAPNAGTNSMVQSLTKVVGIGIETADMLVHEVLARDLRDRRAVARIAGLTGSPDESGARRREKGLSKAGNARVRRGMIELAWRFLQHQKESALAAWFRSRVEAPGVRKKTMIVALARKLLIALWRLVQTGEVPRGVVLRQTA

SEQ ID NO: 358914 - protein, 312 aa, unidentified
MADVTIGIDISKALLDVAAYPERAVKQFTNTSKGHSKLITWLATLPVKLIVFEATGAYHRNLERALGAHGAPFAKVNPRQARRFAEATGTLAKTDRVDALMLARFGALLEPPRNPGKSQTLEELAELLLARRGLVKDRTAAKNRQHTLRSPLLRRQTQQRLKHIKTQIKAIDAYCTALVQGDAVLQERCTILLSIPGLGALTAIIILSEMPELGSMDKRQTAALAGLAPITRQSGHWKGKSCIRGGRANLRQALYMPALVAIRFNAQMAAKYQAMIKAGKPAKVAITTIMRKLIITANALLRDGRKWSKISA

SEQ ID NO: 358915 - protein, 408 aa, unidentified
MLLIGDDWAEDHHDVEVQDGAGRKLAATRLPEGVEGIAKLHELLAKHGGGDLDAAEVVVGIETDRGSWVQALIASGYQVYAINPRQVARFKERYASFGAKSDKGDAHALADMVRIDRAQLRPVAGDSEQAQAVKVVARAHQTLIWERTRTFQRLRSTLREYFPAALDAYADLTLTSTDALELLIKAPTPAAGAKLTRTQITAVLARARRRNRDAKSATIQAALRERQLGLPEPVTAAYAATATAHARVIIALNEQIAAMEEQVKAHFRAHPDAEIYLSMPGIGQITGARVLAEFGDDPTRYASAKARKNYAGTSPITRACGKSRTVQARYVRNNRLADALQTQAFSALRASPGARRYYDKQRAREADYNPALRPLGNRLVGILHGCLKTRTLYDEATAWSHHAQPHAA

SEQ ID NO: 358916 - protein, 390 aa, unidentified
MFEHFAGIDMAKDTFSFCVTDLNGKEVEKGCCNVDKEGFDKFFSVISSFSNIAVAVESTGTYHITLLSALVSANFTTYLITPILVKKFAQSCSLRTIKTDRIDAKIISVFIARNHSTLIPAVSTGNEGLRELARLRESVTGDLGSTKTKLKQLLTTTFPELVRNFNIFTASMLVLIEAFPSANAFVNASETEIETPLKTKGKGRKISVSVKQFQELASKSVGKSDPMIEKAVLHQIRKIRFLTDELKKVTDELVEAAHICSGKEIEILTSIPGIGDTTAAQFIAEIGNIDKFDSVKQLTAYAGTDPGINQSGLSLKRKKISKKGNASIRRVGFLMTVHVIRFSDVFNKYYFKKRNEGMAKKKAIIATFNKLLRCMFAMLKNHSHFLFVYS

SEQ ID NO: 358917 - protein, 404 aa, unidentified
MLFVGLDWAEDHHDVVVMDGLGGVAARQRVPEGLAGLGLVHELLAAHVPDPAEVVVGTETDRGLFVGALVAAGYQVYAVNPLAVSRYRDRHQTSGAKSDAGDAKVLADLVRTDRHNHRPVAGDSELAEAVKVLARTHQSLVWTRQRQVNQLRSLLREFYPGALAAVGGDLGGRDALAVLQVAPTSTLGRQLSRAKLAATLRRAGRQRGVDGRAAELQAALRQPQLEPSPVLAEAYGAAVTALVGVIRVLTSQLEQVAEQLQRHFELHPDAEIVRSLPGLGVILGARVVGEFGDDPTRYGNPKARKSYAGTAPVTRASGKRQVVMARLARNRRLADTCYLWAFSALSCSPGARGYYDRCRAAGQTHPQALRALANRLVGILHGCLRHRTPHNELQAWPATTQNAA

SEQ ID NO: 358918 - protein, 389 aa, unidentified
MSQPFDASKSLTTLEQDNTVIAVIEMSQSKWLVAAVVPGVKRQPLKKLQADEEALLKLLYRWRTEAGQTGREIKRVVVAYEAGRDGFWLARWLRTRGVEAYVIHPASIAVSREHRRAKTDRLDTELLMRAFLGWLRGEKRHCSMAAVPAAEEEDARRPNRERENLVTERTRIANQMKAILARFGIRGFKPTLRKAAEKLDGLRTAEGTPLLENTRAELSRHLARLRVVREQIRAIEQERLNKLATAPVEEKGPHAMVRLIARVFGVGVETADMLVNEVFARHLRDRKAVARYAGLTGSPDESGKRRRERGLARAGNARVRRGMIQLAWCFIKFQKQSALAKWFDARTADGRGSTRKTMIVALARKLLIALWRLVMTGEVPEGVILRPAA

SEQ ID NO: 358919 - protein, 405 aa, unidentified
MTTEFFVGLDWAVHSHAVCVIDSVGAVRERFEIAHDHEGLSELMRRLARFGASVRIAIERPSGLIVDALVEAGHQVFPIHPNAVKASRPRYRSHGGKCDASDAYLLADLLRTDGHRWAALAPQSDSIRALRALVRSRDDLVGARVALGNQLYSTLEAFWPGAACIFADITSPIGLAFLLRYPSPTKAARLSEAQLERFCRTQHYSGRRSPAELLARLRAAAHGSAGQLTNESMAQVVRSMVAVLKPVVAQISALTRRIEAFVASLPDGQIIMSFPRAGQVCAAQILAELGDVRERFPTLDRLAAEAGAVPVTYQSGKTRSVSFRWACNQRLRQAINCLADNSRHANPWAHGVYAAARARGCNHPHTIRILARAWLGVIWRAWIDRKLYDPKLHNAALKLASGGGG

SEQ ID NO: 358920 - protein, 413 aa, unidentified
MEKIVERCAGLDVHKSSVTACVRIPDENEALHQEIREFATTTRGLLLLRDWLASFGVRLVGMEATGVYWKPIYYMLEDDFELWLLNARHLKNVPGRKTDVKDAEWICQLVEHGLVRPSFVPPKEIRELRNLTRYRKAQIEERTREVQRLEKVLQDAGIKLSSVATRVLGASGRAMLDALVGGSTDPEVLAELARGRLRSKLPALRDALQGCFSSHHALMVGKILAHIDYLDESIGELSVEIERVIAPFSEEVELLDTIPGVNRRTAETLIAEIGVDMGQFPTHRHLASWAGMCPGNEESAGKRRSGKTRKGSKWLCSALTESARAAARSKGTYLASHYARLRGRRGSKKAAVAVGHSILVICYHVLERGVPYEELGEDYLDRRRSSEAYAKRLVRKLERLGHKVALEPLPQSV

SEQ ID NO: 358921 - protein, 344 aa, unidentified
MDHFAGLDVSVKETSICIVDDTGRIVREVKVASEPAALVKVLGNPTYRFKRIGLEAGPLSQWLFSVLAEAELPVICVETRHMQAVLKAQINKTDRNDARGIAQMIRVGLYRPVHVKTLRSQKLRMLLTHRKLLQSKAIAIENDLRGTLRNFGLKVGMVGKVRFEARIQELVENILDLAVLVEPLLIVRRVLREQIVILHRRLLAIVREDEVCRRLMTTPGVGPVVALTYRATVDVPARFRKSKSVGAVFGLTCSRYQSGEIDWSGKISRCGDEMMRTMLYEAAQSMMHSKKWSWLKAWAMQIARRRGMKKAIVALARRLAVIMHRIWVDGTEFRWTREQATAAA

SEQ ID NO: 358922 - protein, 338 aa, unidentified
MAIVMGLDQHRAQITADWLDTDTGEVSRARVAPADRAGVRRFLERFRDCELEVALEATTGWRFVVEELQRVGATVHLAEPAETAARRGNEKRAKNDRADARHLRELVMVGRLPESWIAPEHILDLRARVRLRHSLVAQRGEWQQRIQAVLYHHGFPQRRNLMTDGGRQWLAGQTLPAIAREQITVAIAMIDALDRQLAPIDKRLRSYARRQPGCRALMSQFGVGETTAVTILAELGDARRFSSSRDAVRYAGLDITVHQSDRRRAPGHLSRQGPPALRWALFEAALCASRSGSPDRDYYHQTAERVGGTGAGLAVARKLLKRSYHTLRELGEEALAPA

SEQ ID NO: 358923 - protein, 322 aa, unidentified
MSTYLGIDIAKKTFDAALLREDDRYRSKSFPNTPAGFEQLRVWLAKHQGLDAHVCLEATGIYGDALAHFLLDAGMRVSVVNPARIKAFAASELLRTKTDRMDARLIARFCRAMNPLPWQPLPPAVRALKALFLRVQSLKQMCQQECNRLAVAEAVVRPGIEAHIQTLETQIKELEQQIGEHIQAHADLRDKRKLLRAIPGIGPATLALVLACFASVIERFDSVRALVAYLGLNPCQHQSGESVHRPAHISRMGPALLRKCLFMPTLSACKHNPVIRAFFQRLRAAGKPGNVAVIAAMRKLVHIIYGVLKSGTAFDPNLHMTA

SEQ ID NO: 358924 - protein, 427 aa, unidentified
MSEIRSIQPEPEFVAFIGIDWADQKHIWCLQAAGSAKRETGELEHTPEAIESWVAHLYQRFAQRPIAVAVEQSRGALVFMLSKYEPLHLFPVAPQMASSMRQALYPSGAKDDPRDADLLLDLLLQHRNKLRRLSPDSEATRRVQNLVEERRKLVDEKTAQINRLTDHLKIYFPQMLEWFGRLDSDVVCALLERWPALEELQKAPPASLRAFFRKHRCRDREQIEHRMEGIRQGVPAIHDRAVIEAKSATVRVIVRVVRVLGEGIEDLDGQIEEAAAAHPDFFIFNSLPGAGPVMAPRLLAAFGSQRERYRSADEVQSFSGIAPLTESSGKRKWVHFRWACPKFLRQSFHEWAGHSIAQSEWARAYYQQQRGKGNTHHEAVRALAFKWIRIVFRCWQDRVAYDENTYLAALVRRGSALGAIVAMGKTL

SEQ ID NO: 358925 - protein, 349 aa, unidentified
MAVTIVEEARPVTGGVDTHADMHVAAALDPVGGLLGVREFPATAAGYARLLGWLGGFGTVCLVGIEGTGSYGAGLARHITAAGVRVVEVDRSDRQDRRRQGKSDPLDAVSAARAAQSGRARGAPKGRDGAVEAIRALMVAKRSAAGERTRAINQARALILTGPDDLRARFTKHTPAALVAGIASLRPRPGDVPGYAVRVALRELGRRAVFLDGQLERLDELIVPLVTARAPGLLALYGIGPNTAALLLIAAGDHPGRLRSEAAWAHLCAAAPIPASSGKVTRHRLNPGGDRQAGHALWRIAFTRMGSDPATRAYVERRTKEGKSKAEIIRCLKRYVAREVYPHLRPAAG

SEQ ID NO: 358926 - protein, 387 aa, unidentified
MARKRTLSTLDTSIAYEAVGLDLAKEDTAIAAFGPDHEGPYLIDRMPYDKLYELLADMAPTLVAMEPCSGAHQIAEQIQELGHEVMMISGRHVQAWVKDHCNGQKTDLNDAFAILNLAYDRWLTPIRGKTREECRLLALQASYRQLKGQRTKTMVHVKATLHAWGFPIRAGSFNQKALHELIDANREAFGDEVVETLHLMINRVHDLDHDIATVLKLLTEATQRDPRASLLRSIPGFGVLTTSRWCAVVGDIARFDTPKQTMAFIGLVPNNRITGHHTETSSGREARGQGKMSKRGDKMLRSLCILGAGALCLMVRNDRLPDCPFVASIKERLTSPRPWFKVLVYVAAKLVRIATALLKYGETFSFEKAGISKAVLKQWELEQAKAA

SEQ ID NO: 358927 - protein, 522 aa, unidentified
MPRSRTARSSKAHKSLVLHKPNGLLSPRVQAVGPEHFGIVAVDCAKARSRYFLADFYGRVLLQPTTVAHSSGHFQAAIDRLRQAMIEHQLGDLVVAIERTGEYHRPVQRAFRQAGFEIRLVHPLTSKQYRQPADPGNKTDDTDLAAIFRATTHGFGLCDPVWPDLYRTLQLFRRHRRDLVDKNSQLCCQIREVLHAAMPGYAECFCHLWESPAPMVLARQTTSARAVLEAGLAGLQAIADQAQIVCRRDTLHKLLAWALQAPPAHEHTLELRRILGDLDDDRLHKTQQILELERSLAQLVVATPYALLLAIPGINIVTVADLAGELGPLQFYLNANAITGRAGLMPSRYQSDQVDHPNGPLRRRGHRRLRAVLMQTADNLVQCNHYFRARADLWKRAGKDARWIRVKVAKIFSRLAYALVAGQQLFRHDCCQPRHYILGKLLEFHSSHRTAPEQIRQDLETVIGQLPATARAEEAPPLQKLLDELNQRSRGPQPLAKILPLVLARLGQRMLQSEAVREGTSS

SEQ ID NO: 358928 - protein, 413 aa, unidentified
MDRLIQRCAGLDVHKASVTACVRVPGQDGDRQSQTRTFRTTTAGLVLLRDWLASHQVTVIGMESTGVYWKPCYYLLEDDFEVWLLNAAHLKHVPGRKTDVGDAAWIGQLVEHGLVRASFVPPKPIRQLRDLTRYRKALIQERTREAQRLHKVLEDAGIKLACVASDVLGVSGRAMLEALIGGTTDPEVLAELARGQLRKKLPALREALEGRFRAHHALLLGHLLAHLAYLDEAVEQLSEEVARRVVPFSPLLALLLTIPGVDRRTAEVLLAEVGTDMGRFPSAGHLASWAGLCPGSNESAGKHYSGKTRKGSKWLRAALVQAANAAARTKGTYLAAHYARIKGRRGHKKAIVAVAHSILVVCWYLLTTGEPYSDLGADYFLQRQSSEAYKNRLVRQLERMGHKVILEPTNDAA

SEQ ID NO: 358929 - protein, 316 aa, unidentified
MTKHNTMCAGIDTGKRKLDVALAGRAEQFQVDNTADGHTALSAWLRRRRVKRVGIEASGGYEQDVVTKLRHDGFVVVMFQPAQVRSYARFHLQCAKNDKIDAELIAGCTAATKKIHAPPDPRLAPLAAHLTMIEQITEDIVRLKTRSESSREAHIARFWQEEIARLQQRLRAELQQLAAAIRRHGDLAERLDLIASIAGIGERTAIAILVRMPEIGTLTREQAAALAGLAPYDDDSGDRVGARHIEGGRERLRKSLYAAALSASFRWNPQLVAMYRRLIAKGKGHKVALVACARKLLIYANMVVARGTPWVPAASQ

SEQ ID NO: 358930 - protein, 400 aa, unidentified
MRVVFGIDVSKASSEVAILVNGEKVHGYTIPNDAIGFNRLLEDLGTVYQPEIVFEATGVYSRRLQAFFEDNSYAYIRLNPLESKKQLDSLRVRKTDKIDAEKLATSQFILNRKPSYVQEALYQELRDLSRFYQNLTEDIVCSKNRLHKVLQVTFPELENILSSPTGKQYWNLVMAFPCNSFVLELDDAALRAIIRQSTSKRISENRVTYLVDKLTKLANHSYCAVKKTSPVMEEVKYYAGELLRLSEYRQSVLEEMITLAQPLPEYEILLSIPGIAETTATSIIGELGDIRRFHSANQINAFIGIDLKHYESGDFLAKEHITKRGNPYARKILFKCIHNIASASHTNPCHIADFYEKRKRQSQVTSTKPHTIASIHRLIRTMYYLITHNKLYDYTSTQNR

SEQ ID NO: 358931 - protein, 408 aa, unidentified
MRRVIGIDIHRTFGEVVIWEEGRLRNAGRVDMTRTALEGFGKGLRSTDEVVIEATGNCMAVSRVLSPFVARVVIANPLQVKAIAHAHVKTDKIDAGTLASLHAAGYLPEIWTPDAATERMRRLAARRFQIVRHRTRIKNEVHSILHAHLIPRCPHADLFSTVGRAWLLRQPVPEDERGAIERHIRELDRLTDDLAAVDKEIAGDALDDDAIARLLTITGINLTVAAGIVAAIGDINRFSSPQKLVSYFGLNPRVRQSGLGAAHHGRISKVGRSHVRAMLVEAAWAAAKTPGPLHAFFVRIRAKRGHQVAAVALARKLTVLCWHLLTKQTDYRWARPALIANKRRAMELKAGKPQKKGNKPGPAYAYNVRALRDQEMDIARHAEQAYEQFVAQWETKPKVRGRSKPAGL

SEQ ID NO: 358932 - protein, 317 aa, unidentified
MSTPTHFCGIDVSKDRLDVALLPGAECWSVSNDPSGLKQLVSRLHEHGPTLTVLEATGGYERAAAAALAHAGLPLAIVNPRQVRDFARSTGQLAKTDRIDAQVLALFAERVRPEPKTLPDEQAQLLDALLTRRRQLIEMITAEKNRRGFAPAPLKKNITKHIAWLERQLSDVDRDIERMIEQSPLWRAKENLLRSVPGVGPVLSRTLVAELPELGTLGRKQIAALVGVAPLARDSGKLRGRRSVWGGRAGVRATLYMGALVAARHNPVIREFYERLIAAGKPKKVALTACMRKLITILNAMVRTQTPWDATFAQDSC

SEQ ID NO: 358933 - protein, 319 aa, unidentified
MKRNKYSRKAAGIDTGKDKLDIAIHGSPDVSQVANDDAGHQQLVQWLGERKIKRVGIEASGGYEKVVVATLRRAGFQVIVFQPKQVRCLAGFKLQRAKNDCIDAALIAKCAAFCEEVREVPDPRLQDLAEPLTLIDQLGEDIARWKTRLEHVHQAEPRGWIEDEIKRLTRIVTIKRADLLRAVKSHEDLARRYSLIESVQGIGPPTALTLLIRMPELGSLTREQIASLAGLAPFDHDTGRFKGQRRIAGGRGRVRKALYAAAFPAAYRWNPLLIALYQSLIESKKTHKQALIACARKLLVMVNAVVARGTPWIKTETAL

SEQ ID NO: 358934 - protein, 371 aa, unidentified
MYIVGIDIGKNHHEASIVSPEGKQIGRSLRFATTHKGADSLMSFIFKNIGNSPCVFGMEATGHYWYPIYSFLKAKGYTIYVINPIQSDSLRKMYIRQTKNDSIDSFLIAEVIRFGQFGTTSMADENILAMRQLCRYRDSVISSRTEIKLRIGTIMEQIFPEYEKQFSSLWVSTSMGILEKYLTPENIENAPIDELFEIIKDKSHNRLTKAKAISIKEAAADTFGIKIAQDAFSFQLKQLIDRMNFLDKQIEALDCQILEYYEKFDCYLHTIPGIGMIAAATILAEIGDINRFKSSSALVAFAGIDPTVRQSGEFSSTHNHMSKRGSPYLRHAIFLAATTRSFHNSPLNAYYKKKRDQGKHHLTATGAVARL

SEQ ID NO: 358935 - protein, 355 aa, unidentified
MSQEKYIGMDVHQATISVAVMDSSGKLIMECILETKAATILEFIAGLRGTLSVTFEEGTSAAWLHDLLKPHVSHLVVCDPRRNALLKDGSKSDRIDARKLAELLHGNKLHAVYHGEHGVRTLKELGRSYLTITKDLTRVMSRIKALYRSWAIPCSGATVYAPRHRAEWLAKILEPGVRLRAERLYQQLDLLQPVRQEARRDLLVESPKHHAVTLLRQIPPIGPIRAALLVALLQTPHRFRTQRQLWAYSGFAVETHDSGEYRWVRGKLVRNRERITVRGLNHNHNHDLKNLFQGAALSASTRPGPLCDFYVALVEKGMRPTMARLTLARKIAAITLTIWKKGVEFDAKQLNRQAA

SEQ ID NO: 358936 - protein, 424 aa, unidentified
MQNTAARKRKQVPEGYLVVGVDPHKKRHAAVAITQDFTTQAKFKFDNTREGLEAMLDRAKVEMVKSGCRGVMFAIETGGHYWRNVAYFLDEHGIPFRFINQFTLKRRREGKDLNRRKNDYRDSEVAAQLLCTGEFTESKLPQGVYAELRTAHNAYRRLVKERTRITNLVKGLLDALFPEFTQVFKDPCALTALSVLSICPIPRVIAGMTEDEFEATIEAQHKGRRLMRKKLRALHYSARTSIGIDAGACSLSSEIAFLVEKLELIRGHICSIERTLVRLVDETEEGKYLLSIRGLNYIAVAGLLAELGCFKAYQSARQMIKMAGTNPTESESAGKKRARTPMSKQGRPVLRYCAWTSVIPMLRFNSDFRAWAKQRRERPVHANPLGGREVVGAALNRLLRLAFAMVKNKTYYQVSKAELTLVAV

SEQ ID NO: 358937 - protein, 347 aa, unidentified
MNFYKLSHKYYCGVDLHSRTLYLCIVGQDGVILLHRGLPCDPERFLLAIAPFREDLVVAVECVYSWYWLADLCAREGIAFVLGHALYMKAIHGAKAKSDRIDSEKIAVLVRGGLMPVAYAYPADMRATRDLMRRRLLFVRQRGSLLGHIQITHHQYNVDPPGKRITYRSNREGLGEGFEDPSVRQTIAADLALADHYEVIIGDLELAVLRQARIHDPNALALLTSVPGIGKVLALTILYEIHDISRFPSVRDFASYSRLVKCERRSAGKSLGSGGDKIGNAYLKWAFSEAAVLFIAKSEQGRTVLTRLERKYGKPKALSVLAHKLGRAAYYMLARKQAFDPQRFATS

SEQ ID NO: 358938 - protein, 451 aa, unidentified
MSQRKGRKAASLPLVEPNAAGADIGATQIFVAVPPDRDAEPVRCFDTFTADLERLADWLEQCKIRTLAMESTGVYWIPLFQILEQRKIEACLVNAQHLKNVPGRKTDVEDCQWIQHLHSVGLLRGSFRPDQEICAIRSLWRHRDNLIQLATVHLQHMQKALDQMNLQIHHVISDLAGTTGLAIVDAILAGERDLTKLAKLRDWRIRASEEMIIKSLVGDYREEHLFTLRQSLESYRHYQKLIHDVDAQVKQMMRRLPAKIDIGEKPIPKEKNPRKTPWRNEPPQLREDLYRAFGVDLTQIPGINTLTAQMLLTEVGPDLSRFPTVAAFCSWLRLCPEPKISGGKVLSSKTRPTKNRAALALRMAAQGLHRSQTFLGDYFRRMKARLGTPKAMTAAAHKLARIVYHMITTHQEYDTTVFQELEHRLQDRKRMKLRAQARELGFDLVAREAVP

SEQ ID NO: 358939 - protein, 342 aa, unidentified
MLHVGLDVHERSSAVCILDENGKKVKEHSVRGHPRRVITWLRRHIDTPFQICFEASTSYGYLYDELRRIAHRVVVAHPGRLRLIFRSRRKNDRVDAAKLAKLLYLDALPAVYVPSAEIRSWRGMIEHRHRCVRSRTRCKLTIRALLRTHGVETLGRRRLWSKRGRAWLESVELPDEISWLRLEGLLADLDHFDARIGRLESILERIAEKHPAVALLRTIAGVGIRTAEAFVAYVDNPDRFRRSKSIGCYLGLIPRQDASSDTNRLGHITKEGPGTVRQMLAEASWQAIRRSPTVRAFFERIAQGRKDRRKIALVATAHYLARVMLHMLKTGEVWQEDQMITA

SEQ ID NO: 358940 - protein, 331 aa, unidentified
MSTPSHQEIHHVEVGIDVSKRSLDVCILPSEGKSTSQSKSFMVTNDQEGISEILSRLAEPGLSPKLVVLEATGRYERLCAAAIAAAGIAVAVVNPRQTRDFAKAIGKLAKTDKIDAFVLARFAGAVEPRASVIPDEKAQHLQHILARRRQLIEMLVSESNRLGTAPKALQKRIQAHIEWLRKEIARTNKDLDEAIEDNAAFKANEKLLRSVPGVGRVLSRTLLAELPELGKLPHKRLCALVGVAPYNRDSGQRSGKREAWGGRAPVRAVLYMGALVATRHNPVIKEFYERLLAAGKPKKVALVACMRKLLSILNALMRDRAIWRCPHVLTP

SEQ ID NO: 358941 - protein, 341 aa, unidentified
MSIVTVGIDLAKNVFAVHGVDEAGKAVLIKPRVSRDQLSALIAQLPPCVIGMEACSGAHHWARVFQEYGHKAKLMAPKLVAPYRMSGKRGKNDAADAAAICEAVTRPSMRFVPLKDEHQQATLCLHRTRQGFVEERTATYNRLRGLLSEFGVVLPQSPERLRLDITTHLDSLPSWARRCISDLLDHAGNIEHRLAEYDRAIAEIAREDERSKRLMRLRGIGPTTASALLASIGSGHDFRNGRQVAAWLGLTPGQHSSGGKARLGRITKAGDAYLRSLLVLGARAVMANLGDKQDRFSRWIRNLMERRGYWRAAIAIAAKNARMAWAVLKYGDDFRHEPVAA

SEQ ID NO: 358942 - protein, 342 aa, unidentified
MAETIAVDLAKPVFEIVVSTAPGKIVARERVPRRKFLDFFVNRPAATVVMEACGSAHFWARKIQSLGHTVVLLPPAQVRPYVVRNKTDRTDVRGMLEAQRNENIRPVPIKTVEQQALASLHRVRSASVADRTAKINLLRGLLRELGLVIPLGARKVIPHAWAFIEDAESGIPDAIRPPLADLCQDIRALEERIHELEQRIAAMAKHSPAVARLQTIPGVGLLIATAVVALVGDVHRFPSGRHFASYLGLTPREHSSGSRRWLGGISKRGDSYLRTLLIHGARSSISHAHSNPDPDRLRAWALKLEKTSGAKTAAVALANKMARIVWAVLKHDRDFKSAPKAA

SEQ ID NO: 358943 - protein, 368 aa, unidentified
MNGLEAQRRLAMREIISMTTKRVCGLDLGDKTSALCVCGRGGEIEWEGRVRTTVAGLAKRFKGVEPMRIALETGMHSPWVSRQLRQWGHEVIVANASKVRLIGNSRRKNDRLDARTLADLASVRPRLLSPVEHLSAEAQAHRGVLRSREALVRSRSSLILHARGLVKALGGRLPSCSAESFSKKARGFVPAQLLPALAPILSMVGELTAQIRAYDRQIEELLRTHYPQAQRLRQVRGVGPITALAYVLALGDPQRFAKSRTVGAYFGLVPAQRDSGSLRPQLRISKQGDTYVRKLLVQCAHYILGPHGVDSDLRRLGERLGQAGGKNGKKRAVVAVARKLAVLLHRLLVSGQPYEPLLQADLAQPQAA

SEQ ID NO: 358944 - protein, 415 aa, unidentified
MPNPLFVGIDVSSTDNAVCCLTNDDERRPLSRFSVLNNRPGIMELRERISQLVDRHDYDEIRFGLEHTGCYSTHAAMYLQRHLDFGCPDVKVYMFNPSLIKAFKKSHFLDAPKNDRFDAWFIAAKLKAGHLPHPFTWSEPMMALQRLTRARYHLVQALVRESNFLMTNLYLKWSNYTLVFDNKLSATSLAVMEEFESAEALVEISMDELVDFLVQHGKNRFDDPLAVAKELQKAARTSYRLPKAVNDSVNLAMASSIRVIRTVQEQLKSLKKAIEDHLETIPQTLDSVPGIGPIFASGILAEISDVTQFESHKQLAKFAGLAWSQHQSGNFTASQTRLIHSGNRFLRYYLMEAANSVRMHDPVYAQYYAKKKAEPKQFAHKRALALTARKLVRLVFFLLKTNQLYQPEGGNRQNT

SEQ ID NO: 358945 - protein, 430 aa, unidentified
MEVIYPKACGVDVHKSFIVAVICDSTSVKPQYLRKRFSTFNNSLIEFRNWLLANDCQNVCMESTGKYYVPVYNALEGHISNVVVANPKWVRCIKGEKDDNKDAKWIADLFKLGIVRSSFIPNKDIRILRELTRYLYKLTNMRTSEKNRFTNALTVGNCKLDMVFSDIFGKTSSAIINTILSQNEYNDEDILKNVDKHCKSSNEDILNSISGISWQDAQKQRMNVIQEHINYLDKLIKTVREIIDSIIAPYESAINLLCSVPGIDRKSAITIISEIGTDMSQFSSHYRLASWAGLAPGCNESAGKKKSVKISRAGVYLKPALVEVAHCAVKDKNNPYYANKFNVLSKRRGKKRAYIAIARKILVAIYHILSTGEFFNPTDLSRVETSDKDKIKFTKNNFMQSTKQLISLGLTIDDLQTLIQSKISDSTPVI

SEQ ID NO: 358946 - protein, 321 aa, unidentified
MYSIGLDVSKSTINCFVPNGEIDLVIDNNEKSLNQFLSKLKKIYKKDIDKIVFIFEPTGSYSTLLKRFCTKKKIKAFIVNPKQSHNFAKAVAQRNKSDEIDARVLSKMIVIASENDIRVPVYDKNVEDIKDYMSYYKFIVKQLVQANNVLESMNHNQSNKHILKSLEKKIDAFQKESLEIIMKIKKIISQDQLLYQSFNNIKTIKGVGDISAIVLLHLFIKYPAANQRQIISLAGLEPTTKSSGSSVRTKPKISKAGSKLYRGTLFMSALTAIRFNPKITEFYNRLKDNGKQSTLAQVAVMRKLIIIAHSLYKNNQKYICT

SEQ ID NO: 358947 - protein, 430 aa, unidentified
MNSIGIDVSKEKSTVCILRPYGEVIMAPKDLYHTESDINNLINMITELDGESRIILEATGAYHFPIVSKLSEAGLFVSVINPYVMKKYACAAVRWGKTDKLDSVRIANYGIDNWFKLQKYKIAAETYEELKILGRQYAHYISMKIESKLALTTLLDRVMPGIKALLTGKRSEEPTKDKLSDFVEKYWHYDNITKMTERKFCEDYCKWAKKKGYYANETKARKIYAMALAGIPTLSSNAPTTKLIVLESVRVLKEINQTLEIILTEMQKIARQFPEYDTVRNMPGVGEVLACKLIAEIGDVRRFHSGSALIAYAGIDAPPYQSGKFNGTQRKISKRGSSLLRKIGYETMRCLKTTKPEQDNAVYLYMLKKESEGKPKKVAKIAALNKFLRIYYARVKSVYNNSIFLDSEPEANQVTTEGGLPFTDTKKAVS

SEQ ID NO: 358948 - protein, 381 aa, unidentified
MTTTAPHNANSNIADVPLFVAFELSEKTWKLGFTTGHGHKPRERSIPARDQERVLNEIAQAKRRFGLPATAPVVSCYEAGREGFWLHRFLLAQSLTNHVVDSSAIEVSRRQRRAKSDGLDVRKLLSMLMRYHQGERHVWQVVKVPSVEAEDQRHLHRGLETLKQERASTTTRLKGLLSSQGIRLTSLTNVPDQLDAMRLWDGSPIPLGLRRRILRVYAQHTFLSQQIAEVEAERRTQLQTSSEASIAKVRQLMLLKGIGINGAWLLVMEFFGWRAFKNRREVGGLAGCTPTPYQSGESAREQGITKSGNRHVRWMTTELAWSWLRFQPDSTVSCWFRQRFGNGGKRLRRIGIVAVARKLLIALWRFLETGELPEGAALKVG

SEQ ID NO: 358949 - protein, 427 aa, unidentified
MAQTATSSGTWLVAIDIGKRFHAVLVEDPDGTRRCFQLASTREDYDRLVGFLQARSGPVRIALEPTGNLHRTLAYRLLREGFPVVSVSSVAGARYREAMFNSWDKNDPKDATVILHLLKQGIVQHYHDPLLAGEHDLQELSKTYQQITLARKRLADSLLNHYLPLYFPEMARYWESTRVAWFLAFLTQFPTPEAICALSREAFVQAAWPLVGRKVHKRAKLDELYELAHRSIGLPVPLDSPAIETFRLQLEQLRRLATLREALEAQAHTLLQGRADFQHLCSLPGVASILALVILAEGGDLRRFRHHRQFLKYCGLDLAKRQSGQSRGRETLSKRGNARLRMAFWMAAQRAVRMTENSFRDKYERYTKQDPGNPDVRRKALTAVAAKMARVAYAVVKRNQPYRGYHEQALPSGSIPLIRAVGAIATP

SEQ ID NO: 358950 - protein, 255 aa, unidentified
MFFIGIDVSKAKLDCSLLLDVATAKRRAKSVTNSKAGVDDLLAWCVKQQATPDTLHAILEGTGVYHEQAALALSDAGVTVSIVNPAQVKDFGRSLGVRTKTDGVDSLVLARYGALLNPRPWTPPTPEARTLQALLSRREAIAQDLQRERNRLEKARATDTPALIHQSLLDSIAFLETQLAKLQIDIDDHIDQHPELKADRTLLISIPGVGPQVSNHLLAVMHNHHFQSAEQLAAYLGLVPVERQSGSSIQAAPTI

SEQ ID NO: 358951 - protein, 490 aa, unidentified
MSRNRQLRQPPLSDATPTSGSPVPFRDVGKDLASVGEHHATVLDERAEVLFGRYFPTRAEALAQLEARALQATPSGTRLRVLLDCASLAWLPVAVWFQRRGHLVYQVPNGKTKDLREYYSKHSKSDPDDSYALAKHPTVDAESLVPLYLPTPEVFSLDRLNREHDRYSKEVAAMKNRLRDFLNSFAPGLAGALPVGLFHAGARELLREYLAPERVLRLGQRRFGTVLQNRLGDQVTPAVSAAVYQVYQQTATLFDLAERPAVCFDDLQAQLNRYWDELAHWEAQAAELKRQIGERYEQVSPGKHLSSLPGVGDLIGASFFGTVRGRDRFPNLASQRKFFGFTPKRNQSANSDKKSQRMTHAGPNLTKKHLFLATDMLRQHDPEVAAYYYDQMVRKGKCHTVAVCNAVNNKTIPRLHALLREDRPYELRDPETGESITPQQARQLIRERYTVPEEIRRARRSHQPRRKAQPPKEGTRSRKKGRAQSPGLRP

SEQ ID NO: 358952 - protein, 362 aa, unidentified
MAMSHNEFQSSEPIEPQEASPMKHEMHVLGIDIAKRVFHAVGMDDRGNIVYRKRLSRHDLIPFIAKLPPVRIGIEACGGAHYWARRFRAHGHEVKLMAPQFVKPYVKSNKNDSRDAEAIAEAVTRPTMRFVPIKDVDQQDIQALHRVRERLIGERTALVNEVHGLLHEYGIVIPKGVAKFRQAVVGKLESEKDKLTPLSQELFWKLVDEFALLEKQLAYYQEKLDTVATTHPECQRLMTIPGIGPLTATALVAAISDASAFKNGRQFAAWLGLVPRQHTTGGKERLLGISKRGDTYLRKLLVHGARATIRWVGRKTDRRSQWMRQLLERRGKNRTAVAVANKNARIVWALLTSHQDYQPATS

SEQ ID NO: 358953 - protein, 366 aa, unidentified
MKKISTVEIERIQIFKEHQRTIGLDLGDRTSHYCILNEVGEVILEHELPTTPKGMEEVFSRIPRSRIALETGTHSPWVSRQLTQFGHEVIVAHARNVRLIGESSRKDDQLDARTLARLARIDPGLLSPVRHRSAKAQLHLTVIRARAALVSTRTALVNAARGLTKSYGQRLRKCGTEQMNREIAKGLSQELRDVLDPLLAEIESLHERIAEYDGRIEQIAKEVYPQVALLKQVKGVGPLIALTFVLTLDDPHRFRRSRDVGCFVGLRPGRRNSGRSEPQLHISKEGDRYLRTLLVQGAHYILGPFGQDSDLRRWGRKLSERGGKNAKKRAVVAVARKLAVLLHKLWVSGEVYEPLRNNRKGIAAVA

SEQ ID NO: 358954 - protein, 351 aa, unidentified
MMIIGVDYHPSFQTMAFLLEETGECGEQELNHSDGQAEKFYRDLKQRGIRVRVGMEATGYSRWFERLLAELGFEVWIGDPAEIKAKRVKTLKNDREDARLLRRLMLEHNFPRIWVPDPENRDLRQLLWHRHRLVQMRTRIMNQLQALAMNEGYRWRKKLFSEQGRAQLEKLSLAPWASRRRQELLELLDRMNPTIAELTAAVEREARKRPAVQRLMTHPGVGPLTALAFVLILGTWERFPRGKQIGNYVGMIPSENSSAGKQRLGHITKQGNSLLRFLLVEAAQAAARVHPDWRRRYVHLAMRRHRSIAKVAMGRRLAVRLYWMWRNGCEYSQSLEFGSYAGQLGTGHGAK

SEQ ID NO: 358955 - protein, 418 aa, unidentified
MEVAYASCCGLDVHSKFVTACVLRGPAVKPEKQVREFPATTSGLLRLRDWLNGLSCRAVAMESTGVYWKPVWNVLEGPDFELTLANPHAIKGIKGRKTDVGDAEWMAKLHRSGLVAGSFVPPEPIRDLRDLTRYRTTLVEEQSAERNRILKVLEDANIKLAEVASDVFGASGWDMLQALARTEGQVDAAQLAGLARGRLRLKLPELREALRGSLREHHRYMLRIEMRHLEQVAVDIAELEQRIDECLRPYQEQVDLLKTIPGMQDRTAAVVLAEAGPDATVFPDADHFSSWAGLCPGNNESGNKKRPAHIRDGNRHLRAALCETAWAGARKRNTFLSASFWRLRARIGSKKALIAIAHKQAVAIHRVLKERVPYQDLGPEYRRRVDAQRYESSLVRKLEALGYRVSRQPQGGETPAAE

SEQ ID NO: 358956 - protein, 317 aa, unidentified
MESKCAAERFIGIDISKAWVDVHVRPDGVAWRFDTDGDGLGELVRRLKPLAPALVVMEASGGYESIVAVTLAEAGLPVAIVNPRQVRRFAEAVGRLAKTDAIDAAIIGHFAQAVRPPVRPLPDASLAQLQELLGRRRQLVVMVTAERQRLARAESAVTQRSHKAMLRSLEAERERIDRAIDKLVKASPMWCAKLDLLTSVPGIGDIVARTLLAELPELGSVDRHQIAALAGVAPFSRDSGKRKGKRAIRAGRVQVRGPLYMACLVAIRHNSKMRAFYQRLRHFGKPAKLAIVAVMRKLLTILNAMIRDSKPWTVVET

SEQ ID NO: 358957 - protein, 346 aa, unidentified
MKYFAGLDVSREETAICVVDEAGAMVREARVPSEPEALVAFFQGSGLVLERIGLEACSLSAWLHESLVAAGLPAVCIETRRAKAAMGAMPNKTDRNDARGLAQIIRTGWYRAVHVKSPACRSWRALLTARRLLLNKMRDLENGLRAVLREAGLKLGTPTRKEFAARVRELTAADPVLSVLAEPLLTIIAAMTRELAQLTKRVLEIVRDEPVCRRLMGVPGVGPLTALTFRATIDQPERFRHSRDVGAHLGLTPKRYQSGETDVQGAISRCGDELARTALYEAAHSLLVRSRRWSALRAWGMQVAKRRGMARARIAVARKLATILHRMWADGTEFRWGKEGPMPAAA

SEQ ID NO: 358958 - protein, 420 aa, unidentified
MEIDHGVQHLIERVAAIDIGKAEMVCCVRVPGAGRARAQEVRTYSTMTPSVLEMADWLTGLGVTRVVMEATSDYWKPVFYLLEDQVPETWLVNARDVKHLPGRPKTDRLDAVWLCKVAERQMLRASFVPPPAVRRLRDLMRYRTDLVAVRTAEKQRVEKLLEDAGVKLSVVASDIFGVSGRAMMAALIAGERDPARLADMALGRMRVKTGLLEKAFVARFSEHHAFLLARMLTRVDTANDDIAAMETQVAAVLDEEFHDAAARLTTIPGIGAVTAVAIIAEIGLDMTRFPTAAHLCSWAKFTPLTSESAGRAKGRQSTGHGNRYLARALGEAAVMAGRSHTFLGARYHRIARRRGKPRAIVAVGRSLLVAIWHLLSQPGATFTDLGADYYETRVNHQRTARTHIKALEGLGYQVTLAPAG

SEQ ID NO: 358959 - protein, 418 aa, unidentified
MRVLFIGDDWAEDHHDIEIVDADGRRLARARLPEGLEGITRLHALVAEHAPSSWTEQPDDQAAGQVVVGIETDRGPWVTALRAAGYQVFAINPLSAARYRQRHSTSGAKSDAADAHLLAEIVRLDRDHHRPIAGDSDLADAVKLLARAHQTATWERTRHVLRLRSTLREFFPAAVELFEDLAAADALALLERAPDPGRAARLTRAQVTAALKAARRHHVEAKADTLMAALRRPTLRQSSILEGAYAAIVVAEVKIIRALNEQISALGTVVGEHFGRHPTADIYHSQPGLGTVLAARTLGEFGDDTGRFSDARGRKNYSGQSPITRASGKKTVVLARFATNRRLGVALHLQAYSALTSSPGARAYYDSLRARNIGHHAALRQLANRLVGILHGCLKTGTNYNEDTAWAHRRADTDAVAA

SEQ ID NO: 358960 - protein, 356 aa, unidentified
MQNLSRLDFTGQQIYVGMDVHKKSWSVSIFTEHLEHKTFSQPPEVNVLVNYLKRNFPGAVYNAVYEAGFSGFWAHDNLIEQGVNCIIVNPADVPTKNKEKATKTDKVDCRKLARGLRSGEIEGIYVPSRAKLEDRQLLRTRQSMVKKQTRCKNQIKAILFFYGIHIPEELTKSRWSNKFIQWLGEIHQQKASGDLAFAAHLMELKHIRQIIAALNRGIRALSQTDEYRENVRLLKTVPGISLLTAMTLLTELYDINRFQNLDNLLSYVGLIPNTNSSGEKDCKTGITGRSNSQLRWLLIESAWTAVRKDPALLMAFSRLSKKTTSTKAIVKIAKKLLNRVRYVLKNQKEYVPAQVQ

SEQ ID NO: 358961 - protein, 402 aa, unidentified
MTYDYVIGMDVGKYFHHACVLDIDGAQVLSKRINQNEKSLRTLFSTFIANDHKVLVVVDQPNNIGRLTVAVAQDIGIDVRYLPGLAMRQLSRIHAGNAKTDIRDAYIIAHAAKNLPESLRSVDRVEEAFLQLKVLNGIDEDLARSYTRLINQIRSALVGCYPQFEQALRGQIIHRKWVLHLLARYGGPTKIKRLGKAKAAAFARRYKARNPEPVIDAIFAAISEQTVAIAGAQYAEMGVAMSAKDALLKLEHRKQIEQEVIELINDIPHTQILLSMPGIGPKTAAQILMTAGDMSDFPTAGHLASYAGLSPRTNQSGTSIMSNSLNRAGNKKLKNALWQSSFASIRFHERSRQFYERKRREGKRHNAAVVALARRRLNVLYAMMSNHEYYRDPDQSQEVKAA

SEQ ID NO: 358962 - protein, 342 aa, unidentified
MDIKVLGIDLGKTVCSLAGLDKAGAIVFRKRLQRHRLLDFLDKLPPCIVAMEACGGAHHIGRFCLQNGHEPRLMSPLYVRPYVKVHKNDDRDAEAIAEAATRPTMAFVAIKTEEQLDLQALHRARERLVSDRTRLINQGRGFLMERGIRIGTGRHVFQKELFRLTAEGTDDLSSRMLTLLSDMASELGVINDRISAIDAEIRVLAKTDADMQRLMEIPGVGPTIATALVAAVGTGSSFGKGRDLAAWLGLVPRQITTGGKAKLIGISKHGNRYLRKLFIHGARTVLHLVRDRTSPIAAWADRLKERAHVNVAAVAMANKMARIAWAVLTKRERYQPNALSGL

SEQ ID NO: 358963 - protein, 318 aa, unidentified
MSEAVFIGIDVSSQTLELASSAQTKTWQVANDASGIEQLVSQVSALGPELVVLEATGGYEFEAACALQATGLAVAVVNPRTARDFARAMGALAKTDALDARMLAAFARVLHQHPERERFVKPLADAELQQLQALVLRRRQLVQMLTAERQRLRLAHAAARPSIERVIEFLKRELGDSEAEVAAHVQRHHAQLAQALASVPGIGAASVAVLLAELPELGKLDRRRIAALVGVAPLNRDSGQMRGQRCIWGGRAEVRRTLYMATLTAVRYNPALKASYERLLNAGKRKKVALVACMRKLLTMLNAIAKHSSMWDSTMHSA

SEQ ID NO: 358964 - protein, 343 aa, unidentified
MAHYVGLDVSLRRTSICVVSDTGSVVREGVVDSDPEAIAAFVRSKAPDTVRVGLESGPTATWLWTELRRLGVPVICIDARHAKAVLKMQINKSDRNDAIGIARIMQTGWFKEVRVKGLDCHAVKALLTSRALLVKIKRDLENQVRGLLKNLGRVIGRAKFNGFAARAAELIEDRPELVAVVAPLLRAREAIEKQIDDLDRKVLKLARHDAQIRRFMTVPGIGPITALCFKATIDDPARFKRSRSVGAYIGLTSRRHASGEIDWSGRISKCGDAMLRSYLFEAAGVLLTRVPKWSALKAWGMRLAKRNGLRKAKVAVARKLAVILHRMWVDRTDFTWSNKEAIA

SEQ ID NO: 358965 - protein, 359 aa, unidentified
MKTNLSKKQLWLNKINLTKDDELYVGIDVHKKSYHVAFWLNHAPAIDFVMPPDNEKLIDTLNKLRPAVRMVVYEAGPTGYSLARAIQNANLPVSVVAPSKTPRQSAPDSKTDSLDARKLAEYAAKGLLRHVTIPTRHQEAQRQLTRLREQLVAKQTRVKLQIKGFLLQHGISQPQGLSHWSVAAVQYLKNVRLSEQLRYCLDSLLDELRFTVEHRKLTEQKIKDAFSGKPHSTVCKLLATHPGIGPTIAAQFAAEIFNPRRFKDKTQLAKYVGLAPSVKQSGQTLRDGPILKTGRPQLRCSLIQGAWLWIRADHDAHKTFCRLVHNTGHKNKAITAMARKLAVHLWKMACDNKPYACAV

SEQ ID NO: 358966 - protein, 315 aa, unidentified
MTTTLQEYVGIDISKDKFDVAMLGQKLVKQVANTKRGIAKFTKQMYELDPKLIVVEATGGYEEALVLGLFEAGLPVALVSPQRVRQYAKARGLLAKTDKLDAQNLAEYGKNIQPRLFVAKSEEGRRLSALVGRRKQLGDMHKAEKNRLRTVHVELKSSLQTVLACLEAEVERLDEEMRKFMEAHADFKAQEKLLRSAKSIGPVTAATLLADLPELGKLDRKQIAALVGVAPMNHDSGKKRGYRKTKGGRSEVRSVLYMSALSGIRYNPVIKAQYEQLVKRGKEKKVAITACMRKMLTILNAMMRDQQPFHLIPVS

SEQ ID NO: 358967 - protein, 404 aa, unidentified
MWYAGIDWATDHHDAVVIDEKGHQVGSLRIDHSPQGMSRLHTFLEQIIGSQSKEQMACIIETTHGLLIAHLLEAGWPVYPVNPRTVDRRRSASGAKTDAIDAYLLAKTGRADLADLHRLTPDSEKVSELKELTRDQDGLIRMQTRLVNQLTACLKAYYPVALELFTKLPQKCTLLFLQTYPTPHEAMAASVEQLQEGLRRAKHPHARLVAAQIFERLHQPHLQADAVTTRTKARLMLVLVSQLLPLLEQIAQYDKEIDTLFLTHEDHEIFESLPRAGQRLAPRLLAEIGDDRERYQDARSLQALGGTSPVLFQSGMYSKAHRRLGCIKPLRNALHQFAWQTTQSEPWARQYYERKRAEGKSHTVAVRALANVWVRIIFAMWLHHQCYESATFEQAQQQHARKVA

SEQ ID NO: 358968 - protein, 386 aa, unidentified
MQKLNDLSRCLTPLEPDSTLIAVIEMSLSSWLVAGIVPGVERQPLKKIAVDESVLLKLLHRWREEAEKAGYMIKRITVAFEAGRDGFWLARWLMARDIEVHVIHTSSVAISREHRRAKTDRLDTELLKRAFLGWLRGERDHCKMVAIPTIKDEDGKRPNRERESLVGEQSRIINRIKATLVRLGVRGFNPKLKKAAERLEGLRTPEGEPIPPNTLSELYRDMERRRLVRDQIRQIESARLDRLEHAPGEGAHAMVRLLARVMGIGIETADMLVREVLSRNLRDRRAVARYAGLTGSPDESGKKRREKGLARSGNPRVRRGMIQLAWRFLLFQKDSALAQWFRARTENARGTRKTMIVALARKLLIALWRLVREGVVPDGVILRPVQ

SEQ ID NO: 358969 - protein, 323 aa, unidentified
MTTQATLGIDIAKRTFDAVLLQAGRTRHRQFANSVVGFQQLDTWLRDHATAPLHAGLEATGIYGDALALFLHQRGVSVSVINPARTHAFARSELARTKTDKTDAALIARFVATQQPPVWVPPPSEQRQLQALVRRLEALHAMYRQEHNRLDLEDAASLLREYIAAHLTHLDDQIRQLQHRLREHVRTYPALQQRCALLQSIPGIGECTALKLLAELPSPSCRTARQAAAHAGLCPRQRDSGSSVHGKTRLSKTGNARLRKALYLPAVVAMHHNPILREFARRLLERGKPKMAVVGAVMRKLLHQAFGVLKHGQPFDPNYALTP

SEQ ID NO: 358970 - protein, 413 aa, unidentified
MLKIVYPICCGMDVHKSFVYACIASTNEQGVTTYKSKRFSTFTKDLRFCAEWLAENNCKDVCMESTGKYWIPVYNILEQTCNVVLAHPKYVKAIKGKKTDKKDAKWIADIFKHDLVSGSFIPPADIRQLRDLVRYRWKLTNFVVGEKNRAQNCLTVSNIKLDDVFSDVFGKASSNIISRMLENPSEKITDVADFRTKGMKATDEEVLAAVDGEFCPEQAEKLRIIRSHMDSLELCKLNVESLILTVAEKYIPQIDLVSTVPGIQTFAAIGIISEIGVDMSVFPSSKHLCSWAGLTPQNNESAGKKKTTRIGRAGDYIKPLLVQCALCAIRKKSNPEIRNRYLSIKKRRGHKKAIIAIARMLLTAIYNILKKNEPYNAELYTRSNNPPTHRTVSVDEAIFILQRQGYLVTPATS

SEQ ID NO: 358971 - protein, 403 aa, unidentified
MNAVGIDVSKGKSMVTILRPFGEIVSSPFEIKHTSSDIHSLIKLIHSIEGESRVVMEHTGRYYEALAHQLSAADLFVSAVNPKLVKDFNNDSLRKIKSDKADSVKIARYALDKWQSLEQYSITDELRAQLKVMNRQFHFYVKQKTAMKNNLIGLIDQTYPNANTYFNSPTRSDGSQKWVDFVSTYWHVDCIRKMSLNAFVEHYQNWCKRKKYAFNKSKAEEIYTKTKELVPVFPKNEITKHIIRQAVDQLNSTSVTVETIRTLMNETASKLPEYSIVMQFKGIGPSLGPQLMAEIGDVTRFTHKGALTAFAGVDPGVNESGSYAQKSVPTSKRGSSNLRKTLFQVMDVLIKTMPQDDPVYQFMDRKRTQGKPYYVYMIAGANKFLRIYYGRVKEYLSVLPDPS

SEQ ID NO: 358972 - protein, 351 aa, unidentified
MHQNIILTTDYHDENCVIRWFDECSQHEQVHKVPTCPTRLSELVARAEAIAKPRGGCVVWIQESTTGWARVEALLGRRVKFHLANVVQMPLPPKGKRRKTDKIDTARLQREYRNGDLPLAHRPPAWWRQVRRLVALRENLVSRRTALRNWLGRYFAHETWIERTGFWSQKGRVRLQKLASAAPRWDRLVIETKLAELDQLAAQLDTVQAAMHGVFQQWPQAQRLDKIAGIGVIAATSIVARIGPIHRFVNADQLIAYAGLAPGVHQSDSTRRHGRIGGGGTDRHLRHYLIEATIWARHIPRYQAAYERTSRRRGAKIGRLVVARLMLRSIWRILRKAEAFDPQAPGVGKNK

SEQ ID NO: 358973 - protein, 342 aa, unidentified
MLIIGCDYHPGMQQIAWFDEESGECGEQRLEHGTGEGERFYRELKRRGVPVRVGIEASGHTRWFERLLRELEMELWIGNPAKIAAQRVRKQKTDREDARLLLRLLREGRFPKLWVPSPENRDLRQLLWHRHRLVQMRTRIKNQLHAIALNEGVQRKSRLWSKTGRGQLESFALAPWAARRRHDLLQLLDQLTPQIAELSQAVEQEAERRPEVQRLMTHPGVGPITALAFVLVLGTPQRFRCGKQVGSYLGLIPCEDSSAGKQRLGHLSKQGNTLLRYLLVEAAQAAVRCDAGWRRRFVHLAMRRQRNIAIAAMARKLAVSLYWLWRKAEDPPAAPQSGSYVG

SEQ ID NO: 358974 - protein, 418 aa, unidentified
MDIPSPFPYQATVGIDWADQKHDVFVRFAKGDSYRRKIDSRPEAIQEWLFELRSACAEGKIAIALEQRRGALFYLLCTHLNWIDLYPINPHSLASFRLTFFSSRAKDDPIDSQLLEELVRTHSDRLRPYQPESTTERKLDQYCRHRRSLLDLATKTELKLISTLKQYFPLAVNLFAAVGMKSDIALNFLSRWPTLDELQRAKTHTVRSFFYAHNSRSQSLIEKRLQQIADAHNVTDDFALIEPLVLTTKCLVGQLRQFNQVIKEFDHKIKELFKSHPDHFLFESLPGAGEQLAPRLLSLFGSDRSRWADATHIQKYTGIAPVIERSGKSIWVHRRLSRPIFICQTFHEFAQQSVQRSSWADQYYRRQRERGKSHHSAIRALAFKWIRIICACWKANKPYDESFYVQALAKRNSSLSST

SEQ ID NO: 358975 - protein, 434 aa, unidentified
MGPMQGEDEFQWFVGVDWGTVEHMVNVADVGAVRAHERVVAHTGDGVGAFVAWLTQLAGGSLARVAVAIEKPRGAVIEALLERGAAVFSVNPKQLDRFRDRFSPAGAKDDRLDAQTLRSALQTDRPYFRRLAVDEPLVIRVRELSRARDVLQKEFGALTNRLRELVHRVRPEWLSLSANADDPWFWALLVQAATPDLGRSLRRKKLESLLTTHRIRRVTVDALLEALHQPGVPVAPGTVEAVTEHIQLLVRRVQLVHEQREDCSRALDKVLDEWDGNEPPASTRSSDGAEPDEPAPCASAGPSDAAILRSLPGAGTVVTSTFLAEASPWLQARDYASLRAITGVAPVRRQTGKNKQGKVSMRYACSSRLRNACFYLASVSTQVDAAAKAYYARLRARGHSHGRALRSVADRWLRILMAMLKSKTLYDAARFATA

SEQ ID NO: 358976 - protein, 456 aa, unidentified
MPNYYLGADISKGYSDFIMLDAAKRPIEDSFQLDDTFEGHHQLYSILSKFCNDHRKARIYAAVESTGGYENNWFDALIKLQSSLPLKTARLNPCGVHNNSKAGLERNITDPISAENVAKYMIAHPQSVTYQQQDPLASLRKQWSFIKMLLKQKTQLLNQLESNLYAANPEILAYCKNGVPKWVLSLLGRYPTAAKLAKAKRSSLTLIPYVTPSKANALINSAKKSIASATDQISAQIITATVKQIQHLTKAIEAQVKIITKNCSVPEVELLKTFAGISDISAIGLMLEIGSVERFAAAKKISSFFGLHPIYKKSGDGTWGFHMSKKGRVVPRYILYMVAMSAIQCNPLIREIYLRHTAKGMKKKAAIGVCMHKICRIIYGMLKHNMAFDPRVDRKNTKKSPQSKTKIRNDKRRRYQSFDAKAPISGRQNKKRKERKQSQSVNNAQCGIIKAPVPNS

SEQ ID NO: 358977 - protein, 461 aa, unidentified
MPTPTRRPKKLQLDGLPTILPNAAGMDIGTEEIVVAVPPDRAPEPVRAFPTFTPDLHALVGWLVACGIDTVAMESTGVYWIPIYELLEAHGITPYLVNARHVKTVPGRKSDWNDAQWLQKLHALGLLQASFRPDAEIAALRTLVRYRAEVIQHRSPHILHMQRALKQMNIQLPEVLTDIMGETGQAILRAIVAGERDPVKLAQLRNPACKSSVEVIAKALTGTWKDELLFVLQQALVLFDVYTAQLAVCDAQIERYLKAMESRGEPDAPLPDLPPAKADSKSKNAPNFNARAQYARILGVDLVAVMGLSASSVQTIITEIGTDMSRFPSAKHFCAWLGLAPHNEISGGKVLRSRTQKTTNRAGQAFRQAAQAVSRSDSAAGAYYRAMRARKGPQQATVATAHKIARVIYHLLKFGEAYEEESAEAYEQKRQERELRHLTRRANKLGYTLTRVGDLSPAAAT

SEQ ID NO: 358978 - protein, 410 aa, unidentified
MVKENFIYVGIDLHKETHTAVMIDCYNQKLGEITFPNRPAAFPKLVTKVKKCNTDGKEVVYGLENAYGYGRALAVWLIDKGYLVKDVNTAISHRQAKHRGAMYRKSDSDDAEAIALATLNMLDKLPDAYPNDAYWSLGQLVHRRDNIMKQRTRLVNQLHEQLCIAYPSYKQFFNDISRPTALYFWEHYPSRKYLKGKSVEDLRAELVPVSHNKCSTKTCEKILDAVASDKVKNNAYQDARDMVTLSIVSDLQHYDKQLAEVDKMLEQMYKMLGCTLTTIPGVNVITAVKILAEIGDIKRFSNANKLAQFAGIAPLHLSSSGKGKDVATKQGNRRLQATIYFLAIQMVQVSSKGTPRNSVVRAYYEKRKAEGKTSQQALICISRRLISIIYGMLKHGTEYRMPVVESAGEK

SEQ ID NO: 358979 - protein, 484 aa, unidentified
MAKRKMSTFERLRSGKKLGRRERRALERCLQADAPELEIVHPNAAGIDVGNESHFVGIKPGQCEQPVQEFGSWTADLRRMVEWLKSHGVKTVAMQSTGVYWIALYEVLEQAGFEVYLVNARGTKNLPGRKSDVQECQWLRKLHTYGLLRNSFRPPEEIRAVRTIWRLRDRHVQEAGRSVEQMQKALTTMNVQLANAITDLSGATGLAILRAILAGERDPQQLAKLRDARVQASEEEIAHSLEGNWREEVLFELQQVVDTYDFLQRQIAACDVQLQKYMTALPTRELPAAPRVASEAVAVEAGPRQRKAKAKRRSKNAPSFDLAAELRRTTGVDLLTIEGINVMTAQVILSEMGPDLSAFPTESHFTAWLGLAPQRDISGGKVIAQRSRRVKNRVANALRMAAESLSRSDSYLGARYRHLRGRLGGLKAVKAMARYLACLVYRLLTKGQAWVDRGSAEYERKRKQRELVALQRKAAQMGMQLVAA

SEQ ID NO: 358980 - protein, 397 aa, unidentified
MKCPQGLHDRGSVAHSAVRRVRERHIQHEGGTNMNSVHYVGMDVDKEKIILARLGAGNAKEVQEHVIANTPGAVKKYFTALLAGAEVHASYEAGCFGFGLYRQLSAMGVAVLVAAPGLIPRKPSDRIKTDRRDARSIALALRAGQLTGIHVPTVQDESVRDYLRMYEDLRGDLRICKQRVLHFLLRRGIRYDNGGPWTVRHKNWLASLEFADARDRKTLDMYLATLQELEGKCAEAAEEVEGIAAQERYREQTKTLCAFKGIKTLIALSFVAEIGDFRRFPNARQFMAFLGLVPSEHSSGNKRRQGGITKAGNSHLRRLLVEAAWHYRSYHPSSRVLIERRRGVDPHLLSYANRAGRRLSRKYMRLVLRGKRSQVAVTAVSRELAGFIWGAMTGQVA

SEQ ID NO: 358981 - protein, 381 aa, unidentified
MSFRAYPHREDWSMKKSLRFVGLDVHKDTITVAVAEARGGPAEVVEVIPNDGVALYKVLDRLGPPRWLRVCYEAGPTGFGLARRLRAAGIDCLVAAPSLVPVQKGCRIKTDRRDARKLAQFLRSGDLVAVAIPDEETEAMRDLERARGDAKIAERAARQQLDKFLLRHERIWRDGTKWTQRHWRWIRQQEFVDVKLRSVGQDYQTAVEQATARVERVTADIAQFAETCSLAPRIKAFQALRGVDVVTAVVLAAEIGDFKRFGSPRNLMAFVGLVPSEHSSGASSRRGRITRTGNKHVRWLLTEAAWNYQFYPKASKRIKARRKWVSAEVRAIAEKAEQRLYRRFQRLLRKGKQRNRVVTAIARELCGFIWAIAREEKLLAA

SEQ ID NO: 358982 - protein, 341 aa, unidentified
MEKFIRTAIDLGKNYFQVHGLESEGGRSISRKVKRSKMHEVYSQIEPCRVGMEACGSAHYWARQLTAMGHEVVLIPPAYIKPYIKRGKNDVVDAAAICEAMSRPDMRFVPIKSADQQAVLMLHKTRELLVKQRTMAVNALRGHLAEFGIVAAKGIGRVDELLALAKADAALPHIAGAAVACMAGHLEGLDLSIETVDEEIAKAHRQNPISRLLDEIPGIGTLIASATAASVPDPGVFKSGRDFAAWLGLTPRQNSSGGKEKLGAITKQGNRYIRKMLVTGATSVLRVAGKRKGALADWINALRARKPERLVAVALANKLARICWAIMTTGEGFRTDTYVKA

SEQ ID NO: 358983 - protein, 391 aa, unidentified
MILVGVDVAKDKHDCYIMTSEGEVLFKSFTIANNMEGFNQLYEKILSVIDNFDNVKIGLEATGHYSYNILGYLLDKGLTPYVINPLHSNLYRKSLSLRKTKTDKVDSRIIASMLMSDVSLKPYSNTLYHNEELKSLTRYRFTKVQERAKLKISISRLVTILFPELEKLVPTLQMNSIYALLYEFPSAHAISKAHLTRLTNLLNTTSKGHYTKDKAVLIREAAKNSIGSNMPAKSLELKHTIKLIKELTTEINEIEEEIKIIMNKINSPILTIPGIGLSTGAQILAEIGDFKNFSSPDKLLAFAGLSPSTYQSGNMYSSNAKMEKRGSKYLRFALFNAAIYVSYWEPTFSQCLKKKRVEGKHYYVAISHVVKKLVRLIFHLEKTNERYSTVV

SEQ ID NO: 358984 - protein, 414 aa, unidentified
MAGEINKSCGLDIHKRFLIATILSRSGEKQQQRFDRDEDGILSLRNWVTLEKCDVVACESTSDFWVPIHDSLIKHLPFIVGNARDMKAFTHKKTDKIDSEVIAKLALNGMVQPSRVFPKNHRTFRSCIRLRHNLVQKRTDIKNEAHAILAPEMFNLKNVLTDIFGKSGRAILSGICSGKSVDQIIASLSPNVRKKSDQIRETLDREISQGAAFRLQICLDIIKHLDNEIKILEKEIFNYAYKNHKQEMEILMSVPGIGELGAATLIAEIGDFKDFSSGDKLASWLGIVPNVYQSADKYHNGRITKRGSKEARWILTQIAQAAARTKNSRLKEFFNRKKKSIGHSKAIIALARKIATIIWHLITKEEMYEDETRYKKGEIQKRKIVETEMFSVDERIKIMSEIYVIARNDEKEST

SEQ ID NO: 358985 - protein, 423 aa, unidentified
MSYRIAGIDVHKKMLAVVVSDVEVDGEYQFERVRFSSSPEHLRFLADWLMAQQVEEVVMESTAQYWKPVWGALERYWKPICQKREGAGPMSGTLHLAQAQSNRGRRGRKKDFPDAERLVKRLVADELVLSFVPDTEQRLWRAVTRRKYQLTRNHVRLQNQLEGLLEECHIKLSSLVSDLLGASARRMLKALAEGETSPVALAAMADKNLRATQAQLCDALGACTELKPIYRRLLKMFLEELQFIDQQISELDQELASLLSRHHDAVVHLAEIPGLGVDSAQQIIAEVGAGAATFPSAKQLSSWVGACPGEEESAEVSKSHRSPKGNRHMRRILNQAANAAAKSKGTIFEIVYRRLVSRLGHNQTIGAIAHRLCRLIWIILHRGVRYEERGPSVNAKTRRHRTNRMIRELRNLGYRVEPLVNTV

SEQ ID NO: 358986 - protein, 405 aa, unidentified
MTEIEHHDDIEVFIGIDVGKIGHHAVALSRSGKRLLDRSLPNDEAKLRALIDGLKEHGRILLVVDQPASIGALPVAVARDEGVFVAYLPGLAMRRIADLHAGEAKTDARDAYIIAEAARSLPHALRSLRVADTDIAELTMLCGFDDDLAEQITQVSNRMRGLLTQIHPALERVLGPRLDHPAVLDLLERYPSPAKLASLSEKQLANRLVKLAPRMGRSLACEIVQALSEQTVVVPGANAAAIVLPRLAQQLASLRRQRDDVAKEIERLVVAHPLYPVLTSLPGVGVRTAARLLTDVASRAFASAAHLAAYAGLAPVTRRSGTSVRGEHPSRRGNKQLKRAMFLSAFASLRDPASRAYYTRKISEGKRHNQALIALARRRCDVLFAMLRDGTLYCPPSPESCLTNT

SEQ ID NO: 358987 - protein, 343 aa, unidentified
MTKPPIAVLGIDLGKNSCSLAGMDASGAVIMRKRMTRDAIVTFAASLPACIIAMEACCGAHFLGRTLAGYGHTLRLMSPEYVQPYVKAQKTDDRDAEAIAEAATRPTMRFVSLKSEDQLDLQILHRVRERLVHARTALINQLRAVLLERGIILPKGRVHLMRRLGELMAGDPAISTRASKLLEDLRDEWSALDRRIKAYDDELMALTREDTQARRLATIPGIGVINATALLAAVGDGSAFAKGRDLAAWLGLTPRQHSTCGKTKLLGISKRGNGYLRKQLIHGARAAMPHLAAKPNQLGTWLQNMLTRAHPNVVVVALAAKLARIAWAVLRKEENFDQRALTA

SEQ ID NO: 358988 - protein, 356 aa, unidentified
MQTQFTKKIDFTGKQLFIGLDVHKKSWSVTILVDGTEHRTFTQPPDPESLNSYLQRMFPGGEYNSAYEAGFCGYAIHRRLNELGIHNIVINAADIPTSQKDKLQKRDPVDSRKIARSLEKGSIHGIHIFNRELEELRSLNRTRFYLMRDLRRSKTRIKSFLQYYGEPIPVEFDNNQWTLRFVSWLKQVKMQTQSGQNAFSNLISSYEYHRSQLLTLSRQIRERIREYDRELYTLLKSVSGIGPLTASALITELGDINRFANIDQLGSYVGLIPRIRESGETTHTGGITFRCNSFLRTLLIESSWQAIRMDPAMMQYYHSHLINNKGHKVVIKVARKLLNRIRYVMKNRKPYLTGVA

SEQ ID NO: 358989 - protein, 397 aa, unidentified
MFYLGIDIAKHKHYASIIDQTGKPITKPFPFQNHKEGGQTLLNQIYQYIDSPTKILIGMEATGHYWLAVYSFLLDHGFSVIVLNPIQTNAWRKGTEIRKRKTDAIDATMIADIIRFGLFVETPLVDERMFALKQMSRFRNALVSNMSDLKRKALVVLDQTFPEYQSIFSDVFGKTSSQILLEYASPSDYEQISSDDLTQIIEQTSRNRLGKKTANKLMELASNSFGVTFCKNAFSFQLKMLMEQIRFIEDQIKECEDEMSQLLIDLDTPIMTVPGVGPILGATILSEIGDIHRFDKPSKLVAYAGIDATVSQSGQFESSGMSISKRGSSHLRRALFQTAITAHKHDPVLKAFYEKKRKQGKHYYVCIGAVARKLCYIIYAILKNNKPYEIPQYSKEV

SEQ ID NO: 358990 - protein, 337 aa, unidentified
MKYSGIDLHSNNSVVTVTDEEDRVIAEKRLPNDLTRIVGFLLPWRDELKAVVVESTYNWYWLVDGLQEAGFVVKLANTGAIKKYDGLKHSGDEADARQLAHLLRLGILPTGTILPPEHRAVRDLARKRMQLVRSRTSHILAVENIVARQQGAKIGGRQIKQLTADAVDQMGLPADVALAIKSNLAVIITLNAQIDVLEKRLQEKVGERKEFILLSSVPGIGRILATIILLETGPIDRFAEVGNFASYARCVDSRHMSNNKKKGEGNTRNGNKYLAWAFVEAANFAQRFNAEAKRFYERKKAKTNTAVATKALAHKLARACYHMLKEQKPFDVTRCFA

SEQ ID NO: 358991 - protein, 412 aa, unidentified
MELLHRRCCGLDVHKETVVACLRLVSDGKVTTEVRTFQTTTADLLRLSEWLAANECTHVAMEATGVYWKPVWHILDDGQFKLVLANAAHVKNVPGRKTDVNDAMWLAELLAHGLIRASFVPDTQTQEMRNLLRTRKQLVREQSSHVLRVQKTLEDANIKLDSVLTDLMGKSGRAMIEALIAGETNPVKLAGLADRRVKASPEELREALRGRVTKHHRFLLRLHLNQIDALNAAMATVDAQVEANLGPFRTAVDLIMSIPGIKNLGAQAIASEIGIDMSRFPSDAYLISWAGICPRNDEGAGKRRSNRLRKGAPWLKTTLVQCAWAAVKKKDSYLQAQFYRIKARRGPNKAIMAVAASILTAIYHMLKNGTMYQDLGRDHFNRRSKDQQKHSLLKRLADLGYTAEIKPVVATA

SEQ ID NO: 358992 - protein, 344 aa, unidentified
MEEITTIGLDIAKSVFQVHAISATGTAVVRRPLKRRYIAQFFAGLKPCLIGMEACATAHHWGRELTKLGHEVRLMPPRYVKPYVKRNKNDAADAEAICEAVMRPHMRFVPIKTVDQQSILMLHRTRMLFIRQRTMTINAVRAHLAEFGIVAGVGRNGLQALLDLIRKGEKTEIPAEAYLCLSALADQVDLLKQRILDMDRRILKWHRANDLSRKLEAIPGVGPLVATALAASIPDPTVFRSGRDLSAWIGLVPKQNSSGGKEKLGGISKAGNRYLRQLLVVGALAVIKRAKLLGHSRHPWLVNLMERRSSKVVAVALANKMARVAWAMMSRNEPYRITPVLAGA

SEQ ID NO: 358993 - protein, 353 aa, unidentified
MKKLFIGIDFSKKKFDATVILAAGLHELEDRKWETFTNDPKGFKRFVKWVKQNAWKTVQEEWLFCGEDTGACSLPLSRWLYGRGYDMWVANAYAIKHSSGIQRVKSDKADSAVIAEYAWRHQDKAQLFEPMDENLQELREIFLYRHKLVEQRVRLQVRSIEKEAVRGKSKALSFVERKTKHLIAELNKAIKQCDDKMKEIIAADEALRENYDIITSMRGVALQNAACLMIYTNNFKKFNYDSRKIACYYGVAPFGKQSGTSINTAPTTSHFANKLIKSLLGQAAHVAKEFEPEIRTYYDRMIQKGKKRQVAINNVKNKILHILVAMVRKKEKYNPCPSKKSADVKNYAMCVNF

SEQ ID NO: 358994 - protein, 319 aa, unidentified
MNTIHVANTRTTERNVGIDVGKDVLDIAILELDTHWQIANDDTAIQELVKQLGRYKLTRVVVEATGGYERRVAEACAARELPLLIVQPMKVRQFAKAEGLMAKTDKIDAQLIARFGKALELKPRPLPDEKVRKVRDLLARKRQLNEQRTRELNRLHKAQKFLHASHRRSIKLVEKEIAWVEKHIAAIVATVDEWQDTYEIITSVPGIGDGVAYTLLGELPELGHLTHKQISALTGLAPFNRDSGTMRGRRRIRGGRAPIRTMLYMAMLCGIQHNPVMKQFYNKLVAQGKHRKVALTACMRKMMTILNAMVRDQKEWQMT

SEQ ID NO: 358995 - protein, 356 aa, unidentified
MSRDVKYIGMDVHKEATVIAVRNGNGDLVMGSIVETKASSLLQFIHGLRGELHVTWEEGTWAAWLYDLLKPHVLQVLVCDPRRNALLKEGNKNDKVDARKLSDLLRTGMLRPVYHGENGLRTLRELGRSYQTISQDLHRVMNRIKALYRGWGIACSGTRVYAPRYREEWLQKIKQAGVHRRAELLYQQLDGLQELRRMVRPELLAESRRHKASKLLRQIPCIGPIRAARLLGLMQTPHRFRSKRQLWTYSGLGVETRDSAQYRFVDGQLCRAKKPQQIRGLNQNHNHEMKDIFKGAATRASCGIGPFREFYVGLLDKGMEPEMARLTLARKIAAIALTIWKKEERFDAEQLKSQAA

SEQ ID NO: 358996 - protein, 425 aa, unidentified
MNLLVLKGVPMALKIVYKICCGIDVHKNFVVACIAKTDKQGVTTYERHHFSTYTKGLKQLLKWLLDRNCKDVCMESTGKYWIPVYNVLEHDCSIVLAHPKYVKAIRGKKTDKKDAKWIADLFKHDLVAGSFMPPADIRQLRDLMRYRFKLTCFKSSEKNRYQNCLTVSNIQLGNVVSDTFGKSSQKIIAKILENPDDTSFDIGSLIHGSMKDKLPELELAIDGYITPEQAAKLKIIKEHFDNLEARKAELEELILALANPYQQEISIILTAPGFKNTFTAIGIISEIGTNMEAFPSAKHLCSWAGLTPTNNESAGKKKSVRVSKAGCYIKPLLVQCANAAIKSKKHPEIRDRYLRIKKRRGHKKAIIAIARMLLTALYHMLKNGENYNSDLYQKSDILPTTREITVEQAILMAQFQGFRIKSATE

SEQ ID NO: 358997 - protein, 580 aa, unidentified
MLRILLRPQAQRQRPRPSHPSPSGFWGRLQVALAPTCSMVSSHVRTTLSLKGPISDTVSKVIHPPARRALRTSPQPVVNNFAAPEIKPSEKVLRLRHSGHGRIALGGTRSSVSHPKRIQLSSPACPAASVSTSERTTAREASGIRSTHDGATMHNRKANRMKNWKDLTHYAGFDWAKDHHAVVVVNGEGCIMADFEFAHSLEGWKSFVEKTSAWPNLAVAIETSQGAAVDQLLQRDYTVFPVHPIAAQSYRERKAPSGTKTDHLDAWSLSDALRMDGQGWKVLQPMDPMTQQLRLLCRDEVSLIEQRTALVNQLQQALAEYYPAALEAFEDWTDAFTWEFVLAFPTPQLLVDAGKRRWEKFLHTHKLWRPETTEKRLKLFAQADQFKASEPIVRAKSQLAVSLCKLLCTLAQQLKLYRKQIEALFRDHPDHDLFGSLPGAKKMLAPRLLGAVGSDPDRYGSHEVLQCIAGTAPVSYESGKISKVRLRWSCDKFMRHTVHLWADCFRKASGWGQAYYQKKRGQGMSHACALRCLGQRLLKILFRMMNTKTPYNAELHALNQQKHGSWVLKLIDNPAVKSSE

SEQ ID NO: 358998 - protein, 389 aa, unidentified
MLLDHPSDGPTAIRTHIGAIFVSLELSRSTWLVTSLSPGKGEKMSKHSVAAGDMAELLTLFAELRRKAEVRTGQSYPIITIQEAGLDGFWLHRVLQQNGIESHVVDPASIATPRRRRRAKTDRLDGEMLLRALLAYKRGEPRVCAMVVAPSPEEEDRRRICRERRTLIEERITHVNRIKGLLFAQGISDYGSLRRDRRARLEALRTGDGRELPSHLKAQISRELDRIELLLKQIKSVEAAQEALLAAARKPASEKAVPDPVTTLLALKGMGANFAAVLWSEAFYRSFSNRRQVAAYAGLAATPWQSGGIRHEQGVSKAGNPRLRTTMIQFAWLWIRHQPQSTLTRWFKERSQQGRKRAIVALARKLLVALWKYVTQGVVIEGAVMKPAA

SEQ ID NO: 358999 - protein, 362 aa, unidentified
MSQISKQAQRMETAKDKPELTVGLDMGDRFSRYCVLDGEIEVIEEGRVQNTAAAFRRHFPAEPRLRIALECGTHSPWVSRLLEQLGHQVIVANPRKIPAITGSESKNDRNDAEKLARFAAFDPRMLSPVRHRSLQRQQDLHLIQARSTLVKARTMIVNALRGLAKSAGGRLPACSTESFPARAQAAIAPALAAVAGPLIQQIALLNAQIGGMDQQIEKLAQKYPEIGVLRSAPGVGPLVAAAYALTLDRPDAVPGNRSAGAFLGLRPAQSQSGESDPQRRISRTGNTYLRSLLVQSAQYILGRFGPDSALRRWGLKMAGGGGKRGKKRAIVAVARKLAVMLHSMWRSGQRFEPFPQPAKAQA

SEQ ID NO: 359000 - protein, 362 aa, unidentified
MAVVAQSYDFVVGIDTHSRTHTLAIISTLTGAEIANDTFPSTNTGMNRALRWISRRSTGDNSRVLLSMEGTGSYGAKFRQLATESDYRVIEAPFPERRVGRKRGKSDSIDAARAARAVLGIETDELREPRAGQHHMALRVLTVARTSMVRERTAAINSLIALLRVVDLGIDLRKSLNPKTIGTVAAWRTRDEGVGTRVSRSEATRLAKQILALEDQLEQNRADMALLVEQTNQALLDMPGVGPISAAAIPTAWSHPGRVRSEAALAALAGTCPIPASSGGKTRYRLNRGGDRQLNKAIHTIAIVRMRSHQDTREYVIRRTREGRNKKEIIRSLKRYITRQIFRTLSGAHEIPGGHGIPSPAY

SEQ ID NO: 359001 - protein, 343 aa, unidentified
MSYYVGLDVSVKLTAICVIDDAGKVVMERVVASDPGDIGRCIEEIDGEVGRVGLEAGPLAPWLFGGLAERGLPAVCIEVRQMKAFAKASPIKTDRRDARLIAQAMRTGLFKIAHVKTDYSQRIRLLLRHRQAMVRRNKDLINTVRGTLKAFGIRTGGGKNTLFAKRVREAIDDKIILAMTEPLLAAYEDGLQALAKLDAMVLAIAKEDAICRRLMTVPGVGPVVALTFRTGVDVAHRFDKSRLVAAVFGLTPRVHASGEVEQVGRITKCGDAMVRALLYEAANVMVTRCRADNWLKSWALKVARRHGVRKAKVALARRLAVIMHRMWVDGTDFSMERPTPMTV

SEQ ID NO: 359002 - protein, 319 aa, unidentified
MPQSVVGVDIAKLKFDAARLCEGKYRHKKFDNNPAGFADFIAWLATFGDTQPWVCMEATGAYSIPLAEFLVGRGYRVSVVNPAKIHAFAKSELSRAKTDKADAKLIARYCLSMKPEQWTPPPPSIRELQALLRRVEHLLEMQQMERNRLDTADPTIVDSLQTVLGTLEKELNATRKRIKNYIDNDPDLKQRRDLLESIPGIGPAASAHLLTLFSAHYGFTNAKQAVAYAGLAPKIQESGKWVGKTRIAKTGDPALRKALYMPALTAWQHNPHIREFCKRLNANGKNGKAIVCASMRKLIHIAYGVLKSGKPFDPNLALA

SEQ ID NO: 359003 - protein, 337 aa, unidentified
MAQEYVGIDLHRRRSVIYRMDQAGDKIDSVRVDNEPSNFAKAVSAAPVGSDVIVEATYGWYWAADLLEEMGYRVHLANPHGNDWGHRRVKNDERDARDLADLLRLGRLAEAWIAPPKTRELREMVRFRMKLCNLRIGLKAQVHAVMAKNGILPSRGDMWGPSGSAQLDSLELPDAYFNRIAVLRDLVETYEREIGFLDRDIHRLLCDDAGYNAVQAIYGVGPVFAAIFVAEIGDVTRFGSAKALCSWAGLTPIHRESDTHVHRGKITKQGSRLVRWAAIEAVARYHGGAPFRERFEAIAERRGKSKANVAIARRVLTLVYYGLRDGDIRCLADQEAA

SEQ ID NO: 359004 - protein, 462 aa, unidentified
MPERNDRESGESNRRQLQGLPVIRRNVAGVDLGSERHWVCAPTQDGNGREIASFRATTRELLRLAEWLKARQVESVAMESTGVYWIAPHEVLEAQGLQVFLVDTRQLARVPGRDKKTDPSDCEWIQRLHSCGLLRGSFRPEEAVCMLRTLVRDKANLVAESGDWLRRMQKSLDQMNVRVHRAVSDIDGVTGMAILRAIAAGERDAQKLAQLRDRRCNKTQQEIAEQLTGHWREDHLFSLQQALKMYDAVQERIAAYEQEILRQLEEMEEPGQRGQSAPPLNNANKAKAIKRRGQEAKRQGLYRMSGVDITQIDAIGVETVEVVLSEYGPDLSRFPTEKEFVAHVTLAPRVPSSGGKPLKKKKRNSASTRVAAALRMAALSLRHSQTALGAYYRKLAQRLGGDVAVFATARKLATLIYRLLRWGQPYMDEGIEAYEKRYRQQRVKSLTAKAKDLGYELTAVNA

SEQ ID NO: 359005 - protein, 411 aa, unidentified
MEGLSPLHRRVAGIDVHRMRHVVTVLIEGDDGTLSKHQREFGGFKRDMKAMAAWLQELGVELVVMESTGIYWKSAHAHIERVGIPALVVNAHFIKYVLGRKTDMGDSEWLAVLARFGLVRGSFIPPKDLRELRLLSRYRRKVSQMLASETNRMHKVLEDGGIKLGAVVSDIRGVSAREMVAGLIEGKPLGEMLAMARGSLKNKRDDLAASLDGDLSPRHLFVLCQLHEHVTALERQLAQIDAELFQAMTPYHWAWVLLQTIPGMDAIASAMILIEIGDDMSRFGDADRLASWAALCPGNHESAGKRKSGKTRKGNAIVRYLLCECANAARMTKSSLASKYRNLKVRKSYNKCIVAIAHKMIRLIYFMLSRREPYRDPGVNYEAMSARKNAPRWIKALKNIGKLPEATAASA

SEQ ID NO: 359006 - protein, 428 aa, unidentified
MTRISSTTSSTMWVAIDIAKVHNQVLVEFPDGRRRHFRMANTLEDFTKLATFLAGSGCTCRIAFEATGDYHRPLAHFLRAQGFTLCLVSSIAVARTRDALYNSWDKNDPKDAQVILHLLKAGTTQVYYDPLENHYNDLQELANTYQQISLGKVRLYPSIVTHYLPLYFPEAERYLHTPRAEWWTQLLLLVPCPAAVLKYSLEEFLQAARRLPGQKIDKTRWLTDFYQTAQSSIALPVPEDSQAIRMFRVVLNEYLHLCQLRQELEEQAVARLSGHADFKRLQTIPGIGPILALLILAEAGDLRRFSHYQKFLKYCGLNLSTEQSGQFRGTTRLSKRGNARLRYAFWMAATIAVRARQNSFCQKFQDYIRRDPLNPNLRRKAYTAVAAKMARVVYAVIKTGTDYRRFPEATMPGGRIPSLRAVEATSTS

SEQ ID NO: 359007 - protein, 360 aa, unidentified
MIKNITFFIGLDLGDKFSHTAIIDQEGMLIEEARIPTTKAAFMRKFSTIPCSRLAMEVGTHSRWASQLLKELKHDVLVANARKLRAIYQNTRKSDEADAETLARLARLDPKLLYPIHHRSLQAQADLSLIRSRDALVRSRTLLINHVRGTTKSTGSRLPSCTAGSFGSKVVDSIPEQFQPALFPILDTIHALTQQIRDHDRQINELCQKQYPETIPLQQVSGVGSLTSLAFVLTLEDPGRFIKSRDVGPAIGLVPRRDQSGDKDPQLRITKTGNSYLRCLLVNSAQYILGPFGPDCDLRQWGLKLAERGGKNSKKRAVIAVARKLAILLHCLWKTGENYDPFYYSKKQKPVVSYSLSAVL

SEQ ID NO: 359008 - protein, 341 aa, unidentified
MSEVRTIGLDLAKQVFQVHGADASGSAVFRKQLRRGQVLKFFSGLPRCLVAMEACGSSHFWAREIGRLGHEVRMIPPAYVKPFLKRQKNDAADAEAICEAAQRPTMRFVSVKSEETQGAVVALRSRDLLIRQRTQTINALRGHLAEFGKVVPQGSTNASKLIAMVEDPQTALPEAARTSLRFLTAILSQLTDQIRALDAQIVRQAREDETSRRLMTIPGVGPLIAAALVALAPSPETFKRGRDFAAWLGLVPRQHSTGGKQRLGSTTKMGERSLRRLLIMGANSVVVWRARKGAAPGTWLAKMLARKPPMLVRVALANKMARIVWAIMARGKIYRAPVAVA

SEQ ID NO: 359009 - protein, 414 aa, unidentified
MPYKIAGIDVHKKVLMVVVIDASTPEGKPERRRFATMPSDLRRLLTWLREQGVEEAVMESTAQYWRSVWLELEPYMRLQLAQAFSNRAPRGRKHDFKDAERLVRRLIAEELILSFVRDGEQRTWRNLTRMKLQLTRDQVRLQSQMECLLEEMRIKLSVVVSDLLGASGLRILRALAQGETDPKKLALLGDDRLKCTEEQLIDALTGRPQPMHREMLALQLERLQLMDEQIAKLNGLIAQAMKPHQDAVIRLAEVPGLGVDSAQQVIAEVGVKASTFPCAAEFTSWVGTCPGKDESAEENHSSRSAKGNKYLRRVLNQAAHAAVKKNGSHFQTVFRRLLPRLGYQSAIWAIAHRLCRVVWKILHEGVRFIEQGTEPDPKAKKQRARMLARALRKLGYDVAITPMNPATAENGMQI

SEQ ID NO: 359010 - protein, 351 aa, unidentified
MAETQKRAVAVVGIDIGKNSFHIVGLDERGAIVLRQKWSRGQVAVRLANMPPCLIGMEACVGAHHLSRRLRALGHDARLMPAKYVRPYSKGQKNDFRDAEAIAEAVQRPTMRFVATKSVDQLDLQALHRVRARLVSQRTGIVNQIRAFLLERGIAVRQGPRFLRLELPRLLAEPCEILSPRLVRIIEGLASDWRCLDERIDGLSCEIEAMARQDAGCERLMSVPGIGPIIASATVAAIGTGDTFAKGRDFAAWLGLVPRQISTGDRTILGSISKRGNRYLRVLFVQAAWVVLIKPKSWERYGLQGWLEAARKRLHHNVLAIALANKLARIAWSVLARGRGFEVSRLTQAIA

SEQ ID NO: 359011 - protein, 347 aa, unidentified
MQVTTIGLDIAKNVFQVHAIDTAEKVVVRKQLRRSQVVEFFKALPACLVGMEACATAHYWARELTKLGHLVRLMPAKDVKAYVKRNKNDAADAEAICEAVRRPTMRFVQVKSAEQQGRLMLHRTRDLLMRQRTQLINALRAHLAELGIVAAQGNAGLKELLKIIAGERDARLPVDAHASLVVLAAGLHAVQTMIGSIDKRIMIEHRSNEASKRLRSIPGIGIVGASAIVATVADPMAFRSGRDFAAWIGLVPRQDSTGGKQKLGPISKQGDRYVRRILVVGAHAVLRYAKQNPEKYPWLTQLLARRPFKVVAVALANKMARVAWALLAKGGTYYRARALVTVVTAAA

SEQ ID NO: 359012 - protein, 394 aa, unidentified
MFFIGIDVAKRSHQAAVTDISGNVIVKPFNFKNSSDGFTKFLSIVESNAIEKNDCTIGLESTGHYWYPLYFFLIENGFDVKVFNPIQTAAFREITIRKVKNDNLDSLLIADFTRFGRYSETYIPDENMLALKNLTRFRLSISDICGSLKKKVIAILDQVFPEYTGVFSDVFGKTSKQLLEQFSTPDEFMDISTTKLTNLLLKVSRGRNGREKAELIKTAAQSSIGISYALDAFSFELKQLLAQIEFMENQLSDVDAEMEKLLSQSEYAVITTISGIGPMLGSVIVSEIGDINRFENSSKLVAYAGLDASVKQSGEFNSSKNKISKRGSPYLRRALWMAAFMSLQCDPALYDYYSKLRARGKTHRCATTAVARKLCIIVWAIMKSKKPYSPVLKN

SEQ ID NO: 359013 - protein, 347 aa, unidentified
MDLLKQVSGIDVSQKELVVTLAELKADLTKEFKGYKVFYNTEKGMNLLLKWVNQNTQGNLPVHYVMEATGVYHERFAYFLESKGKHISIVLPNKISNYMRSLDTKTITDKTSSQAIALFGLDRKLDKWTKPAEVFKRLKQLTRERDQLVAERVMVKNQLHAEQTEALSNASSIKRLNTRIKFLSKQESEIKQDINSLIKDNPKVKEIIDRITTITGIGDLTAIIVLAETNGFELIRNKKQLVSYAGLDVREKESGTSVKAKPRISKKGNRSIRKAMHLPSLSAVKHDNHFKEIYVRLVSKHGIKKKALVAIQRKLLELIYIIYKNETVYQMDFETKKREQPLNVASL

SEQ ID NO: 359014 - protein, 391 aa, unidentified
MIYVGIDVAKDKHDCFITNSNGEVLFKAFTISNNQDGFNVLYQRIESVMEDVTKVKVGLEATGHYNYNLLGYLIDKSLPTYVINPLHTTLYRKSLSLRLTKTDKVDARTIAYMLMSDVNLKSYSDTSYHNEELKSLTRYRFNKVKERAKLKTSVSRLVCILFPELEKLVPTLHMASVYALLSEFPGAKQVAGAHLTRLTNLLSDASKGRYGKDTAITFREAARASIGSNMPAKSLELKHTIKLILELGSEIEEIENEIKIIIDEINSPILSIPGINYRMGAMIIAEIGDFSRFDSPDKILAYAGFSPSTYQSGQFDSAYSHMEKRGSKYLRYALYNAAKYVCHWDATFAEYLAKKRAEGKHYNVAISHAVKKLVRVIYHLVKSNQQYMKVA

SEQ ID NO: 359015 - protein, 425 aa, unidentified
MNYKQNEKINQVKESTLVVGIDIGSTTQYARAFDWRGIELGKVFPFSNSREGFESFKAWMQHLQDKYKKLDAIVGIEPTGHYWFDLGAYLEDEGILLVMVNPYAVKQTKELDDNSQSKNDRKDPKVIAKLVTEGRYSAPYTPDGVYADLRIMVANRKRLIREMTQIKNRFARWFAIYFPEYTDVFGDYEAQSSMLLLKKVCTPEAIVELGAEKINQIWRDAKLRAVGMKRATTLCETAKRSIGLKKGSSAARYEMKLLLEDYEYKKAQMDAVMEEIEKLCRKIPESEQMLAIKGIGVITVAGFLAEVGDVRRFESPRQIQKLAGLSLRENSSGKHKGQTTISKRGRSKLRAVLFNAAIPLIAKNPEFKSLHEYYTTRANNPLKKKQSVIAISCKLIRVFYAILAKGVTYDAQKLISDIHRQPQVA

SEQ ID NO: 359016 - protein, 345 aa, unidentified
MKIVGCDLHTRYQQVAMLDAETGELVERRLEHESGEAGAFYAALSSPVRVGIEATGHTRWFERMLAELGHELWIGDAAQIRASMVRKQKTDARDAAHLLELLLSERFPRIWRPTLAERDLRQLVWHRQKLVWMRNAVGNQLHALAMGEGVCRKKKLFTKKGRVELESLPLGPWAGHRRQELLTMMDQLDASLQTLEQAVAEQAEQNQAAVLLMTHPGVGPVTSLAFVLTIGPVERFERSKQVVSYLGLNPREHSSGGRQRLGAISKQGNPMMRSLLVEAGHTAARLDPELRQDYQRLKLRRGSGVAKVAMARKLAVRMYWMLRTPANYAQLVRMQGSPRGTLVGQ

SEQ ID NO: 359017 - protein, 315 aa, unidentified
MQDMPCFIGIDVAKAQLDIALRPSGERWAVPNDASGVMTLVVRVKDLKPTLIVLEATGGLERAVTSALATEGLPVVVVNPRQVRDFARATGQLAKTDALDARALAHFADVIRPTPRPLPDAQTQELRALLGRRQQLIVMRTAEQNRLAGTSTRLAKDIAAHIAWLNADITTLDNDLETLLRASPLWRENDDLLQSAKGIGPVSAHTLLLELPELGTLTRQQIAALVGVAPLNCDSGTMRGKRMIWGGRAHVRTVLYMATLVATRYNPQIKAFYARLLAAGKVKKVALTACMHKFLTILNAMLKHRTPWQPQEVQG

SEQ ID NO: 359018 - protein, 519 aa, unidentified
MDGSRDRRGSAGTEGWSVLAPYTPPKSFRTRKQKGGEREEDKATRSGQGLADQRTAKRRALGGSREECPGWQENGAEGSRESCPSEGRYKANLPFPLLGRESGTPPEGGRVRYYLGVDWADQTHAVWVVDEGGTKVAMRTVPHTAEGLTEWGRELDEWRAQRIELWAAIERPEGRVVDFLLDHGVRVYAVNPKALDRARDRFRQSAAKSDPFDARVLADFLRTDHAHLRAVQPSSEAAQELKLLTDDYQRQIRQQTRLVNQLTTTLKAYYPRSLEVAELTTTLAREFLQAYPTPATLTALTERQWQRWARTHRLSEARMRELWAVLQRPQLPVPAHVVRAKARLMQSLVAQLTVVLEVVGAYREAIEDFFAQLPAAQWIRTLPIGDHGITAPTLWARLGDAPGRWASFRHLQAQAGTVPVTIRSGKQQVVRFRFACDKSLRYIIDHVAFLSLRWSEWARAYYAEQRARGHSYRQALRALSAKWLKIIFVMWERQVPYDEQYHLATMTRQQLRRRQEQIA

SEQ ID NO: 359019 - protein, 316 aa, unidentified
MESPQNFVGIDVSAKRLDVAVLPAGTHFAVAHTDEGIASLVRRLQELRPHIVVLEATGGYELSVAYAMSEASLPVVIMNPKVIRHFAKSTGKLAKTDKLDAQVLAHYAQAIQPPVRPLKDSEQMELATLMSRRRQLRDMIVMEGNRRRTSTPKVRGNIDQHLLYLRQLLEDLDREIHDAIRRTPLWHEKSEILQSFNGVGPKVSASLIADLAELGTAPRTQISALAGLAPMNRDSGQWRGKRTIQGGRPAVRQALYMAALVASRRNPVIREFYQRLRQAGKPAKVALTACMRKILVILNAMLKNRTYWNPQLPLAA

SEQ ID NO: 359020 - protein, 345 aa, unidentified
MENYTVLAIDLAKLVFQIVKTTGFGKLVYNKKVSREKLKELLRKEPKALVVMEACGGSHYWCRYAQSLGHEVKALPARRVKAFRQGQKTDANDALAIATAARQPNMKPARILTTEEQGLQGIEKMRQLLVAHKTAMSNQLRGLLNEFGVVIAKSDSALRSAIPEVLEDGENDVPMSFRESIAQMWGLLQTLEAELAQLTRQQTALTMQDEQSRSLIELEGVGPIGALGLKLAIGNGSHFKNGRDAAACLGLTPVQHSSGGKQKIGSISQMSGHKRLRSVLIQGAISVLNYLDKREARTTKEIWLKALMQRRGKRIAAVALANKTIRTAWAMLSRGESYNASLQTA

SEQ ID NO: 359021 - protein, 339 aa, unidentified
MTRTYAGLDVSDKTTHVCVVDEAGKIVWRGTCATDPEALAATLKRRCPDVVRVVLETGPLSAFLYHGVIERGLPAICVCARHAKGVLSTRANKSDPHDAEGLAQLARTGWFKAVRIKQEGTHMARAQLKIHAQLHASRRVLANQLRGLLKLFGLRLGKVTTPGKLRERLEVLFAQKPELKPILQPLIDGIEALDPLIRQSKRRLAAFAAADPVAARLMSVPGVGPIVALTYKCGIEDPTRFARGEDAGAYAGLVPRRNQSGERDYKGRITKAGDGLLRSALYEAANNLLSRVKRPCPLQTWGKKLAEAKGAKRARVAVARKLAVLLHKLWLTETEFRWA

SEQ ID NO: 359022 - protein, 404 aa, unidentified
MWYAGIDWADTHHDALVIDEKGRQVGSLRVDHSPQGMSKLNAFLEQIIGTAPKEQMACIIETTHGLLIAHLLEVGWPVYPVNPRTVDRRRSASGAKTDTIDAYLLAKTGRADFADLHRLTPDSEKVAELKLLTRDQDALIQTQTRLVNQLTACLKAYYPVALELFTKVQQHTTLVFLQTYPTPQAAESASTDQITQVLKKAGHPNPLGVAPKIVERLQQPHLQADAVITRTKSRLMLALVGQLLPLLAQIAQYDKEIATLFLTHEDHEIFESLPRAGQRLAPRLLAEIGDDRKRYQDASSLQALGGTSPVLYQSGIYSKAHRRLGCIKPLRNALHQFAWQTTQSEPWARDYYHRKRAEGKSHTVAIRALANVWVRIIFAMWIKRTCYEAMTFEHAQQQHARPAA

SEQ ID NO: 359023 - protein, 409 aa, unidentified
MSNEFQWFLGIDWGSEKHRLCLMECGGKILEQKWVEHSGSALAELVDWLRRLTSGVPGQAAVAIEVPRGALVETLLEHGFAVFSINPKQLDRFRDRYSPAGAKDDERDALVLADSLRTDRHCFRAVRIDDPQIIRLRELSRLEDDLLAERNRLSNQLWEQLRRYFPALLKLSSSADEPWLWDLLHRAPTPERAAKLKPAQIARILDQHRIRRLNAQQVHEMLASAPLRLAAGAAEAATEHVVLLLPRLRLLHQQQADVARRQEKLLQELATPAGETGEHRDAAILLSLPGAGRKVTATMLGEASQAIAERDYHALRCLAGCAPVTLQSGKKKIVLMRYSCNERLRNALYHWAFASIAHDPAAKRFYAASRARGQTHARALRGFADRQLAVAITMLRHHTLYDPNRRAAA

SEQ ID NO: 359024 - protein, 319 aa, unidentified
MALPLTIVGIDVAKDWLDLWLDPLKRFERMRNDAAGWARLLDCLTRLGPQAGITVAFEASGGYERGLRQALITAGFSVRRLNPLRVRLYARSLGRNAKNDRIDARVIARYAAAAETMPEVLDPGRERLAELVSHRRSLIDERVAIGNRTAMLQEPHPIAHNRQRLALLERQIGEVDRLIADTVGDTPQLVAKLRLLTTLKGVKQGTAATLVALLPELGQLTRRAIAALPGLAPFDHDSGRRKGTRAIAGGRAAVRTALYMAARAAARSKSPLGHYYHRLIAAGKTPKVATVALMRKILVTLNAMLRDRQPWKHATAIAA

SEQ ID NO: 359025 - protein, 435 aa, unidentified
MSGRLKTGFDISLKYNDVCLETEGGDILVAHRRFTNNWPGFQRLLELLLTTLRQGDFDGIDIAGEATGLLWFHSFFHLAQSDDLALFDPRLYLFNARVTKHFRKVLAERDKCDPKDAHVVTECLRFGRLPHELTFDERYLPLQRLTRYRYHVAHTLAREKVYFATVALYLKASDYTRFKPFSDPLGATSRHVLTEYATIDELASLPLDDLAAELDLVGRGRFDDPADNARRLQQVAQTSYPLAPCLVEPVNLILASLLQHIRFLEDLLQSLNAPIEAALQNVPGAPYLRSVNGLGLVYTSGLLAEVQDPLRFFDGLKRDKQGILRPKTKHDAQAALAKFAGLWWPRGDSGDFQAEDRRLPHTGDCYLRYYLVEGGNSLRRHNAEYTTYYDRKYRESAKHKHWRATVLTARKLVRLVFTLLHEEKMYQPPEVRYRK

SEQ ID NO: 359026 - protein, 523 aa, unidentified
MVTKSRVRKSRGSRKRFIGKPTGQVQERVQAVGPEHFGVVAVDCAKRRSKWMLCNFYGKVIIEPTKVEHTAGGLRAMTQFVAKACKAEGLTDTIVAVEMTGIYHKPVYRAFRKAGFDTRIVHPFASNHYRQPLHPDEKTDDKDLEAIFHAAVNGYGLAKLPVSEVYQSLQAVSRHRQNLVKQRTRLMVQIRRLLHQTMPGFADLFDEDKLFHKSIALPVALEFVSADSIRRAGVNGIASHLNNTKVRFQRRTIEGIVAWANIAAEPSELATMHTRQWQQLNELRSLFTEHITTAEREMAGFLVKTPYILLFSVTGINVVSAARLAGEAGPIEHYASARGINGRAGLFPSRYQSDEVDHADGSLVRQCNRKLRGAAMLVAENLIKCHPYYRGLSALWKQQKVDPRDRRCRVANRAMRMVYQLVGGRQLWRGKGVDCEYVLAKLQKFHRVHKTPIDQSIRDMNEAFAWLPKSAYTAEAKPMAELARKKQRGPQPIGDLLVPLLLRLGVSIEEPVELNTSEARSSD

SEQ ID NO: 359027 - protein, 403 aa, unidentified
MNSVGIDISKGRSTVAVMRPFGEVVTSPFEVRHTDSELSELARRLKSLTGETRVVMEATGNYHAPVAKLLHDAGLYVSVVNAKLVHSYGNNDLRRVKTDRKDAVKLANYGLDRWLTLPRYVPEENTRLLLKNCYRQYRQYSKVQTVLKNNLISLLDTVFPNANRLFSSPIRGDGSEKWVDFVAEFWHCRCVSEKSERTFTNKYQRWCKKHGYNFREAKAHTIYAEASGHIGVMPKSETTKLLVEQAASQLRATSAALAALKHEMQSLASMLPEYPVVMDMFGVGPTLGPQLIAEIGDVRRFYSKKALVAYAGLDAPPNDSGDVTGRHKSMSKVGASSLRRTLFLVMSVYLQNAPLDEPVYQFMDKKRAEGKPYRVYMMASANKFLRIYYATVKAYLESLELTA

SEQ ID NO: 359028 - protein, 385 aa, unidentified
MPHTLIAHSTLDYHRTLVLAIELSNKSWVLAAQVPGLPHAKAKQTIEPTAEALMAAIDGYRSRANAAGCFVERVIATYEAGWSGFWLVRWLARRGVETHVIQPSSVPVDRRARRAKSDGIDAELLLRTLLAWLRGEPRVCSMVPIPSEADEDARRSIRERSELVAERVGLVNRIGAVLATLGASNYDPLRRDRRQRLDELRTALGDPLPVNAHAKIVRMLDRLELLLEQIAELNRLRDAVLNDDVPDKAGEMIQQLAALRGIGVQSATVLVREAFVRHFANGKALASYAGLAATPYSSGSSNREQGIGKAGNRRLRTVMVELAWLWQRYQPGSAHVRWYRERAGATGARMRKVMVVALARKLLVALWRFVTQGVVPEGAAMKPVS

SEQ ID NO: 359029 - protein, 389 aa, unidentified
MPQIPLNLDDMSRQQSALAVKLSALMNKTITGHSISQASLVNDVNRVLNLGLDVHYRQVTVAMQEDGGRIKAAGKMGYVDFLNWVGKKLAEGWEIHSCYEAGASGYWLHRELVKLGVKNLVVVPKAMGQGGKKQKTDKRDAGELCDCLDRYLRGQDKALSVVRVPTEDQEQKRALIRFHRQIMADRGRCEARGKGLLCAQGIQVHGRWWQGKAWLEVQSDPRLKDWIKEQLSGWRNKILSTDEEQGALRERIAALAPAILPKGVGAYSAAVLYYEMRGFERFSNRRQVGSMTGLCPGIHQSDGRGKEGSINRCGIGIVRWTLVEMVWRLKIWQPQYPPVRRLASGLVKGKRARKRLVVQAARRLAIDLWRLSTGQTTPEKLGLIMHCAK

SEQ ID NO: 359030 - protein, 318 aa, unidentified
MEQAVTAEAPMNVGIDVSKGSLDIAVEPTQQRWQVSNDEAGIKELVTRLQRMHPDRIVLEATGGFELPLLAALGCADLPAVAVNPRQVRDFAKAIGRLAKTDALDAQVLAHFAAVVKPALRPLPDAATRELSALLARRRQLVDMRTAESNRLGMAVERLRPDIREHLRWLDKRIKELDRELHNRLRASPLWREKENLLRSIPGVGAVLTTALLADVPELGSVRHKQLAALIGVAPFNCDSGKWRGRRRIWGGRASVRAVLYMATSVAVRHNPVLGALYQRLLAVGKPKHVALVACMRKLLNICNAVVRHRTPWRYQPA

SEQ ID NO: 359031 - protein, 410 aa, unidentified
MGLFCGIDWATEHHDVAVIDDDGHVVARGRVSNDAPGFAALLTLLAQAGDSAADPIPVGIETDRGLWVAALRETGRTIYPINPLAASRYRARYGVSGAKSDATDAVLLANIVRTDPGAHRPLPADTELAQAIRVLARAQQDAVWARQQIGNQIRDLLKDFYPAALTAFADLPEGGLARRDARTVLAAAPTPAQAAKLTPARLRRLLIKAGRKRYLDRDIARLREVFTDTYLHQPPVVENAMGIHLAALLGQFEAACTAADALAEAAVAHFEQHPDAEIITSFPGLWMLVGARVLAEIGDDRSRFADARGLKAFAGSAPITRASGKKTVVLHRYIKNRRLAAVGPIWALGSLRASPGARRHYDARRAAGDWHQQAQRHLFNKFLGQLHHCLHTGLRYDEHLAFPPPLQLAA

SEQ ID NO: 359032 - protein, 421 aa, unidentified
MKSTAARKLKQVPQGYLVMGVDPHKKKHAAVAITQDFTTLVKFKFDNSREGFEMMLQRAKAEMIKTGCRGVIFAIETGGHYWRNLAYFLDERGIPFRFINQFTLKRRREGKDLNRRKNDYRDSEVAAQLLCTGEFTDSKLPQGVYAELRAAHNAYRRLVKERTRITNLIKGLLDSLFPEFTNIFKDPCALTAMSVLSTCMIPRVFSSMTEEEFVATIRAGHQGRLMRRKLRALHHIARTSIGIEASAWSVSMEISFLVEKLNLIKRHIRIIDGTLVKLVDETEEGKYLLSIRGLNYIAVAGLLAELGSFKQYRSAKQLIKMAGSNPTESESAGKRGAHTPMSKQGRPVLRYCAWTSVIPMLRLNSDFRAWAKKMRERPVHANPLNGREVVGAGLNRLLRLSFALVKKQTFYRVPEPARTTW

SEQ ID NO: 359033 - protein, 346 aa, unidentified
MHTDPPSTPDASDTTATAWIGLDVSKDVLDACLLAATGKPQHKTFSNDAAGHQKLLRWVGHRAPDRVCHFALEATGAYGRAVATFLAGEGQRVSVLNPARVKYGGIATGQGNKTDKADALAIAQYCRLHAPPLWRRAAPEVEQLRALVRRLAEVQSQLAREKNRSSVPGVTPLVRQSLERAFAFLEDEIRQLQRQIREVIAGSASLKADKELLTSIPGVGEGTAQVLLAELPDVRQFGSAEQVAAWAGLCPRECRSGTSVRRRTRLSKAGNGHIRRALYLPAITAIRHNPPVRALYQRLRDAGKAAMAAVGAAMRKLLMLCYGVLKNRQKFAPDWKKSIEPIGLAA

SEQ ID NO: 359034 - protein, 354 aa, unidentified
MIIIGADYHPGFQQIAVVDTDTGELQERRLEHREDAEKFYRDLAAQGLKVRVGMEASGHARWFERLLAELQFELWIGDAAEIRTKRVRKQKTDREDAELILRLLLEDRFPQVWVPSWENRDLRQLLWHRHRMVQARTRMMNQLQAVALNEGLRCKKRLWRQAGREQLESFRLAPWASRRRHDLLELLDRLTPTIAELTQAIEQEAEKCPAAQRLQTHPGVGALTALAFVLIIGRADRFECGKQIASYLGLVPSEESSGQRRRLGHITKQGNSLLRFLLVEAAQVTVRSDQEWRNRYFHLVLRRGRKIAKVAMARRLAVRLYWMWRKRWDYEQLKKFGSHAGEPGNPYGVQSNTE

SEQ ID NO: 359035 - protein, 329 aa, unidentified
MKITRVGVDLAKNVFQVHGVDVSGQRVWKRQLKRSSWLQVLVETLDTDCEIGMEACGGAHHWARELKARGFEVRLIPPQFVKPYVKSQKNDANDAEAICEAMSRPTMRYVPVKTFEQQDIQAIHRVRSSLIGQRTATANQIRGLVAEYGLVAPKQLGPLRKAIPCWLEEAENGLTDRFRRLLHGLWDELLSVDQQIKLFDHEIEVIAKQHPVAKRLMQLRGVGPLIATALVARFGDGAHFQRGRQAAASVGLTPRHYGTGGKNRLLGITKQGDRYLRSILIHGARAAVSRADGKEDRLSRWVTELKERSHMNVAAVALANKTVRMAWSM

SEQ ID NO: 359036 - protein, 374 aa, unidentified
MGRSIGVDLHRDCFTTAILAENGRCYKREWRLSELGRFVKSLWLDDKVAVEMTTNVRLFHDAVLPHVERVDVVNTRQFKVITESVKKTDRNDAEPLARFLDKDMLPTVHLKDRRLAQIASLTRARDTLVKQRTTLKNKVNNLFAAGGVKLERERMSSNKALGDVEREAEEFFDVLESLEVKVFLRQIRGINESVSELEAAIKAEGAKLKGFSELTSIKGIGPVSATILLTTIGDVKRFENEGKLAAYLGIVPRVSDSNESVRRGRITKLGSKLARTALVQCGLIAKRYSPFLAEYHERMKRRKGGGKANIALARKLLGIVYRTLRNGWVFEDFPSFRLKDGTIPVWSREGARKYAASRRDLSLSAKTGKKKRAT

SEQ ID NO: 359037 - protein, 494 aa, unidentified
MKAKACKAKGKHSNSSKRGVKIAAQRGAEGMEIVNPHAGGIDCGAQEHYVAVPPQSVESGESFVRCFSAFTEGLDALVEWLKACGVTTVAIESTGVYWIALCQKLEAAGIEVFLVNARHVRHVPGRKTDVKDCQWLQRLHSFGLLSASFRPEDAICRLRSLQRHRLNLVSTAGAEIQHMQKALQQMNLHLHHVVSDITGVSGLRILDAILADQRDAGQLAKLRDHRVYKSTLAQMEAALVGDYRPEHLFVLGQSLQAYRFYQARTQECDAEIESHLQQLAQRFESASTLGAELSQPEVLNDAQSQNPQPAKRKVKRKPQANEPKIDLADYLRRICGVDLTQVIGLNVLSVLLIVSEIGVDMSKWRSAKAFCAWLGLCPRNKISGRKVLDTRTCKVISRVATTLRLAAQSVGRTNTALGIFYRRKKAHLGPAKATTATARKLACLVYHLLKYKEQYREPDPATYQLKVQKTILAKIQKQAAALGYKLLPTALVPA

SEQ ID NO: 359038 - protein, 328 aa, unidentified
MVAKMSDSILGIDVSKETLDAYCARGQRKQGRTFANSPDGWKLVRAWLKAMGSKQAHVCMEATGRHSLGVALALHEAGHVVSVVNPAQIRDFARTKLGRNKTDKVDAALICEYAELFKPEPWTPPSPAMRRLCELQTMRAGIIRSRAEWKNRIGSGLGDSTATKLAAATIDHFTSQLEAIDRAIGETIEQDAELRGRRDLLLSVIGVGETLAASLMAEMPEPGVLRRSGEMVAYAGLNPSHHRSGTSIDRPTRISKIGNATLRSSLYMPALSAMRFNPAVAILVARLKSAGRLKPKQIVVAAMRKLLVLCFGVLKTGKRFDLAIAMPA

SEQ ID NO: 359039 - protein, 346 aa, unidentified
MDHIAIDLGSRESQVCIRTADGEIREERRVGTRSLGKFLAGCPRSRVILEACAEAFAIADASLAAGHETVVVPASLAPSLGVGDRGVKTDTRDARNLSEASCRMSKLPSVHVPAQASRDRKALCNLRESLIQARTKLINSVRGWTRPQGLGVVRSGAPTTFPLRVREHVTKRGATLPSYVEHVLAAITKLSLEIVEMDDELEEAAKSDPTCQLLMSAPGVGPTTAMRYMAAIDHVHRFPNAHRLQSYLGLTPGERSSSQQKRKTSLTKAGPAKLRWVLVQAAWAARRYYKDDPIVMWSVEVEKRRGKQVAVTALARRLAGVLYAMWRDGKPYDKHHQATRATKAAA

SEQ ID NO: 359040 - protein, 328 aa, unidentified
MTKHTTICAGIDTGKRKLDVAIEGHREQLQVENAPEGHKTLVAWLRQHGVKRVGIEASGGYEQPVVAELRRTRFVVVVFQPAQVRAYAKFHLQLAKNDKIDAALIAACTTAVRKIYAPPDPRLRPFAERLTMIDQIGEDISRFKNRIESCRDARIKKLWQEDIARLNKREKVELKALVASIREHPDLARRLELIHSVDGIGLPTAVAILVRLPEIGRITREQAVALAGLAPYDDDSGKRVGVRHIEGGRKRLRRAVYTASLAASFRWNPQLIQLYQRLIAAGKKHKQALVACARKMLIFANTVVARGTPWNDEPPARNASIAASLSVS

SEQ ID NO: 359041 - protein, 426 aa, unidentified
MAYRIAGIDVHKKMVAVVVADVDVAGTWQFDRRQLGTSPAQLRGLADWLVEREVVEVVMESTAQYWRPVWEALERSWQPRMQQTDPAPRAGTLHLAQAQSNEGPRGRKRDVPDAERLVKRLVAHELTLSFVPDVTQRLWRTVARRKYQSTCNRVQLQNRLECLLEEMHIKLSSLVADLIGPSARRMLRAIANGDTDPGAVVALGSRRLHATPDQLRDALGACTDLHPVYRRLLALTLDELEVIERHIHELDEELAQLLRGHQDAVERLAAVPGLGVDSAQQIITEVGPTAATFPAAKRLASWVGACPGHDESAGINHSHRAPKGNRQMRRLLNQAANAAVKAKGSIFQLVYRRLVVRLGHAQAIGAIAHRLCRLIWKILHDGVTYEERGPAVTKHRAQRRAAKMIRELRSLGYRVERDLPPASALA

SEQ ID NO: 359042 - protein, 442 aa, unidentified
MRIVYQRVGGLDVHKKSVVATRMQITEDNRLEWETETFGTTTPDLLLLHDWLQEWRCTHIVMESTGDYWKPVFNLLESDFEVLLVNAWHVKHVPGRKTDVTDSEWLAELLLHGLLKPSFIPPRPQRALRDLTRYRTKLVQERVRIVNRVQKLLEGANIKLASVVTNIMGVSARDMLAALGDGETDPVLMAELARGRLRNKIPELEKALTGVVEPHHRFMLGKQLLHIDFLDEQISDISIEIAQRLEAMSLPPRSPDLRGDPTTEPAGADAEALPLTWSEAVALLDTIPGVNQKVAEVMLAEMGLDMSQFPTAKHLAAWAGLAPGNHQSGGKRYSGRTRKGNRPLSAIMVQAAWSAVCTKDKFLKARYQRLAARRGKKRAIVAVAHSMLVSAWHMLTYRQSYQELGGDYFDQRKKQSKISYLIRRLERLTGGSVSVEMQPATA

SEQ ID NO: 359043 - protein, 349 aa, unidentified
MIVGVDVHRREHCAALIDERGVVLGTLSFPNTAAGVRKLRTWLGARDAGGAVVGIENGAGYGQMLCSALAAADLEVLNVPAWRTKRDRGKHGPGKSDPGDAVAIARVVLCDRERLGPALEPELVRALAIVETLRRQTVARRTDAIQRLRALWTQFDPEAEVAVGNVLAARTLRRLRRLRLGSGVLGDAATSCLHRIAAEIARLDAVVRDLDKQLAELLAQSGNPLEDVCGAGLQVAATLIAQSGDVRRFRNRAAYARYGGVAPIPCGSGASAGRHRLHRGGNRQVNAALHRIAIVQAQWDPAAQAYLERKLAEGKTPREARRALKRHLANIVYRRLKGWAESTLPAVTS

SEQ ID NO: 359044 - protein, 359 aa, unidentified
MPKYSLSKARKFVSGYEREFFFLGVDVHKHSYHVALRRTDGDFLTWVASADPRRLVEQILEIGVLVDAVAYEAGPTGFSLSRIIESAGLRCIVAAPSKIPRPISAGAKTDRLDCIKLSEYAARGMLRPIAVPTLEEETERTLIRRRHRLVDCLRKSKQHIKALLLELGIPEPKGLHRWSQESLCALSKLAIDPAARIAMDSHQRELNFLQIELREVESEIQKLIDGKRHEQAVKYMRTVPGVGLVVAATFRLELFRPERFTCKEELTSYLGLAPTVRQSGEKSSRGRLAPVVQKRLRSLLVEAAWVWRTRDEHARKIYNHLISKTGVPQKAIAALARRLAIILWRISLEGRPYRPILAQ

SEQ ID NO: 359045 - protein, 393 aa, unidentified
MICVGIDVAKDKHDCFILSSEGEVLADVFTIQNNAEGFDTLLQTIRRCVCPGDKIKVGLEATGHYSYNILGFLLDKGLDTYVINPLHTNLYRKSLSLRKTKTDRVDARTIAAMLMSDVDLKSYTDTVYHNEELKSLTRYRFDKVRERAKLKQSVSRLVTILFPELEKLVPSLHMASVYALLSEFPGAKQVAGAHLTHLKAVLYDASKGRYGRDMATTLREAARCSVGSVMPTKSLELQHTIRLIRELDAEIEDIEAAIQSMMDEMQSPIMTIPGIGVRMGAMILAEIGDFSRFDSPDKILAYAGMSPSTYQSGQLSLSGAYSHMEKRGSRYLRYALYNATKYVCLWDPVFAAYLAKKRTEGKHYNVALSHAAKKLVRLIYAMEKSRQSYRNAA

SEQ ID NO: 359046 - protein, 345 aa, unidentified
MNQIIRIGMDTSKHFFQLHGVDAAEQPVLRRKLRRKEVVAFFAKLPPTVIGMEACGASHYWARVLCEFGHEVKLIAPQHVKPYIKRNKNDGRDAEGLCEAMSRPTMQFVPAKTAEQQAALMLVGMRERLVVRRTQLSNAIRGYAAEFGLIAAKGLDKIEPLLADIASDQALPVLARELFAMHGREYAQLQAELKDIEARLMAWHRANADSRRLAQIPGIGPIGATALVMKAPDPRLFPSGRHFAAWIGLTPKDHSTAGKTRLGKITRAGDEMLRSVLVAGATAVIQQARRGRGRASPWLLALLARKSSSKLAAVALANKIARIAWKLLVTGESYDGARMPGALPA

SEQ ID NO: 359047 - protein, 411 aa, unidentified
MQTLVERGCGLDVHQATVVACLLIVLKNGQVQKQIRTFGTTTRELLALREWLLSQGCTHVAMESTGVYWKPVYAVLEGGALEIVVANAQHVKKVPGRKTDVKDAEWIADLLCHGLLRSSFVPPKPIRELRDLTRYRRKLVESQAAERNRLLKLLETANIKLSSVATDVFGVSGRLMLEALVEGKATPQEMADLAKGRLRQKIDELGPALEGKLEEHHRFLLRLQLDRLEAAEKDLAVLEQRLQEKLKPYAEQLTLLDEIPGVDWTLAAVIIAELGVDMSVFGSVSQLASWAGVCPGNNESAGKRKSSRIPKGNVYLKTALVEAANSAAKAKGTYLRDKFYRLKARRGYKRAAVAVAHKILVAIYHMFSDRVCYNELGDVYLDKLNKHHLTRNLVHRLERLGYAVTLEQKAA

SEQ ID NO: 359048 - protein, 338 aa, unidentified
MYYTGIDLHKKTCFLTTLDEEGKTVHKAHRENTEGSILSYFRVLQDETKIVIESMASWYWLYDLLTEHGFQVVISNPIKTKAIASAKIKNDKVDSHMLSQLLRVGLISTVYVSTVKTRQLKELLRHRQRLVRDITRMKNRSHILLMKNNYQVPCSDLFGVQGLKYLQEILLPDYQREQVEIYLSLYGQIREKVEPLTKEIQRRAQEHPIAKLLMTIPGIGPIVAMFIVAEIEDLGRFRSYRHLASYAGLVPSLDASGGKERRGRITKQGSPYLRTALIEAAQAIARMKNRRLNLFFRKRIVKSGYQKAIVATAHKSLQYVFYVWKNQTVYREEHPVCA

SEQ ID NO: 359049 - protein, 374 aa, unidentified
MSKDTLYVGLDTDKKHIDVALAEALPGGEVRCWGKIANEALSVGRLVKRLQAGGRPLEMCYEAGPCGYGLYRLLNSKPGVRCRVVAPSLTPRRSGDRVKTNRRDAMMLARLLRAEELTAVWVPDATHEAMRDLVRARGAAVADLVRCRQRIAGFLLRQDIRYAGKPWSKKHRAWLGQLVARLALPAHRLVLGEALQALDEATARRDRLTDHIAELVPGWSLAWLVEALQALRGFALINAVTLAAEIGDPRRFAKPSQLMAYLGLVPSEHSTSDRVRHGGLTKTGNGHTRKALIEAAWTYSRPTRAPRDASPHTPAVAAIATKACHRLSRRYRRLTARGKRPVIAVAAIARELSGFVWAIAQAAGPATPERSPGR

SEQ ID NO: 359050 - protein, 412 aa, unidentified
MDVIHPRCAGLDISKKDAKVCVRINGAGRRKTSQTVTTYGSTTRQIIALRDHLVAQKVTCVVMEATGDYWKPFYYLLEDLAGVEVMLVNARHVKNLPGRKTDVADATWLAQLGAHGLVRGSFVPPEPIRQLRDLTRTRTAVTRERTREIQRLEKLLEDAGIKLSSVAADLNGKSSRAMLEALLAGETDTAVMADMAQKQLRRKIPQLTEALYGRFNAHHAFLTRMHLDLIDQHTASIEALTERIEVVMEPFRGFRDLICTIPGIGGFTADVVVAETGADMTKFPTAHHLASWAGTTPGNNESAGKVKSRRTRPGNPYLQGALGTAAMSISHTRNTYLAAKYRRIAARRGPLRANVAVQRALLVAIWNIATTATAYHDPGGDYFTRLNPHKARNNAVRQLEAMGYHVTLDKAS

SEQ ID NO: 359051 - protein, 391 aa, unidentified
MKLFIGLDVSSQKLDTCFLTDSKEILFEGSLSNDLIGASEIKQRILEYQETFGFYQIVIGMESTSVYSFHPAMFFYLDEDLKLLPVEVTVENPYRIKQYSRMFDQDKTDKIDAQIIADYLRVDLHTLSPIKEEVYVGLQRLTRSRYQLVTQMVEAKQHFLENLTYKCNTLSKELANEDNKTSIFGASIMNLLTEGITLDEFSEMPLEAAVELLQKLGKGRFKNPEQLVKSIQKAVRSSYRLGKVTKNSIDLVLGIIANEIKFLKKQIKEIEKAITALLETIPEAQCLLSVPGLGAVYTAGLIAEIGQIERFDDQSKLAKYAGLTWTKNQSGNSQSENTPLNRSGNRYFRYYLIEATNRVRSTLPEFKEYYQKKRNEVPKHKHKRAGSVAKF

SEQ ID NO: 359052 - protein, 347 aa, unidentified
MRFYTKTHKYYCGIDLHARSMYLCILDQAGNILIHRNLPTEPQKFLSVIAPFREDVVVAVECIFTWYWLADLCAREGIAFVLGHALYMKAIHGGKAKNDKIDAHKIAAILRGGTLAQSYVYPPKMRATRDLLRRRNHLVRKRAELLAHIHNTNSQYNLPELQKKLGRKSQREGVIEQFPDPCVRRSIDLDVTLIDVYDEKLHALEYYLVKTAKEHDPHAFVLLRSVPGIGETLGLVILYEIETIERFPQVGNFLSYSRLVKCARESAGKRYGTGGSKIGNVHLRWAFGEAACLFLRNNPPAQAYHQRLVNQYGKSKALSIIAQKLARAVYVMLKRKETFDMTKFLHG

SEQ ID NO: 359053 - protein, 319 aa, unidentified
MNLGIDVSKDTLDCCLISDGIFFEQRFKNNRAGFNELKSWLNKNGTTNALHCCCEATGKYYEAAADYLAESYVMSVENPRKIKGYGNAKLQRSKTDRLDARLIAEYCRDMKPRAWQKPSEAQTKLKELNQYCQRLKAQKAAEQTKLHTAPDYLAPLIEETIRHLQKQIKAVQEKIGKFHQDHPDYKAKRSRLKTITGIGDNAADTLLTVLAEKHRFENQRQFTAYLGLDPKQFKSGTSVKGRERISKVGSSLLRTALYMPAMHAYRSRTFAPFVSRLQANGKRPKQIIVALMRKLAVIAYNLIKTGKDFEPQRYISQNQ

SEQ ID NO: 359054 - protein, 415 aa, unidentified
MALKIVYKICCGIDVHKTFVVACIASTDKHGVTSYERHRFSTYTKGLKNLLQWLLEHNCKDVCMESTGKYWIPVYNILEKDCSIVLAHPKYVKAIRGKKTDKKDAKWIADLFKHDLVSGSFMPPADIRQLRDLMRYRFKLTCFKSSEKNRLQNCLTVSNIQLGNVVSDTFGKSAQAILDKILENPEDTSFDLEPLVFKSLKKKLPELRDAIDGYITPEQAGKLKIIKAHYESLESRKAELEELILALAAPYQQELAILQTAPGISSDFTAIGIISEIGTNMEAFPSAKHLCSWAGLTPTNNESAGKKKSVRVSKAGCYIKPLLVQCANAVIKSTKHPEMRNRYLRLKKRRGHKKAIIAIARMLLTALYHMLKNGENYNAELYRKSDLPPVDREITVEQALMIARNQGYKIKSATA

SEQ ID NO: 359055 - protein, 389 aa, unidentified
MPIAADRAEAPTAIQTHLAAIFVSLELSRSIWLITSLTPGGGEKMSKHSVQAGDVAALLARFSELKRKASERTGKLFPIVVIQEAGLDGFWLHRVLQGEGVESHVVDPASIATSRRRRRAKTDGIDGEALLRALLAYKRGEPRVCAMVKAPTPEEEDRRRICRERKVLIAERVKHVNRVKGLLFSQGVSGYEPLRRDRRQRLDELTTGDGRPLPVHLKTQIGRELDRLELLLDQIKQAEAERDALLAAPQAAAPSSAGRMLLEFKGIGAEFAAGLWLEALFRHFSNRRQLASYAGLAPTPWQSGSVDREQGVSKAGNPRLRTTLIQLAWLWLRHQPQSALAQWFNERVNRNGGRMKKSTIVALARKLLVALWKYVTAGVVVEGAVMKSA

SEQ ID NO: 359056 - protein, 351 aa, unidentified
MNYVGIDIHKRYSVLVALDERGRELKRCRINGNTAFGFDQFFSGLDGKSKVVVEACWDWGRIYDLLGEIEQVEEVVLAHPLKTRLIADAQIKTDGLDAHGLATLLRGDLVARAYVPSKPTRQRKEVLRQRLYWARLRTRVRNRIHALIDRQGELSMPQCSDLFGRKGLNALNKLCLNEPDATLLREELALLELIQSQIKAQEARIVEFNSKDETTLRLQSIPGMGKILAAVAAVEIDCVERFSSAAKLCAYAGLVPRTHASGGRVYQGPLVKSRNKWLQWAFIEAAWVAIGCSAYFGGLYRQHRARGKNANIAITSIARRMCQISFTLLKERRDFIEAFPGRSAVRLTAAA

SEQ ID NO: 359057 - protein, 355 aa, unidentified
MKNQAIQYLAFDVHQATVVATVRDEHGAIRMRATVPTEANAILGLVRGLGPRVHIAFEEGTQAQWLHDLLQPHAERVVVCNVRGRSETSNKSDRIDADELSEMLRVGSIKSVYHGASGILTLKELVRCYTNLVDDSTRVMLRIKALFRARAIPTPGTSVYRARERAKWLARIESRGGRMRAESLLRQLDTLLELRPKAKAAMIAEASRQPGWKVLRSMPFFGPVRVALLLAIMATPFRFRTKRQLWPYVGLAVVTRSSADQEFVNGKLRRRRRAPLTRGLNRNHNPVLKNVFKGAANAAAAKPGPLKDVYDACVGRGVREELAKVTLARKIASIALRLWKKGELWDPDKLTMQTT

SEQ ID NO: 359058 - protein, 344 aa, unidentified
MDHFAGLDVSVKETSVCIVDDTGRIVREVKVGSEPEALLKVLGTPAYRFKRIGLEAGPLSQWLFSALAEAGLPVVCVETRHMRAVLKAQINKTDRNDARGIAQMMRVGLYRPVHVKTLRSQKLRMLLTHRKLLQSKAIAIDNDLRGALRNFGLKVGMVGTVRFEARIRKLVEDLPDLAALIEPLLIVRRTLREQFCILHRRLLAIVRDDEVCRRLITIPGVGPVVSLTYRATVDVPARFRKSKSVGAVFGLTSSRYQSGEVDWSGKISRCGDEMMRTMLYEAAQSMLHSKKWSWLKAWAMQIARRRGMKKAVVALARRLAVIMHRIWVDGTEFRWTREQVAAAA

SEQ ID NO: 359059 - protein, 380 aa, unidentified
MLTAQTKRSTLSITASMSQDLTQEECFAMNDTRSSKRFIGIDLAKDHCDVACYDWRGKCVQEWARISYPELFEKLAQYPSATVLMEACNGAHDKARRIADLGHDSRLVNAADVKALRHGRHKNDLRDARHIAQLAFLPDVRFVRVKTSDQQDRQLAMNEYKQIQSVRIQIGNQIHSALEQYGIPSRESMDRLAGHLVDYLDERAEKITPTLREFVLRQLERWKRTRQEENEAKARIAEITKQDEVSKRLMTIPGIGCIIATLLIVHFGDPHRFRNSGQAAASIGLVPRQYSTGGRDTLLHISKRGPSLLRRSLVQGANTLYIWAEKLKGNLGLWVRKLKASGKKFGVIICAIAAKLARICWRIMRDGTEYNPNWSIEHRN

SEQ ID NO: 359060 - protein, 450 aa, unidentified
MISTQLQKKRRLIDGKFIVGIDPAKAKHQAAIIDPAGDQVGKSFSFDVTSQGYTTVLWQKLLQIVPNCNPQTTDFAIETSCNLWITLASYLHHEGYSILLVSPLTTYHARPIVNHDFSRTDPKDAFLVASSARQGYFDLYESFPPQSNALHRLSITYSKLRKNLAQNRGRLRATIEEVFPEFLSFISLNTQTGLYLLKRYLFPDDFLTLDLDKESEAIIAISRNQYNRQTLLDLREAATHTIGIPKCREERTAERLSVGSWIALIESISSQMDAVFTELNKLAEQLPEYDLLRSLKGISDITAALFLGEVRDIHRFTHYKQLEKSAGYNLRLSQSGQYVGTRHISHIGNRRLAWLLYTMTEETAKWVSEVRAKYLRRQIKRRKHRKNVVASTPPLLKIIMALVKEGRRYELRQDKLSEMRKLEAQYAEIKQQSKRTKLSRNKTTVASHAT

SEQ ID NO: 359061 - protein, 337 aa, unidentified
MSVYVGIDVHRKRSQVAVVTEDGQVQLNKNVVNGSEPMLRLIGDLPSGTPVAFEAAFGWGWLVQLLEDYGFEAHLVHPLRCKAIASARLKNDKVDAAILAQLLRADLLPEAWIAPPAVRQLRAVLRHRASLVRLGTQLRNRIHAVAADHGYDRSASYWTGPGRGWLAELDLPPASREIVTDALAVIDGLAPLIDRIDGELHAHAKADPRVKVLRTLPGVGEFTALMMLAEIGDITRFPNARKLASWAGLTPTVRGSDLTVRHGHISKQGSAWLRWVLNQAAQTAKRSPEFAATYSSIAKRRGKKIATIAIARKLLTRAWHLLADMQATGTATPPWRP

SEQ ID NO: 359062 - protein, 391 aa, unidentified
MFYIGIDIAKHNHEVSVIDDNGKALAKSFSISNSQKGVDKFNTYLASFNVTSENCVIGMESTGHYWINLFSFLVNSKFNVFVINPIQSDAFRKMYIRKTKNDSKDSYIIAQIMRFGEYSSSNISDENIFALKQLSRYRTSLVDECSTWKRKIISILDQVFPEYSDLFSDTFGVTSKELLSKYPLPEDMLKLSTEELTNLLTKASKGRFGNEKAQEIKEFAKNSFGISFAKQTFSFQIKQIINQISFIESQLKELDNEISNMLKVLNSEITTITGIGEVLGACILSEIGDISRFEKASQLVSFAGLDVAVKQSGEFSGTEMKITKRGSPYLRRAIWLAATVASFKDPALSIYYKNLIARGKKHLTAIGAVSRKMCNIIFSVLKNKKPYTPNI

SEQ ID NO: 359063 - protein, 341 aa, unidentified
MNKPNTICIDLAKTVFQVALFNKYGKLKSNQKMSQKQMVVFIAKYPGALICMEACATAHFWGRKFQKSGHTVQLIPAQIVRKYRSGNKNDANDALAIFEAAQRSDVHFVQVKTTEQQDIASVLKLRESYIKQRTATANRIRGFAMEYGVKFPQSINKLRKLLPFELESTDNALTPSARFILNQLFEQLIALDKPIQEVTDCLIAHAKHIPACQLLITLRGVGWIVASALYARLGSASFYKCGRDASASIGLVPAHTGSGGSNKLFGISKTGDKTLRSLLVHGARSVVSNIKDKTDVLSCWIRQLLERNHLNKVVVALANKTVRMACAMLKSNQPYQEKLPA

SEQ ID NO: 359064 - protein, 361 aa, unidentified
MFTERTSVGLDVHARSVVAAAIDGVTGEVFRARLTPGNDEVIGWVRSLPGPSAVVYEAGPTGFGLARAFTTAGIRCEIAAPSKIQRPSGDRVKTDARDAMHLAKLLRLDEIVSVRVPSIEQEAARDLVRAREDVRGDLMRARHRVSKLLLRQGIVYYGGHAWTGTHLLWLRKQHFDAPGLQLAFDAEHEAVLQAEARRDRLDKAIEVMAADSEFTPVVHRLGCLRGVATLTAFGLAVEVGDWDRLTGSSIGAYLGLVPTESSSGQSRSQGSITKTGNTHARRLLVEAAWHHRKPYRTPGATMAARWELAPAAARARGHAGNQRLHQRWLHFTDRKKRPVVANVAIARELAGWCWSLAVMND

SEQ ID NO: 359065 - protein, 353 aa, unidentified
MDEYIAFDSHKHYTWVEREQVDSGRLRQFRVEHTPGAIRQALAGCAPGTPVAIEATANWYWITDEIEQAGCRPQLTHPRKAKLMMGQINKTDRLDTHGMNRLQRNGTLPVVWMPPGPLRDLRELTRTRVVLVAQRTRWKNRITATLAKWGVPPSEYSDPYGKRARAEWEQRIAWLPEQTRWTLRQMLEQLDHLNAQVAGFEQRLKELVEVTPEMQRLMSLPGVGVILAATIALEVGEVSRFLSAERLASYAGTVPRVIASGDRMRFGRTRPDVNRYLKWAFAEAGNSVAVNYRRWPERHVSQLYVRVRVYKGKGHHKAVGAVARHLAEAAFHVLSRQQEYRDPATAGGRTREV

SEQ ID NO: 359066 - protein, 339 aa, unidentified
MNSIAVGVDIAKQVFQVHYIDQETGEIVNRQLKRAKFLEHFANRARCLIGMEACGGAHHWARELTKLGHEVRLMPAEFVKAFNIRNKNDAADARAIWLAVQQPGKPVAVKTEMQQAMLALHRMREQLVKFRTMQVNGLRGLLTEYGEVMGKGRAALDKEIPAALWRIAARLPAALIDTLREQWNGLAKLDEQIAEIERRMREWKKEDRAVKVISEIPGVGLLTATAAVAMMGDPKAFSSGREFAAWAGLVPKQTGSGGKVNLHGISKRGDTYLRTLLIHGARSVLTRAKEPGPWVEQIKKRRPTNVVIVALANKMARTIWAVLAHDRPYRKDYASVKPV

SEQ ID NO: 359067 - protein, 370 aa, unidentified
MGSIAFVGMDVHKATVTVAVAEGVRGGEVRQLSTFPNRAEVIAKLAERLAGAGRELSFCYEAGPCGYGLQRQLVALGHACVVVAPSLIPSKPGDRVKTDRRDALSLAKLHRAGELTAVWVPDAAHEAMRDLVRARATAVRVLGKARQHLQGFLLRHGRVYAGRTTWTLAYRRWLTTLRFQHPAQQIVLQDYIHAVEDAERRVARLAGQITGLLPSWSLAPVVRALQAMRGVGQIVAVTVAAEVGDFSRFANPRQLMAYLGLVPSEHSSGSTVRRGGITKAGNALARRVLIEGAWTYRMQARVSRKLYDRLEQLPSTVRDIAWKAQLRLCSRYRHLIAAGKARVVVTTAIAREMAGFIWAIARQIQLQPTG

SEQ ID NO: 359068 - protein, 419 aa, unidentified
MTRKDDSKIIRIVHPICCGLDVHKQSVSACIIFPGGNGEEQCEVKVFGTFTDDLMRLREWLLEHDCPVVAMESTGVYWRPVHNVLEDTVQVVLVNARDIRNVPGRKTDIGDSKWIAGLLRHGLLKGSFIPPQTVRQWRDLTRLRKKYVQSAGDYRKRTHKLFESANIKIDSVVSDLFGVTGRNLMQLLVADRKLTLAEIQTCVRGKLRGKEAELFRSLQGFFTDHHRFVLKTILETINMLEAQIETLDQEIRRAMKGHEPLLARMKDAPGISDVSSCDILAEIGPTLESFPTDRALVSWSGLCPGNNESAGKRKSGKSPVRKHHLKTIMLEVAWAAVKKKGSYFKDKYYRLKARRGAKKAIVAIAHRILLGIYHVIKDGTKFRDLGEDYLTCRNKSQKIFHLRKQALAMGFDLVPQAAQ

SEQ ID NO: 359069 - protein, 410 aa, unidentified
MNTTTLFVGIDVSKTTNAVRFMDGGGDTLFRFSVPNNADGAAKLLEKLRHTLLNTDYSALTVGMESTSTYADHLAAFLRNDPFLRKWSCKVYTLNPRLVKNFKKSYPEIPKTDDIDSLIIADFLRFGRLPKEAHLDEKYLALRNLTRARFQSAQNLSREKTRFIETLFQKFSTLDSSKVFSDTFGATSIAVACGFLSVDEIIYMPLDELADFINTKGKGKFADPVEVAKALQAAARSSYRIPKTVNDSLNQLLAVRLVGIRAIEDQIKSLDKAIALFMGAFQNVLVSVPGIGPVYSAGIMAEIGDVRRFAGHAALAKYAGLMWSRYQSGSFEAANTKLIVSGNKYLRYYLLEAANKARMHDAEFERYYRLKFREVPKHQHKRALALTARKLVRLVYSLLSTNRLYTPPTR

SEQ ID NO: 359070 - protein, 331 aa, unidentified
MTHYIGLDAHSKTCTAVVTNAKGKILKKSVFATTEKDLKAFVDSVASPKMLAFEEMNIAHWLYVLLKNRVDEVQVAHAAHLPKQRGAKTDYIDAVRLATELRNGKITNVFHSDSPLFELRILVKAHQDVTQDVVKAMNRYKSFLRSKGKFISGKSIYNDEETPTSFEKENDKFVAVNMFEQIRSLKEIKKSYEEKLAAIAKKWPKIKSLCAIPGISHIRATMIMAIVCSGERFPNKHKFWAYCCLVRHIEISDDKIYGSRKAKGSLDLKSVFMGAVLSVLQGESSLRKYYDRLRSKGVSDRNARMAVARKIAAIALMTVKTGVPFDNHHDE

SEQ ID NO: 359071 - protein, 326 aa, unidentified
MQNILGIDVSKDTLDLVLINEEGKFHKVISNDPAGLKAMDKWLVSRHVDRVHACLEATGQYGDEVSEYLYGQGHDVSVVNPTRIKRYGESKLHRNKTDKADADLIAEFCLKEKPALWEPLSPDLKHLRALVRRLNDLQTNYRQESNRLLSGEKDAWVINDLSVHVEYLKARIVATEEEIQNFINQTPDLKVKQDLLVSIPGIGKKSSAMLLAELGEISGFENAPQLAAYAGLNPKGFSSGSSVHKKTRISKQGRSELRSCLYMPAVVAMTHNSVVRALKNRLRERRLPTMAIVAASMRKLLHIAYGVLKNQKPFDPEYDRQFNFSA

SEQ ID NO: 359072 - protein, 389 aa, unidentified
MFYVGLDVASEKHDCCILNEKKKVLQSFSISNSSIGFDSLLAALAELPSDEIKIGLEATGIYSENLSVFLRRKGFDVTTINPLLLKKHQCATTLRKTKTDKADAKGIALFIAEEGFQPDLPISYHIQELKSLTRARFSVVQDRSALKNKVKRLVVLLFPELLGEFTDIFGSSATALLKQYPSAAKLAACHCDTLAALLRKASRGRFGRAKAEHLRQLAQNSVGNHSTARAMELRMLLKRIDLLSEQIAEYDTEIKVIMDKIDSPILSIPGISYTLGAIIVAEIGDISRFSSPARLLAFAGLEPSIYQSGKFVPTSGKMVKRGSPFLRWALLQAAGYVPTYSSTFALYRAKKVTEGKPAAVVRSHVAKKLVRIIYSLLTHSNAFSDQLSA

SEQ ID NO: 359073 - protein, 361 aa, unidentified
MSESMALVGLDVHKSQTVAAVLDPVSGELRVERLRGEPERVVPTFLEELDRAVTAVYEAGPTGFVLARVAERRGLDVRVVAPGSIPMAPGDRVKTDRRDAKRLVRLFAAGELRFAFVPSEADERFRDLVRCIDDVRRDLMRSRHRLSKFLLRRGVRFQGKTWTQQHERWLCTLHFEDPLSQAVFVDYLCAVQALAQRRKTLGGVLEAAVPNSSHAETVGRLRCFRSIDTLTAAGLCAEVGDFTRFPKPALLSGFLGIVPSEYTSDEKRTQGHITKAGPTNARRLLVEAAHNYRHRPAVGENLKARQSGQDPRVVEIAWRCQQRLHGRWMHLAKKRGKPAATVAVAVARELAAFCWEAATLR

SEQ ID NO: 359074 - protein, 340 aa, unidentified
MNEITTIGLDLAKHVFQVHGVDAEGRTVLRKQLRRAQLLAFFSRLPRCLVGMEACATAHYWARELSAFGHEVRLMPAQYVKAYVKRNKNDAADAEAICEAVLRPTMRFVPAKTAEQQAAVLLHRGRERLVRQRTMLVNALRAHLAEFGVIAPQGLRNVGRLIAIIRDEEDTRLPGLARQVLQVLATQIEQIEAAVTGLEKQLMGWHKSNPISQRLATIPGIGPIIATAIAAMVAEPSGFRSGREFAAWLGLVPRQNSTGGKNRLGGISKRGNQYLRRLLINGASANLLRSKATNADPWVIGLRRRRPSLVVAVALANKTARIAWAVMHRQENYQRMTTAA

SEQ ID NO: 359075 - protein, 346 aa, unidentified
MTTVDATRPVTGGVDTHLDLNVAAALDPLGGLLGLAEFPTTKRGHVELLGFLQGFGPVARVGIEGTSSYGAGIARFLRRSGIEVVEVDRPNRQARRRTGKSDPADALEAARAALSGRAQGAGKTKDGNVEAIRTLVVAKRSCRSTKIKTLNQIRHLSFTAPEDLRERLKGVSRQQLGAAAAALRPRAGSDPVTFATKTALSTLGRRVLALDEEKEHLDRLLAELVEATAPSLLDVFGVGVDTAATLLTTVGDNPGRIVSEAAFAHLCGVAPIPASSGKVNRLRLNRGGDRQANSALWGVVITRMRNDPRTKAYVERRLKEGRSKSEIIRVLKRYVAREVYKHLPVG

SEQ ID NO: 359076 - protein, 376 aa, unidentified
MAQTDVQYPTIHLAIELSRSAWLVAARLPGVEKPSLHRIEGGDTAALLALAAALRARAAARLGTPVRVACCFEAGRDGFWLHRLLTAEGVAAYVLEPTSILVNRRARRAKTDRLDALGMLRVLAAYLGGDRQACSMVRVPTPEEEDAKRPHREREELVRERVRLENRIAALLATQGVRERPSLRSWERDLAALRTGDGRPLPPHLRAELDRLRRRLVLTLGLIRELEAERDAALAAGPRDAAGRKIAALCRLRGVGANFAAVLTREVFYRAFDNRRQLAGYVGLAPVPHQSGEADRDRRISRAGNARARTTLIQLAWLWLRYQPDSAPARWFRDRVGALRGRTRRIAIVAMARKLLVALWRYVETGLVPEGVEVAA

SEQ ID NO: 359077 - protein, 480 aa, unidentified
MNVKTRRTKKQVNVENQAINLLSKEELNKKIEVVEKELRSYTWRELETNGKFAKNDKLSFITDDMLIAGCDIGSETHYIRAIDVRGRELSSGAFEFSNTSEGFANAKAWVLALAAKHDKKQIVLGLEPTGHYWFALAAWMISNGISVVQVNPYAVKQSKEIEDNSQLKDDRKDPKLIANLVKDGNYGMPYLPEKVYADMRRLSMFRDQLTEDRIRNINRLHRELKIYFPEYMDAFGKIDGAFTLEVLKVSAIPTDITALGAEGMKNIWHNAKLRGRGYNRANEIVSYAEKSVGLTDGTDAGREAVKWYAEQILRLDEQLAEIESALHEKCREIPYAENILAINGVGENILAGILAEMGDISRFDDVKEIQKLSGMGLVACSSGKHKGQTKISHRGRKRLRYWLFQAAKSAVSHADEFKQLHEYYTTRSNNPLKKMQSLVVIACKILRVIYTILKTGTTYNPQKLLKDIKHPAASQAPMAA

SEQ ID NO: 359078 - protein, 338 aa, unidentified
MFIIGIDPHRGSHAAVVIDRSEAVLATLELRADRHQRQRLLDWAAGFTPRAWAVEGATGTGSLLAQQLVAAGERVIDVPPKLSARVRLLDNEQSDKSDRHDARSVAITALRKRNLNDVAVEDHVAVLRLFAGRHHDLVAARTRTVCRLHTVLCHLAEGKFPQRLRAEQAEAILSRIDPTTVIATERKALAQELLAELRRHDSDLDELAGKIRAAVKASATTVTDVHGVGPIMAAYILGHTRDIRRFPTAGHYARYNATAPISASTAADNRHRLNPYGNRQLNHAIHVAAVTQVGHDTPGRAYYQRKIAEGNSRKEALRALKRQISNAVYRQLLADTNH

SEQ ID NO: 359079 - protein, 357 aa, unidentified
MVEGSWVGLDVHARSTVAGVLDGGSGELRSLRVPSRCEETVAWLRSLAEPVRVAYEAGPTGYGLARACAAAGIGCLVAAPSKIPRASGERVKTDRRDAERLARLLRLGELVAVRVPDPDEEAARDLVRARADARTDLMRARHRLSKLLLRHGFVYEASAWSCAHDAWLRSLRFDSRVLSLAFDECYGAISQAKLRRDSLDRAIAELAMEAPFADVVGRLVCLRGVSTLTALALTVELGDWRRFRPESLGPFLGLTPSERSSGQRRRLGAISKTGNTHARWLLIEAAWHQRRPPRPSAALERRRSGQPATVRARADASARRLHHRWLTLERRGKPRTLIAVAVGRELAGHCWALATMS

SEQ ID NO: 359080 - protein, 414 aa, unidentified
MESTDRCIAGIDVHKKMLAVVVRRQHGAAVEYLKKQFGTTRREIEHLAAWLQHEGVSEVVMESTAQYWRPVWYGLEAHFALHLTHPLKTRAPRGRKRDFRDAQRLADRWHSGDLEDSFIPGAEQRSWRWLTRTRVHSKRKMGVIRCQVEGLLEQGGIKLSSVVSDLFGVSGWAILEKIAKGESDVEAMVQLACGGLRKKTTKLREALEGRLEPIYQLLLRQHMDQVRLLRKHVEEINEALAVAMKEHVAALCRLSKIPGVDLYAAQELLAEIGPRAAAFPSAEQFASWVGVCPGSQESAGVNYSRRSPKGNRYLRRLLMQTAWGAIHTKKTFYAGLFQRLKPKIKAKGAAWAVAHRMAKVIWLVLHEEVEYQEKGSALPNQRTLTRKLRTLVREFQRQGMDVKAIFNQTLEAHA

SEQ ID NO: 359081 - protein, 419 aa, unidentified
MRRNKAKKLAKVNGNALIAEIDIGKKVNYGYFRAPDGQDIKPFAFHNLRDGFEMFWTKLVEFQRGHNLEGIVVGFESTGPYAEPMLHFLKEKKATLVQTNPMHTKRLKELTGNSPNKTDAKDPKVIADVITLGHALTLVIPEGPAAELRRLSQARERAIKSRTAMSNQLQHLLFVLFPEFLWTMKHMKSKSVLHLVENCPTPESIIRMGIEALSAILRKISRGRPGQERAKEIFEAAQKSVGISEGRESILREIQHLVSNIGNEGCFIASLEKEMEHYLEKIPYSRSILSIKGIGKVTAAGLIGEVGDFRKFSTISQITKLAGLDLYEISSGRKKGQRHISKRGRSYLRKILFFASLSMVRNKGILHAQYQQAVDRGMAKIKALIAMSRKLLRIIFAIVRDNTVYASNHEHMCHSKLAA

SEQ ID NO: 359082 - protein, 379 aa, unidentified
MSKVRFVGLDVHADTIAVAVAEQAGEVRSFGVIPNRVESVRKLISNLGGPKGLKCCYEAGPTGYVLYWQLTQLGVACEVIAPSLIPTRAGDRVKTDRRDAEKLARCYRAGELTPVWVPDADHEALRDLVRAREAAKKDQLRHRHRLGKFLLRHGKRPVNAGQAWTQKYLNWIRIHVHFEQPALEATVRHYREEVDHIAERIIQLDQAIDEAVKQAPAEIRAVIEALQALRGVAQTTAATVVAELGSLARFQSPRQLMGYSGMVSSEHTSGNRVRRGAITKSGNAHLRRVLVEAAWTYRHRPNVQGRVLRRQKSLALSEEVTRVAWKAQQRLHNRFTALAARGKESNVIAIAIARELLGFMWAIGVHTESQSQPARAKAA

SEQ ID NO: 359083 - protein, 363 aa, unidentified
MNEFTHIGLDVHKDSIAVAVLRPGTTSCEERVIPNTAEAVRKLMSRFADQALRTCYEAGPTGYETQRLLASLGIACEVIAPSLIPRRSGVRVKTDRIDARNLARLHRAGELVAIRIPSPTEEALRDLVRAREDLKSDRRIARQRIRSFLLRYGKRYPAPGARWSFRFEVWLRALHFAEPAAQAAFDHLVSAYSVRDAQLDAIDAQIEQAAAAEPLAADAARLRAFRGIDTLSAVTILTETCDFRRFATAASYMAFTGLVPAEHSSGASRHQGAITKAGNAHIRRVLVEAAWAYRHRPAVRGAHAKRLEGQPADLMAYSWAAQCRLHSTYRKLAARRNANTAVVAVARELSGFLWGAMTGRMGV

SEQ ID NO: 359084 - protein, 341 aa, unidentified
MQITTIGLDIAKNVFQVHGIGAAQKVIVRKQLRRGQVMAFFEALAPCLIGMEACATSHHWARELTKLGHMVRLMPAKDVRAYVKRNKNDAADAEAICEAVRRPTMRFVRIKSAEQQGQLMLHRARDLLMRQRTQVINALRAHLAEFGITAAQGREGIKELLAVVVQDEGSRLPVDAHASLTVLAAQLQSVQTMIGTLEKRIIAQHRSNEASKRLETIPGIGVIGATTIAAVVPDPRVFRSGRDFAAWIGIVPRQDSTGGKQKLGPISKQGDQYLRRILIVGAHAVLRRARQQPDKYPWLTQLLARRPFKVVAVALANKMARIAWALLAKGGTYRAPQLAAV

SEQ ID NO: 359085 - protein, 374 aa, unidentified
MNHHSGAFVGIDTSKLRNAVAVAEEGRGGDVRYLGEIDTTEAATRKLVTKLAAKYRQLTFCYEAGPTGYGLHRLIRKLGHDCIVAAPSLIPKKPGDRVKTNRRDAVGLAKLLRAGELAAVWVPDERHEAMRDLSRAREAARKDLKGKRQQVSSFMLRLGRHFPGKKTWGPAHMNWLMLQKLEHREQRIVIEELLGAVRQESERVERLEQAIRDAVPEWSLAEVVTALQAMRGIDLVGAVTVLAEIGDLSRFQNPRELMGYLGLVPSESSTGDTVNRGGITKAGNGRARRILVEAAWSYRYPPRVSREKQMKVAAAPGAVREIAWKAQMRLCGRFRSLTRKGKRPTVVATAIARELAAFIWAINREVVGSHATAN

SEQ ID NO: 359086 - protein, 312 aa, unidentified
MNRIICGVDVSKARLDCCIQPGNSHLSFGNDAEGIAALAAVCREHKVELVALEATGGLERLAFLLLWQEEIACAIVNPRMVRRFAEAMGYLEKTDKIDAQVIAHFAGAKGLQPVPAPSAKDRRLKAFVLRLRQLTQDIAANSLRRAAAKELAVVDGIGDVLSLLRQQAKTLEGEIMSLIDDDPLWQALNKAFRTIKGVASRTISRLMAEVPEIGIYNNKAIAKLAGLAPLAKDSGKSQGKRYIRGGRSPIRSTLYIVSYIVAKHDPRMKIFADRLKAQGKPAMAVRTAVARKLLVWLNAKARDARANLAYAT

SEQ ID NO: 359087 - protein, 419 aa, unidentified
MKVRYGSVAEDAVWAGVDTHAAANWLSVVDARGSELFSGEFATDPEGYRRLCDEIRRLGSPVAAGVECTGTYGAGLVRAMAAYGITCYEVITPGRPRRGPGCDKDDAADALRAARQALSGENLAVPKSQDGWVEEVRNMAVAREELVKQCTSLANLALATVRKGPDEVRERLERLGTAKMMGVLAGWDEAEADPACDAVMLSLAALGRVWAEARRSARLLEGRIEKALKAGNPALASMYGCGPISAAMLAMAAGDNPERMGSEASFAALCGVSPIRASSGKVKRHRLNRGGNRNANKALHIIAMHRMRTDPRTIEYVERRRAEGLSDREIRRCVKRYIAREAYRLIMHPYDVPIEGKGPEMRAERIAAGVSQKDAAIALGVTASTLCDLELGHHQFRELALRYRQWIDDGFPLEAGIAP

SEQ ID NO: 359088 - protein, 343 aa, unidentified
MQTVTTIGLDIAKSVFQVHGVDAAGQVVIRRQLKRRTVLAFFQKLPPCLVGIEACASSHHWSRALQTLGHTVRLMPPAYVKPYVKRQKNDATDAEAICEAVTRANMRFVATKTTEQQSGLVLHRTRHLFIRQQTSVINAIRAHLAEFGIVAPVGRHGVEELLNVVTDTNDKRVPEVARMCLAALGAQLRRFKEQILEFDRLITAWHRSNETSRRLDDIPGVGPVLATALIASVADPKAFKSGRNFSAWIGLVPKQHSSGGKDRLGSISKQGDRYLRGLFVAGALAVIRYAKIHGTKHRPWLTALLARRPTKIAAIALANKIARMAWAMMAKGERYKEPVALAA

SEQ ID NO: 359089 - protein, 378 aa, unidentified
MMGLSGAGLEPTPGNMNSVYHTELSSHEGTRCQFNGGRCTIKLGIDVHQDFYVVVMQEGGSNPKPPQRLHKEALLQWAARLKQCYGQVHAVYEACGFGFSLQRQLSALGIECYVVCPQKLDEQNRRVKTDGLDARALCLKLDRFLQGNRHALALVRVPSEEEEQARALHRQREQLVKVRKVLEAQGRSLMINHGIEPVQQWWKRRAFATLAVPQWIKELLGNSQPVVLSLQQKIDQLTLQLRSAAQCEPPRGLGKMTSVIIDREIGEWRRFNNRRQIASYTGLCPGEYSSGQKRLQSCVTKHGNPRLRAALVELAWRMVRFQPHYRAVRKWKHRFKKGQLTTGAARKKAIVALARQLAVDLWRIRTGRLTPEALGLEI

SEQ ID NO: 359090 - protein, 448 aa, unidentified
MPKRNDNPAGAVPTRVANPNAAAIDVGGEAHFVAVPADRDPQPVRSFGPFTGDLAEMARWLKACRIDTVVLESTGHFWIPVYDALEAAGFEVVLVDPRTLTRHLRKKSDVIDCQWLQDLHAVGMLKGCFRPDDQVRALRALWRHRARLVVEAGRLLQRMQKVLIEMNVHLHLAVADIAGTTGMRIIRSIVKGQRDPAKLAGLREPNCKRDEAEIARALEGSWRDEHLFELKQLLKSWDFHREQTSACDRQVAKVCGAFEDKGQGRPLPEGSKRPKENRNTPEFDGPGIIHRITGVDLTAVDGLGVSTVLTVLSETGPDLSKWPTAKQFASWTKLAPRRDQSGKRVRSPSYPARGASRVAQAFRLAARGLWRSQSVLGHFLRRMKSRLGPASAIRATAHKLAKLFWRLLTTGESYRRGDMVAEQERHRQRHLRSLERQAQELGMRLAPA

SEQ ID NO: 359091 - protein, 345 aa, unidentified
MELHTIGIDLGKTVFHLVGLNLGGEVVVRKKFSRTQLLRFTANVHVGLIGMEACGGSHFLGRALREQRHEVRLIPAQYVKPYVKTNKSDYIDAEAIAEAVARPTMRFVPIKTDDQLDLQSLHRVRERWVMRRTAVINQIRGLLLERGITLRKGRHHVHAALPLILEDADAKLSGAVRMLLAQLKLDLDQLAARIDEADAVIRKTAHENEACRRLVAIPGIGPVTATALIAAIGNGGAFHKGREFAAWIGLVPRQHSTGGQQKLLGISKRGNSYLRRLFVQGARAVLQQRTKQSSGLSAWLAQLTSRTHRNVVAVALANKLARIAWAVLAKNEPYRHPVLADAAAA

SEQ ID NO: 359092 - protein, 325 aa, unidentified
MTLEEKLYIGIDVSQDTLDMAAYPTGQIWQYKNNKSGIAKIVAKLKSVKPEIIVMEATGGQEIPLKDALDEASLPVFVANPKRIRDHARSMGVLAKTDKIDAKVMADFAAKTELTPQPPRDKTERELDSLITRRVQLNDMLTAEKNRLKQHIAPDVQADINEHILWLEGRIKSLDKEIRSKIEHNPVFKAKSDLYRSMKGVGIVFSSTLIAKLPELGRLNQREIALLVGLAPINKDSGKLRGKRMIQGGRAMVRKAAYMPVLSAIRYNPVIKDMYKRLIAKGKLQKVALVACMHKMITILNSMAKNNTQWRYDLDVKGLVPVSLS

SEQ ID NO: 359093 - protein, 420 aa, unidentified
MEGVTERYVGVDWGEAEHRVCVEDAQGQVLGKGRFGADAAGLRALREWVLSFAPDDAGGVAAGLERPGGVLVATLLAAGMRVWAINPKQLDRFRGRFSAAGAKDDDRDAWVLADSLRTDRQAYREVRPQPAAVEELRGLERLRAELQQELLRVSARLRDVLCEYFPAALELLAENQPDRFVCAVLEAAAEPGEARRKHVSTWAKLLQRCGVKRVSAEEVAELFRREAPPSLPGVAAWGVASVRALVAQWRVLDEQFRQVERRITGVLKALETPVWDNEEEAGATAQMLLVLRSMPSTGPVILSTVLGEAWDLLRARDIAGLRAQSGVAPVTRQSGKFWHVVRRRACNPRLQHAVFHWARLAAENDPVWKERYRALRARGVKHARALRTIGDRLIHVLIAMLSNGTTYEPARVGAHRPRAA

SEQ ID NO: 359094 - protein, 343 aa, unidentified
MARFVGLDVSQKLTSICVIDETGRRIWRGQCSTDPVQLERIVKGHAGEDARVGLETGPMTPWLVHALRERGLDIVCLDARHASAALKMQMNKTDQNDAEGLAQIMRTGWYRPVHVKSLDAHRARALLGARAQLVGMTTRLSNQIRGILKTFGLLPGSMRGLPFDRRVEDLLSDRDDLAPIVRPMLVAWRQLRVQIAEFDRQVRALTKKDPTCRLLMSVPGIGVVSVLAYVSTVEDPARFARSRSVGAHLGLTPRQYQSGEVDRSGRISKCGDTLARTLLYEAAVVILGRIKRASGLKDWAQAIAKRSGPGKARVALARKLSVVLHSIWRSGEPFRWPEQAASA

SEQ ID NO: 359095 - protein, 345 aa, unidentified
MQSMYYIGLDVHKKTISYCVKDGSGHVHAEGTIPATRLDLDQWMKALPQPWTAAMEATLFTGWIYDHLLPHAAALKVAHPLMLRAIAAAKKKNDRIDASKIADCLRCDFLPECYRASTPIRERRRTLRYRNLLVRQAVQMKNKIAVLLMEAGVSYNKQKLHKVGYFRELLVTHPDIDEGLRSLLRLCRETLVRLGKTESALVRSLERDPFLRERIERLMTIPAVGPITALTWALEVGEVGRFSSIKKAISYCGLCGAEKRSADTLQRTPLSKQRNKHLQTILIEAAKMAPRHSPALAMIYDQEKQKGNANRATLAVARKLVAYLVAVDRRQKDFLVVENENRTAA

SEQ ID NO: 359096 - protein, 356 aa, unidentified
MKYYTSSTEFNCGIDLHAHQMYVCVMDRQGKKLVHCNVKDNDFEYFLKLIKPYRHDITICAECMFGWYWLADACQEAGLTFVLAHALYVHLIHGGKNKNDRIDSEKLAHLLRSNLIPPAYVYPSARRPLRALLRQRIFYVWRRSELLARINSHQLAHNRTPAKQTRRVRDSWEEQLLKAENHPLRQIALKNDMAMIRHFDEQIFQLDEELQRQTKRVACREFTLLKTIPGIGESLGLTILYEIGDIERFPTVKDFLSYCRLVKGTVASAGKIKGLRGAKLGNPYLRWAFGEAAVISKRDHYQLKPLAERLEARMNGNKFKANTVLAIKLARAAYFMLKNKTVFDPERLTAVLAKAA

SEQ ID NO: 359097 - protein, 324 aa, unidentified
MLIMETVEFAQVVTRGCGLDVHKKTVVATIDGKGLKRSTREFGTFTSSLTKLKDWLLENGITHVAMESTGVYWKPVYHVLEPSGIKVWIVNARHVKYVPGHKTDKKDSAWLCKLLLAGLLKPSYIPPKEQRELRDLTRYRKKLIQDIASNKNRIIRILEDCNVKLSSVLSDTSGVTGTKLINKLCEGKPITMADIDAVYHKNIEASKEELWEACNGIVEEHHIYLLQTIRENNRHIEKLIDELDQQIKKVLSPYDNALERLREIPGLSRKTVEDLIAEIGLDMSVFPTEKHLCSWVGVSPGNNESAGKKKVDEPHTETNKPKPY

SEQ ID NO: 359098 - protein, 425 aa, unidentified
MKPHINQAYAAYIGIDWADQKHDICLQAAGTDARKFTVLAHRPDTIEAWALSLKQRFQGQPIAVCLELTKGPLVYALQKYDFFVLFPVNPSTLAKYRQAFTPSNAKDDPSDARLQLELLMQHRDKLKALHPEGVEMRTLQCLVEQRRGLVNGRVRVSNQLTYALKQYFPHVLEWFKDKDTKVFCDFISRWSTLKQAQQARKTTLETFFREHNVRYPSVIETRVSAIKGATPLTHDTSVILPHQLLAHALVQQLRALLDAIERFDTQIAAFAQTLPDYALFQALPGAGPVYAPRLLAAFGEQRERYQSAADVQQYAGVAPVTERSGKKCWIHWRLQCPKFLRQTFVEWAAETIPRSFWAGAYYRQQREKGCSHQVAVRALAFKWIRILFRCWQTRTPYDESTYLNSLKRRGSPLLNSIGEAAAKTT

SEQ ID NO: 359099 - protein, 339 aa, unidentified
MKYTPVGVDIAKHLIQVHFINEHTGEVVDKQLRSKDFLTFFSNREPCLIGMEACGGSQHWARELAKLGHKVRLLQARFVKAFVMGNKNDVMDARAIWMAVQQPGKEIAVKTEEQQSVLVLHHSRRQLVKFRTAQINALHGTFLEFGETIHKGRAAMDRELPAALERMRVKLPPYLIALLEGQYSRLSELDSLIDDIEKQLISVARQSETCKRLMEIPGVGPLIATAAAATMEEASAFKSGREFAAYIGLVPKQTGSGGKVRLLGISKRGDTYLRTLFIHGARAAALLAKEPGPWISELKKRRPTSVVIVAMANKLARTVWAIAAHDRKYDKNHVSIRPY

SEQ ID NO: 359100 - protein, 407 aa, unidentified
MDVVLSKCAGLDVHQRTVVACARVVARSSVKHDVRTFGTTTAELLALSDWLSTYGCTHVAMESTGVYWRPVWHVLEGGFELVLANALHIRNIPGRKSDVNDATWIADLLAHGLICSSFVPPEPVQELRDLTRTRKQLVREIAQHILRIQKTLENANLKLTGVLTDILGVSGRAILQALVAGESNPERLAKLVRGPVKASQADLMAALHGRVTAHHRFLLKLHLTQIEALEAAVVEVEARLGMALAPFHSALARLTTMPGVSETVARVIVAEIGFDMTRFPTAGHLVSWAGLCPRLHESAGKRLSNRTRHSNPWLKTSLVQAAWAAARTKKTYLRAQFLRLKSRRGPKKAILAVAASMLTAAYYMLKHDVDYRDLGADYFDRRDKAKLAKRLVARLHDLGFTVELRAA

SEQ ID NO: 359101 - protein, 357 aa, unidentified
MHYVGLDVHARRSSLCILDSCGKVVKRLEVKGSWPKLMERVAAEVPRPFSVCFEASCGYGHLHERLSALAERVAVAHPGKLRLIFRAKRKNDRVDAEKQAKLLYLDQVPQVHVPCGDVRAWRGLIELRRRLVGRRTAVKAQLRALLRGAGCCDAPAGKALWSKRGLKWLAAAALGEADALRRDLLLEELAQADERVGRVTRELDRRADAHPGVALLRTIPGVGPRTAEAFVAYVDDVRRFARTRQVGCYLGLVPCQDSSAGRDRLGHITGDGPPTARMLLCEAAWQAVRRSPSVKAFFERVMHGEPGRKKIALVAVAHKLARSMAAMLRAGEAWREDEQEQGRGQGQDRGQGQEPGA

SEQ ID NO: 359102 - protein, 463 aa, unidentified
MYTIGIDLAVTGKHKAVIVDHDRHAVGGVVKFKTSADQMDELVARAGVPLAEIQVTMEPTGMMWYPVAVYLLRRGVTVYLVNTRQVADLRRYFKRHSKSDRIDARVLAAVPDLNPDKLHALTLPGARHLACQRACREANNLQTWMTAIKNRLHVIDRFAWPGLEHVFPDPFSTAARWMREHWYDPFQVLDAGAEAIRSHWQETSPGAGEAPEWIDALLHLAREVVAIYGAPDDALDYSLLQAEVQRYQRWLDQFEQVERDIKLHTLRPLYRHLHPTRNLETIYGVGQDSAAIYASFIGSRERFASAKAFRGWSGMVPQSRQSSDTDTKGLHITRAGPNLIKRAAYMNAEVARRWDPQLAAIYHDQVVNKGKHHCQAVCTCATHLLDRVRVMLAQDRPYQLQDVDGTPVTPDQARQIIAQHYTVSAAQRQRTNKRTRRRRTERRAERKQLKQQRRESHVSSTRG

SEQ ID NO: 359103 - protein, 340 aa, unidentified
MNQAQSYHFIGLDLHKCSIAYCEKTATGKVAARGTIGARASDLAALARSRSQPFVVGMEATLFSGWVYDVVLPYAVEVHVGHPTRLKALSKNKNDRIDAELLANLLRADLFPSCHMAPPEVRHLRRVLRYRNFLVGEATRMKNRAAGLLMETGVEYVKSKLHGKKYFSELLDSLEEVPGSVRELLRMTRTNIELFVSAQRRLLDALARHGALRDRVALLKTVCGVGDVTALTWALEIDDPHRFPSIKNVQSYCGLCSAQHESGGKQRRAPLSKERNPHLQTILIEAAKLAPCKHRHLACVRQAALERGYNRNRATLQVARKLAAYLLAVDKSGEPFVVPA

SEQ ID NO: 359104 - protein, 344 aa, unidentified
MSKVITIGLDIAKNVFHAHGADERGAMVFSRKLTRGKLLEFFAGQPACTVALEACGGAHHWARQLQALGHDVRLIPPAYVKPFVKRNKNDAVDAEAICEAAQRPGMRFVAVKTEEQQAAGLVFRTRDLVVRQRTQLINAIRGHLAEYGWVAPRGTASMTMLADLLEDGDIASSLPEAARPMFKLMIDLLSELEEQIATLDREIGRRAKEDEAARRLMTIPGIGPIAATAIIALAPPIETFRKGRDFAAWLGLAPRQHSTGGKQRLGSITKMGERTIRRLLIIGASSLVLQASRRGAPGGSWLERMLARKPRMLVSVALANKMARMVWALLTRKEDYRAPAAVSA

SEQ ID NO: 359105 - protein, 328 aa, unidentified
MEQELHFIGIDVSKAKLDVDVLRPDGRHRSKKFANTPGGHEELLSWLRSHYVAPAHVCMEATSTYMEDAAASLSDAGFTVSIINPALGKAFAQSEGLRSKTDAVDARMLAEFCRQKRPAAWEAPHPVERALRALVLRHQSLTDMHTQELNRRETAREVQMPSIDAHLQWLEAELRRLEKQIKDLTDDDPDLKHRRKLLDSIPGIGEKTSAVLLAYLGLKDRFGQARQLAPFAGLTPRRHESGSSVNRASRMSKAGHVSLRRALYMPAMVALYKTEWGKAFRMRLEKNGKEAKLIIGAMMRKLAQVAYGVLKSGRPFDATLHQENACVA

SEQ ID NO: 359106 - protein, 403 aa, unidentified
MFYLGIDVSKKSCRYLLLNQEGQKAKGFSLDNTHEAFQNLLKRLEELSIPKEDLLMGLEASGGFWENLYSFLKEKGFRVVLLNPYHTNKFREALAKKAKTDDIDALVIAQLLRTGEYVQSQVAEELIQSLRELTKLRYELMTERKNFQRQAFSLLSIIFPELEKTALKNPFSVASMAILQRFPTAKDLAQAKPKQIEKIVRSIQGNNFNIEEIGKLIQTAQSSIYSGRAKEARATSLRILLRHVETLSSSIEELEAQMKQILSPQQPQDSFPGENLLTIPGVGDKTLAAVLSYLGADGSSFSSSTKAVGYVGYFPKIYQSGQTQRDNAICKRGPKLLRWGLYMAAVASLKHNQEMRTLYHRKLSQGKTEKQALICVGKKLLQIMLTMLKSGEPYNPMKVFVNC

SEQ ID NO: 359107 - protein, 459 aa, unidentified
MKPRMESNTSPPAVVGVDIGKDVFHLVGFGAGGKIAFRRRIRRLGLKDAFEKLPPCIVGMEACLSAHFVSRTLRALGHEPRIVPAIYVKPFVKGQKNDYNDAEAIAEAALRPNLRFVQEKSQDQLDLQACHRVRSRLVSRRTATINQIRAFLIEQGIAVRTGPRALRNSLFAILENRKDEISARTARLIRGLYEDWCYLDERIETVTGEIEVLSRTEAKCRQLMSISGVGPLISTAMVAAICSGEAFERGRDFAAWLGLVPRQYSTGGRSILGRVSKRGSKYLRTLLIQAAKVLLMRPHNWARYSFGPWLNSASARLHRNKLAVALANKLARIARSVLRNDKAFDTHLEVAACPLMRSKVRAYSHQGHGPRADQQAGYISATSDSTASLANCSRSIHLGSVKRPSRGRGEGQPVSRGARWEALRAGNRAARRSLVFGNVEIWCRKPVTDLSRGGRILRG

SEQ ID NO: 359108 - protein, 414 aa, unidentified
MKRMIAGIDVHKKMLAVVVTDAGKQEEFRFERRKFAAVAEGIGLLCEWLAALEVQETVMESTAQYWKPVWQSLERQCQLELAQAQSNRGPRGRKSDFADAERLVRRYVAGELILSFVPDAEQRLWRSLSRSKQAITRDRVRLQNRVEGLLEEMRIKLSSVISDLLGVSGRRILHAIAQGETDTAKLTALAEPQLRATPEQLTECLSAVTEIEPSYRKLLKQYLERIQLHDRHLAELDQELATCLKDHASAVSRLAEVPGLGADSAQQIIAEVGPQAAVFPSAGQMASWVGTCPGKEESAGTSKSDRCPKGNRPMRRILNQAANAAVKTDGTVYQALYNRIRGRDPKKHNVAIWAVANRLCRVAWKILHDGLRYVEHGNRANERAVRKRAARLIRQLRALGYDTSAIRPIAPAPA

SEQ ID NO: 359109 - protein, 421 aa, unidentified
MKGNRQKQQEKPSKKASSEKRQRGASRNRRKQRRELARKIQAQDVSLEVKHPDAAGIDIGNTAHYVAVPPARDREPVRRFGCVTAELKEMARWLKQCGIRTVAMQSTGVYWLPVYDILEEEGLEVYLVNARETKNLPGKKTDVLESQWLMQLHTYGLLRNSFRPTQEIRQMRNYWRQRNDWIRSAVRHLQRIQKTLTRMNVQLANVISDLSGVTGQAIIQAILKGERDGRKLAALRDGRIKASEEQIAGSLEGNWQEDLLWVLKQEQEGYEFCQKQTKACDLRLHEYLKQRPDRSAGADLPEETRKCRRKKKRGNAPQIPMREGIFRMTGVDLTRIDGVDVMTAATVVSEVGWDMSKWPTESHFVSWLRLCPDNRISGERVIGKGRLTTNNRLTVALKMAASSLKESDSYLGAQFRRLRMY

SEQ ID NO: 359110 - protein, 385 aa, unidentified
MAPPTRPRIAIGLDVGKSAHWACVVTREGELLASGPIPNREDAIDGLYAQYPGALVVVDQVRNIGSLALSRAKLAGMPRAYLPGLAAHGASKLFAGDAKTDERDAMVIAKTALGIPDALLAVADRPPEIEAARSLAAQRDFLTCENTRSKNRLRSILLESCPEFEAQADLSDPATLKLMAAVGGPWTISEASPQAVGALTRGCRRAKVAALVESVESSSRPHPAAVACEDRAVRLLARRISENAAEIESLTSEISALLAADETRRCLLTVPGIGPRTASELVISIDIADFAGHDRLASYCGLAPRNRRSGTSISSVSASRQGNKRLKNLLIFSCNCLARSRNRWGEYYARCRDRGMPHGKALKAVARKRLKVIYAIMRDKVPYAA

SEQ ID NO: 359111 - protein, 425 aa, unidentified
MKSTQNEKISQIKIDTLVVGIDIGKETHYARAFDYRGIELAKLLKFSNSAEGFNRLEQWMHDICKQQDKDQVIVGFEPTGHYWFSLGDHLKKKGHKLAIVNPFHVKRTKELDDNSPTKNDSKDPKTIAMLVKDGRYREVYIPDDIYQELREAVGERERLQDQIISIRNRVIRWLDIRFPEFQKVFKKWTGKAALMVLKNYPTPEKVMEAGTSKIVEMWKKAKMRGVGYKRAESLVKAAYTSIGRTTGAVASEASLRNLLAEYDLYLKQLEELEQLILELLLQVPNAEKLLVIDGVGLITVATFVGEVGDILRFQDPRQIQKLAGLNLVENSSGKHKGKTTISHRGRKRLRHSLFMAIIAILANNEEFQSLHQKNLTKEKPLTKMQSIIALCGKLIRVFYAVLKKGVDYSSEKMLGDIQNSMKAAA

SEQ ID NO: 359112 - protein, 320 aa, unidentified
MQCIGVDVSKQELVTYDGMKTRTFPNDRRLSGFSNYIDCAEHVVIVFEPTSTYSHRLQAFCARRDIPTCQLNPRIIPNLRKVSRKRSKTDQTDAELLYQYGMDRGRDEARAPKQVDRLGHALSAQLALYRVIQKARIAYQGLLEAWINDPSTPKTLLNRLRADIAAMKEKEADCVARAEEIVEADEEASSTLQTLMSIPGLRPITSVTLLTFFRRYQTTNREQTVALAGLDPMQYQSGTSVHRRGRISKRGSRELRKRLYEATLSAARYNVSVRQLYQRLKEAGKPEKVARTAAARKLLLIAHAIYKTGEHYHSPINQGP

SEQ ID NO: 359113 - protein, 483 aa, unidentified
MVLRVPIGSWMPFKRVNIPKTNRHEAILQTLKFKFMSKSKTKTEKVKRISQLTVINPTAAGIDVSDTEMMVAYPISPEQLEIRVFGCFTRDLHSIANCLKEHGTTTVAMESTGVYWIPLFLLLQEYGFEVYLVNAKHVKNVTGRKDDESDAEWIQKLHSCGLLNASFQPDNMERTLRSMVRHRKNLVRTSSTYLNRIQKALELMNIKVHTIISDIDGKTGLLILEAILAGERNPEVLADLRDKRIKASREDIIKSLEGHWTTEHLFELRQCYQLYCTHRQMVDECDKEIEKQLIVQIASKNEGVIPDIPKVKRKPCGKHKVQFNLTADLKEILKVDVTEVFGINELSALTILSEVGCDMTKWKTEHHFTSWLGLAPNTKISGGKVMSSRIMKKKHHAGQAFRMAANGLYNSKSPLGDYFRRLRAKAGAPKAVVATARKLAIIYYKMVANKEAFNPKALDDYRKKYNEKKIKQLKRKIAQLEAA

SEQ ID NO: 359114 - protein, 411 aa, unidentified
MDRFVERCAGLDVHKDSVAATVRVPGGGRERLQETRTFSTTTRGLVTLADWHASYGVTLVGMESTGCYWKPIFYLLEERFECWLLNPRHLRNVPGRKTDVQDSAWICQLVEHGLVRASFVPPRPIRELRDLTRYRKAQIEERSREVQRLDKVLQDAGIKLSSVASETLGVSVRRMLEALVAGTHDPAVLAQLAKGRLRRKLPALREALEGRFRGEHHGLLVAQILAHIDYLDETIATLSERIEQVIAPFSRERELLETIPGVGRTAAQVLIAEIGVEMRVFPTSAHLASWAGQCPGNRESAGKRRSGKRRQGSKWLRTTLTESAKAASRCKGSYFSAQYARLRGRRGPGKATGALSHSILVAAYHILDQHVPYQELGADYFDRRTSQQRTNRLVRQLEQLGHKVNLEPLPA

SEQ ID NO: 359115 - protein, 417 aa, unidentified
MSTDVRFFGGVDWASETHQVCLVAADGKIIGERAFAHGGAGLAEMCDWLVTTSGEEPPTVAVAIEVPHGPVVEILLERRFQVDAVNPKQLDRFRDRFTVAGAKDDRRDAYVLADALRTDRHCFRRLTVEDPVVIELREWSRMAEDLQQERNRLANRVREQLWRYYPQALELGDDLAADWFLDLWALAPTPAKAARLRESRVTSLLKAHRIRRIEAAEVLRILRQKPLVVASGTVEAATAHITAVAARLKLVNQQIKQAHRRLDELSDKLAEGREEDAPGQKSKQRDVTILRSLPGVGRIVLATLLGEAAEPLRKRDYHALRTLSGVAPVTRRSGKRCVVLMRQACHLRLRTAVYHWARVAIQHDVRSHARYAELRKRGHSHGRALRSVADRLLAVACAMLKSQTTFDPEHAVEAVAT

SEQ ID NO: 359116 - protein, 450 aa, unidentified
MRTKRAYRRTDVKKIDAEQLRDRAISHGDTGATVGLDIGKDEIVVCVRWSNGDFERPWNVANTQQIELLMDRLVILKEVCDSLTIGMESTGTYGEAVRRAMTQRGLEVHRVSGKATSDYKEIFDGVPSQHDGKDAAIVAELTAFGKGAAWPFAVDSESLQQVKHQFCRMDCYRTEHVRWIGRLEGLLAKHWPELTRSLKLSSVTLLELLIHYQSPSRMAADPDAASRLRGWGGAKLNDKKIAQLMESARRTCGVPPTVSQSAWIGEVASKALATLREVQSCEKELKKLIASEATMSRYVVAVGAPTLSAIWAMVGDPREYDSSGAFLKAFGLNLKERSSGRRQGQLAITKRGPSKARRWVFFWALRAIQREELAAWYANFTRVGNATSGKQEHRKMKALVAMMRKLCRGLWYSMKHGEDFDYSKLLEPKAARKKRRRRRRRRRNANVVPA

SEQ ID NO: 359117 - protein, 425 aa, unidentified
MNVDSTDEPRFAAYVAIDWGDSKHVWSLQPADLDRRERGEIEHSPEAVAAWAAMLSARFGGQPVALAVEQSRGPLVFMLGKYEQLHVYPIHPRAAAQFRAALFPSGAKDDPSDAELLLDLLVHHRARLRRLKPDTEQTRLVQHLVEGRRKLVNERTRQTNRLTAQLKLYFPQMLDWFDAVDSPLVGALLKRWPTLEALQKARPDTVRSFFTAHNCRSQELIERRLDQIRQAVPAVRDKALIEAAQAMTKVLVELIATLREGIASFGCQIAQAVAAHPDFAIFNSFPGAGTALAPRLLAAFGSQRERYQSAADLQTFSGIAPVTERSGKSQWVHVRWACPRFLRQTFHEWAAHSIGFCDWARAYYQQQRGRGNDHHAAVRALAFKWIRIAFRCWKHAVPYDDARYMQSLRRRGSPLTAALAKPELP

SEQ ID NO: 359118 - protein, 468 aa, unidentified
MADLGGRARKGWEKMQDQGQVRQVEGLPVVPPNVAGIDLGSERHWVCARTKDGGGREIADFGATTPELLRMGRWLKDRNVESVAMESTGIYWIAPHEVLEAEGFEILLVDTRQLARVPGRDKKTDRTDCEWIQRLHSCGLLKGSFRPREDVCMLRTLVRDKGNLVAESGDWVRRMQKSLDQMNVRVHRAVSDVDGVTGMAILRAIAKGERDPRQLAKLRDRRCRRTEEEIAEQLSGHWREDHLFSLRQSLQMYDATQQRIADYDREIQRKLAEMARDENRGRPAPPVKNPQKAKAIKRRGEEQMREVLYRMSGVDLTSIDAIGVETVQIVLSEYGPDLSRFPTEKEFVSHATLAPRRPMSGGKPLRKKRRHTASTRVAAALRMAALSLRNSATALGAYYRKIARRIGGDIAVFATARKLATLIYRLLRWGQPYVDEGADRFEMRYRENQIKSLQVKAKQLGYELAQKA

SEQ ID NO: 359119 - protein, 342 aa, unidentified
MAIVAGFDVHRRQITFDALDTDTGEVTRGRIDATPAAVRGWVYRFKGSEVHVAAEACTGWLFVCDALVAAGAEPHLAEPVETRALRGRKRRAKTDREDARWLRQLLADGRLPEAWIPPEHVRQWRSRARLRHTLIGERTQWMQRIQATLFHHGVSGTPERLRTEDGRAFLERLALPADARERIEIALAMIDAIEAQIAPLERELRQLARRQTGCRALMRLYGMGELTSLITLCELGDVQRLSASRKAVRMAGIDIGVHRSDRRARVGKLNRQGSPHLRWALYEAALAACRPSSPDHAAYLALKARGLSHTRASLTIARKLARRSFHVLRELGPAALDPIPMT

SEQ ID NO: 359120 - protein, 376 aa, unidentified
MGEYSEAFIGIDTSKLRNAVAIADSGRGGEIRYLGEIDTTDAATRKLVAKLAAKYGRLTFCYEAGPTGYGLCRLITSLGHACIVVAPSLIPKKAGDRIKTNRRDAENLAKLLRAGELTKVWVPDERHEAMRDLSRAREAAIDDLKSKRQQVSSLLLRLGLHYPGKSTWGKAHRNWLRSLKIAHREQRIVFEELLGAEGQAQERADRLEVAIREAVPEWSLAKAVTALQAMRGIDLVAAVTILAEIGDLSRFASPRELMGYLGLVPSERSTGDSVKRGGITKAGNRRARRILVEAAWSYRHPPRIGRDKQAKVAAAPKVAAEIAWKAQTRLSGRFRALSRKGKRPTIIVTAIAREMCGFIWAIDRAVEAAQPKSTSR

SEQ ID NO: 359121 - protein, 355 aa, unidentified
MNSKKYIGMDVHKESISVAVRNDAGKIVMECVIETKASTILQLIDGLRGDLHVTFEEGTWAAWLYDLLKPHVTELVVCDPRKNASMREGNQSDKIDARRLAELLRLNHLSPVYHGEHGLRSLKELVRSYLTITKDLGRVMSRVKAIYRSWAIPCTGKQVYAPRHRAEWLGKISERGVRRRAEFYYQQLDALRALRQQVRRDLLAESKKHPAWKRLCQIPSIGPIRAAVLLGIVQTPHRFRTKRQLWTYSGFGIETQSSADHRSVDGQLERVKKPSSIRGLNRNCNHDLKNLFKGAAIVASSKPGPFQEFYTALLSKGIRPEMARLTLARKIATIALIVWKRGASFDAQHLKPQTA

SEQ ID NO: 359122 - protein, 346 aa, unidentified
MMLIGCDFHPSWQQVSWLDVETGETGEQKLVHAGGEAKQFYEQLAAPVLIGMEATGNSQWFIELVEDLGHQIWIGDAAQIRASYVRKQKTDKRDAAHILKLLVEGRFPRLWTPDREQRDLRQLVLHRHKLVLIRSRVKNELQHLSLNKGMQRKRRLWSQAGQQLLRELPLKKWAACRREDLLGLLTMLDEQIGKLDGAVEHAAEENPQSKLLMTQPGVGPNTALAFVLTLGDVGRFPRGKQVASYLGLIPREESSGGRQKLGAITKQGNRMLRSLLVEAAQVAVVHDPGLRKQYRHRCHQKPKAVAKVAVARKLAVRLYWMLRTNVAYPEIVRIESSSGLPLVGAS

SEQ ID NO: 359123 - protein, 378 aa, unidentified
MPSESTVHIAIELSVSSWLIAARLPGAEKSRLHRIEGGDTAALLALFAELRSRASAKVAGEANVACCFEAGRDGFWLHRLLTAHGVAAYVLEPTSILVNRRARRAKTDRLDAEGMLRVLVAWLGGDRQVCSMVRVPTPDEEDAKRTHREREHLVQEKLRIENRIQALLFTQGIRARPSLRSWARDMAELRTGDGRALLPLLRTELNRLWRRLVLILELIRELEAERAEALAAAANDAMVRKITALQRIRGIGSNFAAVLVREVLYRSFANRRQLASYVGITPMPYQSGGMDRDRSISRAGNPRARTTLIQLAWLWLRYQPGSALAAWFRERVGTLQGRTRRIAIVAMARRLLIALWRYVETGVLPEGVEIRAEAAPMA

SEQ ID NO: 359124 - protein, 446 aa, unidentified
MSSEVSRYERFCQFKLDIRGSIEHLIVGMDIAKDKNHAFFGTANGRTIYKRLIFPNDLSGYNKLMNHVESLGDHHGLPKVVFGLEPTGNYHKPLADWLISKGCLVVLVGGKAVKDNRELLDGRWDKNDTKDSANVADLISQGKCQFYEQPGIRLNELRNLLSLRKRLKKQEHGLRMRIRNGVLAKFFPEMDRYWGSGIEENLAIVERCPSPKTISSMPFHEFVKRVTTMDRGSRQLRRLQSIYDAATCSVGLPMGPSDEFEAGVLVRDLRAVRTRLKETMEQVKIVSQGFETYDILQTIPGYGPYISALVLATIGEPERFKSRKQLRRLAGLDLCASRSGQRSNQVVPVISKRGDADLRYGLFQAARIASYHSDDFRCLFRRMMKGRERERGIVTKMRVKLAEKMLVIAWTLMKKKEPFTPLFLRVANTVSGETESGSAGEQLDKG

SEQ ID NO: 359125 - protein, 353 aa, unidentified
MKYVGLDWAYRTAQWCALAPGGEIAGEGRFAADRDGLARLVLELGDEVTACLEMMSGALWARDELVACGWQVQVADARKVKTVAPLAAKTDKVDARLLAELCRRQLVPALWLPSLDERALRERLRRRMHLVRLRTSAKGRIFGLQTQWGIRISLRRLRRADGMTLLERAGMPAVWRHSISECLALIDFLDARIVPLDAELRPFAQADPRAVLLDTIPGVAELLALTIAVEIGEISRFAGPEKLVSYGRLAPRVRQSGEGRPHTGPLNKSGSRLLGWAAVEAAQQAWRESNPWHQLYLDVSRRSRNHNSAKATVARKILIAAWHMLSRNEPFNPAPRSTGGASVPASSRLALAA

SEQ ID NO: 359126 - protein, 322 aa, unidentified
MKTTADKITPVTTVSPAYAGIDIGKASLDVSLAGQPPCRYANDPAGRAALLTALKKLPQPVQVICEPTGGYERDLLAALWAANLAVSLVHAARVRAFARAQGRLAKTDPIDAVVLRQFGEVFTPAPLAAPAVERERLAALVQRREQVVDLLAMEDQRLAQSRDKAVLKLGQRLRKTLVKQLEELDRLIAAQIADDATLHRQSERLQEVKGIGPVTAATLLAAMPELGTLSRGEAAALSGLAPYNHDSGAHKGRRTIHGGRKQVRRVLYMAALVAARYNPILKAVYDRLVADGKAKKLALIALMRKLIILLNHLLKNPKFKLA

SEQ ID NO: 359127 - protein, 369 aa, unidentified
MDHYAGIDVSLEYSSICVVDATGNIVREDKIASEPEVLIAWFGSLGYALTRIGLEAGPLSQWLYAAMKKAGLAVELLETRHVRDAFKAMPVKSDRNDARGIAQLMRLGWFRPVHCKSIGAQEIRAELTARKLVESKLRDIANSLRGILRGFGLKVGATTERSFPGRVRELVKGHPVLEAIAEALLSVHEVLLREFNGFQKRVQSAACSNVKARLLMTTPGVGPVISLTYAAAVDDAARFKSSKKAGSHFGLTPKKYQSGETDRSGRISKIGDASVRAALYQAAHVILTKPVKGCPELKSWGMRLAKRAGQEKAKVALARKLAVIMHRMLADGIPFNPNAKAERMAATATKAASKVLALPASGTTVAEAV

SEQ ID NO: 359128 - protein, 382 aa, unidentified
MPDVISSAPAAVRMRAALDVHKRTIVCAAQPDDPRAELRLEEIPNTERAVRGLVRRLGGPEGLVVCYEAGPCGYDLFRLLSAMGVACDIVAPALTPVAPGARVKTDRRDAKRLLVLHRAGALKFVAVPTLAQEGLRDLVRCRDDLVCARRAARHRVAKQLLRHGHVFREGKKSWTKTHQAWVRRQRLGDPLAQSALEHMLAHLDSLDAQIAALDHQLDEIAAREPWSDPVRWLCCFRGVTTITALGLLAELGDLRRFATARELMSFLGLTPSEYSSGEQRHRGHITKAGPRHARRLLIEAAWHYQHPPRVSQRIAAVHPHVPPDVAARAFSAQVRLHHRHRHLTSHGKRSTVANVAVARELAGFLWAAMTRQPLPAQEVTAA

SEQ ID NO: 359129 - protein, 396 aa, unidentified
MAQAAVQNTTATPVLYVALELSKDTWKLGITLDRVSKAKIRDVRARDLDGFLAEIEAAKKHFNLPENTLVKSCYEAGRDGFWIHRFLLAHGIENVIIDPASIEVDRRSRKVKTDRVDAQKMAQLLARHGDGERVLRVVRVPPLESVDKRILPRDLKALKKRREQAANKIQASLFEHGVDLNPRLGSFRDKDFLTALKAARQWDGKRLPPECLRSVKRSWQLYSLLTKQIKELEQRQRQVLREARAEPEKATSAARKAAILSQLRGVGDIGSYVLTTEFFGWRDFDNRSQVGALAGLTGTPFQSGNMGRDQGISKSGNPRVRTLMVELGWLWLRWQPDSRTTKWYHEHVGKGGSRAKRKAIVAVARKLLVEFWHFVEHGVVPTGAVLKTTNAEGSPA

SEQ ID NO: 359130 - protein, 399 aa, unidentified
MGQVRTWAGLDVHAAKVVACVVDGESGEMTVHGLPGDTVAVVSFCAGLTGPTRVAYEAGPTGYGLARALVAVGVECVVAAPGKIERPAQDRVKTDRRDAERLVRLLMIGALCPVRVPSPAEEALRDLVRAREDLRGDLMRARHRLSKLLLRHDVRYEDTRSRWGDRHRAWLARVDLGERGAQLTLSEYVGAIDALEIRRHTLERAIGELIPTSPWARDVARLRCLRGIDTLSAIGLAVEVSDFHRFEHPGLLASYLGLVPSEHSTGEARRQGRITKSGSRHARRLLVEAAWHYRRPPRLGITLERRQDGQDPATVAIAWKAQQRLYRVWRQLEQQRGKRRTVVAVAVARQLAGFCWAIVTHDPELPSRPGSAGIPAGGRPPHAHSPQPPKRRKRQPTTA

SEQ ID NO: 359131 - protein, 340 aa, unidentified
MQIRSIGIDLGKTTFHLVALGERGKSVIRKKLTRKQLLAFTANLPPSLIGLEACSGSHFLGRALSEQGHDVHLIPAQFVKPFVKSNKNDYLDAEAIAEAVERENMRFVPIKTDDQLDLQALHRVRERLVSRRTAIINQVRAFLLERGITFRKGPATLRRQMPEILENADTQLSPRMRNLLATLWQEWKQVEEQIDDLSAEIETICNADLACQRLRQIPGVGPLVATAVVASIGNGAAFRKGREFAAWLGLIPKQYSTGGKAKLLGISKRGNPYLRKMFIHGARAAVLRLKREGSLIGAWMNGLEARAPRNVVIVAMANKLARITWAVLSSGNPYRAQAAA

SEQ ID NO: 359132 - protein, 345 aa, unidentified
MKVRRTKSKDMTESAALYIGADVHERESQLAIFEPSGTLLTEKRLPTTNLPTFIDSLPGEKHIAIESTGFIYPIYDRLSTLNSCHISVAHPNKVKLIAKSKLKHDRADARILGELLRTNYLPASYMPPPDTREKRLLINDRVRYGLRGGELRGSIRWLLKRRGITVQRPFSPEGRRKLRELGLQEINIRLDELQLIEAITRKLNHQIAKIVQEDPNAKLLDTLPGVAPYTALFLSSEIGDVNRFPDSKHLCAYLGLVPSLHQSGDTTITGHITREGNKWLRRNLTECSRVAVRKDPHLRRFYLKLTHTRGEKKAVLAIARKLVAYAYWMLKRNQTYEELSPWEGS

SEQ ID NO: 359133 - protein, 354 aa, unidentified
MIGEKYIGLDVHQATISVAVMDSKGKVVMESILETQAATILEFFAGLRGTLWVTFEEGTWAAWLYDLLKPHVAKLVVCNPRKNALLKHGNKSDKIDARKLADLLRLNDLEPVYHGETGVRMLRELARSYLTIVKDLSRVMNRLKALYRSWAIPCAGRDVYYTRHRSEWLGKIPEAGTRRRAEQLYQQLDMLQHLRQQARRELLAESRKHTITAKLRQIPSLGPIRSALAVALIQTPHRFRTKRQLWTYSGLGLETRDSGEYHYVQGHRRRKKQVSIRGLNKDHNHDLKGLFKAAATRASVQPGPFQDFYQRSLAKGIKPTMARLTLARKIAAITLTLWKKGENFDVAKLKSQAA

SEQ ID NO: 359134 - protein, 407 aa, unidentified
MKVTCGIDWAEAHHDVALVDQNGQTIGKSRIDTGFTGFSELLALIAEHTDTPTSVPVAIETDKNLIVVALQTAGFTVYPINPRAVARYRERHAQAGGKSDPGDAVVLANVLRTDRHQHRALPEITEIGLAIKALARQHQEAIWARQLTVNRLRSVLLEFYPNALKAFPVLTHKAALEVLRAAPTPALALKLTRRRIVTLLQRSGRGNHPTLVDQILHRLHEPALRQPSRVEDALGQAVAGLIAIITAMQTSISALEQAMTAEFTQHDYADILRQAPGLGPILAARVLGEIGDDPNRFLTAQGLRAFAGTAPITKASGKMRIVKTWHVRNKRLGDACHWWAFAAITKSAGAREHYDRRRATGDTHNAALRNLANKLLGRLWWCLTHNQPWDEQAAWPALHKGPISAAA

SEQ ID NO: 359135 - protein, 325 aa, unidentified
MDIAIDLGKRMSYVVMEENGISVKEGYVETKKESFQEFFGKVSNPKIIVEASSTSNWVANMFDGYDITVAHPAKVRLIAQSVKKTDKTDAHILMDLYKKDYLPKSYLPPRNVREARDLCKDRSLMMGQHVALINKIKYHAFCLGIEIRGQGIGKKTIARLKNEPKLELLVRQLEDTDATINKYDERIKDIVENGNSVVSHYARLIDTIPGFGPCSSFAIAAEIGDINRFPDEFRLFSYAGVVPRIYQSGEKEWKGHITKGDTFLKTILLQCTHVHVRYSKNSMVTYRYEEGKDRIGRKRAKVASMKRLLRIIYWMLKRNEEYHDR

SEQ ID NO: 359136 - protein, 407 aa, unidentified
MDLLKTVFGIDVSSRKSNVCIMVNGQKVNDYAISNDMVGFNQLLGDLKQVTKPQIIFEATGVYSRRLQAFLDMHELRYVMMNPLEAKRKTKDDLHQNKTDKLDALYLAKLQSEHPQRMAYVQSKEYQELMANNRIYEQASHDLITNKNRLHKAVQLTFPEIEHLLANPRGKNYWSIALRFPHPDIVLETKEADIIDFLKGLSGIGKKRANDIAQSLIRLAKVACPAVKKNSAHVRGLKMAINNILSAEEECQSALQEMAKLAPKRDLEILTSIPGIGENTALRIISELGDIRRFNNPSQLNAFVGVDPQVYESGNLTAHLSISKRGTAIGRKVLYLAINQIQSAKKAGNPCHIADYYEKRKRFSETASHKKAAIASIHKLLRTIFALITNDQLYSYDVAKHNQRLLS

SEQ ID NO: 359137 - protein, 341 aa, unidentified
MSVKTIGIDLAKEVFQIHGTDEHGKRLFNKQLKRAKMLSFFANIPPCLIGMEACASAHFWAGKLISMGHNVKLMAPQFVKPYVKTNKHDAADAEAICEAVTRPNMRFVPVKTPEQQAVLALHRSRQSFIKQRTAQANQIRGLLAEFGIVVSRGIQQLQLQLPEILEDANNSLPSLFRVQLSLLQHHMTYLFDVIATLDKQIEQCYRQNALCQRISKIPCIGPVTATALIATIGNASNFENSRQLAAWLGLVPRQHSSGGKQVLLGISKRGDVYLRTLLIHGARAVLQSVKRKQDAVSGWASRLLARRNNNIASVALANKNARIVWALLSKDQEYCAAVINV

SEQ ID NO: 359138 - protein, 372 aa, unidentified
MNHNTIYVGMDVHKEKFSLCAYTLEAEKASYHQRTEADYKEVLKYLEFLRSIYGNDANFICGYEAGCLGYTLYHQLSANNVNCVILAPTTMLEQRSKKRIKTDKRDAEIIAKCLAQHNYSSVHIPTAKDEETKEFLRMRDDHKLALKKIKQQILAFCLRHSYRYDGKSHWTAAHLKWLRSLTPEDLYKEILDEYLLTYQNLSDKLERMDKRIEELASLEEYREAVKKLCCFIGVRTHTALSVLVEVGDFKRFASAKNFASYLGLVPGENSSGENQTRLGITKAGNRHIRLLLTEASQCYARGKIGFKSKELKSRQSGNTPEIIAYADKANERLRRRYYKMVLGSCKKHNVAKTAIARELACFMWGMMTDCIA

SEQ ID NO: 359139 - protein, 412 aa, unidentified
MKDLLEISCGLDVHKEKIVACILTGPLGKPTRSEIREFSTLIPDMIALRNWIVSKNCHHVAMESTGIYWMPIYEILEDAFSGDITLLVVNARHMKNVPGKKTDMRDSEWISTLLRAGLLNGSFIPEKRIREFRDLNRYRKSVIRDITSQKNRIEKFLQSSGFRLSSFISDIFGASGRNIILHLIEHGQIDKTALDSCLKTKTRNRIDEILMSVNGTLSEHQKAFLRILMTHYDSLKKHLAEIETSLEEDMAPFALQVEQLNSIYGISTTASCAIIAEIGIDMKPFKTAEHICSWAGLCPGNNESAGKRKSTSVTKGNPYIKSMLCEIAWVIAGKRNTYLSAWYWRIKQKKGSKKAIVALARKLLVIIYTMLKQGTLFDESCFETRRKHCEQKQLSRYIRELEKHGYHVEAQS

SEQ ID NO: 359140 - protein, 334 aa, unidentified
MKKFDFFLGIDISKNTLDYCLLDDQCKVLEKGKVNNEPVSLSKFFLKFENEYCCKTTLLIVFENTGIYSKPVARFLNENKWCYSEVSALEIKRSKGVSRGKSDRVDAHQIAQYGFRNLDKIMLCTEPELIHQQLKILNTEREKMLSAISSFSRTGEAEEFLGKEVFKVVKTHNRQTLSALKKQLKQLDDKISALLRSNEDLKKKQELLKTIPGIAEVGSLYLLLATKGFTRFKNWRKFACYCGIAPFEYSSGSSIRGRNRVNPLADKKMKSLLHLLALTSIRHDPELKLYYERKKEEGKHSLLALNNVKCKLVSRIFAVIKRETPYVKTHQFAN

SEQ ID NO: 359141 - protein, 397 aa, unidentified
MERQVERCCGLDVHRDTVAACVRIGGGPGQRTQQHVQTFRTTAGDLVVLRDWLAAHEVTHVAMESTGVYWKPVYYALEADFTCLLVNAAHIKQLPGRKTDVKDCAWIAQLLEHGLLRGSFVPPAPIRELRDLTRYRKAVIQDRTRVVNRLHKTLEDAGIKLASVASDVLGISGRAMLEALVQGTTDPAMLAELARGRLRGKLPALRQALAGRFRGHHAFLIGQLLAHLDYLDEAIGILSGQVETVIAPFADALTRLDSIPGINQRTAEVIIAEIGVDMSAFPSAGHLASWAALCPGNNESAGKHKSGKPRKGRPLAAHGAYRSGRGVESGKEQRATGAIPTGAPAPRSQESRRGGRPCSLTRAVPCPRGSRGLSRAWCRLLRSAAQPTRHASRDPTP

SEQ ID NO: 359142 - protein, 338 aa, unidentified
MHITTLGIDLAKNVFQLHGVDARGRAVLNRRVKRSQLLDAVASLPPCVIGMEACASAHHWGRAFEQLGHTVKLMSPQYVKPYVKTNKNDCRDAEAICEAVSRPTMRFVAIKTVDQADLQAVHRSRTLLIKTRTAVINQIRGLLAEYGLVIAQSPEKVRPALVRFLDDAESGLTAFARETFSELYEQLVELEQRITKVNQRLDRLFNTHPVCRKLAAVPGIGPLTATALLAAISRPHVFQNGRHLAAWLGLVPRQFSSGGHARLGGLSKRGNRYVRTLLIHGARAVVQRAAHKTDARARWMWALKCRKGTNVAAVALANKNARVIWALLAHDDVYRQSV

SEQ ID NO: 359143 - protein, 441 aa, unidentified
MSNKAAPFRETSDSGVYGGRWGAIPDNLKQIQPRKEKGLTRYHVGIDVGKVRHHACLRDTQGDTYSKVFSFSVNRPGFEGLLAFLEGQAPPEELLVGVEASGPYALTISCFLLERGYQVVELNPCQASQFRKAQGKKAKTDRVDARSLAAFLSVGSYKPLNVADPLLENLRDLTRFRADLLQDRTRQLNRLQENLALFFPELASHLASFGSPSVLALLATYPGPQALAAAGVAEISTFLRQHSRGRLGQPQAEAILQSATTTVGLLGRQRALALKLELLAQSIVALGLQVQRVEAEIQELFGQLPYDPSDFPVGGVQALATILSEVQDIHRFPTLKQFLSHLGWCPKTFQSGGFRLEHPKMSHAGNPYVRRMVWMLAILAVRSVPAYKEYFQQRTAAGKKKMHSIVAVGRKLLSVIYAVLKTGRPYRPVPEVSGHLAVVNS

SEQ ID NO: 359144 - protein, 339 aa, unidentified
MRLYAAYDLHSSNSYLGISDEKGKRIFKKKLPNDPAKIKEALRPFKTNIEGIVVESTYNWYFLVDLLREEGYRVHLANVMKTQQYSGLKYSDDKHDAFWLTEMLRLGILPEGYIYPKEERPIRDLLRKRGHLVRLRTSLIVSLQNIIARNLGSRLKANDVKVLTTDRVTPLFQGNEDLALAGKVSKEAVDFMTRQIKAIETSITERIKLSNPYDRLLSIPGVGKILAFTIQLETGPIDRFQKVGNYVSYCRKVPSGRFSNDKKKGTGNRKNGNKYLAWAYSEASDHARLVHYESRRYYQRKLQKTNAAIAHNALAHKLARAAYYIMRDGVIFMSEKAFA

SEQ ID NO: 359145 - protein, 332 aa, unidentified
MNMHLQGGVAKSAQRPCAGVDVCKQHLDVCVHTLERRVTNDATGWDELAATFKQLDVDLVVIEATGGYERGLVCVLQAKGITVARVNPRQARDFAKSMGVLAKTDQVDARTLRDFGDVLARHKDRAKFITPMVDADRQLLAELMVRRRQLVDMRVAESNRLEHAGKHSVRSIKSVLKTLDRQLEAIDHEIDDHMDRHFKEQRTLLDSVKGVGPVTILTVTAALPELGHLGRRQIAKLVGVAPLADDSGPRKGKRRIWGGRADVRSVVYMAALVAITHNPVIRAFYSRLIAAGKPKKVAIVACMRKLLTILNAMLRDHSMWDAARHLQPVFSA

SEQ ID NO: 359146 - protein, 444 aa, unidentified
MLRIIYKRVAGLDVHKKTVVATRMRVTEEDRVEWETETFGTTTPDLLELHDWLCEWDLTHVSMESTGDYWKPVFNVLEDTFEVWLVNAQHVKHVSGRKTDVKDSEWLAELMLHGLLKPSFIPPKPQRALREMTRYRTTLVQERTRIVNRIQKVLEGANIKLASVATDIMGVSGRAMLAEIAAGQTDAELMADLARGRMRNKIPELEKALTGIVQEHHRFVLAQQLEHIDYLDEKIEAISARIGKQLEGMSWPDGPSQPGAEEGSEEETQSAAGSKLPLSWNDAVALLDTIPGVDRRIAEKILAETGLDMSQFPTANHLASWGGLAPGNYQSGGKRYSGRTTKGNKALSSTMVQAAWGASRTKDTFLKSRFHRLAARRGKKRAIVAVAHSMLISVWHMLTYQQPYQELGGDYFDERKKESKVNYLVRRLEKLTGGSVSIELQPAA

SEQ ID NO: 359147 - protein, 429 aa, unidentified
MIMGFTKPIEHSNLVAKEGDLMNTLYVGIDVSSKSNVVYLMLQNGDKVCNFTVANSHDGSIQLVKRILSALKSYSLDTVLIGLEATSVYGDNLVYFLREDASLASFNRKIHVLNPKQVKKFKNAYNDLPKNDFVDSFVIADCLRFGRINKEVYFADYRYKALQNLTRARYFAVCNLTKEKQRFMNLLFKKYSTMTQEKVFSNTFSTTALAVYDEFESAEALAYMDLHELTEFIVDKGKNRFPDPDSVAKAIQKAARSSYRLPKTVNDSVNQVLSISITSIKALETQIKEFDKAISAQMELLPNVLTSVPGIGPVLSAGIVAEIGDINRFENQASLAKYAGFAWTQYQSGNFEAESTRLICSGNRFLKYYLCEAAFSLVRCDKEYSRFYHLKYNEVNRCQHKRALALTARKFVRLVFTLLKDNRLYRAAD

SEQ ID NO: 359148 - protein, 339 aa, unidentified
MNITTLGIDLAKNSFSIAGMNQHNKFVLRKTLSRKKLLNFIANCPPCLIGMEACSGAHYWSREFKQFGHQVGIIAAKFVQPYRKGGKNDNNDAEAICEAVRRPNIWFVPEKTPEQQAMLCVHRIRQGLVSDRTAMVNQLRGLLSEFGIIIPKGRYAVNKAIPEILEDAENQLPPLARRMIAQLWQRIERVHQEILSYDRELSHIVRTNDIAKHLLTIPGVGEQTASGIIASVPDPRAFKNSRQFAAWLGLVPRQYTTGGNIRLGRITKRGDRYLRTCLVHGARAALSRIKEKDDHVSLWAKQLIERRGYLKAVVALAARNARLIWTLMVKQEDYRAMSA

SEQ ID NO: 359149 - protein, 315 aa, unidentified
MYHNFIGIDISKNDFVVAIHGKKKTFKYLNNLTGFDELLSDHPILKDKSFVVVETTGGYEKALLEYLITKNIVVHRANTRIVKHFIRSTGQLGKSDNIDAFGLAKYGYERHRDLEFYQPNDDKMQKLIKYILRKQDIKKQLAAEKNRYQAPDQKYTKDSHQRMIEFYKQEIMIIESLINELVDDCQYLAKARDLLVKEVTGLGNATATSLLALMPELGNLNRKQVASLAGVAPYPYESGKKVGYRKTYGGRADLKPILFMSALTAARSKGKLGIFYRDLVEKGKKKMVALVAVMRKIIVIANAKIRDLKRDLKIL

SEQ ID NO: 359150 - protein, 337 aa, unidentified
MKYSGIDLHSNNSVVVVSDEADRVLVRRRVANDAAAILALLAGHREQLVGVVVESTYNWYWLVDALQAAGYRVHLANTAAIKRYEGLKHSGDEDDAAYLAQLLRLGILPSGYICPPAARAVRDLARKRMQLVRSRTAQVLAVENMLSRQTGAGMRSYAVQRLTAQAVESFGFHQDVGRAMCANVAVIQTLNREIAKVEQRLRQCVGVRPEFRLLTSVPGIGQTLATLIMLEVGTIERFAAVGNFASYARCVDSARLSNGKKKGQGNVKNGNAYLAWAFVEAANFAHRYCAEARRFYERKKARTNGIVATKALAHKLARACYHMLKENKPFDVKRCFA

SEQ ID NO: 359151 - protein, 479 aa, unidentified
MAAKKKDAKTDTDGENAVAAAEHGGDGAEVAEDRVQVVERAAAIDVAKGFGMVCTRVPGSRPDRRRQKVWRVEATYGEVTALMDHLRCEGIQRLVLESTSDYWRIWYYLAEAAGLEVWLVNARDVKHLPGRGKSDKADCVWHCKLNERGMLRRSFVPPQAVRDLRALTRTRARLAQDQARHQNRVEKILEDALLKISVVISDLFGASGRRFLDALVAGQRSPAALAALGDPRLKASRKQLEHALTGRFRDIHALEISTHLRLIDAINEEIDRLDGKIEEQLALVPRTAPACPACGLAGGGHAPGCADEQLPLLGLAARLDEITGIGQCNAAVVIAELGTDPSQFPTPGHAAAWARLTPRTRQSGETARPGRTGKGNRYIRGALGQAVMSAASTDTRLGAMYRRIARKRGKQKAIVAVSRVICEIAWILICDPAARYAELGPDYYSPRSRARQTRDKIRDIERLNPGKKVILADADPRAA

SEQ ID NO: 359152 - protein, 356 aa, unidentified
MNNISKVDFTGQHLYIGMDVHKKSWSICILTDQFEHKTFTQPPDVGVLVDYVKRNFPGATYHAVYEAGFSGFWTHDRLRELGVDCIIANPADVPTKDKERAGKTDRVDCRKLAHCLRSNQLDGIYVPSRTAVEDRSLLRTRRSMVKKQTRCKNQIKSLLAFYGIHIPEELAQSRWSKKFINWIDEIRMERASGNYSLKAYLDELNHIRRILAELNRNILALSRTDEYRANVLLLRTVPGISTLTAMTLLTELNSMNRFSSLDKLASYVGLIPNTNSSGEKNNTTGITNRRNPSLRGILIESAWVAARKDPALIMAFDRLSKHMTNTKAIIHIARKLLNRIRYVLKNQNEYVPAVVQ

SEQ ID NO: 359153 - protein, 429 aa, unidentified
MRTESTPGARGPVFCGVDTHADSHWLCVLDWRGRKVLSRRFPADAAGYEALAGAIAAAGEPACVAMEGTSSYGAGLTRHLASLGMPVREALSPARTQRRRPGQGKCDEADAERAARAAMSGSKLGTPKSQDGWVDGVRCMLAARSGAVKARTSAINTARSLLATAPEGLRSRFRGMAGPRLMEELPSVRAEGALGAALGALADLWAAARDAALDMERAIEASLEENCPALLAMYGCGPVSAAKLAVAAGDNPGRLRSEASFAAICGACPIPASSGKTVRHRLNRGGDRQANSALHEIARQRVMRDPETAEYAERARARGKGDREVMRCLKRYVAREAYRALMRPHEVRRPEDASGLVAARRAARVSQVRAASILGTSEKYISMLERGQRELKPIRRAYEAWVEAGLPLDWDRQAFEAERKMDSKKHLAK

SEQ ID NO: 359154 - protein, 420 aa, unidentified
MKSATNTPASALPEVPPNDVTAGVDWARDDHAVSIVDGRGREVFRCTVHHTSEGLRELVKELDRHSVGEVAIERPDGPVVETLLAARLVVVVISPNQVKNLRGRYGSAGNKDDRFDAYVLADTLRTDRARLRPLVPDTEATVALRRACRARKDLVSHRVAVANQLRAHLRNVFPAAVGLFADLDSAISLAFLTRFDTQDRADWLTPTRLGDWLTKQGYSGRTDPAVLHQHLRDAPRGATGDHAATQAHITHALVAVLTTLVEQVKTLSAQIDRQLDAHADAHIFTSLPKAGRVRAARLLAEIGDCRAKFPTPESLTGLAGAAPSTRQSGKLRAVSFRWSCDKQLRDAVNDFAADSRHANPWAADLYHRARQRGHDHPHAVRILARAWLHVIWHCWQNDTSYDPSRHHALQRVLANPKQAA

SEQ ID NO: 359155 - protein, 401 aa, unidentified
MVRYIGMDVHREFAQLAVVEDGLVRDEGRIGVTPQALRTWADGLRPDDQVALEATGNSDAIANLLLPLVGRVVVSNPAKTRAIAEAKVKTDKVDARILAQLLAADFLPPVWLPDERTRSLRRQVTRRAHLVRQRTRIKNQVHAILARNLAPTPPVSDLFGKTGRHWLSRQVLPADEHASVQALLRQLDFHGTELALIDKDLAIEAFADPVVARLMTIPGVDAIAAISIVAAVGDFTRFTDPDKLVAYVGLNPRVRQSGNSAPVHGRISKTGRAHTRGVLVEAAWSASRAPGPLRAFYQRVNARRGFQKAVVATARKMTVLAWHLATKQQDYAFARPGLVAHKRRKLELAAGAPSRRGNHGQPGAAYNDKQRRHQEKTAVEQAEHAYAVLVAHWQPKRPTRT

SEQ ID NO: 359156 - protein, 320 aa, unidentified
MMAQNDLVVVGIDVAKDKVDACIRRLSQRRTFQSSSEGRRQLIAWLRRHKVGKAVMEASGGYERDWAKVLREAGLEVRIVDPKRVRDFARGAGRKAKNDTIDAEMIAWFAETFGQVPGQVHDAEREKLAQIVNARQALLDLQISLQNRSEHATPAVVQKMHARLLKNIACEVAKLEAAIKDLIKATPHFAELAEIIESVPGLGEITSASLIAAMPELGQVNDKVVAALLGTAPYDDESGKRRGQRHIQGGRRKLRNLFYMACLGAATRYNPVLKVFYSRLIAKGKQPKVALVACMRKMIVILNIMVARREKWDPHRHVLS

SEQ ID NO: 359157 - protein, 419 aa, unidentified
MSFKIIKNNCCGLDVHKTWIFACIGITDSNNRTEYKQARFSSFTKGLNELCDWLAKYNCNDVCMESTGKYWIPVFNILEQRSLWVTLSHPKYTKPMKGNKTDRKDAKWICDLYMCGMVKPSFIPPADIRELRDLVRYRFKLTCMITGEKNRAQNCLTVSNLKLDDVFSDVFGKSSRSITEQILQHPGETFDVAPFVNSRCKTPIVEIQAAIDGAISKEQAVKLRQCLDHIDELNKHISEVEQEILRLSDKYEVALNLIRTVPGFDKNPLTAIQVLSEIGGDMSVFPTAKHLVSWAGCCPRNDQSNQKIKSTRISRAGSYFKPVLVQVANALIKSKKHSEFTNRYKRIKARRGHKKAIIARCRMILTAIWHILSDLKPYTPEGFLESRPVKEEKVLSTSQALNLLKQRGYIIKDKPLAVF

SEQ ID NO: 359158 - protein, 408 aa, unidentified
MGRAAEVVAPSSSMRTDGGCPVAQVNDLSRSLTAFDPISTLVVVVEMSKASWLVSSVVPGVERQPLKKLEPDATALLRLIERWRNEAVRAGRSISRIALAYEAGRDGFWLARWLIARGIEAHVIHSASVAVSRERKRAKTDRLDAAMLMRVLLGWLRGERGHCGMVAIPTMEEEDARRPSRERESLVDERSRITNRMKSALARLGIRGFKPHLRKAPERLAGLRTAEGTGLPANIIEEFRRDMARLALVREQISSIEKTRAERLERAPDTGPHAMVRLLARVIGIGIETADMLVREILSRKLRDRRAVARYAGLTGSPDESGLKRREKGLAKAGNARVRRGLIQLAWRFLMFQKDSALAQWYRTRTEGPSGARKTTMIVALARKLLIALWRLVTTGEVPDGVELRPAV

SEQ ID NO: 359159 - protein, 426 aa, unidentified
MKLEEKEQEKSIRAWIGIDWADEKHDVSLYDIATEKQEIATIRQSPEALQEWLGQLRRRYEDGYVAVVLEQGRGGLLNALMSCEFLVLYIINPKSLSSFREAFYGSGATSDPVDAELMREMVRQNPSRFRAWRPDDVMTRSLRLLTEGRRNLVNQSTALTNQLTALLKGYYPQALAWVGRLDTAWACDFLGQWPTLQSLQASSRRQILRFYEKHPRASLDLSEQLKQIQNARALTQDEAVLESSALMVQALVSQLRPLLASIAEFDRKIAMIFRKHPDRPIFESFPGAGAALAPRLTAAFGTDRDRFQAAKDMQELAGIAPVTEKSGKKKFVHWRYACPKFMRQTFQEFADHSRRWCKWAKVEYELLRKRGKSHNAAVRALAYKWIRILFRCWKDRKPYQDEIYTKALLLHGSPLSSLLAECVENP

SEQ ID NO: 359160 - protein, 555 aa, unidentified
MKKSTALHRITAEMAVNAGTFFISALLPMKGGKMASFDNNTMRGFRKEGKYTSSELSSSTLDDGTKVVTAPITNIKRRICGGIDVHKSVLMACACVTDKETLSAVFYVRQFTSSNSEIRRMAEWFAEYGVKDVCMESTGKYWIPVYDILEQNGMKPVLTHPKYVKQAKGRKTDFRDAIHIANLFRMDLVVASFIPPADIRDLRELCRYRLKLTYIRTSEKNRFQNSMTISKIRLDSVFTDPFGKSASRIMEYLINTPEDKIQDEKILSLVDRRVKASSEEILDSIHGYEFIGVQRDKLEIISKHIDDVNKCIDLIDKKLDYYRFKYASIINHLCTIPGVSTESALYILGEIGADMSVWNDSKSLTSWAGLSPANNESAGKKKSTKIGKGGHYLKPLLVQCALASIKSTKKQPYFFRKYQTLKKRRGHKKAVIAIARKMLVSIYHMIKEDKDFLPIDYEQVMEQKQNDRELNLKNVILFLGERGVDDKVIRMIESQCSKEELSEGKAAETKPKKTAKEKQPESNTTAKPVKKRGSRKSSTRTKKETPSVQSSAATA

SEQ ID NO: 359161 - protein, 350 aa, unidentified
MSEISIVGLDLAKLVFQVHGADRAGRCLLRKQLKRRELLPFFAGLSPCIVAMEACGSAHYWAREIARLGHEARLIPPAYVKPYVKRGKSDRIDAEAICEAASRPGMRFVPVKTVEQQSLATLHRSRDLLIKNRTMLVNALRAHLAEFGFVAAKGIGKLPDLIKIVSEAPSKTLPAMARAALSGFLDAIALIAGKLDDIEKRLRAWHKANAQSKRLETAPGVGLIGATALCALVPDPKLFRNGRHFAAWIGLTPKIDGTGGKIRLGRISKAGDGYLRRLFVLGATSLLRSLANKTTPLALWVQALLSRRSKRAVTVALANKLARIAWAIMARGAAFKPLAAALPNVAPAGA

SEQ ID NO: 359162 - protein, 394 aa, unidentified
MKLIGIDIGKNKHFFCVMDQQTGEIISQPVSFSNDKEGFDFLVKKIKSYPKDSILIGMEDTGHYHFALLKYLLDLQYTVALINPKTTDFNRKMQGGITKNDKLDTINICDVLDTPERKKQYRITKVNSFDLYEQKQLTRHHHSLKEEENVYKNRLQKCIDIVFPEFNKLFNSKYGIVYMNILKMFGSAENIANTDIRTIRKCFEIEGRGNRISLTPERLKECARSSIGISSSAEVIQIKHLTAQIELIEEQLTEIDKKIEEFSIQNNSPILSIPGISHFSGTSILAELGDISNYSKPSQIIKFAGVAPLHYESSQFNAQHTAITKKGSKYLRKTLYQIILPVIRHNPVFNKYYQLKISQGKGHRCAQGHCVRKLLRIIYHLLKTNQQFDPQLLR

SEQ ID NO: 359163 - protein, 390 aa, unidentified
MDVLYQSCAGIDVHQANIVVSILHGPLTSTRPKREMATFDTTTKGLRACHDFLSQFHVEAVGMESTGVYWRPVWHALCDDFKLILAQPAHMKAIPGQKTDKKDAHWIAKLTRIGLLPRSFVPNETIQELRELTRQRKHYVESRNRETNRIHKILQSGGIKLTTYIEDIMGLSGRNLLQLLVDGTPIIPRIVHQSVYTSLKKKVPQLLEALDGYFSDHHRFMLKQSLEIYDFYQKQIELLEERMNVYLSQYEKHVEILDSIPGIDVITASVIISEIGVDMSQFPTAGHLASWAGLCPGNNESAGKKRSTKIRHGNSYLKKCLCQAAFAVKKQKGSPLAERYYQIQSRRGSQKATIALAHQLLKIAYILLKEQMTYPEFLAQKKTTRDELVA

SEQ ID NO: 359164 - protein, 341 aa, unidentified
MKNSTTISIDLAKTVFQVALFNKYGVMKSNNKMSQVKMVQFIAQHPEAVICMEACGTAHYWGRRFQKNGHKVLLVPAHIAAKYRTGNKNDANDALAIYESINRPKTYFVQVKNLEQQDLASLLKLRQGYVKQRTQTANRVRGLGLEYGVKIPQGIGKIRKHLPEFLENAENELTTSSRFILRNLLDQLLLLDSQVDEATNRLVARAKEIPVCSRLVALPGVAWIISSALYARLGDGSAYKCGRDASASVGVVPAHSGTGGNNKLLGITKRGDRCLRSLLVHGARAVVSRIKDKQDGLSCWIREQLSKNHLNKTAVAYANKLVRMAWAILKSGEEYRTPLAQ

SEQ ID NO: 359165 - protein, 365 aa, unidentified
MRRPNTKVIAGIDLHGNNVVIGIMNQDGKRIEHQKVATDLDEVESVLKPYKKRLSCMAVESTFNWYWLVDGLRLRGYPIDLANPAKIEQYNGIKHADDKHDAFHLAELQRLGILPKAHIYDAQLRPVRDLLRRRSMLVGHRTALYISFKSLYSRTTGRQMPLGELKSLGPGDAARLYEHPANQLIAQIQLEEIGRLDKSIQRIEAAVLSCARHIRLYPKLLTLPGIGKILGMTITMEVGDIQRFKTDGDFASYCRAVDSRRMSNGKQKGQNNQKCGNRYLSWAFVEAANFAKRSDPQCRRWYERKKARTSTVIATKALACKLAKAAWHVMAHNTDYLPERMFPGEQRDLENRRQPATGLAKSPKD

SEQ ID NO: 359166 - protein, 389 aa, unidentified
MFYLGIDIGKNTHVASLVDDKKKVIFKAFSFSNSIDGAESLILKLEAFKNELEVGMEATGHYWLSLYSYLVEKNFTVRVINPIQTDGWRQGIEIRKRKTDIIDSLLIADLLRYGDFVETSLSNEDYLSLRNLSRFRSYLISSIGDLKRKTIALLDQVFPEYASSFSNIFGKTSREILSNFSTPSDFEDINSDDLNTFLESVTRKNYASKKIDELSKKASYSFGINFCLDSFSLQIKMLIEQISFIQNQVSDVENEIEVLLEKLNSPITTIPGIGSVNAATILGEIGDIKRFSNPSKLVAYAGLDASVSQSGEYESTYNHMSKRGSPYLRRALFQSALRAEFCDPVFSAYYQKKITEGKHHLVATNAVARKLCHTIFAVLTKNEPYQVQS

SEQ ID NO: 359167 - protein, 335 aa, unidentified
MDRQYVGIDFHRRRSVIVRKNAAGEKLASVRVNNDALSIASALADAGPCPEVVIEATYGWYWIVDWLQAQGATVHLANPSGLNWGQRRVKNDERDAIDLIDMLRLGRLPEAWIAPPPVRELRELVRYRAKLVALRSSLKAQVHAVMAKEGVLPTVADMFGPAGNAQLDQLELGDAYTIRVASLRDLIERYDREVAMLEAQIRSRLRGHRGYRAIQAINGIGPTMAAILVAEIGDVSRFRSAPALCSWAGLTPKHKESDTTVRRGGVTKQGSRLVRWAVIEGTVRYHGGGKLAADYRAITERRGKNKATVAIARPVLTLVYYGLRDGEIRCLARAA

SEQ ID NO: 359168 - protein, 384 aa, unidentified
MIYVGIDLHRKRSQIAALDEQGTELLSRRVANDPEALKAILAELGGELKVALEATYGWEWLADLLEEEGHELHLSHPLRTKAIAAARVKTDAVDARTLAHLLRTDLLPEAYVAPRELRDLRDLLRHRVVLTRMRSALKNRVHALLARQGIQNEHADLFGTGGRRFLASLALREPARQRLDSLLSLIGDFDREIEQAKREIDTLARHDPRVDVLCQLRGIGPYTAMLVIAEVGEISRFRSARHLCAWAGLTPTVRSSDGRARLGHISQQGSPHVRWALVEAAQKAATGGGPLRAAFERIAKRRGRNIAKVAVARRMLTLCYYGLRDGEIRCLQPPGPASARPVKAARSAPVDHLNAPRAPDHPRRTRSGELVPMSGLASQGRPLS

SEQ ID NO: 359169 - protein, 451 aa, unidentified
MPKNKKQAQQLPVLRPDAAGVDIGASEIFVAVSQDRDLKPVRSFATFTRDLNALADWLQRCGIRTVAMESTSVYWIPLYQVLEERGLEVCLVNAQYVRNVPGRKTDVSDCQWIQYLHSVGLLRASFRPPAEICAVRSLWRHRASLIQMAAEHVLHIQKALDQMNLQLHRVLSDITGESGLRILDAILAGQRDPVLLSRLCNGRVRSSHDTIAKSLEGDYRGEHVFALRQSLTAYRYYQQLMIEVDREIGSYVADLATDRASGSEIPTQTKKTKHRRQHHEPIVFDLRGELYRIFGVDLTDVPGISSVTAQTILCEVGTDLTRFRNASAFASWLGLCPERQISGGKVLYTKSRRVKSRLAIALRIGANSLHHAKNFLGEFFRRIVRKLGKAQAITATAHKLSRIVYHMLVTKEPYREEVFQRTEEDTLRRAARRLQRQAAQLGFTVTPAVTV

SEQ ID NO: 359170 - protein, 396 aa, unidentified
MKNVYDKVASAGVDVHYRFSTVALADRNGRVLRRERLDHQDRAALRARVARWPTGMPVVLEASFGWGWLSDLLEAAGLDVRLGDCFKVEKMRQARGMVKTNDKDAALLAPLPWEPTNWWEVWRAPPAVRDRREWLRHRMDLVAMQTQVKCRIHAIFHRHGIFHDFSDLFGAGGRRFLAALCARRDAQSRYLPAGALEALRSEVSLLGHLRAELAEIARRLRACLERSEVTRWLHSVPGFGVILAHLVSAEVGQLDRFRSAKALAAYSLLAPRSRDTGEAPPRGRAPLGRHLGRRGNRTLKWAFIEAAHGAVRSGGAWRALFDRVTDGGRRDCGRGYIKVARALVDVVYAVWRDGRPYEERRPPRREVRMDARRWFSVDRTRPGTGRPVRPMVAAER

SEQ ID NO: 359171 - protein, 430 aa, unidentified
MKSNTQNAKIEAITEKTLVLGIDVGSETHYARAFDYRGIEYSKKPFKFSNTEAGFVTFKEWILDLKERHEKDKVVPGMEPTGHYWFNLGKFLQDNEMKPVLVNPHHVKKSKELDDNHPTKNDRKDPKVIAGLVREGRYMIPYLPDGVYADLRTASNIRFQLQAELTRIQNRINRWFNIYFPEYKTVYGKPDAKSGMLILKAAPLPEDILTLGIDGVNQIWRDAKLRAVGKARAKTLIEAAGHSVGSKEGAVSARMEIRMLLEDYESRNMRLQEVMVLIEELVKGIPMAEKLLEIKGVGIRTVSGFLAEVGDISRFNNPKELQKLAGLALVENSSGKHKGETTISRRGRKRLRYLLFEAAMSLVAKNPEFRELHNYYTTRRRNPLKKMQSLMAVATKLIRVFYAMLTKGVDYDPKKMVSDIRRPEAYLQAA

SEQ ID NO: 359172 - protein, 339 aa, unidentified
MSKRSILVQETIYCGIDVSAKSLTVAIQRVNQPVEQRSFPNASVGHKALIIWLRKAKSPVRVLLEATGIYSLDLAFALDAAEGIELAVLNPKVANRFAQTIRRSKTDAADAEVLAEYARRMPFTAWVAPSLGSMRLRSIVRHVESLSVQSAQNQNRLHAAQGSTSTPGCILQDLKRSVASLELRIRKLRREAMTLVRQDDLLRRRFELLVSIPGIAQVSAMQLLAELSTLPSDLTVREWVAHSGLDPAHEISGSSVRKASRISRAGNRHLRRALYMPALVASRCDPHAKAFFENLLARKKARLQALIAVARKLLHAIYGIFRSDLKYEGTKLFPKITLS

SEQ ID NO: 359173 - protein, 372 aa, unidentified
MNNIRFIGLDVHKQSISVAVADGGRSGSVEYLGEIDNDPVAIGKLCARLQRPGKTLSFCYEAGPCGYGVLRQIKGLGHQCDVVAPSLIPRKPGDRVKTDRRDATMLARLHRAGELTAVWAPDADHEAMRDLIRLRGVVRQVVTRARQHLQGFLLRHGRTHGQGTAWRMAYRRWLSTLAFEHPAQQIAFQDYVDAVTDAERRLKGVEEQILKLIPAWSLCPVVDALQAVRGIALVTAVILVAEVGDFTRFANPRQLMAYFGLVPGERSSGETTRRGGITKTGNSYARKALVEGAWAYRMKPRVGRHKVDRIEALPKPVRDIAWKAQIRLCARYRQLSARGKTANVVIVAIAREMVGFVWSIACMVQSAPKAAR

SEQ ID NO: 359174 - protein, 387 aa, unidentified
MTARTVSNLPAAMHVETARCLFAIELSKQSWVIGFITPLSAKISRRILSGGDWKGLLELIEEVRARVSRETGRAVDVISCYEAGYDGFWLHRLLEAHGIRNYVIDPASLQVDRRMRRVKTDRIDTERLLRSLMAYLRSEPKVWSVVRVPSIAEEDARRLHRERDRLVSERVQHVNRIKGLCALHGIYDYQPLRPQAMARLEQLRTAQGLSLPPRLTSEIKRELQRLELVVEMIATLEAERDAIVEDEASTHVNAKKIQNLHKLRAIGPEFAAVLVGEVFHRDFNNRRQLASYVGYAPSPFQSGNVAHDQGISKAGNRKGRTTGIELAWLWLRYQPDSDLSVWFRARVGALKGRVRRIAIVALARKLLVALWRYLETGLVPRGAVLKG

SEQ ID NO: 359175 - protein, 388 aa, unidentified
MFQTIDQSKKALNAFEQDSTLVVIVELSQKSWLVAGIVPGIDRHPLKKFDADENRLFALIQRWKQEAIKAGREVKRIVVTFEAGRDGFWLARWLRARGIEAHVIHPTSVSVSREHRRAKTDRLDTELLKRATLGWLRGEPDHCRMVAIPTLEEEDAKRSNREHQYLVGDRTRVINRLKAALARLGIRNFNPKLRKASERLRTLVTPEGVSLPPNTLAEMERDMQRLQFVKQQIKAIEQTRFERLKKAPKTPLNMMVLLVARVLGMGIETADMLVHEVLSRDLRDRRAVARYAGLTGAPDESGARRREKGLARAGNARVRRGMIEFAWRFVRFQKDSTLAQWFRARTADARGPTRKTMIVALARKLLIALWRLVTTGEIPTSLTLRPAA

SEQ ID NO: 359176 - protein, 343 aa, unidentified
MQSISTIGLDIAKSGFQVHGVDAAGQVVVRRQLRRRHVLAFFQKLPPCLVGIEACASSHHWSRELQALGHTVRLMPPAYVKPYVKRQKNDATDAEAICEAVRRPTMRFVPTKTMEQQGCLMLHRARHLFIRQQTAVINSIRAYLAEFGIVAPVGRRGVEQLLEVVADTTDQRLPEIARACVAALGEQLRALKAQILQFDRCIIAWHRSNATSQRLDAIPGVGPALATALVASIADPTIFRSGRDFSAWIGLVPRQNSSGGKDKLGSISKQGDRYLRSLFTAGALAVIRYAKIHGTRHRPWLTALLARRPTKVAAIALANKLARMAWAMMARNERYKEPVALAV

SEQ ID NO: 359177 - protein, 395 aa, unidentified
MFIVGIDVAKRSHEVCMITSDGQTVQRPFSIRNNCTGYNLMLEKIRKHTNIKSQIVFAMESTAHYWLALFTRLRKDGYHVILLNPIQTSAMRDMFIRKIKTDAKDSFIIAELIRFGRYAESNVAQDRLLALKELCRNRFYLVDMAGDLKRKLIALIDRVFPEYEAQFDTIFCKSSVAVLKKYPTPQKLSNAHLDKLTELLWNSSNGHFGEWKARELKELARNSFGVEDCDGAYSTLILLMLDQIQSLSGKADALEKEISRLFQSFDTTVTTIPGIGPIIGAVILSEVGDISRFSSADKLAAYIGVDPSVNQSGEFQAAHAHMSKRGSPYLRRCIWMASQVAVQRDPMFRAYYEKKAAEGLKYMTIIGHVTRKMTAVVFAILRDHKVYEPVLPTAA

SEQ ID NO: 359178 - protein, 392 aa, unidentified
MVVSVGIDVSKDKHDCFILSSEGEVLVDGFTIPNTMDGFTCLLQRIRECTTPQDKIKVGLEATGHYSYNLLGFLLDNGLTTYVLNPLRTNLYRKSLSLRKTKTDRVDARTIAAMLLSDAGLKPYTDTAYHNEELKSLTRYRFDKVKERAKLKSSISRLVCILFPELEKLVPSLHIASVYALLAEFPGAKQIASAHLTRLKVLLESASKGHYKRDMALEIRDAARNSIGSRMPAKSLELQHTIRLIRELDDEIVEIEERIQAIMDELNSPITTIPGLGFRMAAMILAEVGDFTRFDSPDKLLAYAGMSPSTYQSGQLKNCYPHMEKRGSRYLRYALYNATKYVCHWDPTFAAYLAKKRAEGKHYNIAISHAAKKLVRLIFALEKSRQPYCSAA

SEQ ID NO: 359179 - protein, 387 aa, unidentified
MPQPNDLGRSLVALDQDSTLVAVIEMGQASWLIAAIVPGLNRHPLKKIAADAEQLLQVLRRWKQEAETAGRTIKRVAVAYEAGRDGFWLARWLRAHGIEAYVIHPSSVPVSREHRRAKTDRLDTELLKRAFLGWLRGEPDHCSMAAIPTLTEEDAKRPGRERENLVGERTRIVNRIRGALARLGIRNFKPMLRNAPQYLETLRTPEGAVLPPNTLAELRRDMARLSFVKQQIKEVETARLERLQRAPGEGGNAMVQLLTRVVGVGVETADMLVQEVFTRNLRDCKAVARYAGLTGAPDESGKRRRERGLAKSGNARVRRGMLQVAWGFLVHQKDSVLAAWYRARTADARGATRKTMIVALARKLLIALWRLATTGEVPSGLVLGAAA

SEQ ID NO: 359180 - protein, 416 aa, unidentified
MNAETNKVERVIGLDSHPDTFTAAIARGPTPAAAVVEKVFNKLSMGHLRTWIEKNTTVRDLIVLEASGNSFHVARVLAKAKRRALVLESCHLGKLKEAHANNDKISAVRIAKAYLAGTARIVWVPDLKTQERRDLFHIHRKAVNRTTQLRNRLQSYLSDNGVRLQKGTRLTQAQTPEKIRNAHEWLPRQWQLIEGLLMELRHAEEQRQHWRSLIAQEVLADPVLLSIVRLCGVREMVAFALGAFVGDIKRFPHPKKLVGYIGLNPAFDESGNGQWTGGIGGHGRKDLRCLLIEAAHAILRCSKTPLARWGKKLLRRKGAINLAVAAMARRLAVAAWYLMMGRWTTLEEIDKRLSQKVGKIISQVGTDGLKKLGHTRKTFRQQICQSLKSGREYVLDPNKKFVPKTFAQEPIMAALA

SEQ ID NO: 359181 - protein, 523 aa, unidentified
MSAKSKSKRARKSRSHSVHKPQGVIHPRVREVGPEHFAFLCVDCAKRRSKIMVADFYGRVLMEPTIIEHDRFAFDAVLQQVRDTLTRHGIKDQIAVIERTGRYHGPVQRAFVKAGIEVRILHPYTTKQYRQPADPGNKTDDTDLSAIHRAAVNGFGLLEHEPDPIYVRLQLLARHRRRLVHTNVMLRQQMLEHLHSYMPGYSSCFKDIFDSELLLWVPKHMGSAAEILQAGVDGLDQQLRKANVRSHRPTLQKIVAWARSAPSAEEPVSLHRRFFTEFDADRLAKLQVIRALESDLMEPLSQTPYVLLLSVPGINVVSAAEFAGEMGPIKHYPKPRAITGRAGLYPSRHQSDEVDHPNGPLVRHANHDLRRAILMIADNLIRCNEHFGVLVAGWRVKNADARDIRVRVGSRFSRIAFHMVSGQMTFRHPCTKQRDYVLKKLLRFAVDHAIAPDQLQRNLDAATVQLPPSDEREEAESLAQELAQVQKKRGSGPKAIGEILPAVLVKLGIKLISSSKSGEADLT

SEQ ID NO: 359182 - protein, 339 aa, unidentified
MELCCGMDLHSSNTVIGIIDEKRKHLIDRKLPNDPELIRSFLKPYKSDLKGIVVESTYNWYWLADLLQEEGYRVHLSHPVANEQYNGLKHSNDKHEAFWLAELLGLGILKEGYIYPRQIRSLRDVLRKRAHLVRVRTALIVSLQHMISRNCAVKVKTGDIKRLTADLISPSLEKEEALLLAGKTSKDVIDCLTRQIDKIERWVLKCLRQEGVFIRLVTLPGVGDILAMTILLETGPISRFREVGNFASYCRKVNSQWTSNDKVKGRGNIKNGNKYLAWAFSEAAEHARRTNEACRKFYDRKLHQTNTKVAHNALAHKLARGAYYIMRDHVSYQEEKMFS

SEQ ID NO: 359183 - protein, 369 aa, unidentified
MEQITRGIARGEAVRVGADLAKRVIQVHAVDAAGQVLSGRALPREKFIAWCGQLPAGCIVAMETSASAHHWGRKLMALGLDARIIAAQLVSPYRRQGSSGKNDANDAAAICEAASRPQMHFVPVKSIEQQSMLCVHRLREGFKADRTACINRVRGLLAEFGLVFAQSPAELQAVLTDTLEDASNEMNTLARLVVQQAQTQWRELDAHIAWCDERIAAHAKDNAAVKKAATLMGIGPVTASASVATVGDFKQFRHGAQFGAWIGLVPRQHSSGGKSCLGGITKRGDNYLRSLLIQGAKSAVMTAHKRSDPISQWAAALRDRAGWQKAAVALANKNARILWAVMTKGEAFDARHVSVKPGALPTTPAATAA

SEQ ID NO: 359184 - protein, 308 aa, unidentified
MKKHTTAKKKHQALTKVTKTKKKQVVEMAASQRLTIGLDLGDRTSRYCILNEAGEVVSEGQLLTTQTGLNALFEKMPSSRVALEVGTHSPWVSRQIGGLGHEVIVANPHKVKRITQSVRQNDRIDAQKLARLARVDPQLLAPIRHRGAEAPADLAVIRARAELVAARTGLINCARGLAKPMGERLQKCAADQVEEALAQPLSAAAQVVIGPLLKSVEAIREQMGVYDRKIEEIAQRYPEVELLTQVYGVGTLIALTYILTIEDAQRFQHSRDVGAFLGIQPKQRDSGDSQPELGISKTGDRLLRSYLV

SEQ ID NO: 359185 - protein, 459 aa, unidentified
MKKAKSAPQPKAQAALQMVFPNAAGLDIGANEIMVAIPADREGETVRGFGTYTPDLAALADWLKEAGVTHVAMESTGVYWIPIFELLEERGFEVIVVNARHIKHPPGRKSDVMDCQWIQQLHAHGMLRGSFRPEAEMCILRAYLRHRDNLLEDRAKHIQYMEKALLQMNLQLGQVLSDLTGETGLAILHAIVEGEHDPLVLASMRHGNCKHSQEDLIKALTGHYRKEHLFVLKQALEMFESFSQRLRECDQEIERLLEEMQPELPDDFPPLPADPKPNSHSKNAPSYDARALLYPLAGVDLMAIPGMNEILLQKILSEVGLDMSRFPTAKHFCSWLGLAPHNAISGGRILYSHTLKNHNRAGQCFRLAARAVSRGKTVYSEFYRHIRTRSGAKEANVATAHKIARTFYYMLQRGQPFLAPDLQTYLQVQREKDIRRLQARAAKFGFRLQPAEVSLLCYE

SEQ ID NO: 359186 - protein, 382 aa, unidentified
MSQTTHRAESKAVDQSLYLALDLGWTQWHLAFTTEAGQKPRLRTVQARDLSALQEEIRRAKERFDLPVQARVTSCFEAGRDGFWLHRYLLSIGVESRVVDSSSIEVNRRRRQAKTDRLDVIKLVGLLRQHEAKEKRVWSVVRVPSVAAEDFRQLGRELELLKKERTEHSNRIRALLAAQGVDLGSGASALRRSFDLLRLWDGSELPPVLRARLEREQQRLEFVDVQIRELEQQRKEQVKAPLCRAEEQVGKLLQLRAVGIKSAWLFVSEFFSWRQLRNRRQVGSLAGLAPTPYNSGKDLHHEQGISKAGNPRIRAMAIEISWGWLRWQPDSELSQWFWSRFGKAGGRSRKVGIVALARKLLVALWRYLETGVVPAGAQLKPA

SEQ ID NO: 359187 - protein, 362 aa, unidentified
MAQVRSWAGLDVHSAKVVAACMDRESGELRTRRLPGTTSAVVQFCAALPGPTRVAYEAGPTGFALARALAAAGVQCVIAAPGKIERPSSDRVKTDERDAQRLLRLLMIDGLHPVRVPSTQEEALRDLVRAREDVRGDLMRARHRMSKLLLRHDVRYDGSATTWTTHHRAWLSKLDLGERGAQATLMDYLGAIDALIIRRDTLERTIDELVPDSPWADTVARLRCLRGIDTLSAVGLCAEIGDWGRFPRAAHVMSYLGLVPSEHSSGQTRRQGAITKTGSGHGRRLLVEAAWHYRRPPRKGDVLKRRQAGQPAHVLAISWQAQQRLHRTWQRLDHERGKRRTVVAVAVARELAGFCWAAANAD

SEQ ID NO: 359188 - protein, 354 aa, unidentified
MSKINQLCFDGETICIGLDAHKRNWKISGRIGGVDIGSFSQNPDASFLDKHFKKNYPGANLRVVYETGFCGFGTQRSLTAMGIECIVVNAADVPSSDKERKRKDDKRDARKLSRELSEGGLRGIYIPSIEMEYARSLVRQRYRLVQDQTRCKNRIKHLLMFSGIKVDLEREYWSAKYIKALKEVRCQTVQLKQALNLAIEQYNQLRELLKQATLLVREMSHQTGFAGVQKYLQSIDGIGLINGMVVQTEIQDIKRFRSLDSLCDYAGFVPDISSSDERTKVKGITKRCNGFLREAIIESSWMLIRKDPAMLMKYNEYKRRMNKNKAIIRIGKHLLARIRSVWNNRQEYERGLVG

SEQ ID NO: 359189 - protein, 335 aa, unidentified
MEVKTIGLDLAKNIFQVHGVDAEGQVAVTKRLIRSQMLKFFAGLKPCLVGIEACPTAHYWGRQLKSLGHDVRLIPPQYVKPYVRRSKNDAADAAAICEAVARPSMRFVPLKDETQQAALMLHRVRDLLVRQRIQLLNAIRAHAAEFGVIEAKGPQNIVRLLASLEAGGVPDLARQLIGVLTEQLDAADGQIAEVDQRIVSWHKSNETSRRLASIPGVGTMTATAIAATVPDPSVFRGGREFAAWLGLVPRQNSSGGKARLGKISKQGNEHVRRLLIIGAQAALLCSKEVKAKAWVQGMMARRPRMVVVVALANKMARIAWALMARRTQYGVAVAA

SEQ ID NO: 359190 - protein, 352 aa, unidentified
MSRQVTTMSPKLFIGVDIHKKTWKLHFTTGLVEGSGHTFPPDTQKIKKYVDRNYSDYEISIAYEVGCCGYEPARNFIAFGWDTFVVNPADIPKPAKNNFVKTDKIDAKNIAKQLRSGNLRKLIIPEKPREALRCLTRQRTALVRDYRRIKSRIKSLLLYHQIHIPPDMDTPKWPIKFLDWLKVLKFENQNTNFTLTSMINQYGFIDKEIKSVANTIRAYCKKYHKLDYNLLRSIPGIAGLTAAYILAELGDLRRFTSFKKLASYVGFVPGIQQSGDSFYTTGATPRANRHVRNMIVEASWIAIRTDPVMQNYYRSHAGKNSKAVIFKVGRKLLSKLLSVIKTETPYSTGVIS

SEQ ID NO: 359191 - protein, 374 aa, unidentified
MDNTTKAFIGLDVHKETISLAVAEADGKKDLYFFGTIPNDKVIIKKKLEELKKRYSSIEMVYEAGPCGYGLQRFLSKEHYICHITPPSTIPDIKSNHIKNDHRDSKNLARLLRMGELVHIWIPDETHEAIRELVRVRHAARKDVKKAKQRVQSFLLKYERDYSGKAWTNQHRVWLRNQSFDHIALQISFQTYLNSLEQIEERIKQIEEQMKVLCENWKLKEAVKALQALKGVGFIIAISIVAEIGDPARFPHPKNLMAFLGLIPGEHSSGSKTISKGITKTGSIELRSLLYEAAWNYTKTPKVGQFMKLHVPEETPQFAKDISWKAQLRLNRRYKKLVSRGKKSQVAITAVSRELVGFIWSICTQVSLTKPIAA

SEQ ID NO: 359192 - protein, 351 aa, unidentified
MTCKKDVAVVRTIGIDTGKNTLHMIGLNEKGAIVLREKVSRNRIAARLVNIPPCLIGIEAGMATHYMSRDLLALGHEVKQVPPAYAKPFRQGHKNDFRDAHAVAEAVQRPSTRCVPIKTDDQLDLQALHRVRSRLIGDRTAVINQVRGFLLEHGIAVRQGPRSLRQQLPQILATRTDVLSPRMLRIIGDIVDDWRYLDDRIERVTDEIEGLARTDVNCGQLISVPGIGPIIASATVAAVGNGTAFAKGRDFAAWLGLVPKQMSTGDRTILGRITKRGNRYLRMLFVQGARAILLRPKSWAKYSFGPWLTAAARRLHRNILTIALANKLARIALTVLVQGRSYESRIVPAAV

SEQ ID NO: 359193 - protein, 337 aa, unidentified
MKITLIGIDLAKTIFQVCGVNQAGKPVFNRQIKRMKLMTFLAQYPDVTIAMEACSGSNYWGRELQSKGYQVMLIPPQHVKPFVKGNKNDRNDAFAICEAARRPGIHYVQPRTLAQTDTMLAHRILERRIHERTALINQLRGLLNEYGIVIARGKEKLRHELPYILEDAENGLTATGRQYIQLQLEEWQAADEAIALLEKAIKVQARQSEQARRLMGIKGVAEKISTAAEAFIGDGSGYKNGRHFAANLGLIPKEHSSGGKQKLGRITKRGNRYLRKILIQGAWSIIRYADRGDDRLSRWARQLIERRGKHKAAIAVANKLARIIWAISYHQTDYKAA

SEQ ID NO: 359194 - protein, 372 aa, unidentified
MDEGIKFFVGLDAHKDTTSVAACEASREPARFVGTIGPDVRVLLKLLAKAGDPAQVSVVYEAGPTGYGLYRELCRRGYQCEIVAPSLIPRRPGDRIKNDRRDCARLAELSRAGELKPIWVPDEAHEAMRNLWRAREDAVSMRLKARQQLKAFLLRQARRYPGKTSWTRAHERWIADQRFDHGGDRIALAEYQIAVQSAEQRVQRLTIALTEAAQGWRFEPVVAALRALRGIDTVSAIGLVAEIGDIGRFSSARQLMGYLGLVPSEHSSGNSIHRGSITKTGNAHARRLLTEAAWSYRFPARLSRQLRERSASLPDAVRSHAWKAQQRLCSRFARLSSRGVQVNKVCVAVARELAGFVWAIAHQASPAAEALQ

SEQ ID NO: 359195 - protein, 322 aa, unidentified
MNPKNYGGIDVAKKNFVIGIYGQDKTKTGANTPKGHAKAVEYLQKHNVDLVVLESTGGLEVPLANALHAADIRVVIANPQRTHQYAASFSLGKTDHLDAKMLADYAQALDSRKMADDMCYAPPSEEALALEALVKRRSQLVEMRKMEKNRLEQTHASQKASVVAMIKHLGELIAALDKEIDQSNRGGFNGKGEILSEMKGVGRITCATLLSMLPELGKVPHKRAALLVGVVPPPRQSGEKEKKSGCVGGRMVVRNALYMAALAATRSEPKIKAFYEKLMSRGKAFKVALNACMHKLLRILNARMRDYLASLKETEESGLQSA

SEQ ID NO: 359196 - protein, 341 aa, unidentified
MDQYVGLDVSLKQTWISVRQNRKRIWRGKCLSHPRAVADAIRQHAPNAVLVVFETGALATWFHHALTAQGLPAVCIDARHAKAALDTAPNKTDANDADGLALLAEAGFFREVRVKSWEAMPVRTLVGGRAQLIAISNDLSNQIRGIMKTFGLVVPKGGGRSFETNVRALLEGQAALAGSVLPLLEAWRAVRVQTAKLDRQLVAVARKSPACRLLMTVPGVGTITALSYTTMIEDPANFANSRAVGAFVGLTTRSYQSGEVDYDGHISRRGDKHVRALLYEAATVVLTRVRSDSALRRWGLKLKEKVGFKRAAVAVARKLAVILHALWRDGRVFDPAFGAPA

SEQ ID NO: 359197 - protein, 460 aa, unidentified
MSRKRNTRTKSEQQEWSLNLEVVHPNAAGIDIGNESHYVAVAPNRDPNPVRQFACFTEDLHRLADWLKSCGIDTVAMQSTGVYWLPVYETLAEKGLEVYLVNARHTKNLPGRKTDVQECQWLLQLHTFGLLNNSFRPPEQICVLRAYWRHRGEHVAAAGACIQRMQKVLTEMNVQLANVISDISGLTGTAIIQAILNGERDRYKLADLADPRIQATREEIARSLEGNWRKELLFILQQERNLYQTYQQQIAECDTALAAHLQTLDDKVEPGSQPPAAKPSKKAGSNAPTVFDVRGELYRISGTDLTQIDGINIMTAQTIIAELGVDMSRFPTEAHFASFLGLCPDNQITGGKVRHRGTKHVQNRAATALRMAASTLWRSKTYLGAKFRRLRARLGAPKAITAMAHMLARLVYRMLKYGEQYVDKGMQYYEEKYRAHEILSIQKKAKQLGFEVTLSPAAAA

SEQ ID NO: 359198 - protein, 349 aa, unidentified
MIARSDAACFVGIDLHKDTLTACTIVAKDREMAYRKISCVAREKVREFLAGLPRPSVVAIETVGFYRWLWTEAEPIVDQVVLADARGCRALAGRRIKTDREDALNVAELLMTGRLPMAWAPPSNIQRVRNLTRHRVGLSRDHAKTLHRVKSIMNRLNRPGPARMDAAGLQRYLLASVDRLEADDLTVLWQHQRRLVEVEQDRSAIDRRIIELMRADEFRRLRAILESIPGVGLVVSATAIAEIGDFSRFPDGKAIGRYAGLTPTGYASADKNRLGRICKTGSPDLRWALQQAAWTAIRCDAGFKKTWLKIAKTAGKKAAAVAIARKILVLMWTLVRKDEPYKAREPVAA

SEQ ID NO: 359199 - protein, 394 aa, unidentified
MAFKIFRKNCCGLDVHKTWIYACMGITDTNGRTEYKQARFSSFTKGLQELADWIAKYDCNDVCMESTGKFWIPVFNILEKTCWVTLAYPKYTKPQKGNKTDHKDAKWICDLYMCDMVNPSFIPPPDIRQLRDLMRYRSKLTNIMTSEKNRALNCLTVSNLKLDDVFSDVFGKSSRSVIRYILEHPGETFQVAPFIDRRCKHPVEEIQAVIDGTISHQQAVKLRECLQHLDELEVHKTNVEKEILCLVQQYPYQLELLQTVLGFSGNIMTAIALISEIGADMSVFPSAKHLVSWAGCCPRNDQSSKKVKSTRISRAGVYLKPLLVQVAIQPFTANADKLSAAGALEIRCQICDGRFLSMWAALFIFLGCPLPPCPKNLHVHNGRIVILASVAWIF

SEQ ID NO: 359200 - protein, 347 aa, unidentified
MKVLLKQTVGIDVAQNELVVSLGRMDEQISIEVYAYKVFPNTRKGFSSLVSWVNKQTSITTEVRYVMEATGVYHESLAYYLCSIKKQVSIVLPNKISNYARTLDIKTITDKSASQAISRFGLERQLEVWQPPLKIFNDLRQLCREREQLVHERTMLKNQLHAERTSATSSESSVKRTKKRIALIDSQEKEIREEIAILIKGDEVLLEKMNMVSSIPGIGNLTAVTIIAETNGFELIKNKRQLVSYAGLDVREKTSGTSVKSKPRISKRGNRNLRKVMHFPALAAIRTDERFRDIFLRIVSRHGIKMKAIVAIQRKLLELTYILWKSNAYYDSEYERKIISSEVITLP

SEQ ID NO: 359201 - protein, 327 aa, unidentified
MQQESSTSVSSVSQVVVGIDVAKRSLDCFIDPPAQSFTLSNDDAARAGLVARLLPLNVRLVCIEATGRYHRRVAADLIGAGIKVALVNPQRAREFARSIGKLEKSDRIDARTLAAFARAAEHRTLEKPQENQTELNDLVSRRRALVQMRVAESNRLGDEQPKLASRQGKKMLRLIEQQIEDLDRAIAKLIKSNDDWKGKSEIIDSVPGIGATTAHQLVAQLPELGKLNREQIAKLAGVAPLLRDSGTMRGKRTIGGGRESVRAVLYMGAFNAMQHNERFAAYADRLYAAGKQFKVVVTACMRKLLIILNQMIKTNTSWNGQLAFNHP

SEQ ID NO: 359202 - protein, 326 aa, unidentified
MEHELHYIGIDTAKEKLDVDVLRPDGRHRTKKFANTTKGHDELVSWLKGHKIDHAHICIEATGTYMEPVAECLYDAGYIVSVINPALGKAFAQSEGLRNKTDTVDARMLAEFCRQKRPAAWEAPHPLERALRALVVRHQALTDMHTQELNRTETAREAQRPSIDAHLLWLEAELKRLEKQIKDLTDDDPDMKHRRKLLESIPGIGEKTSAVLLAYIGLKDRFAHARQFAAFAGLTPRRYESGSSVRGASRMSKAGHVSLRRALYMPAMVATSKTEWGRAFRDRLAANGKKGKVILGAMMRKLAQVAYGVLKSGVPFDASRHNPVAA

SEQ ID NO: 359203 - protein, 351 aa, unidentified
MMIIGVDYHPSFQAIAFFVEETGECGEQELNHSDGQAEKFYRDLKQRGISVRIGMEATGYSRWFERLLAELGFELWIGDPAEIKTKRVKKQKTDRKDAQLLLRLMMEKNFPQIWVPSPENRDLRQLLWHRHRLVQMRTRIMNQLQALAMNEGYRWKKKLFSEQGRAQLEKLSLAPWASRRRQELLELLDRMNPTIEELTAAVEREARKRAEVQRLMTHPGVGPLTALAYVLIIGTPTRFERGKQIGTYVGMIPSEDSSARKQRLGHISKQGNSLLRFLLVEAAQAAARCNPEWRRRYIHLAMRRHRSIAKVAMGRRLGVRLYWMWRNSCEYSPKLEFSSYAGKLGTGHGVK

SEQ ID NO: 359204 - protein, 412 aa, unidentified
MTAIDQFAAHVGLDWADKKHDVCVQFKNGERTFHVIEHTAEALDAWLNALHKQVKGKIAIALELKKGPVVYALQKYPFITVFPVHALSLARYRQAFSPSGAKDDPQDAELALELMLRYPQKIKAIEPDNADIRLLQQLVEQRRQLVEDKRRFVNRIINTLKQYYPQPLEWFSHRGSLLLCELIMRWPSLQQLKRARRDTIRNFLNAKGGRAIALTEQRVASIDNAIPLTTDPSVIEANALMATALATQIKVVSEIIKTYDERIETLFDTLPDAGLFKSLPGMGPCMGPRMLAALGDNRDRFTSAEEIQNYAGIAPVTERSGQKSWVHWRWQCAKFVRQTFVEWAAKTVNSSYWAKLYYQGQREKGKSHQSAIRALAFKWLRIIYRCWKTRTRYDEAKYLLALEERKSPLLMP

SEQ ID NO: 359205 - protein, 443 aa, unidentified
MAERTRARSLTIAHPNAAGIDVAAGSHFVAVPAERDDAPVREFASFTEDLERLAAWLTQCGVDVVAMESTGIYWIPLYELLESKGFTVHLVNARHVKNVSGRKSDVLDCQWLQQLMSFGLLSGAFRPAEQVCQLRALSRQREMLVQGQTRHVQHVQKALAQMNVQLDQVISDVMGLTGQRIVRAILAGERDPAVLAKLRHVRIHADEATIAKSLVGTWRAEHLFVLAQAVALYDAYQAQLEACDAELARVLATLAITAAKPPEGARRRRGTRADLDLRTALYRACGVDLTRIDGIDVGTAMKVLAEVGPDLSRFRSAKHFASWLGLCPGTKISGGKVLSGASKRIPNRLAQALRQAATTLKNSRSSLGAYYRRLCARLDKAKAIRATAHKLARLIYALLTRGHDYVDHGEAYYEERYRERVLFHLKRKAQAMGFALTPVETPA

SEQ ID NO: 359206 - protein, 478 aa, unidentified
MKADRRWHTRKEKKEWARRLQSNDPGLDVIHPQAAGIDVGNASHYVAVRPDRDEEPVRQFECFTADLHRLADWLKSCGVRTVAMQSTGVYWIPLYDILEERGFEVYLVNARHTKNLPGRKSDVQECQWLLKLHTYGLLNNSFQPASQLRVLRTYWRQRAEHVQAAASCIQRMQKALTQMNVQLANVISDLGGLTGQLIVRAIVRGERDPQKLAALRDRRIQASPEEVAKSLEGNWRPELLFLVKQEVDTYDTYQKRIAECDEQLQQQLASLASVAPGVATPPVTQLQGDEQPKKSKAKRRKLAKNAPQFNLQQELQRVAGVDLTRIDSIDVMVAQTILAEVGLDMGRWETEGNFVSWLGLCPDNRITGNKVVGRGTRHVVNRAATSLRMAANALLRSQTYLGAQYRGLRTKLGAPKAITAMAHRIARLVYRMLKYGQRYVDKGAEYYEQRFRNQQLQFLRKKAAQLGFQLTEHEARTA

SEQ ID NO: 359207 - protein, 421 aa, unidentified
METENIDYAAWIGLDWGSEKHAICLKPADSRAVEHYALEQKPEALHSWFMDLIARFDGRNLALAIEQTRGAVIHFLLGLASVHIFTINPKSLKNYRDAIHPSGAKDDPSDAKLLLQFLTLHQHSLKPWIPDKPEVRLLLRLVEFRRKMVGKRVRLTNELMQLLKEYFPAALDCAGHLDKVMACDFLSKWPTLEKLKKSHPETIRKFYQEHGSRRRNVIENRLNQIRSALPLTTDAPVIEPSVFLVQSSAPQLRSVIDGIAQFDQRIGEIFEKNPDAEIFSSFPGAGAALAPRLLAVLGSDRSRFGSSQEVAEYAGIAPVTERSGKKIWVHRRFACARFVKQSFHEFSAQSILFCDWARCYYDQKRKEGKSHHSAIRALAYRWIRIIYRCWKDRIPYEEDKYMKVLRQRKPDWLQSSPLNKP

SEQ ID NO: 359208 - protein, 378 aa, unidentified
MKKGRSDNGKVVESSDTKTNPLKEHPMKPLKYIGMDVHKAMTVIAVLDSAGKVLAEAIIETKASTIVDFIKSQRGTVHVAFEEGTQAAWLYDLIQPRVASVIVCDPRKIVRRGNKADKLDAKRLAELLRTGALRPVYHGEKSTRAVKELALSYVSVVRDGTRIKNRLKALFRGRGIDCRGTAVYSPDERSDWLAKLDSAAVCARAARLWQELDLVERLSEEAAKDLVAEARKHAAIKILQSIPGIGPVRAAVILGVAGTPHRFRTKRQFWGYCGLAVVTVTTAEYELVNGRVCRSKKRPLLRGLNNNYNRALKGVFKSAAKTVAAGEWKSRFDAMVADGTPESLARLTLARKIASITLALWKKGERYDQRKLKTMRAA

SEQ ID NO: 359209 - protein, 337 aa, unidentified
MYYIGLDIHKKTISYCVKDAAGCVHREGKIGSSRRELDAWIRTLPQPRMMAMEATIFTGWIYDYLLPHAEKLKVAHPLMLRAIAAAKKKNDKIDAAKIADCLRCDFLPECHIAPTEIRDRRRVLRYRNLVVKQMVQMKNRVSGLLLETGVNYNKRQLHKVGYFGELMSTNAEINDAVRPLLNLSRGMIRRSSKLEYDLVSSLERDPLLRERLRRLRTVPGVGSITALTWALEIGDYTRFSSNRQAISYCGLCADEKSSADKVMRMPLSKQRNKHIQRVLVEAAKLAPRLSPELAMIRARELERGNPNRATLAVARKMVCYMLAVERRQQDFVQTAAA

SEQ ID NO: 359210 - protein, 424 aa, unidentified
MKSASNTAIQASRTALSETAPHDVTAGIDWARDDHAVCIVDGHGRQVARTTVEHTAAGLRDLLGFLGRHGACEVAIERPDGPVIDTLLGAELTVVVVSPNQVKNLRGRYGSAGNKDDRFDAYVLADTLRTDRARLRPLVPDTEATVALRRACRARKDLVSHRIAAANQLRAHLRNVFPGAVGLFNDLDSAISLAFVTRFDTQDRADWLTPKRLGDWLAKQGYSGKVDPHVLHQRLFDAPRGATGDHATDQAHITAALVALLTTLSTQIKALSAQISHQLDTHTDQHIFTSLPRSGRVRAARLLAEIGDSRARFPTPESLTCLAGAAPSTRQSGKARIVGFRWSCDKQLRDAVTDFAADTRLVNPWAADLYDRARARGHDHAHPVRILARAWLHIIWHCWQDNAPYDPANHRALQRFLTQQNQAA

SEQ ID NO: 359211 - protein, 393 aa, unidentified
MVNNGLIGVAGGGEASGAKPHAKRSVASRADTSGRREIGRFQVYKTVHKRDPRRHRGTSPNSRLSRRQTASSYLQVREKTMSESIYVGIDVAKDSFDLATSPNILKTSLPNTSQGHQQLCKTLKNHTIALIVLEATGGYERQIVAELLSESLPVVVVNPRQVRDFAKGMGQLAKTDPIDAGVLAQFAQIVQPSPKTHSTPQTVELTEMVRRRRQLNDLRTQESNRLSTICNKQVKKSIHKMIKLLDNQIAQIDKLIREHIDANDNFTTKDRIIQSVPGVGPQTSAMLIANLPELGSLNRQQIAALVGLAPWDRSSGKYIGKAHIFGGRKDVRSALYMAAFSAYRFNPVIRDLYHRLTEKGKPYKVALTACMRKLLIILNTMIRNQALWNPKIS

SEQ ID NO: 359212 - protein, 346 aa, unidentified
MTHSTTVGVDLAKNVIQVSVVSARGKERSNRSLTRKKFAEFLGKQKPALVAFEACATSHYWARASERHGHVARIIPAKFVAPFRQGHKTDSNDALAVAEAARRPSIKEAPMKTVEQQGLQAIHRSRQLLIQECTALSNHLRGLLMEFGVVIPQGFASLLRAVPEVLEDGENELPDLYRPTLHRLYTRLLELREHIEAMTKEVEVLVQQHPICSRLTALEGVGPIGALLLYATLGSGNAFSGSREFAAYLGLAPRQYSSGGKTNIVGLSKKIGNCRLRSILILGARAYTYRLKEPKSVKDRWLKDAIERNGHSRAAIALANKNVRTAWAMVTQGTEYQRRGQLKVAA

SEQ ID NO: 359213 - protein, 411 aa, unidentified
MDKIYDKCCGIDVHKKLIVACFRCGKQQEVREFGATTRELLELADWLKEGGCEMVAMESTASYWKPLYNILESSDLNAMVVNARHMKAVPGRKTDVKDAEWIADLLQHGLLQPSYIPDKDQRELRELVRYRKSLVGERTRELNRLQKMLEGANIKLSGTVSDINGKSARSILEYLLAGESIDESKYDEMYEQKIIAHNLKATKEQIMDDLNGVMSPLQRRMMKELLVHLDELNVHIKNLNDEIDNFMKPEEKQASQAIQDVTGIGNTSAQAIISVIGSDMSRFPTDRHISSWAGLCPGDNESAKKRKSGKTRKGNSLLRTTLITCAHAAVKNKKSYFYAQYMRISAHRGPKRAYVAVAHSMLISIYHILKAGVVFKDLGANYYNQFNKERKINAYLKKLKALGWEAPVVAA

SEQ ID NO: 359214 - protein, 369 aa, unidentified
MTFFIGVDLHKTQFTVHVRTEDKIETLDEIKQYPTTEAGYEIFLERLKTFKEIGANVKVGVESTGNTRFFKNQVEKVGAEVTVINTLKFKVINESTKKTDKHDASTISEFLSKDMLPESYLCGKETENIRRLLKSRERLVRSIVGQKNEVHALLVSLGISDELRSLQSKKGRQKVLDTLESNNDYVLEAQSVKLMIQIIDQMSESVKVIEKQITEITKDDEMVNRLLTIRGCGKITAWTIRAYTEDISRFANAKKYAAFCGLVPWVQDSNETIRHGKITKRGPQELRTSFVQLVLGIRRCKDTSTWRMMQRYEYMKKNKGSGKSIIATARKMAEIVWSMLNDKQDFDSNKMLGNYKPMNLVDQALAVMN

SEQ ID NO: 359215 - protein, 370 aa, unidentified
MGNRSMFVGLDVHKETIDVSIADGERQGEVRHYGVIASDLEPLDKVVRALRAPSRTLHFVYEAGPCGFGIYRHLTGRGEDCVVVSPSMIPKRSGDRVKTDRRDSQMLARLHRAGELRAIYVPDDTDEAMRDLVRAREDAVSVGTQAKYRLKAFLLRQGRRYPGREGWTLPYRRWLTDLSFPSAAQHIALQEYRDAIAETEQRIDRLTEQLRQLAPTWRWAPVVAALQALRGVSFLTAVALIAELGDLTRFRHPRELMAYLGLVPSEHSSGPSVRRGAITKAGNPHVRRLLAESAWAYQGIPRIGRQHAYRQEALPKAVCDIAWKAQLRLTTRFRRLVARGKAKPKVATAIARELAGFVWAIAREVSPTPR

SEQ ID NO: 359216 - protein, 348 aa, unidentified
MAHFVGLDVSVKETSVCIVDEAGTVLLEQKVTTEPADIIAFLSSLGVTYGRIGIEAGPLSQWLVSALMAAELPVICVETRHMKALLTAQQINKTDRNDARGIAQMMRVGLFKPVHVKTLVAQEQRMLLTSRKLLQRKLLDLESELRGTLRNFGLKVGPVSGSRYEARVRELVAGFPGLAAIAEPLLNVRRVMRQQFAVLHKMLLDTVRGDRVCRRLMTAPGVGAVVALTYRATIDQPQRFVHSRSVGAHVGLTPKRYQSGEVDYDGRVSKCGDALLRTMLYEAAHSLLIQSRKWSWLKAWGMRVAQRRGIRRAIVAVARRLAVVLHRMWVDGSEFRWSKNSASVPAVA

SEQ ID NO: 359217 - protein, 340 aa, unidentified
MALYGGIDLHANNSVVVLLNEQDQVIYQKRLPNHLPAILEPLRLHHSEIEGLVVESTYNWYWLVDGLMEAGYRVHLANPAAMQQYSGLKYSDDHSDARWLAHLLRLAVLPEGYIYPKAERAVRDLLRKRAHLVRQHTANVLSVQNIMARNTGARFSVKRMQELTKQELQSLLTEEPQVLAVTSSLAVLDCLKHQIKTLEQTVHTRLNHTPSYEQLLTVAGIGTILAQTIALETGDIRRFPSVGNYASYCRCVDSNKISNGKRKGTGNVKNGNPYLAWAYMEAAQFALRFQPAAQRFYQRKLAKSRNNTVLARKAVAHKLSRACYYIMRDLVPFEATKAFG

SEQ ID NO: 359218 - protein, 348 aa, unidentified
MALTIVEDTRAVTGGVDTHADMHVAAALDPVGGLLGVGEFPATAAGYARLLGWLGGFGTVCLVGIEGTGSYGAGLARHVTAAGIRVVEVDRSDRQDRRRQGKSDPLDAVSAARAAQSGRARGEPKGRDGAVEAIRALMVAKRSARSERTQTINQARALIVTGPDDLRARFARHTAAGLVSELAALRPRPGATVGYATRIALRELGRRAEFLDGQLGRLDELIVPLVTARAPALLALHGVGPDTAALLLIAAGDHPHRLRSEAAWAHLCAVAPIPASSGKRTRHRLNPGGNREANHALWRIVITRMSSHAPTRAYVERRTKEGLSKKEIIRCLKRYAARQVYRHLRPAG

SEQ ID NO: 359219 - protein, 358 aa, unidentified
MEHYVGLDVSLKLTAICIVDRTGKIEREGVVASDPEAIAVFIKSHAPHVARIGLETGPTSTWLWTELNKMGLPVICIDARHAKAALKLQINKSDRNDAVGIARIMQCGWYKEVRVKDLDSHAIKALLVSRALLVKIKRDLENQIRGLLKNLGLVIGQAKMNMFSVRVAELAEARPELAAAVEPLLKAREAVGRQIADLDRKVMRLARNDAQVRRFMTAPGVGPITALCFLATIDDPTRFKRSRSVGAYAGLTTRRYASGEIDWTGRISKCGDKMLRSYLYEAANVLLTRVAKWSALKAGESGLRSEAGYAKPRLPWLENLPSFCIACGSKALNSTGHQRRLPINLHSRTTEIPPISGN

SEQ ID NO: 359220 - protein, 372 aa, unidentified
MIVIGADTHKQSHTVAAVDATTGRLIDDNTVRARRRSFDDLLVWARGVDAERVWALEDCRHVSGALERFLLRRGEQVVRVAPKLAAGARTTARERGKSDVIDAVSIARAALREGLATLPIAQLAGPELEVRLLVDHRERLVAQRTQLINDLRWHLHDLWPELEIPARGLTTSRWQDRLAGRLARAEQSARVRIARDELRRIRELTRAIDTLQRELTELVGALAPQLLAERGCGVLTAAKLIGEIAGIGRFSSDAKLARLSGSAPIPASSGHTIRHRLDRGGNRQLNCALHRLAITKGRLDPDTAAYLARKQAEGKSRREALRCLKRHLARRIWRLLQPPANPDDPAPSPPPRRPPRTITVHCNTPYNRFALT

SEQ ID NO: 359221 - protein, 407 aa, unidentified
MEVLYPRCAGLDVHKDTVVACVRCVTEPQRQEVRSFGTTTRELFALGDWLESHGCTHVGMEATGVYWKPIWHLLEGRFELVLANAQHIRNVPGRKTDVNDAMWIADLLAHGLIRSSFVPPTRIQELRDVTRTRKQIVREISQHTLRIQKTLEDANVKVASVLSNVIGTSGRAMLHAIIAGQEDPERLADLAVGTARRKKTELVEALRGRVTAHHRGMLKLHLGLIDTLQDTLDELDAMAGKLLAPILERAALLTTMPGISDIAGHVVVAEIGVEMSRFPTSAHLVSWAGLCPRNDESAGKRRSTRVRKSGTWLKTTLVTAAWAAVRKKDSYLRAQFLRIKSRRGPKKAILAVAASMLTACYYMLRDGVPYRDLGPLHFDHRDKTKTIRRLVRRLADLGCKVEVQHAA

SEQ ID NO: 359222 - protein, 309 aa, unidentified
MFSCAGIDVSKDSLEIRINPQDIGASYPNTTTEFSNLIDWLTQFEVIRVLLEATGGYERAVMKALQSAGFEVFRINPRRAKCFASAMGYHAKTDPIDARLLAEFATVIKDVSTRISDAKQDNLRALVQQRENFVQQQSDDRRRIKTASADLIKPLLQSHIDYLDQAIKSIEKLICQSAKDLDSDKIARLCSVKGIGLVTAASLMAYLPELGEVGRHEIAALAGIAPYNDDSGDREGPRHISGGRFAVRRAMYMACWTVILRQPEFKARYDALRLRGKRAKVALIACMRVLLIRLNAMIRDKTEWREQAA

SEQ ID NO: 359223 - protein, 433 aa, unidentified
MPSLPIILKNLLVQKGVPMALKIVYKICCGIDVHKTFVVACIATTNNQGVTTYESHRFSTYTKGLKELLQWLLDRNCKDICMESTGKYWIPIYNVLEKQCTIVLAHPKYVKAIRGKKTDKKDAKWIADLFKHDLVAGSFIPPADIRQLRDLMRYRYKLTCFSSSEKNRLQNCLTVSNIQLGNIVSDTFGKSSQKILDKILENPLDSSFDIEPLIHGSMKKKLPELELAVDGYITPEQAGKLKVIKGHFEDLESRKAELEQLILALARPYQQKLDIILTAPSIKNPFTAIGIISEIGVNMEAFPSAKHLCSWAGLTPTNNESAGKKKSVRVSKAGCYIKPLLVQCANAVVTSKKHPEIRNRYLRIKKRRGHKKAIIAIARMLLTALYHMLKNEENYNAELYRKSDILPTGREITIEQAIIMAQFQGYKIKSVTE

SEQ ID NO: 359224 - protein, 391 aa, unidentified
MPQANDLSRCLTALDQDSTLIAVIEMSQSSWLVAGMVPGIERHPAKKLEPNEIDLLRLLQRWRAEAERSGRKISRIALAYEAGRDGVWLARWLRARDVDAYVLHPNSIAVSREHRRAKTDRLDTALLKRAFLGWLRGEPDHCQMIAIPSLEEEDAKRPGREREALVGERTRIINRFKSTLAWLGIRGFKPHLRTAAARLETLRTPEGVALPDNTLAELRREMTRLQLIAAQIREIETARLERLQQQPSAGAHRMIRVLAQVRGVGIETADMLATEAFSRPLRDQRAVARYGGLTGSPDESGSRRREKGLARAGNARVRRGMIQLAWRFLIFQKDSALARWYWQRTVAARGPARKTMIVALARKLLIGLWRLATIGEIPEGVVLRPAASAGG

SEQ ID NO: 359225 - protein, 446 aa, unidentified
MERPTRFIGMDVHKETIVVAVTAAGDVGKATAYGTIPNTAVSLEKLVKRLRQAGGGSLKFCYEAGPCGYGVHRSLTRLGEDCMVVAPSMIPRKSGDRQKNDKRDANGLAVLHRGGLLTAVWVPDAAHEAMRDLIRSRLAAVRAVRTARQQLSAFLLRHERIYPNSGKAWTKAHRGWLADQSFTQPAQQIVLEESIAAVRLGEHRRDRVDGFLRAQIPTWSLFPLVRNLGALRGLDTIAGAGLAAAIGDPSRFASAPDFMAYLGLVPAEHSSGPRRRMDAITKSGDVHARTLLIEAAHSYRFPARIARRKLAAVDAVPEAVREIAWKAQTRLCQRYRHMVAKNKPTPVIVTAIARELAGFVWSIACITSDPPAKTSADTTTSDKVCPTKSASRSRVPRRQPLKAMGCPEPTCAPVELRHVTENRPCPVGRKGEHSGFAHATVGSCIG

SEQ ID NO: 359226 - protein, 402 aa, unidentified
MQVDDIDVFIGIDVGKSEHWATALTTAGECLHDRPLPNDEARLREVYEHLGEHGRLLVVVDQPATIGALAVAVAQDMGITVGYLPGLSMRRIADLSPGSAKTDQRDAAVIASAARTMPHTLRSITSSDEDAAALSMLTGFDLNLARQVNQVSNRIRGLYTQIHPALEGVLGPWLEHDSVLEVIATWPTPAALRKAGRARIDAKLKANGCRRHAAWAQAIVEALSKQTVTVAGTDAAGVVLPHLARQLIALHTQRADIAAQVEALVEAHPLYPVLTSMPGVGVRTAAVFLAGTLGKTFTTGAHLASYAGLAPVTRRSGSSIRGEHVSHGGNKRLKRAMFLSAFASLRTDPVSRAYYERKRAQGKRHNQAILALAHRRILTLHAMIRNGTLYNPQPAQPLTTTA

SEQ ID NO: 359227 - protein, 348 aa, unidentified
MRVYNTQHLHYCGVDLHARSLFVNILNAKGKAVFERDLPAEPDAFLDAVKPFRKNLVVGCECMFAWYWLADLCEDKRIPFVLGHALAMKAIHGGKAKNDRLDAAKIAGLLKGGFFPMAYVYPKAKRETRDLLRRRSFFVRQRAQLIAHIQNTNSQYNLPPFDKKLTYRGNRSAAIAERFEHPSTKLSITADLALIENYDTQIAALETHLVKSAKVDDPATFQFLRTVPGIGPILGLVMLYEIDTIRRFAEVGNFLSYARLVACTHESAGKVKGVGGRKIGNAHLKWAFSEAASLMLRSFPAAKSWMQRQSKKRGAKKAHAILEAKIGRTVYHLWRKQTAFDGKKFLAS

SEQ ID NO: 359228 - protein, 421 aa, unidentified
MLAYGSPQVGLNAIHLEEHASRCHFDPISTTYAHQQVGCNRKELGRIHRFISVNEMVRRLISSCSLSDRVGRFKEDHFMQIHSVGIDLGKTTFHLVALSATGTVLLRKKFTQKQLITFTANLQTPLIGMEACSGAHFLGRTLREQGHDVRLIPAQFVKPFVKSNKNDFLDAEAIAEAVDRQNMRFVPIKTDDQLDLQALHRVRDRLIARRTSVINQLRAFLLERGMTFARTPGKLRLAMPDILENADANLTPRMRNLVGLLWSEWKELEQQIATINGEVEQIASSDAACVRLRQIPGIGPLIATAIVAAIGNGSAFRKGREFASWLGLVPRQHSTGGKARLLGISKRGNSYLRKILIHGARSAVVRMKRERAPLGAWLDALQTRAPLNVVVTATANKLARIAWAVLSTGNDYRAHPNSTAA

SEQ ID NO: 359229 - protein, 423 aa, unidentified
MTRPQLTPPAGVLVAIDVAKARNEVLIEVPGSGRRRRLSVLNTRAEHDRLIAILSDLGQPVTCGFEATGNYHRPIAWRLLQAGFAVRLISSVALARTREALHNGWDKNDPKDAQVMLHMIRIGASQVYHDPLAAGINDVQELSKTHDAVSRAKTEVLHRILTHYLPLYFPEIARFAGNSRSDWFLALIERFPTPATITALDREAFSAAAWPLIGRKVSKARLINDIYETASASTALPVPESSAAITMFRMVIAQGRSLIHQRDEIERLAHARLADDVDYQLLRNIPGIGPINALTILAEAGDLRRFNHHRQFLKFCGLDLATCQSGTFRGRTKLSKYGNARLRRTFWMAAQVAARQRDNSFRDKLGRYVAGHADDADRRRKAMTALTAKMARVAHAVIKTGTEYRPFLERSDARWKDPSLQVP

SEQ ID NO: 359230 - protein, 371 aa, unidentified
MKHNSIFVGMDVHKNSIDIAIAEKGRAGQLRHFGTIEGSLTALDKVVRKLVSNGQRPCFVYEAGPCGYQIYRHLSAKGFDCAVVAPSLVPRQSGNRIKNDRRDCLMLARLHRAGELTTVCVPHDEDEALRDLSRAREDAKIDEKRAKQRLLAFLLRSGQRYSGRAPWSQAHRRWLADIKMPHHCQQIVLQEYIETLTHCSQRLQRLTDQIRQLVPQWRLFPVVQALQSLRGVSLIVAATTVAEIGDFKRFQNPQQLMSYLGLVPSEHSSGDKTRRGSITKTGNTHVRRMLVEAAWAYRFRARISRALLQRQEGLPQSIRDIAWSAQVRLCARYRRLWARGKIKAVVTTAIARELCGFIWAIATAVDGPTAS

SEQ ID NO: 359231 - protein, 437 aa, unidentified
MKSDDCLYVGIDFSKDRNDIALLPANGPPITKHKAFPNSYTGYLDIKEWLQKSLVERNLCKIQIGGEATSYYWLPLYIQFLTDPDWLAYQTKVYLLNATTVHWFKKSKPPNNKSDFVDPAEIGDFMRERNVVTWSYSPKWLALRFYTRLRMHLVNSRTREKNLLSLYLFLLRPTYTSQKPFADYLGSTSQELLLHPEVLESLSSLSLEELTDKLDEISKHNLPDPSKNASNLQKVIADTFPQDPILVSAYNNLISILIKTINSLKERIAEVEAFITSLVSSGEYPEIELLQTIPGVGFVLASGIAAEIGDIFRFTQTPIYDEKREVWRLRHNREVQSAVAKYAGLWWPENSSGKFRADDLHMSAKGNPYLRYYVLEAADGMRHSIPTYREYYSKKFDQATINKHKRALVLTGSQCLELFVSLLRRKEIYRPREVKPS

SEQ ID NO: 359232 - protein, 466 aa, unidentified
MENNYILYVGMDVSKGKADAAILKVSDRRSVKPKFLRKKLSFKFVKSEVASFLETVRNYSDVNCTSICFALEVTGIYSTNVYDYIKANLYENESIKFLNTDFVNQWRIAHNIAKSDPLDAQTISTIIGTDSDVQYVNDNVFENKNGYQDLKALVHRHYQIKKIYSQEINRLIAQCDCLFPELQYVFEPKSAAFIAVLSSYPTTHDIINASRVEVFDVIYEATKHRCSMDKVDKLFELCQDTLVPDDISSYGKSIILDLVENIKNIKGQLKSIERYIKDVASLNPAYKLLLTITGCGPITAATVIAETGNIRRFKNADCFVSYSGTSPRNKRSGTSVETMGKISKKGSRYLRHAIYMIAEFARRHNPVLKHQFERIKNGNKKRHKLANIAIANKIARYIYSIMKNKSSFVILHDHIMRLPEETRDTFFNSISLDFPKNTRKQIYQYSDINGEVHKFVYTKLEETMII

SEQ ID NO: 359233 - protein, 448 aa, unidentified
MSNGNGVSRGDRNRNARLSRLRELVPACNAIVGIDLADNKQMVVVTDHDSKVLARRTFRCRAWDLGSALDWAGQQANEAGFAGVTVACEPTGHRWRVLGQLATDRGMAFVCVQTLLTSWARRSEDLTFDKTDEKDAVLIARLTAQLRCYIPEPVDETWGRLRHLGARRERLLAEAVSEVQQIRDLLECVWPASLDTAKQPFRSRTWLAGVSVILARTDGDPARLRRLGPARFEAAVRREVVARQGKKPCLRIVRLLFAAATDTRGVTAHRPGALERVQLLLDDFHDTGRRLSEAESRMVSVLDELQLTELVCSIVGLSALGGATILAETGDLTRFASARAVVKHAGLAPREKSSGTYTGRTKLTGQGRPGLRAAAWRAIWGAQKANPVYAAKFTHLTTRTDNKLNRGQAHAALAAALLRQLHAVVTTGQKWDAAIAAGRQGEVIQPAA

SEQ ID NO: 359234 - protein, 345 aa, unidentified
MPIVGGLDIHRKQITFDYVDTVTGEVRRGQIAPADRVHLRAWLARFAGRDDVAFALEGCAGWRYVAEELAAAGITAHLAEPADTAFARGRKRHAKTDKTDARHLRMLLAEGRLPECWIPPARILECRALLELYNDLRRERTAWAQRIHAVLFHQGAPQLGEGALRTEQGVAGLRAAAAAHLSPAGQLQVATALEVIDGLEARLHAVRHQLLDAARHLAGAKVLAARLYGVGPVTGLAITCWLAGAGRFSSSRQAVRFAGLDITVSSSDRKGPPGKLSRQGPPVLRWAVYEAGKAHARTSAPDHRYYAAVKDRKNSKRACLSEARKILRQAHHILAELGDDALAAA

SEQ ID NO: 359235 - protein, 529 aa, unidentified
MAYKARTSHRERCQSSTRNSRKRQSLQKPNGVISPRVRKVGGERFAIVCVDPAKHRSEWMMADYFGNLLIQPRTLEHQGRFFKSAVELIRQAQELHNIEDMIVVVERTGNYHLPPKRAFASAGFETRVVHPFATKQFRMPADPGNKTDETDLYAQHRAAVAGFGLCEYELESPYRELQLRARHRRNLVERAAAIACQIREHLHLAMPGYAKLFDRLFESPTALAIAHHCDSPARLLQLGQAGVSDHLRKNKIRHQVRSIVKVLTWAAQVADDNIQDGPMHHAIWTDLHELYQHFQRKISILEQELAGDLVQTPYVRLLAIPGINVVSAADLAGEMGPMTRYANSNAITGRAGLYPSRHQSDQTDHDSGPIIRQANRRLRCVLMRIADNLACHCAYYRGQADVDQKRGVDKRASRVKIAKRFTRLALACVAGDQPMRHPCFQQAGSILEKLRQFHRLHETSLEQLLAELETAVEQLPGSTRRREAEMVAGLLAQQTTRQRGTSAIGDVLPAVLARLNLKTTKESENRDRS

SEQ ID NO: 359236 - protein, 347 aa, unidentified
MQFTATLPVIGMDIAKHVFQLHVVDAETGEVTRHKLRRDRVTTFFANRQKSLVAMEACGGAHHWARTLQTLGHEVKLLPAKHVRAFVLRDKTDARDAQAIWVAAQQPHIKAVPVKNEQQQACLTLHRMRAQLMKVRIMQTNALRGLLYEFGIVLPEGHRALLKLVQDALAKAQEQRLPEVVVVSIQDQLRRIDSLQCDIDQLDKRLASMVKQNQHMLALQAIPGIGPLTATALVSTATDLSSFESGRQFAAWLGLTPRQTGTGGKTRQLGISKRGDPYVRTMLMHGARAVIARSQRSGWIERLLLRRPYSVVVAALANKLARTVWAVLVKGKAFDQVKWNPVDLAAA

SEQ ID NO: 359237 - protein, 416 aa, unidentified
MSAIEWWIGFDWASKTHRACVLDGRGQVIGERDVDHAGEGLAAFCDWLIKQTASVPERIAVAIETPHGPVVETLLERGFAVYALNPKQLDRFRDRFTVAGAKDDSRDARVLADSLRTDTAAFRRLAVEDPLIIQLREWTRLREDLIQECNRLTNRLREQLWRYYPQALELTDDLGAAWFLALWQQAPTPAHAARLRPSSVQKLLQAHRIRRLDAAEVLGILRRKPLAVAPGAAEAARAHIRTLLPRLQLVNQQLHSAERQLDELCGQIQQQTESEPGQLLEQRDVAILRSCPGNGRIVLATLLAEAAEPLRCRDYYALRSLCGVAPVTRRSGKSCRVLRRHACNERLRNAAYHWARTAIQHDPVSRRRYRELRLHGHSHGRALRTIADRLLYVLCTLLQRQTLFDRHHISPCPQAA

SEQ ID NO: 359238 - protein, 351 aa, unidentified
MSRTTSAVAVSTIGIDTGKNTLHLIGLDERGTIVLREKLPRGRIGGRLANVPPCLIGIEAGMGTHYVARELMSLGHDVRQVPPAYAKPFRQTHKNDFRDAYAIAEAVRRPSTRCVPVKTDDQLDLQALHRVRSRLVGQRTAVINQIRGFFLERGIAVRQGLRFLRQQLPEILAKRIDVLSPRMIRMVEDLSGDWRHLDERIEQVTDEIEVLARESESCRQLMTVPGIGPLIASAMVAAIANGAAFTKGRDFAAWLGLVPRQMSTGDRTILGRISKRGNRYLRTLFMQGARVILLRPANWTKHSFGPWLTTAATRLHHNVLATALANKLARIAWTVLAQRRNYETRVIAEAA

SEQ ID NO: 359239 - protein, 344 aa, unidentified
MKITTLGIDLAKNVFQLHGVNEFGKPVIKKQLKREQMAAFLVNLPPCLIGMEACGSAHYWARKLQGFGHTVKLIAPQFVKPYVKTNKNDAADAEAICEAVTRPNMRFVPIKNVEQQSVLALHTVRQGFVKARTAQANQIRGLLSEFGLIIPQGIGHIANRVPELLEDASNELPGAFRLLIQRLLDHLKGLDDQVKELEAQIVKWHHQSELSSKLAGVPGIGPITASALVATIGDAKNFDNGRQVAAWLGLVPRQHSSGGKQNLLGISKRGDIYLRTLLIHGARSVIHWESRKPDSCSWVSGVLKRRNKNVAAVALANKNARIVWALLVHDREFRLDYVCAKAAT

SEQ ID NO: 359240 - protein, 348 aa, unidentified
MRFYPNQHKYYCGIDLHARSMYICILDQAGNTILHRNIRSNPELFLKVVDPYLEDMVVAVECLFTWYWIADFCALHNIPFVLGHALYMKAIHGGKTKNDRIDSHKIALLLRGGMLPMAYVYPPKMRATRDLLRRRNHLMRKRAELLVHIQNTNFQYNLPEFGKKIAYKTNRLGIETRFDDPSVRKNVQVDMALLDTYDTLLTNLELYIVKHAKEHDVHTFYRLRSIPGVGKILALVMLYEIHDINRFPRVQDFVSYARLVTPTKESAGKPAGKPNKKIGNVHLKWAFSEAACLILRESERVKSYMQKLERKHGKAKALSVLAHKLGRAVYYMLRNNQPFDMDKFFNKS

SEQ ID NO: 359241 - protein, 335 aa, unidentified
MIGLDIAKTVFEVHGRNAAGEVVLRRTVKRSQVEKLFGNLPKAVIGLEACGSAHHWARVLGKLGHEARLMPPAYVKPYVKRNKSDASDASACWEAVGRPDMRFVPVKTVDQQAALSLHRSRDLLVRQRTQVSNALRALLAEFGIVAGKGKAGLAHLIEQLRAGKLELPDDAIFSATTLADHHAALQAADAALKRRIQTQARADKTAGLLQTAPGVGPLIAHATRASLPDPSRFKSGRDFAASLGLTPSNNGTGGKTWTGHITKKGNQGLRRLLVQGATSWIRHVSKRLEKASPWLRGMLARKPRKLVAVALAARTARVLWAMLTHNQPYRAPAIG

SEQ ID NO: 359242 - protein, 378 aa, unidentified
MSKNVRFVGLDVHKDIIAVAVAEMGGEVGSLGTIPNRLEAVRKLIAKLGPAQNLKACYEAGPCGYALYWQLTALGVACEVIAPSLVPVKAGDRVKTDRRDAEKLARSYRAGDLTAVWVPDADHEALRDLVRAREDARQDQHRARHRLSKFLLRHDQRPPETIKKAWTLKYLTWIKEQVKFDQPTLEATLLDYVHEVDRMAERIQRLDQAITAAIQKAPPKMRAVIEAVQALRGVAVITAVSVVAECGELSRFQNPRKLMGYSGLVSSEFSSGNRILRGKITKTGNAHLRRVIIESAWAYQHRPWVGGFLLKRQQGLDQQVRDTAWKAQWRLHTRYKKLAAAGKKKPQIVTAIGRELLGFIWAIAVQTEAKFSPHTQAA

SEQ ID NO: 359243 - protein, 455 aa, unidentified
MFLANGMSKSSIEPEICTIHPHAAGIDIGAKSHWVSVPPERAAEPVREFGCFTGELHALSAWLKQCGITTVAMESTGVYWIPVFQILETSGFEVWLVNARRVKMVPGRKSDVLDCQWLRQLHSYGLLSASFRPKDAICGLRSYIRHRERLTQSASTHIQRMQKALTEMNIHLNRVISDVTGVTGMAIIRAIVAGERDPQQLASLRDPRTKRSTTEIAAALVGDYRAEQLFILTQELQLYDTYRQQIQLCDQQIEQTLCELASDDRAQPPLPPRPKGRKPSRHAPEFDLRAHLYRISGVDFTQIDGLEALTVQTILAEVGLDPTRFPTVKHFASWLGLSPGSRISGGKVLSAQTRKVVNRAAKAFRMAAQSLANSKTALGAFYRRLRSRLGPPKAITATAHKLARIFYHLWTTGDTYVDRGVDAYEQQYQQRVVKNLKRKAKQMGFDLVPQQAAVA

SEQ ID NO: 359244 - protein, 416 aa, unidentified
MTGGRKWAKLACGRRSMGMRRDFPHSCNGVEAPRLVVFEVINLKRGKGKSVEQITRGEAAGQIVRVGADLAKRVIQVHTVDEAGRVVCRRALPRNKFIAWCSRLPAGCIVAMEISSGAHHWARRLSQLALVPRLMSAQLVEPYRSQGATGKNDANDAAAICEAASRPTMRFVPVKSVEQQSMLCVHRLRQGLKADRTACINRIRGLLAEFGLAFAQGPEALRRVLTDVLEDAANEMNTLARLVIQRAQAQWRELDDHIVWCDERIAQHAHDNPAVRQAMQLAGIGIVGASAAVATVDDFGQFKNGAQFGAWCGIVPRQHSSGGKTQLGRITRHGDTYLRSLLVQGAKSAVLTAHKRSDPISRWAFALRERSGWQIAAVALANKNARILWAVMTKGERFDAHHVSVKPAAALAPATA

SEQ ID NO: 359245 - protein, 353 aa, unidentified
MELSTNELAIFAGVDVHKKSWEVQLMSRHVCLKRFHMTEPSPKKLSDYLQQKYPGKKHFCVYEAGFCGFWIYEELEKLGIQTIIVNPGDVPTTDKEKRTKTDKIDCKKLATGLASGLMSGIHIPPKQQQKDRSLVRQRYQYATDERRMKNRIKAHLNFYGLKIDDIQSTGHWSNRYIEELEKMATEQDDLVLEGYLMKLRIERRMGLTLLRRVRQLSKSERYSHEFSLLNSIPGVGLLTIMVYLTEIGDIQRFKKDDHYISYIGFVPTIQASGNKEYRGGLSKRGNKRLRTALVLSSWMAIRNDNELLSYYEKCKSNGKHSNVAIIKVARKLALIMKAILRDNKPYKRAFSEV

SEQ ID NO: 359246 - protein, 374 aa, unidentified
MSDHSEAYVAFDTSKLRNAVAIADAGRSGEIRFLGEIENSSAAIAKLVRKLAAKYGRLTFCYEAGPTGYGLYRQIKGLGHACMVVAPSLIPRKPGERVKTNRRDALSLVKQLRAGDLTAVWVPDARHEAMRDLTRARETAVEDLRRKRQQVSAFLLRQGLHYPSERTWTKTHRNWLASQKLEHAEQRLAFEEMLLAMRQAQERIERLEQAIRAAVPDWSLAEVVTALMAMRGIEFISATAFLAEIGDLSRFATPRELMAYLGLVPSEASTGDTVKRGRITKTGNRRARRILVECSWSYQHPPRVGKEKQERVAAAPPAVREIAWKAQCRLTARYRALIRKGKLKTVAVTAVARELSAFIWAINREIPNSRAAAR

SEQ ID NO: 359247 - protein, 413 aa, unidentified
MNHVTVGVDWGTQEMSVCALDETRQRVFERDVPRTGEEIAALVDKLLSLVDDEPSRLSVGLEMPRAAVIEAFLGRGVSVYAINPKQLDRFRDRHTVAGAKDDALDAFVIADSLCTDEHLYRRIRAEGDDIVLLRERSRAYEALTEQAIALAGQLRALLLRYYREILDLNRPLHETPWLWRLIEVAPTPHRLRAGKTTTLIKRLEKKKTKLPTDIHARLEKVRQGKPLPVTRGTMNALRERALRMLPLIRAVHRERKQCLRDLDQLVEQLASDDESEGPTDMAIIRSIPGIGTRIAAVLFAEANAAVKDRDLESLRRLTGVAPVSRRSGGRRKTPVVSMRRASHQRLMNAAHQWASVAIQYDPRARALYDRQRAKGNGFARALRSVADRMLAVLVAALRDRALYDSSKRTLQAA

SEQ ID NO: 359248 - protein, 351 aa, unidentified
MRFYQHQQRHRFYCGVDLHARSMYLHLLDAQGQTRFEKNLPARPDAFLDAIAPHRDGLVVGCECMFAWYWLADLCEDQHIPFVLGHALYLKAIHGGKTKNDRLDAAKLAALLRGGAFPQAYVYPRAMRETRDLLRRRTFFVRQRAQLLAHVQNTNSQYNLPPIPQKLSFAGNRDEDELAGRFAHASTQQGIRADLRLAAAYDEQIRRLELHLTRHAKVDDPVTYQLLRSVPGIGPVLALILLYEVHDIARFPEPGNFLSYARLVRCAHESAGKKKGFAGKKIGNGHLRWALGEAACLMLRCHAPAKQWLARQQKKGTKARALGILAAKIGRTVYHLWRKQVAFDGRRFLTS

SEQ ID NO: 359249 - protein, 343 aa, unidentified
MQNSTRIAVDIAKSVFEIAVSDRPGRVARTARLRRARFLEFFAQQPPATVVMEACGSSHYWARRIEQLGHRVVLLPPHQVRPYVRRNKTDRTDAKGILEASRNEDIRPVPIKTVPQQVLTSLHRLRQGWMTERTARLNALRGLLRELGVFIPVGAENVVPAVWALIEDADSELPEALRPSFAAACQEIREIETRVKQVERQLEALAKQLPAVVSLLSIPGIGLLTATALVAFIGDVRRFPSGRHFASYLGLTPREYSSGLKRYLGRISKRGDGYLRTLLIHGARSVLLHTRTRRPDRFREWAHQLAQTHNHNKAAVAVANKMARIVWAVWTRQQPYRQNQRAA

SEQ ID NO: 359250 - protein, 366 aa, unidentified
MEKLYIGVDFHARQQTICYLKTETGELVIRELKHQDKEQVRAFYQQFQELVVVGLEASGYSPWFESMLEQLGCEVWLGHATEIRRRARWRQKNDRRDAELIWDLMVHDEFPRLHRPAVQSREVLRMLRYRQKLIKLRTMTKNSLQAIALQAGLAKGPQLFTAAGQEQFQAALMSPVLQWQREHWFELLKPFNQQLLETMVWFKEQGKDDVGIQRLRTHPGIGLLTSLCLLHTLQPVSRFRNARQVTAYAGFDPVERSSAERQHFLGISKAGSRMLRYLLVEAVHTAIRYDEDLKRFYKRLAERRGRPKAKVAAARKLLIRAYIMMRDEIDYAEFRRRAVAVRLARRGQGPTNVPEVLIGQPASPGA

SEQ ID NO: 359251 - protein, 429 aa, unidentified
MNYNTQNAKIASITEKTLIVGIDVGSETHYARAFSWRNYEYSKKPFAFSNDEDGFASFKAWMDDIAEKHEMEKVIPGMEPTGHYWLNLGAYLQGQGMRPVHVNPHHVKKSKELDDNNPNKNDRKDPKTIAGLVNEGRFSYPYIPTGIYAEIRNLSNLRIQTQEEITRIKNRIARWFSIYFPEIKDVYRNPDAVSGLMVIKQAPLPCDIKGLGVDGVNKIWRDARLKGAGIKRAKTLVTAAEHSIGNTEAPRSARKEIRNLLNDYEIYKSRMDELMEEIEELLSEIPYIDKLMGICGIGIKTVSCFIAEVGDIERFDNPKQVQKLAGYAIVADSSGKHNGESRISHRGRKRLRYALYEAAISVIGKNKEFKEIHHYYRTREKNPLKKMQSVIAVSCKLIRIFYTILTKAIDYDGQKMLRDIVRPGMQSAA

SEQ ID NO: 359252 - protein, 323 aa, unidentified
MRKHITVCAGIDTGKYKLDVAIDGSLEQFQIDNTADGHAALSVWLKRHKVNRVGIEASGGYEQQVVVGLRRDGFVVVVFQPAQVRAYAGFLLQKAKNDKIDARLIAACTAAIKKIHAPPDDRLAPFAARMTLIEQLTDQVACYKCYREGCREPQIQQFWKAEIARLNKLLRAELKNLAAAIRQHRDLAERLDLIESVDGVGLKTAVAILVRMPEIGRVTRGQAAALAGLAPYDDDSSMHLGIRHIGGGRERLRGSLYNAALAAAFHWNPQLIALYKRLTRAGKPHKLVLIACARKLLIFVNTVVERGTPWTSTAPPLIIGKVA

SEQ ID NO: 359253 - protein, 453 aa, unidentified
MSKSKSLDALAVVHPDAAGIDIGSREIWVAVRPDHAGETTRCFATFTPDLHTLADWLVACNVNTVAMESTGVYWIPLFEILEARGIEVFLVNARHVKHVPGRKSDIQDCNWLQKLHSLGLLSASFRPDAEMCALRSLLRHRAQLIQHRSPHILHMQKALQQMNLQLHHVLSDITGVTGQHILRAIVAGERDPKVLAAFRQPGCKADEATIIKALTGNWADEHLFVLKQSLQLFDFFTDQLAACDTEVEARFSAIKPRWDAPAQLPVLPKIKPNSRSKNKPADCTRQELFRITGVDLVAVDGINANLAQIILSEIGTDMSRFPSVKQFASWLGLAPRNDISGGKVLRSRTLKTGNRAGQAFRQAAASQSRSNSAFGAFYRRKRAYLGPAQAQVATAHRIARTVYFMLKHKVAYQDLGAEAYEAQRQQRELTSLKRRAAKLGFDLTAIAPSSSPP

SEQ ID NO: 359254 - protein, 404 aa, unidentified
MNAIGIDVSKGKSTVAVLRPYGEVVVSPFDVAHTGSDLRALADLIKKLPGETKVVMEATGNYFESIARYLHEQNIFVSVVNPVLISDFGGNTLRKPKTDKKDSVKIASYALTYWLDLKEYTPQEDLRKSLKLLNRQYQQSIKLKTMMNNNLISLLDLTFPGINKLFTSPSRESDGHEKWVDFVLEFSHCDMISKLTIKAFAKKYKKWFNKNSYHFTESSCEKIYAFAKDCVSSVSSDKAIVFSVVQAAKMLISATENCHAIQSEMNRVASKLPEYDTVMNMYGVGKAVGPQLMAEIGDPRRFHSRKAITAYFGYDSENNDSGQKTTRSNPMTKKGSGALRRTLFIIMQVLLQTKPQDNPVYDFLIKKKSEGKHYYSYINAAANKFLRIYYARVKEVLNVSEQIT

SEQ ID NO: 359255 - protein, 416 aa, unidentified
MLRIVHPICCGLDVHKSFVFACIATTDENSVTTYQNRKFSTFTCELVKLAEWLAVNNCKDVCMESTGKYWYPVWNILEPTCNLVIAHPKYVKAIRGKKTDKKDAKWIADLFKHDLISGSFIPPADIRQLRDLTRYYRKLVGFNTGEKNRAQNCLTISNIKLDDVFTDVFGKSATAITDRLLEHPGEPFDVAPYVHGRCKTPISEIQMAIDGSICPEQAEKLKIIRSHMSNLELCKAELESVILGLAQKYLTQLELILTVPGIRNPFTAASIIAEIGVDMSAFPTVGQLCSWAGLVPQNNESAGKKKTTRITHAGTYIKPLLVQCAVAVSKSEKHPEIRNRYLALRKRRGHKKAVIAIARMMLTAIYSMLKKNEPYNAELYRKADNPPENRQVSIQEAIYILQRQGYLITESQTVAE

SEQ ID NO: 359256 - protein, 377 aa, unidentified
MSKVLFVGLDVHAETIAVAVAEQGGEVRSLGTIPNRLESIRKTVHKIGPVKQLKVCYEAGPTGYVLYWQLTQLGVDCQVIAPSLIPTKAGDRVKTDRRDAEKLARCHRAGELTAVWVPTAEQEALRDLVRAREAAKRDQLKARHRLGKFLLRHGRQRPEGVRAWTSKHREWIKSQVRFAEAALEATLADYLEAVDHVVARIVKLEKAIDEAIKQAPPEIRAVIEALQALRGVAQTTAASIVSELGSLSRFPTAPQLMGYSGLVASEHTTGNRVQRGGLTKTGNGHLRRVVVEAAWAYQHRPNVIGYLLRRQKNLAISDEIKAIAWKAQQRLHKRYKAMDARGKNKNQIVAALGRELLGFIWAIGVKTEQQQNLAKVA

SEQ ID NO: 359257 - protein, 364 aa, unidentified
MPTVADSVDAVIGGDTHVDTTSLSVVSPVGAVIEQITIDNDEQGYAQVVTWILRVVPSGRFLVGLEGTRSYGAGLCRALEAVGIRVVEVERPSRGERGRRGKSDPGDAVLAARKVLAMAVERVPAPRTGEGVREALRLLVVDREQMTRHRTQLHNQLLAELLTGTAEHQALRRKGLSGTDLEKLAKSRCRGGRPIEEQARLVVLRRKANAIIQLDQQIRDNGKSLTTIVQDAAPQLLKQVGVGPVVAAQLIVSYSHHGRCRDEAAFAALAGASPVPASSGRIVRHRLNRGGDRQLNRALHTVAVTRAQWDERTQDYIRRRSGSLTAKEIRRMLKRYIAREMFKILRTIEALNPTMTNGQAATAA

SEQ ID NO: 359258 - protein, 331 aa, unidentified
MKFKESLGIDVSKKTLDVMLHCKGVHRQFDNTTKGHKALIVWMKKQTGLTLEQVLICFEHTGLYSLPLAVFLKEQQIKFFMVAALEIKRSLGIVRGKNDKVDAMRIASYAYLRRETLKPFELPSKNILKLQKLVSLRDKLVIQRAGYKAGTKEYKAMLKENESEILLSIHSNLIETMTQQIDIMEKGMIEIMEGDKEIQRLYDLVVSVKGVGFVLASNLLVVTNCFKSFTDSRKFACYAGLAPFERQSGTSLNSRSRVSHYANKKMKALLNMAAFSTIQNDQEIKAYYERRVKDGKSKMSTINIVRNKIVHRIFAVVKRGTPFVPLYKHAV

SEQ ID NO: 359259 - protein, 330 aa, unidentified
MYQLGIDVSKKTLDICLMREGVRGRLKTKKVKNDFKAVHIITEWLEHHNCALSDAYIIMEATGVYHELLATGLHLAGVKVSLANPHRTREFARGMDILTKTDKVDAWMLACYGALKQPEAWTPPSEEIRHLSALLKRRDLLVSDATREKNRLEKYRATHTPEAIVISAESMLTRLNDELAKIELMLKQHIEKHIVLKEDYKLLTSIKSVGPQLGLNMLVILRSHDFRTAEQVAAFLGGAPVEKRSGTSVRGRSRMSKIGPPEIRAKLYLAALCGLRFNIAMKSIYERLCLNGKAKMVAIGALMRKLIHWCFGVLKSRQPFDINYINMGRM

SEQ ID NO: 359260 - protein, 459 aa, unidentified
MRVMYERCCGLDIHKASIAACALITDKGKTLEETRRFGTMTADLRELAVWLQQKEIRHVAMESTGIYWKPVWNILEPAGFELLLANAQEVKVVPGRKTDQKDSQWIADLHKHGLLRNSFVPPRIIRDLRDLTRTRAILTQEHSSICNRIQKVLEDANIKLGSVASDVFGVSGRAMLRALMKGDNDAEALANLSKGTLRKKIPQLRRALEGQVTAHHRLLLTGHWNRMEFLEREIANLETQIAERMKPTAEEMALTRQNTAEDAPAPLSPREQAIQFWMEIPAVGWTAACSMTAELGVNMDQFPSAAHAASWAALCPGNNESAGKRLSGKTRKGNVWLRRTMCEVAWAASHTKDTYFAAQFRRIASRRGSKRALMAVAHSILVTAYHMLKHKCHYKELGADFFDAINRDKVRDRLVQRLSKLGFDVTLKSKATGETATDDGQNSLAAALTVTQSDRDSLM

SEQ ID NO: 359261 - protein, 411 aa, unidentified
MRSSRRDLPVSAAGRNVLGIDVGKGRHAAAGLKSDGQVIKPRLSFENDRTGIDRLEKTLLKPLGGPKGVLVAMEATGHYWMPLYFELSRRGYEAVVINPIQTNAKFRARIRRAKTDKLDAVTIARLVLSGEARAARVPDERTLELRLLTRHRWRLADTASNLHRFALSLVDRIFPEYNGLFSEPLRPTTRRLIREIGLAPGQLLEASDRVGPVLHAGSHGRIGPERAIELLERAGRSIGIGKAEGVMVAQLRSCVELIEVIERQTGLLDEELVRRVRELGSPLPSLGVRAPIAATIHAESDPISDFRHPWQYAAFAGLDPSVFQTGQFTGTQAHISKRGSPHLRKVLYLTAMSLYRHHTDLYRCYQKSRRKGRHHTYAVVVVAHKLARIVWRMLTDNRPFRARPPRHTKPA

SEQ ID NO: 359262 - protein, 323 aa, unidentified
MESKQNKNKIVAGVDVSKAELVVRCSWADKVMRFDNTKSGVRKLTEVLKAGNVELVVCEHTGKYEQLLVATLHCSEIPVHCAHPKAVHYFAKARKASAKSDPIDAESIMLYGITMDLKPDSPLPPALKAAKELAERRDDLRRILVAEKNRLKAPDVSSSLKAGIRAMIKILKNHLKKNEQEMAKIAEKEPSIKQPIEILTKEYGVGLISAVTIYAAMPELGTLTRQTAGALAGLAPILRESGKFSGQRRIGGGRSIVRNALYLVAMTAIRQKGSPLQKFYITLKKAGKRKIVALTAVMRKLIVRFNTLLKVMYQESQICPTAS

SEQ ID NO: 359263 - protein, 441 aa, unidentified
MKNEPTQNNNSIPAADPIAAWVGLDWADKKHSLFVRPTDGAATTACELEQKPQALDQFFLQLHQKHPQGRIAVCLEQSRGPVLYALMKYDFVVIYPVNPRCLADFRRAFKVSGAKADPTDADLLSELGCKHHQRLRALVPEDLATRQLRFLVEARRDFVNKRTALANELTATLKSYYPLALEVVGENLEGPMGLEFLRRWPNLAKLQGAKPSVVRAFFYAHNSRSEEKIAARLEAINTAVPLTEDPAIVGSLQLQAAGLAQQLAAVQKTVAEYDQQIRVVFEGHSEKWLFEKLPGAGPVLAPRVAAAFGTMRTNLGAALDLLCLSGVAPVKRQSGQQETVHFRFARPKFLHQSLVEFAKCSIGQCDWARLLYEKQITQGKSAYAAIRVVAFKWVRILWRCWKDGQAYDEVKYLRSLKKRGIKLYESLYNALPAETGPVNNS

SEQ ID NO: 359264 - protein, 343 aa, unidentified
MKTVTTIGLDIAKSVFQVHGIDAEGRVALRQQLKRRRVPAFFAKLDPCVVGIEACASSHYWAREIRGLGHEVRLMPPAYVKPYVKRQKNDTADAEAICEAVQRPNMRFVPIKSPEQQAGLVLHRTRHLFVRQLTAVGNAIRAHLAEFGIVAPVGRRGMDELVAVINDHNDDRIPALARACLTALRIQLEALKEQIRILDRVLTLWHRSSETCRRLDAIPGVGPVLATALVASVADPKAFRSGRDFSAWVGLVPKQNSSGGKEKLGAITKAGDRYLRSLFCAGALAVIRYAQRHGTEHRPWLTRLLERRPTKVAAIALANKLARMAWAMMARGERYKEPVALAK

SEQ ID NO: 359265 - protein, 366 aa, unidentified
MKRSLIYVGLDVHKGSIVIAMATRRQMAVVVRRIPNDWVQLLKVLDGLGAKDRLRVCYEAGPTGYDLARRLNAVGICCIVVAPSLIPIQPGRRIKTDRRDAEKLANLHQAGQLVEVTIPEAETEAMRDLERGRDDAKNAERNARQQLDKFLLRHGRSWSRSKWTRVHWAWIERQELPTEALHRVLADYIRAVKEATARLDRLEEDIEELVETWTLAPLVKALQALRGVRLITAVILVAEIGDYVRFKTPRELMAYLGLVPSEDSSGLRRRQGRITRTGNGHVRRILTESAWNYRFYPRPSRAILKRRESLPSEVVAIAEKAERRLSKRYRHLIEQGKPSQKAVTAVARELAGFVWAIAQEVTPKAA

SEQ ID NO: 359266 - protein, 375 aa, unidentified
MFERASEMLPPVPHSHVPVTGHYPTPPYRWMSVYLPGWFGNVQVQRDVGGAPMTRPVLGIDIAKAKFDACLVLPDGRQQRKVFPNTTTGFELLTRWLGQHTTEAVHAGVEATGTYGAALALYVYEQQHVVSLINPAAIKAFAASRLTRSKTDRVDAQLIARFCATQQPAAWTPLAAEVQELQGLVRRLDALVEMRTMKCNRLSAGETFAAVRASIEGHVAYLQQEIAQTERLIRQHMALQTQYLLLVSIPGIGAATAALLLAEINFAAFGNARQVAAFVGVVPRLRQSGSSVRGRSKLSKIGSSRVRRALYFPAMTALRCSPSMQAWADGLRARGKCEMQIIGAVMRKLIHLAFGVLKSRQPYDPGRTASERAGS

SEQ ID NO: 359267 - protein, 445 aa, unidentified
MKILALDLGKFNTMCCFFDTKTRKHSFLLAATERNYLQTVFQQHQIDLVVMEACGPSGWINDLAVQCGLKTLVCSTNEDAWRWSNVKRKTDKDDALKLARMAVMQELKAVHMPSPAHREFRSLVKYRKTLDYRVNKMKNTIRAWFVNHGISIDAGAKAWNTGRARIDSFRKPLAECRPDELWRGELDLELTQLDAVSEQLDLVIKKLEEIGKRDPRIQRIMTIPGVGPRTAEILVACLDDPHRFENGRQVSAYFGLVPRQYQSGETDRNGRITKRGNPLARTILVECAWVSLRYNPWAKAVYERISGKQKTRRKKAAVALARKIAVIAWALLRDAKDWDPKTMIEVTQSFGRMNPSLQETLQTMKPKENSDQRKKRLRKEAREAKEARETKEAREAKAPAEPHASAATTKAPQAKPTKQAVTKLNTKSSKPKPKSRRARKPVSRG

SEQ ID NO: 359268 - protein, 355 aa, unidentified
MNVYTGVHAYYCGIDLHARTMYVCVLDKDGKKVYHKNIPCRPDRFLQTIEPFRGDIVVGVECIFCWYWLADLCEEEGIDFVLGHALYMKAIHGVKTKNDRIDSLKIARLIRGGNFPVAYVYPPEMRATRDLMRRRNHFVRKRAELLAHIQNTTMQYNLEPLGTLSRPHHRRDKDIVGHFPDPVVQLIVETDLQLIDHYDPIIKNLDKQILRLAKGHDPTSLHLLKSIHGVGDVLALTMLYEIHTIDRFPSRGEFCSYARLVKGQKSSAGKNYGTTGGRIGNAHLRWAFSEAAVLFLRKNKEAERYYNRLINRHGKSKALSIVAKRLGIAVYYMLRRGNPFNINMFLQSHMAKEKA

SEQ ID NO: 359269 - protein, 351 aa, unidentified
MPRTSTVHAVTAIGIDMGKNTLHMIGLDTRGAIVLREKVSRGRIALRLANLPPCLIGIEAGMATHYVARELAALGHDVKQVPPTYAKPFRQGQKNDFRDAHAVAEAVQRPTTRFVPAKTDEQLDLQALHRVRSRLVSERTAVINQIRGFLLERGIIVRQGLRFLRQVLPDILAKRTDVLSPRMVRILADLASDWRQLDGRIEPVTDEIETLAKSDDSCRRVMTVPGIGPIISSAMVAAIGSGAAFAKGRDFSAWLGLVPKQMSTGDRTILGRISKRGNGYLRMLFMQAARVILLRPANWPKHGFGVWLARAAVRLHPNVLAAALANKLARIAWTVLAQQRSYEARLTKAAA

SEQ ID NO: 359270 - protein, 388 aa, unidentified
MLYLANDQHRKQLTVNLRNEAGDVILKRQVSTEWKRAREFLEDVRNRSVPEGGFVAIVEVCGFNDWFLKLLAEYGCKEIVLVQPEKRSKNKTDRRDANALGELLWTNRRRLLEGKKVQNIRRVVPPSQRDAEDRQLTIMRYRLGRLRTRTINRVQHLLLKHNLQQECPTKGLQSQSARKWLTKLPLGAVDRAELDQLLAQWELWDRQMEELELRIRERQAESKAATIVATAPGAAAYGSLALACRIGSIERFPHARSLPHYWGLTPGCRNSGDATRRLGSITKQGSAIARFILAQMVVHVLRRDARMKEWYQRIKKRRGAKIARVAAMRRLATILWHMLKHQQPYRPGGNSTEGSDPGYGCKPPDRNAFLRHNRGVQGTGNKKAATVL

SEQ ID NO: 359271 - protein, 437 aa, unidentified
MQVIHECCAGLDVHKKTVVACPVQTLQNGQKRQEVRTFGTTTPELQELRAWLQDWGCTHVALESTGEYWRPVWNVLEGHFELLLVNARHIKAVPGRKTDVKDAEWIADLLRHGLVRGSFVPAREQRDLRALTRQRNNLVRERARVVNRLHKVLEDANIKLTAVASDVTGVSSRDMLAAIVRGVGNPTLLAELAHGRLRNKRAELEKALTGVVREHHRFLLVTHLTHIDFLDEQIAQFNREIAARIQAPPAPPQNAASPAPAPAEPPLTRAEAVALLDTIPGISQWLAELIVAEIGTDMSRFPSAAHLASWAGLAPGNNESAGKHFSGRTPPGNRALQKGLVQAAQGAKRKKNCYLREQFHRLAARRGKRRATVAVAHSILVIIYHMLSRREPYRELGGNYFDERKRDSIVNRLTRRLEKSGFRVALELQPVAVPVAV

SEQ ID NO: 359272 - protein, 423 aa, unidentified
MQGVEDNEEIIERVAAIDVGKAEVVVCIRIPDPARPGRRQQEIVHSSTLTPRLLVLADRLVELGVTRVVMEATSDYWKPVFYLLESRGLDPWLVNASDVKHLPGRPKTDRLDAVWLAKVAERQMLRPSFVPPGPIRLLRDLTRYRAGLVKVRTAEKNRVEKLLEDAQIKLSSVVSDIFGVSGREMLAALLAGERRPTVLAQLARTRMRPKIPLLEEAFVGQFTEHHAFLLRLMLARIDEAGADIAALEDRIRQLVAPFATVVTRLDEIPGVGATAAWTVIAEIGLDMSRFPTPAHLSSWARFAPGVNQSAGKTKGRGATGHGNRYLGQALGEAAVAAAHTHTFLGDRFRRLARRRGGPRATVAVGRSILVIIWHLLSQPDARYHDLGPDYTRRRADPNRATRNHVQHLEALGYTVTLTPVALA

SEQ ID NO: 359273 - protein, 425 aa, unidentified
MTATRRCIGLDVHRDFAQVAIWQCGVVTQAGTFATTPEGVREFAAGLGPADEVALEATGNTWAIAMLLASRAGRVVVSNPVKTRAIAEAKVKTDKVDAAILAQLLAADYLPSVWLPDAATAALRRQVLRRAHIVRQRTRLKNQVHAILARNLVPRCPAADMFGIKGRAWLAAQDLPADERAAATALLRQLDFHASELALIDTDLGRAALARPEVLRLMTIPGVDATVALSIVAAVGDFSRFRTPERLVAYFGLNPKVRQSGGQPASHGRITKAGPAHARGMLVEAAWSASKAPGPLRAFYQRVRARRGMQVAAVATARKLAVLCWHLIIKGEDYAFALPSLIAHKQRKLELRAGAPPARGRKGQAARYSLAAVRAAERDLAAQGEAAYRTMVAAWQPARPPARPARKKAAGAAASKGTRLIKPAG

SEQ ID NO: 359274 - protein, 425 aa, unidentified
MPYQIAGIDVHKKMLAVVVADVHVDGEYQFTHRKVGTNPAELRALADWLIECDVEEVVMESTAQYWRPVWETLERYWKPQRRLREGASPMSGTLHLAQAQSNRGAGGRKKDFPDAERLVKRLVAQELTLSFVPDAEQRLWRTVMRRKYQITCNRVQLHNRLESLLEEAHIKISSLVSDLLGTSARRMLQALADGETNPATLAALADQRLRATAHQLSDAFSACTTLNPVYRRLLKLALEELRLIEDHLGQLDQQMADLLTEHHDAVQRLAEVPGLGADSAQQIIAEVGATAATFPSPKHLASWMGACPGNEESAGVNYSHRCPKGNRQMRRVLNQAANAAVKAKGTIFAVVYRRLVPRLGHAQAIGAIAHRLCRLIWKILHQGIRYEERGPAVTKEARQARARKMIRELRSLGYRVELASHTPTA

SEQ ID NO: 359275 - protein, 333 aa, unidentified
MEKKWFIGIDISKKTLDVVIYVPTKKHADETNYERFLNKEEGYKSLLCWLKKNNLAKKRLVMSMANTGIYSFDLCLFLEAASIDYCSFNPLHLKRSLGLVRGKNDRVDAERIAYFAYLHRDELSYSKLSGSSIIRLRDFAAERKRFVKQQAEYKGFLTDRKDCEMTSTIERAAHMVKILDEEIASVEEEMLQIINSDPSILRNYELLNSIKGIGTINAMNTIIHTNNFQAFETARQYACYLGIAPFEHSSGTSIKGKTRVYPTGAKLLKADLSQAANSAIVWDKEMKEYYERKRKEGKAYGVVLNAVKFKLVGRMFAVVKRGTPFVELMTYKK

SEQ ID NO: 359276 - protein, 353 aa, unidentified
MGQNWLRFFNVYKNEIMQKNYLGIDVSKLTFDVSLMVVIKGQKQALVTNKFSNDAVGLKIFKLWLDERQVSFDTNSLLVIENTGIYHRLIWNFCTTYLLPVFIGNAADLKWSFGIARGKNDKIDSMRLCEYAYKNHEDIKPTTGLNKVLITLKDLLSNRSKLLKLKNAIKQTLNELKTSNDKTTQALMEKLNKSALEGLKKSIKQIDAELLKIVKQDASILANYNRMLSVPGIGKITATFIICCTNNFAIKVTGKQLANYAGVVPFENTSGTSIKGKSRVHFMANKELKSLLTMGALSAIQAYPEFTDYYERKIKEGKKHLQVLNAIKNKMLLRVASVVNLQKDYVNNYKKAC

SEQ ID NO: 359277 - protein, 387 aa, unidentified
MQKPHDNSKASPAAFTQDSTLIAVIELSLSNWLVAGLIPGVSREPLKKLEPNPEDLLKLLHGWRDEAIKAGRPITRIAVAYETGRDSFWLARWLRKRGIDAHVIHATSVAVSREHRRAKTDRLDTAMLKRGFLGWLRGERGHCTVAVVPTMEEEDARRPHREREGLVHEQTRVVNRMKSALIQFGVRNFNPKLRKASVKLETVRTPEGKSLPPNTIAALRRDMERLRIIKEQIKAIERARLQQLEQKPEALANRIVYLLVRIYGLGLETADLLVHELLSRTLRDRKAVARYAGLTGSPDESGSKRREKGLSRSGNARVRKIMIQLAWRMVKFQPDSALVQWFKQRTENAKKSRKPMIVALARKLIIALWRYANDGLIPEGFRLHSAA

SEQ ID NO: 359278 - protein, 422 aa, unidentified
MLHDSEDTEEIIERVAGLDIGKAELVACVRVPSSDKPGRRAQEITTYSTMTRSLLGLAERLTELGVTRVVMEATSDYWKPVFYILEAQGLDPWLVNAKDVKHLPGRPKTDRLDAVWLAKVAERQMIRPSFVPPPQIRLLRDLTRYRADLVNSRTAEKNRVEKLLEDAQIKLSVVASDIFGVSGREMMAALITGERNPKALAQLARSRMRAKIPVLEEAFVGHFTDHHAFLLRTMLARIDEASADIAAVVTRIEEVIAPFARAVEQIDDIPGVGLTAAHVIIAEIGIDMTRFPTAAHLCSWARFAPGVKESAGKNKGRGATGHGNPYLARVLGEAAVVAGKTDTFLGERYRRIARRRGKKRAIVAVGRSILVIIWHLLSDPEARYHDLGSDFYDHRAGPDRKKRSHVRQLEALGFKVTLEPAA

SEQ ID NO: 359279 - protein, 310 aa, unidentified
MEITVGIDVSKARLDVHVHPSGDSFAVSNEEAGVAALAERLGRLEGLACIGLEASGRYERLAVAELATAGLPVVVLNPAQVRASAQAIGQRTKTDPIDARVIALFVEAVRPQPRPLPDVQDQELGALMARRRQVVSMLGAERLRRQQAPKGRVRVSIARIVTALEDDLKALDGDIDKTVRGTPVWRDKEDLLASVPGIGKTIARTLLAELPELGQLNPKQIAALAGLAPYTRQSGRWRGKSFIGGGRPAVRTALFMGALVAARHNPTLKAFRDRLVANGKPKLVAIIATARKLLTILNAILRDQKPWRPA

SEQ ID NO: 359280 - protein, 445 aa, unidentified
MSKSDPTLLPVLNPQAAGIDIGSRRHSVCVGPHPDTDVREFDTFTADLKALADWLIERGITTVALEATGVYWIPVFEILTTRGLEAILVDPRQTRRPGRPKTDRLDCQWIRRLHACGLLQPAFRPDDCICELRSYMRRAGTLIRDIGRCILHMQKALELMNVKLSEVVNDITGKTGFAILHAIIEGERDPHRLARFRDPHCKESAATIAKALQGNWRDEHLFALQQAMETWDFFQKQLRACEGQIAVCLQRLPKKQPDKVLPPRPQPRKPRHNAPHFDARALLAPILGVDLTAIEGIDNASALVIASEIGVHVNSFPTEKHFGSWLGLAPKAKASGMRRKNRITPGAHRIAQALRLAATSLHKSQTALGAFLRRLKGRLGAPKATTATAYKLARLIWRMLKHGTDYVLQGMAKYEAQFRERTVQALQRKAKSFGYQLVPVPVLTT

SEQ ID NO: 359281 - protein, 379 aa, unidentified
MKKHSTLFIGLDTHKDSIAVAYATDSRKEPVTYLGAIGTQHYAIRKMVRQFESRHPGCQLQFVYEAGPCGYWLYRLLSSWDYPCFIVAPSLIPKKPGQQVKTDKRDCMQLAQLLRSGDVDPIYVPEPEDEAIRDLSRGRETAMWDLKNAKCQLKAFLLRHDIRYTGSANWSAAHIRWLSELVMPTPTQNTVFREMLYTIVERHKRLERLDTELAYQVRRWRFYPLVKAVQALRGVQLLVATGVVAELGDLQRFDNPRKLMAYVGLTPSERSSGNRRRIGPLTCAGNKRARRMLIEAAHAYRYPAKTSKILQLRQEDLPKAIVEKAWDTQVRLCRRYRALMQRGKHRNVVVAAIARELVGHIWAIAREVVIAKPDPRLML

SEQ ID NO: 359282 - protein, 343 aa, unidentified
MTRFVGLDVSQKMTVICVVDDAGRRLWRGQCPTVPEQITVLVRRHAGDKARIGIETGAMTPWLVHELRNLGLEVVCLDARHARAALKMQINKTDQNDAEGLAQIVRTGWYRSVHVKSFESHRARALLGARIQLIGMTTRLSNHIRGVLKTFGLLPGAMRGLPFDRKVEALLLDRSDVALIVRPMLIAWRQLREQIVAFDKAIRALVKSNSACRLLMSVPGIGVLSALAYVSTVENPARFVRSRSVGAHLGLTPRQYQSGEVDRSGRISRCGDTLARTLLYEAAVVILSRVKRASSLKDWARAIAKRSGNGKARVAVARKLSVILHSVWRSGEPFRWSEHASAA

SEQ ID NO: 359283 - protein, 350 aa, unidentified
MEYFAGLDVSLDTISICIVNADGDIVLEKKLEAEPAAIVAVLNHFGHPLKRVGLEAGPTSSWLYSELRCVGYPVICLECRHVKAGLSAMRNKTDRNDARGIAQLVRLGWFRQVHVKSEQAQRMRMLLVNRQQLLTKALDLENSVRGSLKVFGLRIGTVTRRTFEARVLELVAQDRSLMAITEPVLRVRRVLFDEFERLDRLCRQLARRDTVCRRLMTIPGVGTVVALTYRTGIDAPERFSRSRDVGAHFGLTPRRYSSGQTDYDGHISCCGDAMVRTALYQAANVLLHHGRWSSLRSWAMRIAKRGSVKAAKVALARRLAVLMHRMWVDGTDFRWSTVAAAASTAKTIAQ

SEQ ID NO: 359284 - protein, 339 aa, unidentified
MGDVTLLAIDLAKTVFQLHGIDAEGKVIIKQRLRRTKLVEFVSNLPICTIVFEACGGSNYWARRFSSFGHTVKLISPQFVTPYVKTNKNDCNDAEGICEAASRPTMRFVTPKTIEQQDIQSLHRIRSRYVQERTALVNQARGLLMEYGVIMPQGIHQVRSLLPEILEDAENELSSICRGFISDLYEQLILKDEKISEYEAMLKSIFKEHEACQRIAKIEGVGLLTSTAIIACIGNAQEFKNGRHLSAFLGLVPKQSSSGNKERLLGISKRGDSYIRSLLIHGARSAMIASAKKEDSKSKWIQSIQERRGWNKAAVALANKNARTIWALLAKGTEYKKAA

SEQ ID NO: 359285 - protein, 343 aa, unidentified
MDYFAGLDVSVKETSVCIVDDAGKIVREARVASEPEALLQVLTNTIYRFKRVGLEAGPLSQWLYSVLAEAGLPVICVETRHMRAVLKAQINKTDRNDARGIAQMMRVGLYRPVHVKTLRSQKLRMLMTHRKLLQSKAIAIENDLRATLRNFGLKVGVVGAVKFEARIKELVENLPDLTVLVEPLLIVRRVIRGQVDILHCRLLAIVRDDDVCRRLMTVPGVGPVVALTYRATVDVPARFRNSKAVGAVFGLTPAKYQSGQNDRTGAISRCGDEMMRMVLYEAAQSMLARSAKWSWLKAWAMKIARHRGMKKAIVALARRLAVIMHRIWIDGTAFRWTREVAAA

SEQ ID NO: 359286 - protein, 364 aa, unidentified
MNSNTNQKINQVSEKTLVIGIDIAKRTHYAYVVDERGRVLQKSFPFSQTREGFDTFYERIMTLRAAHEKSDVLVGFEPTGHYWMNLAAYLSAWIPFIMVNPHHVNRSKELDDNLQTKNDQKDALVIARLMRDGRFSYPRLLEGVEAELRNGATLRGKIQEDLNALQNRMIRWIDRFFPEFMSVFKQFGKMAYAVLEMTPLPKDIQGKSPEELLFLYRQVEGLKSPQLPKAKQLVEVAKHSIGLTEGLVMARIEIATLLHQYKLMQHQLDALTEQLIELSKEMTDYEYLSSVPGIGDVTIVELLSEVGSLTQYEHPCQLIKLAGLTLRENSSGQHKGQKRISKRGRRKLRALLFRVMMPLIRHKV

SEQ ID NO: 359287 - protein, 377 aa, unidentified
MKRILKIGMDVHSTNYTLCAMEPVFGADDRIYATIQVSPDYKNILMFIEKVKQKLDPYDTYDIECGYEAGCLGYSLYNQLTSAGVKCVILAPTTMLTQQGKRIKTDTRDAVMIAQCLSYGGYHPVYVPTEEDDSVKEYLRMRDDHVIALKRLKQQINAFCLRRGYHYQDSDWTQAHLKWLREIKLSPLYQETLDEYMATYYELTAKVDKYDARIKEIAAQAKYADKVKKLSCFIGIKAHTALSLIVETGDFCRFAKGSTYAAYLGLVPGEHSSSDKINRLRITKAGNSHLRMLLIEASVGICRGRIGYKSKELRKRQQGNSIQVISYADMANTRMRSKYYRLIRHGKKRNVAVTAIARELACFIWGMMTDNIEGKAA

SEQ ID NO: 359288 - protein, 368 aa, unidentified
MPVLVVHNESIAVSIAPSDTTEVRRYGIIGGEHDDVLKLVKKLQAAHPGMLLKFCYEAGPRGFALCRCLRAHGLDCILVCPSKVPRKPGERVKTDRRDADQLARLYRAGELTGIYVPEPAEEAMRDLIRARYQVGKAQHRARQQLKMYLLRHNLRYGGQTSWNAAHLRYLAEIKMPFAVQQIVFQEMLEVISEATARLERYDQEIERAVPGWRWEPVVRALMALRGLALLHAATLVAELGDFHRFEHPGPLMGYLGLVPSEHTTGTDRQQGGITKMGNGPARRALVEAAWQYCVPARISPHLKKRQEGLPKAVTDIAWKAQLRLHHRYQHLTRVGKKKSQVAVTAVARELAGFVWAITRQVKPRPAKP

SEQ ID NO: 359289 - protein, 479 aa, unidentified
MESKPKEKNNHPTQPHWREMNRKQRRETMRKIQSEDLSLELVHRDAAGIDIGNESHYVAVPPSRDNQPVRRFGCTTAELKAMAAWLKQCGIRTVAMQSTSVYWIAVYDILEQAGLEVYLVNARDTKNLPGRKSDVQESQWLMKLHTYGLLRNSFRPSQEIRTMRTYWRQRNDLVQSASRHILRMQKAMTQMNIQLANVLSDLNGATGQAIIKAILAGERNPHKLAEFRDPRVKASEEEIAGSLEGNWQPDLLFVLKQEQDGYEFCQKQMAECDRQLNQHLEQSEDHSRGASLPEEKRQGRLKKKKGNAPRFDLREGLFRLTGTDLTRIDSIDVMTATTVISETGYDMSKWQTENHFVSWLRLRPDNRISGEKIIGKGRLPTNNRATVALKMAATTLRKSNTYLGAQFRRLRTKLGAPCAIKAMAAKLARLIYRMLRYGMKYVDQGAAVYELKHRELQVHQLKWKAASLGYQVTPIPVAT

SEQ ID NO: 359290 - protein, 377 aa, unidentified
MATTRTVLRDQLTAKPGDLYMSLELGDKHWHISIGGERRSVSHYIVEAGHTEEVADCIAKAAARLHTARVHSCYEAGRDGWWLHRWLTELGVDNIVVDPASIEVNRRARRAKTDRLDADKLLAMLVRHHRGERVWSVLREPSPGDEDARRAHRELQRLTHERIAHTNRISSLLVLHNLRPRIVIGGRDWPVWWNEHREQVPPTLRAELEREAVRLKVVKEQVRAIEAARARELAEGKQPLVAQLVRLRAIGAKGAWVLVKEVFGWRHFANRRELAGSLGLVPTPYASGDSEIEQGISKAGNRRVRALLVELAWSWSRLQPGSALTQWFNRRFAGAGKRMRRVGIVALARRLAIALWRYLQTGEIPIGARLKPAGSGI

SEQ ID NO: 359291 - protein, 319 aa, unidentified
MTTSAVVVGVDVAKDRLDVAVRPSGETWSAANDEAGITALVARLRPLGPALIVCEATGGFERAAIAALAAAGLPVVVANPRQVRDFARATGQLAKTDQLDAGILALFAERVRPTPRPLPDAAAQLLDAVLTRRRQLLEMLVAEKNRLGFAPKPLHRGIHAHVRWLERQLDDVTTELAALIEASPVWRAKDDLLQSVPGVGPIVSYTLLGELPELGRLSHKQIAALVGVAPLARDSGTLRGKRLVWGGRASVRTALFMAALCGRRWNPALKRFYERLKAAGKPTKVALITCARKLLTILNAMVRDDTRWVVPAPSVQYSC

SEQ ID NO: 359292 - protein, 402 aa, unidentified
MNCVGIDVSKGKSMIAVMRPFGEVVVSPFEVRHTANELSELAGLLKSLDGETRVVMESTGNYHAPVAWLLHDAGLYVSVVNAMLVHDYGNNSLRRAKTDKKDAVKLANYGLDHWLTLPRYIPEEDTRLMLKICYRQYQQYSKVQTMLKNNLISLLDTTFPDANRLFTSPPRADGSEKWVDFVATFWHCECVCGRSEKAFTAEYQKWCRKHGYNFSEDKALDIYASACRHFGVIPKTDTAKLLVEQAISQLQTTSSALAALKQEMQSLAASLPEYPVVMGMFGVGPTLGPQLLAEIGDVRRFHSKKALVAFAGIDAPPYQSGQIDVRSRSISKRGSASLRRTLFLVMSVILQCAPIDEPVYQFMDKKRSEGKPYRVYMMASANKFLRIYYASVKAYLESLEHD

SEQ ID NO: 359293 - protein, 450 aa, unidentified
MAKRKKKGKTVKALHVLQPNGAGIDIGATEIYIAVPEDRTQESVRCFGTFTEDLHKAAQWLKSCSIDSIAMESTGVYWIPVFQILDSYGYDVILVNARHVKNVPGRKTDVQDCQWLQYLHSVGLLRGSFRPSQDICAIRSLLRHRDTMVKSASSHVQHIQKSLTQMNLQIHNVISDIVGVTGLSIIDAIVAGERDREKLANLTDPRIRADRKTILKSLEGDFRPEHLFTLKQALSSYRHYQQMIRECDLEIEIHLNAADSNTDFDDNLTPPSCRSKSKAKDDSAIFDLRRHLHRLFGTDLTLVDGISTLTSQVLYTEIGPDLSMFPTANHFCSWLGLSPQNKISGGKTLSSRTRPGSNRAAQALRISANTLIRSKSYLGDYYRRMRTRLGAPKVITATAHKLARIIYFLIKNRKPFDETIFAEQERKHQEGMKKRFINRAKSFGLQLIAD

SEQ ID NO: 359294 - protein, 408 aa, unidentified
MDVIYERCGGIDVHKAKIVVCLQNGRRKETREFGTMTHQLREMTAWLKGAGCEIVAMESTASYWKPLYNIFELEGLPAMVVNAQHMKAIPGRKTDVKDAEWIADLLRHGLLRSSFIPDRGQRELRELTRYRKSRIEERARELNRLQKMLEGANIKLGDQLSDITGVSAQALLEAALSCESLDLPTVEKHRDRRMKASAEELLQSLDGILTPLQRELIREVLRVIREQDAQIQRIDSLIERHIGEEYSTAAKALEQIPGVGRVSAQQIIAEIGVDMSRFPSAQHLCSWAGVCPGNNESAGKRKSGRTNKANKALKTTLTQCAKAAVKNKNTFFYAQYQRLVVRRGKNRATMAVAHSMLIAIYHVLQGSQFRDLGSEYYNQFNREKKINSHFKALEKLGFTVTDEMRAAA

SEQ ID NO: 359295 - protein, 411 aa, unidentified
MENVFPCCAGLDVHKESVEACVRRIEPNGRVHSETHHWGTMTGDLMAMADWMTAQGVTHVAMESTGVFWKPIYNILEGRFTMLLVNARHLKQVPGRKSDVRDCQWIAQLLQYGLLKASFIPPRSQRELRDLTRHRTQLVEEKARAANRIHKVLQDTNIKLSSVATDVLGASGRAMLEALITGEEDPVKLADLAQRKLRGKIPQLEKALEGHLTEHHRFMLKLLWKQLAQQEELIAELDRKIEEQTRPFEAEIDRLDAVPGVDRRVAEVVLAEVGPDMKAFPTHENLVSWAGMCPGNEESAGKRVRKRITPGNRWLKRTLAQATWAASHSKNSYLAAQYRRLAGRRGKKRALIAVGHSILVIFYHMLKTGTTYTDLGGDFFDRLEPQRLTRYYVKRLESLGHKVTLESCAAA

SEQ ID NO: 359296 - protein, 354 aa, unidentified
MEDYDGRQVVAMDLHRRRSVLVRMTEDGRRLGTVRITNSPAELRREIARAGKGPRVVLEATYGWYWAADVLAAAGAEAHLAHPLGVKAFTYRRVKNDVRDSADLADLLRMGRLPEAWIAPHQVRELRELTRYRAKLVRLRTSCKDQVHGVLAKLGIPVTCSDIFGAAGSAWLDGLRLPQPYAGKVTSLRHLAGEFTAEIDMLGEVIADLLAGHRGYQVIQQLPGIGPVLAAVIAAEIGDITRFKNPAQLCSWAGLTPRHRESDTKVARGHVSKQGSRLLRWALIEAIQRIPKDSVIGAVKDGIITRRGKEARNIAKVAAARRLLTLVFYGMRDHQIRCLARPAGPAAAAPARAA

SEQ ID NO: 359297 - protein, 321 aa, unidentified
MSVDHSGLFFGVDIAKGRWDVASQGDKKSRVFKDMEELLIFLEGKTPNLVVVEASGGLEGALVERCWDLSIPVAVINPQHSKNFRLALGNRAKTDSIDACALARYGAAIKPMPRIPIPEDRREARRLVNRRQQLIKSINQEGNRLRLATGEQTELIENTLLFLRGQAEFVERRLDEMVVSMGLQKTMKLLQTVPSVGEMTARRLVVDLPELGLLNRRQIAAIVGLCPWSNQSGGEKKAGGEHIGGGRTYLRSSLWMCTMRLIEDGGVLHDWYFTLKSRGKPVAVAKTAVLRRMLTWCNAVVRDGEPFDLNKALSGLNKQSG

SEQ ID NO: 359298 - protein, 359 aa, unidentified
MQTQNNKLTFNGQNIYVGFDVHLKSWTVTILTEKLAHKTFSQPPQPKVLFEYLSSNFPGATYYSAYEAGFCGYWIHNTLRSMGINSMVVNPADIPTTDKEKTQKEDSRDSRKIARALRSGDLKPIHVPTIQTIEDRSLVRTRARLVKDLTRNKNRVKSFLYFHGIEMPQPFQNLKGRWSKRYIDWLKNLEFEQPSGRMALDALIISSENSRDLILTVTKQIKTISTSPEYSEHVGLLKTIPGIGLITAMIIVLELDTIHRFESLDKLCSYIGFIPSTHSSGEKETTGDITHRGHPTLRSAIIESAWIAARIDPALNKSYHTYCQSMDPNKAIIRIAKKLVSRIRYVLKNKKPYVCSVIN

SEQ ID NO: 359299 - protein, 345 aa, unidentified
MKKIVFGIDVSKEKIDVTAIEVRDGFMGARKLGYNEYENRPRGFHKMLSWAKRLATKDGLKDVLFCCETTGGYDRCLCDYLYGKDCDIWRESALQIKRSCGLRKGKDDKADSEMIAEYAMRHMDKAVSYESPDSNIRDLKALLSYRDKLMRQKTSLSVRMNEIKSTAAKSKTQSLIMQDEKRHIRELEKSIKKCEKEILQIIEQDEQLKKNYLHLTSIKGVGIVNATAMIVYTNNFKNISTANQMASYWGAAPFREQSGTSVNRKAHVGKYSSSRLKAWLTEAAKHTVKENGIYREYYIRMKSKGKPEGVILNNAKNKLLHLAFELIKNDMDYEENHEILRLRRA

SEQ ID NO: 359300 - protein, 412 aa, unidentified
MEVYCGIDWAEDHHDIALADRDGKLLARRRISDDAAGLAGLLDLLAEHGDTPADPVPVAIETPRGLLTACLRATGRPVYPINPMSVARYRDRHSVAGRKSDHGDSFVLANVLRTDLHAHRPLPADSELAQAIAVLARAQQDAVWDRTCAHNKLRSCLREYFPGFLAAYANARGGITRPEARAILAAAPTPADAAQLTVPQLRALLRKAGRRNRIDAEAARLREAFHAPQMRQLPLVEDAMGHQALALLRQLDAACAAAADLEHAVTQSFNQHPDAGIITSFPGLGALTGARVLAETGDDRSRFQDAKGLKAYAGAAPITRASGKTRSVTCRRVKNNRLNAAGYSWAFSALTASPGARAHYDRRKDAGDRHAAAQRNLFGRLLGCLWHCLTTGCEYDETTAFPTTPEKLPRAA

SEQ ID NO: 359301 - protein, 435 aa, unidentified
MDVHKKAIVACRMWTKQNGHVVRETCSFGTTTAELLRLQDWLLAWECSHAALESTGGYWKPVYNIPEGQVEILLVNARHVKNLPGRKTAVGDAEWLADLLRHGLLCASFVPPCGQRELRDLTRQRSNLVRERAAVVNRLQKVLEDANIKLASVATDVLAVSERAMLEAIVGGETDPTVLAKLACGRLRDKHEELEQALTGRVRDHHRFLLETHLRRIDFLDEQIEQFNQRIVSHIEQLSPAPAQVTSPDPATVPATASEKPALSWNNAIELLDTIPGIDRQLAEVLIAGIGIDMGRSPSEHHLSSRAGVAPGDNESVGKRRSGKTMPGNPPLRKALVQAAHAARRKNDCYLGAQYHRLAARRGKKRATLAVVHSILVIAYQVLSRQEPYQGLGGNYFDERKRESVANRLVRRLEKPGCRVALEMQPNSTGSAAAT

SEQ ID NO: 359302 - protein, 348 aa, unidentified
MTMIGGFDVHRQQITFDCVDDDGLVHWGQIRPATRTRLRDWLAKHCPDGNGEFGLEGCTGWRYVSEELLAAGARVHMGDPAEVAALRGPKKRAKTDRSDARLLRTLLLEGRFPESWIPPAQVMEVRTLGGLYCALMDERRSWQQRIHAQLFHQGCPPITALLSHAGREELAGAELSAAGRQYVGTTMRCIDQLNAEIVPLRAQLVDFARHQPGCQALQARHYGVGWLSAAIMWAEIGDARRFHSSDQLVRFAGLDITVYSSDAKRAPGHLARQGSPELRWAAFEAAKCAARPGSPDYAYYHQVAARKDGKRPTLAVERKILRRCYHTLRELGDTALAVPSTKINHIAA

SEQ ID NO: 359303 - protein, 403 aa, unidentified
MGVDWGDRVHQVYVSDEEAAKVREMKVQETPDGLAEMGCWLDARRIEGVELWAAIEKPAGRIVDFLLDHGVTVYPVNPKAVDRVRDRFRMSQSKSDGFDAYVLAEFVRTDHAHLRPLRPNSAQGEELKLLTRDQQRLVHQNTRLLHQLKVTLKEYYPRPLEVFSDLDTQIALDFLKAYPTPAALSELKRKQWNRFAKQKHHLSKPRYEELWEKLKQPQLVVPEHVVRVKAQLIAVLIDQLEVSLKAVKSYSERVKSFFASMPAAKLVKTLPGAKTGTIIATLWAELGDAQSRWESFRHLQAEAGVVPATKSSGKSRVVQFRFACNKILRHAAYWLAFGSLNRSEWANHYYRDQRAKGHSHHQALRALGAKWLKIIFVMWRDHKPYDENYHLANIARQKMRQAA

SEQ ID NO: 359304 - protein, 341 aa, unidentified
MESAAIIGIDLAKSVFQLHGADTTGKPLFRKKLTRDQLSVFLAGQSPTVVAMEACGSAHYWGREIGALGHDVRLIPPIYVKPFVKRHKNDAADAEAISEAAIRPTMRFVPVKSAEQQSRAMIFKTRDLLVRQRNQIVNALRGHLMEYGIVVPAGLTFVRKLEREIEDPDTPLPLLVVELGRLLMDQLQSCNTKIAVVERQMKEEAKRDPEALLLQTAPGIGPVSAMAIKAFGPDMNSFRRGRDFAAWLGLVPLQKSTGGKQKLGRTSKMGQRDIRRLLIIGAMTRIRWAVKNGVPEGSWLQKMLQRKPRLLIAIALANKTARAIWAMMTKGEEYRGEPVSA

SEQ ID NO: 359305 - protein, 412 aa, unidentified
MEVLCERCCGLDVYQKSVVACLLTPDAQGRKQRETRTFGTMTAELLQLSDWLQETGCTHVAMESTGVYWKPIYNPLEGQFELLVVNARHLRTVPGRKTDVSDAEWIAEPLQHGLLRASFIPPAPQRELRELTRYRTRLGQERVRVSNQLQKVLASANIKLATVASDVLGVSGKAMVTALAAGREDPQELAQLARGQLQQKHAALVQALTGAVRAHHRFLLREHLAHIAYLEEAIERVSAEIAERLRPFEEALAHLDSIPGVNRRTAEVLLAEVGSGMRPFPDAHHLASWAGMCPGNDESAGKRRSGKTRKGSPWLKAALVESAHAATHTKETYLRAQYEHLVRRRGRAKAEVAVGHSIPVIAYHLLTRHEDYRELGSSYYDERQRDRTLRRLVARIEHLDLQVTLTPLAQAA

SEQ ID NO: 359306 - protein, 355 aa, unidentified
MASITLLGIDLAKDVFQLHGLDELGRPQLKRTLRRRALVQFVAKLPACTIAMEACSSSHHFSRKFQQFGHEVKIISPQFVKPFVQGNKNDAADTEAICEAASRRNMRFVATKSVVQQDIQCLHRVRKRLVHNRTALTNEIRSIVGEFGIVFAKKRSALVEGIKGLLNGSCPREELSSEGLTLLQDLYSELLELEQRIENCELKLKKISSQPQCQRLFKVGGLGLLSVTALAVALADPGQFKNGRNFAAWLGLAPRHQGTGGKNRILGISKRGDMDLRTLLIHGARAKLRGINAKCRAERKLDPLEDWAYRLCQRQGYNKATVALANKNARIAWSISAHKTEFESHKAVVSLKEGA

SEQ ID NO: 359307 - protein, 379 aa, unidentified
MTLDKYFRQCVGIDISKDKFTACLYMYDMASDTGCCTESIDFPNNRTGFNQMVKWSRKEAQKGFPLVYLMEPTGSYYEPLAYHLHKIGQTLYVVLPNKARKFCEYEGIKTKTDAMDARCLALMGCKNRKLRPWEPPLSIYRELRQLTRLRADLVKMQTQMLNHIESIDHMENVAPEVRKSYEKLLDTIDKQLEKNEKDIAAKLAQDKELETKVKRIATAKGIRVGTVTCIIAETQGFHLISNRKQLTSFAGLDVKARQSGKDDPRHHITKKGNAHIRAALYMPALSAAHCNRQMAQAYGRICTKHPDVKMIGVTAIMRKMLLLVYSLWKSGEEYDETRDNTHTPKKKEPQPTNSPEDCLQPNVEPIDWRATDKEGNPPF

SEQ ID NO: 359308 - protein, 368 aa, unidentified
MQQEKAKNTPSRDKMNTSNYYSMGIDAHKHFCQVHILHPNGDTVWKGRINNTDYHRFPEVVKPLEGPCKAVFESSSNWHVLYDLLGATDGVCEVILAHPLKVKLICAAHLKNDKVDAQRLAQLLRLDMVPRAHATGPESRAIKELVRQRAAWVGMRTRIRNRTHRLLGAVPEHVKLPQATDVFGGKSLKAMRSLKLPAPFDLQLRQNLGMLEHIGTQTGEIEKELQKLMRNHPDISLLATEPGLGKVLACVIAAEVDGTERFPKKSKFIAYCGLAPTTKGSAGISHQGRMIQACNKWLKWAFIEGAWVAMNCDGYLGGRYKRLRTGGKPPNTAITNVARRMAQIAWEILWQRRPYQLHPPQENFPRPL

SEQ ID NO: 359309 - protein, 460 aa, unidentified
MTILNPNAAGIDVHSDMHMVCVPADRVSSPADADSGGMPAHVRRFGANSCDLRAIADWLKECGITTVALESTGVYWIALFELLESRGFEVWLVEPGQLSHCGARPKTDVLDVQWIQRLHSYGLLRPSFRPPDSVMALRGYHRQRQMQIRYAASHTQHMQKALEQMNVKLTEVVSDITGMTGQRIIAAVLNGERDPATLARLRDPKCKNDLETIAKALEGTWRPEHLFALRQAYDLYHFHHQQIAQCDATIQAELARLPNRAADKPFTAKPPRCGRKSNDLHFDACGPLFKALGVDLTEIEGINVGTALVILSEIGVDVSRFPTEKHFASWLGVCPRQYESNRTKKKRSPRKGKNRIAIALRMAAQSLGRTRSPLAMFYRRIKSRIGGKGAITATAHKLACLVYRMLKYGKEYVQQSMAEYEHKVRQQMERSLQRKAAALGYRLVLDPLLTPKSAAEPVPV

SEQ ID NO: 359310 - protein, 344 aa, unidentified
MTYYTGIDVSLRSVSICVVNDKGEVCFEAKVAAEIATIVECLHRFDRDVKSVGFEAGTLTQYLTYGLQAAGFEVVCLEARQVSVTLAAMRNKTDRNDARGIAQILRTGWYSRVHVKSLHSHQVRALLASRKVILKKCVDLENELRGLLKVFGIRLPSRVGHGAFDTELRETVSGDEMLACALVPLLDARTVLYKTYLKLDNAVKGLVCADPICRRLMSIPGVGPVTALTFKAAVDDPSCFKSSRTVAAHFGLTPRRFQSGEIDNPGHISRAGDADVRSALYVAAHSLLTRNAQWSSLKSWGVRLAKTRGHRRAVIAVARKLAVILHRMWLDGSEFRWGSVPTQA

SEQ ID NO: 359311 - protein, 390 aa, unidentified
MSQSFDAGRSLTAFEQDSTLVAVIEMSQSKWLVAAMIPGVARQALKKLDADANALLKLLQRWREEARKAGRVVKRIVCAYEAGRDGFWLARWLQANTIEAYVIHAASIAVSREHRRAKSDRIDTELLMRSLLGWLRGEKRHCSMVAIPTMAQEDTRRPGRERESLVSDQTRIVNRVKAVLALFGIGGFNPRLRKAVQQLETLRTAEGTPLPDNTHAELRRDLERLGLVRDQIRAIERERLRRLAAAPVAATGPHAMIRLIARVLGAAIETADMLVNEVLSRNLRDRRAVARYAGLTGAPDESGKRRREKGLARAGNGRVRRGMIQLAWRFLIFQKDSRLAKWFRERTADGRSTTRKTMIVALARKLLIALWRLVTTGELTEGIKLRPAGA

SEQ ID NO: 359312 - protein, 445 aa, unidentified
MKKQEKNRKTVKRNRAFNGLSVSNPNSAGVDIGSRHHWVAVAPHLTSDNVRKFSTFTIDLLEICKWLKLCKVESVCMESTGIYWIPLYDLLEKNGFEVFLCNATQAKNLPGRQKTDYLDCVWIQKLHSYGLLTNSFIPELAIRDFRNLMRYRERLTQDKSRFVLRMQKLLTQMNILLPKVLSDITGKTGMSIIKAIIAGNTEPEKLLKLKDNRVKASDETFLKALHGNYDTSLIKLLDFELQQYEASNSMISNVDKEINITFLSMHISNSNDNTEITKLSAKDLLIAYAGVDLTEVPGFDILSIRKLIAETGIDMIKWKDSKHFTAWLRLSPHSKISGGKLYSSNTLKHKPRAAVYFRMCAGTLQFSKSYLGDFYRRKKSQKTPGIARTATARKLSVIYYNMLKYKMPYSELGEDYYASMYKSRSVKRLHNYANFLGYRIVKNED

SEQ ID NO: 359313 - protein, 429 aa, unidentified
MTNPQSMPEAVVWVAIDVAKDRHEALIEAPGWKSRKKFRVQNTAEEFRAFAEFLHGLALPVRIGFEPTGNYHRALAYFLHSEGFHLELISSLALARTREAMHNSWDKNDPKDAQVILHLLKAGLTQHYHDPMVHNLNDLQELSKTHHHVSLEKTRTQHRLLTHYLPLYFPEIARYHSSSRSEWLWNLLIEFPTPRSMTRISRDEFVRKAWNFVGRKVAKERILTDIYLTAQSSVGLPAEENSEAVAMLRFVLRQLLTLCQLRATIEKRADELLSSNEDYQRLRRIPGIGPISALTILAEAGDLRRFSHHRQFLKFCGFDLATEQSGQFRGLSRLSKRGNARLRAVFWMAASVAVRMRENSFRAKFERYMRRDPGSADRKRKAYVAVAAKIARVAFALIRSGSDYRCFHEVAVPSGRTRSARAVEAIPTS

SEQ ID NO: 359314 - protein, 337 aa, unidentified
MRYCGIDLHSNNSVVVISDEEDRMLCERRLPNDLAQIVAVLAPYREELVGVVVESTYNWYFLVDGLMDAGYRVHLAHPSAIKKYEGLKYSGDFADAGYLAQLLRLGLLAEGYIYPREERAVRDLSRKRLQLVRYRTAQVLSIENILARQTGARLSSEAVKRLTAAQVEELGFAPDVALAVEANRAVSQALAQQIAALEQRLKERVRLRGEFKLLKTTPGVGDTLATTIMLEMGTPTRFAKVGNFSSYCRCVDSLRESNEKKKGEGNAKNGNKYLAWAFVEAANFARRYCPQAKSFYERKKRKTNGILATKALAHKLARACYHMLREQKPFDVSRCFG

SEQ ID NO: 359315 - protein, 454 aa, unidentified
MPKTTSGGRPEFKPVNVRAAAIDIGSKMHMAAVDPACTDTPVRAFGTFTQDLHDLADWFKACGVTSVAMESTGVYWIPAYEILEQRGFEVILVNARYAKNVPGRKTDVSDAAWLRQLHSYGLLRGSFRPDAEIATLRAYLRQRERLVEYAAAHIQHMQKALMEMNLQLHHVVSDITGVTGMRIIRAIVAGERDPDVLATHRDVRCHSSIETIRAALVGNDREEHVFALTQSLELYETYQAKMLECDRKLECLIAALSNGGTKPVGKLPKPRVKTKQVNTPSFDVRTALYGVLGVDLTEIHGLGPSLSLKLIGECGTDLSAWPTAKHFTSWLCLAPGNKVSGGKVLSSRTRRSSSRAAALLRLAATTVGRSDTALGAFYRRLALRAGKAKAVTATARKIAVLFYNTLRHGMTYRDPGADHYEEQYRSRVVANLRRRAKSLGFVLHAAPGGQLAVS

SEQ ID NO: 359316 - protein, 478 aa, unidentified
MTPESNVQPENPPTAKFSKQLDIINPHCAGLDLHKDIIWACTAPFRDGIAPEVVTFPTHTEGLQQLVSHLKTRRVTTVAMESTGVYWLMPYLTLLDADLAPCLVNPSDVKNIKGRPKSDRADSVWICRLHTYGLLRASFIAPPQILNLRNLCSTREKLIVEAGSAIQRMNNELVKMNLRLDGVLTDIGGKSGMLVMEAIIRGERSPDALYALLASQIKDRGKEKIIPLLTGRYDEFSIFSLETWYSLHKSIQQNIERVNEKIYQLLQSLPKKASASNLPPVKKNYREDYLNFPHPLRPIFYEIFGHDLTQLPGVGADLLLTLVSTVGTDLSAWPDSKHFTSWLGLAPVNRESAGYRKSGKTKRTSNPLANAFKMAAMSAARTQTYLGENARRLRIRITPKKAKVATARKLAEIVFNIIRHDMPMHVKTMEEYEMRRKKREIQHFVKSLNKFSKDGELMPEVLEEIQRQNTNFTTTVAI

SEQ ID NO: 359317 - protein, 341 aa, unidentified
MKNVSTIGLDLSKHVFQANGADKSGAVVFRKKLRRQQVLPFFATLPPCTVAMEACAGSHYWGREIGKLGHSIKLIAPAYVKPFVKRQKNDASDAEAISEAAQRPTMRFVSVKSEEAQAAAIVFRTRDLLVRQRTQTINALRGHLAEFGMIIAKGPQHLSKLIAMVGDPTSHLPEAARSILALLVEQLRALEERVTRLDREIAGRAKEDKVARRLMTIPGIGVVTAVALAALAPSPETFKRGRDFAAWLGLTPLQRSTGGKERLGRTSRMGERTLRRLLIIGASSVAAWTARKGALAGSWLDRMLRRKPPMLVRVALANKMARVAWALLANGGVYRTPIVAA

SEQ ID NO: 359318 - protein, 386 aa, unidentified
MHRATTLPVSEQTCSPEHCATLFVSLELSRSTWVATTLAPGSTKMSKHTLVGGDGRKLLDLLARLKTRAEQRISAPVKVVAIHEVGLDGFWIHRLLEANGVESHVVDPASIAVPRRHRRAKTDAIDGETLLRTLMAWQRGEPRVCAMTVPPSPSEEDRRRMTRERAKLLQERIRHTNRIRGLLFGQGITNYNPLHKNRRKGLEELRTGDGRSVPAHLKSEILREIDRLELVLRQIGEVEAERDEMLQLAQASSPAALLMRLKGIGPEFATVLYLEGLFRQFGNRRQLAAYAGLAPSPWKSGSIDQEQGISKAGNPRLRTTMVELAWMWLRYQPASALSCWFRQRVGSKRGRVRRISIVALARKLLIALSRYVSHGEIPTGAIVKAG

SEQ ID NO: 359319 - protein, 331 aa, unidentified
MALTIVEDTRAVTGGVDTHADMHVAAALDPVGGLLGVGEFPATAAGYARLLGWLGGFGTVCLVGIEGTGSYGAGLARHVTAAGIRVVEVDRSDRQDRRRQGKSDPLDAVSAARAAQSGRARGEPKGPDGAVEAIRALMVAKRSARSERTQTINQARALIVTGPDDLRARFARHTAAGLVSELAALRPRPGATVGYATRIALRELGRRAEFLDGQLGRLDELIVPLVTARAPALLALHGVGPDTAALLLIAAGDHPHRLRSEAAWAHLCAVAPIPASSGKRTRHRLNPGGNREASHALWRIVITRMSSHAPTRAYVERRTKEGLRRRRSSAA

SEQ ID NO: 359320 - protein, 455 aa, unidentified
MPKRTTGDRPELKTVSVGAAAIDIGSKMHMAAVNPACTDVPVRSFGTFTQDLHDLADWFKACGVTSVAMESTGIYWIPVYEILEQRGFDVILVNARYAKNVPGRKTDVSDAAWLRQLHSYGLLRGSFRPDAEIATLRAYLRQRERLVEYAAAHIQHMQKALMEMNLQLHHVVSDITGATGMRIIRAIVAGERSPDVLATYRDVRCHSSPETIRAALVGNDRDEHIFALTQSLELYDIYQAKMLDCDRKLEVLIAALSNKGGKPVGKLSKPRIKTKQVNTPTFDVRTALYGVLGVDLTEIHGLGPSLALKLVGECGTDLRAWPSAKHFTSWLCLAPGNKISGGKVLSSRTRRSSSRAAALLRLAATTVGRTDTALGAFYRRLSSRAGKSKAVTATARKIAVLFYNTLRHGMSYRDPGADHYEQQYRSRVLANLQRRAKSLGFVLQAVPGDADPAVS

SEQ ID NO: 359321 - protein, 319 aa, unidentified
MAQNDLVVVGIDVAKDKVDACIRPLALRQTCPATAQGHRKLVAWLRKHQVSMAVMEASGGYEREWRKVLHKASIEVRIVDPKRVRNFALSAGRLAKNDAIDAEMIAWFAETFSEAPSQTHDTAHEELVALVKARIGLVELKTRLQSQDAHAAPGQVRKAHARVLKSLAAEIEKLEATIAAKIKATADFAERAEIIESVPGFAETTSANLVAAMPELGHVSDRIAAALIGLAPYDDDSGQRRGERHIKGGRRWIRNAIYMPCLGAATQNNPVIKAFYDRLIAKGKAPKVALVACMRKLIIILNTLIARRQKWHPGRYVLA

SEQ ID NO: 359322 - protein, 339 aa, unidentified
MKYTPVGVDIAKHLIQVHFIDEHTGEVIDKQLRRQDFLMFFCNREPCLIGMEACRGSQHWGRELTKLGHKVRLLQAHFVKAFVMGNKNDVMDARAIWMAVQQPGKDIAVKTEEQQSVLVLHRSRRQLVKFRTMQINSLHGTLLEFGKTIHKGRAAMERELPEALERMKERLPPYLITVLENQYNRLNELDSLIEDIEKKLTSVARQNETCKRLLDIPGVGPLIATAAVATMREASAFKSGREFAAYVGLVPKQTGSGGKIRLLEISKRGNTYLRALFIHSARAAALLPKEPGPWITELKKRRPTSVAIVAMANKLARTVWAIATHGSKYDKNHVSIRSY

SEQ ID NO: 359323 - protein, 357 aa, unidentified
MSVYVGIDVHRKRSQVAVINEGGEVLANRNVPNGTQPVLGVIGGLPPGTPVAFEAAFGWGWLVELLEGYGFAPHLVHPLQCKAIASARLKNDKVDAAILAQLLRADLLPEAWIAPPPVRQLRALLRHRAQLVRLRTLLRNRIHAILADHGHDRPGGCWSGPGRAWLASLELPAVSRELIDDDLALIDALQVPIDRLDWEVHQQARRDPRVKVLTQLPGVGPYTALVLLAEIGEVSRFSSARKLASWAGLTPNVRGSDRVAHYGHISKQGSAWLRWILCEAAQTAKRHPDFAAGYQAIAQRRGKKIATTAVARKLLTRAYHLLADAANGGTPTSPEGRQAPGELAFLHEPAPRPRSMT

SEQ ID NO: 359324 - protein, 407 aa, unidentified
MLFVGDDWAEDHHDVELMDAGGRRLAKARLPEGVVGVARLHAMIGEHLGDADDEAVIVKIGIETDRGPWVQALIAAGYTVYPVNPLQAARYRERLAVSGAKSDAADAHMLADMVRTDSHQLRPAAGDSPDAEAVKVVTRMHKTMIWDRDRAVQRLRHALREYFPAALAAFDDLDAADTLELLGKAPDPAAAARLSLTQISAALKHARRRGDITAKAAAIQAVLRAQHLGQPVVVAAAYAATTRSLIALLITLNEQVSALQGQVEAHFGRHPDAEVILSQPGLGVILGARVLAEFGDDHARYSSAKARKNYAATSPITRASGKKKTVIARYVHNDRLVDALHYQAFCALRISPGARAYYDRQRTRGISNNAALRQVANRLVGILHGCLKTGTPYNETTAWAHHLSQTA

SEQ ID NO: 359325 - protein, 397 aa, unidentified
MYIVGIDIAKRKHEAAVIDGEGTVIIKPFSFTNNCSGYNRLLAMLTKAKLPLDEVSFAMEATGHYWLALFTRLQKEGFRVQVINPVQTNSIRSFYIRQVKTDPRDALLIAEVIRFGHFSESTLHPENIYELRELCRGRHAIVSMQADVKRKVVALLDQVFPEYETAFTNLFGDTSMAILQTCPTPKELSETPLEELCHLIEVSSHKRFRMAKAQELQELARNSFGFAMAGDVFSTMIRLYAKHLDFLKQQVREMDRKIAEIMETLDTPITTITGIGPTLGAYILSEIGDISRFSSAAKLAAYAGIDPTMRQSGEYNGVRNRMSKRGSPYLRHAIWLAASSAVLHDPALKLYFQKKRDEGKPYMASVGHACRKMVSIIYAVMRDNKAYTPYIPNEISA

SEQ ID NO: 359326 - protein, 343 aa, unidentified
MGEVSTIGLDIAKSIFQIHGVDADGAVVIRKRISRAKLLEFFTTLTPCLVGIEACPSAHYWSRRLQALGHTVKLMPPSYVKAYLKRSKNDANDAAAICEAVTRPSMRFVATKSEQQQCGLMLQRSRQLLVCQRTMLSNAIRGHMAELGIISAKGRNGTAELLKIVADEHDDRIPAAARFSLDVLARQYAIVRAEIVSIEKRIHTWHRSSEESRRLEEIPGVGPIVATALVAEVGDWKEFTSGRSLAAWIGLVPRQHSTGGKERLGRISKQGNRHLRWLLVAGAMAVIRYARQHGTKRPWLARLMDRRPIKVAAVALANKIARMAWAMMVRGEHFKEPKLLPTT

SEQ ID NO: 359327 - protein, 347 aa, unidentified
MRFYTNTHQHYCGIDLHAKTMYLCILDREGQVLLHKNMKSCPEAFLEAVAPYREDLVVAVECMFTWYWLADLCRREGIEFVLGHALYMKAIHGGKAKNDKVDAFKIATLLRGGTLPKAYVYPPEMRATRDLLRRRLHLVRRRGNLLAHIQNTHHQYNLPVPAAKVAYKANRTGVAESFTEPDVRKSMEVDFGLIEHYDDVLRDLQLHLERRAKHHDAQAYHRLRSVPGIGKILALTILYEIHDIARFERVQDFLSYARLVKCEHSSAGKKLGTGGAKIGNVHLKWAFSEAAVLFLRNNPEGQKHLRRLAGRHGKAKALSILAAKLGRAVYFMLARNQAFDLERFSKS

SEQ ID NO: 359328 - protein, 348 aa, unidentified
MLADQLDYVVGVDPHRDSHALAVVQVVSGAVLFEAAVTASSDGYANALKLVDQHAKGRRAFAVEGTGSFGAGLTRFLTANGERVLEVGRLRRERRSGGKTDALDAIRAARSVLTQNRPATPRASGEREALRALMAAREGAVNAKRAGLCQLRDLLVTTPEPLRSELRPLTRARLLQRLAATRPERRHDPELRGALLALRSVARRVLQLTAEERELAREIETLTRKLAPQLLEQPGVGPLAAAQLLLSWSHRGRISSEAAFARLAGCAPIPASSGQTVRYRLDRSGDRRLNRALHMILVTRRRTHAPTIAYISRRTQEGKTKREATRCLKRYLARNLYRLLEQGAPPAT

SEQ ID NO: 359329 - protein, 411 aa, unidentified
MPKARKRYVGLDVHKNVVEYCILDSEGKKLDGGNIICEQSVLVKFAQNVLSPNDHVALETTTSTWTVVDILEPFVEKIVVGNPLRTRIIAEAKVKTDKVDAMILAQLLRCDFLPSVWVPDKQTRELRRITTFRKSLVEKATAAKNRIKSILNHLLIKHAVTWTKEGLEELKHLALPPVERVIMDREVAILEHQELQIENINLEIQKLAYAEENVRLLMTLPSVGYNTAITLLAVFGDISRFKDADHAASYLGLVPTVKQSAGVTYYGPITKTGSALARGMLCEAAQSLFKNDGPLGVFIRRVRDKQGGGKAVVAGARKLATLAYHILKNKEPYRYATVVSTREKLRILRKKAGGEKPHYPQYHRDEEVQRNRPEGDFAVRYVPPLADVYKNEGLPPALTFNGTILLFCSKA

SEQ ID NO: 359330 - protein, 412 aa, unidentified
MDIVYERCAGLDVHKKTVVACRMLRQADGHWQQETRTFGTMTVDLLALADWLRAEEVTHVAMESTGVFWRPVYNILESEFTVLVVNAKHIKYVPGRKSDVKDAAWIAEVLQYGLLKPSFIPSAPQRALRDLVRYRTALIQERAREINRVQKVLEDANIKLSSVATDVMGVSARDMLTQLIQGQTDPQILADLARGRMRAKLAELERALTGRIHAHHRLLLGLHLEHIDDLTTKLKRLSREIETAVAPFDQTDELERLDEIPGVGLEVAQGILAELGTDMSRFPNGAHAVSWAGLAPGKNESAGRNRSAKIPKGNKHLKALLVQAANAVSRSNDNYLGAQFHRLAARRGRKRAAVAVARSILIIAYHLLRDGTRYIELGADYFDKRNQHYLEQHLVKRLERLGHKVTLDPRAA

SEQ ID NO: 359331 - protein, 351 aa, unidentified
MYTLGIDLHKKTSVWVLIDEERTELWKESVPCHPEYINIAMEKIPISPKEIQVAIEPVAGYRWVSQQLKEAGMDVHIAHPRKMQLIAKSTKKTDEEDSRTLANLLQSGYFPEAHLAGEDVYQLRLLLRERTFIVRQRTSVKNQLHGIATTQGLHLIPSGNPLFKRGKESIMAGDNFVMKELHHLEEELGERIKPFDERLKKEALKYEEVALLQSMPGVGIITALTIISEVDDFKRFKTGQKLTSFAGLVPRQRSSGETIRYGSITHAGSKPLRTAVVETAMRIRESNAPELFAFVKRLTPICGAKKARVALARKLLVIMWKMVTTNTPYNPSILSSSCITNVSDLDTGSDV

SEQ ID NO: 359332 - protein, 365 aa, unidentified
MNFIGIDVHKKQSQICVLDEQGEVCFETRVPTSRAHLKDAVLIYKGAKILLESSTPSEWVARHFESMGMDVIVADPNFAPMYATRSKKLKTDKRDARCLAQACKLGAYKVAHRLSDEQRRVRMQLDVRQTLVETRTKLTNQIGALLLGSGYLVGTGAAENYARRLEALDLPSELRGQLAPLVNMLTPLNQQIGELDKQIEQRADAEPEAKRLQSIPGVGPVTALMFLAVLDGAKRFDHAHSVMSYLGLVPREFSSGEKQLRGHITKAGASRARSLLVQAAQTMMRVKKPQTEALCKWAEGIAQRRGKRIAVVALARRLSGIMWAMLRDGTEYTQRPVSSPVQRVTESMKSLQARSVRTQREGHAA

SEQ ID NO: 359333 - protein, 414 aa, unidentified
MSPPLLVGVDPHRKTNTVSTMDPAGRETGQRFTIQNNRPGTEAFAREVAQRALDGDFDAIHIAAEATGWYWWHFFQTLDQDPLLNQWPLSLYPFNPRLTRNYKKTFVDLDHEDLVDAFVVADRLRIGRDLPAPFHYEERYFPVRMLTRYRYHLVHQLAREKSYCLAILYFKYSEYSRKDKKPFSDLFGVTSRAVIQEFASIEEIAALPFDELVEFIDRTGKRRFPDPADNARKLQRVVRDSYLLPQALQQPVNLILSLSLRQITVLESLEKRINTAIAEGMSAIYHSLDTIPGFGPVFSGGIVTEVGDIARFDYNQAKVAKYAGLKWRKTQSGEFQAEETRLTRTGNRYLRYYLCEAANRVRQCDPEYRAYYDRKFHEVRKHQHKRAIVLTARKLVRLVVRLLTTNEPYRPRRL

SEQ ID NO: 359334 - protein, 444 aa, unidentified
MKTELPNIYEQAAGIDIGADKIFVCAKDGEYQVFRCFTEDFRKAAAYIKENGVSRVAMEATGVYWIALKDILEQEGLVVDVVKAGDAKQLPGRDKTDGADCQWIRTLYQKGLLRPCVIPDAAIRELRTYVRMRQDHIEMAAQHVQQMQKALIQMNIRLPQVLSDIMGASGKRIIEAIIKGEKDPEKLVLLCDRQILKNKREEVVLALEGNYREDYLFLLSQAYQGWQFYNELMKECDKKINEWLERHTKDKAPLEQVTPAKSIRHHKPDIEKLHEKVLLLNDGKDVTRIPGFTDYTVLRLIAEVGTDMSKWKSAKHFVSWLGLAPKKRYSGKGKRHYRGIANTKAAQILRESAQALLRSKHCALGSFGRRIRSTRGPAIAIKAMARKLGILFYNTLTKGIEYVEQGIKKYEEQVRQTELSKVTKWAGRLGYTLIPNQQINVVHQ

SEQ ID NO: 359335 - protein, 334 aa, unidentified
MENIALIGIDLGKNSFHIHCQDRRGKAVYRKKFTRPKLIEFLATCPATTIAMEACGGSHFMARRLEELGHSPKLISPQFVRPFVKSNKNDFVDAEAICEAASRPSMRFVQPRTESQQAMRALHRVRESLVQDKVKTTNQMHAFLLEFGISVPRGAAVISRLSTILEDNSLPLYLSQLLLKLQQHYHYLVEQIKDLESQLKRKLDEDEVGQRLLSIPCVGTLTASTISTEIGDGKQYASSRDFAAATGLVPRQYSTGGRTTLLGISKRGNKKIRTLLVQCARVFIQKLEHQSGKLADWVRDLLCRKSNFVVTCALANKLARIAWALTARQQTYVA

SEQ ID NO: 359336 - protein, 460 aa, unidentified
MQEQREEDRGRTRKSLEGLPSIRPLVAGIDLGSERHWVCAPTVDGTAREVADFGATTPELLRLAEWLKQRRVSSVAMESTGVYWIAPHEVLEAQGLEMVLMDTRQLARVPGRDQRSDPTDCEWIQRLHSCGLVRGSFRPREEVCMLRTLVRDKANLVAESGDWVRRMQKSLDQMNVRVHRAVSDLDGATGMAIVRAIAAGERDAHQLAKLRDPRCRKTEQEIAEQLSGHWREDHLFSLRQALKMYEAIQQRIADYDQEILRKLSAMQREDLRDQPPPSIGNPKKAKRIHRSGEETIRGALYRMSGVDLTSIDAIGVETVPVVLSEYGPDLSRFATEKEFVSHVRLAPRRATSGGKPVSKKRPNTASTRVAGALRMAALSQRNSTTALGAYYRRIACRIGGDVAVFATARKLATLIYRLLRWGQGYVDEGAEAFERRYDAIRISALKAKARELGFELVQGA

SEQ ID NO: 359337 - protein, 337 aa, unidentified
MFMQVYGIDLSMEKFDVNFIDAKGKERNREVKNGVVSISRFLSSVPEDSILCAEHTGAYGDLLVSLCNQANIPIALVPGYSIKHSLGLVKGKSDPLDSRRIREYGERFTDKLTFTEYDEESIVELKQLYTLRSQLVKARKALLTSEKGRRHLPMQNVSVHNHLQSVLSGLDAEISAVEEEIEALIKADQDLNENYELVTGIKGIGPVIATDLLIKTGNFETIDTARKAASYAGVCPFPNTSGKMMGKSKTSPFADRKLKSLLFMGAKSAVKHNKEYRLYYQKKQLEGKPHYLIMNNVSNKMLRTIYSVVKNKTPYNQDHICLDPRERKINSSTKKVA

SEQ ID NO: 359338 - protein, 411 aa, unidentified
MEVLFPRCAGLDVHRDSVVACVRIAENGAVSQEVRTFGATTKELLALSEWLTEHGVTHAAMEATGVYWRPVWHVLDGSVELVLANASHIKNVPGRKTDVNDATWISDLLAHGLIRGSFVPPTPVQELRGLTRTRKQLVRERASHVQRIDKILQDTNLKMGSVLSDIMGKSGRAILAAIVAGESDPEKLVTHVGKGVKASRAKLVESLRGKVTPHHRFLLRLHLTQADALEAAIDAVDKEVGEHLEPFRIAADRLIQIPGVSEVAAAAIVSEIGIDMARFPTPGHLISWAGLCPKNDESAGKRRSNRLRKGAPWLKTLLVQCAWSATRANATYFQAQYRRLASRRGAKKAIMAVAASILTSIYVMLRRGVDFVDLGADHFVKNERAKTANRLLRRLGELGYEVGELRDKQAA

SEQ ID NO: 359339 - protein, 370 aa, unidentified
MSQSTTLFIGMDVHKDSIAVAYIAQDHGAEVTYLGTIGTRQCDIDQLIRKMQSKAKHLVFVYEAGPCGYWLYRYLMKKDYDCWVVAPSLIPQKAGDRVKTDRRDAVQLARLARSGDLTSVYVPKVEDEAIRDLTRAREDPLSDLKDAKFRLKAFLLRHDIRYTGQANWNPAHLRWLSEVVCATPAQQIVFQEYVRAVTEHTERLQRLDQELQERVKAWRLNPVVEALQALRGVQFTVAVTTVAEIGDLTRFDTPRELMKFLGLVPSEYSTGERRRQGSITKAGNTHARRALVEGAWAYRYPAKVSRHLQLRLEKHPKAIQDISWKAQVRLCKRYRKLIARGKHANQVVVAIARELVGFMWAIAKAVPVTR

SEQ ID NO: 359340 - protein, 388 aa, unidentified
MQATNPTFTTRSTSPDQAAIVVSLELSRAVWLVTALLPGGPQKMSRHQVHGGDLTGLLSRFAELQRKTHARTGQLARVVVIQEAGLDGFWIHRVLESEGIESHVVDPASIAVSRRHRRAKTDRIDGEALVRTLLAYKRGEPRVCAMVRVPTPDEEDQRRLCRELKTLVSERLRHVNRLRGLFFSQGIADYDPRRPDRQARLDELRTGDGRPLPPHLKAVARRELEIIELLDRQIAAVKAERDALLAAAQTAEVPSKAVQMLLGVKGIGSGFAGALWSEGLFRHFDNRRQVAAYAGLAPTPWKSGRIDHEQGVSKAGNPRLRAILVEMAWLWLRHQPGSALARWYHDRVRLGGRMKKVTIVALARKLLVALWKYVTHGVVIEGAALKAA

SEQ ID NO: 359341 - protein, 328 aa, unidentified
MRKETFYIGIDVGQKELWAAMEGHKPRSFAHTVVGIRALWNWVRRINAEVTLHFCMEATGVYSQSLATCLVTYPDTQVSIINPAQIASFAKAQLRRSKTDRIDAQVILAFAQCQHPRIWRPQPKTLQQLYALVVQADALRATQRQWANRRHTQAYIPVLPDVVRKTSTALQRSIERQLAKIEKSIQELCASDPTLKIQMQLLCSIPGVAEHSASRLLAYGKTALTSYSVKALVAHAGLAPRHQQSGTSLQAKSHLAKQGDKRLRHALYMPALVGIVHNPILRKHYQRLLAKGKPKMLGLVACMRKLLIIAKAILTQQISFNPTIQSLT

SEQ ID NO: 359342 - protein, 420 aa, unidentified
MTISNSIPADAVLVAIDIAKVRNEVLIEAPGDKRRRRLQVLNNRAEHDRLIEVLRAYGRPVICAFEATGNYHRSLAWRLAEAGFEVRLVSSLALARTREALHNSWDKNDPKDAQVILHMLGIQATQRYHDPLRAGINDVQELSKTHEAIARAKTEIQHRILTHYLPLYFPEIDRFRGNSRSDWFFAFLDAFPTPASITMLTKEEFVKAAWDVVGRKVSKTQILMDIYETARTSIGLPLPLDAPAIRMFRMVVAEARSLIRQRNEIETQADELLRHSQDYQLLRQIPGIGPINALTIIAEAGDLRRFHHHRQFLKFCGLDLSTQQSGQYRGQTRLSKFGNARLRRTLWIAGQVAIRQRENGFRHKFERYIARDRDNPDLRRKAMTAITAKMARVVHAVVKGGSDYRPFVEGRVPGGRTSVS

SEQ ID NO: 359343 - protein, 351 aa, unidentified
MSHTLKAAIAVIGIDIGKNSFHIVGLDQRGAIVLRQKWSRGQVEARFANMPPCLIGMEACVGAHHLSRRLNALGHDARLMPARYVRPYSKGQKNDFRDAEAIAEAVQRPTMKFVATKTAGQLDLQALHRVRERLVSQRTGIINQIRAFLLERGIAVRQGQRFLRMELPRILATPPEVLSPRMVQLIEGLASDWRRLDERIEALSGEIADLARRDAGCERLMSIPGIGPLISSAMVAAIGTGDGFSKGRDFAAWLGLVPKQISTGDRTILGKISKRGNRYLRVLFVQAAWVVLAKVKPTRWDGHGLKRWIEAAKKRLHHNVLAIALANKLARIAWSVLARGRAFEASRLQVA

SEQ ID NO: 359344 - protein, 347 aa, unidentified
MNIVKQSVGIDVSQKELVVCLGRMDSEFSPELYSHKVFKNTEHGHKALLTWVKKHTIESVNLRFVMEATGVYHESFAYFLDEKGYNLSVVLPNKISNFIRSFNLKSKNDKADSRAIAMFGLERKLDDWHRPKQVFREMKQLTRERDQVIHERTIIKNQLHAEKTEARPNQGSIVRLKERISLLNKQEAEINKEIEELVKNDKELHKIIAIICTIPGIGLITASIVLAETNGFELIKNKKQLVSYTGLDVRERQSGTSINGKPRITKRGNKHLRKAMYFPAWTAITRDERYKLIYSRHIAKHGIKMKAGVVIQRKLLEMVYTMYKTGVPYDKGYLQNQEEIKKAVDYI

SEQ ID NO: 359345 - protein, 392 aa, unidentified
MFYVGIDIAKKNHEASIIDSNGKLLDKSISFSNSQAGSSKLISLLEKYNISTSNVVIGMEATGHYWLSLYSHLLDLEYTVYVINPIQSDAFRKMYIRQTKNDSKDSFVIAQIMRFGEFSTTSLANDDIMSLRQLSRYRLALVDECSDWKRKCIAILDQVFPEYSKLFSDTFGVTSKELLAKYPTPEDMLSVDTQTLTELLSKSSRGRFGALKAAEIKESAKNTFGISLARNAFAFQIKQIIAQIDFIEDQLDELEIEIATLLHQTNDVITSITGIGDILGAIIIGEIGDISRFESASQLVAYAGLDSSVKQSGDFVGTKTKISKRGSPYLRRAIWLAATVAAFKDPALSVYYQSLRLRGKHHLTAIGAVARKMTNIIFAVLRDDKPYVPNIR

SEQ ID NO: 359346 - protein, 420 aa, unidentified
MDTLIERCAGIDIGKDEVVACVRVPGPGGRGRVKKTRTFAAFTPTLEAMIEWFSEYGVTAVVMEATGSYWKPVWYLLEEHPGFELMLVNAHHVRILPGRKSDVLDAEWLAELLEHGLLRGSFVPPQAIRELRDLTRYRRRMIQTHTSECQRIEKILEDAGIKLGSVASDVLGVSGRAMLSALVAGQRDPVVLAEMAKGTLRRKIPALRQALQGRFHDHHALMIGLALEHTAYLETSIARLDEQVDTLIAANTTEGGVPFGRARDRLETITGVGKRAAETIIAEIGTDMTRFPTAAHLASWAGLAPGNNITGGKRRSGKTTKGDVWLISILTQCAWAAARTHDTYLAAQFWRLARRIGKKKAAVAVAHSILVICWHLLTNDCNYDDLGGDYFTRRNTNRQRDRLVNQLHNLGYRVTLEQPA

SEQ ID NO: 359347 - protein, 414 aa, unidentified
MEDTVEVLHQRCAGLDVHKKTVVAAVRLVEGNKVITEVRTFATTTAGLLALADWLTQNGCMHVAMEATGVYWKPVWHVLSDGEIELVLANAAHVKNVPGRKTDVSDAAWLAELLAHGLIRASFVPDGQTQELRALLRTRKQLVRERSRHVQRIHKVLEDANIKIDAELSDMLGKSGRAMLNAMVAGETDPVRLAALAHPNVKSPQAKLAEALRGRVTHHHRFLLQLHLQQIDGLNTALGTMDGEIEANLTPFRSAVEIVSTHPGISTLSAQAIVSEIGTDMSRFATAGHLLSWSGLCPRNDESAGRRRSNRLRKGAQWLKTTLVQCAQAAKNKKGSYCQAQYLRLRSRRGPQKAICAVAASILTAIYHMLKNGTVYQDLGADHFNRRSKITQTQRLVKRLEHLGYAVEIQPLAA

SEQ ID NO: 359348 - protein, 342 aa, unidentified
MGEVSTIGLDIAKSVFQVHGEDVDGGVVIRKRIGRSKVLQFFGALPPCLIGIEACPSAHYWSRRLQGLGHTVRLMPPSYMKAYLKRGKNDANDAAAICEAVTRPSMRFVPIKSEQQQSGLMLHRSRQLLVRQRTMLSNAIRGHMAELGIISAKGRKGTAELIKIIGNDDRIPAAARFSLSVLARQYEAIAAEIGAIEKHIHAWHRSCEESRRLEGIPGIGPIVATALVAEVGDWTAFSSGRNLAAWIGLVPRQHSTGGKDRLGGISKQGNRYLRWLLIAGAMAVIRYARQHGTKRLWLVRLMERRPPKVAAVALANKIARMAWAIMVRGERFEESKLLLAAA

SEQ ID NO: 359349 - protein, 472 aa, unidentified
MVLPPKKCKPLAELRKKPLLTACEAVFEERQVQAQMERLNWDAAGIDIGATSHFVAVPADRDEQPVREFPAFTADLERLADWLKECGIRTVAMESTGVYWIPLFELLESRGFEVLLVNAHHVKNVPGRKTDVLDCQWLQQLHTFGLLRGAFRPEEPMCVLRAYLRQRANLVRYAGMHIQHMQKALNQMNLHLHHVVSDITGVTGMKIIRAILDGERDPQVLAEHRDRRCRQSAATIAKALHGSWREEHLFALRQAVELFDFYQQQLARCDEEIARVLARLDPATDADAPPPVRKHKVDRNTPGIDDLREQLFRLVGVDLTRIDGLNPHSVLKILAEIGTDMSRWPSVKQFCSWLGLSPGNKISGGKRIGKSKTTPSANRAAAALRVAAQALSNSQSALGGYVRRQKARLGAPKAITATARKLATILYSMIANQTEYAPPDANYYDIQYRKRVMANLRRRADQLGFDLIERTT

SEQ ID NO: 359350 - protein, 343 aa, unidentified
MSEVSIIGLDLAKHVFQAHGADKDGHCVFRKRLRREEVVAFFARQPLCRVFMEACGSSHYWARQIAALGHEVKLIAPAHVKPFVRRNKTDAADAEAICEASVRPNARFVPIKSEAAQAGATLLRTRQLLERQRTQAINALRSHMAEYGFIAPQGRAHIDRLIAMIQDKEVALREEARIGLSALVSTISSLTQHLDRLDNQIKVSVKQNETARRLMTIPGVGPMTAAFIMALIPDPSVFRCGRDLSAWVGLTPTEHSSGGKQRLGAISKRGERSLRRLFLLGAAAVVRQALIKPPAPTSWLAKMLARKPRMLVITALANKIARVVWALLAKGGVYRERTEALAK

SEQ ID NO: 359351 - protein, 343 aa, unidentified
MTQQTISGIDLAKHVFQVCMVTPTGTLKTNTAVARGKLLALIARQPPALIFMEACGGAHDWARRFCALGHEVRLLAPQYVTPFRRGQKNDPNDALALAEAGQRPNIPTVPIKTIEQQDLQGLHRVRERLVKHRTAVVNQVRGLLLEYGIVIPQGIARLRKRLPRVLEEADNGLSFLMRDLLQSLQSELSALDARVTEVTGQLARLSHEMEACQRLQEMEGIGPLSATALVAALGNGHDFQTGRQVAAWLGLVPRQHSSGGTTRLGGITKGGNSYVRRLLIHGAHSVISHVRDKPDAKSAWIRQLVMRIGVNKACVAVANKMARVAWALLHTGDHYRKPRALVA

SEQ ID NO: 359352 - protein, 344 aa, unidentified
MDNHTQYSGFAGVDLAKKVMQIHFVTGDGEITDKQVKRAEFLDFFRNRTKCLIGMEACGASQDWARKLEAMGHEVHLMSPKAVKPFVSGQKNDHNDAIGIYKAMFNGVRRVPVKSTEIRDLQTLRRIRSQVTKDKVKEINHVRGLLAEYGIVIGKSLNAFNKDISSALEILTERGDVSPLVAEELRTTVEAIKAKIERQKKLDQEIEQLARGCKNYENFLKTPGVGPFTAAMLCVLLCDPSIFANGRQFAAYIGLAPRSRGSGGKNYVTGIPSKFNCDSESRAVLVECAQAIARCKNKSLWVEEILRRKPKKVALIAIANKLARQVWAMANKGESFKQMAVLTA

SEQ ID NO: 359353 - protein, 359 aa, unidentified
MLFAGIDYHKRYSVVHVLDGDGVTVKKGRVEPNSLGGFAGFFSSFPARSVRAVFESSMNWGYLYDLLHEVEAVADVTLANPYKTRVIAEAKIKTDKIDARWLAVLHRGDLIAESHASSAEARHLKELLRQRSYFVRQRTSLRNRIHVLLGTQRNLEMPQVSDLFGKKGMEALRKLRFDQPHRQLMLQQDLDLLKELETRIKEDEKAVAAKFEGGGDYGFVLSVPGIGPILGEVILSELDGIARFPSAKKMLGYAGLAPTTSSSGGKTYHGKMIRSCNKWLKWAFVEGAWVAVGCDPYFGGIYRRARDRGKGANTAITIVASRMATIVFHLLKEHRMFEPFPPKASENPGRPCRSLAGGG

SEQ ID NO: 359354 - protein, 394 aa, unidentified
MKLVGIDVGKNSHHFCVMDKETGEFNVAPTSFSNNKEGFDFLINSLKPYSKKSILIGMEDTGHYHVALLKFLLSNGYTVALINPKTTDLTRKMEGGITKNDKLDTITICDVLDPPERKKQYRITKVDRFDLYEQRQLTRHHHNLKEELNVYCNRLQKSIDLVFPEFNTLFSSKYSIVYMNLLKTFGSAEAIASTDIRTIRKCFEIKGRGNRISLTPEKLKECAKNSIGISSEVETIQIKHLVSQITLIKEQIAEIDKKIEEFSITNNSPILSIPGISHFSGTSILAELGDIGNYSKPSQIIKFAGVAPYHYESSQYNAQHTGITKKGSKYLRKTLYQIILTVINNNPVFKKYYRLKISQGKGHRCAQGHCIRKLLRIIYHLLETGQSFDPALLR

SEQ ID NO: 359355 - protein, 385 aa, unidentified
MTIQIQVPRFIPRDYDVFAGLDVDKKSMAVTFADHAGSQRALRMAHQVTPLLNYVRKHFAGQRVAFAYEAGPTGFGLHDELVRRAYTCVVVAPSKVPRAPGERVKTNRLDSRKLAESLRGGQLHSIHVPSAMYRNLRHLVQMRDTHVRQLTSSKLRIKSLLLFEGIAFPDPHEKWTARAMRELQTLPCSEPVRFKLDDLLDTLHFHFQAAARATKQIRQYCLQEPELQQSIEVLLSLPGIGWIVASHLVARLGNHREIKNGRQIAGFLGIVSSEHSTGDKENRGEITRSGDSRLRNKLIQSAWTAIKRDPELRAFYRRIYQRHPKKVAARKAIVAVARKLTNRIYVVLKEQRPYVIRPDSSIAPLTAEETVGPRERLDGAQNDQS

SEQ ID NO: 359356 - protein, 423 aa, unidentified
MNDLNDGQYTAFIGIDWADTKHDICLQAADSNHREFDCIPHQVDDIEKWALALRQRFDGPIAIALELSKGPIVYALQKYDFLVLFPINPSTLAKYREAFTPSRAKDDPTDAELALDLLRCHPDRFQPLMPQSVELRALATLVEQRRELVNDRVRITNRLRNTLKQYYPQVLEWFDRINTPLFCDFIARWPTLEQVKRARKSTLKRFFHQHRMNFPQVLESRCQAIKAARPLTLDTAVVTPHRLHALVLAEQLRVTLQAIRRFDDEIAQLAPQHPDYQLFSTLPGAGPSLAPRLLVAFGENRQRFSKAADLQQYSGVAPVTEHSGRKHWVHWRWQCPTFLRQTFVEWAAQTVNKSFWAGAYYRQQKAKGCSHQAAVRALAFKWIRILYRCWQDRTPYDELTYLEALRRRGSPLLDQLGTMAETT

SEQ ID NO: 359357 - protein, 312 aa, unidentified
MEKLSYGGIDVSKDRLDGVVLPEGWFFSVSNDTAGWAELVARLHPLAVSAIGLEPSGGYERGIIRALLAAGLSVRRINPNKLRQFARARGVLAKNDRLDARLIAEYVAIMPTRVVQRDDAVERLAEIVTMRRQLCDEHVAVENQAAHLEDAMLRRLSKRRLIRLEADIRLLDKRLAEMVATNAAFAQLYELLTSMPGVGPVLAFTLIALLPELGKMSRKQIAALVGLAPYDFDSGKLRGHRSIYGGRMPIRNVLYMAALSASRYNPALKTFSNRLAHANKKSKVIIVAVMRKMITTLNAMLRDSAAWQPRSA

SEQ ID NO: 359358 - protein, 433 aa, unidentified
MQEAEDEPLFADRAAGIDIAKAGIEVTIRVPSDTRRGGRQQETRSFRTTRKELVALADWLRCWQVTKVGMESTGDYWKPVYFLLEAEGLDCVLYHAAQVKALPGRPKTDKLDSVWLAKITERGALPGSFVPPEEIRRLRTHTRYRRHLTQARTAEKQRVEKLLEDAHLKLSSVISDIHGVSGRAMLEAIAAGQRNPTTLAQLARGTMRGKIARLEEALDCSFLTGEHAAILAMMLATIDYYTARIGELTAKINVLCEPYLHQIEQLDAVPGTGVITAQDVIAEIGTNMTVFPTAAHLVSWAKWCPQVAQSGGKRKGANATGRGNRYLSAALGEAAVSAGRTQSFPGAKYRRLVKRMPKKKALVATGNSLLTTYHALLSDPAATYTDLGTDYYERRANIRRQARNHVRGLERLGYKVTIESIDPATGELEAAAS

SEQ ID NO: 359359 - protein, 359 aa, unidentified
MNTRLSKKQMFFNKVKLTKDDDLYIGIDVHKESYGVALWLNDTPAIDFIMPADTEKLLKLLEKVRIALKRIVYEAGPTGYSLARTLQKANLPTTVVAPSKTPRQSARDSKTDQLDAKTLARYAAKGLLRPIAIPTMRQEADRQLTRTRDQLVSKQSEVKLQIKSFLLQHGIEQPPAVRAWSANAIRALDALKLSKQLRFCLDLLVQELQFLQSQLTTMEDQLKQTFDNDRHAREVALLKTHPGVGPVIARQYTAELFNPKRFKHTTEVAKYVGLAPTIIQSGQSRRDGPVSKTGRPRFRSNLIQGAWVWVTKDPKAHITFLRILHNTGSKNKAITAMARRLAVHLWKMLCDNKPFTNIA

SEQ ID NO: 359360 - protein, 386 aa, unidentified
MLLDHPSDRPAAIRTQFGAIFVSLELSRSNWLITSLSPGKGEKMSKHSVTAGDIAGLLQLFAELKRKAQARTGQIYPIITIQEAGLDGFWIHRVLEQEGIESHVVDPASIATPRRRRRAKTDRLDGEALLRALLAYERGEPRVCAMVVAPTPEEEDRRRLCRERGTLIAERIRHVNRIKGLLFAQGASDYAPLRRDRRARLEALRTGDGRLLPSHLKAQISRELDRLELLLEQIKQVEAEQDALLAAAKNAAEAKEPVVETLLALKGIGANFAAVLWLEAFYRQFANRRKLAAYAGLAATPWRSGGIEQEQGVSKAGNPRLRTTMIQLAWLWLRHQGQSALARWFKAHSQRGRKSAIVALARKLLVALWKYVAHGVVIEGAVMKSA

SEQ ID NO: 359361 - protein, 466 aa, unidentified
MTPRRTKTCRMRPQPAEPLRVQHPHAAGIDVHAAQHWVAAPPEAAPPPPDDHPPRLPPHVRQFGACTADLEALADWLRACGVTTVALESTGVSWVPLFELLERRGLQVFLVDPRQTKQVSGRPKTDVLDCQWIQRLHSYGLLAASFRPEDQVVVLRSYLRQRQMLIRYAGQHVQHLQKALEQMTVKLAEVVSDVIGVTGLAIIRAILAGQRDPLALAKLRHARCHRTEAEIARALHGNWRAEHRFALRQALELYETYLAQLRACDDCIGRHLHTFADRSGGRQLDHKPRRRRRPRHEPAFDVRTALFRFSGVDLTVIEGIDRTTALTILGEIGRDMSKWPTVKHFVSWLGLCPQHQGSAGKIRSRHTRRGANPAARALRLAAQGCHHAQNALGAFYRRIQARGGGPKAVVATARKVAERVYRLLRYGEAYVRQEMAAAEEAYRARLLKGLARKATELGYQLVPTTP

SEQ ID NO: 359362 - protein, 404 aa, unidentified
MNAIGIDVSKGKSTVAVLRPYGEVVVSPFDVAHTGSDLRALADLIKKLPGETKVVMEATGNYFESIARYLHEQNIFVSVVNPVLISDFGGNTLRKPKTDKKDSVKIASYALTYWLDLKEYTPQEDLRKSLKLLNRQYQQSIKLKTMMNNNLISLLDLTFPGINKLFTSPSRESDGHEKWVDFVLEFSHCDMISKLTIKAFAKKYKKWSDKNSYHFTESSCEKIYAFAKDCVSSVSSDKAIVFSVVQAAKMLISATENCHAIQSEMNRVASKLPEYDTVMNMYGVGKAVGPQLMAEIGDPRRFHSRKAITAYFGYDSENNDSGQKTTRSNPMTKKGSGALRRTLFIIMQVLLQTKPQDNPVYDFLIKKKSEGKHYYSYINAAANKFLRIYYARVKEVLNVSEQMT

SEQ ID NO: 359363 - protein, 345 aa, unidentified
MRQYAGIDVSLEYSSVCVVDADGHIIREAKVLSEPDALIAWFGELGVAMERIGLEAGPLSQWLYAGMTKAGLAVELIETRHVRAAFKTMPVKTDKKDARGIAQLMRLGWFRPVHCKSVPAQEVRALLTARKLIQGKLHDIEMSIRGILRGFGLKVGPTTRRTYAARIRELIEGHPTLEAIAASLLKVREALADEFAGFERKLRGMARQDDNARRLMTTPGVGVLVALTFVSAVDAPERFRSSRAVGPHFGLTPKKYQSGETDYSGRISKIGDVGARTALYEAANVILMRPVKGSDLKSWALAVARRAGPRKARVALARKLAVVLHRMLRDGTTFIPHKATPAMAA

SEQ ID NO: 359364 - protein, 344 aa, unidentified
MKVHVCGIDIGKTVFHLVGLSKEGHIVTRKRFSRKQLITFTVNLPNCLIGIEACPGAHFLARILLKQGHDVKLMPAEYVRPFVKSNKNDYVDAEAIAEAVQRPTMRFVPVKNEAQLDLQALHRVRDRWIGRKTAVINQLRGFLLEHGITVAAGPAHLKRQIPSILEDAENLLSPRMRTLLLELREEWVKLEEQIDSANREFVEVAKKEDGCRRLLTIPGIGPLTATALVAAIGNGGAFHKSRDLASWLGLVPRQHSTGGRTRLLGISKRGDPYLRRLFVHGGRAVVSRVKRDTHQFGSWLDRLEARSPRNVVIIAMANKIVRIAWAVLTSGQTYRTSAEVMAIT

SEQ ID NO: 359365 - protein, 346 aa, unidentified
MDQIIRVGMDTSKHFFQVHGVDASERPVLRRKLRRNELLTFFAKLPPTVIGMEACGAAHYWARELGKLGHKVKLIAPQHVKAYIKRNKNDGRDAEGLCEAMSRPTMQFVPVKTEEQQAALMLVGVRQQLMTRRTQLSNAIRGYAAEFGVITAKGLVKVEPLLRQVAQDESLPALAREMFAVQGRDYARLQVELKAVEARLMAWHRANADSVRLAKIPSIGPIGATALVMKVPDPGLYPSGRHFAAWIGLTPKDHSTAGKTRLGKITRAGDEMLRSVLVAGATSVIQQARKGRGRPSPWLVALLARKPPKLAAVALANKTARIAWKLLTTGESYDGARMPLASNSAA

SEQ ID NO: 359366 - protein, 412 aa, unidentified
MPDEAYELYVGVDWATETHQVCLLSPEGQRLSEPAVPHTGAGLAALRTELGRRVSAPSRIAVAIEVPHGAVVDALLEHGCHVYAINPKQLDRFRDRHSVAGAKDDRRDAFVAGDALRTDRRAFRRLHGDDPRVVQVRELSRLHGELVEEHGRLTNRLREQLWRFYPQLLALSPAANEPWLWALLAQAPTPAQGRRLTRSTLRALLARHRIRRLTADAVHAVLQEPALPVSAGTLAAASEHVGLLLPRLQLVHEQRRRCDQRLEGLLEQLATPAAGEEPQEHRDVTILRSLPGVGRVVLATMLAEASGPLAARDYQTLRAQAGAAPITRQSGKTRVVLMRRACNRRLRAAVWHWARNSIRFDAHSRAHYQRLRIRHGHARALRGVADRLLDLLITMRKTRTLYDPARRQRMAA

SEQ ID NO: 359367 - protein, 420 aa, unidentified
MKVVYQTCCGVDVHKSFLVATIIKTTSGVEPSYQKKRFSTFNNSILQFKEWLVKNQCRDVCMESTGKYWVPVFNLLEDEINITIANPKWVKAVKGNKDDTKDSKWIGDLFRLGLVPGSYIPCKPIRILREFTRYRYKLTSCRTSEKNRYQNALTVCNVALDSVVSDIFGKSATSVIDYLIEQPDNSINHEEIASRLLRSLKRKSDSVIESIEGYQMTDSQKYRMCLIRAHLDYITSTINDIDTMLNSLIAPYENAVQLLCTIPGVDRNSAITVISEIGTDMTPFSNSKRLCCWAGLTPDNNESAGKKKSVRITRAGVYLKPALVQVAHAAVKSDKSPYYKQKYERIMKRRGKKRAIIAIARMILTAIYQMLSTGEAWNPTDLFKIDMPEPMKEKQKEKAIKQAMKLLIREGKISESQLAS

SEQ ID NO: 359368 - protein, 400 aa, unidentified
MYRNRIVAGLDVHKDSVFLCIMRHDVAIIFEKTYGTLTTHLRQMREDMLRHGVTECAMESTAVYWIPVWNELCEHMSLRLANPHFIKQLPGRKSDTKDAQWIAECQLKNLIRESFVPNPVVQDMRKLNRRIFNLNEDMSYNKNKLDAAMQRCGFRLSNYVSDTGGRSYQNVVRAISRGETDAGKLVALVHGRTVNKHGRDTVMGAVTGNFSTIDITVIRQYLAMIDLINVQLDECQKMLTAMCEEHFAEQYRRLQTIPGVKERAATAIIAETGADMSLFAKATNLVGWCGLKPRNDESNRKIKSNRITHGNKYLRQILIEIAWVASRTRNCFFSNFSYVQVTVKKKRKMKIQVAIARKILVAVWHMLSNREDFIDIYLKRLEEQRLIQQRIEQLESTMTV

SEQ ID NO: 359369 - protein, 410 aa, unidentified
MDVLYPRCAGLDVHKKTVVACVRIQQGQSVEQEVRTFETTTSGLLNLSAWLSEKGCTLVAMEATGVYWKPVWHILADGEFELLLANAAHVKNVPGRKTDVNDATWLSELAAHGLIRGSFVPDRPTQELRSLLRTRKQLVRERSSHTQRLQKTLEDGNIKLDSVISDILGASGRAMLEAMIAGQTDPAVLAGLANRRIRATPEELREALRGRLTAHHRFLLQLHLEQIDALNRAIARIDEEVKTDLDSFREATQIVTTIPGFDDLSAQSVLSEIGVDMSRYPSDAHLLSWACMCPRNDESAGKRRSTRMRKGSRWLKATLFTCAWAAVRTKGSYFQAQFHRIKARRGGKKAIGAVAASLLRTIYHMLKDGTLYQDLGADHFDKRHKTASTRRLVQRLQNLGFAVQLTPVSV

SEQ ID NO: 359370 - protein, 348 aa, unidentified
MLVGEAETPVTWTVPNDPQAIDRLRRKLTRAAAGPIECCYEAGPCGYVLQRRLARDRVRCRVIAPALIPRKPGERIKTDRRDARKLVTLHRAGLLTEVHPPTPADEAVRDLCRARDDVREDLQRSRHRLSKLLLRRGLHYAGTNWTQGHRQWIERLTWDHAAERHVVEDYLLAIDHLEARLGELDARLAEVAATPPYREPVGWLRCFRGIDTLSAMLILAELHDFRRFESAPALMAYLGLVPSEDSSGDSHRRGRITKAGNALVRRVLVEAAWHYQHRPAIGRTLAKRRQGQPPRVIAIANKAQQRLCRRFRALAVRDKRRGKIAVAIARELAGFLWAALQPAPAATH

SEQ ID NO: 359371 - protein, 340 aa, unidentified
MQLYAGIDLHSTTNHIGIIDEQDRRVFRKKLANDPTRILEAFKPFKKNLKGVVVESTFNWYWLVDILMEHGYRLHLANPSAIKKYEGLKHSDDKHDAFWLAHLLRLGILPEGYIYPKAQRPVRDLLRKRGHLVKLRTSLILSLQGIVHRNCGLKVNVNQVKKVTTDEVIPLLAGQQDLELSGRVSKECIDFLTRKIRQIENTVQKKVRLQAAFKHLPTIAGVGKILSLTIMLETGPIDRFAKVGDYVSYCRKVPTKWTSNGKRKGKGNAKNGNRYLAWAFSEAAEFARRYDANARAYYNRKACKTNRMVAHSALAHKLARAAYFVMRDIVSFDAAKLFAK

SEQ ID NO: 359372 - protein, 303 aa, unidentified
MNNLSYIGVDVSKAHLDMASDFAAQTHPNHPQAIAAWLKKLPPQSHLIVEATGGYERPLVRACHRAGRPISVLNPARVRSFARARGNLAKTDTIDATVLREFGRALQPKASPEAAPAQRKLAELVSARDHLVVLRTQLVNGLEHAELPLVRQCFSSQLRSLDRRILKLEKALADCIQSSVVLSQRHDRLRTQPGIGLLTAATLLALLPELGAANRNQIAALAGLAPYNRDSGQRHGPRFTGHGRPRLRRALYMATLSAIRSPGDMADFYRRLRLSGKPAKVALIASARKLLCFLNSSLKASSC

SEQ ID NO: 359373 - protein, 397 aa, unidentified
MGAAVGIDIGGKSHAVARCGSGEARAERAILRVPQSRAGFAALDAWLSAGPEPVELVALESSGHYWMALASHLRRQGLPVVVVNPLRAKYFAKSRLARTKSDPADARSLAELAMHEPLPRHDPLDGVELRQAARFVMTLVDEQKVVSQRLYRLVELGFPELLEEFDHPHGRIAREVLRLAPTATAAGRRRTATLADANKGPGRRRLGQARAERLRAAAAETIAVPELESEVAFEVGLLLDQYDLLERQIEAADRHVAALLDGELARRLQTIPGVGPATAATLIAEIGDIGRFATFDQLLAYAGIHPAERSSGRKGSDPETAWRMSKAGNAYLRTAVFRMAVVGITHNPVITAHYERKRAAGKSKMNAVGHCMRKALSLVWGVWRNGQDFDPQWADRA

SEQ ID NO: 359374 - protein, 372 aa, unidentified
MRWTLPSAIGVIMRHDGGVKNTHQTKREETEMKITTIGLDLAKNVFHAVCCNQQGKVIKKKMLKRRELIHYFSQIEPCLIGMEACASAYFWARELEALGHNVKLIPAQHVKAFLRGNKNDYNDALAISEAVVRPEMRFVAIKTIEQQDMQALHRIRSLCIKERTALSNQLRALLAEYGIVFPRGIATLRRHIIRLQEDEQSPLTDFFKQSLFRGYEQLQQLEDHISAYSKTLEQHVQQSEACQHLKTLPGFGPIVASAFYIEVGNGAAYRRGRDVSASLGVVPRQHSTGGKDKLLGISKRGNGYLRSLLVHGARSVVNQAKRKEDNLSQWINHIRLTRGYNKATVALANKMARMGWAVLKNNTVYQENFSYS

SEQ ID NO: 359375 - protein, 329 aa, unidentified
MKKDWYVGIDVSKKWLDVAIFAEDSDLKGYIHTQVDNDKHGYKELLRWLKEHDVDVSSCMYGMEHTGFYSDGLQHFLDKKGYKYTMLEPAVIKHYPIQPREKNDRLDAAKIADYLFRFNDTIKLSTLPDKTMEELRNLHRERKFYVEDRVCYMNRKQVVGKEEAKRLDKMIENLDRMVDSIEEKIRNIIQENELLMESYLYLTSITGIGFVNAVNAIVITQNFTAFKTARDYASYLGVAPHTKTSGTTVRWKPKPRKHCDLTAKADISQAAKIAVVHDIELKRFYERKCNGKNDADTIRKAMNAVKFKLVLRMFAVVKQKHTYKQLDTI

SEQ ID NO: 359376 - protein, 418 aa, unidentified
MKKRSYRAVRFQQTDLDRLKQRLPDRTVVGIDVAKKTMYGTLMGESEEILGVLKWDHLSESQRFARWLGGLPQVDEVAMEPSGTYGDALHGCLESADLGVFRVNPKMVKDAREIYDGVPSSHDAKSSATVAWLHLCGRSDRWEAPSELRRSMKAAAGTVSLHDKAFRQAQNCLEGQLTRYWPEVLELLELDSVSLLELLSRYGGPQRVAAHGVEAARCLREAGGGGLKEEKIEDVLKAARKSIGVEMIEGEQEALKELAREARRRQKAVRKAKHRLEQLSCSDIPTVLVASVVGRLTAAMVTTDVGSLLDYANTGSLLKAVGLNLKVISSGIRQGQPAITKRGPSRLRWYLYFAVLRWIQRDPLARAWYDQKVQRDGGQRMKAIVALMRKLLRGLWWVARGEAFDSRKLFDVRRLQTV

SEQ ID NO: 359377 - protein, 401 aa, unidentified
MKRLSGGIDIGSESHHVIILDEEDNVLYNKKISHKLNEFTENIKLFRQLEKQERGKLSFALEGKNGYSNPLDRILLNQGFTLYNVDNFKLKRFREAFAGEWRDDERDSLMLSKMLKLKEHINSKREKVFIKIEKPSPIIESLKLLSRHQRALISERVRLINRLRKKLLEVCPQILELGKVKSKKIIAILAKYPDFSKYKRITLKSLLKIKGIGKNRAFFLLKRLNHIEYMPGLTDIYKTIILSYAQRILQLREEIKDIDKKLDEIGEKNKEVRHLKTIPGVATKLVSRLIGEIGDINRFPSEKQLAVYCGVACVNNDSGKVTKAKAVYKANKICKQTLITMAGGSIRLSPQCKAYYLKKRTEGKSHNHALRCLARQMIKVIHKMLTEDRDYIVRKELKKVA

SEQ ID NO: 359378 - protein, 363 aa, unidentified
MKGNRDVNQQMMVEPTSESTIGLDLGDRWSRYCMIDSRGVVVKEDRVRTSPEVLEETFRVILPSKTVIEAGTHSPWVSRLLERLGHQVIVANARKVRLIYQSDRKNDRLDAQMLAKLGRVDVSLLAPVEHRSLAAQTDLAVVRGRDALVSARVQLINAVRGLVKSMGGRLPASTTAAFANKVASFIPPSMESALTPLLNSIQHLSEQIHRCDRQVEELARKKYPQTKLLQQVKGVGPLISLAYVLTLENPARFQKSRMVGSYLGLQPKQSESGESSPQLGITKSGNGFLRRMLVQAAQYILGPLASDSRLRRWGLDLSRRGGKNSKKRAVIAVARKLAVLLHKLWVSGEVYEPLRGIEPAPTI

SEQ ID NO: 359379 - protein, 343 aa, unidentified
MDEYDGRQFVGIDLHRQRSVIVRQCESGELLSAVRIVNDPVALRLQLEQAGSDPEVVLEATYGWYWAVDVLQEHGAHVHLAHPLGVKGFRYRRVKNDVRDAADLADLLRMGRLPEAWIAPPQTRELRELVRYRAKLVALRSGLKAQVHAVLAKAGVLISASDLFGVTGRQRLAKVPLGAAYAQRISSLLELIDILDRHEARFAAIIAERLRADRGYQVIQQLPGVGPVLAAVFVAEIGDVHRFSGPARLCSWAGLTPTHRESDKVVRRGHITKQGSKLVRWAAVEAIQRQPDTAKITLDRKRIEGRRGRNIAKIAAARKLLTLVYYGLRDGHIRALAHRQVAA

SEQ ID NO: 359380 - protein, 305 aa, unidentified
MNETLYLGVDVAKSHLDFDAPVGRIANTPAAIAAVLRQLPAGTHLVCESTGGYEAELLAGTMATALPVSVVPPQRVRHHARSMGRLAKTDRIDAALLSDYGRKHRPPAHRALEPERQHLRQLLRARTQLLELQQLETNWQEHASDLPRLRQQAAQRAKLLARQLAQLEQDIRVLVATSAALAPVHRLQQVQGIGEITAWTAWAEMPELGRLEAGQPAALAGLAPHPHDSGQKHGRRQVQQGRPQLRRVLYMAAISASRHNPVLKHLYRRLLARGKPPKLALIAVARRLIEVLNLLIKNPNFILAD

SEQ ID NO: 359381 - protein, 315 aa, unidentified
MVNVPCFIGIDVAKAQLDIAIRPSGERWAVPNDASGVTMLVDRVQALQPTLIVLEATGGLERAATGALATAGLPVVVVNPRQARDFARATGQLAKTDALDARALAHFADVIRPTPRPLPDAQTQELRALLGRRQQLIGMRTAEQNRLAGTSERLTQDIKAHIAWLNTRIATLDDDLETMLRASPLWRENDDLLQSVPGIGPVCARTFLLELPELGTLTRQQIAALVGVAPLNCDSGPLRGRRTIWGGRAHVRTVLYMGTLVATRFNPQIKAFYQRLLAAGKIKKVALTACMHKLLTMLNAMLKHRTSWQAQEVQN

SEQ ID NO: 359382 - protein, 343 aa, unidentified
MQSVTTIGLDIAKSVFQVHGIDAKGKVVIRQQLRRSRVLGFFGKLSPCVVGIEACASSHHWSRELQALGHAVRLMPPAYVKPYVKRQKNDAADAEAICEAVQRPTMRFVPTKTADQQACLMLHRTRHLFIRQQTALINSMRAHLAEFGIVAPVGRNGVEKLLDVVADPDDERVPDIARECLRALGSQLQGLKVRILEFDRRIKAWHRSSETSRRLDDLPGVGPALATALVASVPDPKVFRSGRDFSAWIGLVPKQHSSGSREKLGNITKQGDRYLRSLFFTGALAVIRYAKIHGSKHRPWLAKLLERRPTKVAAVALANKLARMAWAMMARGQSYKEPVALAR

SEQ ID NO: 359383 - protein, 476 aa, unidentified
MAKGSGSAASRRKTTRNAERRKRVKKEAKAVLGLPVLWADTAGIDIGATEIYVAVPVDRDEEPVRCFGGFTEDLRNIAEWLRQCGVQRIAMESTGVYWIPLWQVLSDGGFEVCLVNARHFKNVPGKKTDVEDCQWLQFLHSVGLLRGSYRPEQAICGVRTLLRYRVELIRFAAEHIQHMQKALEQMNVKLSHVISDLMGVSGLAIVDAILSGERDLRKLAKLRDPRIRASEETIMKSLEGDYRLEHLITLQHSLDLYRHYQQKIGELDQKMEAFMSDLPDRIDVSKCPMPPWRKKSRAHKQHNAPAFDLRTHCYRILGVDLTGIDGVDEVTAHVVVTELGPDLSAFSSSSAFCNWLRLCPNNGISGGKILWRKTKKGKNRLALALRNAAQTLHGSDSPLGNYYRRMKSKFGPPQAITATAHKLARIIYHMITTRQEFDPGILEKQDEKQQQKREAKIRRQARQLGYDLVRAQSAQA

SEQ ID NO: 359384 - protein, 454 aa, unidentified
MQKQDSYDYYVGIDCAQNKHNFAMKNNQDKFLIKKGHFSNTLQGYEKFINTVLSKCLNKDKILFGMEVTGIYGTNLYERLKSDGYHVVMISPDSVKNYRDYKRLNKTDKIDSACIAELLLNGDAQIVHVEKNGYTDLKAYIRRRNALKVTCTQETNRFLAKVCLYFPDLLKVFPSGRATLKAIFSIYPTPYSIIEADFDELVSVLQKASKNKFGVDKANELIHAARNSIVVRKSISDGELYNIHSLIDSIDSLESEIRNLEKIIDSKAEEFPAYHVLLTLTGCGKITAATIVAEIGDISRFHKASQIVSLAGLYGDNSKSGSSVNKRGKISKKGSRYLRHAIYMVAEFARRNNPIFKAYFTRKKNGDRTKHTLAVNAVANKLCKVIYSLMKNQSTYIIQYRDLAKLSESTQNEFFQNAETDFSAKTRRKKYLYEDEYGELHEFVFKSLKTALIE

SEQ ID NO: 359385 - protein, 429 aa, unidentified
MNNVDSIRLEQFRQLRKEIRGSSEYLIVGIDVAKDKHYAFYGTATGKTLLKRMIFQNTIEGFEKLRIQEDSLKVRYGLEKVIYGLEPTGNYHKPLGEHLIKCCGHLVLVSGAAVKNNRKMMDGRWDKNDTKDAAVIADLISQGKFLFYEYASMPLRDLRNLLSLKKRLKKQEHSQKVRIRNNLLAQYFPELDKYYRNWGKEGLAIVRWCLDPSVIVGLEYEEFVRRVAPNGRGGISQQERLRAVWKKAIESIGCMAGESLEVEAKLMVEGLQYIRDAIRYVEEKIEDICLDIPEYHYILSIPGFGPDVSSKVVGGIGYPFRFNNGRQVLKMAGMDLSANRSGKNSDNVTPKLSKSGKADLRYALYQAALIASCRNKHFVRYYTDKLRGREKEKGIKSKMRVKLAAKLLIIAWTLMKKQEYFDPGYLSIE

SEQ ID NO: 359386 - protein, 372 aa, unidentified
MATDSITWVGMDAHKNSIKVAVLLPDQADPVEWTEDTTVEAVRRLARRLQRLAPGEVRSCYEAGPTGYALQRQLRAAGVGCTVIAPSLTPVKPGLRIKTDRRDARKLAEYFRNGELTEVHPPSETDEALRDLCRCRDDVRVDLLRARHRLSKFLLRRHLIYRQTKHHWGPRHVAWLEQLRFDDAMSQATFDSYFLAVQQLEERQHQLDQRLAEFGAQEPYRERVAALRCFKGIDTVTAVCLVAELHDFRRFRSPRQLAAYIGLVPSEDSSGDRQRRGPITKSGNRHVRRLLVEASWHHRHRPALSAPLRARRVGQPARVLAIADRAQERLAARYRRMSEHGKVHPKTIVAMARELCGYLWAALHPAALATRG

SEQ ID NO: 359387 - protein, 346 aa, unidentified
MMIIGCDFHPSWQQVSWLDTETGETGERKLVQASGDAEQFYRQLPVPSLICMEATGNCHWRVDLLAEIGHELWVGDAAQIRASCVRQQKTDQRDAEHILKLLVEGRFPRIWMPSSEVRDLRQLLLHRHKLVTIRTRVKNELQHLCLNQGVQRKHKLWSKAGQQVLRELPLKPWAARRREDLLGLLAMLDQQMEPLDRAVKEEAQRDKMALLLQTQPGVGPITWLAYVLTMGAVSPFPRGKQVASYLGLIPREHSSGGRQKLGAITKQGNRMMRMLLVEAAQSAVRYDPKFRRQYQHLCHSKPKAVAKVAVARKLAIRLYWMLRSQKPYPAVVRIESSPRVALVGAS

SEQ ID NO: 359388 - protein, 450 aa, unidentified
MATRNRAINRKGLELTHPNAAGIDIGSASHYVAVPPDRDDEPVREFASFTADLQRLADWLSACGVDTVAMESTGVYWIPLFELLDARGFTVLLVNARHVKNVSGRKSDVLDCQWLQQLMSYGLLHGAFRPDEQVCVLRALARQRSTLLKTQARCVQHMQKALVQMNIQLANVIADVAGVSGQAILRAIVAGERNPYVLAGLKNSRVRASDEQIARSLQGTWRAEHLFALRQALDAFDFCGRQLQQCDEEIEAQLQRLHITAVEPDKGKKRSKARNAPKFDLRTRLFQMCGVDLTRIDGVDVTTALVVVSEIGTDMGRFPTDKHFASWLGLCPGTKITGGKVMSGKTKRCANRAAQALRLAAAALRTSQSALGAYFRRMCARMDKAKAVTAAAHKLARLIYSMLTKGEEYTDQGQAYYEERYRQRVLHNLNRRAQQLGMTLVPTAPAAQAA

SEQ ID NO: 359389 - protein, 341 aa, unidentified
MKQFIRIGVDLAKNYFQVHALANEGGPAVTRKLKRSKMHEFFAQIEPCLIGMEACGSAHYWARELETMGHEVLLMPPAYTKPYVKRGKNDAVDAEAICEAASRPGMRFVPIKSAEQQATLMLHKTRELLVKQQTMSVNALRSHLSEFGIVVAKGIGRVDELLELAESDTTLPEVARAAVKILAQHLEGLDKSIDDLEKQIGRAHAQSEMSRLLDQVPGVGKIIASVISASVPDPSVFKSGRDFAAWLGLTPRQNSSGGKQTLGGITKQGNRYIRKSLVLGATSLLHGVGKRKGALRDWIVALLAKKPARLVTVALANKLARIVWAMMKTGECFRAEMFAKA

SEQ ID NO: 359390 - protein, 351 aa, unidentified
MIIIGVDYHPSFQQIAFFDQETREGGERRLHHSDGEAERFYRDLKQRGVSVRVGMEATGYSRWFERLLAELGFEVWIGDAAEIKRQRVRKQKTDRQDAQLLLKLLLENSFPRIWVPNPENRDLRQLLWHRHRLVQMRTRIMNQLQAVAMNEGKRWKKKLFSEQGRAQLEKLPLAPWANRRRKELLELLDRLDPKITELTAAVEQEANKRPEVLQLMTHPGVGSITGLAYVLVIGTPERFPCGKQIGSYVGLIPSEDSSAGRQRLGHISKQGNALLRFLLVEAAQAAARWNPDWRRRYAHLTMRREKRIAKVAMARKLAVRLYWMWRNGWQYSQLVEFGSHAGKLVTGHGVK

SEQ ID NO: 359391 - protein, 358 aa, unidentified
MRESIITSPESNYKQNPDHYDHFIAIDWSQENVVLARSTSKKEVIKLVEWEKSEIKQVKEYLSHLKGKKILTIEETNTSHWLFTELKELVERIIICDPYRNRLLSEGPKTDKIDARKLCWLLRSGLLKEVFHSCDKLYDLRQLLSAYDDLVKAGVRIQNQRSAHYRSKGYRYTKKEHIQLKKDAISNKGFDTFISDWHERTIKQYKADKRLFEEQIEKVVKSTKAMKVLTQLPGIGYIFAFKIYAVVIQARRFRTKGSYLSYCGLVLLEKSSGQRSYGTRRPRYNRQLKAVYKTAVRTAIQGGNNPLYEYYQFLIEKGLTHKQAMLAAARYLAKVSLGMMKTGQAYEPYRWRKDEIAA

SEQ ID NO: 359392 - protein, 315 aa, unidentified
MRKETFVGIDVAQDQLDVHVLPEAVHFTCPYDANGIASLVSRLRQKHPTVIIMEASGGYEITLAAELGAAGLPVAVVNPRQVRDFARGIGKLAKTDKIDAFVLARFGETNRPEPQAMPTDEQSQIKELVTRRRQLVALRTSEKNRRHSARSMRVRQSIDIIITTLDRELAEIDKDIDDLIRNSPLWREQEELLKTFKGVGPVVSRTLLAKLPELGKLDRQEIACLVGLAPLNKDSGKMRGKRMISGGRKDVRDILYMAAVSAVHHNEVIKPFYERLVKAGKIFKVAITACMRKILVILNAMVKTKRPFHIPEVFA

SEQ ID NO: 359393 - protein, 317 aa, unidentified
MTKCNTKTAGIDTSKDKLDIVIDASTTCWQVENTAIGWRHVAARLAAAGVTRVGIEATGGYERGVVGYLREKGFTVLVLQPTQVKAYARMHLRRAKNDKIDAALIAGCAAGLEAPAVPPDARLEALAGHLTFVEQVEEDIARLKVRLEHVEDARLRDILKADIAGLKARRATEMLRIINALRAHADLARRYHLVLSVAGIGERTAIAIIIRMPELGRISREQAAALAGLAPYDSDSGTHKGQRHIAGGRARLRRSLFAAALPAAFRWNKALIELYTRLIARGKCHKAALIACARKLLIYANTVVQRGTPWVQEQVPA

SEQ ID NO: 359394 - protein, 472 aa, unidentified
MKSKSSRKPNPVDPVAEEIPDAEHELVIERVAAIDVAKASGKVCVRLPGKTGRRFSRVWDVPARTGAVSELAEQLIESGVEKVTVESTSDYWRIWYYLLEAAGLDVQLVNARDVKNVPGRPKTDKLDAVWLAKLTEKGLLRPSFVPPAEIRQLRDYTRLRVDLTRERTRYWQRLEKLLEDALIKISAVASTLDTLSTRDMIEALIAGERDPGRLADLARGKMKAKRSELIAALDGRFDDHHRELARMLLDQIDTLTAQIAALTSRIEQLLAAMPDTRSRGDGGTGGDPDRPSTGHGVEPETAARFTDATLLTPVERLDEITGIGELNAQVVLAEVGLDMTRFPTPAHLVSWAKLCPRTIQSGPVTRGGKTGRGNPYLKGALGEAAAAAARTDTFLGERYRRIVKRRGKLKALVAVARAILVVIWHLLANPEARFRDLGPDYHTQRIHTERKLRNHIAQLTAMGYRVTLEPAA

SEQ ID NO: 359395 - protein, 344 aa, unidentified
MTSIDYIGLDIHKKTISFCAKAQDGTILDQGTIVARRDTLLAWAKARPRPWIGAMEATLFTGWIYDLLKPLAQELKVAHPAMLKAITAAKKKNDKVDARTIADLLRCNLLPECYMAPSAIRDLRRVLRYRNLVVRQATRMKNRIAGLLMETGTPYNKERLHGRAYFSELLASLREVPRSVVELLQLSRGQLEFFATIQRRLLKGLCQNPDLSERVARLQTIPGVGEIMALSWALEVGEVKRLPSIAQAASYCGLTSAQHNSAGKEQRGPISKQRNKHLQTILIEAAKLAPRHNPQLAVVHERELKRGDRNQATLAVARKLVAYLMAVDKSGKPFAMRASGEEAA

SEQ ID NO: 359396 - protein, 391 aa, unidentified
MIIVGIDIAKNNHEATIIDSLGNILTKSFRFSNNHKGSSTLIANINKTNEANEPVVIGMEATGHYWLPLYSRLLSEGFEIKVINPIQSDIFRNLYIRQTKNDSKDSFIIAEVIRFGRFSSTCLAEEDILSLRNLSRFRLFQVDMVSDLKRKVISLLDQVFPEYSKLFADTFGKSSLEILTEYSTPEEFLSVDTNALAETLAIASKGRLGFSKAEQIKDAAANSFGIKLATDTFSFQIKQLIEQIKFIEEHIAELEQEISNLLKKLNTPIETIPGIGPVLGAIILSEIGDIARFKDASKLVAFAGIDPTVKQSGEFMGTKNKMSKRGSPYLRRAIWLAANVASFNDPILSAYYNKKREEGKHHFTALGAVARKMLYIIHAVLKNNKPYEPIA

SEQ ID NO: 359397 - protein, 408 aa, unidentified
MEVRYPRCAGLDVHKKTVVAAVRIAEGRQVRPEVRRFATTTTALLALGDWLAAEEVTHVAMEATGVSWKPVWHVLEDAVELVWANAAHIRQVPGRKSDVPDAQWIAELLAHGVIRGSFGPPAPVQELRDLTRTRKQLGRELTQHNLRIQRVLEDATIKLGSVISEVLGVSGRAILDALVAGETDPGRLAAAAKGRLKCAPEDLVEARRGRVTVPHRFRVGQPLQLGASLRARMAAFDAESERRREPFPPAVERLTTIPGVSEGAAQAIVAELGVDMTRFPTVSQLRSWAGLCPRLDESAGKRRSPRIRKGAPWLKAMLGQCAKAAARAKGTYRQAQYQRLKSRRGGKKAAVAVAASILTAVYYRLRDGVEYRDLGADPFTRRDKVKIAARLARRIRDLGYEVDIRQAA

SEQ ID NO: 359398 - protein, 330 aa, unidentified
MKSWNVILGVDVSKLTLDICCAERGLHLKTNNCSKGFAGFKKWCKTHQINLKETLVVMEYTGGYEYRFIQFCESVSLSYCRIPGLEIKQSLGMVRGKSDHADAFRIGRYGEEKIKKLTPSKPLDKNLLTLKELLSFRKRLVREKAGFQSTIKERKHMYPANKADTIIRIAQAKIREAKKHIGQVEQQIIAVIRGNEEWLQTYRIITSIKGIGNVNAWMTIAYTQNFTCFTDPRKYAVYVGVIPFEHTSGTSVKGRKRVSHLANKGLKSELNQAAKTAITHDPELRAYAERKLKNKCYPLVLNNVKFKLILRMFALVKRGERFVENYKRAA

SEQ ID NO: 359399 - protein, 372 aa, unidentified
MESILYVGMDVHTSNYTLCTYSIEDDKEFGLVKFGPDHLNIVRYVKRLKEHHGQDTRIVCGYEAGGLGYSLYRILTANNIECVILAPSTMPKAPNERKTDYRDAAKIARCLAYNSYRSVYIPDAEDEAVKEYIRMRDNTKDHIKQLKQRILALCTRWRKEFNGTKKFWTVAHMKWLQHLKFENPIAQEAFDEYVIQLNEANARLKRYDERIEKWAELPRYAEKVSKLTCFCGIKTHVALATIAEVSDFDRFPNANRFASYLGLVPGEYSSGNNINRLGITKQGNSHIRKLLTEAAQCYARALPGKTSAELLRRQQGNDPKVIAYANKGNERLKRRFRSIAARKPKPLAVTAIARELACFIWGMMTEHLEQVY

SEQ ID NO: 359400 - protein, 348 aa, unidentified
MSLYIGVDFHPHQQTVCWCDTATGEIKTQTLPHDVDKVSEFYQAMPPATVGIEATSKAIWFENLLAATKHKLVVGNPTLIRKKATSRHKSDKRDAEVMLNLLLKDEFPTLWRRSAANNQVLDILKARLNLVRQRTKIYNRLQALAHNFGLPKGRMKSSYFQLLVKHAKTDEAGELQRSQLLSLLEYVTKQIVELEVWLHKKEKLDDQVQLLMTQKGVGYLTALCLVNTIGEISRFSKPTKQVPAFLGIEPLENESAGKSKNKGISRAGSSLARFLLGQSANIVARYDTKFKAFYKRLAKKKPKPVAKTATARKVLVKLVIMMRDNITAQEFDQRGRTVNDTRRVQGLK

SEQ ID NO: 359401 - protein, 345 aa, unidentified
METMYYIGLDVHKKTISYCVKDGSGQIHSQGAIPATRLDLDLWMKTLPQPWTAAMEATIFTAWIYDHLLPHAAALKVAHPLMLRAIAAAKKKNDRIDAHKIADCLRCDFLPECYMASTEIRERRRTLRYRNLLVRQAVQMKNKIAVLLMEAGVSYNKQKLHKVGYFRELLATNQDIDEGLKPLLRLCRETVVRLGKTESALVRSLQRDSLLMERVERLMTIPAVGPITALTWALEVGDVQRFSSIKKAISYCGLCGAENSSANIIKRTPLSKQRNKHLQTVLIEAAKMAPRNSPELAMVYEQEKQKGNANRATLAVARKMVAYLVAVDRRQKGFLVVENKNRTAA

SEQ ID NO: 359402 - protein, 370 aa, unidentified
MLDTTTFVGLDVHARSIKAVSLDVMTGEVRCATFGYDAGAVAGWVRSMDPGARCVYESGVTGFDLQKRLSGLGVDCVVGAVSKMIKPSADRRRKNDRNDAEFLARMLSVGNVVEVWVPDDECEAARDLTRALEDARDDLSRSKQRLSKFLLRHGLVFDERTPTGRRKGNWTRAHWSWIESIRFAEGADNDVLAYYVDAVRRAAEEKARLEGLVEAEARKPRWRRRVDSLRCLKGVDTATAADLVFEAGEFSRSGNARSFAAWVGLTPSEHSSGESDRRGAITKADNKHLRKTLVEAAWHYLTCSGRPKDLAKGQAPDRVARRHAAKGVRRPVERREALLARGVHGNKANVATARELACWVWAVGLMAEEA

SEQ ID NO: 359403 - protein, 402 aa, unidentified
MNSVGIDVSKGRSTVAAMRPFGEVVISPFEVCHTDSELSELARRLKSLDGETRVVMESTGNYHLPVAQALHDAGLYVSIVNAKLVHGYGNNELRRVKTDKKDAVKLANYGLDRWLSLPGYIPEENTRLLLKNCYRQYQQGCKVQTMQKNNLVSLLDTTFPNANRLFRSPARADGSEKWVDFVAEFWHCECIRECSEKVFMTKYQRWCKKQGYNFREEKARSIYNEACGCVGVMPKSSTTKLLVKQAVSQLKATSSALAALKQEMQTLAAQLPEYPVVMGMFGVGPTLGPQLMAEIGDVRRFHSKKALVAYAGIDAPPNDSGDVTGRHKAMSKIGASSLRRTLFLVMSAYLENSPPDEPVYQFMDKKRSEGKPYLVYMMASANKFLRIYYATVKAYLNKLEQA

SEQ ID NO: 359404 - protein, 351 aa, unidentified
MLIIGVDYHPSDQYIAFADTETGECGERRLNHSEGEAEKFYRDLQSRAASVRVGMEATGYSRWFERLLAELGIELWIGDAAEIKTRRVRKQKTDSNDARLLLRLLLEDNFPRIWVPSPENRDLRQLLWHRHRMVQMRTRMMNQLQALAMNEGQRRKKKLWNEQGRAQLEGLPLAAWASRRRKDLLELLDRMNPTIEDLTRAIEREARRRSEAARLMTHPGVGPITALAFTLIIGTPQRFGCGKQIGSYVGLIPAEDSSAGHQRLGRITKQGSRLLRFLLVEAAQAAARGDTDWKRRYMHLAMRRERNIAKVAMARRLGVRLYWMWRNGWEYAEWVKFGSNAGQLGTGHGAK

SEQ ID NO: 359405 - protein, 337 aa, unidentified
MKYFAGLDVSMEETHVCVVDRDGKVILEARTPTAPKTIATALAKGPAVERVLFETGRMAPTLFHGLTALGLPVVCVESRHAYQALRSLAAHKTDRNDARGLAHLARTGFFKPVHVKSLPSHAIRALLIARKKLVGQRVTLENQIRGLAVAFGVRLPRGLSSGFAEKGMAAGRGIPGLDGAMRGLLAARDAILQAIVAINADMKTLERSSAACRRLMTIPGVGRLTALAFAATIDDPDRFRRSRDVGAYLGLVPRRYQSGEIDYTGSISKCGDGRLRTLLYEAANVMLTRYRGSLALKTWALDIARRSTMRKARVALARRLATIMFAMLKHGTEFEPV

SEQ ID NO: 359406 - protein, 358 aa, unidentified
MDRELYIGVDVSKKTLDLAYYDGETIDWKNAHIKVSNDDAGFKKIGSWVAKVGKDFDTFLFCMEYTGLYNQNFRLWLESKEYIYGMVEPRKMHHFEPDLDDDQRSLDRIKTDELDSFRIAIYCEQNHKKILRNPSKLPSPVYFKLKRLLVERKQNTKQSTLYKQQLHDICAYDTDLSVERKKLLLTNMQENQKAIDKEIDSYMNEDASISKNYDLLTSIPGIGRIIALETIVLTENFTAISNPRKYACYIGIAPFKKESGTSVRKRTAVSKKGFSEAKSDLSIAALSAITYNPAIRGYWIRKRKEKCGGIVLNAIKFKLVLRMFAVIKRGTPYVETDAYKNREYSKSELKLFPDQNYH

SEQ ID NO: 359407 - protein, 450 aa, unidentified
MTAAMEQETFRWFVGIDWGTAEHVVNLADATGRLVEERTIKHTADGVAQLLDWLTAVSGDRLAEVAVAIEIPRGALVEGLLERGAAVFAVNPKQLDRFRDRFSVAGAKDDRLDARVLGSAVRTDRALFRRLALDEPLVIRVRELTRASEVLQGEFQALTNRLRELVHRIAPEWLTLSPNADDPWFWTVVEWAATPTLGASLRRRKVESLLTTHRIRRVSVDDVLTVFERPALTVAPGTVEAVTHHIQMLLPRLRLVQEQRHACEKELADVLTELRTTAPPPPAAGGTTAAQPRGAPSTPGDVAILESLPGVGLVVTWSLMADAMALLRLRDYASIRAVTGVAPVRRQTGKNHRGTISMRYACNRRLRNACYHFARVSTQVDAAAKHYYATLRARGHSHGRALRSVADRWLRILISMLTHRTLYDPSRFAIAGGGPTADARESHRNLKTTS

SEQ ID NO: 359408 - protein, 373 aa, unidentified
MTKNLRYLGLDVHAETIAVAVAEPGGEVRSLGIIPNEPSVVAKLIRKLGGREQLRACYEAGPCGYVLYWQLTKLGVACDVVAPTLVPIKPGDRVKTDRRDAEKLARCHRAGDLTAVWVPDAAHEALRDLVRAREAAKADQLRARHRVSKFLLRHGIRAPGDVKPWTQRHRRWLDTVTFAPVAQQTTLADYIHEVDHAGARLERLETTLDVAIAAAPPAMQAIMRALQCLRGVRQLTAATIVSEIGPLSRFSHPRQLMGYSGTVPSEYSSGSSVHRGAITKTGNAHLRRVLVEAAWAYRFPPKCGDALRTRQRGQPPGITDIAWKAQQRLHTRYRRLLGRGKPVPHVITAVARELVGFIWAIGIAAEREVAIAA

SEQ ID NO: 359409 - protein, 342 aa, unidentified
MKITTIGIDLAKTPFQVQGVDERGKAVLKKPLKRGQMAPFFANLPPCLIGMEACGSAHYWANKLQEMGHTVKLMAPQFVKPSVKTNKNDAADAEAICEAVSRPNMRFVPIKSPEQQAVLALHRARQGFVKARTAQANPICGLLAEHGIIIPRGITHIGRELSGIREDGENGLPDIFRQRIERLGDHLKELDRQVRELEGQIQAWHRESAASRKLAGIPGIGPLTASALVASIGDARQFENGRQLAAWLGLVPRQHSSGGKQTLLGISKRGDGYLRTLLIHGARAVIRIAERKAQQAGSWLEGVMARCHKNVAATALANKNARTVWALLVHDREYQAGYRATA

SEQ ID NO: 359410 - protein, 336 aa, unidentified
MYHLGIDLHKDESHVAVLDDNAEVVEDIRVTNANLDDVAEEYAGVKAALEATSNYYTVYDILDGHLDVVVADPTQTKAIGYAEVKNDRLDAKLLAQLRRAGMIAESYVPSEELRERRALVRGRKRLVEKRTDFKNEVHALLDKHGITYDWDPFSVNGREILAGEDFSLGVVGDQLMESFLSIIDELTAQIEELETLIEETAASLEETQLLMTIPGVSFYSSLLITSEIGEIERSDEAKQVVSYAGLDPVVRESGDSRTEGSISKRGSGDLRWILVQCVQTAVHRCNDPYLGRFYARLKQRKNHQIAIVATARKLLVSIFHMLEREEVYDPPEVSAR

SEQ ID NO: 359411 - protein, 339 aa, unidentified
MTYQYFCGWDISKLTLNYCLQDQQSRVVKEGQIKNSSRAISALVKQLHSHFSIANGAILHGAENTGQYAHPLCRASVELHFPLWLEDAFQLNRSMGRQRQKSDLVDARGIAEYTRRFADKARLYELPTKFQLKMKHLAKVRQHILRNAQRSKTMFQEMQQFSLVQIDPRTVEIFQEHLRQMKHQLELIEQRIEACIAKADQAIRRKIAVARSVPGIGPKNSIAILVITGLFERIPSARKCASYAGISPHERQSGTTLRQRFRASRSASRSLKTAFHQGAMSLIQGDNLFNQLYRRLRANGRSHKQAINAVRNKIIKVLYACLEKDTMYCKKYHENLHRL

SEQ ID NO: 359412 - protein, 320 aa, unidentified
MIAATTVVGIDVSRDWLDGFCVPGEQRFRLANSVEGHDQLIAAIREMPGAVKTGFEATGGQEWVLWARLVAEGIEATQLPPAQIKAFALSRGTRAKTDRIDAELIARFMLSRPEAGRMLPSENLRILRALTTRRAQIVDMRKRLLAQIAARKKQDVPAGVEGMDEDLKAMLDTQVGDLERRIECAIAQEETSAAKARLLRSIPGIGPVSAAMLIAEMPELGRMTAGEAAAMTGLAPVPHDSGTMRGKRTIAGGRRALRHVLFQAALAAACHNPVLKPVAQRLKTRGKPHKLVIIAIARRLVTIANAILKAGTPWRSQPVP

SEQ ID NO: 359413 - protein, 336 aa, unidentified
MNEIIRIGVDTSKSVFQVHGVDAAERPVLCKRLRRSEVERFFAALAPTVIGLEACGAAHHWARVLEGLGHQARLIPPQYVKPYVKRGKNDAADAAAICEAMSRPSMHFVPVKTAENQAALMLHGARDLLLKQRTMLTNAIRGHAAEFGLTGAKGSCQIAALLERIAAANVPALAREIFARLAEQIEALNVQMDSLDAQLRAWHRTNERSRRLAAIPGVGVIGATALAMKVPDPGFFKSGRHFAAWLGLTPKDHSTAGRQRLGGITRAGDETVRRLLVSGALAVIQRAKPGRSSPWLLGLLARKPKKLAAVALANKTARIAWALMSRGETYQRPATA

SEQ ID NO: 359414 - protein, 436 aa, unidentified
MPFFLTYTNLEGGYPLKVVYPICCGVDVHKTFFVATLITSEGITPRYQKKRFSTFNKQILAFKEWLLENNCRDVCLESTGKYYVPVLNLLEDSINITVANPKWVRAVKGNKDDVKDSKWIGNLFRLGLVPGSFLPSKPIRVLREYTRYLFKMVNAKSSEKNRYQNVFTVCNVALDAVVSDMFGVSATNITDYIINSDTFDPDYCVTLLRGTLKGKAQSVLESIEGFQMTEAQKFRARLIRDHYNFLMNHISTLKSNIETLSAPFAGAIRLLCTIPGIRERSAISILAEIGDDMSQFGSAKRLCCWGGLTPGNNQSAGKKKSVKITRAGVYLKPALVEVAHAAVKDLKNPYYGIKYERIVRRRGKKRAIIAIARMILTAIYHMLSTGEVWNPCDLPLIDIPPEIREKQLKKDIRRAANLLVANGVINLSDIRFPDTA

SEQ ID NO: 359415 - protein, 344 aa, unidentified
MDHFAGLDVSVKETSICIVDDAGRIVKEVKVASEPEALLKVLGNPIHRFKRIGLEAGPLSQWLFSALAEAELPVVCVETRHMQAVLKAQINKTDRNDARGIAQMIRAGLYRPVHVKTLRSQKLRMLLTHRKLLQSKAIAIENDLRGTLRNFGLKVGMVGKVRFEARVQELVENQPDLAVLVEPLLIVRRALLEQIVILHRRLLAIVRDDEVCRRLMTTPGVGPVVALTYRATVDVPTRFRKSKSVGAVFGLTCSRYQSGEVDWSGKISRCGDEMMRTMLYEAAQSTMHSKKWSWLKAWAMQIARRRGMKKAIVALARRLAVIMHRIWVDGTEFRWTREQAAAAA

SEQ ID NO: 359416 - protein, 376 aa, unidentified
MEHNSEAFIGIDTSKLKNAVAIAEGGRDGEVRYLGEIETTDAATRKLLKKLATKYRKVTFCYEAGPTGYGLYRLIKSLGHDCSVVAPSLIPKKPGDRVKTNRRDAVGLAKNLRAGELTAVWVPDMRHEAMRDLSRAREAAVDDLKSKRQQISSLLLRLGLHYPGEKTWGKSHRNWLASLKLDQREQRIVLEELFGAERQAQERVDRLASAISDAVPEWSLAKIVTALMAVRGIDLVAAVTIMAELGDLSRFASPRELMAFLGLVPSESSTGDSVKRSGITKAGNRRARRILVESAWSYRYPPRISRDKLAKVAAAPEPARAIAWKAQTRLSSRFRALSKRGKRPTIVATAIARELCGFIWAIHRAVTAPGGRQLVS

SEQ ID NO: 359417 - protein, 411 aa, unidentified
MVKENFIYVGIDLHKETHTAVMIDCYNQKLGEITFPNRPADFPKLVTKVKKCNTDAKEVVYGLENAYGYGRPLAVWLIDKGYFVKDVNTAISHRQAKHRGAMYRKSDSDDAEAIALATLNMLDKLPDACPNDAYWSLGQLVHRRDNIMKQRTRLVNQLHEQLCIAYPSYKSFFNDISRPTALYFWEHYPSRKYLRGKSVEDLREELVPVSHNRCSTKNCEKILDAVASDKVKNNAYQDARDMVTLSIVSDLQHYDSQLAEVDKMLEQMYKMLGCTLTTIPGVNVITAVKILAEIGDIKRFSNANKLAQFAGIAPLHLSSSGKGKDVATKQGNRRLQATIYFLAIQMVQVSSKGTPRNSVVRAYYEKRKAEGKTNQQALICISRRLISVIYGMLKNGTEYRMPVVENAGENR

SEQ ID NO: 359418 - protein, 423 aa, unidentified
MPYRIAGIDVHKKKLAVVVADVEVEDEYQFERRWYGSNPEQLQLLAEWLSEQQVEEVVMESTAQYWKPVWGTLERYWKPVCEKREGAGRMSGTLHLAQALSNRGRRGRKRDFRDAERLLKRLVSQELTLSFVPPAEQRLWRTVTRTKYQLRRNKVRLHNQLEALLEEAPIKLSSLVSDLLGASARRMLQALAEGETDPAALAALADQRLRATPTQLRDALGACTELNPVYRRLVKMALEELQWIEHQIGQLDQEMASLLHQHQDAVQRLAEVPGLGVDSAQQIIAEVGAKAATFASAKNLSSWVGACPGEEESAGVNYSPRSPKGNRHMRRLLNQAANAAVKRKGSIFEILYRRLVPRLGHNKTIGAIAHRICQLIWMILYKGVRYEERGPAVCEQSKRVRTLRMIRTLRKFGYRVELQADPA

SEQ ID NO: 359419 - protein, 462 aa, unidentified
MKKNTKSSSTTPAPLSLLNPKCAGIDVGASELFVCIAKNSSEQEVRSFPTFTADLKRMIDWLKNNGVKSVSMESTGVYWIVPYEMLEEAGFEVLLVNARFFKSVPGRKTDVQDCQWIQQLHSYGLLRGSFRPSQEIVRLRAYVRQRSRLFELAGTQVQLMHKALIQMNIQLNRAISDITGVSGMNIIRAILRGERNPKILANLSVNGCRKNIDRIAKALEGNFNTEHMFALEQAHEAYEFFHRQIHQCESAIETVLSFMQVAASSLHPSSDNGQKATSCSSKKRARKTQAMRSPYYFNAPDAIKRITVADLTTIPGIDANTAMKILSEIGTDTSRWANAKAFASWLGLCPGNKISGGKVLSSRTKPSDNRVAQALRLAAASLYRSKTAIGAFFRRMRARLGAPKAITAAAHKLARTLYRMLETGNNYQEAGENYYEQQYQARVVASLTKRAKELGYTLVPAK

SEQ ID NO: 359420 - protein, 342 aa, unidentified
MKSTTIAVDVAKEILEVAVSVRPGQVREQKRLTRTAFMKFCTDQPPATVLLEACGSSHYWGRRLQGLGHRVVLLPPHATRPYVFRNKTDRADTRGLLEAYRNEDIHPVPVKSVPQQALTALHRLRSTWLAARTARLNTVRGLLREFGCIIPVGAHHVLPRTWDLLADPDSGLPDALRPALAETCTEIRALEDRIRLVETQLEALADQTPVVARLRSIPGVGLITATALVAFVGDVQRFPSGRHFASYLGLTPRERSSGLIRRLGSISKRGDVYLRMLLTHGARAVLGKAKSRPHPDRLRAWALQIQRLRGHNKAAIALANKLARIVWAVWKHDVDFREVTAA

SEQ ID NO: 359421 - protein, 401 aa, unidentified
MSGLKGSFGCFVGIDISKDKFDTCGITGEEAKLFQFSATMDRKGFDKLKGHIASVPVSSVLIGMESTASYHVNLFSYLVSEGYNVILINPLLISNYVKMQLRKTKTDKKDAVVIAQFLRTNGDSLIQRVTSSLISDLRDLARQRESLVDEMTALKMEIKRLLNITFPELEHMVGIFTKSILKLLQRYPSAFALRDADLGQLSQTLIADSYGHKREAFATELIKTAHASIGSSSSAKEMILKQKIALLLHLEGALQEITDVLIEMSRKLMEEDINIMTSIKGIGDKTGVNFLIEMGCDISQYDRSGKIIAMAGLDPAVYQSGNHEGKGRITKRGNRHLRRVIWLMTTRVIHYSDIFKAYYLRRRKEGLPYKMAVLATAHKLIRVIYAMLTQRTSFCPQANLL

SEQ ID NO: 359422 - protein, 342 aa, unidentified
MQAIRFGIDLAKSVLQVHGVDASGQVVVQRQLRRGQVLKFFARQPPALIGMEACGSAHYWARELSKLGHEVRLMPASYVKAYVRRNKNDARDAEGCCEAVSRPTMRFVPIKTVEQQGQRALHRARDLMVRQRTQAGNAIRAMLYEMGLIASKGRLGIGELIERIEAGGEDIPAGLLIPLKSLVRQWRGLDAQITALDRELVAQARANADACRLMKIPNVGPVTAHAVIAAVGDGRQFASARDFAAWVGLTRHNHDTGGKTSLTGHISKAGDRSLRRLLVLGASAGLRHVRAKPGKGSPWIRGVLARRPVKVAVIAQAAKTARIIWAVLAKGQEYRTDQPHQA

SEQ ID NO: 359423 - protein, 344 aa, unidentified
MYFIGVDHHKQASQMTVLAEDGRELKSGRVPNLRKKVELFLKEYHPFTAVLEAGRSSYVMADLLRELGGEVKMANALQVKAIAHARIKTDKRDSRTLAHLLRADLIPEIYQRGERNRQAQRILRARAHWVRKQTEIKNKIRALMAQQKEEIRLEVENRKEGLFSAGGIECLNRQPVEGPDKMVLDDLLQGYQETQAHIKKSDGWVRELYGELEEAARIDTVPGFGTTFSVLVAVEIADIQRFSSPAHLHSYAGVIPSTHASGERSYHGRITKQGSRWLRWAAVEAVYPAIQKDLGLRVLYNRLAQRKGPNAAKIAVARRLLTIIYRIMTEKRTYIPDMMNRSAA

SEQ ID NO: 359424 - protein, 344 aa, unidentified
MDNRTQYLGFAGVDLAKKVMQIHFVTEDGEITDKSAKRAEFLDFFRNRGKCLIGMEACGSSQDWARKLEAMGHEVHLLPPKAVKPFVSGQKNDHNDAIGIYKAMFNGVRRVPVKSTEIRDLQTLRRIRSQVTKDKVKEINHVRGLLAEYGIVMGKSLNAFNKDISSALGILTERGDVSPLVAEELRTTVEAIKAKIERQKKLDQEIEQLARGCKNYENFLKTPGVGPFTAAMLCVLLCDPSIFANGRQFAAYIGLAPRSRGSGGKNYVTGIPSKFNCDSESRAVLVECAQAIARCKNKSLWVEEILRRKPKKVALIAIANKLARQVWAMANKGESFKQMAVLTA

SEQ ID NO: 359425 - protein, 327 aa, unidentified
MNSICLSTDSLPVLGLDVAKKSVQAELRRAGGKTVRFGFENNAKGFAQLARVLKEHNVPKVWAGLEATGPYSHALALWLHGAGHRVSLLNPRRVKQYARSAGKRNKTDLLDAAIIADFVCAHRPAPWQPPTLEVAQLRALVRRREELSLMLQAEKNRMEGVAPNVSCSLRRIIATLSAERARLEKLITQQIRSHQQLSCDHQLLCSIKGIGSLTAAILLAEMARPGQVERARQAAAHAGLVPRREESGTSVRRNRGLGKEGNRYLRKALYMPALVAIKYNAPLRHFASRLRAAGKPKMSIVCAVMRKLVHIAFGVLKHQKPFNPSLA

SEQ ID NO: 359426 - protein, 341 aa, unidentified
MQITTIGLDIAKNVFQVHGIDAAEKAVVRKQLRRGQVLKFFSSLPPCLIGMEACATAHYWARELTKLGHEVRLMPAKDVKAYVKRNKNDAADAEAICEAVRRPTMRFVRVKSAEQQGGLMQHRTRDLLIRQRTQVINALRAHLAELGIVAAQGREGLKDLLKIIADEKDARLPIDARASLIVLAAQLQALQTMIGSIERRLLVQHRANEPSKRLESVPGIGIIGASAIAATVTDPNVFRSGRDFAAWVGLVPRQDSTGGKQKLGPISKQGDRYLRRILVVGAHSVLWRAKKNPEKYPWLTQLLARRPFKVVAIALANKMARIAWALLARGGIYRAPRLAAA

SEQ ID NO: 359427 - protein, 401 aa, unidentified
MEGSTFIGLDVHKATISVAIAQGERGGEVRHWGSFPHRPDHIRKLAERLAAGGARLHFCYEAGPCGYGLHRQLTELGHDCMVVAPSLIPMKAGDRVKTDRRDATMLAKLHRAGELTAVWVPDAAHEAMRDLVRARATAVRVAGKARQHLQGFLLRHGRIYPGKKGWTKACRRWLTTVRFTHPAQQIVLQDYIHAVTDAEARIERLTKQIADLLPGWSLAPVVEAVQVMRGVAFIVAVTVVAEVGDFNRFDNPRQRMAYLGLTPSEHSSGASVRRGGITKAGSGLARRVLIEGAWRELPDAGPRQPQAARPGREPAASGARHRLEGPAADVPALSAPDGGGEAEGRGHHGDRARDGGVHLGHRPHRSACPGLTRSTTEKRRLDPSDAQGWGRNAVGNPRALL

SEQ ID NO: 359428 - protein, 458 aa, unidentified
MSQRSQKQRKQKFRVQNLPKQLQHINVNAAGIDIGAAQHLVAVPEGRAAVSVRQFGTFTAELQAIADWLEQCGVTTVAMESTGVYWIPLFELLEQQGFEVKLVDARQVKNVSGRKSDVLDCQWLQQLHTYGLLAGAFRPAAEICVLRSYLRQKEMLTQASAQHIQHMQKALQQMNLLLHNVVSDITGVTGMRIIKAILGGQRSPQMLASLRDGRCHSSSETIAQSLVGNYRDEHLFALRQAVELYETYQAKIADCEAAIINQLDSYPDNTDDPPPPGSKPGKARTHIRNGVDVRHLLFQKSGIDLFAIPGLGTDTLLTVTSEVGFDMNPWKTVKHFTSWMNLCPGTTISGGKVLSKKIKRNANRAAQAFRLAAATLGRSQTALGAFYRRIKARHGGQQAVTATAHKLARIYYTMLTKGTAYVELGQQAYEQKYRERRFAHLQRQAKTFGFQLVPCTQS

SEQ ID NO: 359429 - protein, 352 aa, unidentified
MIVLGADMHKSSHTIAGVAAATGEMLGDKTAGVGARGFDEVLQWARGLGSDRVWALEDCRHVSGSFERFLIARGERLVRVPTRLMANSRRSSRERGKSDRIDALAVARAALAEGIQTLPMAALAGRELDIRLLVDHRERLVRTRCALNNTLQWHLHDLWPELELPGSSLFYGKWSTRIARRLARAEQTMRVRIARDELRRLRELTQAINALESEIAELVGRVAPQLLDEPGFGPLTAAKLVGEIAGAGRFASDAKLARAAGLAPIPVSSGRTDRHRLDRGGNRQINAAIHHVAVTRARCHPETIEFVARKKTEGKTHREAIRCLKRHLARRIWQLLRAPHPVSETTPHPWTS

SEQ ID NO: 359430 - protein, 401 aa, unidentified
MQEPLQHNSIDVFVGVDVGKGQHHAVALDRSGKRLYNKALPNDEAKLRALINELKAYGQLLFVVDQPATIGALPMAVARDEGVLVAYLPGLAMRRIADLHAGEAKTDARDAAIIAEAARSMPHTLRSLRLADEPLAELTMLCGFDDDLTAQVTQTSNRIRGLLTQIHPALERVLGPRLDHPAVLDLLERYPSPAALAETSEKTLANRLTKLAPRMGKRLAAEIVQALGEQTVVVPGTQAATVVMPRLAKQLAALLQQRDEVASEVERLVHAHPLYSVLTSMPGVGVRTAARLLTEVAHKAFASAAHLAAYAGLAPVTRRSGSSIRGEHPSRRGNKVLKRTLFLSAFAALRDPISRAYYSRKIQQGKRHNQALIALARRRCDVMFAMLRDGTFYQPQTAPNA

SEQ ID NO: 359431 - protein, 356 aa, unidentified
MRFSVGVDLHKHQMTVHIKDGKNLMPDLCSKFRTTNDGYDEFTGLLTSISENKDCQIAVESTGNTRYFVKKMQEKGLSVKIVNTMKFKVINESINKTDKHDANTLSEFLQKDMIPEVKLCSKESKDLRAILKHRKTLKSATVSLKNQVHCTMLENGIETRNGQLNSIRGREKIIEQIDDPVTKTIVSNIIKSIEILEEEIKKLEEELRLMSEGDNAVKILQSIPGTGFLTAVKVRAYLDDIKRFSSYEKLSSYCGLVPWVQSSDTKSYYGQITKRGPQELRTAFIQMAIGMMRVKIEKNNRYMLSYQIMKRNKGSGKAIVATARKLTKLVWTLLTEEKNYDPFKSNKIYKSAYYVA

SEQ ID NO: 359432 - protein, 407 aa, unidentified
MNAVGIDVSKGKSMVAALRPMGEVALLPREFLHTEVGLEQMAYAIIALGEDTRVIMGATGRYHEPVAAALHEYGIYVCVLNPLFIKQSGGGSIRKVKTDKADAMKIAKYGLDNWVDLREYTPMDTIRQQLKLCSRQYNLYMKTVVSLQNNLISLTDKTFPGVNELFSSPERADGHQKWVDFVMTFWHCDCVCHVSEKAFTERYQKWCKRKGYHFSEEKARNLYVSSCGHFTTLPKNENTKLLIVTAAQQLLAGKTTLAALRAEMTRLASQLPEYETVRAMYGVGETTAAQLMAEIGDVRRFPRRSSIVGFAGVDPGVDESGKYRAKSVPTTKRGSPHLRKTLYQIVRTYLRKTPADEPVYQFLDKKRAEGKPYFVYMTAAQNKFLRIYYARVKECLEAFDAQTAEQK

SEQ ID NO: 359433 - protein, 342 aa, unidentified
MAIAIVGLDLAKHVFQVHAVDETGRAVLRRQLRRAGVEAFFKTLPPCVVGMEACASAHYWARRISALGHEVRLIAPAKVKPYVQRGKKNDANDAAAIVEALMRPHMVFVPIKNEEQQAVLMLHRTRDLLVRQRTMLVNAIRAHLAEFGIVAAQGRRKVKDLITGLDNTEIPELARLALWQIADQIDECDNHIDTLERRILAWHKSDEASCNLATIPGIGPITASAIAATVPDPSAFRNGRQLAAWLGLVPRQNSSGGKDRLSGITKAGNPYIRRLLVIGATSVIRYARSKAPGTAEWLKKLLDRKSARLASVALANKMARIAWSVLTRGEVYRNTYPIPKPT

SEQ ID NO: 359434 - protein, 431 aa, unidentified
MRKENIIYVGIDLHKETHTAVMLDCWNHKLGEITIENKPAEFHKLTRKVSRFVTEEKTAVYGLENAYGYGRALAVWLFEKGFVVKDVNTALSYAQRKSVPMYQKSDSYDAEAVALVLINMLDRLPDAIPDDKYWTLSQLVNRRDNINIHQQRLKNQLHEQLCMAYPSYKKFFQDIGRPTALYFFHEYPSPVHLRGKTAEELAGELRPVSHNNCSVKRAEKILELVKSDGETYRDCQESRDIITRSLAYDLEHYRKQMEEVEAAIEAMLPEFDCTLMTMPGIDIITAANILAEIGNIDRFPNAKKLAKFAGIAPINFSSAGKGKDVCPKQGNRRLQAIFYFLAIQMVQVAPSGTPRNAVFREYFLKKLEEGKNKSQALICIARRLVNIVYGMLKNHTEYREPESKTGDETPPGSFLIFSSILETPGGRILHI

SEQ ID NO: 359435 - protein, 345 aa, unidentified
MNYIGIDYHKQYFVATMMNEQGKVIRRDKASTDRASIKRYFADADSRGETKAVMEACYGWEYFYDEVSGLVDELIMAHPLKTRLIAEARIKTDTIDSETLAHLLRTDLIPRAYAPDSETRDKKNLLRYRSSLTAMKVRIKNIIHSVLTRNHIEDNSFTSLSDKFGKQGMSYLRSVTLKGDDTGILNNYLDLLEETERKIKLAEKQIRAVCREDKICTLLQSIPGIGPILAVTIRYEIDDIERFMSAGKLCSYAGLVPSTYSSGNRTYQGKITKQGNKWLRWALIEAAQQAPGKDLWLRGFYQRISKNGKKIARVAVARKLLEIIYRIWKEEKPYYKKGTVALPLV

SEQ ID NO: 359436 - protein, 342 aa, unidentified
MNLPVRIGMDTSKSVFQLHGVDENEVVVVRRQFRRAEMIRYFERLPPVLVAIESCGSSHHWARLLQSFGHEVKLIPPQYVKAYVKRGKNDAADAEALCEAVTRPSMRFVPVKSKERQAACMLMTVRERLVSVKSQLSNAFRSYAAEFGIVGPAGRQNVTALIKRVLEDDSLPEMARDLFRLQAEEYAAVQARLAKIEAKLMKWHREDDVSRRIATIPGVGPIGSSMLSMKAPPPETFRSGRDFAAWLGLTPKDHSTGGRQRHGGITKAGDSALRSTLIVGATALLRHIRKGRHKPTPWLASLLERKPPKLVAVALANKFARIAWRLMISGGVYNRPVADMPI

SEQ ID NO: 359437 - protein, 352 aa, unidentified
MSQKPESTIAVVGIDIGKNSFHVVGLDKRGAIVLRQKWSRGQVEARFANMPPCLVGMEACVGAHHLSRRLKALGHDARLMPAKYVRPYSKGQKNDFRDAEAIAEAVQRPTMKFVATKTADQLDLQALHRVRERLVSQRTGVINQIRAFLLERGIAVRQGLRFLRAELPRILTTPPDVLSPRMVRIVEDLAGDWRRLDERVEILSDEIEATACQDAGCERLMSVPGIGPIISSAMVAAIGTGDVFTKGRDFAAWLGLVPKQISTGDRTILGKISRRGNRYLRVLFVQAAWVVLIKPKSWERHGLKSWIEAAKKRLHRNVLAIALANKLARIAWSVLARGRDFEAGSIATVQPV

SEQ ID NO: 359438 - protein, 510 aa, unidentified
MITIPVITETCAGIDVGKRGLAVAVATGPADKEAAITTRWCGTTVPALRELQAWLRACGCTSVALESTGVSWIPVKNILEEECRITLVCARKHHPKKGDKTDFQDAINLAIYHRHGLLTGSYLPERGIVELRDLTRRRKKLIGAIQSEKNRIQKVLETANVKLGNIVSDVFGVSGQEILQALLDNAPMMAAELANMAKRRLRKKLPQLTEALEAHQMNDHHRWLIEQSIAHAKFVDEQVEELEKKIEEQLQPYRRQYELLMTIPGIKEASAANILAEIGPRMDQFPDGDHLSSWAGICPGNNRTAGKSKSSHIKKANKFLVASLVEAAWGATRKKDSASQRKFYRWLRKLGKKKAVIAMCHHQLKVVWSVLKHGRPFIEPDPIVLKTIERQKQIRHHANRLRQLGADAEAITAVMETLLADEPVATASAPANAETTEAANPTCQPRCKCSSQKMKRSLPRGVLGFRLRNAYKDLYSTVKEPTGTTLDTPPPKTTKRRGPTRKKAGASVEQ

SEQ ID NO: 359439 - protein, 366 aa, unidentified
MMIIGCDFHPSFQQLAMLDTETGELVEKRVSVSEAGAFYRSLQGQTVRVGVETSGNMLWLERLLAECGHELWMGDAAKIRAANPQRQKTDRKDARHLLDLLMQDRFPRLWVPTLAERDLRQLLVHRHKLVRMRAQVKNQLQHIALNQGIQWRQKLWTRAGRESLESLELDRWTRLRRDSLLQRLDGFDQEVAELDRFVQQEAESNPRACLLMTHPGVGPVISLATVLTLGDVSRFRNGKKVASYLGLVPREQSSGVRRRLGSITKQGNTFLRHLLVEGGHSAVMAEEKWSRSYLHLARKKQRTGEAKVMVARKLAVRLYWMLRLEKRYPEIVGHAGQLESSCGLKKTGRLCEHPASRSQRGFKRGA

SEQ ID NO: 359440 - protein, 444 aa, unidentified
MSDSSPLPSAGSEWAAFAAIDWADQKHFWRLAPTGSDQQEQGELENTPEAVEAWAVALQERFGGRPIALCLEQSRGALVYMLAKYAHLVLFPVHSTTAARYRETFHPSGAKDDPNDTASLLDLLLRHRERLRRLQPDTVETRLLQFLVEERRRAVDEKTRQSNRLKECLKRYFPQLPRWFEDITTTLVGALLERWPNLEELQKAHPGTLRRFFHQHNCRSEELIRERIDAISHATPATKDMALLEAGALTARGLVALISTLRRSISDYDRRIEQLVATHPEGALFASLPGAGPALAPRLIVAFGTRRDRYQDAYQMLCYSGIAPVKEASGRSEWIHFRRSCPKFLRQTFHEFASHSIGQSEWAKAYYQSQRARQKNHHAAVRALAYKWIRIIFRCWKDGTPYNEQVYLQSQRRRGALLGPALAAATSSGWQQVAGFQKFSRRPS

SEQ ID NO: 359441 - protein, 335 aa, unidentified
MKSYKRVIGIDISTERLDVADSNAKIVHEVDYTIEAIKSKILRLIKKPSETLVVCEATGGLEYSLVDMLHDAKIDVVVANPARIRDFAKGHGFLEKSDKIDAKVLQLYGLQVDATLAIPRTLQERNFIALTRRRTQLLQLISQESNRLRQSNDTQVKSFIEEMLKSLENQMKTLDSWISKALDEQSKTNPSIDVMRSVPGVGVVMTATLVAELPELGTISRTKIAKLVGVAPMIKQSGKSEERRRARGGRGGVRRVLYMATLAATQKNDVIKKRYIKLLASGKPKKLALVACMRTLLTILNDMVRHETKWGEKKKSVAGSVVSNRPAPAHVLDKS

SEQ ID NO: 359442 - protein, 344 aa, unidentified
MKYFAGLDVSLQETAICVVDEDGIIVTEGKAASDPDDLVRWLAATGLTITRVGLEAGPLSPWLHAGLREAELPAICIETRRMKGATAAMAVKTDRNDARAIAHAMRVGWFTAVHVKTAESQELRLLLSNRRTLLEKRVAIDNEIRGTLKAFGLKLGAVTVAAFEARVLELLAKRARLLTMVRPMLTARDALRRQCEVLHRMVLKAVRASVVCRRLLSVPGVGPIVALTYATGVDDPARFLRSRDIGPHFGLTPRKYASGEIDRNGSITKAGDGAVREVLVQAALTLLTRVHRWSALKAWGMAVAKRRGLRRAIVAVARKLAIIMHRMWADTTTFNWSRETVAQA

SEQ ID NO: 359443 - protein, 396 aa, unidentified
MRKAWIILKGCSFQPLYDRATYERTGPMSTSVVYVGMDVHKDSITIAVAREGREPAEKWKTIPYDGVRLRKALSMLCKNRAVLKVCYEAGPTGFGLCRRLREKGIDCIVVAPSLVPGKPGDRIKTDPRDARKLAHFLRSGDLTEVFVPDEAVEAIRDLERARDDAKCAERVARHQLSKFLLRQDRHWEGTAWTGKHRDWIRTQKFTHPAQQRVLEDYLKTVEDLAERVERLTAQMEELVQETALAPLVKALQAFRGISVVSAVTIAAEAGDLRRFPTASQFMSYVGLVPSEDSSGKRQHRGAITRCGNGHLRRILVESAWHYRHLPVLSKELRRRNKGIAVGVQRIAWEAQKRLNKRLYHLIHAGKSVNKAITALARELAGFVWAVGQEETLLEAV

SEQ ID NO: 359444 - protein, 344 aa, unidentified
MEKHTVVSVDIAKSVFEVAVSKEPGRVSDRRRLSRGAFLVFLAQVPRGTVVMEACGSAHYWGRRIQELGHQVVLLPPHQVRPYVTRNKTDRTDAKGILEAYRNADIHPVPVKSVSQQVLVCLHRFRSGWISSRTAQVNTLRGLLRELGFVIPEGIEKVLPQVRTLIEDADSDLPEGLRAVLATACDEIQTLGESIKRTERQLQAVAEQTPLVERLQSIPGIGLMTSTALVAFIGDVERFPSGRHFAGYLGLTPREHSSGLKRRLGRISKRGDSYLRMLLIHGARSVLCHAKKAREHDRLRTWALALERRATHNKAAVALANKLARIAWAVWKRGREFESHQKAA

SEQ ID NO: 359445 - protein, 346 aa, unidentified
MQITTIGLDLAKNVFQVHGINSGSEVVVKKTLRRSQMRRFFEQLDPCLVGIEACGTSHYWAREITKLGHEVRLMPPAYVKPYVKRGKSDAGDAEAICEAVTRPTMRYVAIKSPDQQAALALHRTRDLFVKQRTQLVNMIRGLLAEFGIEIRRGIEQALMLAKRIAAHEVPDIPPLAAKMIAGLAGQVLDLQARLGEIERELLTWHRSNDIATRLATIPGIGTVCATALAASVTDPHQFRSGRQFAAWLGLTPLQHSSGGKERLGRISKMGDKYLRRLLVVGMTSLIRRAKYKPEAVDPWLADLLSRKPARLVTVALANKAARVVWAIMVRGGVYHRSASASVTTSV

SEQ ID NO: 359446 - protein, 446 aa, unidentified
MEVVFPYCAGLDVHKKRVTACRLVSDSTGQVPEGVAELQTFGTMTHELLALADWLVEAGVTHVAMESTGEYWKPVYNLLEGIVTIFLVNASHVKNVPGRKTDPADARWLAKLMRYGLLQASFIPPIAQRDLRDLTRYRTKLVQERAREVNRVQGVLERANIKLASVASDVLGVSGRAMLEALITGQADPATMAALAKRRMRSKIPALEQALTGTVRDHHRRLLAMQLRHIDFLDEQIAALNSAIAQCVTTLSQEAPVSPAPLAPTTIDVPTPADPPPPLTFTRAVELLDTIPGVNQRGAEMIIAEIGIDMTRFGTAARLAAWSGVAPGNDESAGKQRSGKTRKGNQVLRAGLTQLAHGAVRTKGTYVSALYRRLAARRGKRRAILAVAHSIMGSVFHMLSRNEPYRELGPNYFDERRRHYTVDRLTSRIEHLGYRVHLEPLPTAAA

SEQ ID NO: 359447 - protein, 339 aa, unidentified
MKYMEINHFIGVDVSKGTLDFSLAYQGKVIYHLRVSNSNSGIESFIKEIKKNFAVNLSNTIFCMEHNGIYNNILLLYLGKLNTNVWVESALQIKQSQGMLRGKNDKVDSARIAIYAYRYLENYTPWNPPREIIIQMKQLLVIRARIVEAVKQLSSPIGKDAEIFFTKTHLRLSKKCCESSIKALQKDVKAIEKQIKDLIRSDESLNRLFKIVMSVDGVGLLIAATIITTTNEFKNFSCAKKFACYSGVVPFEHSSGSSIKGRPKVSHLANKNVKKMLHLAALTGIRKGGEFREFYERKVAEGKHKMSVINSIRNKLVLRIFACVRENRLFVKKPQVLLA

SEQ ID NO: 359448 - protein, 353 aa, unidentified
MPIIAFDSHKHYTQVCVESDSGARLSESRIRHRRGVFTAFLSGYEPGTPVALETIGNWYWIVDEIEQAGMKPLLVHARKSKLMLGCVNKTDKLDARGINTLQHTGTLPVVWIPPSELRDRRELCRARMAFSAEKTRLKNRIHSMIDKYGMQDMFEDCSDIFSQKASPAISACIRQLPEQTRYVIRHMLEQLKRVVSRIEQLDKRIQKVYRKDRQIELLETLYGVGPVLSVVIAQEMGDVDRFADASHFASYCGVCPRVHSSGGKTYYGKMRDDVNRYLKCAFCEAANVIARHYRKHPGRHLDKVYARLRLKHGHGKAVGAVARRLAQAAYWVLKKQEPYREPSSRLTASTTAI

SEQ ID NO: 359449 - protein, 426 aa, unidentified
MSEVESVTREPQFAALVSIDWADKKHVWCLQAVGTEKRESGELEHTPEAVEAWVGQLCQRFGNRPIAVALEQSRGALVFMLSKYEPLHLFPVPSTMAAAMRKALYPSGAKDDPRDADLLLDLLLQHRDKLRHLSPDTEATRRVQNLVEERRKLVDEKTEQTNRLTSHLKIYFPQILDWFDLDTELSCALLERWPTLEELQKVPPAKLRGFFRKQHCRDQELVERRILAIGQAIPAIRDRAVIEAKSTVVKVIVQLIRSLREGIANLDERIEEAAATHPDFFIFESLPGAGAVLAPRLLAAFGSQRERFGNAGEVQTYSGIAPVMEQSGKMKWVHFRWACPKFLRQSFHEWAGHSIGQSVWARNYYHQQRCKGRRHQATVRSLAFKWLRILFRCWKDRVAYDESKYLTVLAKRGSPFAVVVAAGKTL

SEQ ID NO: 359450 - protein, 596 aa, unidentified
MSLLTPAAAQPAGCPAARFGVGIDTSRYGHHACFLRDDLQAAAAELSFPESAAGYEQFRQRLLGIAAGHPAACFVIRLDAAGQYADNLLHFLGQLDGTSGQPHRAIPNAQVILSCGDPQRNKNYRAALFGAKKSDAVEARACARYALSERPAPSAALPQPLRQLRQIAGRLQAVVRQRTRLINQLHHLLALSFPELALLTKDVSKGWVLELIHRYPTAARLGAAAAADLDAVAYLPTKQIEPLLQHARTSIASLSGPVVEELVRDQIRQLRDCSARQQRLEGLLVAAYRQLPKANHLDTIPGIGAVTAAVLTAFVLDVERFESPGKLVAYFGVLPIETSSGVERDGTPRSSRRYVMSQRGNDLVRRYLWMAALSAVQVNPAVRALYRRVVAKRPENKAIAIGHAMRKLLHLAFALWKTGRPFDANHYRWEKAEGGDSSRDDNEVSIEEAAGVEQGQAAGHKPEVEPAEKVVTAACAATVASAREVGEGTFIDFAHLKRQLPLAKVLDQLGISGRLRGSGAQRRCACPIHRGDGRGRTFSVNLSDNVFCCFDSHCGKKGDVIDLWAALRQMSLREAAVDLVRTFGLQPAPATEKRNG

SEQ ID NO: 359451 - protein, 436 aa, unidentified
MKEKKQMHEELYYERCAGIDVHKDKLTVCLRIGRNTTIREFDTFTSSIRDMVAWLKEKGCQMTAMESSGSYWKPVYNIFEQEELPAMVCNAYHVKNVPGRKTDKNDARWLAKCLSQGMLNPSFIPEREQRELRDMTRFRKSQVEDRARNVNRLQKFLEGANIKLGSWVSSVEGQSATQLLELIIGKPDFTKEDVALRMHKNLKSTSEELFKSLEGYMTDVQREFFAHILSVIKEQSAQIEKTDAMIQRVLSTNYKAAVDAIDVIPGIGRVSAEQIIAEIGTDMNQFKNQGSLCKWAGVAPGNNESAGKRKSGKTPPGNKTLKATLTQCATVAKKNKNSFFGAQYNRLVTHLGKKRATMAVAHSMLIAIYFVLCGKEFIDLGGDYYTNFNREKKINSHVKQLSKLGVDIPEEILKESISAALDDASTHRKPPENKAS

SEQ ID NO: 359452 - protein, 350 aa, unidentified
MNYAQINQRYLCGVDLHANSMYFKILDREGKILYKRNMPNNFALFKKILTPFLPDIAVGVESTFNYYWLYDGCIEADIPFYLGHAAYMKAIAGNKKKNDPLDAETIAHLMRSNLFPQAYPYPGDMRAVRDLLRRRHRLVRHRSEAYTHVQLLLRQQGICNFRGRDVKSVSGKQEILQTLTDPDVYYLVNSDLLLIEQLDILLSETEKQIKERAYQHNRTDYNLLKTTTGVGDMLALSILYETHDINRFPSVQNYSSYCRVIRVQRTSAGKNKYGRNQKMGNPYLKWTYGQITVHARQSSERINAYSQKLEARRCAKLARGIISHKFAVAVYYMLKKKEAFNEDRFLKVAS

SEQ ID NO: 359453 - protein, 418 aa, unidentified
MKHSKPEKIGTINQKTLIAALDIGKKVHYGYFRAPSGKDFQPFAFHNTRNGFDKFWERLCNFKEKQMLEEIIIGFESTGPYAEPICHYLRHKSVKLVQVNPMHTKRIKELTGNSPNKTDKKDPRVIADVMSLGHSLTVIVPEGAAAHLRRLTQARERAIERRTAVGNQLQHLVFLIFPELVHIIKPSTKTGMYLIKHYSDPKTLLFAGIDKLNAIIKKVSRGRLGTDRAEQLHGAAKKSVGITEGKESILFEITHLVSKIESENHYVEDLEKQMGDYLEKIPYSHSILSITGIGHVTAAGLIGEVGDFRKFKTISEVLKLAGLDLYEISSGAHQGCRRISKRGRALMRKLLYFAAINTTRKNGILHGPYQRHLANGMPRIKALMAIARKLVGIIFALVRDHSNYIADYSSQLVFKKAA

SEQ ID NO: 359454 - protein, 351 aa, unidentified
MTIISHYIGFDVHKKSVSYCVKTGDGTIVEEGRLRATREALRQWAAKRQEPWHGAMEATLFSGWIYDALQPFAAKLQMGHPARMKAIFAGKKKNDKLDARKIADLVRVNLLPVCYVGPAAMRELRRMLRYRNLVVAQAVQMKNRMSGMLMEVGAEYSKRRLHGKEYFSELLDQLEEVPESVKDLLRLSRGSVEMFETVQRQLLERLQKEPLLRKRVELLRSIRGVGEVTALTWALEVCDARRFPSIDAAVSYCGLTSALVESAGKQQRGPISKQRNAHLQTVLIEAAKLAPRWNPQLAAIHERELQRGHRNRATLEVARKLVAYLLAVDKSGQPFQPRTAPTRETEAQQVA

SEQ ID NO: 359455 - protein, 425 aa, unidentified
MGHVIIGMDPHKRSATIEAIDDQEKILAQGRFGTDRDGYKAMLAAGRGFPDRTWAVEGCGGIGRHIAQRLVADGESVVDVPAKLSARARVFATGQGRKTDATDAHSVAVVALRTQGLQVVAADGATVALRLLADRRDGLGHARTDTVNRLHRLLLELLPGGAKKFLSAQQARALLATVRPRDIAGRTRRQLACELISELAAIDRKIKAANTQLSGLVAETGSSLQHLNGIGPSGAARLLGDVGDIARFADRGHFASWNGTAPIDASSGEQQRHRLSRAGNRRINRVLHIMAIVQLRNDTEGRAYYRRKLAAGKTSMEAIRCLKRRLSDQVYRQMINDARASATGPGGHTGTATGSSVAGLHPSAGTSEKSLPGPATCDPTPARRSILQVAPGASLSRRTAAVVKRPLLDDGEDRRTLARREQRPS

SEQ ID NO: 359456 - protein, 358 aa, unidentified
MVAVMIGVDPHKGSHTAVVIGAAEEPLGEIRVRASAAQTGKLVAWAAAWPERTRAVEGAGGLGRLLAQQLVAAGERVLDVQPKLASRVRLLQAGDTNKNDPNDALSVAVAALRSRTARPVMAEDCPAVLKVWSRRHRDLARLRNQVACRLHAVLYDLVPGGHPKEISAAQAARILEQASPSGAVDRARAEPAAEFLQDMRRLDARLRDTRKKLAAAARASGTTLTEVFGVGPVIAGTIIGDIAEVSRFPGRDHFAAYNGTAPVEVSSGNRKVYRLSLRGNRRINHAIHMAAITQIRHKHSDGRAYYDKKVAEGKTHKGALRSLKRRISDAIYARLLATPGKPDSGQREGPGRATGERL

SEQ ID NO: 359457 - protein, 351 aa, unidentified
MKYVGLDWAYRTAQWCALDPGGEIAGEGRFAADRDGLARLVLELGDEVEACLEMMSGALWVRDELVACGWQVQVADARKVKTVAPLAAKTDKVDARLLAELSRRQLVPALWLPSLDERELRERLRRRMHLVRLRTSAKGRIFGLQTQWGVRISLRRLRRADGMTLLERAGMPAVWRHSISECLALIDFLDARIVPLDAELRPFAQADPRAVLLDTIPGVAELLALTIAVEIGEISRFAGPEKLVSYGRLAPRVRQSGEGRPHTGPLNGSRLLGWAAVEAAQQAWRESNPWHQLYLDVSRRSRNHNSAKAAVARKILIAAWHMLSRNEPFNPAPRSTGGASVPASSGLALAA

SEQ ID NO: 359458 - protein, 343 aa, unidentified
MEHYAGIDVSLERSSVCVVDATGRIVREAKVPSEPEALAGFFGQLALPLTRVGLEAGPLSPWLHAGLVAAGFETVLLETRHVKAALSAMTVKTDRKDARGIAQLLRMGWYRPVHRKSPPAQEIRALLVGRKLLQGKLLDIERGVRGLLRGFGLKVGTVAKGGFAARIRELVAGHPMLERVVEPMLRARDALRAEFHVLHRAMLAIVRADTTCRRLMTVPGVGPLVAVTFTSAIDDPTRFRRSRTVGAHFGLTPKKYQSGETDVTGGISKAGDGMVRTALYEAANSLLSRTGGFSSLKRWGLEVAKRRGLRRAKVALARKLACVLHRMWIDGSEFRFGKEATAA

SEQ ID NO: 359459 - protein, 427 aa, unidentified
MKQEAAEQQEFGAYIGLDWADRTHVISLRGTDSGKVEHYQLVHKPEALAEWVSDLQRRFPGQRVAVALEQARGAVVHALMGYDFLVLYPVNPKTLAKYREAFSPSGAKDDPTDADLLLELVTLHRDKLRAWLPDDELTRTITLLVEYRRQLVATQTSLSNRLTSLLKLYYPQALAWAGELTTVQACDFLQRWPTLAQVQQAPPAKLRQFYLAHGCRKADVIEQRLQEIKLAQPLTRDGAVITASVLMVQATTTQLRPLMEAIARMEKQIGELFSQHADHDLFSSFPGAGPVLAPRLLAALGADRGRFAAATEVQQLSGIAPVMERSGKTCWVHRRWACPKFVRQSFHEFAGQSIRWSTWARAFYDQQRQRGHGHHAAVRSLAYRWIRIIYRCWQMRVPYCEQTYCRALQRRQSPLARVLAAPMQNAS

SEQ ID NO: 359460 - protein, 314 aa, unidentified
MPTQTKTFSRFIGCDVGKTEIVVFDSHTAQITTIANHPRDLAAFAATLDTTCLVVCEATGGYEAALLSAVVKAEIAAHRADARKVKAFIRSFGILGKSDAIDAGALARYGRERQAILAPWQAPAEQQAALQALVLARADLVAERTAYGNRLAAPGSGVVRGCIKKLLACFDAQIRVIDATIATLIRTHQPFERAAKVLQTIKGIGPQTTAALLGLMPELGTLDPKQAAALAGVAPHPRQSGGRDAYRRTKGGRPEVKRVLFMAAMVAAKFNPTLRPFYERLIAGGKKKLVALTAVMRKIIVIANARLRDALAAA

SEQ ID NO: 359461 - protein, 369 aa, unidentified
MLRPRQQGKLERGAKDEEHAMSHKLNAGIAVIGIDIGKNSFHVVGLDRRGAIVLRQKWSRGQVETRLANLPPCLIGMEACVGAHHLSRKLTSLGHNARLMPAKYVRPYSKGQKNDFRDAEAIAEAVQRPTMKFVATKTAEQLDLQALHRVRERLVSQRTGIINQIRAFLLERGVAVRQGLRFLRAELPRILATPRDVLSSRMVRVLEGLADDWRRLDERIEGLSSEIEVLARRDAGCERLMSVPGIGPIISSAMVAAIGAGDAFSKGRDFAAWLGLVPKQISTGDRTILGKISKRGNRYLRVLFVQAAWAVLIKPTSWDRHGLKSWLEAAKKRLHHNVLAIALANKLARIAWSVLAHGRTFEASKMQAA

SEQ ID NO: 359462 - protein, 416 aa, unidentified
MRIIGFDIHRAFAEAVAWEDGKLRRLGRVDMRRHLLMAFAETLSREDIIVVEATGNAAAVAGVLSPHVKRVVIANPMQVRMIAHAKIKTDTIDAGVLAQLYASGFLPEVWIPDEATQALRRQVTRRNQIVRQRTRLKNIIQSILHAHLIPSCPAADLCGAKGRAWLTKQVLPEDERLAVERHLREFDRLGEDLTVIERDLARSALADDTIARLMTIPGIDMIVALAVRAAIGDINRFAEPEKLVSYLGLNPSVRQSGPGPAHHGRITKQGRGHARGLLVEAAWAAARAPGPLRAFFLRVRAKRGQHVAAVATARKLASLIWHLWRRGENYAWSRPALQARKIRKLELKAGHQARRGQKGRACAYNNKGQREQERRFVEQAEAAYARFVAGWNPRGPKPATKPKTPARTGAANEERG

SEQ ID NO: 359463 - protein, 409 aa, unidentified
MNTTLYVGIDVSSKSNVVYLMLPNGDKHSNFSVANSHDGSTQLVKRILSALTSNSLDTVLIGLEATSVYGDNLVYFLREDATLAPFNRKIHVLNPRQVKQFHDAYNDLPKNDYVDSFVIADCLRFGRINKEVYLGDYHYKALQNLTRARFFAIQNLTKEKQRFINVLFKKYSTMTQEKVFSNTFSTTALAVYDEFESAEALANMDLQELTDFIIEKGKNRFPDPDAVAKAIQKAARSSYRLPKTVNDSVNQVLSISLASIKALDAQIKEFDKAIKAQMELLPNVLISVPGIGPVYSAGIMAEIGDINRFENQAKLAKYAGLAWKQYQSGGFESETTSLIPSGNRFLKYYLCEAALSLVRCDKEYSDFYHLKYKEVNRYQHKRALALTARKLVRLVFRLLKDNRLYRPAK

SEQ ID NO: 359464 - protein, 407 aa, unidentified
MRHYIGVDWADEEDAVWVVNDAGDTVLSRRVAHTVAARSEWARWLRERQAEGVELWAAIERPHGRIVDFLLDHGVVVYPINPKSLDRARDRFRVSGAKSDPFDARVLALFLRSDHLQLRPLRPNSEAAQELKGLTRDYRRQVHLQTRLLNQLTATLKEYYPRALELCEDLTAGWAQAFLARYPTPAAAATLTEADWGAFARAHRLGPTRTAALWETLQQPQLPLPAHVVRLKARLLQALLRELAPTLSGVAEYRQAIDDFFSTMPMAEIARSLPVGKSGTTVPAIWAELGDNLDRWDSFRHVQGYAGSVPETERSGQHLVVKFRFACNTSLRDALHQLAFLSLSHSVWARAYYDGYRARNHTHHQALRALGAKWLKIIFVMWKRDVPYSETHHLATMARQHLRQTAA

SEQ ID NO: 359465 - protein, 310 aa, unidentified
MDLVFVGIDVSKDRLDVHVRPSAEAFAVTRDGKGLEELTTRLQTRSPTLVAVEATGGFEIVVAAAVAGAGLSLAVVNPAQVRHFAQAVGKRAKTDPLDAEMIARFAEAVRPEPRPIADEATRLFAELVARRRQIIEMLVAERQREQRASSKGIRKSLARHIAMLEKELPQIDGDIGTLVRGSPVWRANEDLLVTVPGVKNIIARTLLAEIPELGRLGRREIASLAGLAPYTRQSGRWSGKSMIGGGRAAARAAIFMAALSASRCNPVLKIFYQRLLSAGKPKMVALIAVARKLLTILNAMLRDKQPWQTA

SEQ ID NO: 359466 - protein, 405 aa, unidentified
MFDTEDVGVFLGLDVGKSAHHGHGLTPAGKKVLDKQLPNSEPKLRAVFDKLKAKFGTVLVIVDQPASIGALPLTVARDTGCKVAYLPGLAMRRIADLYPGEAKTDAKDAAVIADAARTMPHTLRSLELTDEITAELTVLVGFDQDLAAEATRTSNRIRGLLTQFHPSLERVLGPRLDHQAVTWLLERYGSPAALRKAGRRRLVELIRPKAPRMAQRLIDDVFEALDEQTVVVPGTGTLDIVVPSLARSLAAVHEQRRALEAQINALLEAHPLSPVLTSMPGVGVRTAAVLLVTVGDGTSFPTAAHLASYAGLAPTTKSSGTSIHGEHAPRGGNRQLKRAMFLSAFACMNADPASRTYYDKQRNRGKTHTQALLRLARQRISVLFAMLRDGTFYESRTPADVELAA

SEQ ID NO: 359467 - protein, 342 aa, unidentified
MKLFIGLDVSLAKTAVCVVSEHGQIVKEAEAESEPTALARWLEELDGNVAAIGLEAGPLSQWLHRGLTEAGLDAVLMETRQVKGALKAMPIKTDRRDAEGIARLLHLGWFRPVHCKSVSAQETRAVLGARKAIQQNMIALEMSLRGLLRNFGLKVGAISRGRFEARIQELAEGNPMLETATVPMLRARATLRRELATLEKQVRQFAQDDPVCHRLMTMPGIGAVVALTLRAAVDDPARFRSSKRVGPWVGLTPSRSQSGERDVSGGITKAGDVNLRRALCQAATVMMNRGRSTWLRTWGAQLAQRRGSKIAMVALARRIAVILHRIWVDGTTFQSDAAPNPV

SEQ ID NO: 359468 - protein, 385 aa, unidentified
MQKLNDLSQSRIVLKQDSTLIAVIEMSQSSWLVAGIVPGVERQPLKKLAVDESALLKLLNRWREEAEKAGRRIERIAVAFETGRDGFWLARWLRARGIEAHVIHASSVAVSREHRRAKTDRLDTELLKRVFLGWLRGERDHCKMVAIPTIKDEDAKRPHRERESLVGEQTRIVNRMKAALIRLGIRGFNPKLKRAAGRLEDLRTPEGEPIPPNTLAELRRDMERRHLIGGQIRQIQDARLERIERAPSDRPHAMVRLLARVIGIGIETADMLVQEVLSRTLRDRRAVARYAGLTGAPDESGAKRREKGLARSGNERVRRGMIQLAWRFLMFQKDSALAQWFRARTENSRGARKTMIVALARKLLIALWRLVTTGEVPAGVVLRAA

SEQ ID NO: 359469 - protein, 314 aa, unidentified
MASINVGIDVGKSELAVAVLPSGESFTEVNDERAVMRLVQRLSALSCERIVLEASGGYETLVVGALAAAGLPVAVVNPRQVRDFARAIGQLAKTDPLDARVIALYAERVQPPIRQLPDQQTRALRALCVRREELIEMLVMERNRLRMASKATRHEIAGHVDYLLKRLKRMDRDLDQAVRNSPLWREKGKLLTSVPGVGPVSCAVLLGMMPELGDLNRGESGALLGAAPYNHDSGTLRGRRSIRGGRPRVRRVLFVATVAAVRCNPVLRAYYLRLRAAGKPVKVALVATMRKLITILNAILKTNTPWRPPCSAAP

SEQ ID NO: 359470 - protein, 352 aa, unidentified
MIIIGVDFHPEFQQIASVDTETGEFQERRLAHREEAETFYRALAGQKVRVGMEASGHARWLERLVAELQFELWIGDAAEIRTKRVRKQKTDRQDAQLILRLLLENRFPQIWVPSWENRDLRQLLWHRHRMVQARTRIMNQLQAVALNEGLRCKKRLWREHGRQQLEWFRLAPWASRRRRDLLELLDRLNPTIAELSQAIEQEVEKCPEAQRLRTHPGVGALTALAFVLIIGRTERFHCGKQVASYLGLVPLEESSGNRRRLGHITKQGSSMLRFLLVEAAQVTVRSVPEWRSQYLHLMMRRGRKTAKVAMARRLAVRLYWMWRKRWDYEQVKKFGSHAGQPGYRDGVQSNTE

SEQ ID NO: 359471 - protein, 342 aa, unidentified
MYYIGLDVHKKTISYCVKDVSGQVHREGQIGATRRELDGWMKTLPQPWTVAMEATIFTGWIYDHLLPHAQQVKVAHPLMLRAIAAAKKKNDRIDAGKIADCLRCDFLPECHMASTPIRDRRRRLRYRHLLVRQMVQMKNRISGLLMETGVSYNKQRLHKVGYFRDLLSSNEEVNESIRPLLRLSRDSIVRLQKTEYALVSSLQRDPLLAERIRHLRTVPGVGPITALTWALEMGEVSRFPSMREAISYCGLCGDEKSSADKVTRTPLSKQRNKHIQRVLVEAAKLAPRQDHDLALVYETAKQKGNSNRATLAVARKMVAYLLAVDRGQRDFVPAEAPRSAAA

SEQ ID NO: 359472 - protein, 359 aa, unidentified
MLNVTRVGVDLAKNLIQVCALDASGKVLANKSLPRDKFLAWCTEQLPSECLVAMEACSGSHHWARELNKRGFTAKIISASLVEPYRMEGKGGKNDANDAFAVSEAAARPKMRFVPVKSRHQQGLLCVHRIREGFKEERTGIINRIRGLMAEFGLVVSKSPGKLRESLQDLLEDAENGLDWLARLVIQELSTHWEAINQKIDWCDLRINAHIAEDTQAKAAMQLMGVGPITASAVVASVVDFKQFKNGAQFGAWLGLTPRQNSSGGKTKLGKITKRGDTYLRTLLIQGAKSAVMSAHKREDPISKWLFELKEKAGWQKAAVAMANKNARILWAVMTKGTAFDPRHMSLKPTGEISPAMAM

SEQ ID NO: 359473 - protein, 366 aa, unidentified
MKKISTAQILGNEIFKEQKLTIGVDLGDRWSFYCVLDEAGKIILEQKVPTTPEAIKQAFGKMPQSLIALETGTHSPWVSRLLTELGYKVIVAHAQKVQLITKSNRKDDRHDARTLARLVRIDPELLGPVRHRSAKAQIHLTVIRARAELVSARTALVNAARGLVKSFGERLPQCGTYQVSEKLAEGLSAELREVLVPLLREIESLSERIQEYDEWMEKIAQEVYPEVSLLKQVKGVGTQIALTYVLTIEDPYRFAKSREVGCFLGLKPGRRNSGESEPQKHISKEGDRYLRTMMVQGAHYILGPFGEDSDLRRWGRKLAERGGKNAKKRAVVAVARKLAVLLHRLWVSGEVYEPLRNSQKALRAVA

SEQ ID NO: 359474 - protein, 389 aa, unidentified
MTFYVGVDIAKYEHVASILDSGSGELRLDSFRFGNDLKGFESLLSHLSKLNREDVVIGFESTAHYHQALFSCLNGKGYECILINPLIISRFRKLSLRDAKNDSIDSRIIAQFLLFEHDHLKNEEFVMNDLKELCLQRDFLIQTSTSLKIKMVSYLDRVFPELENVIPKGTLHTKGLRAVLKEYPSAQMIAKTRIDHLVNLAKKASHNRYKEATVRRIRDAAKTSAGFHSDALALKIRQSIESLESIEKQIDEVEGVLCSLPSVQNSPLHKIKGINSIEVAYILSAIISIERFSSAKKLIAYAGLDPKVRQSGTWEAKSTRMSKRGNVLLRYALVWTANNVRKHSPSMKEYYEKKRSQGKGHYSALGHCAAKLCRYIFYILNHPEEDFIS

SEQ ID NO: 359475 - protein, 419 aa, unidentified
MARLKIVYPICCGMDVHRDFVIACIASTNTQGVTEYISKRFSTYSGGLRELSAWLQANNCTDVCMESTGKYWFPVHNILESTCHVVVTHPKFVKAIKGKKTDKKDAMWIADLFKHDLVRGSFIPPEDIRQLRDLCRYWVKLTQQTTGEKNRAQNCLTVSNFKLDSVFSNVFGKSASAIINHMLEHPGEKFDVTPFVHGRCKTPIADIQAAVDGAFSPFQAEKLKVIRTHMAYLADCKALLETQIYILALPYKRQVELLLTVPGISEPMTAIRILAEIGADMSVFESSKHLCSWAGLTPQNNESAGKKKTTRIGKAGQYIKPLLIQCAIAASNPRSKKYPEILSKSQQLRKRRGAKKARVAIARRLLTAIFQMLMKDEPYSPYIAPPAPSIPHKRILTTNQALSFMRSKGFIIEDLPSSA

SEQ ID NO: 359476 - protein, 351 aa, unidentified
MMIIGVDYHPSFQTIAFLMEETGECGEQELNHSDGQAEKFYRELKQRGICVRVGMEATGYSRWFERLLAELGFEVWIGDPAEIKTRRVKKKKTDREDARLLQKLLLENRFPRIWVPDPENRDLRQLLWHRHRLVQMRTRIMNQLQALAMNEGYRWKKKLFSEQGRAQLEKLSLAPWASRRRQELLELLDRMNPTIEELTAAVEREARKRPEVQRLMTHPGVGPLTALAFVLIIGTWERFPRGKQIGNYVGMIPSEDSSAGKQRLGHISKQGNSLLRFLLVEAAQAAARVHPDWRRRYVHLAMRRHKSIAKVAMGRRLAVRLYWMWRNGCEYSQSLEFGSYAGQLGIGHGAK

SEQ ID NO: 359477 - protein, 354 aa, unidentified
MKRTTKHVALDVHQATTVASVREESGRVIARSILPTEDGPISEFFRGMRGTIHVAFEEGTQAQWLHDLLEPLVHRVVVCDRRGESRRGNKGDQVDADELSELLRRGSLRAVYHGSVDRATLKELTRAYQNLVEDATRVMLRLKALFRARGIPAPGKRVYHPGERAAWLERLTNPGARCRAEALYAQLDPLRALHPRVKAAMMAEARRDPAWALLRTIPFYGPVRVAQLLATMQTPWRFRTKRNLWAYAGLAVVTHTSAEYLLVAGRPVRRRRAPLTRGLNQNYNRVLKNVFKGAATAATAQPGPFQEFYQGLLARGMREELARVTLTRKLAAVTLRLWKKGERFDPAKLTTQAR

SEQ ID NO: 359478 - protein, 415 aa, unidentified
MLWGGRRGRVTFGAVQRLPMELPMSHQDYHFDASRSLTALEQGSTIIAVIEMSQSKWLVAALVPGVERHPLKKFDAQEEGLLKLLHRWRNEAGQAGREIKRIVVAYEAGRDGFWLARWLRARDVEAYVIHPTSIAVSREHRRAKTDRLDTELLMRAFLGWLRGEKRHCSMVAIPTIEEEDARRPNRERQNLVTEQTRIVNQMKAIFVRFGIRAFRPTLRKVEGKLKDLRTAEGSPLPENTRAELCRHLARLRVVRDQIRAVEQERLRKLAAAPAVEKGSHVMVRLIARVLGVGIETADMLVNEVLSRRWRDHKAIARYAGLTGSPDESGKRRRERGLARAGSARVRCGMIQFAWRFVRFQKGSALAQWFAARTADRRASTRKTMIVALARKLLIALWRLATRGEVPPGIILRPAS

SEQ ID NO: 359479 - protein, 320 aa, unidentified
MSNIILGVDISKLTFDVALLNDNKVKTKKFSNTFKGFSELKQWLKNKGIDTVHACMEATGGYEAKLAQYLYDNNFKVSVVNPARIKGFSMSKLARVKTDKADSELIARFCQAIQPDLWQPTPKHIQELQQWVRRLDSLIANKNQENNRLDEASDVIAINIRTHIEFLDKQIKEVEELISNHIKEHKDLNDKSKLLDSIPGIGEKTIGVILAFLTVENFDSAKQVAAFVGLNPKPKQSGSSVRGTGRISKTGDADLRKAFYMPAVVSIRFNPIIKDFAKRLDSAGKSKMVIVIAAMRKLLHIIYGVLKNETPFNENILLKN

SEQ ID NO: 359480 - protein, 461 aa, unidentified
MTKKKPTGPQQGSARKKVDWKALDIVHPEAAGIDVGGSEHWVAVSPDRDSEPVRRFGCFTADLREMVRWLIEKGVHSVAMQSTGVYWMPVFEMLEQNGLEVYLVNARDTKNLPGRKSDVQECQWLLKLHTFGLLSNSFQPPNEIRIARSYWRQRGNLVAQAGSAVQRIQKALTEMNIQLGNVLSDLSGVSGMKIIGTILEGERDPWKLAALARPEIKATPEDLAKSLEGNWREELLFVLKQEVDLYRFYQGQIIDCDLQLRKHLESFGSSVDIRAQPLGPKPKGKKGSRNAPHFDLRSELYRITGIDWAQINGIDVLTAQTVIAEAGADLSAFPSEKQFTSWLGLCPTNEQSGGKILNRRTRKVVNRATVAFRNAAMTLLRSQSYLGAPYRRLRTRLGAPKAITAMARKLACLFYRLIKHGQQYVDKGTEYYEARYREQQIRALAKRAQKLGLQLVIPKTA

SEQ ID NO: 359481 - protein, 369 aa, unidentified
MKKIVKHIGLDVHKNSISIAIAEKGQKRDVNFYGVINNDMDQLHKFLRKQISQGVEPKCVYEAGPCGYNIYRSLRDKNIDCVVIALSLIPKKSGDRIKTDRRDAETLARLHRAEELTAVYVPAIEDEALRDLVRGREDSVNTLKRAKQQLGAFLLRHHICYSGKSKWSKTHFNWLADISMPHPAQQITLQEYIDMVQDGKKRVERISLQIIQLSGQSRLNTLNISLQSLRGVSQIVSAVVVSEIGDLTCFDSPSKFMAYLGLVPTQHNSGDKKRPGKITKTGNGHVRRALIEAAQAYRLPARKSRAIAKRNEGLPQEICKIAWQAQVRLCGRYKRLVLRNKNSNLVKTVIARELAGFMWAIAQAVPKTT

SEQ ID NO: 359482 - protein, 349 aa, unidentified
MDATTVAVDVAKNSFEVVIANRDWQIVDRHRFSRTRFLRFLETTPGTRVVMETCATAHYWGRLAQDHGHTVVLLPAAYVRPYVRRNKTDRTDAEALLEALRSGQLPTVPVKRVEQQAVVALHRVREQWKTTRIARINALRALLAEHGVVLPIKTAAALAAVPTVLTEAAVPMYLRYVLSLLHDEIRAIEAHLKAVEGQLRTLAARDPVIRRLRTIPGVGVLAPTALVGSVGHIHACRRGRQFASWLGLTPSEYSSGSRRHLGGISKRGDRYLRCLLTHGARAILATARRYHRDERPPTRLLQWAVAVQSRRGHNKATIAVANKLGRIIWAVWTRDTDFQSIPALTIAAA

SEQ ID NO: 359483 - protein, 351 aa, unidentified
MENITAVGIDLSKNVMHLHGINHTGRGILRKKVLRARFLEELVKLPAGTKLFMEACSGAHYWCNQIEKLGYQARQIDGRAVRRYVKSQKNDFRDAEAIAEASTREHINFVTTKSVEQLELQAIQRVRERLIKNRTALSNEIRGFLTELGIVLPKSISQLAHYLQRRAYLEDERVTATFSAIISELSEELNELNTRVSRIESSLNERAKAMPVVKRLQSVPGIGPITAISLVAAFGNAAQFKNGRHLAAACGLVTRQHSTGGKTSLGSITKRGNSHIRCLVIHGARNLARYATAKKKCDKQSLWIRKLHAAKGTNLTAVAVANKNVRIAFHILRNADTWFDADRAHDSDLIQ

SEQ ID NO: 359484 - protein, 310 aa, unidentified
MDHFVGIDVSLESCAVCVVTQSGTVAREAKIACEPEALIAFLRAMDVSITGIGLEAGPLSQWLHRHLCAAGLEAVLMETRQVKGALKAMPIKTDRRDALGIAQLIRMGWFRPVHCKSVSAQELRALLGARRTLQKSMISIELSMRGMLRGFGLKLGQITRRRLPERARELADGNEMLTAMVTAMLRGHAALRSELAKLENRLRRIARADRVCRLMMTVPGVGAVVALQVKAGIDDPARFRSSKMVGPHFGLTPRREQSGERDVVGAISAAGDQNVRTALFQAATVMLYHSQTKSLIQNSASVFSSLQDGG

SEQ ID NO: 359485 - protein, 430 aa, unidentified
MYYGNDTRLELFHQMRSEIRGSTEYLVVGLDIGKEKHNAFFGTATGRTLYKGMFFDNTREGFQKLSAQVEALKTQYRLPKVVFGMEPTANYHKPLAEHLIKCGHLVVLVSPASTVKNRELLDGRWDKHDTKDAANVADLVAQGKCLYYDYPEAAIRDIRGLLSFRKRLKKEEQALQVRIRNQLLAQYFPEMDRHSRTAVGLSVVQHCIDPSMIAGMEYDEFCRAVAPGKMNFKQQRILQQIWQVAPQSIGCRVGETALYEAQVMVLSLHHVRETIKVVEERIEGLCLPFPEYSCLLSIPGFGPEVSSTVLGAIGNPYRFTCGKQVLKMAGFDLSADRSGKTASNAVPVISKRGKAGLRYTLYQAAVIASNSNTYFMTYYTKKLQGRAQEKGIGTKMRVKLAAKLLIIAWTLMKKKEMFDPACLTRGDIQV

SEQ ID NO: 359486 - protein, 401 aa, unidentified
MRSIGMDVHRSFAQVAIFADGTVSDNFRVDLEHDAVVAFGRSLRPDDEVVLEATGNTAAIVRLMTPFVARVVIANPLQVKAIAHARVKTDKVDAAILAQLHAAGFLPEVWAADDATLALRRLVSERVAVVRSIRRAKSRVHAVLHANLIPAYEGKLFGKGGRSWLAKAPLPTSERALLVRHLDELDWLQTRLETLERDLIALSLDDARTRKLMSVAGISAVVATAVVASIGDIERFATPEKLASYFGLTPRVRQSGAGRAIHGRITKQGNATARTMLVEAAWSAASAPGPLRAFFLRVKGRKGQNVAATATARKIAVLIWHLLKKDEPYRWARPAFVGMKMRKLALRAGAPKQHGNKPGPGRDYWIKEIRHREMELVANAEASYARMVEAWKDKPPKPRPS

SEQ ID NO: 359487 - protein, 401 aa, unidentified
MRFFVGLDWASDAHAVCLIDERGTVRWQTSVPHSATGLDTLARRLRRWRQRGALAIALERPSGLLVDTLVHAGFDVVPIHPNVVKATRPRYSAAGGKSDPGDAFLLADLLRTDGHRFRPLQPPSDDTRALRTLVRGRDDLVAQRVALANQLRALLERVWPGAAQIFADIDSPIALAFLARYPTAHSAARLGPKRLAHFLVQHAYCGRRSACELLARLQVAPPARLGEGETEAAGDLVRCLVTVLTPLVAQIQQLGAAIAAALQHHPDAPVVQTLPRTGTVNAAQMLAELGDDRARFTSAEQLAAEAGVAPVTHASGKHRDVTFRWACNKRLRSALTTFADNSRHASAWAADVYRRARARGCDHPHAVRILARAWVRVLWRCWQAHTPYDVTRHRAAAAFAA

SEQ ID NO: 359488 - protein, 385 aa, unidentified
MKGRSMTANGMVRPCSCPASDKLARDRPDKEHAMPATAQSAIAVVGIDIGKNSFHIVGLDDRGAIVLRQKWSRSQVEARLANIPPCLIGMEACVGAHHLSRKLNALGHDARLMPARYVRPYSKGQKNDFRDAEAIAEAVQRPTMKFVATKTADQLDLQALHRVRERLVSQRTGIINQIRAFLLERGIAVRQGQRFLRAEMPRILATPTDVLSPRMVRMIEDLASDWRRLDERIEGLSGEIKAIAHQDAGCERLMSVPGIGPIISSAMVAAIGAGDAFTKGRDFAAWLGLVPKQMSTGDRTILGKISKRGNRYLRVLFVQAAWVVLVKVKPSRWEGHGLQPWIEAAKKRLHHNVLAIALANKLARIAWSVLAHGRAFETNKLQAAA

SEQ ID NO: 359489 - protein, 321 aa, unidentified
MEHELHYIGIDTAKEKLDVDVLRPDGRHRTKKFANTTKGHDELVSWLKGHKIDHAHICIEATGTYMEPVAECLYDAGYIVSVINPALGKAFAQSEGLRNKTDTVDARMLAEFCRQKRPAAWEAPHPLERALRALVVRHQALTDMHTQELNRTETAREVQRPSIDAHLLWLEAELKRLEKQIKDLTDDDPDMKHRRKLLESIPGIGEKTSAVLLAYIGLKDRFAHARQFAAFAGLTPRRYESGSSVRGASRMSKAGHVSLRRALYMPAMVATSKTEWGRAFRDRLAANGKKGKVDSRRDDAQAGTGGVWSAEVRRAVRCVTA

SEQ ID NO: 359490 - protein, 318 aa, unidentified
MTNITYHFNIGVDVAKQKIDVSFNDQRVASFENNLAGFKLLLKEIKDKSQTRVVMEATGGYEKPLAHFLQGQGVAVSIVNAKRVRDYAKALGRLAKNDVIDAKVIRLFADAVNPKLLPTASDTQQALDAQVHRREQLVKQRAMEKQHLETVGNKDAVRSIKRTIAFLDKEIERIEKALKALINADSTLTGKVDRLSGVKGIGDITALTLIADLPELGQLTNKEISALVGVAPFCRDSGTLKGKRTTWGGRAQVRSILYMAALSAVQYNHPIKAFYNRLLKNGKTKKVALVACMRKLLTVANSMLRNNTEWNPNHGKLA

SEQ ID NO: 359491 - protein, 339 aa, unidentified
MKKYVLFIGIDISKKWIDVALTPDGQKDQMHHQRFSNKLKGFKKMMRWIMKFIRQQNLAPCFLFCMEHTGVYTFPLCYFLQEQGFDYVLDSALRIKRSLGIKRGKDDKADSMDIARYIYFHHKELKASVLPAKVLMDLKNLLAYRNRLVKKCQAIKVAASETKAFMPDDSIMNWIMEDSEEIINLLKSKIKKVESRINELVSQDREIKRIFDLATSVKGIGPINALQMIIHTNCFKAFDTARQFACYIGIAPFHKKSGTSLNIEAKVSPLGHKKLKALLTNGVMSAIQNDKELKAYYERKVAQGKIKYKVLNAVKNKLVSRVFATVKRGTPYVELSNYI

SEQ ID NO: 359492 - protein, 357 aa, unidentified
MKFIAFDSHKRYTFASIEDEAGVIVEEKRINHEAGALEGYLSRWDKGSPVAVETIGNWYWIVDEIERAGMRPQLVQAGKAKLMRGQTNKTDKLDARGLNRLQRNGTLPTVWIPEGALRDKRDLPRTRMVLVSHRTQLKNRILATFGKYGINLNEMSDPYGVKGQDLMREQLTKLPENTRYATKLMLEELDMVQSQVERIDSRIEMVFESTPELEWIMSLPGVGKVLGVVILSEVGSIERFPRAGQLASYAGTTPRVHSSGGRVWMGSLRHDVNRYLKWAYVEAANVVSIHRGHWPQRSVVQLYNRVKAKKGHGTAIGAVARHLAESTFWVLKKKEMYKEPQQRAVLSRANQRVGILN

SEQ ID NO: 359493 - protein, 343 aa, unidentified
MEHYAGIDVSLELSSVCVVDATGRIVREAKVASEPEALIAWLRGLGLELARVGLEAGPLSQWLYAAMRDAGLPVELLETRHVRDAFKAMPVKTDRKDARGIAQLMRLGWFRPVHCKSASAQETRALLTARKLLQTKLHDVEMSLRGLLRGFGLKVGPTTSRSFAARIRELVEGHAILTAVADALLAARETLGAQLRGLEKRLRDQARHEKRARLLMSVPGVGVIVALTFAAAVDDPSRFRSSKTVGAHFGLTPKRYQSGETDMTGRISKIGDAGVRTALYEAAHVILTRPVKGSALKSWAARLAQRTGLRKAKVALARKLAVVMHRMLVDGTSFAAERAAVAA

SEQ ID NO: 359494 - protein, 370 aa, unidentified
MLDTTTFVGLDVHARSIKAVSLDVMTGEVRAATFGYDAGAVAEWVRSVDPKARCVYESGVTGFDLQKRLSGLGVDCVVGAVSKMIKPSADRRRKNDRNDAEFLARMLSVGNVVEVWVPDDECEAARDLTRALEDARDDLSRSKQRLSKFLLRHGLVFDERTPTGRRKGNWTRAHWSWIESIRFAEGADEEVLAYYVDAVRRAAEEKARLEGLVEAEARKPRWRRRVDSLRCLKGVDTATAADLVFEAGEFSRFGNARSFAAWVGLTPSEHSSGESDRRGAITKAGNKHLRKTLVEAAWHYLTCSGRPKDLAKGQAPDRGARRHAAKGVRRLVERRGALLARGVHGNKANVATARELACWVWAVGLMAEEA

SEQ ID NO: 359495 - protein, 458 aa, unidentified
MTRKKMELDIINPDAAGIDVGSRSHYVAVGQSLEDVKEFGVYAEDLTALCEWLLSYGITSVAMESTGDYWQNLYAELMKHGIEVVLCNGKFTKHAKGKKTDVKDCRHIQKLHALGLLTSSFLPDETTEKLRTYCRQRSNLLSSAAGASRKMQKYLKFLNFRLDVVVKDVCGLTGLAIIEDICNGNLDPELLSNHRHYNCRKSKGEIAKALHGNNREDFLFGLKQEYQAYRFFQKQIDACDKQIDKFIKEELRKSPEKNKLKTTDKPHKRQNKNAISIKNFNQVAYQYFGGVDLMAIEGLSHATVLSIMSEIGPDGFIKFGTSKQFVSWARLAPNNKISGGKVLSSKIPKGSNRLKIALRQAANAIGNLKDTHLSDFFKRVAFRKGRQAAVSATARKLGVIIWTMVTKQVPYNPPEQYLFLDQKRKMGIAKRIKKQMAKFDIKPEEIGIGNSLNPNFNF

SEQ ID NO: 359496 - protein, 321 aa, unidentified
MSLFHLGIDVAKAKLDCALRLPNGKFRSKVIANSGNGFTQLIDWLASHQATPVHVCMEATGIYWEEVAQFLATAGFTVSVVNPAQIKAYGASRLTRSKTDAVDARLIADFCAERQPAPWQAPSAEEIALRALVLRLEALQTMRIQESNRLDVSRDAVHEDIQQHLDWLDNAIKQLIKTINEHINNHPDLKQKRDLLDTIPGIGERTSAIMLAFYADTDRFDNGRQAAAFAGLDPRQYESGSSVKGKPRLSKVGHAFLRKSLYMPAMVTLYKTAWGKRFKDRLTCAGKPPKLIIGAMMRKLVHVAFGVLKSGKSFDPVLHGA

SEQ ID NO: 359497 - protein, 484 aa, unidentified
MHPRTTNKSTQTSDVRRFSFESAGALALDNEYSGFAVLPAHYIAFAERKHARPWTSIYHFGRYDVKPLATQPFTAYVGIDWADTQHDICLQAPGNESREFDCIAHQMVDIDQWAQSLHQRFGGQIAIALELAKGPIVYALQKYDFFVLFPINPLTLAKYREAFTPSRAKDDPTDAELALDLLMRHPERFTPLQPQSVKMRTLLSLTEHRRELVGDKTRFTNRLTNTLKQYYPHVLDWFEQHDTLLFCDFLTRWPTLAQVKRARRASLEAFFYAHNGRRPNVISARLEAIKAAIPLTEDAGVIVPCRLHALVLVEQLRTTLQAIDRFDREIAELAPTLPDYGLYQNLPGAGPHLTPRLLVAFGEDRQRYQHADELQQYAGIAPVTERSGKKSWVHWRWQCPTFMRQTFVEWAGQTINKSFWAGAYYRQQRAKGSSYQAAVRSLAFKWIRILYRCWQTRTPYDESKYLNALRKRGSPLLKHLELNV

SEQ ID NO: 359498 - protein, 428 aa, unidentified
MTQQSCITERPVLVAIDVAKAYNHVVVELKDGKKKQFKVANKIGDYDELGTYLKSLRSECVIGLEATGDYHRPLAHYLLREGFTVKLLSSLALARTREARYNSWDKNDPKDAQVMLHMLKTGLTLTYCDPLIHNFNDIQEISKTYYQVSLRKTRVQHNIMTHFLPLYFPEAEKYMGSTRAEWFSDFLFAFPVPASIIRYGKEEFIEKAWSLAGKKVNKRIWLTDVYHTALESIGLPVSESSESVAMFRIVLKEHGDLCRRRREIESYANRYLKDHPDYRILQTIPGIGPICALTILAEAGNIRRFSHHRQFLKYCGMDLSTQQSGRFKGISRISKHGSKRLRQAFWLAAIVAIRLRENTFRTKYERYIAPDPKDKDLQRKAYTAIAAKMARVAHSLIKSGQDYRSFYEEALPGRRIPARRAVEAIMTS

SEQ ID NO: 359499 - protein, 349 aa, unidentified
MRYFAGLDVSLEETAICVVDETGGIVQELRAASEPQALIAALSELGLDVERIGLEACSLTAWLHDALRAAGLPAICIETRQANAAMKTMPNKTDRNDARALAQIMRMGWYRQVHVKSRQCRQWRSLLVARRAVLNEMRSIENVVRAVLREGGIKLGTPGRKSLAARVRALAGGDADMMRLVEPLLAILATMLVQLQRLTRQVVDIVRREEVCRRLMSAPGVGPITALAFRATIDRPDRFRRSRDVGAHLGLTPARYQSGETDIQGRVSRCGDELARTALYEAAHSLLVRSRKWSSLRAWGMSIAKRRGMARARVAVARKLAVVLHRMWSDEAEFRFGKEPGADAGRVAA

SEQ ID NO: 359500 - protein, 338 aa, unidentified
MKVYVGMDLHATNTYVGMVDEENEVLHKQRFRNELPLILAGLDPFRKDIQGVVVESTFNWYWLVDGLMAEGYRVHLANVSAIKQYEGLKQIDDTRSAFWLANLLRLGILPTGYIYPKEERPTRDLLRKRLHLVRHRTSHILSVKNILARNLGLRMKSEDVKKLEDPEVKRFFPDKETQTAVLASVGLIRHLEVEISGIERMITKKLKIRKEFAKLMTIPGIGKILTLTIMLEVGDIRRFPTVGDYSSYCRCVKSIRTSAGKIIGYGNRKNGNKYLSWAYIEAAQAARRFHETVRNYYEKKMAKTNRIVAIKALSHKLTRASYYVMRDQVDYDPARLFR

SEQ ID NO: 359501 - protein, 353 aa, unidentified
MEVTTIGIDLAKSVFALSGADSRGRVVIRRQLRRAQVLGFMRGLPRCVVGMEATGGAQYWARQFTALGHEVRLMSPALVMPYRKGNKTDRNDADAILEAVSRPSMRFVMVKSVAQQELLALHKVRAQLVKSRTALCNQLRGLLRERGVAVRVGVAALKRSLPAALTDESSELSGEMRELLSEMSQWLRTLEQRIASCEARITRKFKHDERCVRLAEVPGVGPLTATALVAAVGNAQRFKNGRELSAYLGLVPRQHSSGGKTVLLGITKRGDRYLRTLLIHGARSALRQCKLEGDARSRWMARISAARGPNVAAVAMANKNARILWARLSRGDRYRPSRVLTRAVLRPGSPTPG

SEQ ID NO: 359502 - protein, 431 aa, unidentified
MNYNQNHKISQITSETLIVGVDIAKHNHVARAQDFRGLELGKTCFFENTKAGFHSFLDWITQLVKGCKLNQVIVGMEPTGHYWLNLAHLLKENNIKFVSVNPLHVKRSKELDDNSPTKNDMKDAKVIAQLVKDGRYAEPTIPQGIYAELRVAKKLRDLLNVDLQVVQGQVHNWLDRYFPEFLTVFKSWEGKAAIHFLKLEALPHELVKYTEEELLLSLRQVVKRSIGLKKIRALKEAANRSIGIRQGAAMAKLELRALLEKYDFIQMKFEELDHQLDQLLDHIPGVTQMLEVSGIGRDTVAGFFAEVGDLRDYQHPRQIVKLAGLSLKENTSGKHKGQTKITKRGRKKLRALLFRAAMILVAKNKAFKALHIYYTTRSHNPLKKMQSLIALCNKLIRILFSIGKKQFTFQEDKMLKDIPHMATFVAHQTVA

SEQ ID NO: 359503 - protein, 376 aa, unidentified
MERGSLMLNTTTFVGLDVHARSIKAVALDAMTGEVRSATFGYDAAEVAGWVSSVDPSAKCVYESGVTGFDLQKRLSSMGIDCVVGAVSKMIKPPADRKRKNDRNDAEFLARMLSVGNVVEVWVPDDGCEAARDLSRALDDAREDLKRCKQRLSKFLLRHGYVFSETTPTGRRKGNWTAAHWAWIKSISFPEKADNDVLAYYVDAVRQATEDKARLERLVEAEASKPRWKRRIDSIRCLKGIDVTSAADLVFEAGEFSRFKSARSFAAWLGLTPSEHSSGESVRQGGITKAGNKHLRRVLVESAWHYLGCSPHSKDLAKGQVPDPAARRHAAKGVRRLVERRRAMLERGVHKNKANVATARELACWCWAVGRMIENG

SEQ ID NO: 359504 - protein, 324 aa, unidentified
MEKIIRIGMDTSKHVFQLHGVTAAEEPLLRKALRRKEMIAFFTALPPTEVAIEACGASHHWARLLGSLGHEVKLIPPQYSKPYVKRGKNDAADAEALCEAMSRPTMRFVPVKSAEQQAGLMLMKLRDRLIRNRTQLANAIRGHAAEFGLTAAKGMAHIVPLLERIATDETLPLLARELFALQQGELARLEVEIATLDARLKAWHHADECSRRLVEIPTVGPIIAALLTMKTPAPELFRSGRDFAAWIGLTPRDHSTAGKARLGVITRAGDEALRSALVVGATALLQHVRAGRSPHASPWLLDLLRLCAASPANCGRARWLGGLS

SEQ ID NO: 359505 - protein, 370 aa, unidentified
MTFIGVDLHTNRFTCCYRNGKLPTDGKDGKRIETFDLSPYGMVQFYKTLTKHTYVLLEATITTFCFVRLIQSRVKEVIVANTYELKQISLGRNKTDKIDADKLCRILKMQVISGEKTISPVTVPPEHIQELRGLFTTYRLLKKQSTQYKNRIHSLLKEKLHGFTQEQIFGKSSREMIRAMEKGSVLSFQLNHLFDLLENLEAGIAILEDKIKEQAEPYMREIKILTSMKGVSVFIAIAIIADIVSVDRFKDSKSFTSYLRSAPRVESSNTTKGNKGTNKMGRKLSATLLTQILNHVLDGSQKLDNWYTKLTQYKKAGSVRTALRRRVFAEIYQMLKKGEYHYCRDAKKHEEKLLHYEKFLEKRKNLLKSA

SEQ ID NO: 359506 - protein, 402 aa, unidentified
MNAVGIDVSKGKSMVAIMRPFGEIVSAPFEIKHTASGINSLVELINSVEGESRIVMEHTGRYYEVLAHQLSKANLFVSAINPKLIKDFDNDSLRKVKSDKADAVKIARYALDKWQNLKQYNVMDELRNQLKTMNRQFGFYMKHKTAMKNNLIGILDQTYPGVNTYFDSPARSDGSQKWVDFASTYWHVDCVRKMSLNAFIDHYQNWCKRKKYNFSQSKAEEIYGKAKELVPVLPKDAITKLIIKQAVDQLNSASTTVESLRTLMNETASKLPEYPVVMAMKGVGTSLGPQLMAEIGDVSRFTHKSAITAFAGVDPGVNESGTYEQKSVPTSKRGSADLRKTLFQVMDVLIKTHPQDDPVYQFLDKKRAQGKPYYVYMTAGANKFLRIYYGRVKEYLASLPES

SEQ ID NO: 359507 - protein, 337 aa, unidentified
MKLYGAIDLHSNNNVVVVMDEQDKVALEKRLPNDLSRVLMELAPYRESMEAIAVESTFNWYWLIDGLMEAGYKVKLVNTVAVKVYDGLKYTGDEHDARHLAHLLRLGILPTGYIYPKEERAVRDLLRKRAQLVRCRTAQILSIQNLVSRNRGKGISKDEIRGLDEEGIARVCAGNEARALAIRSNLAILRCLDEQVRGLERAAQAKLKPEFKKLLTVNGIGNILAMTIMYEAGTMERFAKVGEFASYARCVSSSRWSNNKKKGEGNRKNGNKYLAWAFVEAANFAVRFDEQIRRFHQRKKAKRNGIVAIKAVAHKLARACYHVLKDQQSFDVTRAFA

SEQ ID NO: 359508 - protein, 340 aa, unidentified
MEKASMIGLDIAKNVFEVHGRSAAGQVVLRKSLKRGQVEQFFATLEPTSIGMEACGSAHHWARLLGKHGHAVRLMPPAYVKPHVKRNKTDAIDAAACCKAMADEDMRFVPVKTVEQQGALSLHRSRDLLVSQRTQLGNALRALLSEFGIVAGKGKAGLARLVDELRAGTLDLPADALASAMALADQHAALEAAADALERRITAQAKADTKARMLKTAPGVGPLSAHATLATMPDPSLFKSGRDFAAWLGLTPRLHGTGGKTRTGRITKQGNQPLRRLLVLGATAWVSYAKAHPEKASPWLRGMLARRPSKVVAVAQAARTARILWAMLSHNQPYRAPAVG

SEQ ID NO: 359509 - protein, 375 aa, unidentified
MDQHSRAFVGIDTSKLRNAVAVAEDGRGGDVRYLGEIDTTEAATRKLVAKLAAKYRQLTFCYEAGPTGYGLYRLIRKLGHDCIVAAPSLIPKKPGDRVKTNRRDAVGLAKLSRAAELTAVWVPDERHEAMRDLSRAREAARKDLKGKRQQVSSFMLRLGRHYPGKKTWGPAHMNWLMLQKLEHREQRIALEELLGAVRQESERVERLEQAIRDAVPEWSLAEVVTALQAMRGIDLIAAVTVLAEIGDLSRFQNPRELMGYLGLVPSESSTGDTVNRGGITKAGNGRARRILVEAAWSYRHPPRVSREKQIKVAAAPRAVREIAWKAQMRLCGRFRSLTRKGKRPTVVATAIARELSAFIWAINREVVESHATANQ

SEQ ID NO: 359510 - protein, 419 aa, unidentified
MLNLGVCRPTHKPAVDQRLRAAPYKKHAAACRRPSPAGRHKILDQRPAHPLAVDVKQTTKSSPLFTNLRSCVVKKIATIGLDRAKNVFQVHAADADGSTVFNRKIKRADLLEFFAKLPPCLVGLEACSTAHHWARRIAEFGHEVRLIHPAYVKPFVKRGKSDFNDAEAINEALTRKTMRFVPVKSAEQQASAMIFRARTLAIRQRTQAINALRSHLAELGVATAQGTTGLKALIAIANDEHDGRIPASARFALQQILKQIEFLGEYIARLDREILARTKNDADIKRLMTIPGVGPIIAVAITALAPDLSGFKSARHFAAWIGLTPKSHSSGESQALGNISRMGNSHLRTLLVTGAMSVIRSAKTAERVSPWLAKLRKRRPFKVATVALANKTARIVWALLIRGGNYIKPGGTVDVGTMA

SEQ ID NO: 359511 - protein, 344 aa, unidentified
MDNHTQYSGFAGVDLAKKIIQIHFVTEDGEITDRQVKRAEFLDFFRNRSKCLIGMEACGASQDWARKLEAMGHEVHLMSPKAVKPFVSGQKNDHNDAIGIYKAMFNGVRRVPVKSTEIRDLQTLRRIRSQVAKDRIKEINHVRGLLAEYGIVMGRSVAAFNKGISSALVNLKERGGVSPLVAEELRTTVESIKTKTERQKRLDREIEQLARGCKNYENFLKTPGVGPFTAAMLCVLLCDPDIFANGRQFAAYIGLAPRSRGSGGKNVVIGIPSKFNCDSESRAVFVECAQALTRYKNKSPWIEGILRRKPKKVAVIAIANKLARQVWAMANKGESFKQMTILTA

SEQ ID NO: 359512 - protein, 339 aa, unidentified
MQLYSGFDLHSNNCYLGIIDATGKRIFKRKLGNDPVLILQTLQPFQQDLMGLVVESTYNWYWLVDLLMVEGYRVHLANPAAIQTYKGLKHVDDIHDAFWLAEMLRLNILPEGYIYPKETRPIRDLLRKRGHLVRLRTSLIISLQNIVDRNCGVRLKAHEIKRFRDDCIGPLLSDSEDLALAGAVSKDSIDFLTRQIQQVERAVESRIDLEGPYRYLLTLPGVGKILALTIMLETGAIERFAKVGNYASYCRKVSSRWKSNGKTKGRGNEKNGNKYLAWAFSEAAELARRFDQQARAFYNRKLQKSQVMVAHGALAHKLARASYYVMRDQVPFRPEKLFG

SEQ ID NO: 359513 - protein, 447 aa, unidentified
MNNLKNHANSFAAYIGLDWADKKHYWSMQTGDGKRSRGELKHTPEAIDAWAAELSQRFGGRPVAIALEQARGALFATLSKYAHLHLFIVDPSRLNHYRKSVSPSGAKSDLVDGDLILDFQLKHPELLRCQEPDTVETRSLQFLTEQRRALVNQHTCQVQVLTHWLKQVFPQMIAWFDDLSTPLVADLLQRWPELAKLKKARPETLLQFFHDHNCRSAERNQQRLEEIRTAVIATHDAALLKTANLVIQTSVQMLATLRASIEQFEGQIQAVYATHPDRFLIESFPGAGPALEPRLIAALGTNRSRFKSAADMACCFGIAPVTESSGNSRWVHWRWACSKFVRQTFHEWAACTVRKQGWARDHYERQRAKGKGHHAAVRSVAYKWIRILYRCWRDRVPYSEQRYLEALRAHGVGKGKATASAVEPSINLPAVQWKNCGGFSKPTQFSS

SEQ ID NO: 359514 - protein, 427 aa, unidentified
MSQGTADWSERAAFVGFDWAGDHHDVVVVDGRGMIVEEFRFEDTAEGWQLFHKKLNPHPNPAVAIETSIGATVERLLAAGYAVYPINPKAAKRYRERKAPSGTKTDRIDAWSLADALRLDGHTWRALKPDDPLTVELRLLCRDEIGLIRQRTALVCQLRAALGEYYPVALQAFDDWTSPSSWAFVEAFPTPQALHQARKRRWEKFLHVHKLYRPETYEKRLALFAQARAFCGSEPAVQAKSLLALALTAQLRALQSHLDKYRARIHELFTQHPDHELFGSLPGAGEKLAPRLLAELGDDRERFDSPQALQCHAGTAPVSYQSGQINKARFRIACQKLLRHTVHLWANLSREKCPWAEAYYRTKRAEGQSHACALRCLGQRWLKILWKMWQTRTSYDAELHQRNQLKHGSWVLNLMTPKTTALAAGEA

SEQ ID NO: 359515 - protein, 369 aa, unidentified
MNTTTFVGLDVHARSIKAVALDAMTGEVRSATFAYDAAAVAEWVGSLDPAAKCVYESGVTGFDLQKRLAALGVDCVVGAVSKMIKPSADRKRKNDRNDAEFLARMLSVGNVVEVWVPDDGCEAARDLVRALDDAREDLKRRKQRLSKFLMRHGYAFSETTPTGRRKGNWTAAHWAWIKSISFPEKADDDVLAYYVDAVRQAMEDKKRLEKLVEAEASKPRWKKRVDSLRCLKGVDAMTAADIVFEAGEFSRFKNARSLAAWLGLTPSEHSSGESVRQGGITKAGNKHLRRVLVEAAWHYISASPHPKDLAKGQAPDPAARRHAAKGIRRLVKRREEMLGRGVHKNKANVATARELACWCWAIGCMVENG

SEQ ID NO: 359516 - protein, 481 aa, unidentified
MPFLPTAAQALRERFMGLDLAKRETQLSVLNVAGEEIAVKRFLTRREQFQQLADELKANDTVALEVTTNAFAVVRLLQRSGARIILSNPIKTRVIAEAKIKTDKIDARVLAELARVNYLPSVWLPDDDTEALRHFCSDRRSLVDRRTELKNTIHAVLHRNLIPVSHSDLFGTGGQKWLQTVLADQNDETAVQLSLDPIDRLRVRALLLELERLEHSLKEIEGCIAAFIAARPPLRVQLDHLLSIPGVSLVVGAGLLAAIGNVQRFHSPKRLASYFGLVPATYQSGDPRRKHGPITKRGRAQARWLAVEAAEHLRKAPGPMRALYTRINRKRGHNVAVTAVARKLTELVWYLLMRDSDYLYQLPRLADEKRARVRLLARRRVGLRTPSAARKIGGRTALYGSGIAGRSFKTKIVRHAAKQAEDLYAAIVANSPRAQVAGSADPPVAFDPTRPRSIDWESLLRQAATDLLENQSLREEKQSLK

SEQ ID NO: 359517 - protein, 421 aa, unidentified
MEPEKIDYAAWIGLDWGSYKNALCLQSADSGPVERCTVEQKPEALHSWFMNLLARFDGRKVAIAIEQTRGAVIHFLLGFDSVHVFRIHPKSLKNYRDALHPSGAKDDPTDAELLLQFLRLHQDRIKPWIPDEPPIRLLLRLVEFRRKIVGKRVRLTNELTQLLKEYFPAALDCAGDLDKAMACDFLSKWPTLEKLQKSRPDTIRKFYQEHGSRRRDVIEERLKQIRSALPLTTDAPVIEPSVFMVQSIAPQLHSVIEAIAQFDQRIKEVFQKLPDAPIFSSFPGAGPALAPRLLAAMGTDRSRFSSSLEVAEYSGIAPVTERSGKSKWVHRRFACSRFVKQSFHEFAAESILYCGWARGYYDQKKTEGKHHHAAVRALAYRWIRIIYRCWKDRIPYDEDKYVKALRQRKPAWLESLPISES

SEQ ID NO: 359518 - protein, 391 aa, unidentified
MESAQMLQPVFVPREFEVFAGLDVDKTRIAVTFTDHNRLLKSLQMPYSSQHLLNYTRKHFADRRVAFVYEAGPTGFGLHDDLLAAGHRCLVVAPSMVPRAPGQRVKTNRIDSRKLSEGLRGGQLNSIHVPSLAYRHLRHLVQLRDSHVRQMMAAKYRIKALLLYEGIPFPEAPASNQWSARVLQELGTLPCTSTVGFKLNSLVASLYFHKLEAAATQKQIRRFCQQDPELSRSIRYLTTIPGIGWIVASHLVARLGDWRLIRNVRQIASFLGLVSGEHSTGDQVQRGSITRTGDVRLRNKLVETAWTAVRKDPELEQFYRRIYQRHPRPIAARKAIVAVARKLTTRIYSVLKQQRPFRLKTVIAQAPLTPEETACPRGRLDQPQNEGTHGS

SEQ ID NO: 359519 - protein, 408 aa, unidentified
MTVVGIDVSKGKSMVAAMKPGGELVAAPYEVRHSDIELSHLALDVLCMEPDTRVVMEATGRYHEPVAALLHSEGIFVSILNPLLIKQSGAGSLRKVKSDPKDALKIAKYGLDNWSTLREYTPMEAIRQQLKLCARQCDLHNKNIVMLTNNLISLSDKTFPRVNELFSSPEKADGHLKWVDFYRSFWHCDCINRMSPDAFEERYKKWCKRKGYHFSTDAADALYAASCGSYTTLPRDNNAKLLVTVAADQLIALRENQSKLEAEMLNLCKQLPEYETVMAMYGVGKSTGPHLMAELGDVRRFPHRSSIVAFAGVDPGVVGSGKMQLSSVTTSKRGSPQLRKALFQVVSTYVKCKPENEAVYQFYAKKRDEGKPFFVCTTAAANKFLRIYYARVKECLNAAESATQVEEG

SEQ ID NO: 359520 - protein, 422 aa, unidentified
MAWDVIFVGIDWGARVHAVCVLGPHGERLLEQEVRHDGAAIRKFVDRAIELVDGEASRIFAGMEAPRGTMVEALLDRGAQVFSISPRQLDRFRDRYSPAGAKDDALDAYVIADTLISEHDRKLYRRIQLPQPELIRLRQLSRTHDSLTVQAQALGSQVGEQLNRYYPQLLRLSDDWHQTAWLWALFDAAPTPQRAASLHVAVIKKLLKEHRIRRYKPDEILEKLREEPLHVAPGVADSAAEHIATLLPILRVVHQQRTACSKQIDLLLNQSSHSGDESPEGLHRDAALLLSLPGIGIHNGAAMLAEASTALQDRDYQSLRKLCGAAPVSKRTGGRAKRPQVNQRRACNPRLREATYHWARVATQHDPRTREHYATLRSKGHSHGRALRGVADRLLKLMVSMLASGQPYDPARRPARLASIAA

SEQ ID NO: 359521 - protein, 412 aa, unidentified
MEVIVERPAALDVHKAQVTACVRVPGQGGRRRSEVREFSTMVGGLLVLRDWLKAHGVTQVAMEATGVYWKPVWAVLEDDFELLLVNARHVKQVPGRKTDVSDAAWLCQLLEAGLLRPSFVPPKPIRAVRQLTRYRKAQIKERQREAQRLHKALEDTGIKLDCVATDILGKSGRAMLDALCRGTTDPEVLADLAHGKLRRKIPQLKQALEGRFEPLHALLVSSILAHLDFLDEQIERLSEAIEEQLRPCAAAVELLRSLDGIETRTAQNVLAEIGVDMSVFPTAGHLASWAGQCPGNDQSAGKRKSGKTRKGSKWLNDALKDAAMAAIRTNDSYLQAQYQRLRPRIGHGRAIGAVKHSIICACWHMLTTGELYRDLGGDYYRRQNPERQTRRLVAQLERLGHKVNLEQMPQAA

SEQ ID NO: 359522 - protein, 436 aa, unidentified
MRGCRCSMIMGFTKPIEHFNLQRKKVITMNTLYVGIDVSSKSNVVYLMLPNGDKHSNFSIANSHEGSTQLVKRILSALTSHSLDTVLIGLEATSVYGDNLVYFLREDATLASFNRKIHVLNPKQVKKFHDAYNDLPKNDYVDSFVIADCLRFGRINKEVYLGDYRYKALQNLTRARFFAVQNLVKEKQRFMNVLFKKYSTMTQEKVFSDTFSTTALAVYDEFESAEALANMDLQELTDFIMEKGKNRFPDPDAVAKAIQKAARSSYRLPKTVNDSVNQVLSISITSMKALESQIKELDKAIAVQMELLPNVLISIPGIGPVYSAGIMAEIGDINRFDSQAALAKYAGLAWKQHQSGGFEAEVTRLIPSGNRFLKYYLCEAAFSLVRCDKEYSDFYHLKYKEVNRCQHKRALALTARKFVRLVFRLLKDNRLYCQAK

SEQ ID NO: 359523 - protein, 410 aa, unidentified
MKKHNYRTKKVNEINWPELGQQLGGEAVTFAVDVAKAQQYALLTNDTQSLSIIVKWELLETKGLIHELKQLNCPVTVVMESTGTYGDAMRHQFRQAGFILYQASAKRVHDAKEIFDGVPSLHDAKAACLIAKLHKEGLTKPWQELDEAGRELNAVRREYDMHQSQYERNQNRLEAYLSRHWPEVLGLFDLDSVTLEKLLITYGSPQAIAADAEQAAKDMKAWGGHFLSAEKIACAIDSAVGTIGQPCIDAERRYLQALATEMQHSRCQRQAAKKLLEASVEADAGLKEMAALIGKLTTAILIGLHLDPRNFSSAHSFLKALGLNLTEKSSGQYHGQLKLSKRGSATARKYLYLAALRLIQKDPVIGEWYRAKADPKVKMKTVIACLRKLAKALWHVARGERFDARKLVTI

SEQ ID NO: 359524 - protein, 346 aa, unidentified
MEHYAGIDVSLELSSVCVVDAQGKIVKEAKVASDPEDLIAFFASLGFAMTRIGLEAGPLSQWLQSSLKRAGLEVVLLETRHVKAAFSAMTVKTDRKDARGLAQLIRMGWFRPVHAKSMGSQEVRALLVARKQLLGRLIDVELSIRGILRGFGLKIGVVTRKGFEARVRELVTGQATLEHITRTMLSARSVLRVEYEKLHKSVLAMVREDAVCRRLMTVPGVGPLVAMTYKSAIDDPSRITKSKAAGALFGLTPKKYQSGEKDITGGITRTGDEMVRTALYEAANVLLSRITRFSKLKRWGLDVAKRRGSKRAKVALARKIAVILHRMWIDGTTYRWSEAQLMATQA

SEQ ID NO: 359525 - protein, 338 aa, unidentified
MKVVTIGLDLAKNIFQVHGVDREGHPLLRKRLRRLQVAGFFANLPPCMVGMEACCGAHHWSRVIGQFGHTVRLIAPQFVKPYVKSNKNDANDAEAICEAVRRPQMRFVPAKSVEQQDIQSLHRVRSRLVSSRTQLGNQIRGLLSEYGIVLPEHVSQLRRGLPLIIEDAANELTAFSRRLFASLYDELLSLEEKIEAIDEQIRAVYQGNEACQRIAAVEGIGPLIATALVAAMSDGKIFKNGRQFAAWLGLVPRQHSRGGKARLLGISKRDDPYLRTLLIHGARSVVYRASRKTDRRSLWIADKQRRLGTSKACVAVANKNARIVWSLIARGEVYRRAA

SEQ ID NO: 359526 - protein, 340 aa, unidentified
MKITTFGLDLAKNVFQLHWVEPETGEVKRRSLKRDQMIKFFAQRSASVVAMEACGSAHYWARKLIELGHEARLIAPQFVRPFVRSNKTDAADAQAIWEAAQRPERRFVAVKSVHQQAVLMLHRVREQRVKMRTMQINQLRGLLYEFGVILPAGRHKAMPQVTQALARLEDTLPAMALEVLREQCASVEALSAQIEEIERKLAAWRKEDEAAKRLMQMPGVGLLTATAAVAAVGDAKVFSSGREFAAFLGLVPRQSGTGGRVKLLGISKRGDGYLRRLLIHGARAVITHAKARDPWVEALLARRPLNAVVVALANKMARTIWALLAHGRHYEPRGQALGCA

SEQ ID NO: 359527 - protein, 539 aa, unidentified
MKKRVYSAIDIMHVDWQRILTSRTGQEAIVVGIDVGKLEMRAVLRWADGTFERPWSVANPAQIGALVEGVGRLARGGGGGGGGGGGGAGRRVVRVAMESTGTYGDALRQALSDANVEAHLVSGKRAHDYAEVFDGVPSQHDGKDAAVVAELCALGKSLAWPWPAAPDEQVGQLMFLVDQLEVATRAKTQWALRLEAMLARHWPEASRVLKPGSATMLRALAHYGGPAALAADPDAAATLQRWGTRWLDADKVRQVVASAHATAGVRQGATDVARVQWCAQRGLEAHREAGRCQARLKRLGAAHAAIAAQGAVIGIPTACVLWRHLGDPKRYHCAAAYRKAMGLNLKERSSGKHQGKVKITKRGPGACRRWMHLAALRLIRDDGDRDVQRWYARQCGRGSGKGKEKDKGGASSSSSPSSSGRLRVVTSLVRKLALAMWVVGAARGTFEIKRLLGLPAAAAAAAPRRRNNSNNSNSNSNSNSNSNSNSNNNNNNNNNNNNNNNNNNNNNNNSNSSSSSSKGLPAAAREKGGTNATAVASRR

SEQ ID NO: 359528 - protein, 388 aa, unidentified
MGEVALLPQEFLHTEVGLEQMAYAIVALGEDTRVIMEATGRYHEPIAAALHEYGIYVCVLNPLFIKQSGGGSIRKVKTDKADAMKIAKYGLDNWVELREYTPMDTVRQQLKLCSRQYNLYMKTVVSLQNNLISLTDKTFPGVNELFSSPERADGHQKWVDFVMTFWHCDCICRVSEKAFTDRYQKWCKRKGYHFSTEKALDLYAGSCGHFTTLPKNDNTKLLITTAAQQLLAGKTTLAALRTEMTRLAKQLPEYDTVRAMYGVGETTAAQLMAEIGDVRRFPRRSSIVGFAGVDPAVDQSGKHSAKSVPTTKRGSPHLRKTLYQIVCTYLKRSPADEPVYQFLDKKRAEGKPYFVYMTAAQNKFLRIYYARVKECLEAFDERQDTVQN

SEQ ID NO: 359529 - protein, 410 aa, unidentified
MEVLHAHCAGLDVHKDSVVACVRHMVDSRVTTVVKTFKTTTQELMALSDWLSAEGATHIAMEATGVYWKPVWHILCDGEFELVLANAAHVKNVPGRKTDVNDATWLADLMAHGLIRASFVPDEPTQQMRDLLRTRKQMVRERSSHVQRIQKTLEDANIKLDSVVTDILGLSGRRIIEALIAGQTMPQALASLAHRRIHANSAELEAALRGRITRHHRFLLKLHLAQIDAFDAAIASIDKEVDTNVEPFRAAIELLSTIPGISTLSAQVLVSEIGIDMSRFQNAGHLISWAGLCPKNDESAGKRRSNRMKKGAPWLKTTLIQCAWAAARTKGSYLQAQYLRIRSKRGAKKAIGAVAASMLTAAYHMLKDGTFYQDLGPNHFDSQAKGKHVLRLVNRLHNLGFDVQITPLAA

SEQ ID NO: 359530 - protein, 341 aa, unidentified
MKKFIRIAVDLGKRYFQVHGLESESGRSVSRKLKRSKVLEFFSQLERCRVGMEACGSAHHWARELVAMGHDVVLIPPAYIKPYVKRGKNDAVDAAAICEAMSRPSMRFVPIKSADQQAVLMQHKTREMLVKQRTMSVNALRGHLAEFGIVVAKGIGRVDELLALAQSDAALPQVAKSAVAALAQHLEGLDQSIEAVEDEIARAHGQNPTSCLLDEVPGIGTLIASAIAASVPDPGVFKSGRDFAAWLGLTPRQNSSGGTEKLGAITKQGNRYIRKMLVTGSTSVLRVAGKRKGALADWINALRARKPERVVAVALANKLARICWAIMTTGESFRVDTYLKA

SEQ ID NO: 359531 - protein, 357 aa, unidentified
MQPQGTKKIDFKGKELFIGLDVHKKSWSVTILVEGMEHKTFTQLPDPKALFNYLQRMFPGGTYHSAYEAGFCGYGIHRELNALGIKNIVINAADIPTSQKDQLQKRDPIDSRKIARALEKGMLRAIHIFDRDMEELRSLNRTRFYLMRDLRRSKNRIKSFLQYYSIIIPLEMDNNQWPLKFVAWLKQIQMQTLSGQDAFSNLIRSYEYHREQILTLSRQIRQRVTEYDKELYTLLKTISGIGPLTSSALITELGDINRFPHIDHLSSFVGLIPRVKQSGETSYSGGITFRCNSYLRTLLIESSWQAIRQDPALMQYYHEHLINNKGQKVIIKVARKLLNRIRYVMKNRQPYVTGVSY

SEQ ID NO: 359532 - protein, 482 aa, unidentified
MTERVYKLGGFGGEGVNSAIGIDPDSTGFVCALVKTSKAQVITKRFSVSQNGLSEFLRWVKAEGNPIVGIEGTHGQSRPIEKALRDTGVIFHSFKPADTDKFRKAVLGQNKNNERDAESVARFALALEAQGKLEQYRRVWSVDMELQVLTRRYESLSDQLTAEVNRLWKLLRYACPDLYLLLGGKNEENEQRGKVLKNQGILTLLISTSDIGEWKLLSEEGMLEAMGGGNYKGRGELIAELREAAGSFPSISSGIALVIKGSAQQIQRFKGEQGELARMLESLTEGNLAVQCLKSHRGIATLTAAKMIAEMIDIRRFAREDSLASYSGLGMREHTTGNTTMMIPTRLFNHRLKDAFMTAARNVVFYDPGSHLAGYHRNLLKAGMQPLEATKRVARALVRVLFRELSALNESKEKDLEQEKLKEGEGDMASGVTRSEQGRQSNISPSSQRSSKSKSTKKVKNSKAQVAIINGGRIKQVAKKTA

SEQ ID NO: 359533 - protein, 315 aa, unidentified
MTTKSETYVGIDVSKDRLDLAVLEEKRIEQYTNTERGIKELVDEMKALKPALIVVEVTGGYERAVVKALFEAGLRVARVSGYRARQYARAKGLLAKTDPLDAMNLADYGKHVQPRVYEAKSEEGQYLAGKLARRRQLGEMVQAEKNRLRLAYGDIGPSIERVIKFLQGELKQLDEEIRAYLDANPVWLEQEQLLRSMKAVGPVTAATLLAELPELGKLDGKQIASLVGLAPINQDSGKRSRYRKTGKGRPSVRNVLYMAALTGLRYNPVIKKQYDGLVFRGKVKKVALTACMRKLLTILNAMVRDQKPFGYATMS

SEQ ID NO: 359534 - protein, 315 aa, unidentified
MAQPIFVGIDVCKDNLDVAIIQDSKVLECFRSPYTDDTLLELAAKFKRLMPQIILVEGSGGLERPLVAYMADAQLPIIVVNPRQCRDFGKATGLLAKTDKIDAHLLARFGSAIRPALRPIKDAQRQLLTEQVARRRQLVQMLAQEKNRLSRACKQIQPDIEHHIEYLKDRLDNSNKTIEHILKDTPIYQETVELLSTVPGIGPVTTASLLANCPELGTLNRRQIAALVGTAPFNRDSGTRSASRCIWGGRRTVRHQLYMATISAIKCNYKIRTFYQRLIAAGKKPKVAITACMRKLITILNAMLKQQKPWQVATN

SEQ ID NO: 359535 - protein, 344 aa, unidentified
MTYYVGLDVSLRSVNLCVIDDQGDLVEEAKLTSDVQDIIAHLDQLNVAIERIGLEAGSLAQYLTYGLQSAGFEVVCMEARQVKAALSAMRNKTDKHDARGIAQLLRSGWYRPVHIKSMASHHIRMLLSSRKAVLSKCVDLENEIRGLFKVFGIKLPPKLGHGAFDAAVRDIIQADSTLAYALLPMLDARLALYRTFRELDNRTRHLAQEDAVCQRLMTAPGVGFVTALTFKSAVDDTARFRQSRTVAAHFGLTPRRLQSGEMDIEGHISKCGDAEVRGALYTAANAMLTRTSRWSGLKAWGMRLAKTRGHRRAVVAVARKLAVILHRMWIDETPFRWGMEVARS

SEQ ID NO: 359536 - protein, 349 aa, unidentified
MNIKHYIGFDVHKKSISYCVKTGDGQILEEGKLRATHQVLREWAQKRAEPWHGAMEATLFSGWIYDALKPFAAELQMGNPSMMKAIGAAKKKSDKLDARKIADLVRCHLLPVCYVAAPEMRDLRRLLRYRNLVVGQAVQMKNRMSGMLMEVGAEYSKQRLHGKQYFSELVDRLEEVPASVKDLLRLSRGALETFETTQRQLLDRLQKEPLLVKRVKLLRSIGGVGEVTALTWALEVCDPRRFPSIGDAVSYCGLTSALVSSADKQQRGPISKQRNAHLQTVLIEAAKLAPRWNKQLAELHDRELKHGDRNRATLAVARKLVAYLLAVDKSGKRFEVRTPVTERAVSQVA

SEQ ID NO: 359537 - protein, 348 aa, unidentified
MDKVIRIGVDTSKHVFQLHGVNAAEQPILRKKMRRKEMIDFFSKHLPVVIAIEACGASHYWARLLGALGHEVKLIPPQLAKPYVKRGKNDAADAEALCEAMSRPTMRYVPVKAPEQQAALMLVGVRERLIGKRTQLSNAIRGYAAEFGITAARGLNHLTRLLERIQADAGIPDLARDLFAMQAAEYSQLEDQIAQVDDKLKAWHKADARSRRLAEIPGVGPLGAMLLSMKAPAPELFASGRQFAAWMGLTPRNHSTGGRQRLGVITRAGDRILRTTLIAGATSLLQQVRAGRGRNASPWLIELLKRKPPKLAAVALANKIARIAWKMMAAGESYRKNAAPVPVLACAA

SEQ ID NO: 359538 - protein, 282 aa, unidentified
MPAACPSAAPLKYVVGIDIAKDTFVACFGRIDTSQRLHFQKEVTFANSATGFADLLVWTNKQHAPAVPLWFVVEATGVYYEELAYFLADRAQALSVLLPNKVKHFAQSTEQKSKTDQLDARLLCRLGLERALPTWQPPTPALRQLRALSRERQSLIQQTTRLKTQRHAYQHSYQPDTRTLARLTARQQLLEQQVQAVDQDVATLLKAEPELARKLAQLTSIPGIGLTTAIAVVAETNGFVLVENERQLASYAGLDVVQRQSGLSAGATCISRRGNGPSICRL

SEQ ID NO: 359539 - protein, 324 aa, unidentified
MAKRTTICAGIDTGKRKLDVAIDGSSKELQIDNTVEGHKALLDWLRRHRVKRIGIEASGGYEQVVVAELRRKRFVVVVFQPAQVRAYAKFQLQRAKNDKIDAALIATCTAAVKKIHAPPDARLLPFAEQLTMMDQIKEDIARFKNRLETCRNPRLRQIWQEDIARLEKREKIELKALVAAIREHRDLAERLDLIYSVGGIGMPTAVAILIRMPEVGQLTREQAAALGGLAPYDDDSGEYAGARHIDGGRKRLRRALYAAALPASFRWNPQLIALYNRLIAAGKEHKRALVACARKLLIFVNTVVARGTPWQNQPPPRAAMTTTG

SEQ ID NO: 359540 - protein, 400 aa, unidentified
MRSVFGIDVSKASSEVAILVNGEKVHSYTMANDAIGFSRLLGDLKTVHKPEIIFEATGVYSRRLQAFLDEHSYAYTRLNPLEAKKQLDSLRVRKTDQIDAEKLAQSQFVLNRKPTYVQEEVYQELRDLSRFYQNLTEDIVRAKNRLHKVLQVTFPEIETVLSKPTGEQYWNLVTAFPCKDFVLELSKDELLESIRQSTSKRISDKRVAYLAKKLTALANQSYCAVKKTSPILEEVRYYAKELLRLSERRQAVLDQMVELAQPLPEYDILLSIPGIAETTATSIIGELGDIRRFQSTNQINAFIGIDLRHYESGNFLAKEHITKRGNPYARKILFKCIHNVASASHTNPCHIADFYEKRKRQSQTTSTKPHTIASIHRLIRTMYYLITHNKLYDYRSTQNQ

SEQ ID NO: 359541 - protein, 407 aa, unidentified
MELIALYKRVIGLDIHQAQITACALIEEADGSTRIEQRQFGGFKRDRRELAAWVAGLRPDEVVLESTGIYWKSPYAALEAAGIRAKVVNARHVKNVPGRKTDVGDAHWLATLARAGLLRGSFVPPAKLRELRLIGRQRQKLVGQLASEKNRLHKVLTDSGVRLGVVVSDLHGQSARAMVKAIIAGQPPQEVLKLASRRLKSSREELFDALQGDLSASHRFVLDELMRHIEEIEARIARFDARLLDELESERNTLALLQTVPGVDLIGAAMLLIEIGTDMDAFGSADRLVSWVGICPGNNESAGKRKSGHVRKGNLYVRRLLCEFAHAASRTTSVFKSKFQSLVVRRGYKRAIIAIGHKILRTIFFMLKRREHYRDSATDYEALSVQRNAPRWIKALTKFGFIATAST

SEQ ID NO: 359542 - protein, 355 aa, unidentified
MNSEKYIGLDVHQATISVAVMDSTGKVVMESILETKAATILEFFAGLRGTLSVTFEEGTWAAWLYDLLQPHVAKLVVCNPRKTALLKDGNKNDRIDARKLAELLRLDSLKPVYHGETGVRMLRELARSYLTLVKDLTRVMNRLKAMYRSWAIPCAGRDVYYPRHRAEWLGKIREAGVRRRAERLYQQLDMLQHLRQQARRELLAESRKHAITAKLRQIPSLGPIRSALAVALIQTPHRFRTKRQLWAYSGLALETRTSGEHCYVRGQLRRSKKQVSIRGLNKDHNHDLKGLIKAAATRASVQPGPFQDFYQRSLAKGIKPTMVRLTLARKIAAITLTLWKKGENFDAERLKSQAA

SEQ ID NO: 359543 - protein, 426 aa, unidentified
MLRSQIDKVMAINPKIMIVGIDIAKKTHWARVLNFLGLELTKPFSFNNTKEDFIRTVVKLENLKKEKGLEEIIVGIEPTGHYWKGLAWFLKHNGIPVVMVNPYHVKKAKELDDNTQTKSDRKDAFVIAKLVKDGRYSKVYLPEGVYAELRVLSNTRSQLRAKLNVVKNMLVAVLDEYFPEFVKVFKNLEGKMATHALYHFPFSQQVIDLGLDGMVFEFKKAVKKGAYLKRSKKLLDAAEESIGVTEGTESAKIKMRACLDEIEFLRKQMINIETEMEKKLEVTGIARYITSFPGIGIVTAAGIMGEIGDPKRFESWEQVRKYAGFNLVEDSSGERKGKTVVSKRGRAMLRNILYQAALVMVAKNKEMKLLYHHLTDRKENPLCKKQALVVIAIKIIKVILALVNKKQIYDAEKVLGEFRIAQIKAA

SEQ ID NO: 359544 - protein, 345 aa, unidentified
MIKGNLRLLLPYEGTITAKSGIFLKAANTVFHNNRKTSPEAFLQAIAPYRDDIVVAAECMFVWYWLADVCAQESIPFVLGHALYMKAIHGGKSKNDKIDSHKIATLLRGGTLPIAYVYPREMRATRDLLRRRNYLMRKRAELLAHIQNTNSQYNLPEFKKKIAYKANRQGVTDHFPDPAVQKSIETDLHLLDFYDRLLNDLELSIVQTAKKHDAHMWYLLRSVPGVGKILALILLYEIHDIHRFPRVQDFVSYSRLVKCPRESAGKKAGTKNSKIGNVHLKWAFSEAACLFLRGNERAQQYHDRLVNKHGKGKALSILAHKLGRAVYFMLKRKEPFNMETFFAQP

SEQ ID NO: 359545 - protein, 413 aa, unidentified
MLKIVYPICCGMDVHKNFVVACIATTDDKGVTTYKKKRFSTFTCDLRRCASWLAENNCTDVCMESTGKYWIPVYNTLESTCQIVLAHPKYVKAIRGKKTDEKDAKWIADIFKHGLVSGSFIPPADVRQLRDLMRYRWKLTHYTVGEKNRAQNCLTVSNIKLDDVFSDVFGKTASAITDRLLESNEPFDVAPYLSRRIKTPVEKIQAAVDGELCAEQAEKLRIIRSHMNSLDLCKANLESLILSTAQKFLPQLELVMTVPGIQAYSAIGIISEIGVDMSVFPSSKHLCSWAGLTPQNNESAGKKKTTRISRAGAYIKPLLVQCALTVSKSSKHPEIRNRYLSLKKRRGHKKAIIAIARMLLTAIYNILQKNEPYNPELYLRCNNTPPEHRAVSVEEAIFILQRQGYLVTPSAPG

SEQ ID NO: 359546 - protein, 316 aa, unidentified
MQSALFIGVDVAKDNVVVACSQETFASRTLLNKTAALKAFLVSLPPQSSIAMEATGSYHQNLADLAHRLGLRVYVLNPRDLYHYAKAMGLRAKTDRVDAALIARFLASEGARLRPYHPPTAAQRQVDHLLRRRAKIVSLKTALQLTCAEAPSIRAETASVLKSFAALLKKIDRQLDELQQAMPGRTQQLERLQTIPGVGALTACWLTNLLDRIKFRNSDALVAFAGMDPRPCDSGQKRGRRRLSKRGPAEGRRLLFNAAMAASRCAAWKEVYTRCRQQGWASTEAFMILARKILRIALAMYKTQTNFDPAFIGKRA

SEQ ID NO: 359547 - protein, 388 aa, unidentified
MNVGADKSEPLTAIHTDLGAIFVSLELSRSSWLITSLSPGGGEKMSKHSVPGGDFARLMQRFAQLQEKARLRTGQSFRIIVIQEAGLDGFWIHRALQNEGIESHVVDAASIATSRRRRRAKTDKIDGETLVRALLAYKRGEPRVCAMVKAPTPGEEDRRHLCRERKALTAERVRHVNRIKGLLFSQGISGYQPLRRDRRQRLEELQTGDGRAFPQHLKALVNRELDRLELLLKQIKTVEAARDALLAVGQTAKPAPAAMLLDIRGIGPEFAAILWSEGLFRHFENRRQIAAYAGLAPTPWQSGAVDREQGVSKAGNPRLRTTLIQLAWLWLRNQPRSALSVWFHERVSRNGGRLRKTTIVALARKLLVALWKYVTAGVVIEGVTMKVA

SEQ ID NO: 359548 - protein, 416 aa, unidentified
MNAVGIDVSSRKSTVAVLRPLGEVVCLPFDVTHDIAGLASLAEKLKAIDGETRVVMEHTGRYYEAVEKALHEAGLFVCAVNPLLIKEYGANSLRRVKTDKADAVKIARYALDNWADLRDFTPMDAIRYDLKTLNRQFQLASKQRTASANNLIALLEQSFPGIRKCFDSPVRSDGTQKWVDFAHSFWHVDCVRKQPFAAFCERYRKWCKRHAYLFKLSNAEEVYALAKRAVVLTPKSKVVKVLVQEAANQLISISRSVEVYRAEMDRLAAMLPEYPVVMAMYGVGKSYGPQLMAEIGDVRRFERKQALVAFAGIDPMPNQSGDKNVRSNKSSKRGSPYLRKTLFNVTRTYLQCAPQDEPVFQFLNRKRAEGKPFYVYMLAAANKFLRRYYAKLRDYFASLDTLQPVDPIPTILKATL

SEQ ID NO: 359549 - protein, 344 aa, unidentified
MQQIQTIGIDLAKNVFQVHGVDESEKVVLVKQLRRNQVIPFFEKLEPCLVGMEACATGHHWARELIKLGHNVRLIPPVYVKAYVKRSKNDAADAAAICEAVTRPTMRFVPIKTVEQQAALAVHRARDLLMRQRTQLTNALRAHLAELGIIAETGREGGAQLIEVVADARSTGALPAEMIDALSALIDQIFSAQQQIDTLNQCIKRQHRASDVAKRLEGIPGIGIITATAMAATVTDPGQFKTGRDLAAWVGLVPKQHSTGGKVKLGGISKQGDRYLRRLLVVGGMSVVKMAKIFPWRYPWVAKLLERKPAKVVAIAVANKLARVAWAIMNSGGTYRPQVRGARP

SEQ ID NO: 359550 - protein, 421 aa, unidentified
MDVVHQRVAALDISKTDAKVCVRIPGKRKGTFTREVTTWGATTNQILALRDHLIAAGVTLVVMEATGVYWKPFYFVLEDGIEVMLVNARHVKNVPGRKTDVSDAQWLAQLGAHGLVRGSFVPPEPIRQLRDLTRARTRLTGERSREVQRLEKFLEDAGIKLSSVASDIMGVSGRAMLEALIAGVDDPAGPPDPAMLADLAKRRLRAKIPALVEALTGRFTEHHAFLVRLHLDQIDRLTAALDALADRIEAQIAPFRPAVDLLTTIPGVERYVAEVIIAETGGDMTVFPTADHLASWAGVVPGHRESAGKNKSGKTRPGNSYLKGALGVAAFGAAGTNGSWLQARYRRLTARRGPLRALVAVEHSILIATWHMLTNQAPYTDLGGDYYTRQNPDRAERRAVHTLEALGYTVTLDRPDLEPAA

SEQ ID NO: 359551 - protein, 411 aa, unidentified
MEVVHARCAGMDISKKDAKVCVRVAGAGRRKTVETVTTWSSMTSQILALREHLVDQQVTCVVMEATSDYWKPFYYLLEDAGFEVMLVNARHVKTLPGRKTDVADATWLAQLGAHGLVRGSFVPPEPIRQLRDLTRARTAITRERGREVQWLEKLLEDAGIKLSAVASDILGVSGRLMLEALIAGDRDPAALADLAKRRLRSKIPQLTEALRGRFTEHHAFLARVHLDLIDRHTDALDQLTARIEVMMEPFQGFRDLICTIPGIGVATADVIVAETGADMSRFPTAKHLASWAGTTPGNNESAGKVKSSRTRPGNPYLQGALGAAAMACSQNPSTYLGARYRRIASRRGPMKANVAIQHSMLIAIWHMGTTGTLYDDPGAEFFTRLHPERAKKRAIGQLEAMGYQVTLDHAS

SEQ ID NO: 359552 - protein, 409 aa, unidentified
MPHFVGIDWASAEHAVCVVDEQGQVRLRAALAHNATGLEALCRQLQRFGTPVDLPVAIERPSGLLVDTLVEAGFPVVPIHPNAVKAARPRYSAAQAKSDPGDAYLLADLLRTDGHRFRPLHPLSDETRALRALVRTRDDLVAERVALANRLRQLLESFWPGAAAIFADVDSPVALAFLTRYPTPQSAERLGEKRLAAFLARHAYCGRRAPAELLQRLRSAATGHAGAMEAETRGELVLALVAVLEPLVTQIQRLTASVEHALLQHTDGPIIASLPRSGRVNAAQILAELGDERARFPRPELLAAEAGVAPVTRASGKHHAVSFRWACNKRLRLAVTCFADNSRHASPWAAHVYQRARERGCDHPHAVRILARAWLRVLWRCWYDRTPYRAEQHRAAKPFLPPPTSEQAA

SEQ ID NO: 359553 - protein, 467 aa, unidentified
MKGEKIEMQVINHNCAGIDVGSRSHFVAIGQGVTHVEEFGVYAEDLRALSKWLLKNKIKSVALESTGTYWQNLFVELMNSGIEVVLTSGRFTKNINRKKTDVLDCQWIQKMHALGLLPSSFLPDEQTEKLRTYTRHRANMIALKADTSHKMAKFLKYLNFRLDVVVRDVTGLTGMKIIADICKGNLDPISLSKHRHFNCRKSEEEIAKALVSNCRTDYLFGLKQEYARYKFYLGQIAECDMEIKDFLDHLITHQENEITDRPKKKPYKRNNKNSIKGIDLNIVAYQYFGGVDLFEIPGVSFSTVLSLMSEIGPEGFSRFPTAKHFASWLRLAPNNRMSGGKVLSHKIPKGSNRLKIALRNAANAVGNQKDSDLGKFFKKIAFRKGRKAAISATARKLGVIIYHMVTKKEAYKSRTEYVFLDEKRRQLALIRKRIAKFGIDPNEIGIFSRPSYKLAYEKRISDNQRDS

SEQ ID NO: 359554 - protein, 322 aa, unidentified
MSVSVLGIDIAKQKFDAALLSDGKTKHKTCKNSAEGFEMLRLWLEKQGIQEVHACLEATGNYGEDLAIYLHEAGHMVSVVNPARIKGFAQSELLRTKTDKLDAALIARFCLAMKPGAWIPPSPETRSLRALVRRVDSLIDMRSQEKNRISTAHESVSLLIKEHIAYLDQEIEKIRQQIADLIGQNPNLKRKKDLLDSIPAIGKVTIPHILAELDDLEKFNHVSELVAFIGLAPKETLSGSSVKGKPRLCKIGHARLRKALYMPALVSIQCNPVMIAFYNRLKDKGKNGKVIVCAIMRKLVHVIFGVLKSGKKYDPNFRPAAA

SEQ ID NO: 359555 - protein, 408 aa, unidentified
MKRYYMGVDWGDRLHQVYVGDQEGKKVREIKVQESPQGLAEIGRWLDEKRAEGFELWAAIEKPAGRIVDFLLDHGVELYPVNPKAVDRVRDRYRMSGSKSDAFDAYMLAEFLRTDQAHLKALRPSSEKAQELKMLSRDQRRVVRHKTRFLNQLTTTLKEYYARPLEAFEDLETEIALDFLKQYPTPAHLSALKRKEFNRFATKQHHLSKQRCEQLWEKLNKPQLAVPEHVVRAKAQLVEVLIEQLRASIKAVKIYNHKVESFFASSPAAQFAKTLPGGKSGTLVAAIWAELGDAQGRWESPGHLQAEAGAVPVTKASGKSRVVHFRFACNKHLRHTMYWFSFVSLNQSEWANLYYRGQRDNGHSHHQALRALGAKWLKIIFVMWRDHKPYDENYHLANIARQKLRQAA

SEQ ID NO: 359556 - protein, 367 aa, unidentified
MPTMTHPRAVTEDSGKVGEVGEVTGGVDTHKDTHTAAALDQAGRLLGHAQFPTTVAGYAALLAWLQAFGLLVRVGVEGTGVYGAGLARHLRAGGISVVEVDRPDRKTRRWQGKSDPVDAEAAARAALAGRATGTPKHRDGRVEALRALRVARRSAVAARAQAQTQIRSLIITAPDELRAELAPMGLRELLAYCATRRPDTTTCDQPDAATLVALRSLSRRHRELTVEIDELDSLLAPLTEVINPALARLNGVGPDVAGQLLVTAGENPHRLRSEAAFAMLCGAAPLPASSGRTHRHRLNRGGDRHANAALYRIVLCRMRWDPRTRAYAHRRTTEGMSKKEIIRCLKRYIARDIYRALLTPHDTTPTG

SEQ ID NO: 359557 - protein, 289 aa, unidentified
MKLYGAIDLHSNNNVTVLIDEKDKVIYQKRLANDLPLIVEQHSAYASSMEGIVVESTYNWYWLVDGLMEKGHRVHLANTAAIQQYEGLKYTDDDSDARWLAHLFRLGVLPEGYIYPKQERAVRDLLRKRSQLVRQKTANLLSIHNLYSRNTGQSISANRIKQLTSEKVDAQFTNSEVALAVKANLMVMRSLETEIAVVERVVKERIKLRPGYRYLLTVNGIGQTLALTIMLETGDIGRFPKVGNFASYCRCVGSEKLSNGKRKGNWQHEKRQQVFVVGVCGGSEFCDSL

SEQ ID NO: 359558 - protein, 409 aa, unidentified
MDKLYVGIDVGSLDNSAYIMRPDGEKHSSFPIQNSIEGAKTVSARVVAALTELEITNAVIGIEATGVYGQNLIYFLREDAALKRFDRKFHVLNPKQVQKFKEAYPELPKTDAVDAFVIADNLRFGRITKAVLEDDYRYDALRTLTRARFFATQNLVREKQRFMNLLFLKCSGLAQDKAFSDNFGVAAMELYSYFETPDTLAKMSVKELSAFLAEKGKNRFPDPDKVAKAVIAAAKNSYSLPDPVNASVSQAISISTSSIRATQAQIKALDAEIERQFENIPNVLTSVRGIGPVYSAGIIAEVGNIDRFSGQASLAKYAGLAWTRHQSGTFEGENTRLIKSGNKFLKYYLCEAAFSLVRCDTEYKSYYNLKYKEVNKYQHKRALALTARKLVRLIFRLLKDNRLYKPASA

SEQ ID NO: 359559 - protein, 350 aa, unidentified
MDKELYIGVDVSKQTLDLAYYDGESIDWKKAHIKVSNNNAGFKKIGSWVAKVSKGFDIVLFCMEYTGLYTQNFRLWLEEKHYIYRMVEPRKMHRFEPDLDDGLRSLDRIKTDELDSFRIAIYCEQNHRKILRNPSKLPPPVYFKLKRLLAERKQTVKQSVLYKQQLHDICAYDTDLSVERKNGQLKTLNDALKGIDNEIDMYIKEDADISKNFSLLTSIPGIGRVVALETIVLTENFMAIDNPRKYACYIGVAPFKKESGTSVRKGSSVSKKGFKQAKADLSIACLVCMQHIPNIRDYWERKRKEKCSGIVFNAIKFKVILRMFAVIKRGTPYVETDNYRNGKNKQPRVN

SEQ ID NO: 359560 - protein, 317 aa, unidentified
MTAVGIDVAKHTLAVDLMLPDGRHRQKHCANAAAGHAELVRWLGRYAVAPVAIGVEATGGYQEAVAMALHDAGFAVSVLNPTAVAAYGASQLRRAKTDPTDAALIADYMRTQTPSVWTPAPLEARQLQALVRRLDALLEMRTQESNRLELAAAIVRPSITATVAHLDTQIATVKQQIAHHIDQHPTLRAQRDLVQSIPGIGETTAAIVLGELLDIARFSSARQLAAFTGLVPRLHQSGTSVRGRGTLSKLGSSRLRKALYFPALTAVRYNPVLTRFAARLRAAGKAKMVIVAAVMRKLIHQIFGVLRGQRPFDPNYA

SEQ ID NO: 359561 - protein, 345 aa, unidentified
MELHTIGIDLGKTVFHLVGLNSRGEVVMRKKFSRTQLLRFTANVHVGLIGMEACGGAHFLGRALREQGHEVRLIPAQYVKPYVKTNKSDYIDAEAIAEAVARPTMRFVPIKTDDQLDLQSLHRVRERWVMRRTAVINQIRGLLLERGITLRKGRCHVGAALPGILEDADAKLSGALRMLLAQLKLELDHLDLRIDEADEMIKKTARENEACQRLVAIPGIGPVTATALIAAIGNGGAFRKGREFAAWMGVVPREQSTGGKQKLLGISKRGNSYLRRLFVQGARAVMQQRTKQSSGLSRWLAQLTSRTHRNVAAVALANKIARMAWAVLAKNEQYRPPVLADVAAA

SEQ ID NO: 359562 - protein, 364 aa, unidentified
MDVHLRSTTVCALDAETGEAVTRRFRGNPWGEVAEWMSGFPGPSLAAYESGYLGFAPQRELSGLGVDCVVAAVSKVPRSAADLSSKNDRNDAARMAKAILSHDVTPVWVPSPEIEGLRDLAGAHDAATARLAAAKQRLLAFLARRGYVYGGTTPAGNPRKYWTYGFLRWLDGIHPADDGGIRALAALRNEVEAADETRGALLAEYRAAVAAGPLSAEVEALQSIKGCGFALAAAFASEVGDFSRFRSGRQVTSYFGLAPKQRSSADSVRLGGISGAGNALVRKLAVEGSWCYAQAGHQPKLMPKGSGVPLEIRMHGRKGSERLLRRREEMIARGMPQAKANAATAAELVRWLWALGTMCREGAE

SEQ ID NO: 359563 - protein, 354 aa, unidentified
MHYANRVDFSGQTIYIGMDVHKKSWTVSLFMEHLEHKTFTQVPDVAVLAAYLQRHFPGARYSAVHEAGYSGFWIHDKLLESGIACMVTNPADVPTRDKERRRKGDRSDSRKLARCLRSGQLEGIHVPPRATVEDRGLIRTRQAMVRKQTRCKNQIKSLLLFYGLPVPDAASGWSRNFIRFLEETRLERESGDLALKAHLTELIHLRQIIAQLNRDILALSRTDEYRERVQLLKSVPGISTLSAMIFLTELGELSRFPSLDKLCGYVGLTPDTHGSGEKQGIGDITRRCNQMLRSLLIECSWVAVRKDPALALAYHSFCKRTLKTKAIVKIARKLLNRIRFVLNNRCRYVSSVAA

SEQ ID NO: 359564 - protein, 467 aa, unidentified
MTPHKDFFLDSGPSVPTPLLPPSPVLSDALQVYHPHAAGIDIGEAEPWVAVPQGCDPQPVRRFGTFTADLDALADWLLDCGVTTVAMESTGVYWIPLFELLEARGLQVLLIDPRQAKRVPGRPKTDRLDCKWLQRLHTYGLLAGAFRPDAHVCVLRSYLRHRQMLLTYAAHHIQHMHKALEQMNLKLTQVVSELTGVTGMAILKAIIAGERDPQRLAKLRNPHCHHDEDDIAKALQGTWRAEHLFALQQAIALYDFYHQQITQCDQQINAHLATFDDQSGGRPLPPKARRHKKTNEPRFDARTPLYRLAGVDLTTIEGIEEGTALVILSEIGTDMTRWPSVKHFCSWLGLCPQHKISGGKVLSRRVRPGAHRVTVALRLAARTLHHSQSALGAFFRRMKARLGTPKAITATAHKLARLVYSLLQHGSAYVQQGLDAYEAQYRERKVTTMAKQAKALGYTLVPLAAQG

SEQ ID NO: 359565 - protein, 402 aa, unidentified
MRFIGMDVHRDFCDVAIYEDGKVRLAGRVESSPEQLGLFAQSLCDEDHVALETTGNALSIARILEGHVGGVLVADTRNVRAMTHAKVKNDRVDACMLAKLLAAGMLPGTWLCDEPTRVLRRRVSRRNQLVRGRTRARNQIHAVLIRNLGGRGPGGDAFSKKGREWLAGLELPTDERETLEGCLREADFLSGEVALVDREIACYAMGSAEIRRLMTIPGVDVTTAATLMATIGDIRRFPSPRHLVGYVGLDPRSRQSGASPIYTGHISKQGSSSARHVLCEAAHATMRAPGPLRAFGQRVRSRRGSKIATVAVARKLLCLTWQLLTKEQDYLYERPALTFRKLRKLELAAGAPKRSNPRGRNGKGTPDNPAQWATDRAQALQTEDHYRTAVANWQPQPQASPS

SEQ ID NO: 359566 - protein, 450 aa, unidentified
MEVIYERCAGLDVHKKTVVACRVVSKGNGRKEQETRTFGTTTAELLELVDWLGEWGSTHVAMESTGEYWKPVYNLLEGEVEILLVNAAHIKAVPGRKTDVGDAEWIADLLRHGLLRASFVPPRPQRELRDLTRQRSNLVRERSAVLNRLQKVLEGANIKLASVTKAGGVSAREMVKAIVGGESDAAVLADMARGRLRSKRGELEQALTGQIGGHHRFLLDSHLRHIAFLDEQIEQFSQEIAARMDELEVTGEPPAGASSAASGESRRPLPGGGNHQTALTATRAMALLDTIPGIDRWQAEVILAEIGLDMTRFGSATCLAAWAGLAPGNNESAGKRRSGKTRPGSPIIRRTLTLVAHAAARGKDSYLAAQYHRLAARRGAKRAIIAVAHSILVIIYHLLTQQEPYRDLGGNYFDERKRESVTNRLVRRLEKLGYQVALDTKPASASMVVS

SEQ ID NO: 359567 - protein, 545 aa, unidentified
MLSSGYALGVKTGSAMESANPLASMVKGCFDSFIGDVTSTIPLRRLDTVINPLQNVSHYLYEAHIMTKKSGVQQAQKIRKIESREKGTVFELLNPDAAGIDIGSEEHWVAVPEGRDEHVVRKFGCFTADLHDMAIWLKQCGVKTVAMESTGVYWICPFQILEQHGIEVKLVNARQARNVPGRKTDVSDCQWLQRLHTYGLLSGSFRPEDQVCVLRSYWRHRDNLVRYASAHIQHMQKAMTEMNIQIHKVLSDITGVTGMRIIRAILSGERKGEALADMRAPGVKRSKEDIIKALQGDYREEHLFALQQAVELYDFYHNKIRECDGKIERCLKGFEGQAEAADESNVIIAGLKEESGAEKILPKKGKHKARKNECAVDLQTELYRITGVDFTEIDGLDVLSINTILSEVGLKSAAFPTIKSFTSWLGLCPNNRITGGKIKSSRTKRISNRAAKAFRLAAQSLSNSKCALGGFYRRLRARLGAPKAITATAHKLARIFYVLWTTKQRYQDIGAEYYEKQYKERVIRNLKKKAYELGYIIIPQEMGVS

SEQ ID NO: 359568 - protein, 320 aa, unidentified
MQTPTEVLNIGADIAKDEIVVACSQGSFPARTLANQRTALLAFLKGLPAGSRIGVESTGTYHELFANVAHQLGFIVFVLNPKDARHYAKAVGLRGKTDRVDAELIARMIAHEHTKLHTWIPPTPEQREMARLIKRRAKLSSLRQALSMSLKGLDGFAADLKVLRARFDQIVARIDQRVKALVEASPDRQQHVTHLRTIDGVGQVVSAALVNTLERAPLKSADAFVAFTGLDPRPDDSGQHRGKRRLSKRGPSELRRLLYVAAMSAKKSKAWKPLFEHYRAKGLSSTAALVILARRIARTAWSMYTYRTEFDPVRLAKSLT

SEQ ID NO: 359569 - protein, 341 aa, unidentified
MNAITIGLDIAKSVFQVHGEDHTGKVVIQKRLRRHQVEAFFSKQLRCLIGIEACGTAHHWARTLVALGHDVRLIPAGYVKPFVRRNKNDARDAAAICTALSRPDMRFVTIKSVDQQASRGLERSRDLLVKQHTQLMNCTRSLLAELGIIAAVGWRGFAELIARVKHNEAAIPPVLLAALLPLIQQIEGLHTAIAALEDRIIAAARDNPVMRRLAGIPGIGGLTAHAIVTAIGDGRQFGSARDFAAWCGLTPQQHSSANKRHDKGISRQGDIRLRKLLALGASTIMRNVRSRSDRATLWQRGILARRPVKVAVLAQAAKNARIAWALLVSGETYRNTTATTA

SEQ ID NO: 359570 - protein, 312 aa, unidentified
MNDKTPSVHAGLDIAKASLQLHLQSKSYDLPNTPAGHAQLIKRLAAIPGLHVICEATGGYERAVVAALHAARVPVSVINPARVRQFARASGELAKTDPIDAAVLTAFGQAFTPDATAPRTPVEIKMAALVTRRGQLLELRVAEAQRAQTCADPDLRRLFTPWLAQMEKQITKVEALIEGLLKEQAPLADRVQRLDDIMGVGRLTAVMVLANMPELGQLNRRQAAALAGLCPYNRDSGQWAGQRCISGGRAEVRRALYMAALSASRSNHLLKPFYDRLIAAGKPAKVALTAVMRKLIVLMNHLLKNPNFSLAK

SEQ ID NO: 359571 - protein, 326 aa, unidentified
MQGKVPSQRSAAAPVYIGIDVCKARLDVHIHPLGESLVLPNDAGGLKRLKKILARYDVVIVVMEATGKFHRPAHRSLHASGFKVAIVNPLRSRRFAEAIGTLAKTDRVDARVLALMGESLKPGALEPTPELMETLQELARGRESAVDSKTAIGNQIQTSNSKVLVRELKRQLTAVETAIENLEAELERQIDADPVLARRFEILTSIPGIGLVAAVALIVELNEIGRLSSKQVAMIVGLAPIARDSGQKTGTREIRGGRKHLRTALYMPANSAKQHNPDLKIFHDRLIKAGKLAKVAITAVMRKLVVLANTLVREDRLWQPKHVIAR

SEQ ID NO: 359572 - protein, 351 aa, unidentified
MMIIGVDYHPSFQEITFLVEETGEYGEQKLNHSNGEAERFYRDLHARGIHVRVGMEATGFSRWFERLLAELDFELWMGDPAEIKAKRVKKQKYDREDARLLLRLMRENNFPKIWVPSPENRDLRQLLWHRHRLVQMRTRIMNQLQALAMNEGKRWKKKLWSAQGRTELEKLPLAPWASRRRRELLELLDRLDPSIEELSKAVEREARKRSDVLRLMTHPGVGALTALAFVLIIGTTERFQCGKQIGTYVGMIPSEDSSAGKQRLGHISKQGNSLLRFLLVEAAQAAARINPHWRRRYMHLAMRRHKSIAKVAMGRRLGVRLYWMWRNGCEYSSSLEFGSYVGQLGTGHGVK

SEQ ID NO: 359573 - protein, 409 aa, unidentified
MEVLYSHCAGLDVHKETVVACVRHMEGHVRTTVKTFSSTTRGLLDLSAWLSEEGVTHVAMEATGVYWKPVWHLLSDGEFHLLLANAAHVKNVPGRKTDVNDATWLADLMAHGLIRASFVPDEGTEQMRNLLRTRKQFVRERASQVQRLQKTLEDANIKLESVISDGVGVSGRRRIEALIDGQSEPQQLAALADGRIRASGAQLEAAVRGRVTAHHRFLLKLHLDHLDAVDAAIARIDKEVDGHIEPFRTAVERLSSIPGVSSLSAEVIVSEVGLDRSRFPTVGHFISWAGLCPKNDQSAGKRRCTRMRKGAPWLKTVLIQCAWAATRVKGSYLQAQYLRLRSRRGAKKAAGAVAASILTAAYHMLRDGTWYQELGASHFDRRSTTQQISRLVKRLHHLGYDVHIAPLAA

SEQ ID NO: 359574 - protein, 337 aa, unidentified
MAVAGIDSHKDTLAVAVVDDQGRELDRSEIENSAHGHHALIGWLGRHHPTRVGIEGAGSNGRVAALRLQDAGYEVVEVPPQLTAQARRRQRTQAKSDPIDALLIARIGLREPELPQIRPSGDIEDLRVLVRHRRELRSERTRLASRLHADLEQLEPGYQARIGRLTNERNLDRARRLLGGDDRVRAQVARERVSRLRQLNRQIERITEEIGLLAATFGSGLTTIIGIAELSAAELLAEIGDVGRYRTKAQFAMANGTAPLPASSGRIDRHRLNRGGNRQLNRIIHYVALTQISRSSEGRAYYERKRAEGKTTKEALRCLKRRISDRIYLTLRASALT

SEQ ID NO: 359575 - protein, 516 aa, unidentified
MGKDFFWICVSVIKDGKNVRNYKMRCNCELNGAEQAAELILRIAARIGFEDFPISYGIESTGVYHLFFVRYFFAHADKFSCHLLNPVLLEKSVEKTDARDAEEIARLVMFSKIGLYVPVVGFQEDLRQATRFRVYLVRKRSGFLNFWDARMRYYGITLKSEIKTVWKSRGGRDFMRELAAGSRDLKFFQDILGLDNMDRDSHLWALKDIPESFNAVVQMYLDMLEGLDEKIKQSEKVIRQIISGSEELREAHDLLLTVPGFGTITAAVYLAEIGGFSVTERFKNAGSVAKYSGLCPTKRISGDKAVSFRRRFGNRHVNHALIMAANSVWKSSEDIGSWARGISGRGHRNTGKVALARRLSEIAYHVLRTKNSANLEKYDFHATERKMAKEVRKVSYILNDVKTVDVETREELTRAGAIIASKIGGSLRYAPVVGADLTMPLSKALLKKGKNGRVVRLIGLLGSNGYYTVADVVSGYWTGTLMNVSGIGPKSIELLIDRLIELNFIIDIYAKKEEEK

SEQ ID NO: 359576 - protein, 365 aa, unidentified
MTKVRTWAGLDVHAAATVACVVDVPSGEMTVERLAGRTAEVAAFCARLPAPVRVAYEAGPTGFGLARALEAAGIGCVVAAPGKIERPAHDRIKTDRRDAERLVRLLMIGGLHPVRVPSGEEEALRDLVRAREDIRGDLMRSRHRLSKLLLRHDIRYEDTASAWNATHRAWLSRIELGDRAAQATLLDYVGAIDALVVRRGTIEKTISELVPLSPWARPVGRLRCLRGIDTLSAVGLCAEIGDFARFERPGQLMSYLGLVPSERSSGQTRRQGAITKSGSRHARRLLVEAAWHYRRPPRKGTTLQRRHEGQPAQALAISWKAQQRLHQLWRRLDRERGKRKTIVAVAVARHLAGFCWAITNTDPDA

SEQ ID NO: 359577 - protein, 410 aa, unidentified
MEVIHPRCAGLDVHKQTVVACIRIANNGAPTQEVRTFTTTTSGLLTLADWLAAHGVEHVAMEATGVYWKPVWHILEGHFQLILANAAHVKNVPGRKTDGNDAMWLADLLAHGLIRASFVPPTPVPELRALTRTRKQFVRERASHVQRIEKVLEDANLKLGVVLTDILGKSGRAVLQAIIDGDSDPESLLSRIDRRVKASRDQVLEALRGHISSHHRCMLQLHLEHIDALNRAIATLEQEVGAGLKPFLDAAELVSTMPGMSAVASHAVLAEIGIDMSRFQTPGHLLSWACLCPRNDESAGKRRSTRLRRGGKWLQTTLVQAAWSAVRVKGSYLQAQFHRLRARRGAKKAIIAVAASMLTAIWHMLRNGTEWRELGAAYFDRVDAQKTATRLIRRLQQIGYAVQVTAVTPA

SEQ ID NO: 359578 - protein, 412 aa, unidentified
MLFIGDDWAEGHHDVVAQDDAGKTLARRRLPEGTDGIARFHEMVASCLGEDAEPDPAGVIVVIETDRGPWVKALAAAGYRVYPANPKQAARHKETIANSGKKDDFFDAGALADMGRTRRHQLRELAADSDIAEAVKIAARAHQKLVWERTRHLLRMRSALREYFPAALEAYADLTLTGPDALELLGRAPDPDSAARLTVTQITAALKRAGRRGDLPQRARDIQAALRAPHLPQPAVIAGAYAASVQAGAAVIRALNEQCKIMETKVSELFRRHPDAGLYLSQPGIGDITGARVLGEFGDAPGRYATAKARKNYAGTSPLTIQSGKKKTVHARYIRNRHLIDALHAQALSALTASRGARAYYDELRAHDAGHDDALRRVASRLVGILHGCVKTGREYDESTAWSHRAQSPQAA

SEQ ID NO: 359579 - protein, 322 aa, unidentified
MEQITFTQVVSRGCGIDVHKKVVVATVDGEGIKKTTREFSTFTSSLTELREWLLELGITHVAMESTGVYWKPVYHILEPTGIKVWVVNARHIKYVPGHKTDKKDSAWICKLLLAGLLKPSYIPPREQRELRDLTRYRVKLIQGIAANKNRINRILEDCNIKLSSVMSGTDGIVATKLLDKLIEGKEISPDDIDRVYHGNLKASKAELLQACNGLITEHHVYMLGLIKRDIAASEVIISDIDDKVRQMLSPYDNIIELLKGIPGFNLKTAQDLIAEIGLDMSVFPSEKHLCSWVGISPGNNESAGKKKADEPPTGTNQPKRQS

SEQ ID NO: 359580 - protein, 413 aa, unidentified
MKLFVGDDWAEGHHDVELMDAGGRRLAKARLPDGVAGIARLHAMIGGQLGGDAEEEDAGQVAVGIETDRGPWVAALVAAGYTVFAVNPLQASRYRDRHGVSGAKSDAADAHVLADMVRTSSHQFRPVAGDSAQAAAVKIVTRTHKTLIWERTRCTQRLRHALLEYFPAALEAFGDLDGPDVLELLARAPDPASAAALTTAQISGALKRAGRRRVAEKAAQVRAVLRAPHLGQPEVLTAAYAVSVRALIMVLSALDEQVKALQGQVEAYFGQHPDAEILLSQPGLGPVLGARVLAESGDDPARYASAKARKNYAGTSPITRASGKKKAVLARHVHNNRLIDALMAQAFSALSASPGARACYDRQRARGAGHNAALRQLANRLTGILHGCLKTRTRYDEATAWPQHAAHPEKTAA

SEQ ID NO: 359581 - protein, 310 aa, unidentified
MNSEKYVGVDVSKSSLDLNMLPGNKSQQFSNDDQGVTQLVKFLRKVDPTLIVFESTGGLEMLAVSSLVERQLPVVIINPRQVRDFAKATGKLAKTDAIDAATIARFARDIRPEIRPFKDEQTQALTALNTRRRQIVDMLVAEKNRLYTALKPNRKSIEQHIRWLEKALSDINSDIDQMIKQSPTWRKNDEILQSFKGIGPVTSATLLCALPELGSLDRKKIAALVGVAPLNCDSGKYRGRRRIMGGRAEVRRSLYMATVAALRYNPTIKSFYDRLIDAGKPPKLALTACMRKIIVTLNAMMKNRSYWIAS

SEQ ID NO: 359582 - protein, 398 aa, unidentified
MSNNTPLEIRVGVDVGCYQHNVAIGLPNGDFLEEFEISHTSDGFREFFLRIGAHEKKYNCGVAVAMEGFNGHARPLDTMICVRDYRLYNVNNLKLARFKEIFPAAAKTDVIDARKALELFQLRDHLPSARDVLQEVKAVPQENAILKRLTRRRRFLVNERVRIINSLQTDLRAVCPGLLDITNDAGNLWFLRFLTSTDSLKKLARLRLATLLKIPGVGKKYANSIRHWQEKAIYSPEVDWVGDMIQEDALRVLELHDKIKTLEKRCEDIGRHSRTAALISSIPGYGPVCSATLAGEIGTIDRFRSEASLALYLGMATLDNSSGKHKSSKNPRHVNARAKAAMMIAIDRHRKGVPESQKYYVKKRSEGKAHNQAIRALGRHLSRVIYKMLKEDRPYQMR

SEQ ID NO: 359583 - protein, 400 aa, unidentified
MPFHAGLDWGGVSHAMCVIDGVDPVLVRLDVRHDSAGLADMVGRPKRVAAPAELRIAIERPGLVVDTLVEAGYPVIPVHPNVVKACRPRYHAAGGKSDPGDAFMLADILRTDGHRFRPLVPVSDDFLALRALVRGRDDLVAQRVALANQLRNLLEGFWPGAVAIFAAIDSPIALAFVGRYPTPDSASRLGEKRLASFMAQHADRGRRSPADLLARLRAAPTGLAGDAEAGAKGELAGALVAIPERLVCEIAKLSSHIEHAVAQLPDGKIVMSFPRAGRICAAQILAELGDVRERFLMQDQLAAEAGVCPVTHASGKSRGVVFRWACNKNLRLAFTCFADNSRHASAWAAAVYRKARDRGCKHPHAVRILARAWLQVLWRAWRNKALYDPQQRRAAIKITA

SEQ ID NO: 359584 - protein, 342 aa, unidentified
MNITTVGIDLAKNVFQVHGVDQRGKGVLGKRLRRKQVLMFFAQLPACLIGMEACGGAHYWARKLQAQGHTVKLMAPQFVKPYVKANKTDAADAEAICEAVTRPTMRFVPIKNAEQQAILSLHRGRQGFVRARTAQANQLRGLLAEYGITLPQGISHVAKRLPEIVEDADNELPGLFRDLLQRLVGHLRELNQQVQELEEQIDTWHRANEASQRLAKIPGIGPLTASALSASIGDAKSFNNGRELAAWLGLVPRQHSSGGKPLLLGISKRGDAYLRTLMIHGARSAVRVAKRKSTPADRWSTAMLDRRHMNVAAVARANKNARIVWALLVHGRDYRADYKLAA

SEQ ID NO: 359585 - protein, 346 aa, unidentified
MELHTIGIDLGKTVFHLVGLNLRGEVVVRKKCSRKQLLHFTANLQVHLIGMEACGGSHFLGRALREQGHEVRLIPAQYVKPYIKTNKSDFIDAEAIAEAVARPTMRFVPIKTDDQLDLQSLHRVRERWVMRRTAVINQIRGLLLERGITLRKGRCHLDAALPGILEDAAMKLSGAVRLLLAQLKVELDQMVIRLEAANTLIKQIAEESEVCRRLDAIPGIGPLTATALIAAVGNGTAFRKGREFAAWVGLVPREHSTGGKQKLLGISKRGNGYLRRLFVQGARAVLQFREKQSSGLSAWLAQLAARAHHNVVGVALANKLARMAWAVLAKGEVYRPPVLASALTCR

SEQ ID NO: 359586 - protein, 482 aa, unidentified
MKKKNIYVNQSQELLSLFEEAGNNDKIMCVPIDYAKKDHIVMFCNGYGHILRKPFSVKNSPEGIEYLTEQVTRSCSHRRIDPKHVFFGGEDVGSYAENFTNTLRSGGWIVAGVNAHDAKEQRANIQASTDRLDLMGIASMLLNRRGNCSPAQSGIYRNLRTLARHRRKLVSMSTEEKNRIHTVIDRLFPGFLDEKKTGILPFSKSSLYLMENRFSPLQIRRRKRHKLIEVLHRYGTTKSENTAAKLQEYAVRVLNTPDEYVFTLQLSLAQHVKHFRCLQDSINQLENEIAVWLAQTQGAFLTAVRGIGIVLAAGVSAEIGNPYEQKPLNNLVSYSGIIPRVKQTGGSEGKTRTGKVAKRCNRILKDYVVQSGLHMGLHGPEDLMADYKRREAAGQHSDFGIGRRYLRMAMCLMRTSQIYMPQRLRNTEVKPEERAGYYLMTWPSLRNKWNKAGALEAAFEKDRPLGQWRNMVQELYEIKLKL

SEQ ID NO: 359587 - protein, 343 aa, unidentified
MQAVTTVGLDIAKSVFQVHGVDARGNVVVRRQLRRRQVLPFFKKLPSCLIGVEACATSHHWSRQLQALGHTVRLMPPVYVKPCLKRQKNDAADAEAICEGVTRPNMRFVATKTPEQQSCLMLHRTRHLSIRQQTAVINAIRAHLAEFGIVAPVGRNGVEELLDVVADPNDDRLPEVARECLAALGAQLRMLQAQILEFDRRILAWHRSNETSKRLDEIPGVGPALATALVASVADPRAFRSGRDFSAWVGLVPKQNSSGGKEKLGSITKRGDRYLRSLFTAGALAVIRYAKIHGTKHRPWLTALLARRPTKVAAIALANKIARMAWAMMAKGEHYREPVALAA

SEQ ID NO: 359588 - protein, 355 aa, unidentified
MDSTKYIGLDVHKETISIAVLNSSGKLVMETIIETKASMLVQFVQGLRGNLHVTFEEGTWAAWLYDLLKPQVTKIVVCDPRRNALLKEGNKSDRIDARKLAELLYLNKLKPVYHGEHGVRALKELSRSYLTISGDLARVMTRLKAMYRSWAIPCAGKQVYAPRYRSEWLGKITEAGVRRRAEFYYQQLDALRALRQQVRRELLAESGKHKASKLLCQIPSIGPIRAALLIAILQTPHRFRTKRQLWAYGGLGIETHSSADHRYVEGQLRPSKRPVSLRGLNRNHNHELKNIFKGAAIIAATKAGPFQEFYAALVAKGIRPEMARLTLARKIAAITLLVWKKGVCFDAQHLKPQTA

SEQ ID NO: 359589 - protein, 316 aa, unidentified
MPTISAYIGIDVAKATLDVGSTERLLFTLTNTSQGHQELIRHLRGFPVERIVLESTGIYGVELVRALILAGLPVSVVQPTCARHFAQSLNRRAKTDAIDAVVLARFAEATKPRLYALPPANLTRLRALSDRRDQVVEDRVREQNRLEACLDPAIAKDLKASIKRLEKAEDKLDRDIAVVIAADPVLKARSDLLQEEPGVALKTAAILLAHLPELGQVNRQQIGSLGGVVPYDRSSGTSDRQRHIFGGRERVRRALYMASLTACRGNGPIAKAYQSLLARGKLKKVALIACARKLLIRLNSILAQADKTAAREPVMS

SEQ ID NO: 359590 - protein, 355 aa, unidentified
MKQQAIQYVALDVHQATLVVSVRDEQGSIVMRATVATEAKAIVGLVRGLGPRVHITFEEGTQAQWLHDLLTKHAERVIVCNTRGRGEIGNKSDRVDADRLSELLRLGALKPVYHGASALLTLKELVRSYVGLVEDGTRVMLRIKALFRARGIKTPGTSVYRQSKRKEWLARLEERGACMRAEALLAELDVLQELRPKAKAAMITEARRQPGWKILRSIPFLGPVRVAQILAIMATPWRFRTKRQAWPYVGLAVVTRSSADQEFAEGKLRRRKREPLTRGLNRNHNPLLKSVFKGAANAAAAQDGPFKEYYDACVARGVREEMAKLTLARKIVAIALRLWKTGEVWDATKLNVQAT

SEQ ID NO: 359591 - protein, 448 aa, unidentified
MIKQNKQQKLQSLSLGIIYPQAAGLDVGSMNMVVSYPGADGVQTLKEYGAYTEDLHQMAKDLRAAGVTQVGMEATGVYWMAVYEVLEQYGFKATLVNARHYKNVDGQKTDVKDCQWLQQLHAHGLLRASHIAEEQYRELRTYIHERGVLQQQKADTLNRIHKVLTQMNIKFQHVISDIEGVAGMQVVERIAQGETCAETLLAGIKTKSLKTPKEELVKSLQGIFKLHYIIVLKNHLIAYHFYKKQMQAYEQLIEESLKKMLPENEPMDIEKKTTKARKNQYHFNLKQYLHKIVGVDLTQIDGLDENTVLTIIAVVGLNMHKWPTADHFTSWLNLAARPKKSGGKVLGHQKRFTNNPATQAFRMAAQTMWQQKGMLGSLYRRLSHTKGSKKAIKAVARRLAVIFYTMVKKQTHYDPKKVMIDEEKLRARKISRLQKEAEKLGCRLEVAA

SEQ ID NO: 359592 - protein, 310 aa, unidentified
MTIYPSSIGIDVSKAFLDIFDPSAGFARIANTPQAVTHWSASVTPARLIVFEATGEYDRVLRDALEAAGLVYSRINPVQARRYAQATGQLAKTDRIDAALLAEIGSRLAPTPQARSEPDRERLVELGRRRDQLVAQRACERTRLKESQNADAIVHESLQSHLDWLDTAIAAMDDEIARQIAQSDTLRGEAELLLSVPGVGIQTTHTVLALMPELGRRRPGAIAALAGLAPYNRDSGTVRGQRRIQGGRSRVRRALYMAALIASRFNARMKRVYQRLLDAGKPKKLALIAVARKLLITLNAIIRDQRPFQA

SEQ ID NO: 359593 - protein, 423 aa, unidentified
MKPLYTQTFTAYVGIDWADTKHDVCLQAVGSDQREFACIPHQMHRIDAWAKLLHQRFGGTIAVALELAKGPIVYALQKYDFIVLFPINPLTLAKYRQAFKPSRAKDDPTDAELALDLLLRHPERFAPIQPQSVAMRSLISLTEHRRELVGDKTRLTNRLTNTLKQYYPQALDWFEQRDTVLFIDFLTRWPTLAQAKRARIDSLKAFFNAHNSRRAKVIDARLESIKSALPLTEDLGVITPCRLHALMLVKQLRVTLQAIEQFDHEIAELAPTLPDYSLFQRLPGAGEHFAPRLLAAFGEDRQRFQHADELQKYSGVAPVTERSGKKSWVHWRWQCPTFLRQTFIEWAGQTINKSFWAGAYYRQQRVKGSSYQAAVRALAFKWIRILHRCWKTRTPYNETTYLNALRKRGSPLLKNLMPDATNT

SEQ ID NO: 359594 - protein, 473 aa, unidentified
MSVSLSVQRLRSFHSRYTSFAFGHRCREAGVAPSMSAVGSAYDNAMAESFFASLECELLERSHFQTPRAGAHRRVRIPRELVQPAATSLVARVPRAARVRKELRGGCDHLVFDAPRKRISSRGPPSRRDSVAVRQYNTRRLYAAIDIHKQVFQAAVLDAVSGELVEARFAATREALGNWAARWQGTLTDVAIEATCGWRWVHRELEPRGFTVQLAEPARARALKGNTRQPKTDRLDARWLAQLLAKKMLPESWLPPKDIERLRDLTRLRQSLRHDRTRWAQRLHAVLQHEGWPCARRSLLSPTGQRWLAALALDAGVRRLVDAHQAMIGAIEEQLAQIDRELGTLARSDPRLVALQALYGIGPVIASHLLAEIGEARRFRRSRQLVRAAGLDPVVLESGDSHRRGHLSKQGSPHLRWALMQAAQQAARRDRSPDHARYVAVQKRIGAQRAALTTARKIARRAYHVLAALEDAA

SEQ ID NO: 359595 - protein, 338 aa, unidentified
MNNSHIIGIDLGKNSFHLVGHDHAGNQLFKKKLTRQKLLEFLSCHEPVIIAMESCGGSHWLARKCTEFGHTAKLIPPQYVKPYVKTNKNDFIDADAIAEAASRPTMRFSSAKTESAQVISTIRKIRSGYIRERTACMNRIGSILLEFGVSLPKGHASMKGLFQWLADKNQNLPPLIIFELSELHEHYQNLNERIDSQADKVERILADNEQMKQLQSVPGIGPVIASACLSSVGNPNDFKNGRNFAAWIGLVPIQYSTGGKSTLLGISKRGNKELRTLFIHAARSILWRDKSVEKYFGSWLVELKKRKPFNVAVVALANKIARIAWAVLVSKKSFEIRT

SEQ ID NO: 359596 - protein, 342 aa, unidentified
MKDVGILAIDLAKHSFQVCGTTADGEILFNRKYSRAKFEQFLTSHPACLVAMEACATSHHWGRTAREAGHEVKLIPPVYVKPFVRRGKNDANDAAAIATAVRQPDMRFVAVKSQEQQAQAILFRTHQSFTRARARMMTTLRGQLAEHGVIVPKGHAALLAFEEELERSPERVPDLVLEAVRLFYHQIQQLGQSIKTLERQMTEIAKKDEVARRIQTMPGVGPINAAAFLAFTPPMESFKRGRDFAAWLGLVPKQLSTGGKTRLGRVNKMGQSDMRRLLVNGATVCMRWAAAKGVDPESWLGRLMARKPWKVAAIALANKMARALWAMVTKKEEYAGGLVTYA

SEQ ID NO: 359597 - protein, 377 aa, unidentified
MITSNKSTSRKRPSEPQAQASALPGTIKAKTIKLGVDAHLGLFVVVRIIDGGTPQPPQRFKRAEFLLWCAKQLTLTEKVFTCYEAGPFGYTLHRQLEKMGITNYVVRPRDWDEYGQKVKTDKRDATALADCLDRYVNGNDRAFCVVRVPTEAQEQARSLSRQRESFQKEKQRLAAQGRSHALYYGCPIQGEWWQKDRWEKLAVQLPPIVVNLLEPLRRLIAAITLELTARTKEVEAAAPSALPVGLGKLTSEILEREVADWDRFQNRRQVSSYTGLCPREDTSSDRRFQGSINKHGNRRLRPVLVECAWRLMVFQPGYLAVKKWKSVLADPKAGKAQRKKKVIVALARTFAVDWWRIRTGRCQAKDLGLQLNPAPAN

SEQ ID NO: 359598 - protein, 431 aa, unidentified
MDEVDRNRLEEFRQLRQEVRHSEEYLIVGIDIAKDRHHAFFGTATGKTLLKRLVFSNDYEGFRKLLDQAEALRVRHGLKKVVYGMEPTANYHKPLGEFLIHLGRCVVLVSGVSVKKNRETLDGRWDKHDVKDSANVADLISQGKCLYCLYYEYPTAQLRGLRGLLSLKRRLKKQEHGYRVRIRNHLIAQYYPEMDRDYERLGAEGLSIVRWCFPPSQIALLDVEPFIERVTSRRIGIEKRRRLEAIWEKAGESIGCDGVPGVDHEARVMVEGLRLIREMIRETEDKIRELCKEFLEYPYLLTIPGFGPDVSSKVLGAIGEPDRFQNGKQVLKLSGYDLSADRSGKDSDKAIPEISKRGKADLRYALYQAALIASTRNRDFMHYYTKKLQGREKEKGIQRKMLVKLSAKMLLIAWTLMKKKEAFDPAYLNAE

SEQ ID NO: 359599 - protein, 382 aa, unidentified
MNRIVKIGMDVHSTNYTLCAMEPVLDGEDRIFTNIQVTPDYKNVLQFIENLKNKLGSDDSYSIECGYEAGCLGYSLYHQLTSAGVKCVILAPTTMLTQQGKRIKTDKRDAVMIAQCLSYGGYHAVHVPTNKDDSVKEYLRMRDDHKLALKKIKQQINAFCLRHGYFYPDTKWTIKHLQWLRKLEVKDLFRETLDEYLASYDEQTAKIERFDKRIEELASDPDYKDNVRKLGCLLGVKTHTALSLIVETGDFVRFRKGSTFAAFLGLAPGESSSGEHINRTGISKAGNTHLRRLLIEGAKGICKGRVGHKSKELRSRQAGNSAEVIAYADRGNTRMRSKYYRMIRHGKKKNVAVAATARELACFVWGIMTNNIDPHTAGKKAA

SEQ ID NO: 359600 - protein, 385 aa, unidentified
MNATVNPAPIQTDLGAIFVSLELSRSTWLVTSLSPASGEKMSKFSVIAGDAADLLSRMSVLRDKALHRTGRAYPIITIQEAGLDGFWLHRLLTREGIESNVVDPASITVSRRRRQAKTDRLDGETLLRTLMAHKRGEPRVCAMVHVPSPEEEDQRRVSRERKTLTGERVTHVNRIKGLLYSQGISGYEPLHKDRRKRLDELKTGDGRDLPVHLKRQVSRELDRLELLLEQIKSVEAERNAFLGSQVKKANQPQVEMLLGIKGIGAEVATILWTEALYRHFDNRRQIASYAGLAPTPWQSGSIDREQGVSKAGNPRLRVTLVQTAWLWLRHQPNSALSKWFRERTQANHGRRKKSTIVALARKLLVALWKYVTSGVLMEGVITNKV

SEQ ID NO: 359601 - protein, 392 aa, unidentified
MYIVGIDIGKNHHEASIVSPEGKQIGRSLRFATTHKGADSLMSFIFKNIGNSPCVFGMEAIGHYWYPIYSFLKAKGYTICVINPIQSDSLRKMYIRQTKNDSIDSFLIAEVIRFGQFGTTSMADENILAMRQLCRYRDSVISSRTEIKLRIGTIMEQIFPEYEKQFSSLWMSTSMGILEKYLTPENIENAPIDELFEIIKDKSHNRLTKAKAISIKEAAADTFGIKIAQDAFSFQLKQLIDRMNFLDKQIEALDCQILEYYEKFDCYLHTIPGIGMIAAAAILAEIGDINRFKSSSALVAFAGIDPTVRQSGEFSSTHNHMSKRGSPYLRHAIFLAATTCSFHNSPLNAYYKKKREQGKHHLTATGAVARKLTTVIYAVLRDGKPYEPKKFC

SEQ ID NO: 359602 - protein, 370 aa, unidentified
MKKLIMYVGLDVHKNSIEVAFADAGRDGEVRSYGKIDGNLTALDKVIRKLEAKGSELHFAYEAGPCGYEIYRHLSSNGYDCIVVAPSMIPRQSGNRIKTDRRDAQMLARLHRAGELTSIYVPALEDEAMRDLTRAREDAKSVEKKAKQRILAFLLRHGYRYSGKTPWSKAHFRWIAILKMPHPAQQIVLQESLDALSECTERVNRLTEQIQRLLPQWRMFPVAQALQTLRGVSLIVASTTIAELGDLTRFASPVELMSYLGLVPSEHSSGEQTKRGSITKTGNGHVRRVLVEAAWAYRLPARVSRALLLRQEGMSQNVCAISWKAQLRLCNRYKRLLERGKAKQLIITAIARELCGFMWAIAHEVETPSS

SEQ ID NO: 359603 - protein, 350 aa, unidentified
MRIIGCDYHPGFQQIAYVDTETGECGERRLQHREEAEKFYRDLAAQGKKVRVGMEASGQARWFERLLGELNFELWIGDAAVIRTKRVRKQKTDRQDAQLILQLMMEDRFPQIWVANWENRDLRQLLWHRHRMVQARTRIMNQLQAVALNEGLRCKKRLWREAGREQLEAFPLAPWASRRRRDLLELLDRLSPTIAELTQTIEQEAEKCPAARRLRTHPGVGSLTALAFVLIIGRAERFQCGKQIASYLGLVPSEESSGDRRRLGHISKQGNTLLRFLLVEAAQVTVRSLPEWRSKYFHLAMRRGRKIAKVAMARKLAIQLFWMMRKEWDYEQVNRFGPHAGQPEHRDGVL

SEQ ID NO: 359604 - protein, 422 aa, unidentified
MQNNISRKLGQLRPGDLMVGVDPHKHKHAVISMDQRAVVGTRFKISNDRKGFEHLLMRVEQETGKVGASGIIFAIEAGGHYWRNLAYYLEEQGIPFRLINPFTLKRAREGEDLNRRKNDYRDAIMAAELLRMGKFTETHLPQGDYAELRALDRCHQRLKNEQSRSINLLRGLLDGLFPEFCQVFKDPSGQSAMSVLSTIPVPEAIASVSPEEFIRLVRSGHQGGRLAVGKLVSLHQLASVSVGVRAGALGVATEIRLLVERLRLLAGQVKQTEGRLLELVGKLPEASYALSIKGLGKLAVARLIARIGPLGDYGNAKDLIKLAGSNPTQSESAGKSRSHTPMSKKGRSDLRGLLWQVAMSLLRHNEEFRDWAKGMENRSAGANPLHRREIVGAAMNKLLRLYFALVTKRQMYRPASRLLVAA

SEQ ID NO: 359605 - protein, 399 aa, unidentified
MIGIGIDISKNKSTVSAINDTGEIIMKPQEFKHSENELNKLIQWIKDQEDTVFVVMESTGHYHYPVLKKLYEEGIYVSVVNAYLMKKYGDIEIRKAKTDKKDAIRIAKYAIEKRFSLKKYEGEDEKYNDLKFLSRQYNQIVSIRVRAKIQFNNLLDEIMPGINKILTRTTGNSSKILYDFVEKYEHFDNIKRKGEQKFIKEYSAWSKKKGYRNGAIKALKIYELAQNSITTRSANNSTYIALKNCIKILRETEESSNSILTQMQTIAYTLPEYKIVRELKGVGDKLAPRLIAEIGDVRKFTSAKALNAYAGNDAPPHQSGQFEGTKRHISKRGSSSLRKVGYEIMMALKVTKPTEDNAVYEFMIKKESEGKAKNVAKMAALNKFLRIYYTRVMNLYKTL

SEQ ID NO: 359606 - protein, 369 aa, unidentified
MEKRIKYIGLDVHKNSIAIAIADQGQDQEVRFYGTIINRMDLFDKFTRKLISDGSELRFVYEAGPCGYQLYRHLTKKGFECMVTAPSQIPKKSVSRIKNDRRDAIDLARLYRAGELTAVYVPNAEDEAMRDLSRAREDAKFATRKAKQQLGGFLLRNGHIFTGKSNWSKAHFNWIADIKLAHPCQQITLQEYVDAVQTGCERVDRITEQIQKLTKTWRMAPVVKALQAMRGVSTIVATTTVAELGDLGRFDHPQQLMAYLGLVPSEHSSGEKVKRGAITKTGNGHVRRVLVEAAQAYRLPARISRVLLKRQDGLSPQIREIAWKAQLRLCQRYRRLSGRGKPANVVITSIARELIAFMWAIAKQVAPVV

SEQ ID NO: 359607 - protein, 402 aa, unidentified
MNCVGIDVSKGKSMIAVMRPFGEVVVSPFEVLHTDSELSELARLLKSLDGETRVVMEATGNYHAPVAWLLHDAGLYVSVVNAMLVHDYGNNSLRRAKTDKKDAVKLANYGLDHWLTLPRYVPDEDTRLMLKTCYRQYQQYSKVQTMLKNNLISLLDTTFPDANRLFASPPRADGSEKWVDFVDAFWHCECVCGLSEKTFITRYQKWCRKHGYNFNENKALDIYASACGHFGVMPKTDTTKLLVEQAISQLRATSAALAALKQEMQSLAASLPEYPVVMGMFGVGPSLGPQLMAEIGDVRRFHSKKALVAFAGIDAPPYQSGQMDVRSRSISKRGSASLRRTLFLVMSVILQRAPMDEPVYQFMSKKHSEGKPYRVYMMASANKFLRVYYASVKAYLDSMEYD

SEQ ID NO: 359608 - protein, 458 aa, unidentified
MYRELQPFREALSHELRTSLFPAVAGVDPSKLLETYLDRLTMYTGVDVADQTFTALALDAGREILGSLDGCANEPDGFQRFLSWARALRDQHGLRILAVAGETTGIYYWALWDFLGEQSDVARVLYNPRTTEHMGEVLSKKVRNELVDSLLLAEQLRLGSTPEVLLQDNADLLTARYYSRAARDLAQQINRKKNQLRALLRAYCPPVCQVFGGQKLHHPAVYALLQEHVFPTEFVQAGAEALTTILTTHCRDMFGPAEVDQLLAASRQAITRSIGQDAIHHLVRAYIQDITTFQERKALYLKAGYALIKERKETELLRTVKGAGVSNTLALVSEIGDVTRFSSGEHLASFLGLTTSKHISGATLFQSKRITKQGSPNGRYAAVNVAQHLTQRVPRYQAMYTRIKGRKPPRKGHFIALVAVARDFVSNVLYDMWLDQRPFFLEVSDYRSYRQKHLRSND

SEQ ID NO: 359609 - protein, 345 aa, unidentified
MEPMYYIGLDVHKRKISYCVKDSCGKFFAEGLLPATRLDLDLWMKTLPQPWSAAMEATMFTGWIYDHLRPHAAALKVAHPLMLRAIAAAKKKNDRIDAGKICDCLRCDFLPECYMASTAIRERRRTLRYRNLLVRQMVQMKIKISALLMEAGVSYNKQRLHKAGYFRELLATNPDIDEGLCSLLRLCRETVVRLGKTESALVRSLERDSLLVERVERLMTIPAVGPITALTWALEVGDVQRFSSIKKAISYCGLCGAEKSSGNTVQRTPLSKQRNKHLQTTLIEAAKMAPRNSPELAILYDKEKQKGNANRATLAVARKLVAYLMAVDRGQRNFQIAETSSNIAA

SEQ ID NO: 359610 - protein, 337 aa, unidentified
MSLEETTIAVIDETDNLVWRGSVASTPEAIAAALRKHAPRAERIGFEAGQLSSWLYHGLKAKGCPVICIDARHAKAVLSLKVNKTDPNDALGLAQIMRVGWYREVTVKGHDCQALRALLVARAQIVSQITTVKNCVRGILKTFGHVLPKKLRATYIASAREIIEGHATLEPILMPMLRTLAATMEQLQVYDRAINRFARHSETARHLMTAPGVGTVVALAYITGVEAPARFSRSSAVGAYFGMTPRRYQSGEVDHAGRVSKCGDGMVRTLLYEAAKVLLSRSAKPSDLQAWGHALARRSGKKKATMAVARKLAVILHRMWTTGEPFRWTAAPAPTMA

SEQ ID NO: 359611 - protein, 340 aa, unidentified
MGSVTTIGLDLAKNVFQVHGVDAEGVAVIRQRLTRGRMLKFFAKLPRCLIGIEACATSHYWARELVALGHDVKLMPAQYVKPYVKRGKNDAADAEAICEAVTRPTMRFVGIKSPEQQSAMMLHRVRLILNRQRTQLSNAMRAHLAEFGIAAPIGRNGIEQLLDVIADPTDERVPADARFCLEMLAAQLRIVKEQILENDRRILASARETELGRRLMEIPGVGPLLASAIIATVPDPAIFRSGRNLAAWIGLVPRQNSSGGKERLGGITKAGHQYLRQMLIVGAMAVVRYAERNGAKRPWLVQLLARRKTKVAAVALANKNARMIWAMMASGERYREPQVA

SEQ ID NO: 359612 - protein, 504 aa, unidentified
MTFPPWEPAFWLAIPLRKSVNPFGGDLCFGWLGSLRLYLYKPLGCVSTLWKWMPAGKDITMHYQKVLKMPESIPYLSVGFDVGADFTWMSIMLPNGILIGKPFKIIHSDPQSRELAISKIKEAQEMYSLESRCFLESTGIYHIPLLCFLRDKGFDCAVINPIITKNSTNMNVRKLHNDKFDSKKAAKVGLDASLKASIVPDDAIIDLRNLVRDYYYFKDLQSAIVLKLHAELKVSFPAYLNVFSKVTTQTSLKLLEAYPLAADMLAAPKDELVEIIRSTARFGETYALARYDAICTAAKDAAVFGRALPSNALRIRLYIKMYREYQAHLDSILEELHQAVGKLEGTPDYDRISFIQTLHGVGFLSAVVLIAEMGSFDLFSSPKKLYAYFGLDPGVNDSGKFHGDRVHMSKRGSSLARRILHMVAINNLKVDKATKTPVNPVIYDYYTRKCASKKKSVAVGAVMHKICNIIFAMLRDNKPFELITPEEHRERYAAEHPESVNTAA

SEQ ID NO: 359613 - protein, 487 aa, unidentified
MSRHKRPPATAEPAAQPAWPPRSQAPALSILNPNAAGIDVHSDMHMACVPARSVVPPAPDTAGGLPANVRRFGANSCDLAAIADWLKECGVTTVAMESTGVYWVPLFELLQSRGFAVWLVEPGQLSRCGARPKTDVLDVQWIQRLHSYGLLQPSFRPPDSLMALRAYHRQRQMQIRYAATHTQHLQKALEQMSVKLTEVVSDITGLTGQRIVAAILQGERDPHKLALLRDPQCKNGVATIAKALEGTWRPEHLFELRQAYDLYRFHHEQIAQCDAMVEAELRRFPSRAGEKTLAAKPRRCGRKPNDLSFDARGPLFQALGVDLTEIDGIDVGTALVILAEIGVDVSRFPTEKHFASWLGVCPRQYESNRTKKKRGPRKGKNRVAVALRMAAQAWGRTRSPLGLFYRRIKSRVGGKGAVTATAHKLACLVYRMLKYGKDYVRQSMEEYEQQVRKQMGRSLHRKAAALGYELIPKGPAVPEPKVGPVLA

SEQ ID NO: 359614 - protein, 339 aa, unidentified
MFMIGIDPHKGSHTATAVDASEAVVGEIRVEADRHQRARLLEWAAAFEPRTWAIEGATGLGSMLAHQLVGAGEHVLDVPPKLSSRVRLMDNGRIDKTDPNDARSAAIVALRNASLNTVTGEHEDRVILRLLADRYHQLTAQRTRSVCRLHAVLCLLIEGGTSRSLTPARATKLLANVEICDAITFQRVATCGDFVTEIATYDKALADTRTRTVAAVLASKTTVDEIYGIGPIGAAIILGRSGDIRRFPTAGHYARHNGTAPIEASSGPKARHRLNPRGDRQLNHAIHTAALTQVAHDHPGRVYYLRKQAEGKTRKEAMRALKRRISDVVYRQLTADTRD

SEQ ID NO: 359615 - protein, 408 aa, unidentified
MDAFCGIDWAEDHHDIALVDRDGQLLARARISDDAAGLARLLELLAEHGDSPEEPVPVAIETPRGLLVACLRAAGRQVYPVNPMAVARYRDRHSVAGRKSDKGDALVLANILRTDLHAHRPLPADSELAQAVAVLARAQQDSVWDRTTAHNRLRSHLREYYPGFLAAFAAAKGGIMRPEARTILAAAPTPAGAAKLTLAQLRALLKKAGRSRGIDAEAQRLREAFRAEQMRQPPLAGDAMGRQSLALLRQLDAACTSADDLEQAAIESFNQHPDAGIITSFPGIGPLTGARVIAETGDDRSRFQDARGLKAYAGAAPVTRASGKTRSVTRRHVKNNRLAQAGYIWAFSALTASPGARSHYDRRRDHGDRHAAAQRNLFSRLLGCLHHCLVTGQHYDETTAFPAQAAAA

SEQ ID NO: 359616 - protein, 392 aa, unidentified
MANYFGDILYDPFEFTNSVSGVKMFHTILKSINSSIKAQKVIIGLESTGHYYENLYRNLISLGYDVAMINPTSVYSQRSGQLNWCKTDEIDLCAIGQVLIDNQATETRLPEGLYYNLKQLTRLRRDEVRKRARLKNQIRVLCDHIFPGLQKSDIFSDFWGKSSILLLENYPTPSSIIRLGTKRLARFFKKHNTKLGLYTAERLVNLAKNALSVDRVNLEAHLLNLRFKIADLKTANEKIRKLNLEIARYLVHTPGILLLSIKEINVPSAAEYLGEVGPLGQAGSAKKIIARAGLNPSRFQTSEYERANNPITKRGSNPLRNISLIISQNLLGLNPHSSLAYNPYFREFFDHLVGEGKEKRLAKVACGNKFIRVSWPMMVGRKLFSPPYLEKE

SEQ ID NO: 359617 - protein, 351 aa, unidentified
MDHIGIDVHKRESQIYILAEGGEVIERRIRTEPERFDAVLGTRPRARIVIEASTDSEWVARCLEALGHEVIVADPNFAPMYATRTRKVKTDRRDARALAEACLLGAYRPAHRLSDPQRHVRGRLVVRDALVRTRTRYISIIRALLRQHGYRVPSGSAEHFVHRVQRLPLPGRLRSVVAPLLALMRPLNAQLTYSDATIEHLAVQDPRLPRLRSVPSIGPVTAAAFLAAIDDAQRFPHAHQLEAYLGLVPGERSSGETQRRGAITKAGHSRTRWLLIQAAVSILRRRPPQAEDLRTWAVRIAARRGKQVAVVALARRLAGILYALLRDGSIFEPQRVRPPRPPAAAAAPVGM

SEQ ID NO: 359618 - protein, 408 aa, unidentified
MGRAAEVVAPSSSIRIDGGCPVAQVNDLSRSLTAFDLISTLVVVVEMSKASWLVSGAVPGVERQPLKKLEPDATALLRLIERWRNEAVRAGRPISRIALAYEAGRDGFWLARWLIARGIEAHVIHSASVAVSRERKRAKTDRLDAAMLMRVFLGWLRGERGHCGMVAIPTMEEEDARRPSRERESLINERSRITNRMKSALARLGVRGFKPHLRKAPERLAGLRTAEGTGLPANIIEEFRRDMARLALVREQIDSIEKTRAERLKRAPDTGPHAMVRLLARVIGIGIETADMLVREILSRKLRDRRAVARYAGLTGSPDESGLKRREKGLPKAGNARVRRGLIQLAWRFLTFQKDSALARWYRTRTEGPSGARKTTMIVALARKLLIALWRLVTTGEVPDGVELRPAG

SEQ ID NO: 359619 - protein, 314 aa, unidentified
MSSPSCYLGVDVSKNTLVVAGSGRRWQFANTKDGHRKFIAQIKKLSGSGHVVCESTGSYHLSMCLALQEAGLAFTVANAARIHYFGLSEGIIAKNDPIDAGLIERFANTKQPLADPPLCREQLALSESVTHRQQLVEMIKVLRTHRQQVLHAPLVTEIDKSITALEKRLEALERKLRAQVDAHPLWKKKLALLVEVQGIGFITALSLLAKMPELGTLNRGQCAALGGLAPYDNDSGKHQGKRTIRGGRKEVRCALYMAALSAAQFNPILKTFYQRLLAQKKLAKVALTAVMRKLLIYLNPVLKNISTPPLTTAS

SEQ ID NO: 359620 - protein, 342 aa, unidentified
MTELSIIGLDLAKNVFQAHGAGSDGSVVFRRRLSRQQVLTFFAGQPCCTVAMEACASAHHWGRAMAALGHEVKLIPPAYVKPFVKRQKNDAADAEAITEAASRATMRFVAVKTEAQQAAAMAYRTRDLLVRQRSQIVNALRGHLAEYGVVAPVGLVHVGRLEALIEGEEGVVPEPVKSLAKMLLMQAAGLTEQIDLIEKQIRRRVHDDAAAKRLMTIPGIGPISATAITTFAPPAETFTKGRDFAAWVGLTPRQHSTGGKERLGRTSKMGQRDIRRLLIIGAMAVVRWAARKGAPEGTWLARMLAKKPRMLVAVALANRMARVAWALLRKEEDYKDPAVVAA

SEQ ID NO: 359621 - protein, 418 aa, unidentified
MKVVYPICCGVDVHKSFLVATLITSQGIIPHYSKKRFSTFNNSILKFKQWLIDNNCYDVCMESTGKYWVPIFNLLEDTVHITVANPKWVKAVKGNKDDTKDSKWIGDLFRLGLVPGSYIPEKPIRILREYTRYRSKLVSCRTSEKNRFQNAFTVCNVALDAVVSDMFGKSASSITDYLISSDTFNPGYCTSLLQKSLKKKADAVVESIEGYQMTQEQKERMVMIRSHLEYVTKCIVELDLKLDNMVESYESAIRLLCTLPGVDRTSAITIISEIGTDMSQFANSKRLCCWAGLTPGNNESAGKKKSVRITRAGVYLKPALVQVAHAAVKSDKSSYYRIKYERICKRRGKKRAIIAIARMILTAIYNMFVTGEEWNPSDLYKIDMPQEMLEKQKEKAIKQAVKLLISNGVIKAADISVA

SEQ ID NO: 359622 - protein, 351 aa, unidentified
MTVIGIDAHKATHTLVAVDHRGRKLGEKTVPANSTGHVRAIRWAHATYGTHDLIWGVEDVRNVTARLERDLMDTGAVVVRVPAYLMARVRGSHRIAGKSDPIDALAVARAVLQEPNLPYARHDPHSLTCKLLTDRRDNLVRHRSATMTRLQWRIHQLDPTQDISQGKLRRRKHTNNLLGWLATKDGVLADISRDEVHEIEQLSEKISVLDRRITAYVEDVAPSLLALPGCGALMAAKIVGETADVTRFRSESAFARFAGVGPLPNWSGNSIGTMRGHRSGNRQINMALQRIALVQIRLGGPGATYYRMRTEAGDKPSRARRCLKRHLARAVYRALRADRQEAKGTVPVGVR

SEQ ID NO: 359623 - protein, 367 aa, unidentified
MKSIVYVGMDVHSEDNCMAVYLDDRGEPEYESTIPNTEAKVQRFFQKLKEKYPDCTIQTIYEAGPTGFVLYRKLKEVGISCLIAAPSLLPHAPGDRLKTDRRDAKSLAKALRSGMATPCHVPSKEFEAVRDYQRMVADTKDAVGTAKKRLIMLLHRQDCPSYEGTYWTQRHLQWIKTVSLDPVDRETCDEYLMMVKELQDRLARQLVRLEEFAAMKEFSEEVAKLKCFKGISTQTALAFVTEVEDFQRSPTARSFMAYLGLVTSEHSSGGRRVQGGITKAGNRHVRSLLVESSWHFRYPFVQKSRALKERQQHQDIAIVSYANKANNRLTRKFSKMTYRNKSTKTTVVAVAREMSGFVWGMMTGNIV

SEQ ID NO: 359624 - protein, 398 aa, unidentified
MITSDVDIFLGLDVGKTDHWACAVTKDGTKIWNKTLPNDEAKLVSVYQKLMTQGTVLVVVDQPATIGALAVAVAQHLGIPVAYLPGLTMRRIADMYPGTAKTDEKDAFIIADAARTMPHTLRSIQVSDEDEATLGMLTGFDLDLARQITQTSNRIRGLFTQIHPPLERILGPWLEHDAVLEVLASWPTPAQLKHAGKARIDAKLKKQGARRHTAWAGAIMDALYEQTVVVVGTDAAGLVIPHLARQLISLHAQRVDVATHLETMVEAHPLYQVLTSMPGVAVRTAAIIIAETSGKTFPSAAALSSYAGLAPTTRQSGTSIKSERVSHSGNKRLKRALFLSAFASIRFDPTSRAYYDRKRAQGKRQNQALIALAHRRLTVLFAMIRDGSLYDVPELKIA

SEQ ID NO: 359625 - protein, 332 aa, unidentified
METQVASQWVGIDVSKAKLDIALRPANKVLQVTNQESGWQELSEQLKKYKIELIIIESTGGMERGVAHKLQKEEFKVAVINPKRARDFAKASGRLAKTDKIDAEVLAHFGEALQPSPKPLASESQVALSDLVNRRSQLVEMLNSEQKRAHSVRSSTAKADIETNIQWLKQRIKGMDEQIDQLRQDNEESKKQYELLTSVPGVGRVTAVTLLSMLPELGELPLKKLSSLVGIAPMNCDSGQMRGKRRIIGGRARVRAVLYMSALVAIQHNPVIKAFYQKLLQAGKAKKVALIACAHKRLGFLHAIVKSQKPWRCPENIETRGIKRHCARSLLM

SEQ ID NO: 359626 - protein, 316 aa, unidentified
MGGPGIYVGVDVSKKRLDVAVRPNGEGFAEANDKRAVSHLVKRLEALNCTRVVVEATGGYETVVVGALYAAGVPVVVVNPRWVRNFAKGMGWLEKTDRIDAKLLALYAERAELKVQQLPDEVTRRLAELCARRIDVLEMIETERNRLEHASSAVRRAINSHIDYLRKQLKSIEHDIDGAVRGSELWRHKNELMDSVPGVGPTLRACMLAWLPELGQLNRGEAGKLVGVAPLPDDSGTIRGVRRIFGGRAPLRKVLYMATMGAMQHNPHLRAYYDHLRARGKPHKVALVATMRKLLRILNAIIKNDTPWSEPCPANA

SEQ ID NO: 359627 - protein, 368 aa, unidentified
MHKETIVAAIAKAGRGDAMQYGEIDSTAEAIQKLAKKMSANGERVLFCYEAGPCGYGIYWQLKEMGQECMVVAPSLIPKKAGDRIKTDSRDAVTLARLSRAGELTAVWVPDKEQEAVRDLTRAREDMKVMEHHARQQLGAFLLRHGKRYFGKSAWTQAHFRWMEDLRFEHPCQQIVFQEYVDMVKHAQGRLEALEQQMLAVLETWSMREVAIALMALRGVKLIAAMTILAELVDLSRFESAPQLMAYLGLVPSEHSTGQKKKRGGITKSGNGHVRRVLVEAGWSYRFPARKTAALQRYAEKTSGEVQEIAWKAQKRLCMRYRHLLLKGKLKVEVCTAVARELTGFIWAIACEVMKKRGIKTITKAKAA

SEQ ID NO: 359628 - protein, 388 aa, unidentified
MHPTGPCPEQDPPRDRHHQATLYASLELSRSTWLVTSLAPGDRKMSKHSVAAGDGAALLALLARLRGRVERSAGGPVGVVVVQEAGRDGFWLHRLLEAEGVESHVVDPASIAVPRRQRRAKTDAIDGETLLRTLLAWRRGEPRVCAMVVPPTPGEEDRRRLTRERGTLLEERTRHTNRIKGLLAGQGIYDFEPLRPDRLERLGALVTGDGRPLPDRLRAELRRELERLELLRRQIAEVEAERDAAAAAESEAGPSPVALLAGLKAIGPQTAAVLYHEGLYRSFANRREVAAYAGLAPTPWRSGKVAREQGISKAGNPRLRHAMVELAWLWVRHQPESAPSRWFRARVGQERGRVRRVAIVALARRLLVALWRYLAHGEVPEGAVLKAA

SEQ ID NO: 359629 - protein, 403 aa, unidentified
MNAVGIDVSKEKSTVAIYQPGNQVILNPHDFHHTQSDISSLIRIIKGLDGETKVCMEHTGRYYEPVATWLSDAGIFVSAVNPILIKNFGDDSLRAPKTDKADAKKIARYTLDRWTNLKQYSHMDETRNQLKTMNRQFGFYMDQKTAMKNNLIALLDQTYPGANTLFDSPARSDGSQKWVDFVYTYWHVDCVRGKSLAAFTEHYKNWCKRKGYNFSAAKAEKVYHKSTDLIAVFPKDANTRMLLHQAVDMLNLASKTVESLRTEMNQTAATLPEYPVVIAMNGVGPTLGPQLIAEIGDVTRFVKRGSLTAFAGVDPGKNDSGNHSQKSVPISKKGSPHLRKTLFQIMNGLIKRSPVDDPVYAFMDKKRSQGKPYYVYMTAGANKFLRIYYGRVNEYLSTLSEGE

SEQ ID NO: 359630 - protein, 387 aa, unidentified
MIYVGIDIAKRTHYASVMNSDGEILAEPFPFTNDLAGFQKLLSCIGSFPKEQLLIGMESTAHYAENLTCFLFSRDFQVCIINPIQTASLRKSNIRKTKTDSVDTFLIIKALSLHDYRRFSKRDYDSLQLKNLCRFRQKLMKARTKVKIQLVSYVDLIFPELQYLFKSGIHTKSCYALLKTESNPDRIAKMHLTRLSNLLKKTSKGHYTKNHAIALKELASQSVGIKDDTLSLQILQSIEQIEMYTQQISKVEASICEIMDHMDSVIKTIPGIGNLNGAMIIGEIGDISRFEKPCQLLAYAGLDPSVYQSGKFTAARTRMSKRGSKLLRYALINAAWQLTLNNETFKAYYDLKVSQGRRHYNALGHVAHKLVRVIHKMMTDNLVFDLD

SEQ ID NO: 359631 - protein, 424 aa, unidentified
MKVTYQTCCGVDVHKSFLVATIVKTSGGIEPSYQKKRFSTFNNSILEFKQWLLDNDCHDVCMESTGKYWVPVFNLLEDEINVVIANPKWVKAVKGNKDDTKDSKWIGDLFRLGLVKGSYIPCKIVRILREYTRYRYKLVSCRSSEKNRYQNALTVCNVALDSVVSDIFGKSSTSIIDYLLEQSGTSINHEEIASKLLRSLKSKEDAVIQSVEGYQMTDAQKYRMRLVRAHMDYITAEINDVDKMIENMISSNSDFENAVQLLCTIPGVKRDSAITIISEIGTDMSQFSSSKRLCCWAGLTPGSNESAGKKKSVRITRAGVYLKPALVQCAHAAVKSDKSPYYKKKYESLVKRRGKKRAIIAIARMILTAIYQMLSTGEQWNPSDLYKIDMPEALVEKQKAKAIKQAKKLLQREGILPPDEPLAS

SEQ ID NO: 359632 - protein, 411 aa, unidentified
MHATCGIDWAEDHHDVAVVDSGARLLGKLRISDDAAGFQDLLHLLAEHGDSPDDPIPVAIETSRGLLVACLRASGRRVYAINPMAVARYRDRHAVSRKKSDHQDAVVLANILRTDVSLHRPLPHDSDLVKAIAVLARAQQDAVWDRTRAHNRLRSHLREYYPAILEAFAAKRERLLSREARTILAIAPTPAEAARLTRHRLRTAVIRAGRQRRIEAETDRLLEVFRRTWLRQPALVEQAMGRQTLALLAQLDAACQACDDLASDTEELFLQHPDAEIITSFPGLAVLTGARILAEIGDDRSRFVQAGNLKAYAGSAPVTRESGKSRRVVHRRIKNSRLAATGRHWAFAALTASPGAHAHYNRRRDTGDRYHAALRNLFNRMLGQLHHCLTNHQKFDEAIAFSPSAPLAAAA

SEQ ID NO: 359633 - protein, 366 aa, unidentified
MLYLGIDQHKRQLTVNLRSEDGSVILKRQVSTQWEKVRAFFADLADKARPDGGFLAILEVCGMNDWLLKMLDEYGCREIVVIQPTERAQQKTDRRDAGELAHLLWIHRQQFLDGRHPLGLRRVQPPTPQEAADRQLSMLRTRLTRKRTAVVNGIHKLLRKHNLEHSQPTKKFRTKKVRKWLETVELPPLDRFELNLLLPQWDLLEEQLKTVDVKIAERAAADEQVQLLETVPGLGHYSALAISSRIGSVKRFKHADSLANYFGLTPGCRNSGEATKRLGSITKRGSKVVRYLLNQAVIKVLRRDGAMRTWFKRIKKRRGAKIARVAVMRRLATILWHMLTRRQRYRYESPIQRHRGGGACVQMAAG

SEQ ID NO: 359634 - protein, 388 aa, unidentified
MSKPFDLSKSLTALDQDSTLIVVIEMSQSSWLVAARAPGLARDPLKKLPPDPEQLFKLIDRWREESRRAGRVVRRVCVAFEAGRDGFWLARLLRQHDIEAYVIHPTSIPVKRDHRRAKTDRLDTELLMRAFLGWLRGEADHCSMAAIPTLAEEDAKRPTRERESRVNARSRLVNRMKGALARLGIRGFNPKLRKAAEKLEELRTGAGEPLPPNTLAELRRDMAQLRFVADQIKQIEKAREARLEKAPREGAHPMVLMLASIKGVGLETAEMLVAEVLSRKLRDRRAVARYGGLTGSPDESGSRSREKGLARSGNARVRRGMIQLAWRFLMFQKESALAKWFEARTANGPRGVRKTMIVALARKLLIDLWRFVEDGTVLVGVELFDSRA

SEQ ID NO: 359635 - protein, 390 aa, unidentified
MYYIGIDASKFKHDCCIAHDNNIIPIKKFEFSCTHEGFSYFLNELNSIDLNEEYKIGLEATGHYHETLIKLLLDNEYHFAEFNPLIIKRLADGLSLRKTKTDPVDASFITRILKFVDYKTYHVDYNTKALRNLTRMRSRLVKNRSNFLVQVTNILDLIMPEFKGFFSSSNDFTATSLFILHKYPSVEKMKTIDLMCFEEIRKTSRNSFNLSKYYKFMNLVENTIGFSSPISEFQLQMYLNLVDEYNKQIKLLEHEIINKIKEINPFFLSIAGIGPLSAAVILAEYGNINWFNNPGQLLSFAGVEPSIDDSGTQSHTGHMVKHGSGYLRETLMNLVGPLILQNPVISAYYYKKRSEGKSHRTASTHVVRKLLRYIFFLETHQIYYDPTKAK

SEQ ID NO: 359636 - protein, 307 aa, unidentified
MTAVGIDVGKASLEVAVEGVSGVARFANTRAGIGKLVRRLQGVSDVRVVVEATGGYEDALIEACCDAGLWVSRINPRQARDFARATGELAKTDAIDARLLCLLSKLFADRLRRHQAPAAWQRELRDWLRRRGQVVVALQAQQQQASMAPAAVRRLMTRTVMALKRELAAIDQAMQALVKAHATPALRSSKGLGPIFQSSMLALLPELGRLTRQQIAKLVGVAPMNRDSGQSQGKRRIRGGRAPVRVALYMATLSAVRWDPLMKAHYQQLRARGKLGKVALVACMRKLLGIVNARRREELQAEAAMMA

SEQ ID NO: 359637 - protein, 414 aa, unidentified
MKAWNEHTHFAALDWADDHHELVVVDAGGQSVVELTFPHSAEGWQQAQQALAQWPELPVAVETSAGPAVDQLLQRGFRVYPVMPKAAVRYRERKRPSGSKDDLHDAWSLADALRTDGHGWCALSPLDPLSSELRALCRDEISLIEQRTALVNQLQAALKEYYPAALQAFDDWTNPSSWDFVLAFPTPAALAAAGRRKWEKFLHTHKLWRPQTAAERMEIFAAANQFRGGVAITAAKSMLAQSLARLLQTLEQQLRAYRARIQALFEQHPDHELFGSLPGAGAKLAPRLLVELAGVNWTLISQVQARAGTAPVTYESGKIKRVKIRRACIHWLRATLHLWADQSRKYSAWAGALYQAHRDKGQSHACALRCLAHRWLEIIGGMIRSRTPYDAEKHLAQIRKHGSYVLKLISETGE

SEQ ID NO: 359638 - protein, 386 aa, unidentified
MQTVAALIPAAVDYERTLVLAIEVSNESWVLAAQVPGLPHTKAKRTINPDAESLMTAIAGYRARAAAIGHSVERVITVYEAGWSGFWLARWIMRQGMEAYVIQPSSVPVDRRMRRAKSDGIDAELLLRTLLAWLRGEPRVCSMVPIPDEADEDARRCVRERTELISERVGLTNRIGAVLATLGVSDYNPLLRNRHRRLTELRTGLGEPLPRNAQAKIERLLARLELVLAQIAELERERDAVVEAEASDKASKMIQQLTKLRGIGVQSATVLVREAFVRRFANGKTLGSYAGLASSPYSSGGIDREQGIGKAGNRRVRTVMVELAWLWTRYQPGAAQVRWFRERVGSTGRRARKIMVVALARKLLIALWRFVIDGVVPEGAILKPAA

SEQ ID NO: 359639 - protein, 429 aa, unidentified
MTRTKDTTVVTVLHPICCGLDIHKQFVTACLVTMDSMGKERSVLESFGTFTDDLVRLREWLLEHECPVVALESTGVYWRPVHNILEAYLTVVLVNPRHIKNLPGRKTDMSDCQWIATLLRVGFLKASFIPPKTVRHWRELTRYRRSLVEALGDVKRQVHKLLESSNIKIDSVVSVLFGKTGRNLMDLLAKDQTELTLQAVQTCLKGRLKTKATELFRAVQGFFEDHHRWMLREMLDRIDQQEANLARVESRLRGLLQPHDELIERMMQIPGIGTTSAYAILSETGTTLESFPNAGALCSWAGVCPANNESAGKRRSTRSPVRRNHVRTHLVESAWGAVKTKGTYLRSKYFSLKSRLGPKKAIMAIAHRILKALYYIIKHGDSFRDLGEDYLIDLRRSSITSYINRQARKLGMVLISESVWNQMIDRSPA

SEQ ID NO: 359640 - protein, 335 aa, unidentified
MDHFAGLDVSVKETSVCIVDDTGKIVREVKVSSEPEALLAVLKSPAYRFKRIGLEAGPLSQWLYSALAEAELPVICVETRHMQAVLKAQINKTDRNDARGIAQMMRAGLYRPVHVKTLRSQKLRMLLTHRQLLLSKAVAIENDLRGTLRNFGLKVGMVSKAKFERRIKELVENLPDLAVLVEPLLVVRRVLREQIGILHRHLLTIVRDDDVCRRLMTVPGVGPVVALTYRATVDVPARFKNSKAVGASFGLTPSKYQSGEIDRGGRISRCGDEMMRAMLYEAAQVMLTRTNKWSWLKAWAMQIAKHRGMKKAIVALARRLAVILHRIWIDGTEFR

SEQ ID NO: 359641 - protein, 433 aa, unidentified
MSNYYHLPVVGIDIAANFSIVTALKPDGDIYQKNLRIEHTLCGFKKLLTFLQKIEEELGDSPKVFCESTGIYHLTLLHFLVNNQVDIRVINPLITNSNKNSNIRKVKNDKLDSLSIAKICKFDNVKTSSFTCEEFLHLKFLVREYYKVVDLKANLKKTFSNNIYIHYPGLQDAFADLTGKTPLMFITKYPTPQHLLNACENEVINLLVTSSKRGVKWATKKFKQLMDIAKSAAVIGINSLLFQSKVNRFYESFTFYSHQLQSITKEIFEYLDGCSFANIFKYNLELLKTFKGIGDISAITLLVEIGNIDKFCKPQQLVAFFGVDPGINQSGNFSSDCNKMSKRGTKVGRRALYAIALASIRTNKNKVPINQVIYEYYHISLDKKKKKVKLVAVMNKLLRYIFSVLKNQKPYEIRNPKIHKRMFLESKPSLQSA

SEQ ID NO: 359642 - protein, 357 aa, unidentified
MGKSIRKLSSVTRVGLDLAKKVFQVHAIDANGEIVVARKLARGRLIRFFSELPRCVVAMEACSSAHHWGRQLLALGFEVRLIPPAHVKPYVRRNKNDAVDAAAICEAAGRPGQRFVPVRSIENQAELMRHRARELLAGQRTAALNALRGHLAEIGVIAPQGVQHAYDLKRLAVDGFDEYGEVVVPDCVRVALRPLVSQIDALDEAIGAIDKEIAMSVKADETAKRLMTVPGVGPVTASAILATIQDIGDFASGREFAAFLGLTPRQSSTGGKSRLGRITKMGDRYLRKLLVVGACSTLCHRKGHNDALRLWASGMLERKTVKYKFKLTAVALANKVARIVFVLMTRGGQYDDRPVAA

SEQ ID NO: 359643 - protein, 346 aa, unidentified
MSMTTIGLDTAKSVFQVHAVDAAGKTGIRRKLSRAELIPFFEKQAACTVVMEACGAAHHGARLLIGLGHTVKLIAPEAVRPFVKKGKKNDAADAAALCVAASRPDMKFVPVKPPEQQGILALHSARSLLVKQQTMLVNAMRGLATEFGLTVPQGVGRLAELKTRVDEDEAFPETARRVFTALLDQYGALAKSIETFEAAIVAHARNDETARRLATIPGVGPLTASLIAATVTDISLFKSARHFAAWLGLVPRQYATGGKTRLGRITKAGNQEIRQLLVLGATSMLHRAPQWNSAVGAWARGVLARRPVRLASVALANKMARIAWALMTRKEVYQAKGHGVAATQAA

SEQ ID NO: 359644 - protein, 355 aa, unidentified
MNSVRYVGLDVHRDTISAAVLNESGRLIQQSILATRAAAILDFIGGMRGTLHVTFEEGTHSGWLYDLLWRRVARLVVCNPRKNALLKSGNKSDAIDARKLAELLRADLLSGVYHGEKSALEVQHLARSYTMLTEDTTRVMGRLKAVFRSHAIACAGKKLYGRKHRDEYLSELGAGALRRRAEFLYRELEAVQQLRRQAKHDMIVECGKYPETKLLCSVPFLGPVRAAVLIGRVQTPHRFRTKRQFWAYCGLALEMRDSGEYRMVDGQVERRKKPAQVRGLNWNHNHELKNLFKAAATSAAACNGVFHEFYLGLLKKNMQPEMARLTLARKIAAIVLKIWKKGEAFNADHLNLQAA

SEQ ID NO: 359645 - protein, 340 aa, unidentified
MEKAIMIGLDIAKNVFEVHGRNAAGEVVLRRSLKRGQVEKFFAKLPKAVIGMEACGSAHHWARVLGKLGHEVRLMPPAYVKPYVKRNKSDAIDAAACWEAVGRPDMRFVPVKTIDQQAALSLHRSRNLLVSQRTQLANALRALLSEFGIVAGKGHAGLARLVDYLRAGTLDLPADAVVAAMALADQRAALDAAADALERRITAQAKADKKAAMLKTAPGVGPLSAHAALATLPDPSLFKSGRDFAAWLGLTPRLHGTGGKTRTGRITKQGNQPLRRLLVLGATSWLRQVRARPEKASPWLRGMLARRPSKVVAVAQAARTARILWAMLSHNQPYRAPAIG

SEQ ID NO: 359646 - protein, 381 aa, unidentified
MSRQLAAPAAKLSALMNKELTAESIEQESGERKCNRVLKLGLDVHYRQVTVAMQEEEGRIKAVGRMGHDGFENWVERKREAGWEIYSCYEAGASGYWLHRELEQMGVKNLVVAPKAMGQDKRQKTDRRDSAELVDQLDRYLRGNRKALSAVAIPTAEQEQKRALLRYHRQIMADRSRYEARGKGLLCAQGIEVQGKWWQPQPWKELKTHGRFQGWMQTQLQGWRRKLLSAEQEQQKLRTQIEALAPALLPKGVGAYSAVALEYELKGLARFKTARALSSYTGLCPGIHSSDGRGKEGSINRCGNAAVRWNLVEMVWRLLKWQPDYQVVRQLGAGLVRSKRARKRLVVKAARQLAIDLWRLETGQVTAQELGLVMQPSLKAK

SEQ ID NO: 359647 - protein, 411 aa, unidentified
MSTLFCGIDWGESRHDVAIIDQAGTVVSRKKITTDAAGFTDLLGLLAEVGDSAADPIPVAIETDRGLLVAALRSTDRDVYPLNPLAASRYRARHQVSGAKSDAADAVLLANILRTDAAAHRPMPADTELAQAIRVLARAQQDAVWARQKLGNQVRSLLKDFYPAALDAFAGMPNGGLARPEARTILAAAPTPAKAAKLSRIKLRALLVKAGRQRGIDAEADRLFPVLRGEQLRQPTVVEDALGIQLAALLVQFDAACRASDDLEAATREHFERHPDAAVIHSFPGMGTLVGARVLAEIGDDRTRFADARSLKAFAGSAPVTRSSGKKTVITYRRIKNNRLAAAGSIWALAALGASPGAKRHFQARRERGDWNRQAQRHLFNKFLGQLHHCLQTNTSYDETHAFPPPLGLAA

SEQ ID NO: 359648 - protein, 345 aa, unidentified
MNVLIGVDPHKATNAAAILNDHGELLECANFAQDRAGLRALERWAKRFPERRWAVEGANGLGRPLAQKLVAAGETVVDVPPKLSAKVRVLSTGNARKNDALDATFTALAALRNERLARVHPEDRTEVLRLLSERREDLVAERTRFLNRLHGLLRDLVPGGVPGTLSADRAASILRRLRPRRKWRSAAESVRRRLASELLRDVRALDRRISDLDERIRKEVEESGTSLMEIFGVGPILAAKIIGMVGNVTRFPSKAHFASYAGVAPVEVSSGEVVRHRLSLAGNRRLNWALHMIAINQARYKGQGGSYYRKKVAEGKTHREAMRCLKRRVSDAVFKKLMLDLEEAA

SEQ ID NO: 359649 - protein, 366 aa, unidentified
MESYVGLDVHSKRSVFVIEAEDGRVVARGDIPTTPAGFRQLRQQHELAAETPVALETGTVAFYAARELARVGLRPVVIDAHEVRVKAHRPRQKSDRRDAFELCEGLRRGHYRAIVHVPPAPIGALRETLSRRRHFVAVRVAEVNAVKRLLRAAGLGHLSKSLGTDAAWEKLLAALATEPALRTYVAQHHALWRCAQEQIVALEETLAAQPATITKVAARLQTVPGVGPLVSLTAVAVFSDVHRFPSAKHAASYAGLVPSTDQSGDRDTHGHITKRGSAALRTMLCEAAHHAQRPNHPLHPYFARLCAQRGYKMAVVAVAHRLCRILFALLRDGAEFDVAKLAVEEGVFRRTTVQRYRLKRATASRA

SEQ ID NO: 359650 - protein, 410 aa, unidentified
MAYKIAGIDIHKAVLMVVVLDVEAMGAAPIRRRFGTCESDLQELAAWLQQQGVEEAVMESTAQYWKPVWYELEDLMTCHLAQAFSNRAPRGRKMDFRDAERLVRRLVAKELILSFVPGPEQRGWRSMTRMRVQLARDRVRVHNYVEALLEEMRIKLSSVITDLFGASGLRILKALAAGTTDAKSLASLGDERLECSQERLEDALTGKSTKQQRELLELHLQRLELIDAQIQTLNERIAQALKPHEEAVIRLAEVTGFGVDSAQQYIAEVGPEAASFESARKLTSWAGTCPGKEESAQQNKSNRSPKGNKYVRRLLTEVAQAASKTKGSHFQQVFRRLLPRLGYKSALWALVNRICRVTWVILHNKVRFVERSPERDAKAQKQRAQSLARALRKLGYQVELKPMNPAPLRA

SEQ ID NO: 359651 - protein, 345 aa, unidentified
MLYLGLDVHGKWTTMVGFDPASGEVVRLDRVSNEPEAMGMALESLRGPLYGVMEAGTNSWAMYRQVRPFFERLVVADPAKLWDRRRDRGAKTDRRDAWRMAELLYRGEIEGIYIPDERTQDLRVLVRAKVRASRWVTKLSNEIGSLLRCWGYVGARSLLSKRGLKDLDQAQLPARSARVLALWREMLEKAQQIECELQAAVQEEAATEPACALLQTMPSVGAFTALLVRAEVGEIRRFASAKALVSYSGLAPRVFQSGDRCAYGSLGRWGNRWLRYAVGLLANRIAGSRRENALHRLYWRTCLRQHRNSAKLAVARKTMELVYHLLSHGESWQEPRQEDAIALTA

SEQ ID NO: 359652 - protein, 368 aa, unidentified
MKQQTSAATETKIKGRNIIDFTGKTIYVGIDVHEKDYQVAKVFDGICLGNHRMAANHQMLIDHLNSRYPGATFKCVYESCAWGFTLQRALNSAGIECIVVHAADVSSSDKENKRKTDKVDALKLARNLASGDLTGIHVPDEDLQKERNLIRFRKKLVGDLNRSKNRLKSLLKYQGIKIPEHLGKKNNWSYNFMNWVEQEANKDVLLKDTLLLMLEEIKFLRQLLLKTERALRKLMKERHNEKATLLMTAPGIGRTIAMQFVLEVGDIKRFHSFDALNDLIGFCPDTDSSGDMQRDRGITSRRHKQLRSALIEAAWTAIRIDPALMDAYQKLTKRMQGKYAIIRIARKLLRRMRTMLLTGQPYQIGVAA

SEQ ID NO: 359653 - protein, 312 aa, unidentified
MVHLSHGGIDVASDRLDVMLLPEGQCFWVANNAAGWAELVSRLRGLSIAAIGIEASGGYERGVIRALLTEGISVRQINPFKLRQFAKASGILAKNDRLDARMIALFVATIPTRPAQRNEAAERVAEVVTARRQLSDEKVAAENASRLFEDVGLRRLYRRRITRIALDMALLDKRLAEMVAADTTLANRYRLLTSMPGVGPILAFTLIALLPELGQMSRKQVAAIVGVAPYDFESGKMKGMRSIWGGRAPVRRVLYMAALTACRFNPALKTFHERLAAAGKKSKVVIVAVMRKIITTLNAMIRDNVAWNARSV

SEQ ID NO: 359654 - protein, 341 aa, unidentified
MKHDLNVVGIDIAKRIFHLVGLDDRGKIILRKRLMRGEVMAFMAKLPRVTVGMEACGGSHYWARQLREQGHEVKVMAPQYVKPYVKTNKNDLRDAEAIAEAVTRPSMRFVPIKEVEHQDIPALHRVRERLMGARTALVNEMRGLLGEYGIVLPQGVNAFRKGVLEKLEAEQAKLTSLSQEIFSKLFDELVKLESELAFYDDKLEAMSHSHPECQRLLTIPGIGPITATALIAAISDVDVFTNGRHFSAWLGLVPKQHSTGGQTRLLGISKRGDSYLRKLLIHGARATLRWARTKTDRRSQWIRGLLERRGWNRTAVAVANKNARIIWALLRRGGVYREGTS

SEQ ID NO: 359655 - protein, 391 aa, unidentified
MTVAKDPGRCVTRFEPKRTLIAVIEMSQSSWLVAAIVPGLKRQPLKRLEVDEAGLLQQLERWREEATRAGHTVKRIAVAFEAGRDGFWLARWLRARGVEAHVIHPTSVAVCREHRRAKTDRLDTELLKRAFLGWLRGERGHCSMAVVPTLEEEDARRPTRERESLVAERTRVVNRMRACLARLGIRSFRPTLRRAPERLEELRTPEGDALPPNTRAELQRDMARLRLITDQIRELEIARAARIDHAPAQGANVMVLLLARVVGVGLETADMLVHEILSRGLRDRRAVARYAGLTGSPDESGARRREKGLAKAGNARVRRGMIQLAWRFLRFQEGSALAQWYRTRTAEARGGSRKTLIVALARKLLIALWRLATTGETPTGVTLRPTMVVAA

SEQ ID NO: 359656 - protein, 318 aa, unidentified
MNQVYIGIDVSKDSLDAAAYPIKKRWSFANDETGINQLIKELSKLMPALIVVESTGGYETSVAYALQKAHIVCAVVNPREVRDFAKATKKLAKTDQIDAQVLAHFAAVIQPEPRSLSDEKARELEAILGRRRQVVEMLTAEKNRLHHAGYPVKEDIQMHIAFLEKRLQNCDSSLEGRIEESPVQREKYALLQSVPGVGPNVAMTLLIGLPELGTLNRWQIAALVGVAPFNHDSGSKRGTRHIWGGRPGVRAPLYMATLVATRFNPLIKQFYTRLCVAGKVKKVALTACMRKLLIILNAMLKHHVPWTFSPSELSISYS

SEQ ID NO: 359657 - protein, 340 aa, unidentified
MDMTTLGIDIAKSVFQLHGVDADGAVVVQKKLRRGAVLNFLGKVGPCLIGMEACATSHYWAREIAALGHEVRLIPPAYVKPYVKRQKNDAADAEAICEAVTRPNMRFVPIKTEEQQSVLVLHRARDLLVRQRTMILNAIWGHLAEFGIIAAQGPRQVMGMIARLRDDGDASLPEIARSALLALGAHLEALAGEIRALERQLIVWHRADPTSQRLETIPGVGLITATALAASVSDPSVFKSGREFAAFLGLVPRQNSSGGKDRLGRISKMGDRYLRKLLVVGATSVIRRAGSNPTKTGAWVRSLMERKPARVVTVAMANKTARIEWAVMTRGEAYRASPIA

SEQ ID NO: 359658 - protein, 484 aa, unidentified
MKSKPKEKSKKATDHPVQHHWHEMNRKQRRDMMRKVQSQELSLEVVHPDAAGIDIGNESHYVAVPPSRDNQPVRRFGCTTGELKAMAAWLKQCAIQTVAMQSTGVYWVAVYDILEQAGLEVYLVNARDTKNLPGRKSDVQESQWLMKLHTYGLLRNSFRPSQEIRVMRTYWRQRNDLVQSAGRHILRTQKVLTQMNLQLANVLTDISGATGQAIIKAILAGEHDPHNLAEFRDPRVKASKEEIAQSLEGNWQEDLLFVLKQEHEGYEFCQKQMAECDRQLQQYLQQREDRSHGAPLPEEKREGRLRKKKQGNTPQFDLREGLFRMTGTDLTRVDGIDVLTATTVISETGYDMSKWQTENHFVSWLRLRPDNRISGEKIIGKGRLPTNNRATVALKMAATTLRKSNTYLGAQFRRLRTKLGAPCAIKAMAAKLARLIYRMLRYGMKYADKGAAFYQIQYKQFQIKHLKWKAASLGYQVTPIPAAA

SEQ ID NO: 359659 - protein, 282 aa, unidentified
MNSIAVGVDIAKQVFQVHYVDRETGEIVNKSIKRTKFVEHFANRAPCLIGMEACGGAHHWARELSRLGHEVRLMPAEFVKAFNIRNKNDAAHARAIWLAVQQPSKPVAVKTEMQQAMLALHRMREQLVKFRTMQSNGLRGLLTEYGEVMSKGRAKLDKEIPAALGRIAERLPAALIDTLREQWNGLARLDEQIAEIERRMRDWKKEERAVKAISEIPGVGLLTATAAVAMMGDPKAFSSGREFAAWAGLVPKQTGSGGKVNLHGISKRGDTYLRTLLIHGAR

SEQ ID NO: 359660 - protein, 375 aa, unidentified
MKNVRFVGLDVHAQTIAVAVAEADGEVRSVGVIPNDAEAVRRLVKKLGKPEQLRVCYEAGPTGYVLYWQLTKLGVRCEVIAPTLVPVRAGDRVKTDRRDAQKLARCYRGGDLTPVWVPDAAHEALRDLVRAREAAKRDQLRARHRVSKFLLRQGRRAPAGVTAWSKQHRLWLQQQSFEQAAQQATLEDYLHELEHQSARVLRLERCIDSAVEHAPPRMREVIGALQSLRGVAKVSAVTLVAELGEISRFAHPRQLMGYSGAVPREHSSGERVRRGSISKTGNAHLRRIVLEAAWAYRHRPRIGQELAQRQRGQPARITQIAWRAQQRLHDRFRKLSARGKSPQLTVTAVARELLGFIWAVGIEAEQPQRGLPLAA

SEQ ID NO: 359661 - protein, 374 aa, unidentified
MENNITHVAMDTHKKQHRIALHYPYHEEIVEFTINNTVRDIKKMVNKIKKHAPGKVEFCYEAGVCGFTLKRRIEQLDCRCVVIAPSLVPRKPGERVKTDRRDAKKLLMMHKAGLLTEVHAPNEQQEAARELTRLRETAKENLKRIRHQLLKLLSRHGYVYREGHHWTQKHIAWLRAIEFSEPMLTGVFENYFNEMIYCIGRLKALDKEVELLADSEEYKEIVGLLRCFHGIDTLTAITILTEIFEFGRFESPRHLMSYLGLTPSEDSSGDKQKKGSITKTGNKRVRRLLNEAAWHYRHRYVPSKALNKRRKEQPQWAVEIADAAGRRLSKRHRHLVNNGKMPCKANIAVARELAGFIWFVVTQYHARNNTKGAA

SEQ ID NO: 359662 - protein, 354 aa, unidentified
MKKLFIGIDFAKEKFDAAIIDAIGLREFGERQFGTFPNDKKGYRQFMKWVKGHCGNSSETDWLFCGEDTGQCSHSLSKWLYGKGLDIWIESPYAIKHSSGIQRLKTDKADASMIAEYAWRHQDKATMYKPLSESLEQLREVFLYRHKLVQQRVAMEIRDKGKESEDSSRGLSFIRRKAKHLIAELDKTIKECDLMIDSLIDSDEELKANYKIVTSIKGIARQNGACLLIYTNNFSRFDLDARKIACYYGVAPFGKESGTSIHSPARTSHFANKLIKSLLTQGANIAKMFNPEIRAYYDRLIKKGKHKSVALNNVKNKLLRIIVALVRDKTIYDPKTFQFYQQRWKDKNQETLAL

SEQ ID NO: 359663 - protein, 370 aa, unidentified
MLDTTTFIGLDVHARSIKAVSLDVMTGEVRCATFGYDAGAVAEWVRSVDPKARCVYESGVTGFDLQKRLSGLGVDCVVGAVSKMIKPSADRRRKNDRNDAEFLARMLSVGNVVEVWVPDDECEAARDLTRALEDARDDLSRSKQRLSKFLLRHGLVFDERTPTGRRKGNWTRAHWSWIESIRFAEGADNDVLAYYVDAVRRAAEDKARLEGLVEAEARKPRWRRRVDSLRCLKGVDTATAADLVFEAGEFSRFRNARSFAAWVGLTPSEHSSGESDRRGAITKAGNKHLRKTLVEAAWHYLTCSGRPKDLAKGQAPDRGARRHAAKGVRRLAERREALLARGVHGNKANVATARELACWVWAVGLMAEEA

SEQ ID NO: 359664 - protein, 390 aa, unidentified
MRKPKQRKPNDLSRSLAALDVDHTLIAVVEMSLSSWLVAGIVPGVERQPLKKLKTDACALLELLHRWRAEALRVGHKITRVAVAFEAGRDGFWLARWLKAHGIEAHVIHASSIAVSREHRRAKTDRLDTDLLKRSFLGWLRGERDHCKTVAIPTLEEEDAKRPNRERESLVGEQSRLVNRMKATLVRLGIRGFNPKLKRAADDLEALRTPEGAPIPPNTLAELKRDMERRRFICDQIRKIEQARIERLQRAPNTGPNAMVRLLARVVGIGVETAELLVHEVLLRNMRDRRAVARYGGLTGSPDRSGTISREKGIARSGNARVRRGMVQLAWRFLLFQKDSALAQWYRHRTENAPRSRKTMIVALARKLLIALWRLVREGVIPEGIIMRSA

SEQ ID NO: 359665 - protein, 357 aa, unidentified
MPIVGGLDIHRKQVTFDYLDTVTGEVRRGQVSPAGRAHLRAWLRHFAGRDDVAFALEGCTGWRYVTEELAAAGIAAHVGEPADTAFARGRKRHAKTGKTDARHLRQLLADGRLPECWIPPAQILECRALLEAYHDLRREHTAWVERIHAVFFHQGAPRLGEGALRTERSLAALQKAAAAHLSAAGQLQVATALDMLAAVEARMDTLRRQLREAARRLTGARVLADRLYGVGPPTALAMTCWLGGAGRFSSSRKAVRFAGLDVTVYSSGGKRSPGHLSRQGPEILRWVAYEAGKTYGRASAPGHDHYAAVKDRQDGKIAALSQARRLIRQACHILAELGDDALTVTLPPPVPAGDHHP

SEQ ID NO: 359666 - protein, 373 aa, unidentified
MKEHTSKKQDARKNNQKACKETKEKFAFHVGMDLGDKNADVCVLDPDGEVSEEFRLPMKGADFQAYFVTIPRSRVALEAGGQSRWAAEVIEKCGHKVYVSNTRKVPYIHQSDDKDDPGDAYKLAELVYLKPRLLHPIQHRSQEAQADLSWIRAREALVESRTQLINTVRGISKAFGERLPKCSVEAFTGKLAGQIPAAIQGAVAPLLETIDHLNERIHAYDQMEEHLARERYPKYWLLDQVNGVGVHTALAFMLTIGDPGRFEKSRQVGCFLGMRPKKQESGESKPQLGITKAGDIYLRKTLVNCAHYILGPNGKDSDLRRFGQRISARGGKNAKKRAVVAVARKLAVLLHRLWVTGEKYEPLRNSQKRRVAA

SEQ ID NO: 359667 - protein, 372 aa, unidentified
MNYNTVYVGMDVHKESFSLCAYTIEAEKASHYHRTEADYKKVLNYLEFLRTIYGDDANFICGYEAGCFGYTLYHQLTANNVKCIILAPTTMLEQRSKKRIKTDRRDAEIIAKCLAQHNYSPVHIPTAKDEETKEFLRMRDDHKLALKKVKQQILAFCLRHNYRYDGKSHWTAAHLKWLKALTPEALYKEILDEYLLTYQTLSDKIERLDKRIEELATQDEYKEAVKKLCCFIGVKTHTALSVLVEVGDFKRFASAQHFASYLGLVPGEDSSGDDQNRLGITKAGNRHVRLLLTEASQCYARGQVGFKSKELKSRQSGNTPAVIAYADKANERLRRRYYKMVLNKYKKHNVDKTAIARELACFMWGMMTDNIA

SEQ ID NO: 359668 - protein, 342 aa, unidentified
MQISIIGLDIAKHVFQVHAVDAEGHAAAQVRLRRAQVLDYFAKLPPCLVGMEACATAHHWARELIGLGHEVRLMPPAYVKPYVKRNKTDAADAEAIAEAVTRPTMRFVAVKSADQQAALMLHRVRELLVRQRTMLATALRAHLAEFGIIAPQGIHRVEKLAAEVQSPTVPALAREALMLLVEELAGIWRRIEAIEARLVALHRADEVSRRLASIPGIGPITAMAIANTVPDPTMFRSGREFAAWLGLTPKSHSSGGKDRLGRISKRDDRYIRHLLYVGAGNAVRFGKARAATGEAWIEALQKRRPPKVVIIAVANKMARIAWALMMRGGTFRSPTAAAAAAA

SEQ ID NO: 359669 - protein, 376 aa, unidentified
MQNDITLFVGLDVHKDSITVAYALGSGEVELLGKIGTSARDIDRLCKKLQSKAGHVKVVYEAGPLGYDLQRRLAAKGFDCMVCAPSLIPRKAGDRVKTDRRDAVKLVRSLRADDLTAVHVPTVEDEAFRDLARVWAAARDALKRARQALKSFLLAHAVRYTGTANWGPSHRRWISSFSFGNAWQDLAFSELRRAIEDRFAQCERLESALREAVTQWRFYPAVLALQTMRGIQFTTAVGLLSEIVDVTRFAHPRQLMAWLGVTPSEYSSGGSRRQGSITKTGNSLARKLLIEAAWSYRHTAKVSPEIQQRHEGVPKVIVDRAWDAQLRLCGRYRRMVAKGKNKNVAVVAIARELAGFIWDIGRLGIEQAINTPKPAV

SEQ ID NO: 359670 - protein, 346 aa, unidentified
MNAITIGLDLAKSVFQVHGEDAAGRIVFQKQLRRGQVETFFAKHPRCIVAMEACGSAHHWGRTVAALGHEVRLIPAAYVKPFVRRNKTDARDAAAICAAMGRPDMRYVALKSVAQQAMRAVERGRELLVKQQTQLTNCVRGLLTELGIVAPQGRRGFAQLRALVETGDARVPEPLAATLQELTRQLDSLAKGIAELEARIMAAAKQDPAMRRLCTIPGIGGLTAHAIVAAIGDGRRFDTARDFAAWAGLTPRESSSGGKTTKLGISRQGERRLRSLFALGASTIMRNARASEGRATPWQRGILARRPVKVAVLAQAAKTARIAWAVLVSGQAYRQPANPQTQTLAA

SEQ ID NO: 359671 - protein, 410 aa, unidentified
MDVVYERCCGLDIHKQLVVACLLTPGAGAQPTKEVRSFGTMTADLLELADWLGAAGCTHVAMESTGVYWKPIYNLLEDQFTLLLVNPKHFRAVPGRKTDVRDAEWLADLLRHGLLRGSYVPARPERELRELTRYRTALVHERSDEINRLHKTLEGANIKLGSVASDLMGRSGRRMLAALAAGTTDAAALADLAKDKLRHKLPELERALTGRMGAHQRFLLQQQLAHIAFLEQTIEQVSTEIQERLRPFEAELARLETIPGIGRRVAEILVAEVGTDMSRFATAGHLASWAGMCPGQNESAGKRKSGRTRRGSPWLRSALIEAAHGAARSKGTYLGAQARRLKPRLGWKKTMVAVGHSILVRAYHVLQRGTTYEEPGADYFLERDRHALERRHVRALERLGYRVALEPDAA

SEQ ID NO: 359672 - protein, 245 aa, unidentified
MNKDIKYFGIDISHLVFDVTDSQGNYYQFKNSISGFKKFVKLLSINSHCVMEATGYYHYQLAYYLLECGMKVSVENPLAVKRFIQMKLSKIKTDKSDSKLICEYGKQVELKLWKGTSKHQTECLQITRLLAVYTKQSTMLENKLHGEAVLGNPSKIVVSSLKRSLKQVQKEIKTLEDKLLILVKEVHQDLLTRLKTIPGIGAKTSLMLVVLTDGFKRFKSGSELCSYAGLTPVIRKSGSSVNGRS

SEQ ID NO: 359673 - protein, 400 aa, unidentified
MFDIGDVGVFLGLDVGKSTHHGHGLTPAGKKVFDKQLPNSEPKLRAVLDKLAAKFGTVLVIVDQPASIGALPLTIARETGCKVAYLPGLSMRRIADLYPGEAKTDAKDAAVIADAARAMPHTLRSLEVTDEITAELTVLVGFDQDLAAEATRTSNRIRGLLSQFHPSLERALGPRLDHPAVTWLLERHGSPAALRKAGRRKLVEVIRPKAPRMAQRLIDQVFDALDEQTVTVPGTGTLDLVIPSLARSLAAVQEQRRALEAQIGQLLEAHPLSAVLTSIPGVAVRTAATLLVTVGDGTSFPTAAHLASYAGLAPTTKSSGTSIHGEHAPRGGNRQLKRAMFLSAFAALHDPTSRTYYDRCRARGKTHTQALLRLARQRINVLFAMLRDGTFYEPRTPRLA

SEQ ID NO: 359674 - protein, 354 aa, unidentified
MRNSSNAQQGLTVGVDLGDKYSHVCVLNAHGEIVEEGRIATTREALERRFAGMAPAAMAIEAGTHSNWVYDLLTSLGHDVVVANPRKLRAITANERKSDQMDARMLARLRRADSQLLSPVVPRAEHMRRDLGVMRARAALVQARTMLVNHVRGVAKSSGSRLRKCSAESLHKAELPADLVSVLAPLLQVLERLTEQVHVYDQHIAKLSKESYPQTSLLRQVEGVGPITALCFTLTIGDARRFKNARAAGAYAGLTPRRDQSGDRDPELRITKCGDRMLRTLLVQCAHRILGPFGPDCDLRSFGLKLIERGGKNAKRRAVVATARKLSVLLLALMRSGEVYEPLRHSPAARRASA

SEQ ID NO: 359675 - protein, 393 aa, unidentified
MRKPKQRIKLLNDLSRSLTALDVNHTLIGVIEMSQKSWLVAGIVPGVERQPLKKLEPDETALRKLLERWREEAEKAGRKIKRIAVALEAGRDGFWLARWLRRCGIEAHVIHASSVAVSREHRRAKTDRLDTELLKRAFLGWLRGERDHCKMVAIPTLADEDAKRPSRERESLVGEQGRIVNRIKAALARLGIRNFNPKLKRAGERLEGLRTPEGEPIPPNTLAELRRDIARRRLVTDQIRQIEDARLERLKHAPKEGPHAMVLLLARVIGVGIETADMLVQEVLSRKLRDRRAVARYGALTGSPDESGSKRREKGLARSGNARVRRAMIQLAWRFLMFQKKSALAQWFRARTENARGSRKKMIVALARKLLIALWHLVRDGVVPEGVVLRPAK

SEQ ID NO: 359676 - protein, 387 aa, unidentified
MTQVDDLSRSFVAFDQTTSLTVVVEMSQSSWLVAGMVPGVDRQPLKKLEPDPDALLRLLERWRAEAVKTGRAIERIVLAYEAGRDGFWLARWLRARDVDVHVIHSTSVAVSREHRRAKTDRLDTAMLMRVFLGWLRGERGHCAMVAIPTADEEDAKRPSRERESLVGERTRITNRMKSALARLGIRGFKPELRKAPERLAALRTPEGSAIPPNTLDELRRDMARLAVVRGQIKEIEQARLECLEQAPAEGPNAMVRLLARIVGVGVETADMLVREVLSRNLRDRRAVARYAGLTGSPDESGSTRREKGLAKAGNARVRRGLIQLAWRFLMFQKNSALAQWYQSRTEGPNGARKTTMIVALARKLLIALWRMVTTGVVPEGVVLRPVA

SEQ ID NO: 359677 - protein, 317 aa, unidentified
MDTPTPTYVGIDVAQHTLAIAVVPSGEQWSCANDAAALPALAARLVQLQPAGVVLEATGGYELPVSAQLALAGLPLSVVNPRQTRAFAKAVGQLAKTDAVDALLLARFAAAVKPEPRPLPDAQSQALAALLARRTDLVGMLVAEKNRRGSALPVVRPRIDTHIAWLEEELAALETDLQQRLRDSPLWREKEDLLRSVKGVGPIVALTLLADLPELGTLNRKQIAALVGVAPLNRDSGAWRGKRAIFGGRATVRRVLYMAARVAARCNPVIRPFYERLIEAGKPDKVALVACMRKLLTILNAMLHAQTPFRAPEVKTT

SEQ ID NO: 359678 - protein, 339 aa, unidentified
MLIIGCDYHPSMQQIAWVDKETGECGERRLLHRSEAEEFYRQIKEKQVRVGIEATGHSRWFERMVAELNFELWIGDPAEIRAKRVRKQRNDRFDAQHILKLMLEGTFPRIWVPTAENRDLRQLVWHRHRLVGMRTRVMNQLQAVAMNEGIRRKKRLWSEKGRKELESLSLMPWTTRRRQELLQLLDQLDPNVDPLSQAIEQEAERMPEVKLLMTHPGVGPITALAFVLVLGTPERFGCGKQVASYLGLIPCEESSSEHWRLGHITKQGNKLLRFLLGQSAQSAARCEEQWHRQYAHLSMRRNKLIAKVALARKLAVRLFWMWRRGWDYQQLKKFGSHAG

SEQ ID NO: 359679 - protein, 437 aa, unidentified
MDRVVIGMDPHKRSVSIEVRDVREVLRATGRFGTDTANYRAMLRVARQWPERVWAVEGANGIGRPIAQRLVADGERVLDVPAKLAARARVFDTGQGRKTDATDAHSIVLVALRDKGLRELSVDPQLMVMRLLCDRRDELSHARAQTLNRLHRLLLELLPGGAPVKKSTAQYKTMLASVRPRDPVGKTRRRMAAEELADLAVLDTKLKAMKAELKAAVLATGSQLMDIHGIGPAGAARILADVGDVARFPDRNHFASWTGTAPIDASSGEQIRHRLSRAGNRRLNHVLYIAGIVQLRNDTEGRAYYRRKRAQSKTSMEAMRCLRRRLSDVVYRQLVTDAARKTVDGAGPGGHSGATTKSSATDLTPGIGSSDQPLPEPAAATLPGDVVLPHHLVPGTAAPLRRRAGGVNVERPTGRTTLTPTSTVAPLKASRTRPLDI

SEQ ID NO: 359680 - protein, 331 aa, unidentified
MERLYYIGLDIHKKTISYCVKKVDGTIVQQGKIAADRKTLLKWMKGLPGPWFGAMEATLFTGWVYDFLKPYAVDLKVAHPEMLKAITAAKKKNDRADAEKIADLLRVNLLPECHMLSEELRELRRILRYRNMIVRTAVKMKNKISGLLMEVGATYNKEKLHRRKYFNNLLERVEDVPASVKDMLKLSRSSLEMFEAVQKKLVHTLREDKLIYERVQRLMSIKGVGEVMALTWVLEIGDSSRFHSARQAISYAGKDQRGPISRKRNKHLQTILIETAKLAPRWNPQLAALHEKEVNQGHRNRATISVARKLVEYMLAVERQQKDFVPSELAA

SEQ ID NO: 359681 - protein, 348 aa, unidentified
MNSLHYIGFDVHKKAISFCVKTAAGEILEEGSVLAQREVLRQWASARPQPWRGAMEATLFSAWIYDTLKPYSAQLEMAHPAKMKAISAGKKKSDTIDARTIADLVRCNLLPACYVAPARIRELRRLLRYRSLVVSESVRMKNKMAGLLMETGALYVKEKLHRKKYFASLLEELEEVPESVIDLLRLSRGALEMFENTQKRLVRELLADPELTERVERLMTIPAVGEITALTWALEVGDPQRFPSCSDAMSYCGLTAALKSSAGKQQRGPISKQRNHWLQTTLIEAAKLAPRWNPQLAALHARELERGHRNRATLAVARKLVAYLLAVDKSGQAFQARVPLEEPTQKAA

SEQ ID NO: 359682 - protein, 283 aa, unidentified
MLIIGCDHHPSFQQIAFVDTDTGELQERRLEHCEEAEKFYRGLGVQGMKVRLGMEASGHGRWFERLLAELNFELWIGDATEIARKRERKQKTDRQDAQHILKLMLQDDFPRIWVPSWENRDLRQLLWHRHRMVQARTRIMNQLQAVALNEGLRSKKRLWREHGREQLESFRLAPWASRRRHDLLELLDRLNPTIAELSQAIEQEVEKCPEAQRLMTHPGVGPLTALAFVLIIERADRFQCGKQIASYLGLVPLEDSSGDRRRLDISRNKGTLYYVSCWWKRRK

SEQ ID NO: 359683 - protein, 366 aa, unidentified
MPAISKTPDRVVIAIDPHKASWTAAAVDASSQPVATIRVPVSRDGYRALRRFARRWPGSTWAIEGASGLGAPLTARLRTDGVDVVDVPAKLAARVRMLSTGHGRKNDDADAVSVGVAALSARTLTSAAVDDTVTALRAIVDHRDDLVKTRTQTVNRLHVVLTNLIPAGAKRDLTADQAAELLRKIRPRDAAGKTLRGLAVDLVTEIRQLDRRIAKAADDIKTAVTASGTTLTELCGIGDLTAGKILGRVGTIDRFRSAAAFASYNGTAPIDVSSGDVVRHRLSRAGDRQLNLCLHVMALTQIRQGTPSRAYYLRKRTDGKSHKEAMRCLKRRLSDVVYRQLLRDAARQGAGPGGHPGAALLSSAAS

SEQ ID NO: 359684 - protein, 345 aa, unidentified
MPMFAALDVSKRETQVHIVDVSGKCVWRGKVPTNPRDIATVLHPYAKQLEKVGLETGSWSSWLFHGLTDLGFDVACMDARQAHAALSVTVNKTDVNDAEGLAHLLRTGLFRDVRVKPWCDLRRRALLRARATLVRTVIDLGNAIRSALRLFGFNMAAGPGSGGARAFERRVEQHLAEQPGLVPVVMPLLDAWRAARKQVARHESSIRAEVRADERCQLLMTVPGVGHLNALGFVAAIGDTKSFPSGRTAAAWIGLTPRRYQSGEINIQGRISRHGDKLLRSYLYEAAAHILTRAKTDSALKRWGTALREKVGFKRANVAVARKLAVTLFAMLRTGKPFEADGVAA

SEQ ID NO: 359685 - protein, 357 aa, unidentified
MEITTIGLDLAKHWFQVHGVDANGRVVVRRRLWRSGVIAYFRSLEPCLVGMEACATAHYWARELIALGHRVKLMPPAYVKAYVKRNKNDAADAEAICEAVARPSMRFVPVKDAEQQSVLMLHRARSLLVRQRTMLVNALRAHMAEFGIIAPQGLRHVEILTKTIAHQQERLPELARAILQMIVGQLNGTMVRIREIEGQLARWHRESPVSRLLATVPGVGIMGASAIAATVADPTLFRSGREFAAWLGMTPRQNSSGGKECLGRTSKRGDKYIRSLLTAGAVAVLRHARNRPTRDGEWVRALLARKPTKLAAVALANKTARIVWAVMMRGRAISLKKFSGGRHNHRQPIQHARVKRT

SEQ ID NO: 359686 - protein, 383 aa, unidentified
MNGPIYEQSVIVGVDAHKYSHTAAAMDAWGQEKGRLNFTNDSLPDCLSWLKTLGRREDVIVAVEDANSYGCHLVSALAEQQFAVRSVPAVLTERDRQHSTQRDKSDFRDAKRVAKVILAKYEETLPVIASLATSAELAAATELNLLLNERRDVVKEGTAIKNQLHSLLHQYYGDHYADGFSKAFNKQAIIFYQANLAQAISANSSSADQAGKALIAESILRRIRRLKLLQEQSAAILKQITKIGETSAPVAALHENIHGCGLLTAGAIMAELVTIRRFGGRDKLAKYAGIAPTLKSSGSHHRLYTNPFGNRLLNKALHTIALSQIAVKGDDRGKRYYRKKLKEGKTKLWALRCLKRRLINLVFRVLKQAEAGIGIGSAEKMIS

SEQ ID NO: 359687 - protein, 461 aa, unidentified
MAKKAKKVKTAKGAELRIVNPDAAGIDIADGIMQVCIPADRSKDNNRAFGAYTSDLHAISAWLRECGIKTVAMESTGVYWIPLFCRLQEDGLDVVLTNARDVKNITERKTDESDAEWLMLLHQYGLLKASFQPHNDAKRMRTLTRHRDTLSREASSMVLRMQKAMQQMNIKLTLVLSDITGKSGIRIIEAILAGERDPKRLADLADIQCKTPKEEIAKALEGNWEEDLMFVLRQNYDTFKHYCTQLGECDAELEKLMENYRAEVAKVEDTSYSPAKKRRDYKKTRHTVGFDVERKAYEMWGVNVFEIPGISHLTALELMSELGHDFTRKFPSSKQFCCWCNISPNTKISGGKRISSHVPHRRNNVGLIFRSIASSLANAKNQLGNFYRRIRSRAGGKAAVIATAHKVAEIFFAMVANQTTYNPERVGIDEKVLLEKRITRYKRELERITGTHIEIGNACVP

SEQ ID NO: 359688 - protein, 346 aa, unidentified
MEYIALDVHKKYTWARVENTQGDRLYESRLQHAHGTIKNFVNRWTAGSPVAVETVGNWYWVVDEIEAGGGQPQLVNARLAKLMMGMVNKSDKLDAKGMNRLQRTGTLPTVWIPPSSVRDARELPRTRMVLSRQRTQLKNRVHATLGKYGYTVEGASDAFGKKGRQIMAQLMAKLPPHTEQALGRVLDQLDHVCENLQEIEAKMMEVFAPCSQTTWLKTLPGVGDILAVVIWTEIGTIERFGRAEQLASYCGLVARENSSGGKIRFGAVRRDVNVYLKWAFVEAANSALLNAERCGYGHISRLYQRIKPRRGHGKAKVAVARHLSEASFWMLKKGESYREPMSSTQR

SEQ ID NO: 359689 - protein, 365 aa, unidentified
MARSIVTEDRAWKEASYIMLHVGLDLSRKRIDVCAISDQGELVDELAAPFDEEGLRRLTDRVAAKHADRVRAVVESMNGARFVHDTLEAQGWDVLVADAQRVKGLAPLACKTDKIDARVLAELSFRDLVPAIWLPDPQVRRERELARFRLHLVRHRSSLKNRIHSTLITFGKPCPVSDLFGVAGRKLLERLDVPDPWRDNLEASVVLIDQLDRQIDAIASELKHVGADHPYVPLLMTAPGVGWLVGFSIACEIGDIRRFSSPTKLCGYTGLCPRVIQSGETDRRGPISKHGPKYLRWALFEAALNACDHPLYKERYERTKKRLGRQRGPKVAQIELSRKLTEAIWHMLTRNQPFAPAGAPFRLAA

SEQ ID NO: 359690 - protein, 423 aa, unidentified
MLLNNSLIVGVDVHRRTNVVQVMDDQGQVLTTSLVVSNNRQGTSHLADCLAEAARRGNFASIHIAAEATGAYWLPFFCQLQQEPRLAAWPLTLYPFNPRVVHNFRKAFVDLDKVDLNDAHLVAERLRFGRNLPAPFVMEEQFLPLRSLTRYRFHLVHELVRVKSYCTYLIYLKSSEYTADRDWQPFSDVFGATSRAVLRDFPSMDAIIEMPFDELVEWLDVKGKRRFADPEANARKLLQVAEDSYRLPKPWLESVHTILGLNLRHLKTLENLIQRVDTAIADEMEAIPNTLTTIPGIGPVIAAGIIAELGDLARFDYDQKKVASYAGLKWSRRQSGDFLAEDTPLKRQGNRFLRYYFCEAAHLVRMNDAEYNAFYTKKYNEALKHKHKRAVVLTARKLVRLVVRLLTTNQPFRVRRVDSDESV

SEQ ID NO: 359691 - protein, 369 aa, unidentified
MAHSTASLPTPATHTTVELVTTLGLDLSDRVSHFHVLLGDGRTLARGKVLTLREPLSELFAEWKGCRLVIEAGGHSPWISRLGKECGMEVVVANPRRVELISKSDRKTDRTDAETLAELGRSNPKLLAPITHRTKEAQADLAVQRARDEVVRTRTGLINHVRGVLKSHGYRAPSCSPESFGRRAVASIPPELTTALLPMLKLIRDVSAQIKDYDKEIERLGREQYPITQRWQKIPGVGPIVSLGYALTLDDPKRFPRSRKVGAYIGVVPGQKSSGKSNPQMHITKAGDREMRRLLVLAANYILGSFGPDCDLRRFGLKIMGAGNDKVAKKRARVAVARKLAVLMHHLWVTGKAYDPFYLAKKRGEPLPG

SEQ ID NO: 359692 - protein, 451 aa, unidentified
MKEEKKKKQIIIKMSKEMSVVHPHAAGIDIGDTEHWIAVENGEGYEVRRHDAFTCDLKDIVKWLISIGITSVAMESTGIYWLALYLMLEEAGIEVYLVNAKSTKNVTGRKKDDSDAVWIQKLHRCGLLQKSFQPEHEQRVLRNYVRQRKNLITIGSDSVRRMQKALELMNIKVHTVISDLLGKSGMSIVTAILNGERNPEILAALCDPRIKATKEEIIKSLEARWSDEYLFMLQQAYEGYQFYQKQIKDCDKKIQEQLLKQEAIVKEGDITEALQEDSTKKKPKKNQFDFNVADYLRELTGVDLCKIPGINEVSALEFLSETGTDMSKWKNVKHFDAWLNLTPNTKITGGKVISSKVMKKKNRAGQTLKMSASTLSRNKGPLGDYYRRIRAKLGGKGAVLATAHKLARIIFVMLKEKKEYNPEMLTESQEKLKLKRIKQLEKQLAKLKQAA

SEQ ID NO: 359693 - protein, 324 aa, unidentified
MNNMHYVGLDIHKKTISYCVRQSDGTILRENTIAATRPALEIWMRHLPQPWTAGMEATMFTGWIYDYLGERGATVKVAHLAMLKAIAAGKKKNDQLDARKIADLLRCDYFPECHMAPREIRDRRRVLRYRNLLVRQAVQMKNKVSGLLMEVGVQYNQQKVHDKKYFAELLHEQRKEMPPSLPELLQLSRSTIESLTGMERQLMRALEQDDLLAARVERLATIPGVGRVLSLTWALEIGEISRFSSVKDAVSYCGLCGAEKSSGGKAERTSLSKQRNKHLQSMLIEAAKLAPRWNAELALVYEREKQKGNSNQPRSPWCGSSWLT

SEQ ID NO: 359694 - protein, 402 aa, unidentified
MNAVGIDVSKGKSMVAIMRPFGEIVSAPFEIKHTASDIHSLVELINSVEGESRIVMEHTGRYYEVLAHQLSKANLFVSAINPKLIKDFDNDSLRKVKSDKADAVKIARYALDKWQNLKQYNVMDELRNQLKTMNRQFGFYMKHKTAMKNNLIGILDQTYPGVNTYFDSPARSDGSQKWVDFASTYWHVDCVRKMSLNAFIDHYQNWCKRKKYNFSQSKAEEIYGKAKELVPVLSKDAITKLIIKQAVDQLNSASTTVESLRTLMNETASKLPEYPVVMAMKGVGTSLGSQLMAEIGDVSRFTHKSAITAFAGVDPGVNESGSYEQKSVPTSKRGSSDLRKTLFQVMDVLIKTHPQDDPVYQFLDKKRAQGKPYYVYMTAGANKFLRIYYGRVKEYLSSLPES

SEQ ID NO: 359695 - protein, 394 aa, unidentified
MSKAYVGIDIAKDRSTAHGIEEGGRSLFELTFDMGAAGFAELLKRIEASGVTLGNVAVAMESTACYHINLYSFLSAKGIETFIINPLLIANYARLSLRKTKTDKKDAKTIAQFILAHKESVTQLAISQDLQDIRDMARERESLCHQISAAKVEIQRVLQTTFPELPTMTNPLTKVMLHFIQRFPSARLVSIAKLKVIEKTLKEKPCSCRLRFTPKDLIEVARKSIATVSPAKELILSGKIETLLHLQKRCDELTKALTKYCESTIVEDLRIVTSIYGINNKMATTLLAEIGQIANYHSYKNLIAFAGIDPTVYQSGKYEGASRISKRGNRHLRRVIWLMTISVIHHNPMFRNYFLKRRTEGQPFKKAVFATAHKLMRVLFAMLSNRAFFKEQCV

SEQ ID NO: 359696 - protein, 323 aa, unidentified
MNDEISQFIGIDVSKDSLSIFVWGQQGNSLEIKNTEQAISNWLMNVPAGSFIGLESTGRYHKLAASMGYNAGMTIFLLQPRDMSNYRRSVTPRSKTDNIDAQVLARFVAMEHKNLRLWKPSTKEQEKIDDLLRIRALCSSSRAKLAMAGKESPDTSALLDDLAKTFNQTIAQIDKAMAVTIKSITGLTENYKRLRTVSGIGKVSGAGIANILAHYEFRNADALIGYVGLDPKPVESGKYRGRRRLSKRGPSQIRWLLYLASMAAVKKEAFKPLYKASIDKGLSRTAALCIVARKILRIAYAIWNKPGAIFDPTKLLKSTPLPA

SEQ ID NO: 359697 - protein, 387 aa, unidentified
MQASAPRPEQAAIHVNLAAIFVSLELSRSTWLITSLSPGSGEKMSKHSVRGGDAAGLLDQLGRLRTKAQARTGETFPVIVIQEAGLDGFWVHRVLEAEGIESHVVDAASILISRRRRRAKTDRIDGEALLRTLLAHKRGEPRVCAMVRAPTPQEEDRRRLCRERKTLVAERVGHVNRIKGLLFAQGVSDYEPLHRDRRQRLEELTTGDGRPLPAHLEAQIGRELDRLELLLKQLKAVEAERDALLEPTSDDGPTPATLLAKLKGVGPEFAAVLWSEGLFRSFGNRRQVAAYAGLAPTPWQSGSVQHEQGVSKSGNPRLRTTMIQLAWLWLRHQPTSELSLWFQERMRHNDDRGKRTAIVALARKLLVAFWKFSSSGVVIEGAVMKAA

SEQ ID NO: 359698 - protein, 345 aa, unidentified
MEQITRIGMDTSKHIFQLHGVTAAEEPALRKKLRRRGMVTFFQQLAPTVIAIEACGASHHWARLLQSFGHSVKLIAPQLVKPYVKRGKNDAADAEALCEAASRPTMRFVPVKTAEQQAALMLVGVRDRLIRNRTQLANAIRGYAAEFGLTAAKGSAHLKPLLARLQGDESLPALARELFAAQAKEYAQLREQIDEIDTKLMAWHRADECSRRLAKIPGVGPIGAVLLSMKTPEPELFRSGRQFAAWIGLTPRDHSTAGKIRLGVITRAGDEGLRSVLVVGATAVIQHVRRGGRSSPWLIELLKRKPPKLAAVALANKMARIAWKLMVTGDNYAAKSAPATLVGTA

SEQ ID NO: 359699 - protein, 450 aa, unidentified
MSNAVAAVAAAAAPSEPEWAAFAAIDWADQKNFWRLLPAGSRQSEAGELDSTPEAVEVWAAHLQLRFGGRPIAVILEQTRGPLVYMLTKYPHLVLFPVHPTTAARYRETFAPSGAKSDPSDTDSLLDLLLRHRERLRPLRPDTVETRLLHFLVEERRQTVDEKTRANLRLSDCLKLYFPQLLRWFDDVSSPLVGDLLERWPTLEQLQRVHPGTLRRFFHEHNCRSEEKNVERIAAIQQATSATQDAAVREACVLIAHSLVAMLATLRAQIDVFDKRIAELVTDHPDGALFRSLPGAGDALVPRMIVAFGTQRDRYQSAYQMQCYSGIAPVTEASGNSQWVHFRFLCPKFLRQTFHEFAGCSIQQSQWARAYYDHLRNDKNKSHQVAVRTLAFKWLRIIYRCWKDGKPYDETIYMQSLRRRGSLLAGVLGTPTGVGWKSVAGFQKFSENNA

SEQ ID NO: 359700 - protein, 353 aa, unidentified
MKVTTIGIDLAKNVIQVHGVDERGKVVLRRQLRRGQVIDFFAQRPGCLVGMEACGSAHAWARRLMKLGYTVKLMAPQFVKPYVKTNKNDAADAEAICEAVTRPNMRFVPVKSEEQQAVLSLHRARQGFVRQRTAQANQIRGLLAEFGIVIPQGIRHISKHLPEILEDAENTLPGAFRQLLRQLGEHLKTLDELVRAMEVQIQQWHGTNEASQRVSAVAGVGALTASAMVASVGDARNFSSGRQLAAWLGLVPRQHSSGGKSKLLGISKRGDCYLRTLLIHGARSVIAATGRKKQSTVGQPAVQPGADRWLEALIARRNRNVAAVALANKNARVIWALLAHGDCYHAFYPLVAA

SEQ ID NO: 359701 - protein, 409 aa, unidentified
MRIIGLDIHRAFAEAVAWDEGELKRMGRVDMRRPLLEAFAKKLTKEDVVVVEATGNASSVAAVIAPHVKKVVIANPKQVRIIAHAKIKTDTIDAKVLAQLYASGFLPEVWIPDEPTQALRRQVTRRNQIVRQRSRLKNIIQSILHSHLIPSCPHADLCGASGRAWLFHQILPEDERLAVERHLREFDRLGEDLKVIERDLARSALGDESVKRLMTIPGVDMVVALAIVAAIGDVGRFGQSQKLVSYLGLNPSVRQSGPGPAYHGRITKQGRGHARGMLVEAAWAAARAPGPLRAFFLRVRARRGQHVAAVATARKLAVIIWHLLRKGESYAWARPALHARKLRDLELKAGYKAERGQRGAAYAYNIKSHRDQERRWVEQAETAYARFVAGWNPRGPKRVRTGAATGVRR

SEQ ID NO: 359702 - protein, 474 aa, unidentified
MKKHKQAEAKTKSEALKPLREQEPDAAGIDLGANEIWVAVRAERDQKAVRQFGAFTRDLMAIVQWLVQCGVRSVAMESTGVYWIPLFQLLEEAGLKVCLVNARHVKNVPGRKSDVRDCQWLQYLHSVGLLLGSFRPVQSICAVRSIYRYRQNLLSMASQHVQHMQAALDQMNIKLHHVIDDLTGVTGQAIVGAILSGQRDPVQLAKLRDKRIQAPEATIAKALEGDWRKEHLFVLAKAWAQYQQVQKQIQDCDQELWNYTRELEACTKVIKPAKVMRLKPELVGAELLSTPPTKKRARKKTSKNQPEGPWKEELERFFGVDLTAIPGISVLTGLTLMSELGHDLSTFRTEHHFASWLCLCPDNETSAGKVLRRRTRRSQNRVRQALRMAASSLHHDKSYFGDKYRRLRARLGAPKAVTAMAHQLARIIWTLITRQLPFDLSVFAYHEKVHQQRRLKHLAASARQMGYQLTPVPA

SEQ ID NO: 359703 - protein, 371 aa, unidentified
MAKEKMTNKRYYIGMDVHKDYVQMAVFEETGENPIYERRLINETALLVKEVTRYSREGVAEVAYESGSCGYVIYRAMERVGITCHVLPANKVAKKRDDRIKTDKRDARLIGRELRSKNIRPISVPEEADEAARDLLRCREDVSGDLRRVKQRLLKFLVRHGYDYPGSGNKWTLKHWKWMDGLKFRHDHERTVFEEYRSQIRALEERLARLSQTVEETAESPRYKAKVSILRAFKGIDYIIALAIICEIGDFKRFAEAKSFMSYLGFVPSENSSGGKRNQGGITKAGNGHLRRLLIEGAWHYTKNARTGKRLEKRRQSSPSSAIDAADRALHRLHKKYIRLLMKGKHKNVAVTAVARELAGFIWAVQVSTVA

SEQ ID NO: 359704 - protein, 342 aa, unidentified
MTIKEILKQVVGIDIGKDNFYVCYKVQLINGQIVIKGTKSFANSLSGIKDFFQWTEKRNKISVSKPLFVMEATGVYYEELAYFLYEKGQSLSVQLAQKIKYFAKSCNLKTKTDKVDAKMIAEFGLEKNLSGTDLWTPPSKEFKIIRDLAREHTSLKHAQTSVKSQLHALKHAHDSYENVLKLKQGQISFFEEQIKIVEKDIYELVKTDKELFGKIQKIETIKGLRFMTIIKVITETNGFLLFKSIRQLVSYAGLDVIEKESGKYKGKTKISKKGNARIRSALYMPAVTAARCNNALKVFYERINEGRVMKKQGLIAVMRKLLILIYTLWKKDEEYIENYQVA

SEQ ID NO: 359705 - protein, 410 aa, unidentified
MSVLGMALDPSTVIVAVDPGKAFSRVWISNGSGSLVDPLSLPVSRDGISQLEVELGRNGAVAPVIAVEASGNLHRPWATELERRYPGSVRVFAPSETKAARIQLGSGRFKSDDRDCAALTYLARQGLGRQFQEQWAVEALCAAVRHRRGLVADRKIAQQRLHDQLNVLCPGLSSPAGHGRALALETPTGLAILACAVAFAGRAPKPRSLICRAPGRLTVATAEFWTTRWRQCLPAPADAQARAHRLGRDLDRYRRLLADVSVIDAEIDELLTVTDGQVLTTLPGVATIRAAAFAAHSLPIERFPDAEHLYSATGLAPALYQSATLNRRQRISRQGLAEHRDALMGIAWGLSQRSPSFLERNAELRARGMAPIQARVALARHACRLSYRLLRTQQPFDEQRYRRGRLSRGR

SEQ ID NO: 359706 - protein, 322 aa, unidentified
MSQPNPLCVGIDVSKATLDIAASSDVAQFTVSNDSDGFNAIITGLRRHSVALVLMEATGGLEVAVACSLQAEGFEVAVVNPRQARDFARAMGYLAKTDRIDARVLTQMAEVINRHPERKRFIRALPDAERQALAAMVVRRRQLIAMLVTERNRLHPSHPQNKKSINTIIKALEDELVRLEKEMDSHIRNHFKEIAERLSSIKGVGTMTVSAMLAEIPELGTLSRREISALIGVAPVNRDSGTMRGRRTIFGGRAGVRSALYMAALVATRFNPVIKTFYVRLLAAGKAKKVALVACMRKLLTILNAMLRKNEEWDESYHHVAP

SEQ ID NO: 359707 - protein, 315 aa, unidentified
MTRTGVYVGIDVSKATLDIGTSDGETWQVANDDRAMEPLRERLGALQPALVVLEATGSYEARAAAALASAGLPVAVVNPRQVRHFARATGALAKTDRIDARVLARFAQAVQPEPRPLPDAEAQELEALLTRRRQLLDMLVAEESRLETAPPAMRKEIKLHVGWLRRRLGKTNEDIDGTVRRSPVWRAKEDLRKSVPGVGDVTARTLLAFLPELGQLGPKQIAALVGVAPFNQDSGTLRGRRRIYGGRPRVRAALYMAALVAARHNPVLKAFRARLQAAGKRPKVAIVACMRKLLIILNAILRDGRAWDSAQAAHA

SEQ ID NO: 359708 - protein, 342 aa, unidentified
MNNKQISIDSAKNVFQACIYNSTGTILSNKKIKRAKLTELIQQCEPTQIAMESCYSANYWGRVFQSMGHEVNLIPAQHVKPFVRGNKTDGNDAIAISEASLRPAMRFVPVKTIFQQDIQVIHRVRERHVSNRTALTNQIRGLMSEYGIVVSRGWRKLKNQLPAILEDAENMLSPLSRQSIAALYQELCIVNQWVDDDKKILAQAMQDNEDYQRLLVVPGIGPIIASAAIASIGNGAQFASARQMAAWLGLTPRVEASGERSVCKGISKRGNRYLRTQFVHGARSLVNWVEKKTDPLSLWILQLMARIGRYKTIVAVAHKLARFCWVILNRKEDYKPPSMAIA

SEQ ID NO: 359709 - protein, 345 aa, unidentified
MQESFYVGLDLGSSQCYQSIINSDGALALARSIPTSEHHLRAAFANLQGDVRVHLEAGELSNWVASIIQPLVAEVIVSHPRSLAWIGKDSQKDDKVDAKKLAELLRLGRVHQVFYQSDNSRQTFKYLVTHYEQLSREQARFKSKIKARLRTLGIIRKDSHLFSTLGQTALLDEIKAVSIKQMLTQSFAVLDQMLASFDNAKRAMIEFSKQFQEVKLLQTAPGVGIITACRFVAYLQTPHRFSNKRKLWRFCRLGVTRRESNGKRLAHPRLDSAGVGSLKDVSRKVFEAARRTKSANSFKQFYEQSLANTKNAVHARLSTQRKILATLRAMWMSNQPFRNDLTEIG

SEQ ID NO: 359710 - protein, 338 aa, unidentified
MIVIGVDVHKQSLTAVAVDEAGRMLDERTVLVGSDELVGWASTLGAERLWALEDCRQLTRWLERQLLGHGEDLVRVPPKLMAPERRAGRTRGKSDPIDALAVARAALREPDLPRPRPEEPVYRDLKLLVDHRDDLVDERRRTQQRLRWHLHQLDPTLVVPLRRLSRASHLERVSRWLARREQELEVRLARELVNRCRALTRQIEQLDQELEQRTAAIAPALLELPGCGVVTAAKLLAEIGPVDRFKSDAQLARHSGVAPLEASSGRIQRHRLDRGGNRQLNAALYRIAITQSRYHAGARAYLERKQTEGKSRREAIRCLKRLLVRTVFNTLKSEAALT

SEQ ID NO: 359711 - protein, 379 aa, unidentified
MRKDTRHVGFDVDTEKISVAVAEPEGEVRSIGVIPHREESIRRLVKKLGPASRLRVCYEAGPHGYGLYWLLSKLGVHCDVVAPTLVPVKSGDRVKTNRRDALKLARCYRGGDLTPVWVPDAEHEALGDLVRAREAAKKDQLRARHRLGKFLLRRGLRATAGMKSWTAKHLLWVKTVRFFHPAQEATYLDYLHEVEHAAERVARLERAIDQAIEGLPAEMRALVAGLQALRGIKEVSAATIVAEVGPLSRFARPKLLMGYSGMVSREDSTGSDVRRGAITKTGNAHLRRIVGEAAWAYQYRPAMSAAMKKRQEGLSEEVKEIAWKAQHRLCTRYRRLAAKGKLRQKVTTAIGRELLGFIWAIGMQVEREQRNAKLARRAA

SEQ ID NO: 359712 - protein, 334 aa, unidentified
MENIALIGIDLGKNSFHIHCQDRRGKAVYRKKFTRPKLIEFLATCPATTIAMEACGGSHFMARKLEELGHSPKLISPQFVRPFVKSNKNDFVDAEAICEAASRPSMRFVQPRTESQQAMRALHRVRESLVQDKVKTTNQMHAFLLEFGISVPRGAAVISRLSTILEDSSLPLYLSQLLLKLQQHYHYLVEQIKDLESQLKRKLDEDEVGQRLLSIPCVGTLTASTISTEIGDGKQYSSSRDFAAATGLVPRQYSTGGRTTLLGISKRGNKKIRTLLVQCARVFIQKLEHQSGKLADWVRDLLCRKSNFVVTCALANKLARIAWALTARQQTYVA

SEQ ID NO: 359713 - protein, 467 aa, unidentified
MVYSTLNHIQGKIGSRWAQFVRETGVENILIVAIDAAKYTPKAMIASFYGEILEKPFDIDASMSGFTKLKTLIGRHKVRANTRVVVGIETTGHYYEHLVFKCHLEGYHVRTINAATTAKERDALLNWSKTDNLDLMAIVQSIIHGRGTSNELPTGEILQLRKLTRARRELISERTKTKNLILMHMDHIFREYQGKTVWVNGKKSFAKPLTNVFGKAARYLMRHYPHPSDILKLGEEGLRDLSIRENLKLRDKSIKLLLEFAEGSISLPKEQLDADIFLLIQKLDRLDFVDNQIKILERKIEDLFVVMDGAVVLSVQGIGLVTGAELVAEMGELSDFDESGQLIKLAGTNPIVKQSGDNRPSYYGVSKQGRRSFRNIVYQVGRSLAVNNPEMHQRYQKLRERGKHSRQAYIALGNRMIRLAFAMIRNRTLYQTEDKKYVLLEEISKKIRKTNVKKFFETHVSSIKCAS

SEQ ID NO: 359714 - protein, 410 aa, unidentified
MTAVYSVGIDVALRSHRVAVLGGDGEAVGKSFTIESTAGGFATLVETLHARGAGAAQSVIGLEATGHLWENLEAHLTRVGYRVVVLNPVQTRRYRDVLRRKAKTDDIDAYVIAGLLRSGAAAASYVPAETIQSLRELARLRARLMRDRQNYLRQLGAQLSVVFPEHADALGDLLTARARGILRACPTAYHLAAATPRTIHHAAHSAGARGFTREDATRVRDLGRASIYSGKAATARGNVVRTLVTQLERLTAAIEDLDTAMAEELPPPAGGGPPSDAELLHTLPGVGTHTVATLLGELGTLSRFTSSKALVAYVGFYPQLAQSGERAAAPHLVRLGSRLVRRTAYLMAVNAIRGSAEFRTLYLRKKAQGKKPKQALIVVAVKLLHTMYAMVRDRHAYTAGRVLVAPPAGA

SEQ ID NO: 359715 - protein, 354 aa, unidentified
MDNITFSKSSFFVGIDAHLKNWRVTIRNSGLDLKTFSMNPSPEELYKYLTKHYPEGTYFLVYEAGFCGFWPQRKFNQLGINCIIVNPADVPSSGKEKTVKTDPNDSRKLARELENGSLKAIYIPDVYHEQLRSLMRLRFRLVQNQTRIKNRIKMLLYNYGIIIPKEHITNSRWSGYFIHWLNSVKLNSTAGQFTLDNLLLQLEQSRVNLKQVLKQLREESKDENISSVISSLISVPCVAFITAMSLYTEIIDINRFNSFDHLASFVGLVPSVHSSGETDYTKGLTFRHNKFLRPLIVEAAWTAVKTDPALTFRYKELIKTMPKQKAIIRIAKKLLRRIRHVWINQDSYVKALVA

SEQ ID NO: 359716 - protein, 343 aa, unidentified
MQTITTIGLDIAKSVFQVHGVDAEGKVIIRRQLKRRYVLAFFQKLPACLVGIEACASSHYWSRELNALGHTVRLMPPAYVKPYVKRQKNDAADAEAICEAVTRANMRFVPTKTPEQQSCLMLHRTRHLFIRQQTAVINVIRAHLAEFGIVALVGRKGVEELLDVVADPSDKRVPEVARVCLAALGAQLCRLKGQILEFDRLIMAWHRSNETSRRLDAIPGVGPVLATALVASIADPKTFRSGRNFSAWVGLVPKQHSSGGKDRLGSISKQGDRYLRSLFMAGALAVIRYAKIHGAQHRPWLTALLTRRPTKVAAIALANKIARMAWAMMARGECYKEPVALAA

SEQ ID NO: 359717 - protein, 450 aa, unidentified
MDKKTKQNKSLQFAVINPCCAAIDVGSMMMMVSYSDAQSNQHLLEVDAFTASLQQLATTLKQAGVTHVAMEATGVYWIVVYEILEQQGFKLTLVNAKHFKNVDAQKTDVKDCQWLHQLHANGLLRASHIAKEVYRELKSYLHERTVLQNQKSDTLNRIHKLLTQMNIKVQHLISDIEGVSGMKLLRGIAHGIKDPEELLSLIDVSKLKADKEDLTKSLNGVYKKQFITILQHALKAYDFFKQQMNAYEMLLEEVLKTMLPKDEEGYKPVIQKKKGFVRKNQYTINLKEYLKHIIGVDVTQIDGIDEISALEIISVTGTDMSKWPTDGHFSSWLNLASRPKKSGGKVIGHERRFTNNKATQAFRMAAQTMWQNKGSLGQLYRRLSAQKGSKKAIKAVARKLAVIFYNMVKHQTEYDKNKLQVDTARQTVKKISYLHKEAMKYGFVLQNVAC

SEQ ID NO: 359718 - protein, 416 aa, unidentified
MELIVERAAALDIGKDEVVACIRVPDPAGGGRGRRRRRQEIRTYPTFTASLEALADWLQTEGITQVVMEATGQYWKPIWYVLEERGLELLLVNARHVKILPGRKTDVGDAAWLCELLECGLLRGSFVPPPGIRELRDLVRYRKRLIQAHGAECQRVQKTLEDAGIKLDSVAADVLGVSGRAMLKALVVGERDPQVLAELAKGKLRKKLPQLRQALRGRFGEHHALLVGLALEHLEHLEAAIARLDARVDEVMAPFAVARDRLDTITGVGKRAAEAIIAEIGVDMSVFPTAGHLASWAGRCPGNNVTGGKRRSGRPTKGNHWLADVLTECAWAAARSRDTYLAAQYWRLARRIGKKKAAMAVGHSILVIAWHLLTEDCDYHDLGGDFFIRRDTDRARHRAVAQLQALGYHVTLQPAA

SEQ ID NO: 359719 - protein, 347 aa, unidentified
MKFYTKQHKYYCGIDLHARNMYLCILDEAGQIKLHRNMKTDRDFFLKVIEPYREDVVVAVECMFTWYWIADLCVKENIPFVLGHALYMKAIHGGKAKNDKIDSRKMAVLLRGGMIPQSYVYPQRMRATRDLLRRRNHLMRKRAELYAHIQNTGSQYNLDEPIGRIAKPHNREGVVEKFDDSSVQKMIAVDLQVIKAYDPIIAQMERDIVTMAKHHDPIAHALLNTIPGIGKILSLVILYEIEHINRFPSVQDFASYCRLVKCSKESNGKQYGSNGKKIGNAHLKWAFSEAAVLFLKGNEYGKRYLDRLTNKHGKGKALSILAHKLGRAVYFMLKNNKPFDQNKFLGL

SEQ ID NO: 359720 - protein, 337 aa, unidentified
MSVYVGIDVHRKRSQVAVVTEDGKVQLNKNVVNGSEPMLRLIGDLPSGTPVAFEAAFGWGWLVQLLEDYGFEAHLVHPLQCKAIASARLKNDKVDAAILAQLLRADLLPEAWIAPPQVRQLRALLRHRASLVRLGTQQRNRIHAVAADHGYDRSASYWTGPGRGWLAELDLPPASREIVTDCLAVIDGLAPVIERIDGELHQHAKADPRVKALRTLPGVGEFTALMMLAEIGDITRFPSARKLASWAGLTPTVRGSDRTVRHGHISKQGSAWLRWVLNQAAQTAKRSPEFAASYAAIAKRRGKKIATIAVARKLLTRAWHLLNEMQATGTATPLRRP

SEQ ID NO: 359721 - protein, 343 aa, unidentified
MHGVTTIGLDIAKSVFQVHGIDAIGKVVIRRQLKRRYVLAFFQKLVPCLVGIEACASSHHWSRALTALGHTVRLMPPAYVKPYVKRQKNDAADAEAICEAVTRANMRFVATKTPEQQSCLMLHRTRHLLIRQQTAVINAIRAHLAEFGVVAPIGRRGVEELLDIATASSEERVPEVARACVGALGVQLRLLKAQILEFDRQIMAWHRSNETSKRLDEIPGVGPALATALVASVADPKAFRSGRNFSAWIGLVPKQHSSGGKDRLGSISKQGDRYLRSLLTAGALAVIRYAKIHGTRHRPWLAALLARRPTKVAAIALANKIARMAWAMMVKGERYKEPAALAA

SEQ ID NO: 359722 - protein, 445 aa, unidentified
MSRKQRKHIRGRRGEAFLQIVRGIDRAHILCVSLDVSKYFHLVMMHNAYGEIICPSFEINIFRAGFEHLCQVIDETAERIAAQVTLIGLEPTGHYFENLARHLHTRYEHVYLINSLAVKENRAQQMMHYEKTDEVDVAAIGDLLCRGEGTPYRPVQGIYLEMQHIDRVRVAKLKMRSALKNQIIGHLDRIFPGMIILDKAAQKRHAPLFTTPFWSCQMAQHLVRVCPDPRRLSQMTPQALIEAFHAQGYRMGPKWAAKIIAFAQQTLHPDPEVIAVRSQLLQRDLTLLEQIERHIAALEEQLCTRLAQTPGLVWTRLMGVSLIQAASLMAAMGDPSHYDYAAQVFRRSGLVSGRNDSGTRQKKGKGKHVTKVGDVYLRRALINLVETLSLHQPTLGDYRRRLKGVKPHPGVARVATVRKAVGILFAILRDQRIDGLRLKKEDDLM

SEQ ID NO: 359723 - protein, 347 aa, unidentified
MKYVGVDVGKKKCRAAIMSAEGKILKELDFSNNRKEIAGIASMLTMEDQVVMESTGPYWLDIYNQLDALHIPVVLANPLKTKAIASARIKSDKVDARILAHLLRTNLIPECYVPSREMREIRSLVRHRLSIVKLRTMVKNKVHALIDRNGFKHEFSDLFGKAGTEWLKSVELSALDRLMLDNYLMHIESLELQIERVDEEITSRASFDSDVRLLLSLKGINVYGALLIKSEIGSIGRFSDYKKLVSWAGLAPSLHQSGEVEFHGNITKQGSTMLRWMMVESARVATTFDPRMKAFYERVARRRGDQKAVVAVANKMLKIIWFMLSRKEAYASVDEGRYAKKLKSLDR

SEQ ID NO: 359724 - protein, 362 aa, unidentified
MAKSTTIIAFDQHAATTVAAVLPSGQRTPALHPLTSDTSTILRFVERLRRSATVQCCYEAGPCGFELQRALAAHDIHCDVIAPSLIPRRPGDRVKTDRRDAGQLAVLYRAGALTTIHIPTEQEEAARDLLRCREDIRADLLRARHRLSHFLFRHGRRFTLTKRAWTKRHAQWLQAQRWPLPALEHTHRAYVRAVDEALARLHAVDQDLRDLLTLEPLRPRVERLRCFRGIDDLTALTIAAELGDPRRFPTAPSLMAFTGLIPSEHSSGARQARGPITKTGNAHLRRVLVEAAWQYRHHAFLGPALQQRQRGAPPAAIDIAWRAQHRLHRRYRRLAARGKPKQHIVTAVARELTGFLWAALTH

SEQ ID NO: 359725 - protein, 428 aa, unidentified
MADTAHTTTKPHLLAIDIARKFNAVFVELASGEQRRFKMTNSAQDFDRLVQYISSTPGPWRAAFEPTGDYHRPIAHRLLQAGVEVAIVSSVAQARYREAKFNSWDKNDPKDASIILDMLKHNMVMRYVDPMVAGHHDLQELSKTYYQITRARTKVLHAIINHHLPLYFPEMQRYWQTTRIEWWLRFMLEFPTPRHVRQLPLEAFIQQAWELVGRKVAKTTLLTEIWHMAEHSAALPHDPNCLAVETFRVTLRQAQQMNDLRSSLEQRAAEVLASNKDYEQLISLPGIGPVIALTVLAEVGDIRRFTHHRQFLKYCGFDLAKLQSGTQRGREQLSKRGNARLRLAFWMAGQVAVRLRENAFKDKYDRYIRSNPGNADLRRKALTAVAAKMARVAYSVIKSGQPYQRFYEQSLPSGSIPINRAVEAEPYH

SEQ ID NO: 359726 - protein, 377 aa, unidentified
MKRIKFVGLDVHAETIAVAVAEQDGEVRSLGVIPNREESVRKLVKKLGPVEQLRFCYEAGPTGYALYWQLVKLGASCEVVAPTLVPVKAGDRVKTDRRDSLKLARNYRSNELTAVWVPDAEHEALRDLVRAREAAKKDQLRARHRLGKFLLRHGRRGPLGVRSWTIKYLEWVKRDVHFAARAQEVTLLDYLHEVEHAAARVARLEGAIEEAVKLAPPAMRAVIQGLQALRGVARISAVTIVAELGEITRFGNARQLMAYGGIVASEDSSGERTRRGGITKTGNAHVRRVVVEAAWAYRHRPGIGVTLRKRQEGVSEEVKEIAWKAQHRLHAKYGKLMAKGKNKGVVVTAVARELLGFLWAIGVHVEKQQKNSLQEVA

SEQ ID NO: 359727 - protein, 494 aa, unidentified
MREAKNNLNLQPSTLNPLMNPSYPYDLIIGLDRSDKKADLCLITTATGQRRSQTIDTAPEALWEWLLALRQKHPQARVGLCLEQPAVHLVAFLEAYDWITLYPINPITLQKYREAFVTSCAKDDAKDADYLADLLLTHHAKLKPWAPEDSATRAVQQLVFHRRAVVDERTGLTNRLIALLKQYFPQALVLCGEDLWRPLATRFLLKWSSLQAVQKVKPATLKTFYYLHGSRSAKLLEQRLALVQKAVPVTDETALIESFALRVQLICRQLQLVQQTLTHYEKQIVSAYAAHPDHEIFASLPGAGPVLGPRLLASIGSQRERFGAAAELQHYTGIAPVTKRSGGSCYIHRRYLCPKVPQAELPRVCQGKHSVEPMGGGVLFAAAYQGQSASDRGAGLGLQVAAGDLPLLAESHSLSGSHLRGGFEEKWQQLGVALRPRGIGQKSLQKSHERILKKPLTDYLRGELRHAGPNDVNPVKVRGPTGLYARAAELACPP

SEQ ID NO: 359728 - protein, 316 aa, unidentified
MNTQNKHYIGVDVSKDKLDFYHPKTKRSWTVPNTPSKVKSELLKLSKQQDEIHIICEPTGGYEKCLLAQALELNIPISLVNPKRARAFAEAMGISAKTDAMDATVLSRFGESITPASRVKPTALQEKMSAIARIKDRFTRQAAAQKTALQKVTDSFVKKELKTQIQSLERAIARCQKQLDTLIAKDAVLREKKRKIESIKGLGLAASTVFLSEMPELGAITDNQASALVGVAPFNKDTGTHSGKRHVRGGRHLLRRSLYMPALCATNHNPILKEFYGRLIAKGKPHHVAITAVIRKLVRLVNRLLSDPNFEPIKQN

SEQ ID NO: 359729 - protein, 417 aa, unidentified
MEVLYSRCAGLDVHKDTVVACVRVAVEGKVHREMRTFDTTTTGLLALSSWLAENGCTHVAMEATGVYWKPVWHILAADGFALILANAAHVKNVPGRKTDIADAAWLADLLAHGLIRASFVPEPALQEIRTLLRTRKQLGREKTAHVQRLQKTLEDANIKLDSVIADVIGVSGRAIIEALIAGESDPATLARLGHRRLKASPGKLSEALRGRVTPHHRFLLRLHLQQVDAVDTAIAQIDQEVEANLAPFRAAAQNLTAIPGVGALASRIIVSEIGIDMSRFPTAGHLLSWAGLCPRNDESAGKRRSTRLRKGAPWLKTTLVQCAWAAIRKTGSYLQAQFRRLRARRGTKKAICAVAASMLTAAYHMLKDGTEYQDLGASHFDQRSKQSQARRLIKRLQDLGIAVDIKPSHEPPVLVSC

SEQ ID NO: 359730 - protein, 414 aa, unidentified
MFAVGVDVSNGRSTVAVLGARRTVVMKPHEVQHTADGFANLTARLNALDGEVRIVMEHTGRYYESFAMSMYRAGFLVSAVNPLAVKDYQEGIRVRKVKTDKADAVKIACFALDKWELLPQYTPMDTIRYDLKTMHRQYQLSSKTKTALNNNLIALLEQSYPGVDKYFDSPVRPDGSQKWVDFADTFWHVECVSKVSQKAFVERYWNWCRRHGYNFSEQKAIELHTDAKQKFPLVPKSDTCKLLVKEAVSQLNAISRTVETYRAEMNRLASQLPEYETVMAMYGVGESMGPQLMAEIGDVRRFAHQKSLVGFAGTDPIKDDSGDKVSNSKPSSKRGSPYLRKTLFVIMTILLQHHPQDDPVYQFIDKKRSEGKPYYVYMTAGMTKFLRIYYGKVRDCLKEKGLWEQPVIDEVNPG

SEQ ID NO: 359731 - protein, 428 aa, unidentified
MIKANTTKLSAINPATLIVGVDIAKKLQWASFTDYRGLELGKAIKFNNSKDGFKNILASIETTCKLKGLKQVIVGMEPTGHYWKPLAHYLRAHDVTVVMINPYHTKRAKELDDNSPTKSDRKDSLTIARLVRDGRYYEVYLPQDAYAELRVLSNTRIGLIKRQNALKNNITAVMDEYFPEIRTVFKKPLTGKAELQILKSCPFPELILALGIEGVLAEIKKAVKRTVGRKKACELVEAAQSSIGVNYGLSAAHLKLRLLIEELELLKEQLEQVKEEMDLALTETGYKDLILSIPGVGIVSAASFLGEIGDPLRFEHPNQISRMAGYNLVEDSSGQNQSRTVISKRGRKHLRSILYQMAMVMVARNNEMKKLYQYLKNRPDNPLKKKQALVVISKKAVTIIYNLVKKQARYEAELVFNQFRKNQIKQVA

SEQ ID NO: 359732 - protein, 306 aa, unidentified
MKHVPSNVFIGVDVSKDRLDVAVAPSGESMRFANSEDGIALLADFLKPRNPELVLFEATGGWEMNAVNHLAAQRLPLVVLNPRQLRDFAKTDAIDARILARFGQAVRPEVRSLKPLELRKLDALNTRRRQIVEMLTAEQNRLVSAPEWVRPDIEELIAILKKRLAAINRDLNKLIRKSPLWREKDKILQSFPGVGPITASTIIAALPELGTLTRRQVAALVGVAPLNCDSGTHKGKRKIWGGRADIRSVLYMCAMTAARCNPVIRPFYQKLLRAGKPNKVARTACMRRVLVILNAMMRSNTCWQPT

SEQ ID NO: 359733 - protein, 364 aa, unidentified
MKRKVYVGMDVHKETIQIAYLTSNTKEMVKEQQIKHNEVHIKKFINKLKTEWNEIHCCYEAGVTGYPLYRYLKSLGVNCILVAPGKIPRQSSDKIKTDKRDAIKLARLLRSGDLESIHVPSEEDEAVRDYLRSRDSLRLDLGRNRQRLMRFLLRKGNVYSTTKYWTVSHYKWLNNLHFENEILHETFNDYYSRVRVQEENLKAMDQKIQEIAKSEAFRERVGILRCFRGVDYLTAMFLLSEVNDFRRFKTAGSFMSFLGLVPGEYSSGSKRKQTGITKTGSPRLRRILTEAAWQHRFPGTGSKIVAARRTGQPALVVALAEKASLRLHKKFRNLQLRGKTPQVMITAVSRELSGFLWAAMNLVA

SEQ ID NO: 359734 - protein, 363 aa, unidentified
MYLPLHRIGFETLLSRIQSCSQGESKIKVGLEATGHYSYNLLGFLLDSGLATYVINPLHTNLYRKSLSLRRTKTDRIDARTIAMMLMSDVDLKSYSNTAYHNEELKSLTRYRFDKVKERAKLKSSVARLVNILFPELEKLVSSLHIAVVYALLSNYPGASYIANANTEELAETLCTASKGRYTKSKTAEIQVAAGVSIGSKMPAKSMELKHTIALIRELDKEISEVESAIDKITSQMDSPIFTIPGIGRHMGAMILAEVGDFSNFASADKLLAYAGLSPSTYQSGQLQNCYAHMEKRGSRYLRYALFNAAKYVCLWCPTFSAYLEKKRSEGKHYNVAISHAAKKLVRLIFAMQRSGKAFLADY

SEQ ID NO: 359735 - protein, 326 aa, unidentified
MTESMVGIDVAKATFDVAAPLVPKGKYRTKAKLPNTPAGFTLLSDWLDRHVPGAAVCMEATGVYHEALATFLVERGVTVYVANPAQVAAYAKSELSRTKTDHADAKLIARFAMAQLQVGTTLRPWVPPTPAQRKLRALIHRLNDLEGMRQMERNRLDVSDQAVRGSIADVMETLDAQIAELKKEIDNHIDSDPDLRRDAGLLTSIPGIGELTAAFMLGCAGDLRRFDDPRKLDAFAGMNPAIRESGKWVGQSRLSKLGHALLRAKLYMPAMTAIRHNVAVRALFDRLVARGKPRKLALGAAMRKLLHLAWGVIRSGKNFDPSIALA

SEQ ID NO: 359736 - protein, 419 aa, unidentified
MKIVYRTCCGVDVHKSFLVATIIKTTGGIEPHYSKKRFSTFNNSILQFKQWLIENDCYDVCMESTGKYWVPVYNLLEDTIRVTVANPKWVKAVNGYKDDEKDSKWIGDLFRIGIVPGSFIPEKPIRILREFTRYRYKLISCKSSEKNRFQNAFTVCNVALDSVVSDMFGKSATLITDYLINTDEYDPEYCASLLQKSLKKKSDAVKESIAGYQITPEQKFRLLMVRAHLNYIEKSIEQLDQKLDEMVKPHEDVINLLCTIPGVDRTSAVTIISEIGTDMSQFSSSKRLCSWAGLTPGNNKSAGKKKSVRITRAGVYLKPALVQVAHAAVKSKKSPYYKTKYERISSRRGKKRAIIAIARMILTAVYNMFNTGEVWNPCDLYKIDMPVQLQDKQKQKAVKQALKLLVSEGIISESELAVS

SEQ ID NO: 359737 - protein, 412 aa, unidentified
MTAKDQFAAHVGLDWADKKHDVCVQFKNGDRIFHVIEHTPEALDIWLNELHQRVKGRIAIAIELKKGPVVYALQKYPFVTVFPIHALSLARYRQAFWPSGAKDDPQDAELALDLMLRYPHKIKAIEADNPDIRLLQQLVEQRRLLVEDKRRFVNRLINTLKQYYPQPLEWFSHRDSSLFCELIIRWPSLQQLKRARSDTVRHFMNAKGGPAVAYTEQRVASIASAIPLTTDKTVIEANALMATALASQIKLAGDLIRTYDERIESLFDTLPDAELFKSLPGMGPCMGPRMLAALGDNRDRFNSAEEIQNYAGIAPVTERSGQKSWVHWRWQCTKFVRQTFVEWTAKTVNSSYWARLYYQGQREKGKSHQSAIRALAFKWIRIIYRCWKTKTRYDEAKYLLALEARKSPLLKP

SEQ ID NO: 359738 - protein, 344 aa, unidentified
MDHFGGLDVSVKETSICIVDDTGRIVKEVKVASEPAALLKVLGNPTYRFKRIGLEAGPLSQWLFSALAEAELPVICVETRHMQAVLKAQINKTDRNDARGIAQMIRAGLYRPVHVKTLRSQKLRMLLTHRKLLQSKAIAIENDLRGTLRNFGLKVGMAGKVRFEARIQQLVENIPDLAVLVEPLLIVRRVLREQIIILHRRLLAIVREDEVCRRLMTTPGVGPVVALTYRATVDVPARFRKSKSVGAVFGLTCSRYQSGEIDWSGKISRCGDEMMRTMLYEAAQSMMHSKKWSWLKAWAMQIARRRGMKKAIVALARRLAVIMHRIWIDGTEFRWTREQAAAAA

SEQ ID NO: 359739 - protein, 354 aa, unidentified
MSGDKYIAFDVHQATTVTSVLNAAGRELDGSIIATKAQPILSYLEGFSGPLHVTFEEGTYAAWLYDLLEGRVAERVVCDPRHNALLKEGSKTDRGDARKLADLLRTGMLRPVYHGSRSLPPLQELAHSYEALVEDTTRAMNRIKALYHPCGIDCAGRGVYTQKQRASWLEKLPAGATRLRGELLYEQLDPTRSLRRKARLALLKESRKHLISARLRQIPGLGPLRVALRMARMQTPHRFRTRRNFWSYVGLGLVTFDSGEYRLVKGRIVRRAQPVKIRGLNRNHPPQRKEIFKSAALTAIRQPGPFKDYYDPRLQQGRDPEMLRLNVARKLAALVLSLWKKGGHYRAEGLPSPA

SEQ ID NO: 359740 - protein, 390 aa, unidentified
MVFVGIDVAKDKHDCFIINSEGEVLKDVFTIENSKQGFELLLQSINTCTGVGEKIKVGLEATGHYNYNLLGFLLDNGLPTYVINPLHTNLYRKSLSLRKTKTDRVDAKTIASMLMSDVSLKPYTNIAYHSSELKSLTRYRFDKVKERAKLKSSISRLVNILFPELEKLVPTLHMVSIYALLNEFPSAKHIAEAHLTKLTNLLSSASKGRYNRDKAILIRNAAKNSIGVFMPAKALELKHTICLIQELTKEIDEIEFAIKNIMDVINSPIPTIKGLGQDTSAMIIAEIGDFNNFDSPDKILAFAGLSPSTYQSGQLNNCYAHMEKRGSRYLRYAFFNATKSVCNWNPVFAEYLDKKRSEGKHYNVAISHAAKKLVRLIFAMQKSGQSYRLN

SEQ ID NO: 359741 - protein, 347 aa, unidentified
MVTFGGDSHKRTHTVVAVDENGRQVGERTVAATPIGHMEVLGWARQWPERRWALENCRHLSRVLERDLLSAGEAVMQVSPKLMGIARRTGRELGKSDPIDALAVARAALREPNLPVAQLEGKSREVKLLVDHREDLVGERTRIQNRLLWHLHELEPGYEVVASGLLRTVVLAEVSSRLESHKGVVAEIARELVARLTELTQSVKRLQRRIDAQMCELAPSLLSLPGCAGLSAAKLVAETADVSRFRSSAAFAMHNGTAPIPVWSGNRERHRLNRGGNRQLNVALHRIAITQMRLGGPASAYIARRLTMGNTKTEAIRALRRQISDEVYRRLRHDHSQRSTALVAVAA

SEQ ID NO: 359742 - protein, 377 aa, unidentified
MDNIAGRIHQDSIIIGVDVHKYSHTAVALDCFGQEKGRFEFSNDSLGEYANWLATLGKKDNLIVALEDVNGYGVHLVERLSLLGFSMRYVPAILTERDRKQSTSRDKSDYLDARRVGKVILTKYEETLPAKESIANREEIGIATALDLLLCERRDLVRGKTCLKNQLHALLHQYYGDHYQDGFPKAFHKKALAFYTKDLGKAPSTSGKNQTKVLLAKSIIRRIGRLTLIEDQIKIITKDLEKAGRDSPQVQTLASAIHGCGMVTACAIVSEVVTIKRFRNKAKFAKYAGVAPTERSSGSKDRLYTNPFGNRTLNRAIHTIALSQIAIKGDQRGKIYYQKKLSEGKTKLWALRCLKRQLCNRIFQALKNTRGETNCLE

SEQ ID NO: 359743 - protein, 395 aa, unidentified
MRRDTKEVLAELVGKLKEKLDPKKVAATSAREEHERGELRPNLDRLTVGVDLGDQWSHYCILGLEGETLAEGQLRTTQEDIAEFFQALNAARVVFEVGTHSPWVQEVICGSGHEVLVANPRLMEGSKRRKRKNDRIDANKLARLGRVDPQSLHPMQHRSREVRQDLVVLRARDALVAARTELINATRGLVKSMGSRLPKCSSPSFAQKVEETVPVELRDALLPLVRMAAALSDCIQGYDEKIEKLGREKYEHTALLRQVKGVGPITSLAYVLTLENPERFVKSRDVGPYLGLVPKQEDSGESQPQLGISKAGDTMMRRLLVGSAHYILGPFGPDTDLRRYGLRLCERGGKNAKKRAAVAVARKLAVLLHCLWVSGEVYEPLRQGMSATMTPAAAA

SEQ ID NO: 359744 - protein, 349 aa, unidentified
MKHTITIGMDLGDRSHLVVVQDDAGNELDMSKVINTRKAIEHYFRDYPGATVALEAGTHSPWISRMLTELGCTVYVGNPRKLRMIWDSKDKTDERDARMLAMVCRVEPKLLSPIRHRGRQAQVDLSLIRSREVLVRSRTSLINHARGLVKGIGERLPKCSAASFAKRCEPEAPSSLQPALSPVFSIISALSEQIRALDKQIQVLSRERYPEAQLLQTVPGVGPITSLAFVLTIDDASRFDKSRQVGPYLGLTPRKDQSGTSDKQLPITKAGDGYLRQLLVSCAQYILGPFGPDTHLRRHGQQLTMRGGKNAKKRAAVAVARKLSVLLHRMLVTGEAYDPFYQQKMRKTS

SEQ ID NO: 359745 - protein, 499 aa, unidentified
MAPCPANRRLVVRGRIEECSSTGHGLCHLSINKSNDITMAKKAKKVKTAKGAELRIVNPDAAGIDIADGIMQVCVPADRSKDNNRTFGAYTSDLHAISAWLRECGIKTVAMESTGVYWIPLFCRLQEDGLDVVLTNARDVKNITERKTDESDAEWLMLLHQYGLLKASFQPHNDAKRMRTLTRHRDTLSREASSIVLRMQKAMQQMNIKLTLVLSDITGKSGIRIIEAILAGERDPKRLAELADIQCKTPKEEITKALEGNWEEDLMFVLRQNYDTFKHYCIQLGECDAELEKLMENYRAEVAKVEGTSYSPAKKRRDYKKTRHTVGFDVERKAYEMWGVNVFEIPGISHLTALELMSELGHDFTRKFPSSKQFCCWCNISPNTKISGGKRISSHVPHRRNNVGLIFRSIASSLANAKNQLGNFYRRIRSRTGGKAAVIATAHKVAEIFFAMVANQTTYNPEKVGIDEKVLLEKRITRYKRELERITGTHIEIGNACVP

SEQ ID NO: 359746 - protein, 347 aa, unidentified
MTIVENRTLITGGVDTHLNFHVAAAIDANGGTLGIETFPVGRRHYADLSRWLESFGELDKVGVEGTGSYGAGLARHLRHGGISVVEVDRPNRQMRNRQGKSDHVDAVAAARAALSGTATGLPKGRDGNVEAIRVLMVARRSAVDERIQILNQMRHLVFCAPDEIRTRFEDLSPKALLNATSTLRPREGDDVVRYTTLIVLRELGRRAKNLHEETKRLNRLLRPLVKQTAPGILEIYGVGYDTAAKLLVTAGDNPQRLHSEAAWAHMCGVAPIPASSGKTQRHRLNRGGNRQANSALYRIMLTRMRHDQRTRDYVARRSAEGKTMGEISRMLRRYISREIYGQLPRPA

SEQ ID NO: 359747 - protein, 458 aa, unidentified
MAEISLPHRRLTGNGHPLSYCQLDRSLRLAHRSLGKDVPAWLSGKEARLVRTTTGGDFVSELWIGVDAGKRAHHCVAIDAAGAVVLSKRVDNDESALLDLIAAVLVAADGDAVVWATDLNTGGAALLIALLEAHGQQALYIPGRIVHHTAATYRGDGKTDAKDARIIADQARMRRDLQPVRGADQISTDLRLLTSHRTDLIYDRVRLINRLRALLLEYFPALEAAFDYSKKAPLVLLSGFQTADTIRRMGATRLAVWLRKRGCRNSSQMAVKAVAAAHAQDTTLRTQSTGAALVARMAAKITALDLEIAEIDAMITDRFSAHRDAEIVTSMPGFGTVLAATFLANTGGDLSAFGTADRLASVAGVAPAPRDSGRISGNHHRPRRFNRRLLRTCYLAALSSLKSSPASRRFYDRKRAEGKSHKQALIALARRRITTLWAMLRDRTHYQEPDPVELVPAA

SEQ ID NO: 359748 - protein, 371 aa, unidentified
MKSILSVGMDVHKNSFSLCAYDGYTGEIVSESTFASDVKLVIKFIETLKSRHENDVEIKCGYEAGCLGYSLYKLLTARGVDCVILAPTTMQVSAKNKMVKNDRMDALNIAKNLASGSYKTVYIPDEEDVEIKEYIRMIHDFKKELQRVKQEICAFVLRHGYQYDGKSKWTIRYMNWIRELEMSEIQRETLNEYIAEMENLNDKIDRFMNRINEIYQSERYHEKVSKLRCFKGIETFAAMTIQVETADFERFPNAKAYASYTGLTTGEHSSGDKNNRIGITKQGNTVIRKTLVECAQALAKGNVYAKKSQRLKSRQKGMDVNIIVYADKATERLKKKYQKLIERNVPRNKAIVAIARELACFIWGMETGNIH

SEQ ID NO: 359749 - protein, 343 aa, unidentified
MQWPVAIGIDTHKDRHVAVACDRLGAQLGSCEIPATAAGYLHLWQWAVGLGEPRFGIEGSGSYGAGLASFLVVAGASVWECERPQRCERRRGKSDLIDAALAARRLLSGEGLSRLRGAGRREDLRLLLLERRGVVAARTAALNQLQAVLVTAPASLRERLQALAGEQLAEAVTRLRVRTAEPDTKTPLTVLRRLARRLGFLDKELGELERELEAIVSDLCPELLGECGVGPVCAAQLVVSAGDPTRMRSEASFAAHSGTSPVDASSGRQQRHRLNKGGDRQLNRALHIIALSRIRYHAQTAAYYASLLARGKTTREARRCVKRALARYFYHRLRANPRLALTP

SEQ ID NO: 359750 - protein, 341 aa, unidentified
MEYCGIDLHAEYSQICILDEDGEVMETSRVRTSRKALERFFHRDHMRMVMEAGGSSPWVSRLLDSLGHEVVVCSPRRVRLIAESKLKNDRVDAEVLARLVRLDPEFLKPIQHRSEEAQLLRANLKVRSAMVEARTKWINTVRGLLRGFGYKVAGKAPNTFAERVDQMELPGELRAVIEPLLEQLDLLSGEITRRNEHLEEMVKELPEVDHLREIPGVGPVVATYFVLTIDDPNRFSNSRDVASFFGLRPSMRESASVTHFGRITKEGDPEMRRLLVQAAHACLLTKADSELKSWALALAERKGKGKAAVALARKLAVLMHHLWVTGEVYQAFPNKQATQAA

SEQ ID NO: 359751 - protein, 415 aa, unidentified
MQTLVERGCGLDVHQATVVACLLIVLKNGQTEKQMRTFGTTTRELLALRAWLLSQGCTHVAMESTGVYWKPVYVVLETEGTLEIVVANAQHVKKVPGRKTDVKDAEWIADLLCHGLLRSSFVPPKPIRELRDLTRYRRKLVESQAAERNRLLKLLETANIKLASVATDVFGVSGRLMLRALIEGKATIQEMAELAKGLLRKKIPQLEMALEGKLEEHHRFLLKLQLERLEAAEKDLAVLEQRIQEKLQPYAAQLALLQEIPGVDWTLAAVIIAELGVDMKVFGNVSQLASWAGVCPGSNESAGKRKSSRMPKGNVYLKTALVEAANAAARAKGTYLRDKFFRLKARRGYKRATVAVAHKILVAIYHMFSHNVCYNELGDLYLDNLNKHHLTRNLVHRLERLGYTVTLEPKAASAA

SEQ ID NO: 359752 - protein, 403 aa, unidentified
MVLVGIDWSEKWHDVCLMDEAGRVLSRCRVEDSLPGLTQLQSLIAEQASDPGEVLIGIETPHGLLVRALRAAGYTIYTVNPQAASRYRDRHAVSKKKSDRGDAMMLADLVRTDRHRHRPLAEDSQLAEAIKVLARMHKSLIWTRQQLGNQLRSSLREFYPGALEAFGDRLCEADSLALLKQAPTPGQGRRLSLAKITSALRKAGRHHIEQRAVAIRDALRTPQLEQPALVAQAHGVAAAALAGLIQDLIAQIDHLEKELDRSLRAHPDAEIYLSQPGLSTVLSARALGEFGDDPNYYQDGKARKNYAGTSPITKRSGKTKVVLARFVRNERLADVCQWWAFAAISASPGARRYYDAQRMRGKGHQEALRTVANRLVGILHGCLRYRQLYREDVAWPSSEAAAA

SEQ ID NO: 359753 - protein, 315 aa, unidentified
MKLYGGIDLHANNSVVALLDEEDRVVYRKRLGNDAALVLDALAPYREAITGLVVESTYNWYWLVDALMDAGYRVHLANTAAIVQYSGLKYSDDDSDAAWLAKLLRLGLLPEGYIYPKEQRAVRDLLRRRSRLVQQHTANVLAVQNLFSRNRGRSLNANAIRRLTPEIVGELLPDAHLALAVQSTLLAMRGQEAAIDLLEREACAQVRGRPAYRHLLSTSGIGQVLGLTILLETGPIERFARVGNYASYCRLVGSERLSNGKRKGRGNTKSGNNYLAWAYLEAANFAVRYNPAIKRYYQRKRAKTNGMVAIKTVAH

SEQ ID NO: 359754 - protein, 424 aa, unidentified
MNDNTPQVGRLEPGLFIGIDWADQEHVAYVMDRQGNGMLETIKHTPDAIETWVSDKLRQADGQSIAIIVEQKRGGLIHALMFRENVVLFPINPKQFAHYRQSYSNADCKSDNRDARLLAQMVRERHRQLDPWQADDESTRTLARLCQTRRQLVDEQTRLNQQLNDYLKSYFPLIFEFKTGRSVNRLMLEMLRRWPDPRQLQRADRRILQRVLKEHGYRNEEKRREMIEHIRSARLLTRDRALIEPVAVMVQALSRQIPVLQKAIGELEEMIATEMQAHPDAALFTVLPGAGEALAPRLLTAFGSQRDRYANAEELATLSGIAPVTKQSGKSRVVHRRYACSKFLRQTFHEFADQTRKWCPWSRAYYQLQRSRGMKHHAALRKLALRWIRILYRVWQTRAPYNPSAYLATITNKNPQIVPFLENP

SEQ ID NO: 359755 - protein, 411 aa, unidentified
MDVFCGIDWAEDHHDVALVDRDGQLLARQRISDDAAGLARLLELLAEHGDSPEDPVPVAIETPRGLLVACLRATGRQVYPVNPMSVARYRDRHSVAGRKSDKGDSAILAHVLRTDRHAHRPLPADSELAQAIAVLARAQQDAVWDRTTAHNKLRSHLREYFPGFIAAFAGARDGIMRPEARAILAAAPAPGQAARLTLAQLRTLLKKAGRVRGIDAEAQRLRDALGTEQMRQLPLVEQAMGRQALALLRQLDAACANASDLEQAATESFNLHPDAGIITSFPGLGALTGARVLAEIGDDRSRFADAKGLKAYAGAAPITRASGKTRSVTRRHIKNNRLNTAGYLWAFAALTASPGARAHYDRRKDTGDRHAAAERNLFARLLGCLHHCLLTGQHYDEATAFPASTKLPAAA

SEQ ID NO: 359756 - protein, 410 aa, unidentified
METVVERPAALDVHKAQVTACVRVPAAGGEREQQVAEFPTTVAGLLTLRDWLAAHEVGQVTMEATGVFWKPVWAILEDEFECLLVNARHVKQVPGRKTDVSDAVWLCQLSEAGLLKASFVPPKPIRALRNLTRYRKTQIQERQREANRLHKALEDTGIKLDCVASDILGKSGRAMLDALVAGSTDPEVLADLAKGRLRSKLPALREALEGRFEHLHAVWIGAILAHLDFLDEQIQSLTETIGEQIAPFEKAVELLRTIPGVQQRTAETIIAEIGVDMSVFPTAKHLASWAGLCPGNDQSAGKRRSGKTRRGSKWLDWALEEAAMSAVRTNDVYLAAQYARLRPRRGHKKALGAVKHSIIYATWHMLNTGEIYQDLGGDYFRKRDPERTTTRLVHQLETLGHRVTLEAVAA

SEQ ID NO: 359757 - protein, 394 aa, unidentified
MRYFGGIDVAKDVHWICVVDENARVLIDKALPNTQDDIDAVCEELRAVDGELVIGLDVMGSVATFLEAALIAAGFKLVHVPGIAVNRARVGFTSGETKSDPRDARVIAEQVRTRDNLRVVAFDDEVTIAIRVLIGRRRDLVQDQTRRIARLRRLVGSIHPGLEKALDFRALGPLHLLTKFVAAGEIRSAGQEGLIGHLRARPGVRNAKGLAEAALKAAQAQHTAVPGEAAMAEMARELASEALAVKERLARLDDQLGELLDRHPDAALIRSLPGMGVILTAEFIATAGNIARFRSADAMAAAAGLAPVLRQSGHSRTWRRTFGGDKSLKRVFFQSAFCACSTGDPISKAFYDRKRREGKHHTQALIALARRRVTVLWTMLKNRSEFDPDRAMAA

SEQ ID NO: 359758 - protein, 357 aa, unidentified
MKKLFIGIDFAKEKFDAAIIEACGLKEFGNREYGTFTNDKKGYRQFFKWVKTNADKSVENEWLFCGEDTGSCSLGLSKWLYGKGLDIWIENAYSIKHSSGIQRVKSDKADSSMIAEYAWRHQDKAVLFEPLSESLSQLREVFLYRHKLVQQHIAMDVRKQDKEAAEPSKAISFIKRKSKHLMSEIDNAIKECDLMIDRIIESDAELKENYAIITSIKGVARQNGACLLIFTNNFRRFDLDARKIACYYGVAPFGKDSGTSIHSPAKTSHFANKLIKSLLGQAAHCAKKFNPEIREYYNRLIGRGKKPQVALNNVKNKLIRIIVALVRKKVPYDQNTYKYYEEREVIERKKNEKLIYC

SEQ ID NO: 359759 - protein, 345 aa, unidentified
MDNTIVGVDLAKRVIQVCIYTNKKVHSNIEMTSGEFLLWLFQHKPTTIIFEACSGSNYWKQKAIEAGHEALLISALLVKTVRQNQKTDKNDALAIIQASQLADIGFINGKTHKQQQLQTMLKLRDLAVKHQTALRNQLIALLAEFNIHSSSRNGGIRSAVGNLLEDADNGFTFECRDVIRVAYDHIIAQGKIVDQYDKQLQNSIEQHEDCKRLLRLEGVGTINAINLYIALGCGDMGLFKKGKDASACIGLTPKQYSSGGVIKLGAIGNRVKHGKLRSQLIVGAMAVVGHIDKRAAKTKKEFWLKKLIERKGKKCAAVALANKTVRTAFAMITQGTDYKAELLTA

SEQ ID NO: 359760 - protein, 368 aa, unidentified
MYNSTTSRTYVGLDVHKDTIAVAVLRPGNEGADQQTVSNRPEAVRRLVSSWNDPGSFQVCYEAGPTGYELQRHLASLGVSCQVVAPALVPRRPGVRIKTDRRDALNLAGLYRAGELTPIRIPSPEEEAIRDLVRLREDLKQDVLRARHRLTKFLLRHGRTYEGHSWSGAHTVWLNHQEFSHAAEKSTFSHYRTALDLRLTQLAGLERELEAYLSGPPFGEMVSRLVCLRGISYLSALTIASEVVDFARFASPAEFAAFVGLVPSEYSSGKSERRGSITKTGNAHVRRVLVEAAWHYRHRPAVGANLYRRSQRQPPEVLAAAWQVQVRLCGRYQRLTKRGKRSAVAVVAVARELAEAVCAFMQPDTTAA

SEQ ID NO: 359761 - protein, 417 aa, unidentified
MTSTSRGWFAGVDWASSKHDVSLTDETGTIVGRRTFEHSGGGLAQMADWLLRETGATPAAVQVAIETPHGPVVETLLERGFSVYSINPKQLDRFRDRFTVAGAKDDRRDADVLASSLRTDGKAFRLLAPADPAIIELREWSRMADEHGRDLRRYMSRMRDQLQRYFPAFLALEGDNDAAWKLALLELAPTPAMAACLPRAKVARLLKAHHVRCHDADAVLAILRAPSLAVSQATIAAASAHVVALLKSIRLTAQQLKEANARLDRLTNALADAEESASGQTMQRDVAILRSSPGIGKIILATLLAEAPQAVRERDYHALRCHAGVAPVTKQSGKRRYVVRRHACNRRLQNAVYHWARKAIQHDKSSRAKYEALRARGHSWARALRGVADRLLYVACAMLTAGTLYDPNHAPASTKTT

SEQ ID NO: 359762 - protein, 359 aa, unidentified
MIVIGADSHKRTHTVVGVDQVGRRLGERTVKTTSDGHLALLEWSAQWPEVTFALEDCRHLTRRLEADLLAAGQRVVRVPTRLMAAARRAGRQPGKSDPIDAEAVALAALRHPDLPVAELDGPTREVKLLVDYRRDLVRQRTRVANRLRWHLHELDPALQVPSRGLRRYKVLEELAVRLAGVEGTVARLARRLLARCRELTVEINALEAELRSLVRRLAPRLLAVPGCGVLGAAMILGETAGAHRFRSKDAYARFTGTAPIPVWSGDRRGKMRLNRGGNRTINTALHMIAVTQIRGIGPGQAYAERLMARGKTRTEAVRLLRRRLSDVVFSALRTDEQARSTSTLTRYSAAAKAASARAA

SEQ ID NO: 359763 - protein, 308 aa, unidentified
MFPVGIDVSKNTLDLCMLYDGIKGRIKTRNIQNNRHSVENILRWLRLQHCSPEDVHVVMEATGVYHEQLATELHDAGFRVSLANPHRSREFARGMGIMTKTDKVDAYMLACYAFLKKPHRWEPPAPEIRYLGALLRRRDVLLGDALREENRLEKYLSTDTPADIISSCRRMAQLLREEISNIERQIKAHIKASPALRRDYTLLASIKSVGPQLGMHMLIVLRSHNFVSAEQAAAFLGVVPIEKRSGTSVRRRPRMSKIGPPQLRAKLYMSALCGKIYNKRMRNIYDEMCLRGKPKMVAIGALMRKLVH

SEQ ID NO: 359764 - protein, 421 aa, unidentified
MDQVVERAGALDVHKEQVTACVRAPGERGGERREEVREFKATVRGLLALRDWLAEHRVTHVAMEATGVYWRPVWHILEGEFELLLCNAAHVKNVPGRKTDVADAQWLCRLLECGLLRGSFVPPLAVRELRDLTRRRRTLVRERAQEANRLHKTLQDTGIKLDGVASDILGVSGRLMLDALIAGQSDPVALAQLAKGRLRAKIPALTEALEGRFTAGHRLLIGGILRHIDFLTAEIDTLEEAITVQMTEHGDVPDRPFELAVQIACSLDGIQKRTAQALIGEFGTDMSRFPSDAHFASWAAQCPGNHQSAGKRRSGKTRKGPRWLDGALHDAAMGAIRVKDGHFARKYRRIRTRSGHKIAIGAIKHAILIALYHMLKNGEMYRPPTPNPDAERKHRERTTKRLLAQLERLGHSVTLTEGAPA

SEQ ID NO: 359765 - protein, 416 aa, unidentified
MKQTQNTRGYERYFAIDTHREYHLVGGQNEDQEWVVNPRRVSIEKFSEWAQQNFRAGDIVVLETTTNVWDTYDIVAPLVSRVLVANAAAVGEIAGARVKTDKEDIKRLLKLLFGGIVPEVWVPPAHVRELRAFISYRNRLVKMATMIRNHLQSLLHKHSLMLPKEGVLNQVWWDAQTSISALEKMQIRQELGLLDEIKKLQVAVNEELEKQSTGELWGKQALQLMQLPGVGVIVAMTVVSAIGDITRFESAKQLVGYSGLGAGVHDSGKTHKEKHITKKGRKELRWIMVEAAWRAVRMSPYWKEQYEKYLWRMRKPNQAIVVIARKLLVVVWHVLTKEETDVHASEEDLAYKMLLLSWSLNDNVRMGLSYKQFAKYALMKLGVENDITRFVRKDVPRRLAPREEVLERMTELGIAQ

SEQ ID NO: 359766 - protein, 336 aa, unidentified
MQYVGMDVHWRQTTICILDENGRRVKIFNVQGPWQKVLEELGRIKGDWAVCFEASCGYGWLYERLKRRAQKVVVAHPGQLRLIFRSKRKSDRVDAEKLAKLLYLDEVPPVYVPSAEVRSWRAMIEHRQKLLQERVRTKNQVRALLRTHGIVAPRGLWTKKGRAWIEAQELPTSMDRLQRDVLLERLESLRGLVERVEEALGAIAQSQAGVKLLMEIPGVGIRTAEAVMAYVDDPHRFRSLKSIGSYFGLVPCQDESAGKNRLGHLTRQGPATVRKLLTEASWQAIRRSRTIRAHFERIRQGHPERKRIALVATAHYLLRVMLAMLRTGEVWRAEAA

SEQ ID NO: 359767 - protein, 353 aa, unidentified
MERYIGMDVHAQSCTLAVVSAAGKRLGLKVIETNGTALKEVFASIPGNLHVCIEEGTQSAWMYELLKDRAEVVVAIPDKTKGTKDDARDAWGLAEDLRIGGIKRRVYKDQGPFTELRAAMRSYAMLRDDVRRTKNRLKAVYRARGLMPPAGQPFHSEHHLAWARKLPVEHARSAELLLEQLRLEEDLWAKAEERLKAASKRHAIVKLLSTAPAIGPIRAAQIVATVVTPHRFRTKRQFWAYCGLAVVMRSSANWEKDRQGNWVRAMRQQSLGLNRNRNGSLKEVFKGAAHQVATQMTGHPLHRDFLRLTEGGMKPNLAMVTIARRLAAAVLAMWKHQEVYETKKHLSKISAQA

SEQ ID NO: 359768 - protein, 446 aa, unidentified
MICAAVERCAGIDVGKEFLAVCVLTGPLQGEARKQTRRFGTNIAELERLRDWLKQEEVTHVVMESTGSYWQPVFNVLEDTVKVYLANPREVKARKGHKTDDKDGWWLAHLLRHAMIHPSFIPPRAIRELRDLTRRRKKLLGAGTGEKNRVQKILEDANVKLGNVLSDVFGVSGQLMLDALLQNKAEPAEIAQFAQRRAKQKIPQIIAALEGHRMSDHHRKIIGYSLEHMRFLEEQVAKLDEDIVAKIKEAGLEREWQLVQSAPGLKETSAANVLAEIGPDMSQFPSARHISSWGGVCPGNNRSAGKNKSSHTTGGNPWLRAALTECAWAAATKKECFLKEKFWRITTKSGGKKAPAIVAVAHTVLSLVYEALRTGQPYQEKKVADLNPGQRGRMIRHHVKRLGKLGVKVRSTPLNHETEAVKTKKAKRTRAKDNSPGIRHLQLRAE

SEQ ID NO: 359769 - protein, 388 aa, unidentified
MKNRSDLNQSYAAFDQASTMACVVELSSSSWLAAGTVPGVKRQPRKKLSANPHELLTQLGRWRAEAEKAGHSIKRIVVGFEAGRDGAWLARWLQDRGIEAYVIHAASIPVPREHKRPKTDRLDTEMLMRALLGWLRGEARHCRMAQIPTLEQEDAKRPSREHKNLVSEQTSLVNQLKSELVWLGITNFNIKLVKAGQKLAGLRIPSGEPIPSNALAELYRGLERLAVIRKQIKAIEQAREQRLKAKPAQGTNPLVLMLAQILGLGLETADLLVHEVLTRNLRDQRAVGRYGGLTGSPDESGKTRREQGLAKAGNWRVRHSSLQLAWRWLKFQKGSALAQWYFERTAGGGDIIRKKMIVALARKILVALWRYVTTGELPAGVVLKPAAI

SEQ ID NO: 359770 - protein, 328 aa, unidentified
MQAVTTIGLDIAKSVFQIHGVDAAGNVIVRRQLKRRYVLPFFQKLPPCLVGIEACASSHHWSRELQAVGHTVRLMPPAYVKPYVKRQKNDAADAEAICEAVTRANMRFVATKTPEQQSCLMLHRTRHLFIRQQTSVINAIRAHLAEFGIIAPVGRNGVEQLLDVVADASDKRLPEAARACLLALGAQLRTLKAQILNFDRQIMAWHRSNEASKRLDEIPGVGPALATALVASVADPKAFQSGRNFSAWIGLVPKQHSSGGKDKLGSISKQGDRYLRSLFTAGALAVIRYAKKSMAPNIGPGSRLCWHGGQPRSPRSRSPTRSQGWLGP

SEQ ID NO: 359771 - protein, 410 aa, unidentified
MRRMKGKRSASSIVGCAPRCAEPHAETPEGVLPQAFRGGRPVSKTITSFVGLDVHKDSTALAEAEAGRETPRFIGTVGSELGQLLKALRSLGKPETMLVVYEAGPCGYGLARQLRSRGYSCEVVAAGKIARRPGERIKTDRRDALTLARLARSGDLVKVRVPDERDEAMRDLSRTREDAVKARLKARQQLKALLLRHGHRYGGKSSWTLAHERYLATVGFAHPAQDIAFAEYRQAVREGQERVERVTQALRTQTEHWRLQPLVAALSSLRGIDFVAAVTLAAEIGDFSRFAHPTELMGFLGLVPSEYSTGDTRRQGDITKTGNGHARRVLVEAAWNYRFPARISRILQIRQEGQPKAVREIAWRAQLRLAHRYRRLSSRKLHPNKICVAIARELAGFLWDIARQVKVAQA

SEQ ID NO: 359772 - protein, 331 aa, unidentified
MSNIIGIDVSKASLDCAFLRDAEQKRTKRLRCENDVSCFASLVAWAEARSGLPVESLAFVIEPTHVYHEQLVQFFHKAGATVYLVNPGRVRKFAEGIGILSKNDLVDADLLTRYGLIARNLIAWTPVPQELNDLRSLLNRLDVLERNLRSELNRQEKVGKAMVFHRLEQQSIARAVKRLKAEIIRFKRAIRQCIKSTTVLQQHFDLLCTIPGVGAKTAWVMIVILGSRDFRSAPEVASFLGLNPIEKRSGNSQYRRPRLSKSGSGHYRQKLYFPAMVATRKNPDIKDLYERLLAADKSKMCALGAAMRKLVHICYGVVKNQTPYQAQTIPS

SEQ ID NO: 359773 - protein, 368 aa, unidentified
MGTTYAGMDAHARTIHVAVLRPGASGPEEWQLANEPRAVKRLARRLRRDAGGPVVACYEAGPTGFALQRQLEAEGIDCRVIAPALIPRRPGDRVKTDRRDARKLAELLRAELLTDVHPPTEEQEAVRDLCRAREATVSDRTRARHRLSKLLLRKGLAYDGRGWTERHRRWLLTLRFEHPAAQATFDDHLRALEGVEERLRTLERELALCAESEDYREAVGVLRCFHGVDTVTAMTVLAELGDITRFRSARQLMAYLGLTPSEYSSGGRTQRGAITKTGNAHVRRLLVESAWHYRHPPRVGSALRKRREGQPGWAVACADRAQSRLYRRYRRLTTHGKPTVVANVAVARELAGYMWEALHVQAGRLAAA

SEQ ID NO: 359774 - protein, 370 aa, unidentified
MSNNSTTFVGLDVHKDSITVACVGAATTDPVIDVGSIGTQQYAIDRLLKRLGGHGRLELVYEAGPCGFWLQRYLASRQQACVVVASSLIPQRPGDRIKTDRRDARNLALALRAGTLTPVHIPTPAQEAFRDVVRAWQQAKRDITAARQRLKSFLLRNDIRYTGQANWSAAHRRWLAQLVLPSRAQQIVCQELIDAISERERRRDRIEAELDRLAPAWDGYPLAHALQAFRGIQKTVAYTVIAEAGDLSRFAHPRHFMAWLGLVPGEHSSGATRRQGPITRCGNRWARTLLVEAAWAYRYSPKVSAIIERRAQTIDPQIRALAWKAQLRLSTRYRRLAARGKHHNVVVTAIARELGAFIWAAARLVTHTAA

SEQ ID NO: 359775 - protein, 367 aa, unidentified
MTKVRTWVGLDVHAAKVVACVVDAESGEMCVQRLPGDTSKVVSFVAGLPGPTRAAYEAGPTGFGLARAFDAVGIGCVIGAPGKIERPAQDKVKTDRRDAERLVRLLMIGGLHAVGVPTGEEEALRDLVRAREDLRGDLMRARHRMGKLLLRHDVRYDGTSDTWSHRHRQWLSMVRLPERGAQATLLDYLGAIDALIIRRDQLEATIAELVPVSPWAQDVARLRCMRGIDTLSAIGLCAEIGGFERFEHPKQLMSYVGLVPSEHSSGQSRRQGAITKSGSQHARRLLVEAAWHYRHPPRLGTRLKARQLDQPATVIAIAWKAQQRLHQTWRRLEAKRGKRKTIVAAAVARQLAGFCWAIVTTQTEPTP

SEQ ID NO: 359776 - protein, 338 aa, unidentified
MQTGQPVQTYELFVGVDIAAQTATVATQRPGTKASRSFTIDQTPEGYTSLLHQLQVTGSIPDQVLVVMEATGSYWISLATRLAHEGFAVSVINPAQAHHFAKALLKRAKTDAIDAQTLAQLAMVIQPEPWTPPPPIYYALQQRLAQRDDLLTLRQQVRNQLHALVQHPDVVPEVCARMERLLATFETQLVEVESEIAAALTQDSAWAAAATRLQSIKGVGWVTAAWTLVTTLNFTSCDTVDSLTAYAGLAPMPRQSGSSIWHRPAIGHTGNSRLRTAFYMATLSAAQHNPIIKAFYVRLREAGKPEKVARCASARKLLHIAWAVVKKDQRFDPHYAQG

SEQ ID NO: 359777 - protein, 348 aa, unidentified
MVTIGVDPHKDTHSAVAVDALGRQVSERTRPAVMDGFGDLLAWARGLGLERTWVIEDCRHVSGPFERFLLDHGESVVRLPPHLMAGARRSVRERGKSDPIDALAVARGALEEGLETLPVARLAEAELELRLLSLHHQRLVRQRTALINDLRWHLHDLWPELKLATRSLTALTLQTQLARRLARAGSSARVQIARDELRRIRDLTRSCNELYRQLTRLVRQTAPQLLAETGIGPVTAAQLIGEIAGIDRFASDAKLARMAGCAPVPVSSGRTDRHRLDHGGNRQLNYTIHMIALTKLRHDPATALYIAKQRQNGKTQREAIRSLKRYVARRVYQLLAALAGPHSSVHLL

SEQ ID NO: 359778 - protein, 354 aa, unidentified
MTSMATESTAVTGGVDTHSATHYAAALDAVGRLLGTREFPADDAGYAQLRTWLRSFGAVGEVGVEGTGAYGAGLTRHLRRHGVVVIEVNRPDRRSRRVRGKSDPLDAESAARRALSGQEQITPKDTTTIVEAIRVLRIARTGAVKSRTAAYNQLKDLIITAPDGLRATLRGKTLQRVAAEAARLRPDLTDLANPIHATKLAMRSIGLRVTDLNAEIRALDTQLKTLVTRAAPRTLALRGVGIENAAQLLITAGGNPERLRTESAFAALCAACPLPASSGKTSRHRLNPAGDRDANKALYLITISRMRYCPDTQAYIARRLTEGLSKREAMRRVKRYVARQTYHAIRADLALAGP

SEQ ID NO: 359779 - protein, 338 aa, unidentified
MHVATLGIDLAKHMFQLHGVDARGQAVLSRRVRRSQLMEVVRSLPPCVIGMEACASAHHWGRAFEQCGHTVKLMSPKYVKPYVKTNKNDCRDAEAICEAVSRPTMRFVAVKTVDQADLQAVHRSRSLLIKTRTALINQIRGLLGEYGLVIARSPEQVRPALVGLLNDEQTGLTPFARDTFSELYEQLVELEPRIARVNQRLDRVFRAHPVCRKLAAVPGIGPLTATALLAAVSRPHAFQNGRHLAAWLGLVPRHCSSGGHARLGGLSKRGNRYVRTLLIHGARAVVQRAAHKTDAHGRWMWDLKRRKGTTVAAVAVANKHARVIWALLAHDDVYRQPA

SEQ ID NO: 359780 - protein, 300 aa, unidentified
MVKDNKLSFQGQYIYVGIDTGKKSWTVTILTEQLEHKTFSQQPVPEILVDYLHKNFPEAHYKCAYEAGLFGFWIYETFEKLGVDCIVVHPADIPTKDKERRNRNDSVDSRKIAKNLRNGDLTPLHIPSRQSQEDRSLVRMRITMVNKQTRCKNQIKGFLSYYGITIPDELSNSHWSNRFICWLESLKENLEENSREGLYLEYNSGKKALGVLLSELRYLRSVIAQLTKDIRHLSGQNPYSDLVSYLNSVPGISTTTAMVFLTELDDITRFKNLDHLASYVGLIPGEDSSGDKEYRSFKTS

SEQ ID NO: 359781 - protein, 370 aa, unidentified
MLDTTTFIGLDVHARSIKAVSLDVMTGEVRAATFGYDAGAVAGWVRSVDPRARCVYESGVTGFDLQKRLSGLGVDCVVGAVSKMIKPSADRRRKNDRNDAEFLARMLSVGNVVEVWVPDDECEAARDLTRALEDARDDLSRSKQRLSKFLLRHGLVFDERTPTGRRKGNWTRAHWSWIESIRFAEGADNDVLAYYVDAVRRAAEEKARLEGLVEAEARKPRWRRRVDSLRCLKGVDTASAADLVFEAGEFSRFGNARSFAAWVGLTPSEHSSGESDRRGAITKAGNKHLRKALVEAAWHYLTCSGRPKGLAKGQAPDRVARRHAAKGVRRLVERREALLARGVHNNKANVATARELACWVWAVGLMAEEA

SEQ ID NO: 359782 - protein, 317 aa, unidentified
MTFVGIDVSKARLDVAALAPTGEIQREAFENTVQGHADLVAWLASFPSCRVALEATGTYHHCLTSVLQDKGVYVSVLNPAQVSYFVKSQHRRNKTDKADALWLAVYAKERQPDATLELNLSRQGLAREIGTLSKDITRLKNRLEAAEAGHTHAKVVASLKRRVAALEEEKKDLEAELEQETKNTNEQELSLLRSIPGVGVRTACLLLAELSDVRRFADARKLVAFAGLTPTQFESGTSVLRRSSISRLGSSHLRRILYMPCLSAVRFNPIIKGFFERLVERGKHKKAALVACMAKLLKIVYGVLSHQMPFDPARMTP

SEQ ID NO: 359783 - protein, 425 aa, unidentified
MNQDNQSFAAFIGLDKSDKKINVTLQRCSTARSERSIIQGSAEALHAWVAALCARFPHQRVAICVEQPAAGLIHALMGYDFVVLFPINPVTLARYREAFTPSRAKDDPTDADLLCELVAQHREQLKVWQPDDICTRKLRHLTQARRSSVNMRTRLSNQLKALLKGYFPQALELCGEDLTTPLACAFLQKWSSLQQLKKARPETIRRFYYAQNARRGDVIEKRLTLIAQAVALTNDPALIESSIITVQALTLGLRAVHTAIARFDREIARTFTQHPDASLFAALPGSGTVYSARLLAAFGSRRERFESAEALLNFSGIAPVLKRSGQTAIVHRRYARPIFLHQSFIEYANESIRHSLWARAFYQMHKAAQQSHWVIIRALAYKWIRILFRCWQERTPYDELRYLKSLQKSRSPLLQYLAQPNTQTV

SEQ ID NO: 359784 - protein, 409 aa, unidentified
MFHIGIDWADDHHDIFAVNDIGRHVADFRVKADREGLAHLQDRLGQLSAEAGGKDQVAIGIETSRLLLVDLLLNDGYTVYPINPKAIDRYRDRYTASQAKSDRFDAEVIANALRTDRERFRPIQPDSPLVRELRILVRDQRRLIRTKTMFLNQLQAALKDYYPVVLEFFDDFDGPSALAFLAKYTLPARLGAKPIERLLRSQHHPHPEQKAQQIAAKLSEPFIPVDEFTVRAKSRLVRTLVEQLQALRAQIQGYQKEIENLFEKHPDSNWIQSLPGAGPGNGPRLLTELGDNRARYESPDRLQCEAGTCPVTASSGKSNFVFFRRACRKSFRDTMHQFSFCSMNQSTWARALYDQSRAKGKTNASALRVVGDKWLKIIYHLWKERKPYDENVFLASRMRYQLQQSGAPA

SEQ ID NO: 359785 - protein, 366 aa, unidentified
MRSKKLYYIGLDVHKDSIWMAVMVDEQDLPIESKQLPNDYLKIVKAIAPYQEKGKVQVAYEAGCLGYGLQRHLSEFGFDCRVIPPTKVVRPGKNKRVKNDKRDAMLIANMLKRREGESINIPTKEDEAGRDLLRCRNDFKDDLKRAKQRVLSFLLRHEKKYESNRHWTMKHRKWMAGLQFDLAVDKMTYEYYLHYIENMEERIARVDEEIRKEAENERNAEKTRVLRAFRGIDYITALSFICEVGDFRRFATAESFMSYLGLVPSEYSSGKKIKRGPITKTGNNQLRKLLVESAWHYTRPVKESKRLAARRAGTSEQVITYADKAMSRLHRKYYKMVARGKEKNIAITGVARELSGFIWGVMKMTA

SEQ ID NO: 359786 - protein, 343 aa, unidentified
MILVGIDVAKDKHDCCIINSDGKFPEEVFSILNNREGYETLYKRICSLAVDFTKVKVGLESTGHYSSNLLAFLLDKHLTAYVINPLRVNLFRKGQSLRRTKTDKIDSRNIAHLLMADSSLKPYSLSSYHMEELKSLTRYRGTKVRERTKLKTSIARLVTILFPELEQLVSSIHIHSIYAMLEKFPGSAYIAAAHLTRLTALLLKASRGRFGRETAIRIRDTARRSIGAVSPAKSMELQHTIAHLRVYDQEIGEIESEIEKIMDDVNSPITSVPGIGMQMGAVILAEIGSFRRFDSPDKILAYAGMSPSMYQSGKLTGSYSYGEKRIPLSSLCTVQCHKICLSL

SEQ ID NO: 359787 - protein, 410 aa, unidentified
MSNSLLVGIDVSLNDNKVRILHPDGTSLSKFVVPNSVPGAKVLSQKVTGIMEKNSFDTIVIGLESTSVYGDPLVYFLKQDASVNRFNTKIHVLNPTQVNKFKLFYPDLPKTDDIDAWIIAEHLRFGRINKEVYMDDRYKALQKLTRARFHTVQNLAREKNWFLNNLFLKFSSLAQEKIFSDRFGATSSSIIEEFFSVDEISYMPIEELVEFINKKGKGHFENPDEVAAAVQKAARSSYRLPKTVTDSVNQVLAVSFAAMKAYKEQLKIFDKAIEEQFKLIPNTLTSIKGVGPVYAAGIVAEIGDIHRFKDHAALAKFAGIAWTKHQSGNFTAAHTHLIKFGNRYLRYYIMEATNKVRMHDHELKRFYDLKYSQTPKTPHKRALALTARKFVRLVYALLHSNRLYTPPKGD

SEQ ID NO: 359788 - protein, 340 aa, unidentified
MDATTYGLDVAKRVFQMYWVEVETGEIVNRRFGRDELIRFLAQRPPGRIALEACGSAHWWARKIKALGHEAVLLHAKFIRPFVQTNKTDAADARAIWTAVQQPGMRTVAAKTEDQQAMLSLHRMRALLVKFRTMQVNQLRGLLYEFGVTFRAGRAAGLAEIQARTAELEGALPGTMMCCLQDQLRRIDELQRDIDLLEKRIGVWQKQDAACHAITAVPGIGRLTATALVATMGDAKSFRSGREFAAFLGLVPRQSGTGGKVRLGPMSKRGDPYLRTLLIHGARSVMYNAKVPTPWQTDIQARRPSNVAAVALASKIARTAWAILARGQEYQRNYVSVRPA

SEQ ID NO: 359789 - protein, 409 aa, unidentified
MQVMHPRCAGLDVHKKSVVACVLISLPEGVVQKHTQTFGTMTPELLALSDWLQGHGVTHVAMESTGVYWRPIYQVLEGRFTLLVGNAQHIHRMPGRKTDLTDAEWLADLLRHGLIAPSFVPAQPQRELRELTRHRSNVAGRRAQCVNEMHRTLEGTNIKLSSVATDLTGVSATAMLEHLVAGETNPDLLAELARGLLRKKIPQLRQALQGVVRPHQQLILSQLLADLAACDEQIGTLDAEIDLRLTAEREVLERLDEIPGVNRKVAEVIIAELGTDMKRFGSASRAAAWSGMCPANRQSGGRRYRAPSRFGNTHLKSALTEAGRAAGRSKDTYLGAQYRRLATRRGSKRAALAVGHSILTISYHMMDRGTRFHDLGADYFDRRNPERVRDRLVRRLESLGYRVTVEQAA

SEQ ID NO: 359790 - protein, 427 aa, unidentified
MSYRIAGIDVHKRMLAVVVADVAGEGEYEFERRKFGATPEQLQVLAQWLTQQEVQEVVMESTAQYWKPVWGALERYWKRGCKEREGAGPMSGTLHLAQAKSNRGARGRKNDFADGERLVKRLVAQELILSFVPEPEQRLWRTITRKKYQLTGHMTRVKNQLEALLEEAHIKLSSLISDLLGVSGRRMLQAVAEGESDPAKLASLADQRLRASASQLRDALDACRDLQPVYRRLVKMALEELGLLQKQIEELDKESAGLLSPHQDAVERVAEVPGFGVDSSQQIIAEVGPQAASFPCEKHFSSWVGTCPGQEVSAGESKSSRSPKGNRNVRRLLNQAAQCAVRVKGSIFELLFRRLVPRLGYKAAIWAIAHRLGRLIWKILHEGVRYEERGPAVSAKSKKARAVRMIKELRELGYRVEPPNVQMEGAR

SEQ ID NO: 359791 - protein, 341 aa, unidentified
MQITTLGIDLAKSVFQLHGVDGSGTVVLQKKLRRGAVLDFLSGLEPCPIGMEACPTSHFWGREIAALGHDVRLIPPAYVKPYVKRQKNDAADAEAICEAVTRPNMRFVALKTEDQQAVLVLHRSRDLLMRQRTMILNAIWAHFAEFGVIAAHGPRKVAEMVRRLRDPDDELDLTALARSALLSLAAQLESLAEEIGKIERQLMAWHRQSAASQRLETIPGVGIITATALAASVPDPSVFKSGRQFAAWLGLVPRQNSSGGKDRLGRVSKMGNGYLRRLLVVGATSVTRRAPTTDTRTGAWVRSLLERKPTRLVTVAIANKTARTAWALLARGENYRAAPAT

SEQ ID NO: 359792 - protein, 349 aa, unidentified
MDATTVAVDLAKNVFELAVADSGGRIRAHHRLSRARLLPFFSNLPHCRVVMEACGSAHHFARRFSELGHDVMLLPAQYVRAYVRRNKTDRAYAAALIEAARCADIHPVPIKSVDQQAIQQLHRLRTQWMRTRTARINLLRGMLREFGIAIALGAMRAIEQVRRQLAAPNGTVPAALQPSLTELLAEIAALEQRCTHIERQLRSLTQHDAVVQQLLGIPGVGPLTATAMRAALVDVHRFPSGRHLASWLGLTVREHSSGERRRLGRISKQGDPYLRTLLIHGARAVLNAAQTARRRGQSLDRLRSWALSTHERCGHNKAAVALANKLARIIWATWKHERTFNANWVPTTA

SEQ ID NO: 359793 - protein, 375 aa, unidentified
MSEIIVACRSFIGVDLHKTTVTLVAVAPDGTEIARLTINTKCREKIRLWLLGLPGPSHMAVEAVGFVEWFIEYFRPYVDRIDIADATELSNRRGKRRKNDYKDALDVAQRLARGECPCGYIADDELMQLRKLGRHWRQLSKLLALNKQFMKSILLAANLRGPKFDGASAQRWLLAHGHLLKPAQRMAFANFTRVVQLIELQREPLRYAIIMASRSERFAPMTKLLQSVPGIGEIWSCMITAEIGPFNRFPNADALEFWAGMTADLKESAGRTQSGKITKAGSRTLRWALCNAALTMCHSDAGQEAIRQRLIRKTGGIKGKANTAMGRRLLRTLYAMVRDNRPYQAGAPRNRNAAANKARAAKRASKTRKNGKEAA

SEQ ID NO: 359794 - protein, 349 aa, unidentified
MTIVGCDLHTRKQQVAVLHTDTGEVVEQELVHAGDAVERFYRTLPRPVTVGIESTGYALWFHELMQHLGHTLLVGEAAKIRAMVVRKTKTDRRDAQHLLDLLKHDRFPAVWIPDPATRDLRALVTHRMRLVRMRTMVKNGLHAIAMNRRLTLGPSLWSQRGLAQLQGLALAPHTTQRRDESLQLLTWLTARIAALDDRVAAAAQADPGARLLLTHPGVGPLTALTTVLVLGPVARFPDSKHVGSYTGLAPAVHASADTCRLGQITKQGSPLLRFVLGQAGLIAAHAEVDLKRHYRTLLRRRGRPKAIVAIARKLLVRLYIMLRDQIDYEEFRRRGRTPRGQEVPPPALA

SEQ ID NO: 359795 - protein, 373 aa, unidentified
MSVIDSDTQATRGRQAGVGRAGPRGMGVTVGVDTHQRTHHAVVLDAAGMPRGDREFAACARGYEELVTWALALAGSGLIEAVGVESTGSYGAGLTRHLLVAGLSVIEVARPEKSTRARHGKSDPIDAESAARQVQAGTATGRPKISTGIVEAIRILKMPRDGAVHDRTRAYNQLRDLVTTAPASIHDELIGLSGPQRVARALAWRPDRDRLADPTQAAKRALRWLAHRIRELDTQIAQADVELDTLTAQAVPTLRAMPQVGPQTAAQLVITAGQNLDRLRTEASFAKLTGTAPLPATSGKRQHRHRLNRGGDRAANSSLHMIAIGRLRRDPETRAYRDRRQAEGLSTPEILRCLKRHLARHVYRALRTDLMTA

SEQ ID NO: 359796 - protein, 395 aa, unidentified
MKFNMFLGIDVSKKTFDACLINDEQKQIFNDNFSMNNSGFQKLDEKLKSFEQNRLLIVLESTGIYHINLSVFFTEKKFNVAIMNPLLIHNFIKSVSLRKSKTDRIDAFRIAQFALYNNAKIETIESVPKSIKSLNRERENLSKNIAKLKTEIKALLQVLFPELVNNYNVFVKAILNLLLTAPGADKIKKLKPQQIEAIIDSTKGNRLKSITPRQFIKLARKSIAHEDPSREVILIMKIKMLLFIINQKNDLNKMLKDYIKQNQHEEFEIITSIKGIGQNTAEKFLIELDDINLFDSHKKLRAYIGTDPSIKQSGSSINKSSRISKRGNAILRKTIWQMAVSVIRYCDKFHEYFLKKKNEGKKYKQAVIAVANKLIKTLYALLKNKVKFSPNYGAN

SEQ ID NO: 359797 - protein, 357 aa, unidentified
MEYGAIDLHKKESQIRIVTKSGESIDRRIVTTRERLTHVLGGRPRMRILVEASTESEWVAQHLEHLGHEVIVADPNYGPMYGHRSRRIKTDRRDVAALTEACQHGTYRLAHRRSARQHEVQCRLNVRQELTQARTRAISLARAITRAAGLRIRSGRTETFLARLGGLDLPASMHTTLSPLRSVIDVLDDELVRADEECETLVAADPMVKRLTTLPGIGPITATAFVAALDVVSRFERAGQVTSYLGLVPQEHSSGEKQRRGRIVRSAHPHLQSLLVQAAWRVWRASDPKTEPFRVWAQAIARRRGKKVAMVALARRLARTLFAMWRDQVDYQAERIRTRRATLVAETTSETSVAVPV

SEQ ID NO: 359798 - protein, 381 aa, unidentified
MRQVCGLDVHKDSVFVCILNENGIVFQEKFGVLTPELEQMLSVMLQYRVEEVCMESTSIYWMPVWRVLENYVSLKLVNPYFIKQLPGKKSDVKDAEWIATCLLKDLIKGSYVPEDLIQQLRQYDRRISDLNAEIVRKLGKLDAALQRCNIRISNYVSSTDGKSYKEVVRLISEGIRDPSELTKVIHGRTVNRVGRDVVLASLTGVISDTDIDVMRQLREEVELVEKHKDECQSKMDAICRQYFPDQLKNLQTIPGIKGRSATAIIAEVGTDMSSFEDAAHLVSWCGLKPRNEESAGKIKARGITHGNRYLRKTLIECAWAASKTQDCYFSKFSYHQVVVRRKSKMKVQVAIARKVLTAVWYVMHDNVAYRDFTPDIAPAAE

SEQ ID NO: 359799 - protein, 364 aa, unidentified
MVIPGWSATHYSLKYVGLDVHRDTISVAVLDGGGKLLMQSILATHAAALLDFVRGLRGTVHLTFEEGTHSAWLHDLLVRRVARVVVCDPRQNALLKAGNKNDKIDARKLAELLRAELLSPVYHGESGTVTLKHLSRGYAALTEDTTRVKGRIKALYRSQAIASAGKKAYGRRHRGQWLAQLTQAGMHRRAELLYEELDGLLLLRREARRELIVESHKHDAVKLLRTVPYLGPIRAALLIARVQTPHRFRTKRQFWAYCGLALETRSSADYRIVEGQLARAKKPVFIRGLNLNHNHDLKNLFKSAATSAGARPGPFHSFYENLLIKAMPPAMARLTLARKIAAIALCVWKKGEPFDAEYLKPQAA

SEQ ID NO: 359800 - protein, 428 aa, unidentified
MLKINPLSTLYVGIDVSSKSNFVCALDFYKNKYINSSFANNQPGAEELAKKILECLKEHPDLNTIVAALESTSVYSIHIANFLSSCEELMHFKPYVFVLNPKCTANYKKSYIGLGKSDPIDAFVIADYARAGNIETEPWRGSQFLALKRLTRHRLHLVECMTREKTYLVSNLYLKFSELQMLEGDGQPFCDIYGAASSSVLTEYLSPEEIIDSSEESLINFLAEKSRNRIKDISKTAELLKKAARDSYRLDKALYEPLNVSIASSFNCIETFKKEIKLIDTAIEREIKGLNPNAFIILQSIDGIGPVFAGGIVAEIGDISAFHSSDALAKYAGLMWKSNQSGDFDGEDTPMSKAGNRYLRYYLGEAANSMRKHNVEYGAYYRRKYNEVPKHQHKRALALTSRKFVRLVYGLLARNQLYSGVSLDTSNE

SEQ ID NO: 359801 - protein, 404 aa, unidentified
MARQVWAGVDAGKTAHHCVVIDTDGEQLLSRRIDNDEPALTDLIATVGDIAAGGEVTWAMDLNAGGGALLIALLIDAQQRLLYLPGRTVHHASKGYRGDGKSDAKDAAVIADQARMRRDLQPLRPGDDIAVDLRILTARRADLVADRTRAINRMRATLLEFFPALERAIDYSSSKAGLTLLTGYQTPDSIRRMGHARLEAWLRNRKVRNAAAVAQTAMDAAHQQHVTVRGQQVAAQIVARLAKEVMTLNSEISDTEALIEDRFRRHPHAEILTSMPGFGTILAAEFLAATGGDMTVFGTVDRLAGVAGLAPVPRDSGRISGNLHRPRHYSRRLLRSCYLSAQVAVHRDPVSQVYYQRKRREGKTHVQAVIALARRRLNVQWAMLRDQKPYTTTDSATHVHGAAA

SEQ ID NO: 359802 - protein, 398 aa, unidentified
MTVAILEPPQITIAAESPRIIFAGVDTHKDTHYVAIVDDHGQPIADREFLAVGSGYRKIIEFLHAYGIVDAVGVEGTGSYGAELARVLANAGMRVLEVNRANRAERRLRGKSDPLDAHQAAMSVLAGRGLSTPKQRDGDVESMRVLLAERCSATKARTASINQIHALLVSAPEVIRQDFRRYDGNKLTVALARTRPAPGTTPELIVRASAKRLAQRHQVLTADIALIDSQLGQLASRQNPALMAASGVGPFVAAHLLTTAGDNPDRISTKAQFAALCGVAPIPASSGKRQRFRLSRGGDRQANAALHRIVLLRKRHKEPRTMAYIARRTAEGLSDRDIVRCLKRHVANEIFALLTQKIPLSLCPVDHGYGNAARRSASSLPTRPNSSTFPTSAYVDSR

SEQ ID NO: 359803 - protein, 355 aa, unidentified
MDSAKYIGMDVHKETISIAVLNASGKLVMESVIETKSFTIIQFIQGLRGDLHVTLEEGTWAAWLYDLLRPHVTEVVVCDPRKNALLKTGNKSDRIDARKLAELLRSNLLRPVYHGEHGVRTLKELARSYLTISGDLARVMTRLKALYRSWAIPCSGKQVYAPRHREQWLCKISEAGVRRRAEFYYQQLDALRALRQQVRRELLAESGKHKASQLLCQIPSIGPIRAALLIAILQTPYRFRTKRQLWSYGGLGIETHSSADHRYVDGQLQPSKRQVSLRGLNRNHNHELKNIFKGAAIIAATKPGPLQQFYAALLAKGIRPEMARLTLARKIAAIILIVWKKGVCFDAQYLKPQTA

SEQ ID NO: 359804 - protein, 353 aa, unidentified
MKQFIGCDAHKKFSLFVTMNEDGEYGRAIRVGHDREVFRAFLQGLAPGSQIALETSGSYYWLVEEMERAGHRPQLAHALTAKRRMEGRHKTDERDARGLAMLLRNGTLPRVWIPPAELRDQREMLRLRMSLVRMKVQLKNRIHGVLLRHNVSIKASDLFGDQGRAELLSRKEELPCWSRESVVEQLQMVDRIESQIGECEKQLETILYPNLERDLLKTLPCVGKVLSAVIALEIGDVQRFGDAKYLVSYAGLVPTARESAERKRQGKCPRDCNMYLKWAFVEAANLISAKQKSWPERHAVRLYQRVKQNTKLHGKATVAVARHLAEAAYWILRKQEGYREPSQKRQVLSSTHG

SEQ ID NO: 359805 - protein, 358 aa, unidentified
MLLAEHIDFVVGVDTHKYTHTAALVTPAGRLVAHLTVTADGAGYAQLLRFAREQAAGRRVWAIEGTGSFGAGLTTHLLERAEWVVEIDHPKRPARRNGAKTDELDALRAAREALARDHLAQPRRRGDREALRVLITTRDDAMRARTKAICQLKDLLVNAPEHLRRSLQGLPTATLVERCARLRTTATQSAELGCTIVALRITARRALALQAEAAELEALLEPLVQQVAPVLLAEPGVGPVSAAQLLCSWSHAGRLHSEAAFAALAGVAPIPASSGQVTRYRLNRSGDRQLNRALHTIVVSRMLHHAETHAYVARRTAEGKSPREIKRCLKRHLARHFFKLLERGAARCAGEFEFERAA

SEQ ID NO: 359806 - protein, 372 aa, unidentified
MSHNNTTPIWVGMDVHQASITAAILHGDDPVPELVRLPGDLNAARRLFRRLADRGVPRACYEASGAGFVLQRTLEHDGFHCEVIAPSLVPSRPGDHRKTDRLDAVHLARMYRSGLLTAVSVPDEDQEAIRHLVRARLFRQRQITRSKHRIMGILRTTSHRFTGTKSNWTKKHRAWLAALRRQITGPLHTVLTSELEYLEYLETSQCALDAEISKVARQHPWRASVEALCCFKGIKTLTAMTIVSEIGDIKRFRSPRQLMGYTGLVPGERSSGDKQRRGPITHAGNRYLRRVLVESAWQYSKRTGSTLILQRRRMGQDPGVVAIAVKAQQRLQRRHYHLSQTKHTNKATTAVARELCGFLWSALWELEHTKQH

SEQ ID NO: 359807 - protein, 358 aa, unidentified
MTQVKKLDFSGTTIYCGVDVHKKSWRVNIQDSEFELEDFTQNPDAVLLHKHLTRRYPGASYKIGYEAGFSGFSMQRSLSGSGCQCWVVNAADIPASDKDKKQKQDKADARKLCAYLQSKKLKGIHIPDAAWEHARTLVRTRERIVNNQTRCKNRIWQLLHFSGLPVPAQQQEGKYWSKRFIDGLQKMDCGGSVHLQQSLQLYIKDYLQTRLLLLEATRAIRSLCREEKYAGNIKLLQSIPGIGEINAAVMLFELQDVTRFKRFDYLCSYVGLVPDTSDSGDTKRTKGITHRHNYYLRTALVESSWSVVRKDPALLMKYKEYCKRMERNKAIIRIAKHLLSRINFVLRNKKEYVTGVVA

SEQ ID NO: 359808 - protein, 315 aa, unidentified
MSRCVLGMDVSKKDISLALLKDNRFFDKTIPNSPSGFKEILNFLQKHNALKAECFLESTGSYSEAVANFLFDHKFIVKVINPFKIKFFSRSRLSRIKTDKKDAQLIAEYGTVSSNDPNYQKPSEAVRSIRSLYRTYLAQTKMSSQCKNHIEHATNELDKNVWTETLNEFELRRKKIVNQIINLINSDKKLKTQFENLQSIDGIAEISAIAIIAEVQSVDKFVNARQLAAYCGLTPRICESSTSVHKKPRISKFGNNFLRNALYFPAIVAIQRCEQFHRYSQKLLSRGKTKKQTIVAVMKKILLAAFAVLKYDCRS

SEQ ID NO: 359809 - protein, 343 aa, unidentified
MQTVTTIGLDIAKSVFQVHGVDAGGQVVIRRQLKRRQVLAFFQRLPACLVGIEACASSHHWARELQVFGHTVRLMPPAYVKPYVKRHKNDATDAEAICEAVARANMRFVPIKTPEQQSCLILHRTRHLLIRQQTSVINAIRGHLAEFGIVAAVGRNGVEQLLGVVADANDKRLPEVARACLATLGAQLRVLKAQILEFDRMINAWHRSNETSRRLDKAPGIGPVLATALVASIADPKAFRSGRDFSAWIGLVPKQNSSGGKDKLGSISKQGDRYLRSLFTTGALAVIRYAKIHGTKHRPWLAALLARRPTKIAAIALANKIARMAWAIMAKGERYKEPIALAA

SEQ ID NO: 359810 - protein, 311 aa, unidentified
MYYIGIDVSKKDLSVFDGKDLKFINKEGLKSFKKYLKKKYDLSEIAIIFEPTGIYSFYLKEFCAENSIKAYIINPKQSHNFARALGIRPKNDKIDARTLYKFHKLIEAKDIKVPKIDQQAKTLASYLTSYEFALKQRVALSNHLESLRDKKLISLLKKDLKRAQILEDKILNNIKEYIEQNQDLKEDYQRLLTISGVGDKTAIVLLTLFKTYQGTNRAQITALVGLDPTRRESGTSVRDRVKISKNGKGIYRKIPYLPTICATVHNQKIRVFYQRLLAHHKPKKLAIIASMRKIILIAHAMYRDKTEYVAV

SEQ ID NO: 359811 - protein, 410 aa, unidentified
MERVIERCCGLDVHKKTVVACVRVPGRTGGREQHVRTFGTTTAELLALRDWLGGYGVTHVAMESTGVYWKPIFYVLEDAFTCVLANAAQIAQVPGRKTDVKDCAWIAQLLEHGLVRGSFVPPVPIRELRDLTRYRAALIGEQTRETNRLQKVLEDAGIKLASVASDVLGVSGRAMLDALTQGTRDPDVLADLARGALRRKLPALRQALTGRFRPHHAFLVSQVLAHLDYLDEVIEALSTHLDEVMAPFAEAVSRLDTIPGVNKRTAEVLIAEIGVDMGVFPTAGHLASWAGLCPGNNESAGKHRSGKTRKGNRWLRGALIQAALAGGTRATKGAFAARYRRVMRHRGHKKAVVAVAHAMLVAAYHLLARHTTYQEPGADYYERRHAERVRHRAVQLLERQGYRVILEPAA

SEQ ID NO: 359812 - protein, 478 aa, unidentified
MEPIHERVAGIDVHRMKHVVTVLISGDGGAVSSETREFGGFKRDMRALVDWLRSHRIQQVVMESTGIYWKSVFSHLEAAEIPALVVNAFHVRNVPGRKTDVGDSEWLAQLARFGLLRGSFIPPKDLRELRVVSRYRQKLTATLAGEKNRLHKLLDDAGIKLGGVVSDIDGVCARKMVEGLIAGSTPEQLSALGRGKLKSTGEVLEAAMDGDLSPRHRLVLTIILNHLRYLQQELARLDRYLIAAMKPYAWAWRLLQTIPGIDEIAAAMILIEIGDNVHRFGSPSRLASWAALCPGNNESAGKRKSGKTRHGNPILRYLLCEAANAARRTKTVFRAKYDSLVIRRGHKKTIIALAHKLIRTIYFVLARRKPYRLDLRLPSRERRKKCTALDQRTEDVRLLAKAVRRKHKGRCCRNLIRPIIRVPTAAVSREHGSEFGADHLTPNAARGLHADRCSSHHPAMGGRFPRAFLAQPHHPLSR

SEQ ID NO: 359813 - protein, 439 aa, unidentified
MITFFILFQKGVIPVKKIDYLSTLFVGIDIASRMNVVSAIDFNQDYFIKMKPAPNSQEGAEFLETMIVNVLGNNHQFKYVIIGMESTGFYGVHIANYLSASDTLAPFSVHVYCLNPKEVKNYKKSFNDLGKNDGIDSFVIADYARVGRIASKPWRGSQYLALQRLTRHRMHITECIAREKTYMLNNIFLKFSEYALLNKDEHPFSNKYSATAQAILTEYTTNEDLVNSSVAELVDFVNSKSRGRIADPEETAKILQAAARNSYRLDTCLYEPLTISIASSFNCISSFEKELKVIDKAILQTVQGLNPVEYTVLNSIPGIGKVFSAGILAELGSIKTFQNADALAKYCGIVWNDNQSGDFEAEDKKMSKAGNRYLRYYIIEATDSVIRNCPAYKRFYTKKYVETRNHQHKRALALTSRKFIRMLFGLLDKSQLYSPEKSR

SEQ ID NO: 359814 - protein, 341 aa, unidentified
MKHYVGLDVSQKETSICIVDETGRPIHQGRVKSDPGVLAAVIAKKAPNAERVGLETGAMSSWLWHELKRTGLPVVCIDARHAHAALSVRMNKSDENDARGLAELVRVGWYREVAVKSEESQTARSILVCRSRLVRVRRDLENQMRSMLKECGLLFPRAAGGQFQRRVNDLITDGHALSTILCPLLSVHQQTCSELEKIDRIVRDLAREDETTRRLMTVPGIGVVTALTYRHTIDDPTRFQNAAKVGAYLGLTPRRKQSGEMDVTGKISRWGDRLLRAYLFEAASVLLHRTKRWCSLKAWGLRLAKRSGMKKAQVAVARKLAIILHCIWVDGTEFEWGKQPA

SEQ ID NO: 359815 - protein, 338 aa, unidentified
MNNTNLIAIDLAKNIFQVCIMDKHNKILLNKAFSRKALTEFIMQQPPGVIAMEACYSSHYWGRLFNSLGHNTKLLPAQHVKPFVRGNKNDHNDAIAIAEASRRPGIKAVPVKTLAQQDIQCLHRLRERCVCQRTHLSNQTRGLLSEYGIIFNQGFKSLTTSLVQLISPEDERLSETIKKELRYVYTEFKQLNQRLNELNKSLLQIANDNIQCRRLMSIPGIGVVNATAIFSAIGDGDQFKNARELSVWLGITPKQFSSGDKNTMAGITKRGNRYLRKQLIHGARAVIYRYKNRDDKLSNWVNSIVLRRGPNKACVALANKMARLCWVLLQRKQMYIAQ

SEQ ID NO: 359816 - protein, 343 aa, unidentified
MQIARIGLDLAKYVFEIHGVDAHGKTVLRKTLRRHAVSTFFANLPPCLVGMEASNGAHFWAKTLLDLGHDVRLISPQFVTPYVKSNKNDRNDAEAICEAVGRPNMRFVPVKSAEQLAVQAVHRIRTRLVADRVRLVNQVRGLLGEHGIVVAKDIGNLRRALAGLGDNEDRALNPMVRALMGELREELTELDARIVGYDRKIRELYRNSEICQRLGKVEGIGPVTATALVAAVGDRSSFKNGRQFAAWLGLVPKQRSSGGRARLFGISKRGDRYLRTLLIHGARAALGRVQDKPDPRSLWLGKMRQRRHQNVVAVALANKNARIAWSLLTSDNVYDASLSVGAA

SEQ ID NO: 359817 - protein, 437 aa, unidentified
MTPASDRICFVGVDWATRAHEVCALDGSGRLLGRREFPNTPEGLEAMLSWMVDRAAGDPTALAVAIERPDGLVVEALLDRRIAVWTINPKQLDRFRDRFSPAGAKDDRRDARVLADALRTDGHAFRRVAADPPPIVALRGLIREDDALRIEETALSNRLRELLGRYHPRLLGLAADRVDPLLWDLWELAPTPARAAAVSRAAVAAALRRHRIRRLDTEAVMQALTGPAPRVAEPTIAASERAVGRLLPRLRLAHAQRQECGHRIDEVLKELEAPLGGVGGQHSDAAVLRSLPGVGRAVLARVLTEGAEAIRRRDLTRLRALGGSAPVTQRSGKTCHVLMRRACSRSLRYAYYHWARTAVQNDERSKEHYAALRARGQSHGRALRGVVDRLLVVAVAMLRSGSLYDEGLRPARGSAAAGGGSSRRPRGEGAAAPSPAA

SEQ ID NO: 359818 - protein, 343 aa, unidentified
MQTITTVGLDIAKSVFQVHGVDAAGQVVVRRQLKRRYVLAFFQKLPPCLVGIEACASAHHWARELQVLGHTAKLMPPAYVKPYVKRHKNDAVDAEAICEAVTRANMRFVATKTPEQQSCLTLHRTRHLLMRQQTSVINAIRSHLAEFGIVAPVGRNGVEQLLGVVADPNDKRLPELARACVAALGAQLRVLKLQILEFDRMITAWHRSSEASKRLDQVPGVGPLLATALVASVAEPKAFRSGRDFSAWIGLVPKQNSSGGKERLGNISKRGDRYLRSLFTTGALAVIRYAKIHGTKHRPWLTALLARRPTKVAAIALANKLARMAWAMMAKGERYKEPAALAA

SEQ ID NO: 359819 - protein, 338 aa, unidentified
MAIVMGLDQHRAQITAEWIDTETGEVSRARVSPAQRADVRRFVAQFAGRRLEAALEATTGWRFVVEELRAIGAEVHLAEPAETAARRGTKKRAKTDRADARHLRELVMIGRLPESWIPPDHLLDLRAKVRLRHTLVAERGEWQQRIQAVLYHHGFPQRLGLLTGENRHWLEELEVSAAAREQVTVALRMIDALDAQSAPITRELRLYARRQPGCRALMGHYGIGELTAVTILAELGDARRFSSSRHAVRYAGLDITVHQSDQRRAPGHLSRQGPPALRWALFEAAQAARRPGSPDRAYYDQAAQRLGGNRACLALARKLLKRSFHTLRELGDDALAPA

SEQ ID NO: 359820 - protein, 355 aa, unidentified
MNKIKYIGLDVHQTSISAAVLDEEGKQVMQLVFPTRADALLEFLGGLRGTLHLTFEEGTHSAWLYDLLVRRVAKLVVCNPRKNALLKVGNKSDQIDAWKLAELLRSGMLSAVYHGENSTRTLHELGRSYMALTEDTTRIMSRLKALYRGQAIPCAGKKLYTVRHRGEWLQQLTQAGIVRRAERLYEELDAVQKLRRQARGDLLVESRKHPVCERLRTVPFLGPIRVAILVARMQTPYRFRTKRQFWAYCGLALESRSSADYRWVDGQLQRSRKKVLIRGLNVNHNQDLKNIFKGAALSGSIFPGPLKDFYEQRRAAGIEPEMARLTLARKIAAIALILWKKGENFDATKLNAQAA

SEQ ID NO: 359821 - protein, 387 aa, unidentified
MNVKARRTKKQVNVENQAINLLSKEELNKKIEVVEKELRSYTWRDLETNGKFAKNDKLSFITDDMLIVGCDIGSENHYIRAIDVRGRELSRGAFEFSNTSEGFENAKAWVLALAAKHDKKQIVLGLEPTGHYWFALAAWMISNGISVVQVNPYAVKQSKEIENNSQLKDDRKDPKLIANLVKDGNYGMPYLPEKVYADMRRLSMFRDQLTEDRIRNINRLHRELKIYFPEYMDAFGKIDGAFTLEILKVSAIPSDITALGAEGMKNIWHNAKLRGRGYSRANEIVSYAEKSVGLTDGTDAGREAVKWYAEQILRLDEQLAEIESALHEKCREIPYAENILAINGVGENILAGILAEMGDISRFDDVKEIQKLSGMGLVACSSGKHKG

SEQ ID NO: 359822 - protein, 311 aa, unidentified
MKVSVVYYVGIDVAKAELAVATSQGHAVFPRDRAGLERLVEWLRELGPGAHVVLEASGGYEREVVAWLQAHDLAVSVVNAGWVRNFARSQGRLAKTDRIDARVLVDFAAANAPRLCAPVCPEQRKLTDLVRARQQLVAVRTLLQNQLEHTREPLARRSQQELVELTDTRIRRLEKALAALIAQTPQLNAKAQKLTAVAGIGATTAALLLAELPELGTLNKAEAAALAGLAPRNHDSGAFRGQRHIAGGRPSVRTGLWMPTLVATQHNPVLKAFYQRLRAKGKPAKVALIATARKLLIHLNCLLKPSPLPSC

SEQ ID NO: 359823 - protein, 401 aa, unidentified
MKQLYAGIDWASRTHAVGVVDDHGGIRARFEVPNTGKGFGGLIRRLTKLQVAGVAIERPDGPLVEAMLDAGLRVVVITPRQVKALRSRYRATGAKSDTADALLLADVLRTDGHRLQPLIPDSDATIVLRALGRTRKDLQKARVALCNQLTAQLERCFPGAVGLFADLHSATAIVFLRRYPTSQAAATLTQATLTAFLRRIHYSGRTPVAVLLARLKTAPLAAISPDQATGRAVCVQALLDAIQACHSRERELEAEIIERLEVHADQQIFTSLPKAGHGLRAAALLSEIGDVRTRFPDEEALAALAGVAPVTRASGKLRSVGFRWACDKKLRNAIIDFADDSRHASPWAASIYAQALQRTRRHPQAVRILARAWIRVIWRIWQDHTTYDPTKHGGAVRLLTA

SEQ ID NO: 359824 - protein, 346 aa, unidentified
MMIIGCDYHPSWQQICWVDTATGETGERKLEHASGEAEKYYRGLSGAALIGMESTGNCQWFVEMTTAAGHDLWTGDAAKIRACDVRAQKHDRRDAALILKLLLEGRFPRIWTPSGEEKDLRQLLIHRYKLVRIRAQVKNELQHLAMNQGITKKRRLWSKAGEKVLRELPLKPWTSRRREDLFRVREMLSAQIDLLDQAVVEVAEKNEKARLLMTQPGVGPITSMAFVLTMGDVSRFQRGKQVASYLGLIPREYSSGGHQRFGSISKQGNWFMRMLLVEAAQNAVRYDPGFRNEYLHRCHNKAKGVAKVAAARKLAIRLYWMLRTNTGYPGVVRVESSSRVPLVSAS

SEQ ID NO: 359825 - protein, 344 aa, unidentified
MLYVGLDLSRKRLDWQALLPSGERLGIGAVPPDANGLEKLVGKLGDAEIVAAIESMSGARFVHDQLERRGWEVKIADAVKVKGLAPLACKTDKIDSGVLAELARRELVPEIWLPDPEVRGERERARFRLHLVKHRSALKNRVHAILFQHGVPSPGSDLFGVGGRALLERLRLPEPWASTVAASLSLIDTLDEQIAGCECELRALGAAHSYMPLLLSCPGIGWVLAFTIASEIGDIARFASARKLVGYTGLCPRVEQSGERDRRGPLRKNGPNYLRWALVEAAHSAARHPCYRPVRERFRARHGNKRGTKLAAIEIGRRLTEAIWHMLTRNEPFAPAGAPASLAA

SEQ ID NO: 359826 - protein, 557 aa, unidentified
MAHSCGLEEIDEPADQVPEAADGSLACFAQHCLQARKRLLDGIEVRTVGRKEAQRCAGSLDKRLHRCALVARQVVHDDDVALAQFGHQHLGHVGFEPIAVDGAIEHHGRDHTGHAQARDQRGGLAMAMRVPHPQAFALGAPTMATGHVGGGPRLIDEHEAFRCQIELAVEPVLALPQDVGAVLLDRVPGLYGMARPFSPASDMMLVLEEERSGPMSIVILGVDLGKNACSVVGVDAAGAVVVRRSMRRQTLVDYVAKLPVCVVAMEACCGAHYLGRLFAAHGHEIRLMSPEYVRPYVKAQKNDDRDAEGIAEAASRPTMRFVELKTQEQLDIQTLHRVRSRLVAERRSLTNQLRAILLERGTIFPVGRRKLELGIDALLADEDTTLSPRLRQLVAELRAEWRELDTRVEALNGEFVELARNDAAARRLTSIPGVGVLNATALIAAVGDASSFAKARDLGAWLGLVPRQHTTGGKPRLLGISKRGNTYLRTLLIHGARAALPSLARSETPLGRWLTGMIERGVHRNAIVVALANKLARIAWAALRKDATFERGYPVAA

SEQ ID NO: 359827 - protein, 299 aa, unidentified
MRPSDERWSVANDEADVAALVARLRPLEPALVVCEATGGFEHAVIAALAAAGLPVVVANPRQVRDFARATGQLAKTDQLDAGILAFFAERVRPTPRPLPDAAAQLLDAVLTRRRQLLEMLTAEKNRLGFAPKPLHRGIRAHIRWLERQLDDVTKELAAQIEQSPVWRAKDDLLQSVPGVGPIVSYTLLGELPELGTLTHKQIAALVGVAPLARDSGTLRGKRLIWGGRASVRTALFMAALCGRRWNPALKIFYERLKAAGKPTKVALIACARKLLIILNAMVRNNTRWMTPTARIQYSC

SEQ ID NO: 359828 - protein, 335 aa, unidentified
MRGCDPYLPAAGHSGPAAATAGGHLDLLGWSRTWPQRTWALEDCRNLTRRLEADLLKAGETILRVPTKLMAGARRSAREPGKSDPIDALSVARAALREPNLPVAHLDGIERELRLLVDYRDVLISDRTGHQSRLRWFLVELGVPEPPSRRLTVAAVLASVDLQLLGRTEPCARIARDLVARISELTVAINDLAREIGELTKALAPSLLALFGCGALTAAKLVAETAGIGRFRSRAAYASHTGTAPVPVWSGNLVRHRLSRGGNRQLNVALHRIAITQLRCPSLGQAYVAKRIAAGDTKTEAIRALRRRLSDEVYRRLQADEAARAATENVAPAAA

SEQ ID NO: 359829 - protein, 379 aa, unidentified
MQQDSEIYVGLDTSKLKISVALAEAGRSGEVRFFGDIDSTPEAVARLVAKLEKRHVRLAFCYEAGPTGYGLHRQITTLGHACTVVAPSLIPRRPGDRVKTNRRDAVTLAKLHRAGELTAVWVPDPGHEAMRELVRAREAAMAELRRARQQLQSFLLRQGRIYTGRAAWTKAHARWLSEQAFTQPALYLVLQEHRQAIADAEKRLERLTRQVTEAAETWSMAPVVAAYQALRGVAFLTAVTFVAEIGDVRRFDSPRQLMAYLGLVPSESSTGEQVHRGRITKAGNSRARRVLIEGAWTYRHPARMSRLLQERQADLPPAVREIAWKAQVRLCGRYRKLMARGKRQTVVTTAIAREMAAFLWAIGHEVEPTAAAPADGQLH

SEQ ID NO: 359830 - protein, 538 aa, unidentified
MGRLESGSHDSEEPPCRFFDQEVIVRRVGIDLALKAHHRATVFEDAVQVGKPFSVRRTAAGIDALVRRATSGTDQPCEFIMEPTGLAWLGLAAELERRGHHTYVPKAQKTHLLRKFLAQFAKTDTADAKAQALVRHVDPDGVYRLHVPSAAETTLRLCVKQRARLVVDVGRAKRRVLSWLILANPHLGDALGDDAFNQPGTAFLRRYIDPFAVQTLGIAKLRKDWATHARGVDGKRVAAVWEACEATCALYAELRAAGRLPFDYAVMQELVRQELERIEYLENQVAALDERIRATYRLVDPDRLLETEVPGIGAAIAPTIEAFVSDIDRFGSAKRFAAYFGIVPRTRQTGGQDGKPGQRLTKGGPGLLRQYMFLAAEVARRCDPALAAAYEKARARGKHHYHAVIIVAHKLLRKIYAVLKLRAAAQRAKLEGRTPPRVAYDYCDPETGQVLTKAEARAVVEARYPSKAEKVRRADKKRAVQTLPQPGPAAQTGSSEDATKEVSGTPPEPGIAGTAACEKPVKKPVLKSEKDGAKKPLL

SEQ ID NO: 359831 - protein, 345 aa, unidentified
MHYVGVDYHKKSSYVTVMDERGKVVKEGQIANTREALAALLDGTAEGASAVLEAGRNWPVMYDWLDELVDEVTLAHPAKVRVIAEAKVKTDRIDSRMLAHLLRADLIPAAYVPGAVTREQRRRLRQRMFLVRLSTMVKNRVHTLVDRHPELSRQAGGWSDLFGKAGRAWLEQLELPAGEAEILRTDLDLLEAIQEHIKSSDRWVSQLARKDGRAKLLSTIPGIGEFFAVLLAVEIDDMGRFLRPEKLAAYAGLVPSTYASGGYVHHGRITKRGNKWIRWACIEAVYPATRQDPALAALYQRLKATKGANVAKVAVAKRLLTIAYRVLREGRPYRPAEEQAALKRR

SEQ ID NO: 359832 - protein, 363 aa, unidentified
MAIAILGIDLGKNSCSLVGQDASGRVVLRRRMRRETVMTFGATLPACIIAMEACCGAHHMGRALAAQGHTIRLMSPEYVRPYVKAQKNDDRDAEAIAEAATRPTMRFVALKSEAQLDMQTLHRVRNQFVGERTALMNQIRAVLLERGHIVPQGRAKLAASLESLLDTEAVSDLTPRMRSLVADVRERWQSLDGRIAALDAEFAEQARTDDSARRLTTIPGIGALNATALVAAIGDVATFARGRDLAAWLGLVPRQVTTGGRPKLVGITKRGSKYLRKMLIQGARAAMPTLRKSDTRIGQWLRGLLARAHANTAVVALVNRAGFPGGRLVWVMRPRVGSRPGHSSALPPRREGCGRSARAACGD

SEQ ID NO: 359833 - protein, 398 aa, unidentified
MCRVGEPVDNLLSFTLQRNIILIIQSKQIIQESKPLCAGIDVGAEELVVVIRKDGTSSKPQKFANSPSDRARLVQKMAKLPGVKVCLEATGVYHFDLSIALHDSGVALMVVNPKASHNFAKALMKNSKTDAVDAETLAQYAERMDFIAWTRPSNEKIAIRSFARRIDALTRQKAAAKNHFHALSASQENPKAVLRDVKLAISQLEKRIARLSKEALILIRKHSELERMFLLLTGIKGVAETSAIALMGEILLLPPGLSHREWVKFAGLDPCAFDSGKSVHKQARLSKTGNRHMRSALYMPALSAKQHDPHVKAYSQHLIDNGKKPLQAVCAVMRKLLHAIHGMLKHDKPFDNTRFLRHSSIAMKTKKNTENRFTLNRVSTGQAEARINAGLKVRSFGR

SEQ ID NO: 359834 - protein, 426 aa, unidentified
MADTTHVKSDCHWVAIDVARYWNAVLIETASGERHRFKMANSAEDFDRLVQFLHGLGGRCHAALEPTGDYHRPIAHRLLQAGVEVSGISSVAQARYREAMFNSWDKNDPKDAGVILEMLKQGRVQTFVDPMLAGNHDLQELSKTYYQVTRARTKVQHSIINHHLPLYFPEMHRYWAASRNEWWVRFMIEFPTPAHVRQLACDQFLQAIWDVVGRKVNKRAKLTEIWELAGHSAALPHATDSLAVETFRMTLRHYQHITELREEIEAKAESVLCGNPDYENLKSLPGIGPIIALTILAEAGDVRRFRHHRQFLKYCGFDLAKNQSGVYRGREQLSKRGNARLRMAFWLAGLVAVRIRENSFREKYDRYISANPKDADLKRKALTAIAAKMARVAYGMIKKNQPYRRFFEQSLPSGSIPLSRAVGAPS

SEQ ID NO: 359835 - protein, 409 aa, unidentified
MRRLIERCCGLDVHKKTIVGCVRVPDARGEVAELIRTFGTTTPDLLELSDWLTGLGVTHVAMEATGVYWKAPYYILEGDFEVMVVNPAHIKHVPGRKTDAIDAAWIAELLSYGLLRPSFVPPKPIRQLRDLTRYRMQVIREHTRTVNRIHKVLEDAGIKLASVATNVMGVSGRDMMRSLISGTADPEALAELARGRLRTKLPELRKALTGRFEDHHAFLLERMLAPVDDLEADIEALSGRIEDHLAPFAEAVELLDSIPGVGQRAAEAIVGEIGTDMSRFPSAGHLASWAGLCPGQRESAGKRKSARTRKGSELLRTVLIECAHAAAHTKDTYFAEFFRQVTRRHGKKQAAVAVAHEILVACWHILSTGQPYLERGPAALRQLTEDQIRRRAVRQLEKLGLTVTLEPAA

SEQ ID NO: 359836 - protein, 249 aa, unidentified
MGFIGIDVSKDFLDVFERPSGEAWRETNDEAGIATLVERLGKLGPTLVVVEATGGYEAPFVAAAAVSAIPLAVVNPRQARDFAKSTGKLAKTDALDAAALAHFAEAVRPAPRPLDDPQIRELQDLLTRRRQLVDMLTAETNRMRSDRDLDTKLRDMPIWREKDDLLQSVPGVGPVLARTLLAELPELGTLDRSRIAALVGVAPLNRDSGSMRGKRAIWGGMRKLLIILNAMLRDHRAWFQATPISSSLL

SEQ ID NO: 359837 - protein, 278 aa, unidentified
MFPVGIDVSKNTLDLCMLYDGIKGRIKTRNIQNNRHSVENILRWLRLQHCSPEDVHVVMEATGVYHKQLATELHDAGFRVSLANPHRSREFARGMGIMTKTDKVDAYMLACYAFLKKPHRWEPPAPEIRYLGALLRRRDVLLGDALREENRLEKYLSTDTPADIISSCRRMAQLLREEISNIERQIKAHIKASPALRRDYTLLTSIKSVGPQLGMHMLIVLRSHNFVSAEQAAAFLGVVPIEKRSGTSVRRRPRMSKIGPPSVESEALHVRPVRKNLQ

SEQ ID NO: 359838 - protein, 345 aa, unidentified
MTRFVGLDVSQKLTAICIVDETGRRLWRGQCATDPGQIERLVRGHTGEDASIGVETGPMTPWLVHELRARELNVICLDARHASAALKMQMNKTDQNDAEGLAQIMRTGWYRPVHVKSLDAHRARALLGARAQLVGMTTRLSNHIRGVLKTFGMLPGAMRGLPFDRRVEELLDDRDDLTPIVGPMLAAWRQLREQIAAFDKAVRALAKVDPTCRLLMSVPGIGVLSVLAYVSTIEDPARFARSLSVGAHMGLTPRQYQSGEVDRSGRISKCGDTLARTLLYEAAVVILTRVKRASSLKDWAPVIAKRSGPGKARVALARKLSVILHSIWRSGEPFRWSEQPQPAGA

SEQ ID NO: 359839 - protein, 414 aa, unidentified
MALVRWVGRAIGLDVHREFCVVAICEDGKVRSAGRVPSTPEGLRLLAESLLGTDRVALEVTASCWEVARILEPFVDRVIVVSPDDTGIASARAKTDKLDARTLASLCWKGELEAVWMPDERCRILRRRLARREQLVHARSRAKNEISAVLARRLVERPAFADLFGVTGRRWLAEVQLPVEERESVDAGLRQIVFLDSEIKAVEQLIAQQALGWPEIRRLMTVPGVNLICAATFLGAIGRADRFFTSRKLVAYLGLDPKVRQSGETPARSGRISKRGSASARWALVEAAWSVVKQPGPLRAFYERVRARRGHGKAIVATARKLAVLFWCMLTRSEDYAHQRPALTKKKLRELELTAGAKPRTKAAAGIWSTNRAIRDAERALTLQAEVSYKRMVTDQQAGAPAKKVGASATPERA

SEQ ID NO: 359840 - protein, 416 aa, unidentified
MAFKIFRKNCCGLDVHKTWIYACMGITDTNGRTEYKQARFSSFTKGLNELCDWLAKYNCTDICMESTGKYWIPVFNILEKHNLWVTLSHPKYTKPQTGNKTDRKDAKWICDLYMCGMVKPSFIPPADIRQLRDLVRYRFKLTCMITGEKNRAHNCLTVSNLKLDDVFSDIFGKSSTEQILQHPGEFFDVTPFVDDRCKTPIEEIQAAVDGAISPEQAVKLRQCLEHIDELEKHKSEIEREIFRLSDKYEVALNLIRTVPGFDKNPLTAIQVLSEIGSDMSVFPTAKNLVSWAGCCPRNDKSDRKIKSTRISRAGTYFKPVLVQIANALIKSKKHPEFTNRYRRIKARRGHKKAIIAICRMILTAIWHILTDLKPYTAKGFLEPRPVSKEKVLTASQALNLLKQRGYVIKDEPIFIS

SEQ ID NO: 359841 - protein, 295 aa, unidentified
MELHTIGIDLGKTVFHLVGLDLRGEVVVRKKFSRTQLLRFTANVHVRLIGMEACGGSHFLGRALREQRHEVRLIPAQYVKPYVKTNKSDYIDAEAIAEAVARPTMRFVPIKTDDQLDMQSLHRVRERWVMRRTAVINQIRGLLLERGITLRKGRHHVDAALPLILEDADANLSGAVRLLLAQLKLDLDQLSVRIDQADTVIQKTAHENDACRRLVAIPGIGPVTATALIAAIGNGGAFRKGREFAAWMGVVPREHSTGGQQKLLGISKRGNSYLRRLFVQGARASYNSARSSLPV

SEQ ID NO: 359842 - protein, 451 aa, unidentified
MSESSKSVSVPVPEPEWAAFAAIDWADQKNFWRLLPAGSQRYEEEVLENTPEAVEAWAVNLQQRFDGRPVAVCLEQSRGPLVYMLSKYPHLVLFPIHPTTAARYRETFTPSGAKADPSDTASLLDLLLRHRERLRRLQPDTVETRLLHFLVEERRQTVDEKTRQNNRLTACLKLYFPQILEWFDDVTSCLVGDFLERWPDLEQLQRAHPGTLRKFFHQHNCRSQQLMEQRIQAIYQALPATRDQAVLEAGRRITRGLVALLATLRSNIAAFDQRIAELVDSHPDAALFTSLPGAGDVLVPRLIVAFGTHRDYYQSAQEMQRYSGIAPVKESSGKSRRVHCRFACPKFLRQTFHEFAGHSIEHSEWAKAYYEHLRNDEKKDHHAAVRSLAFKWIRIIFRCWQDRKPYDEEIYLQSKRRRGSLLGVALGPTTQFGYTMVAGFKKLSKNKGLTD

SEQ ID NO: 359843 - protein, 338 aa, unidentified
MELSVIGMDIAKNVFQLHCVDRQTGEIERIKLRRNEVLPYFARRTPALVAMEACGGAHWWARQLQQLGHTVRLLPAKAVRPFVLRNKTDAADARAIWTAVQQPEMKTVAIKTEYQQSILALHRMRAQLLKFRHMQTNAIRGLLLEFGHPLPESYLALRKAFPTVMATLDKQLPGILIETLREQWARVQSLDNEIALIEGRLKRALAETPTCQMISDIPGVGLMTATAAVATMGDPASFKTGREFAAWLGLVPRQTGTGGRIRQLGISKRGDAYLRTLLMHGARAIIARRTNSDWVAGLIARRPYSVVIAAIANKLARTIWAVLATGKRYDGAAFAAAI

SEQ ID NO: 359844 - protein, 342 aa, unidentified
MLHYGLDVHTKYTTYHALDDAGRSVGEGRVANTREEFERLFARHPGPCRATMESCIAWPHVYNLIWDLVEEVQLAHPLAAKLIAWNHVKTDRLDARALAILLRSDLIPQAYLAPREIRDLRALVRHRLKLVQLRAVVRNTTHHVLFRTGHQRAVSDLFGVSGRNWLRELPLDPVDRNIVARNLAAADSFNSLIADADRELRDTLLPHPAYALLQTIPGVGPLIAAICIAEIGDIRRFPSAKQVVSYAGLVPSEYSSGGKVRRGHITRVGSRILRWAAIEAAFHFCRKVPAAEARYTRIRQERGAGVALVATAANVLRVVHGVWKSGRPCQAGLAPPVRPLVT

SEQ ID NO: 359845 - protein, 326 aa, unidentified
MRYFIGIDISKFKHTAAVIDQDGVVHIEPFDFDNDIIGFNSFFTSVSSFIQDDFIIGMEDTGHYADNLQKFLLSKNLKVAMFNPLATNHIRLAFNLAKNDRLDSLTIASALAMPRLYRIIEDEHFTYHEIRELSRYHQSLSKTMNRYKNRLQKFIDIAFPEFNKLFDTKYSKTYLKILKDFQSAQNIANTDIRTLRKALLSKGRCVSITAEELKSAARDSIGHSHTALDLEIQQTVEMIEKIDSNLNIVDKKIEEFSLQLNSPILAIPGISHISAMSILSELGDFTQYESAKKIIKLSGTNPYIYESGTYRLPLYLPYRLSFFFVY

SEQ ID NO: 359846 - protein, 345 aa, unidentified
MKVTTVGIDLAKNVFQIHGVDAHGKAVLKKQIRRDQLMLFFTNLPACLIGMEACASAHYWARRVQECGHTVRLMAPQFVKPYVKTNKNDAADAEAICEAVARPNMRFVPIKTESQQAVLAVHRARQSFVKARTAQANQIRGLLAEFGLVIPQGIAHIAQRVPELLDSDTCALPGPFRLLVLRLMEHLKLLDQHVRELETQIQTWHRDNPASRKLAEIPGVGPITASALVASIGDAKNFENGRQLAAWLGLVPRQHSSGGKSTLLGMSKRGDSYLRTLLIHGARSAILAAQRKPDTDSWLSRLLGRRHPNIAAVALASKNARVIWALLAHNQQFRPGYATAAAVAR

SEQ ID NO: 359847 - protein, 392 aa, unidentified
MFFLGIDIGKNTHVASLIDDNGKTVFKAFSFPNSTIGATSLLDKLTPFSNEIEIGMEATGHYWLALYSFLVEHGFVIHVINPIQTDGWRNATEIRKHKTDIIDSLIIADFIRYGEFLETSLANEDILSLRNLTRFRNYLVSSIGDLKRKTICILDQIFPEYESVFSNIFGKTSKEILLHFSSPAEFESITSEQLETALEQVSFKKFASKKISYISNIAKTSFGITFGLQSLTLQLKLLIKQINFIEQQVHDVEIQIKQLLHKINTPITTIPGIGDIIGATILGEIGDIERFSNPSKLVAYAGIDASVHQSGDYISTNNKMSKRGSPYLRTALFRAALIASVHDPVFKAYYQKKRSEGKHHLTCLGAVARKLCYTIHAILKNNCEYKVQLPTE

SEQ ID NO: 359848 - protein, 331 aa, unidentified
MKKRVLAGIDVSAAKLDVVIERARGPMWTGTFENTAEGHHRLMRVLRKKGAVVRVCLEATGVYHLELALALQSASGIEVMVANPRATKDFARAQMQRTKTDRTDARSLLEFARRMEFVAWEPPPPEILALRALARHLEALVGMRVQEKNRDHAASHLGEEAAAVREAIGEHLEWIEGTVAELQQKALALVQSSARLKPAYDHLVSVKGIATGSAIALLAELAVLPDDMTARQWVAHAGLDPRRQESGTSVQGHERISKVGNRRLRRALYMPALVASRHEPQIRAYYENLLSRGKKPTPALVAVMRKLLHAIHGMWRRAEDFDGEKFFASRA

SEQ ID NO: 359849 - protein, 343 aa, unidentified
MEQYVGLDVSQEQTSVCVVDGGGKVIWEGKCTSTPEAIAATLRTRAPEAVRIGLESGPLSAWHWHELRKLDLPVVCLDARHAKAALALQLNKSDRNDARGLAQIVRTGWYREVAVKSVDNHLVRSLLTTRAQLVRMRVDLANQIRGVLKPFGLIAGKGGGRPFAERVRALVAGGPLQEVAGALLAAWQAIGEQIAVLGRRLVAVARQDEAVRRLMTAPGVGVLVALAYVSVVDAPERFAKSSSVGAYIGLTPRRYQSGEADYTGHISRCGDKLLRTYLYEAAGIILHRVPRWSALKAWGTRLARRIGTRKATVAVARKLSVILHRMLRDSSEFRWSAKEVQAA

SEQ ID NO: 359850 - protein, 444 aa, unidentified
MPRVSGAEPPVVGLTPQTMPTRKTDTMKTYILRAPNPVEPQEPRRDDPALAAPVAPIPGPPPAAVRWPPLFIGLDVHNDSIAVSLAPGDSPEVRRYGIIGGDHDDVLRLLQKLQAAHPGAGLKCCYEAGPRGYPLCRFVRRHGAECIIVAPSKVPRQPGDRVKTDRRDADQLARLYRAGELTGIHVPDPQDEAVRDLIRARYQVQRQQHRARQQLKMFLLRQNLRYAGTKPWTQKHLNFLATVRLPFAEQQFVLQEMVNGITEAGERLARYEKQIASVVEQWRWLPVVQALMSLRGVALLTGATLGAELGDLHRFASAPQLMSYLGLCPGEHTSGTTRQQGGITKLGNGIARKAMIEAAWNNSRAPRVSRTVLARQAGLPKAVTDAAWNAQTRLHQRYHHLTGVGRKKSQVAAAALGRELAGFVWAIGRMVQPRPEKREAQPAA

SEQ ID NO: 359851 - protein, 350 aa, unidentified
MTANHYIGFDIHKKSVSYCVKTADGRIVEESKVRATHHALRQWAQQRREPWRGAMEATLFSGWIYDTLQPFAGELQMGHPALMKAIGASKKKNDKLDARKIADLVRCDLLPACYVAPVEIRELRRMLRYRNLVVTQAVRMKNKMSGLLMEVGAEYNKQQLHGKKYFSELLDTVEEVPESVKDLLRLSRGALEMFEATQQQLLVRLQKDQRLAQRVILLKTIRSVGEVTALTWILEVGDPHRLTSVAHAVSYCGLTSALVSSADKQQRGPISKQRNAHLQTVLIEAAKLAPRWNPELAAVHARELERGNRNRATLAVARKLVAYLLAVDKSGQPFQIRTPSATETEGRKVA

SEQ ID NO: 359852 - protein, 387 aa, unidentified
MYFVGIDISKFKHDCAIVDEFGDVITPSWSFQNDREGFSLLKELLDALDGEKKIGLEATGHYGQNLKLFLENNDFSFMEFNPLLINRFVHSKSLRKTKTDSIDALMIAQYLMTVEYKPYPPSFYTLEKLKSLTRFRDSLIRQRSRQLVELTNILDKVFPEFKPFFKGRFSATALYILSHYASPEKISNMNSKSYEPLRRLSRGRFSMVDFVELKTLARNTVGSTSDYLLQEMEITIDIYNQLQSKVEEIELQIHDCVLALAPPILTIPGIGAASAAVILSEFGDLSKFNNPSKLLSFAGMEPGYFQSGTSESTGKMVKHGSSHLRYAMMNCAQTVINNEPTFAAYYAKKRAEGKEHRVALTHVAKKLLRVIYTLETKELSYNPDLVR

SEQ ID NO: 359853 - protein, 456 aa, unidentified
MSSQRSKGIRRRKFKVPSLPQQLAHINVNAAGIDIGAEQHLVAVPAGRDEVAVRAFGAFTAELVALADWLAQCGVTTVAMESTGVYWIPLFELLERRGFEVKLVDARHVKNVSGRKSDVLDCQWLQQLHTYGLLRGAFRPPDEICVLRSYLRQKEMLVQTSAQHIQHMQKALQQMNLLLHNVVSDITGVTGMKIIKAILAGERNPEVLARNRHGCCHHSEATIAKSLVGNYRDEHLFALRQAVELYEFYQSKIADCEQAISEQLTSYPDATDGEPPAPTKQSNPSARIRSGVDMRKLLYKKSGVDLFAVPGLGADTLLTVTSEVGFDMSPWKTVKHFTSWLSLCPGTRISGGKELKKRGKRKANRAAQAFRIGAATLGRSQTALGAFYRRIKARHGGQHAVTATAHKIARIYYTMLTQGSAYVEVGQKAYEQKYQERRFAQLQRQARALGLQLVPC

SEQ ID NO: 359854 - protein, 282 aa, unidentified
MNSMNYIGLDIHKKSISCCVRQADGTIIQESTITATRHALDEWLRRLPQPWTAGMEATLFTGWIYDHLVSGGAMVKVAHPAMLQAIAAGKKKNDRVDARKIADLLRCDYFPECHMASREIRDRRRVLRYRNLLVRQAVQMKNKVSGLLMEAGVPYNQQKVHQKKYFAELLQTQKKEMPPSMPELLRLSRSTVEALTGMQRQLIRALESDVLLAARVERLASIPGVGRVVALTWALEMGDIRRFGSVKKAVSYCGLCGAEKSSGARQSGRRSQNKETNICKPC

SEQ ID NO: 359855 - protein, 349 aa, unidentified
MRFYNQHHRFYAGGDLHARTLYLHILDDQGKTRFEKNLTASPETFLEAVAPFRDGLVVGVECMFAWYWLADLCEDEQIPFVLGHALYMKAIHGGKSKNDRIDAGKIATLLRGGMFPQAYVYPRAMRETRDLLRRRTFLVRQRAQFLTHIQNTNSQYNLPPLTKRLSYASNRMDPELIDRFPFESVKRSIGVDLKMIDALDDQVRELELYLTRNAKIDDPQTYHLLKTVPGIGPIIALILLYEIHRIDRFPEVGNFASYARLVRCEHESAGKVKGFGPRKIGNGHLRWALGEAACLLLRCHEPAKKWLQRKEKKVGKPTALGILAAKLGRTVYHLWRKQCAFDVKKFLTS

SEQ ID NO: 359856 - protein, 462 aa, unidentified
MLQAINPRAAAADVGSEAIYVSIAGAKPVFFGTVTRELHRLRDYLHEHQVETIAMEFTGVYWIPLFEILEESPIKTCLFNGAQIKALPGRKSDVADSQWAATLHAHGLIRCGFVPSAEIRELRDYVRLRTNHISQASTHVLQMQKALELMNVKIQDVLSDLMGASGRRLIDAILGGTRNPQILLELCDQRILSKKEQRMREALEGTWSEQHLFALKQAYSAWKLCQGHIKACDQKIHGVLRAMAAATKASGKEPAGEDPKSDGGDGGTTEPDTKAKRMGKNAPKILGFNSLMEKVLGGRRPGRLPGLTQYTVLQLVSETGTDLSAFPDKKHFTSWLGLAPGKRQSGKRSRRESRKGARAGQIFRNVAQTVGRTLDAGLGGFYRRIRAHKGGLVASKALGRKLAALYYDVMTKGLEFAEEGLKKSEERYRAQEKAKLERLARKMGMSLQPLTLEEPQIQAVTG

SEQ ID NO: 359857 - protein, 417 aa, unidentified
MDILFKHCAGLDVHKKLIVACVLLSGPEGMQRFVKKFATTMAGLEALAAWLSGLEVTHVAMESTGVYWKPVFNVLSSHFEVWIVNARDMKQVPGRKTDVCDAEWICKLMSMGLLNRSYIPEVEQRDLRDLTRYRKRLVEERTSASNRLEKILEDSNIKLSAVVSQIQGASARDMLEALIRGETDTVAIADLARSSLRNKIPELEAALEGQIRDHHRFMWRELLDHLDELNLRIAVINERIAEYVAPYENLIARLDEIPGISRWTAEVILAEIGPDVKIFPSAQHLASWACLCPGNNISANKRRSGKTRRGQNWLRPALVEAAWATLHTKSYFGSQFHRLRARRGDKRAAVAVAHSILIVVYHLLANPEAVYTELGADYFVKRDVEKEQRRAVRKLETLGFTVTLSPVQAGASAPAPS

SEQ ID NO: 359858 - protein, 343 aa, unidentified
MQTTTTVGLDIAKSVFQVHGVDADGNVVVRRQLKRRYVLTFFQKLPPCLVGIEACASSHYWSRELQALGHIVRLMPPAYVKPYVKRHKNDAADAEAICEAVTRRNMRFVPTKTPEQQSCLMLHRTRHLFIRQQTAIINSIRAHLAEFGIVAPVGRNGVEQLLEVVADATDTRLPEIARACVAALGAQLLALKAQILAFDRRIMAWHRSNETSKRLDAIPGVGPALATALVASIGDPKAFRSGRDFSAWIGLVPKQNSSGGKDKLGSISKQGDRYLRSLFTAGALAVIRYAKLHGTKHRPWLTALLARRPTKVAAIALANKIARMAWAMMTKGERYKEPVALAA

SEQ ID NO: 359859 - protein, 410 aa, unidentified
MEVLYPDCAGLDVHKDTVVACGRHMANGEVRREVRTFKTTTKELLALSDWLADEGCTHIAMEATGVYWKPVWHVLGDGDFTLVLANAAHVKNVPGRKTDVNDATWLADLLAHGLIRGSFVPDEQTQEMRSLLRTRKQLVRERSSHVQRLQKTLEDANIKLDSVISDILGLSGRRMIEALIAGETDPEGLAALAHRRIKATPDELEAALHGRVTRRHRFLLRLHLQQIDAIDAAIDQIDQEVDADVEPFRAAIALLTSIPGVSVLSAEIILAEIGRDMSRFPTAGHLISWAGLCPKNDESAGKRRSTRMRKGAPWLKTTLVQCAWAASRKKASYLQAQFHRLRARRGAKKAIGALAASILTTVYHMLTSGEFYRDLGPDHFDRRANGRQTSRLVARLQNLGYAVQLTPLTA

SEQ ID NO: 359860 - protein, 409 aa, unidentified
MTVLIDPFTASTAITVVAGVDTHAATHHVSVLNAATGAVLGDRQVTATDDGYRQLLEFVISFGDVVRIGVEGTSSYGAGVARYLRGVGIEVAEVIRPKRAMRRRGKSDPIDALAAARQVLAGEALPIPKDGDGLVEQVRVLLAVRRSAVKARTALLRQVKSLLVTAPEPVRTRWSAITGNEDLMATLAATRPGPAITSVQAATGQGLRHLARRYQHLAAEIDELEQDLAALVDSANPALRAAFGTVTAAQLLVTAGDNPERLRSEAAFAALCGTAPIPASSGKTNRHRLNRGGDRQANAALHQIALVRMTTDPGTGLYAARRRAEGKTGREIMRCLKRSIARQVWHLLVHPDPVPDARQFRAARQQLRLTLTDIATRLGTCPARISELERGIRPNAQLATAYQQLLATV

SEQ ID NO: 359861 - protein, 473 aa, unidentified
MSRVGEVSDDVLLLSLTGLVSLNIQEDVVVQGNRLSRGDKRRNAKLAELRGLVRADHAIVAIDLADRKQAVVVCDHDSRVLVRKMVKLRAWESGPVLDWARGVARQHGFADVTVGCEPTGHRWMVLNQLAAQRDMTLVCVNPMLVGRARETEDYTRDKSDDKDAMLIARLVAGLHCYVPERADETWARLRQLGARRERLVTEASACVAQLRDLLECAWPGVLEAAAKPFDAANWCAAVAVVLERCNAHPERLARLGLARFEAAVVRELPRWGGSRRRRAVIEAVFTALVDPRGVMTQRRGALERAHWVLADWRETKTRLAQVEARMVEVLDELELTELVTSIAGISAVGAAAMLAETGDPARFDTPRALVKHAGLCPRQNSSGTFTGRSRISRRGRPGLRLAAWRAVWGALAHNPVMAARYRYLTGRQHNRLTDGQARTAIAAALLRWMHVVVTQRVRWDPTIAGADVMPAAA

SEQ ID NO: 359862 - protein, 349 aa, unidentified
MDHIGIDVHKRESQIYILAESREVIERRIRTEPERFAAVLGGRPRARILIEASTDSEWVSRCLEALGHEVIVADPNFAPMYATRSRKVKTDRRDARALAEACVLGAYRPAHRLSGPQRHVRGRLLVRDAVVRTRTPYISLIRALLRQHGFRVPSGSAESFVRRVQGLPLPGRLLSVVAPLLALMRPLNRQLAYSDETIEHLAIQDPRVPRLRSVPCVGPVTAAAFLAAIDDAQRFRHAHQLEAYLGLVPREYSSGETQRRGPITKAGHSRTRWLLIQAAVSILRRRPPQAEELRTWALRIAARRGTQVAVVALARRLAGILYALLRDGSVFEPQRARPPRPTAAALVHV

SEQ ID NO: 359863 - protein, 346 aa, unidentified
MKYFAGLDVSLEETAICVVDETGAMVREARIPSEPEALVAFLQGSGLVMERIGLEACSLSAWLHESLVAAGLPAVCIETRRAKAAMGAMPNKTDRNDARGLAQIIRTGWYRAVHVKSPACRSWRALLTARRLLLNKMRDLENGLRAVLREAGLKLGTPTRKEFAARVRELTAADPVLSVLAEPLLTIIAAMTRELAQLTKRVLEIVRDEPVCRRLMGVPGVGPLTALTFRATIDQPERFRHSRDVGAHLGLTPKRYQSGETDVQGAISRCGDELARTALYEAAHSLLVRSRRWSALRAWGMQVAKRRGMARARIAVARKLATILHRMWADGTEFRWGKEGTMPAAA

SEQ ID NO: 359864 - protein, 381 aa, unidentified
METSPAPAAPATDMEPATLFVALELSKAKWLVGLHSPTADKISRHTITGGDAPALLGLIEAARRRAEASLGGEVQIVACYEAGYDGFWLHRLLLAHGIANQVVDPASLLVNRRARRRKTDRIDLAGLLRTLMAWHRGEPQVCSMVRVPSLEEEDQRRRGRERERLVKERVQHLGRIKGLLMTQGIRDFQPARRGWQERLEALRTGHGQPLPGCLKAEIARECRRLALVDEMLEELEREREATSDGKAPQQAALLGKLRGIGPISAHVLAEEVFHRDFANRRQVAAYLGLDPSPWQSGQRDHEQGISKAGNRRGRRVAIELAWFWLQHQPDSGLSRWFKERVGTARGRVRRIMVVALARKLIVALWRYLASGTVPEGASMRA

SEQ ID NO: 359865 - protein, 311 aa, unidentified
MTSITIGIDVSKDRLDAYRLPDGASAAFVNDRAGIGRLIRWIGAGVTRIVYEPTGSYHRAMERRLGDADYPLVKVNPRQARRFAEALGILAKTDRIDAVMLTRMGCALELEPRPLKTAVLHDLNDLQVARRALVKDRTAATNRAKRLALPLLKRQNAARLARIEEDIAAINQAIRAIIQADADLAKRFAILTSIPGVSEITAAALIIMMPELGCLDPRQAASLAGLAPMTRQSGQWRGKTFIRGGRAALRQAVYMPALVATRFNPDFKEKYRALREAGKPPKVAITAIMRKLVILANALIRDGRKWTPRAS

SEQ ID NO: 359866 - protein, 349 aa, unidentified
MLADELDYVVGVDTHRDEHVLAVVVAPAGAVVAQRSVQTSACGYAAAARFAEEHANGARVWVVEGAGHYGAGLARYLSGRGETVLEVGRGPLAERRLRGKDDSLDAIRAARTALASETLAMPRAGQRREALRLLLLARRSAVDARREALVQLRSVIVTAPDGLREQLRGLPVQRLVVRCSRLRRSSSAPLDELATRQVLRSLARRIEAATAEAAALEREILAHVRALAPQLLDEPGVGPIVAAQVIVAWSHQGRVRSEAAFARLAGAAPIPASSGQTTRHRLSRGGDRQLNRALHTVILHRRQHDPATKAYIARRVAEGKSRRDAVRLLKRYLARHLYRILDNQTPLTT

SEQ ID NO: 359867 - protein, 355 aa, unidentified
MTTVPHDEVRVTVGVDTHEEIHVAVALDQLGRWLGETSIPTNTGGFARLIDWASDFGVIDRFGVEGTGSWGAGLARWLRAEGLVVVEVDRPKRKHRRHGKSDAIDAEAAARAVLSGEATAVPKTGDGPVEMIRVLRLTRRSAVRNRTMAANQINALVITAPDALREQLRGMTTRRRVAVAAKFRTGDEPTTVLDATRYALRELARRYQHLTEQITRLDTQLDRLVAETAPELVAKVGVGTHTAAALLVTAGDNPERLAREGSFAHLTGSAPLDASSGKQQRHRLNRGGDRDANCALYQIALTRSSKDDTTKRYIERRIAEGKTKKEAFRCLKRYIAREVHQTLVRTPALQVALDT

SEQ ID NO: 359868 - protein, 340 aa, unidentified
MTAVMIGVDPHKGSHTAVVISLAEEPLGEIRVGASAAQAGKLTGWAAAWPERTWAVEGAAGLGRLLAQQLVAAGERVLDVQPKLASRVRLLQAGDTNKNDPNDALSVAVAALRSPACRLVAAEDHPAVLKVWSKRHRDLARLRNQVACRLHAVLCDLVPGGIAKEISAAQAARILGQVTPSSAVALARAELAAEFLQDMRHLDAQLRDTRKKLAAAVKASGTTLTEVFGVGPVIAGTIIGDIAGVSRFPSRDHFAAYNGTAPVEVSSGNRKVHRLSLRGNRRINHAIHMAAITQIRHKHSDGRAYYDKKLAEGKTHKEALRSLKRKISDAIFARLQADAR

SEQ ID NO: 359869 - protein, 340 aa, unidentified
MTYALDLGDRFSQLAAVAADGSLLEEGNVPSSLEGLTARFAGLPAARVVIEAGSQSPWMSRLIASLGHEVIVANPRRLKLITASSRKSDRVDAIALARLGRADPNLLAPIRHRPLEAQAALAVVRSRLSLVRTRTSLINHCRGAAKSFGVRLPACDARYFHRKAALGLPPDLRPALQPIIETIAGVSQRIAEMDRELEQIIDSRFPHARLVQQVPGVGPITALTFVLTIADSARFRRSRHVGPYLGLVPRRHQSGGHDPKLSISKEGDSYLRSLLVEAAHFTLSHRAPDSDLRRWAKAQLERRPTEHNTVVIALARRLAVLLHALWTSGEVYRPLSTDPV

SEQ ID NO: 359870 - protein, 348 aa, unidentified
MTIVHAGLDLSRTRLDVCVLDETGRRLVEHAFPPDADGLRHLVDEVGRFGQPVQAVIESMTGARFVHDTLELLGWDVQIADALKAKGIAPLAAKTDKIDAHVLAELSRRDLVPSIWLPPPGVRAERERARFRLHLVHHRAMLKNRIHATLLTFGKPCPVSDLFGLGGREILARLDIPDPWKENLDTALGLIDDLEVQIDSIERELKLAGADHPYVSLLTSAPGIGWILGYTIASEIGDISRFSSPKKLVGYTGLAPRVIQSGNNDYRGPLAKNGPRYLRWAYIEAAVHAARHPYYKDHYERTAKRLGRQRGRKVARVEVARKLVEATWHMCQTGATFAPGRSQSVPGR

SEQ ID NO: 359871 - protein, 429 aa, unidentified
MKYNTQNAKIASITEKTLIVGIDVGSETHYARAFDWRNYEYSKKPFAFNNDEAGFAAFKAWMEDMADKHGKEAVIPGMEPTGHYWLNLGAYLQEQGMKPVHVNPHHVKKSKELDDNNPNKNDRKDPKTIAGLVNEGRFSYPYIPTGIYAEIRNLSNLRIQTQEELTRIKNRIARWFSIYFPEIKDVYKNPDAVSGMMVIKKAPLPCDIKELGVDGVNQVWRDAKLKGAGLKRARTLVSAAEHSIGSTEAPGSARIEIRNLLNDYEVYKNRMDDLMREIEAKLSEIPYIDKLMEINGIGLKTVSCFIAEVGDIRRFDNPKQLQKLAGYAIVADSSGKHNGESRISHRGRKRLRYALYEAAISVIGKNKEFREIHDYYRTRKQNPLKKMQSVIAIACKLIRIFYTILTKGVDYDGQKMLSDIVRPETIMAA

SEQ ID NO: 359872 - protein, 431 aa, unidentified
MSKFFYRPTVGIDISADFSVVAILAPDGEVHRKPFKIMHTRNGFDYLVDQIKKVEKEFNMKTAIFMESTGVYHLTLFHFLKDTFEVCILNPLITNCNKNVDIRKVKNDKKDALTIAKIGKFQDVKYSSNFDIEIYTLKSLCRDYYKFTDSKSTFKKKLSTDLRVIFPTYNTVFSNITCKTSIAILKTYSSPEAILNADRHSLIDLISTNSRKGLVHSEKIYNKLYAAAEEAVYIGLNSPSLFVKIINTIAVIESLETQIQNLLSEIQLLMTSNRIPDEFKKNVQLIHSIPGVGELTAITIMSEIGNIKGFIKPKHLVAYFGIDPSVSQSGKFNSDKNVMSKRGTRIGRRALYAVALASIRKNRNGEPINKVLLNFYKENMKGKSKKVGLVAIMHKLINYIFSVLKNQKEYELRDPKIHAKMYLNRKSNFAA

SEQ ID NO: 359873 - protein, 347 aa, unidentified
MKITAVGIDLAKSVFQIHGVDERGKVMVRKQLKRAEVAKFFANLPPCLIGMEACASAHYWARKLMAFGHTVKLMAPQFVKPYVKTNKSDARDAEAICEAVQRPNMRFVPVKTPEQQAVLALHRARQGFVKARTAQANQIRGLLAEFGIVIPKGIAHLAKRIPEILEDGENGLPGNARQLFAGLLEHFQELHQRMAELEKQIVLWHRSNEQSCKLEKIHGIGPITASALVASIGDAKSFKNARQAAAWVGLVPRQHSTGGKDRLLGISKRGDVYLRTLLIHGARSVVRQAESHADRATSWLKGVLDRRHKNVAAVALANKNMRIAWALLAKERDYESNYAAAPNVAQA

SEQ ID NO: 359874 - protein, 309 aa, unidentified
MDIVVGIDVSKDRLDVAVAPSGLVFQVENTQAGIDDLVQRLQPIGADVVALEATGGFETAAVAGLSAAGFAVVVVNPAQVRAYANALGRRAKTDAIDAAVIAAYVLATRPELRPLKDAETQALSALVARRQQIVQMIVAEENRERMALAKEAQKSIKRLLAALRRELESLDKDLDDQIRKSPVWRVRETLLTSVPGVGPATARTLLAEMPELGGLDRRQIASLAGLAPWTRQSGTWKGKSFIGGGRGKVRAVLFMAALVASRHNPVLKAFRDRLVAAGKPKIVAVVATMRKLLTILNAIIRDEKPWQNA

SEQ ID NO: 359875 - protein, 361 aa, unidentified
MSESMALVGLDVHQAQTVAAVLDPVSGELRVQRLRGEPAVVVPGLLEALGRPVRAVYEAGPTGFGLARAATERGLDVRVIAPGSIPRAPGDRVKTDRRDAKRLVRLFAAGELSFAFVPSEPDERFRDLVRCIDDARKDLMRSRHRLSKFLLRRGLRFPGRAWTQPHGRWLGKLSFDDALSQAVLVDYVCAVDALVQRRRALIAVLEDAVPASSHAQTIARLRCFRGINTLTAAGLCAEVGRFERFAKPSLLSGFLGIVPCEYTSSEKRVQGAITKAGPTHARRLLVEAAHHYRRGPRVSYELAARHAGQDPRIVQIAWRAQRRLHSRWAHLGSERGKPTGTVAVACARELAAFCWEAATLN

SEQ ID NO: 359876 - protein, 344 aa, unidentified
MGEISTIGLDIAKSVFQVHGVDDAGAVVMRKRITRSKMLEFFAGLPPCLVGIEACSTAHHWGRELQTLGHTVRLMPPSYVKAYLKRSKNDANDAAAICEAVTRPSMRFVPIKTKEQQTALMLHRTRQLLVRQRTMLSNALRGHLAELGVVSAKGRNGTAELLGILADGADTRIPAAARGILDALARQYSAIGAELGSIERTLLAWHRACEASRRLEEIPGIGPIVATALVAEIGDWKAFSSGRNLAAWIGLVPKQHTTGGKDRLGSITKQGNRYLRWLLVVGATAVIRYAQKHGTKNRPWLGRLMQRRPAKVAAVALANKIARMAWAIMVHGDRYKEPKLLMAA

SEQ ID NO: 359877 - protein, 382 aa, unidentified
MDIVHDRCAGLDVHKKTVVACVRHINPDGSVASVVHTFGTMTADLLALADWLDAHGVREVAMESTGVYWKPIFHILEGRFNVMLVNAGRLKQVPGRKTDVKDAEWIAQLLQHGLLSPSFIPKPEIRELRDLTRQRTELVRDRAAVANRLQKTLEDANVKLGSVASDVLGASGRAMIRAIIDGQDDPEKLADLAKQRLRGKIPELRRALLGRVTDHHRFVLRLLTDQIDALERLIERLDERIDEAMRPFDEAAGRLQGIPGVGDRAAEVIVGEIGPDVESFPTAGHLCSWAGLCPGNDQSAGKRRSGKTTKGSPWLRSLLVQSAWSASHAKNTAFSICYRRWVPRLGKKKALIAVAHKILVVIWHLLKNGADYRERQLPAPAA

SEQ ID NO: 359878 - protein, 399 aa, unidentified
MKEPRTPAGERIAEMQMILGQSRFALFGLPFVGLEELMEGRQSVTALYDYHIGVDYHKSYSHLVVQDSTGKTLRSGRVKNDRQSLGVFLERYRENSHAVVEATRNWMVMYDWLDDICDDVVLAHPLKVKAIADAKIKTDKIDATVLAHLLRADLVPEAWAPGEKARELRVALRERMFYVRLRTMMKNRIVTVFDRYPEQTAQLRKLGDLFGKTGRQQLALINVSEIDRIQIDRGLEFIGDIDNRIRQSEATIRAMTKTNANVKLLKTIPGIGEFFARLIDAEIDDIGRFRNAKKLAAYAGLVPSTYSSGGKTYHGKIIKQGNKWLRWAFVEAVAPAVAMEPQLRAQYEHLKLRGTNKARVAIARKLLTITFQILRDRRPYERRGASGEEGASSTISRLS

SEQ ID NO: 359879 - protein, 463 aa, unidentified
MPKARKSRKKLALKVDVTAGLEALHHHAAGIDVGNAEHYAAVPVGRDPQPVQTFGSFTADLHRLAKWLKACQIETVVMQATGVYWIALYEVLEGYGLQVNVVNAKYTKTLPGRKTDVLECQWLQKLHSFGLLNNSFLPPEEIRVLRTYLRQRENLGAAAGTCIQQMQKVLTQMNVQLANVSSDLSGMTGMAILQAILDGQRDPQQLAALADPRVQASRKEIAQSLAGHWREDLLFVLRQVHGLYFTYLESITACDQRIEAHLKTMPAKVDVVAQPLPEARPKDRLPNRKHIPQFGLREELYRITGVDLTRIDGIQVQTAQVLVSEVGVDMTRWPTEHHFSSWLGLSPNNQITGGKVIRRGTKKVLNRAATALRLAAQTLHRSKSYLGAKYRRLRARLGAPKAITAMAHHLARLIYRLLRFGTQYHDKGVEYYERKYRETEMKWLQKQAAKLNMQLIPTGALTK

SEQ ID NO: 359880 - protein, 345 aa, unidentified
MGTYMGVDLHSNNGYYGIIDQNDERIFQKKLPNDLPLVLSALEPFRKDVEGIVIESTYNWYWLVDGLKEAGYKVHLANPSAIKQYDGLKYSDDITDSFFLARLLKLDILPEGYIYPKEGRPVRDLLRKRLMLVRQRTSHILSFENHIARNTGSNISSNKVKKMNPEDVELLLDNKHLVLSGEINIEAIRFLDEQIKKIEKVVLAEAKLKEPYEYILTVPGIGKILALTIMFETGNIKRFQKVGNYSSYCRCVKSERLSNEKKKGRGNTKSGNEYLGWAYVEAANYMRRWCPEANSFYQKKSAGTNKIVATKALANKIARACYYIIRDQKPFDVKRMFGNRKGLRQ

SEQ ID NO: 359881 - protein, 312 aa, unidentified
MKMAHPVSIIAVDVSKAHLDCFDAARGEAFRVDNARPGFTALARKYQGQSVVFAAEASGGYERGLLRELGAVGFSVRLLDPRKVRLFARASGRLAKTDRLDARAIAAFAQAIPGEPQAINPAQEALAELATYRRQLIAEQTLVANQAEGLRDPELLRVTRRRLAMLKTQIVRLDLRLAEAIQASETLREKSRLLLSIPGVGPVLCSALLAFLPELGQISRHQVAALVGVAPFDNQSGKTDRPRRIQGGRTALRTVLFMAALAATRCNKTLAAFYDRLRAAGKKPKVAIVAVMRKLVVLANALLRDQRPFASP

SEQ ID NO: 359882 - protein, 370 aa, unidentified
MDAPFQKRHLSAKVEMSLNHVPKWASKMKITTIGIDLAKNVMQIHGTDVHGNTVLKKQLRRSQVVEFFVKQERCLVGMEACGSAHHWARKLEQMGHTVRLMAPQFVKPYVKTNKNDMADAEAICEAVGRKNMRFVPIKNIEQQAILSVHRVRQGFVKTRTALANQIRGLLTEYGIALAQGITHITKDVPKALDANGQDLPGSFQQLIGRLVEHFKEIDKQIDELELQIKQWHQQNEASRKLAEIPGIGPITASALVASVGDARNFKSARQMAAWLGLVPRQHSSGGKSTLLGISKRGDTYLRTLLIHGARSVIRFAQAKAACGWLQALLNRRNVNVAAVALANKNARIAWALLANDRTFRSDYAAAGAAT

SEQ ID NO: 359883 - protein, 318 aa, unidentified
MPQETRIVGLDIAKGKVDACIHSLGLRLTAPSTAEGEAKLVAWLRANRVGRAVMEASGGYERSWAEALRAAGLAVRVVDPKRVRHFAKAAGRLAKNDPIDAETIARFAEAFPDGGAQPHDRAREELARLVQAREALKDVQERIKQQREHQPPAIVVEALAAVAKTLRAEMRKLEASIASRIKANPAFAHRAELIDGVPGLGDQTVAGLIAWLPELGRIPNEAASALLGAAPYDDDSGQRKGVRSIRGGRRKLRNLLYMAVVGAATQHNPVLKAYYRRLLARGKEPKVAIVACMRKLIVILNTMLARDEPWTPPAQAAP

SEQ ID NO: 359884 - protein, 412 aa, unidentified
MLRIAYPICCGLDVHKNFVYACIASTNERGVTTYKSKRFSTFTKGLKELLSWLLENGCRDVCMESTGKYWIPVYNILEIDCKVVLAHPKYVKSIRGKKTDKKDAKWIADIFKHDLVNGSFIPPFDIRQLRDLMRYHFKLTYCMTGEKNRAQNCLTVSNLKLDDVFTDVFGKSASAIINQILEHPNEPFDVSDFVDGRCKTPVEDIQAAVDGVICAEQSDKLRIIQTHMHDLEKAKANLESVILTLAEKYRPQINLVSTVPGIKSFSAIAIIAEIGTDMSVFPSAKHLCSWAGLSPCNDQSAGKKKTTRISRAGAYIKPLLVQCANAIVKSDKHPEIRNRYLKLKKRRGHMKAIIAIARMLLTAIYNILKKNEPYNSELYKKSDEHTKSRDLSLEQAIAVLVRQGYSVSPPGC

SEQ ID NO: 359885 - protein, 410 aa, unidentified
MTNQDHRVGGIDSHKDTIHVAVITAIGQPVTDREFPTTVAGYRRAVAWLIEHGPLSAVGVEGTSSYGIGITTELLAVGIRVVEVNRTRAAEKRKQGKTDPLDAYRAARSVLSGEASTEPKNPSIEPLRALTIARRSAVKSQQAAWRQIGSLLVTTRPALRDRFRDLPETKLIATLRDCRPDQIHDVDDADTLYALRTLARRYLALQDEITALEERMLRRATRANSALMAIKGVGPAVGAQLLITAGDNPDRLRTSASFAALCGTAPIPVSSGRTDKHRLSRGGDRQANAALHHIVKVRMSYEQRTRAYRDTRLANGWTTKEVFRALNAPSHERSSTPWPAIPSRPTTPTYDPHATRRTSPSPPPHNTWAYGPPESANSNSGDAPTTNPPPATEPGSPPPETPPPQRLDTQ

SEQ ID NO: 359886 - protein, 345 aa, unidentified
MKIIGCDFHPSYQQIAMMDSETGELWEGRLEHEKGEASRFYESLRGPVRVGMEAVGNSQWFEKKMEELGHELWIGDAGQIRRLAVRAQKTDRRDARHILDLLLDGRFPRLWVPSTEMRDVRQLLRHRQKLVGMRSQVKNQLQHLALNQGVRRRQRLWSSTGRRVLEQLPLEGWTARRRAELLALLDQLDRQVGELDQAVRSEAQRRPEVRLLMTHPGVGPVVGLAYVLTIGPVGRFPRGKQVASYLGLIPKEKSSGGRQRLGSISKQGNTMMRTLLVEAAQTASRFDPELRRDYRRLAARKHRALAKVMVARKLAVRLYWMLREDRPYWQRSVAPTQGSPSHSVV

SEQ ID NO: 359887 - protein, 371 aa, unidentified
MKHTRFVGLDIHKERISIAVAESGRSGAVEYLGEVANDPGAISKLCDRLGRPGRPLAFCYEAGPCGYGVYRQLTSLGHRCDVVAPSLIPMKPGDRVKTNRRDATMLARLHRAGELTPVWVPDADHEAMRDLIRLRSVVRQIVTRTRQHLQGFLLRHGRKHGQGTAWRMAYRRWLSTLAFQHTAQQIAFQDYVDAVMDAERRLQRVEEQISCLLPEWNLRPVVDALQAMRGIALINAVVLVAEVGDFTRFSSPRQLMAYFGLVPGEQSSGETVRHTGITKTGNSHARRALVEGAWAYRMKPRIGRHKVDQIEALPKIVRDIGWKAQVRLCARYRRLSARGKNANVVNIAIAREMVGFIWSIACTIQSAPRTA

SEQ ID NO: 359888 - protein, 438 aa, unidentified
MSNKVIFNLDELFISVGIDVGADFSWMSIALPNQQFVGKPFKILHNSIDSLTTAVSKIKEAEELYSLESRIFLESTGIYHYPLFCYLRDKGFNCSVINPIITKNSTNINIRKVHNDRFDSKKAALVGLKPDLKVSLMPSDLALNCRNLCREYYDLMDNRSAYVNKLQGELRMAFPQYLGIFSKVTINTSLTLLETYTSPSAFLEADKQEIIDIIKSTARFGLTYAQNKYNAIIQAATDANQFGYIIDSNIKRIRLYISFIRKYDEEINNILESLHELVDANEDADFVKQIHLIETFKGAGFLSAVSIMGEIGDFSAFSKPKQLFAYFGLDPAVKQSGKFEGTKVQISKRGSAIARRVIHTLTLQCISISRNGEAKNPVLREYYLKKCDSKPKLVAMGAVSHKVCNMIFAILRDNKSFEIITPQEHIKQYNASKCDMAA

SEQ ID NO: 359889 - protein, 339 aa, unidentified
MEKITTIGLDLAKHAFQVHGVDASGATVLRKQLRRSQVVAFFARLPRCLVGLEACATAHYWARELRAVGHDVRLMPAQYVKAYVKRNKNDAADAEAICEAVQRPTMRFVPIKTAEEQAALLLHRGRERLVRQRTALVNALRGHLAEFGVIAPRGLRNVSGLIAIVRDESDGRLPDLARQVLGVLAGQIEQVEAAVSRLEKQLIAWHQSSPVSQRLATIPGIGPIIATALAATVVEPSGFASGREFAAWLGLVPRQHSTGGKARLGAISKRGNGYLRRLLINGASANLLRSKATNADPWVIGLRRRRPGLVVAVALANKTARIAWAVMKRRENYRPMAAA

SEQ ID NO: 359890 - protein, 320 aa, unidentified
MICGVDVASKSLEARIGRQGAVGSFANDVEGIAALGDFCRTHQAEFVAMEATGGYEQQAFAQLSGQGLAVAILNPRAVRQFAQSMGSLEKTDRIDAGMIAWYAEVKKSQPVCLAPENQQHLRALVTRLRQLTDLRSVQLNQQRLVTDRKVQTSFKKLLALLARQIKELEQNIAVLLAKDPLWRAFDQAFRTIKGVADRTVARLMAEMPEIGTLSNKTISKLAGLAPLANDSGKRQGRRAVRGGRAAVREILFMVASVVGRHEPDFIAFRQRLRAAGKPPKVVRIALAHKLLVRLNAKAREVRQAMASPEHNRAVLQAEPA

SEQ ID NO: 359891 - protein, 372 aa, unidentified
MEQNSSLFVGLDVSKLKISVAVADGERGGEVRFHGDIASDPASVSATVQKLAKRGATLHFCYEAGPTGYELYRQLIEMGHDCIIVAPSLIPKRPGDRVKTNRRDAVSLAKLHRAGELTAVWVPDRGHEAMRDLVRARESAMEAQRRARQHLQAFLLRHGHIYSGRKAWSLAHERWIARLKFEHPTHYVVLKEYCQTVEDSAVRLQRLTDLISETVDTWTMAPVVRAYQALRGVALLSAVVFVVEIGDVRRFENPRQLMAFLGLVPSESSTGEHVRRGSITKAGNRRARRVLIEGAWTYRFPARVGRTQQAQLEGLPREVREIAWKGQVRLCSRYRKMISAGKHKAITVTAIAREMGAFLWAIGQEVQPAPQA

SEQ ID NO: 359892 - protein, 347 aa, unidentified
MKIIGCDFHPSYQQVAWLDTETGEVREATLAHENGEARRFYESLRGPVRVGMEAVGNTLWFERLLAGLGHEVWIGDAAHIRSLVVRRQKTDRRDAVHVLELLTSDRFPRIWVPGPEQRDTRQLLLHRHKLVRLRARVKNELQHLALNQGVRRKRKLWTTAGRQLLESLPLDGWTAQRRQDLLQLLDQLHRRIGELDRAVEAEAARHPAAQLLQTHPGIGPVTGLAYVLTLGPWQRFRCAKAVASYLGLNPREHSSGGRQKLGAISKQGNPLLRSLLVEAALSAVRGDAELRRAYRRLAQRKHTALARVMVARKLAVRLYWMLRSNQPYAPRPAVRMPGSPSHSVVAV

SEQ ID NO: 359893 - protein, 339 aa, unidentified
MDLYSAIDLHSTSSQIAVIDADGRRVARKKIPNDAMLINAWFSTFKGDLRGIVVESTYNWYWLVDALMNDGFKVHLANPSAIQKYSGLKHVDDTHDAFWLAEMLRLGILPEGYIYPKAERPVRDLLRKRSHLVRLRTSLIISLQNIIARNCGVAVRASEVKLLREDCIAPFLDGNEDLAMAGAVSKETIDFLTRKIRSIETVVKKRVELKQPYRHLLTIPGVGRILSLTIMLETGPISRFRRVGDYASYCRKVDSQWTSNGKKKGSGNKKNGNKYLSWAFSEAAEFARRFNESARNYYNRKTRKTNFMVAHNALAHKLARATYHVMKDEVPFRADKLFG

SEQ ID NO: 359894 - protein, 355 aa, unidentified
MSQSTTLYVGLDVHKDSIDIALAEASRDAEVRHLATVGGGNEAVTKALRRLVSAGHRLHIVYEAGPCGFALQRHLSALGWRCDVVAPSSIPRPSGERVKTDRRDAMKLARLARVGELVPVRVPDSADEALRDLVRGREDAVREQRNARHRLKALLLRNGIAYSGRAAWSGAHLRWLASMKLAHPAQQIAFQEYLHAITEAGARIVRHEQALRDALSGWTLAPVVLALQALRGVQLIAAITLVAEIQDFWRFATPRQLMAYLGLVPCEDSSGPRRRQGVITKAGNAPAATHARRDRSSVPACRPRQPEHCASPERPRASQSRDRHRLERPDPPVRALPSSKRTTLASQQDRRGRRP

SEQ ID NO: 359895 - protein, 370 aa, unidentified
MSVRRILAKTIDTDLEYEAIGIDLAKNCVSAALITTEGEVVGIDRLDYSELEKSAQVLSPTTFVMEPCTEMNYLVQKLEAWGHRCLVIGGKHVRDYIENHYSGQKTDLNDAQALAFLAKDTQLRTIKAKDMEQQKYASLTTLREQYVKQYRQTIVSLKGICQAWGLNISKGISGKARLKDLIENHAAFPEELKESLVDMVTHAQTAQKALNKITKTLEVLAKNDKVCQLIQTIPGLGTICSCRLRATIGDIKRFKNPKDFPAYYGLVPRSIATGHNEKKGKITHRGDKTMRSLMVQAAGSLVNMATKGKLKSKQLTKWILKKQKEKMPWGKLVCAVAAKLLRIVRAVLISSKPYNPKIAGVAKCSLPKGT

SEQ ID NO: 359896 - protein, 421 aa, unidentified
MLKIHRFNCAGLDVHKNLIVATIGITDKKTHVTEYIQKDFSSLNFDLYNLKNWLIEHECFDVCMESTGKYWFPVFNVLETEAKMNIVLVHPKYVKAIKGKKTDKKDSKWICDLFKHDLLKSSFIPPKDIRELRDLSRYRFKLICMRTSERNRYQNSMTVSNIGLASVVSDTFGKTAQAVMNEVLSTEVIDEDKITKLIHGKCKNKDKIVESLKSSKIEPDKRFKMAEIQSHMNELNQHIEAVEVEIIKRASRYFDDFLHITEIDGIQLMSAILIISEIGVDMTQFETDKQLCCWAGLSPANNESAGKKKSVRINKAGQYLKPVLVQCALAAIKNKNSYFGQKYTKIKKRRGHKKAIIAIARMMLVSIYHMILTGEKFNPSDYESFKNPKPQKEKNNYTVETALDFLKSQGFDVSTIQDIPK

SEQ ID NO: 359897 - protein, 290 aa, unidentified
MPRYSTAFGMDVHLRSTTVCALDAETGEAVTRRFRGNPWGEVAEWMSGFPGPSLAAYESGYLGFAPQRELSGLGVDCVVAAVSKVPRAAADLSSKNDRNDAARMAKAILSHDVTPVWVPSPEIEGLRDLAAAHDAATARLAAAKQRLLAFLARRGYAYGGTTPAGNPRRYWTYGFLRWLDGIRPADDGGIRALAALRSEVEAADETREAVLAEYRAAVAAGPLSAEVEALQSIKGCGFALAAAFASEVGDFSRFRSGRQVTSYFGLAPKQRSVSANLKLTTFANASRRMR

SEQ ID NO: 359898 - protein, 431 aa, unidentified
MKYKHARKQNQRIQQITESTLVVGADIAKKTHVARAVDFRGIELGKDCVFGNDHQGLTKLVTWMKELQRRHHKTEIVLGIEPTGHYWFPLAEYLQREGVRVVVVNPHHVNKSKELEDNSPTKNDYKDAKVIADLVRNGKYSEPKLPMNVYADLRILMNLREKVMVNFGQVQRRIQNWLDRFFPEYGQVFKDWEGKASLITLSEFPTPSEIVALGVGAIVRRWKEDVKRAVGPKRASQLLETARTSIGLKQGLAAAKIELKTLLEQYEMFAKQLEDIMMEVERLLAQIPGTKEMLTIPGVAIVTLAGFLAEVGDLSGYDHGQQIIRLAGLNLKENSSGKKKGKSTITKRGRSRLRALLFRAVMPMVAKNAEFKALHQYFTKRSHNPLKKKQSIVALCGKLIRVLYTLGTKRIPYQPSDVLGPVRQAQLQMAA

SEQ ID NO: 359899 - protein, 356 aa, unidentified
MDQLTTVGIDLAKDVFAICVLDVTGAVLQRRVLRREAFIRWAEQLSPCRVAMEACGSSHHWGRWFAARGHTARLIPAEFVKPFRPGGKNDAADAEAIAVAARQPTMRFVAIKSVEQQAILAWHSVRNGWQEERTALLNRTRGLLAEFGVVIARSADRFLGALPTLIEDPRLPDPVRAMLFEVREQLAALNLRLARCDQQIATHARSSDVARRAGELLGVGPVTSSALAATVPDAKIFRNGRQFGAWLGLTPRQHSSGGRTRLGHISLRGNVYLRTLLVQGARSTLQSALRADPTHASRLQRWIRQLHERKGYHKTLIAIANKHARMLWAMLARDERYDADAWQRHPMHPSLPPATT

SEQ ID NO: 359900 - protein, 391 aa, unidentified
MVCVGIDVAKDKHDCCILDSDGMVRADCFTIPNNMDGFKQLLQTIRNCTKKSDKIKVGLEATGHYSYNILGFLLDNGLPTYVINPLHTNLYRKSLSLRKTKTDRVDARTIATMLLSDVDLKSYTDIAYHNEELKSLTRYRFDKVQERAKLKQSVSRLATILFPELEGLVSSIHGTSIYALLSEYPGAKQISEVHLTKLTNLLTTASKGRYGKEKAIQIREAARASIGSVMPAKSLELKHTIKLIQELASEINEIEDSIQKIIDELNPPILSIPGMGVNSAAVILAEIGDFSNFSSPDKILAYAGCSPSTYQSGKLTNCYAHMEKRGSRYLRHALYNATKYVCYWNPVFAEYLAKKRAEGKHYNVALSHAMKKLVRLIYALQKSGKAYLAAA

SEQ ID NO: 359901 - protein, 343 aa, unidentified
MDTVTVMGCDPHLDTISVSVMDLMGRELAAVTVSNDRHGWCETAELAHQMGVTKVGIEGASGYGVNLSRVMSGIGFEVLEIPTRLTARHRRIDGAGKTDPGDARTIARTVTVGEGHRWADTPNLETIRLLVSRRDQLIKTQTGDINYLRSVLADIAPHLAATLGRVRSQRRLNELANLELDDPTPYQQQALQLIADTAHDCIQRLEQIRRIETELDTILPPVGRQMIDQIPGCGLITATQILAQLAGTTRTETDARFAAWSGIAPLDASSGRQQRHRLNTGGNRQLNRAIHTIVTTQARHHGQAHHYITRRISEGKTRKEAIRAAKRHVARNVWKLLRNHQLT

SEQ ID NO: 359902 - protein, 370 aa, unidentified
MKEFSKYVGLDVHKDTIAVAVADADGGEVRFVGEIAHTPEAITKLVRQLKRGAARISWCYEAGPCGYGVYRQLNAVGEHCQVVAPSLIPKKAGDRVKTDRRDALSLARLHRAGELTAVWVPDQAQEALRDLTRAREDMKHLQRQVRQRLSAFLLRHGRRFSGKSKWTQVHFRWFETVNFDQPVQQIVFQEYVDTVLACGKRVRGLDEQLERVARESVFWPVIEALMALRGVNLLSATTIVAEIGDLHRFASAPQLMAYLGLVPSEHSSGPKQVRGGITKTGNGHVRRLLVEAAWTYRHPARKSAPLQRRAERTAEAVQDIAWKAQKRLCQRYRHLTARGKQSVQASTAVARELAGFIWAIGQAMPRPTTA

SEQ ID NO: 359903 - protein, 339 aa, unidentified
MKDQDVSDVVRTKKRTAMRYIGIDVSKATFVVAYSSDKGGEIRTFNNTTAGIKQFIGTLPKDGSIHCVMEATGNYSALLLYMLNVAGITVSMENPLKVKNFARAMLSTVKTDKIDARLIALYGEKMNPQPFKVQGEAILRLRQKRTVIRQLTKQITAMSNLRGSLACLPVPDKGATHTVDETIKFLEKKRDRLQSELTDLVEVEFSRQLALLTTIKGIGITLATALILTTGGFTYFQNAKQVSRYLGICPTYEQSGTSVNIRGHINRNGDAYTRGLLYIAAWPASRFNAQCKETYTRLRQNGKSGKLAMIAVANKLVRQAFAVVAHDKEYVDGFVSNRP

SEQ ID NO: 359904 - protein, 454 aa, unidentified
MGASGKTMTKDAAAASALGDGGVEAAEEHVEVVRFAAAIDVAKGSGMVCTRVPGSRGDRKRQTVWQVDATYRSVIALMDHLRCEGIQRLVLESTSDYWRCWYYLAEAAGLEVWLVNAKDVKHLPGRGKSDRQDCVWLCKLNERGMLRRSFVPPEAIRDLRALTRTRARLAQDQVRHQSRVEKVLEDALLKISGVISDLFGVSGRRFLDALVAGERSPAALAALGDGRLKASPQRLAEALTGRFRDIHAVEIATHLRLIDAINDEIARLDERIEQQLAAIPGVAPACTACGLIGGGHAPGCVRDRTPVPGLIERLDEITGVGARNAQVLIAELGTDMSVFPAGHAAAWARLTPRTRQSGTTARPGRTGKGRPVPARRARPVRDGRGTYRYPARRDVPADSPPPWQAERHRRGITCYLRNSLAAHRRPRRPVHRPWRGLLQRPQPSPADTLSDSRD

SEQ ID NO: 359905 - protein, 400 aa, unidentified
MASMTSPIPTTQAARMLFGGVDTHKNIHVAALLDSDGGLVGSASFPTTVAGYRQLLGWMRSFGTVARVGVEGTGSYGAGICRQLTSVGVEVVEVNRPDRSQRRRRGKSDVLDAAAAAEAARTGNRISIPKSRDGQVEALRMLRLTRASAVQGRTKAFQQLDQLIVTGPEQLRDQLRDLPKMGLIRCCAAWRSNSHNVADPMVAARIGLKKLARRYLALDEEITDLDKLLAPLVAELAPQLVAVRGAGTETAGQILVTIGGNPDRVHSEAAFAMLCGVAPLPASSGKTQRYRLNRGGDRQANRALHVIAITRKRCEPRTQAYLNKKIAEGHSDREAIRSLKRLIVREVYYLLRPDLTAAPVPPSRPASRRAGAVKVEPPTRGTTLTAPSTGTPSKMEESAP

SEQ ID NO: 359906 - protein, 402 aa, unidentified
MNCVGIDVSKGKSTIAVMRPFGEVVVSPFEVCHTVNELSELARQLKSLDGETRVVMESTGNYHAPVAWLLHDAGFYVSVVNAMLVHDYGNNSLRRAKTDKKDAVKLANYGLDHWLTLPRYIPEEDTRLMLKICYRQYQQYSKVQTMLKNNLISLLDTTFPDANRLFTSPPRADGSEKWVDFVATFWHCECVCGRSEKAFTTQYQKWCRKHGYNFSEDKALDIYASACRHFGVIPKTDTAKLLVEQAISQLQTTSSALAALKQEMQSLAASLPEYPVVMGMFGVGPTLGPQLLAEIGDVRRFHSKKALVAFAGIDAPPYQSGQIDVRSRSISKRGSASLRRTLFLVMSVILQCAPMDEPVYQFMDKKRSEGKPYRVYMMASANKFLRIYYASVKAYLESLEHD

SEQ ID NO: 359907 - protein, 340 aa, unidentified
MDHFAGLDVSVKDTSVCIVDDAGRIIREVKVASEPDALLAVLTNRIYHFKRIGLEAGPLSQWLFSALAEAELPVICVETRHMRAVLKAQINKTDRNDARGIAQMMRVGLYRPVHVKTLRSQKLRMLLTHRKLLQSKAIAVDNDLRGTLRNFGLKVGMVGTAKFEARIRELVENLPDLAVLVEPLLVVRRVLREQIGILHRRLLAIVRDDEVCRRLMTVPGVGPVVALTYRTTVDVPARFRKSKSVGAVFGLTCSRDQSGERDRPGAISRCGDEMMRAMLYEAMLGRSSRWSWLKAWAMQIAKRRGMKRAIVALARRLAVIMHRIWVDGTEFCWTRDAAAA

SEQ ID NO: 359908 - protein, 375 aa, unidentified
MQNKVRFLGLDVHAETIAVAVAEPDGSVRSLGTTANRAESIRKLVKKLGPVEQLKACYEAGPTGYVLYWQLAELGIQCEVIAPTLMPVKAGDRVKTDRRDAERLARSFRSGDLTAVWVPDAGSEALRDLVRAREAAKQDQLRARHRLSKFLLRSGQRPAAGLKAWTQLYMAWVRRLRFEQAAQESTRLDYLHEVENMAERVVRLEKAIAEAVKLASPEIQEVVKDLQALRGIAQISAVTIAAELGNITRFESARQLMGYSGAVPGEDSSGKRTQRGSITKTGNAHLRRIVVEAAWSYRLRPGIGPALRKRQEGVPEELKEIAWKAQNRLHKRYSRLAAAGKDQRKIITAVGRELLGFIWAIGTKAEAAAGQREAA

SEQ ID NO: 359909 - protein, 337 aa, unidentified
MRAAAGSVAAGDGGKRRANARQSVCAFRVLTQPALGEERRWGIEGGGGYGRGLAQHLVGLGEVIYDINPRLTAKERRRSRRVDKSDAFDAQAVAMVAHREEDTLPRVAAEDETVALDLLTAEREDAQAEATRLRNRLLHLDPEYHLHLPALTSIAGVRAAETYTTASGSLVQQERAAVVRRLAGRLRLVMEQVAELGRRIEALVQTRYAPLTRLCGVSLLTAGSLAGILGPGRRFASEAQLAAYAGVAPLETSSAGRVRHRLNRGGNRRLNAIVYRIALVQARSSPEARAYLARRVAEGKTKREAFRALKRYLIRAIWRLWRACLPPAGAEPADYAA

SEQ ID NO: 359910 - protein, 435 aa, unidentified
MGSKLQKIHAQGAGIDVGSRQFFVGIEDREVKSFDTFTSGCHRVVEYLQQHSITSVAMEATGVYWITLHDMLRDVGISVDVVNGRHVKHVPGRKTDVKDCMWISELHSYGLLKKSFMPAAPVKEMRHYMRLRENHIAQKVKAVQRMDKALVMMNIRLSSVVSEVQGQSSLRIIQAILNGERNADVLLNLCDNKILKRKKEQMQECLKGFYKPEQLFALKQNREQYAFFEKQIADCDVCIEKLLQTLTINKPEPVLNKKPKRIYHNKPNVNNLHKMVQQLYDGKDLTVLPGITSYSLLKFFSVTGNDLKNWQTENHFTAWLGLAPNQYQSGKIKKYRRIKTNTEAGQILKECVQPLLRSKHLALGVFGKRISNRRGPNIAIKAMARKLACWIYRIVNKGLEFVENGIKQYEERQKKDTLKWLEKKAKEFNYTLAPC

SEQ ID NO: 359911 - protein, 340 aa, unidentified
MYPFYLGIDLHLKRTYLVLMNQDGEIIEEQRLENAKVGDYLGQRVPQNTYAVVEATRNWPFMYDLLAEHVDRVELAHPKEVKAIANAAVKTDKIDASVLAHLARLNFLPTAYAAPKEVRDLRLYTRHRKWLVEQRTQAKNRIRAVLASYNLASGMGNLFGVRGRELLTEILPQLRPAGQRVIKDQLVIIDHLDQQIRALEKEIPLTEDQKHKVKLLSSMPGIREVTAMTVLAEIGDISRFRSPKALCNWAGLTPRVRKSDAIVRHGRISKQGSRYLRGAMVQAATVAYRFSPRWAKVHDRIAKRCGRKGAKTALARHMLTVVYYMLKRDEPYREDYPRGA

SEQ ID NO: 359912 - protein, 338 aa, unidentified
MFYTGIDQHRLSSVLTTVTAQGERLGQVTLPNERRLLSEYFAQFPGPHHAVVEATGRWYWLRDLLTPQGIDLHLAHAKFLKAIAYAKVKTDAVDSNTLAQLLRTGLIPEAHMISEAQRGPRDVLRARLRLVERRSRCKNSLDRLLEKFNVAAAGELPPLYRLQAELHAAQITLLTEQIHTLEQAVQGELLDTPAIQRLLWIPGIGRIVAFTIALEVDDIQRFPTVRHFWSYCRLVPGAADSGGRQRHRASKDGNRYLKLAFSHATVRAIQYFPEVRQWYQRWKRKKPIRIARALVAKELAQSVYMVLHDQVDFNQEFKGTPLTRQKKAQWPRRASPSA

SEQ ID NO: 359913 - protein, 463 aa, unidentified
MKSNTHHSESRKRKKMDSFPIINPNAAGIDIGSEEHWVCVPEDRDEQPVRRFACFTADLYAMADWLKKCHIDTVAMESTGVYWIVLYQVLETQGFQVNLVNARHARNVPGRKTDVLDCQWLQRLHTYGLLSGSFRPEDDVCVLRSYWRQRDRLIRYTSAHVQHMQKALTEMNVQLHKVISDITGTTGMRIIRAILDGERDPLKLAQMRDPRIKSSVETIAKALQGDYRQEHLFALKQSLELYEFYQHQIQSCDREIEAYLEQMDSKVDPDSTPPPASKRGNKKPRGNEPDFDLRTHLYRISGVDFTQIDGLHVLTVQTILSEVGFDPGKFPSAKNFASWLGLCPNNRITGGQVKSSKTRKVVNRAADAFRLGAQAVANSSSALGAYYRRMRARLDPPKAITATAHKLARIFYHLWKNHGLYHDPGADYYERQYRDRVINNMKKKAKNLGFEITLNPIANMQVS

SEQ ID NO: 359914 - protein, 379 aa, unidentified
MSKIRFVGLDVHADTIAVAVAEPDGEVRALGLIPNRLESIRKLVVKLGPVKQLKVCYEAGPTGYVLYWQLTALGVACEVVAPSLVPVKPGDRVKTDRRDATKLARSYRAGDLTPVWVPDAAHEALRDLVRTREDARQDQHRARHRLSKFLLRHGQRPPEDVKKTWTLKYMTWIQEHVHFDQPALEATLLDYIHEVEHMAERILRLEKAIAEAIQKTPSEIRAVIEALQALRGVAQLTAVTVVAELGSLSRFPSPRQWMGYSGLVSSEFSSGHKIQRGPITKTGNAHLRRVIIESAWAYQHRPWIGGFLLRRQRDLQLTPEVKEIAWKAQWRLHTRYKKLAAAGKKKPQIVTAVGREFLGFIWAIAVQTEATFPTDRKAA

SEQ ID NO: 359915 - protein, 354 aa, unidentified
MMIIGCDYHPAFQQIALVDTDSGELQERRLQHREEAEKFYRDLAAEGIKVRVGMEASGQARWFERLLAELNFELWIGDAAEIRSKRVRKQKTDRQDAQLILKLMQKDDFPRIWVPSWENRDLRQLLWHRHRMVQARTRIMNQLQAVALNEGLRCKKRLWREAGREQLEAFRLAPWASRRRRDLLELLDRLNPTITELTQTIEQEVEKCPEAQRLMTHPGVGPLTALAFVLIIGTAERFQCGKQIASYLGLVPLEESSGNRRRLGHITKQGNALLRFLLVEAAQVSARSIPEWRNKYFHLAMRRGRKIAKVAMARRLAVQMFWMWRKGWDYEQVRKFGSHAGQPGNRDGVPSNAE

SEQ ID NO: 359916 - protein, 345 aa, unidentified
MELHTIGIDLGKTVFHLVGLNPGGEVVVRKKFTRKQLLHFTANLRVELIGMEACGGAHFLGRALREQGHEVRLMPAQYVKPYVKTNKSDYIDAEAIAEAVGRPKMRFVPIKSDDQLDLQSLHRVRERWVMRRTAVINQIRGLLLERGITLRKGRRHVDAALPGILEDASAKLSGALRILLAQLKLELDHLQMRIDEADAVIKKTAGDNEACRRLVAIPGIGPITATAIIAAIGNGAAFKKGREFAAWLGIVPGEYTTGGKQKLLGISKRGNSYLRRLFVHGARAVLQQSAKQSSGLSAWLAQLTIRTHRNVAAVALANKLARMAWAVLAKNEAYRPPILVGAAAA

SEQ ID NO: 359917 - protein, 353 aa, unidentified
MAVYIGVDLHVRTETVCWMNTADGEIHQHTLDHSRDDLRAFYAQFTAPAVVGIESSGYALWFHQLMEQAGHRLLVGDAYAIRQFARRRQKNDRRDAELLLDLLRRDEFPVVHRPAPPSQDTLALLRYRHRLVRMRTMVKNGLQAVALNHQLRLGFRLFTVRGQQQFAALPLSGAYATQRQQSQVLLTTLEAQIAAVNQELATRAAADPRVVRLRTHPGVGLQTALAVVHTLEPVTRFDRARRIAAYCGLDPSEHSSGDTTRYGHISKQGNRLLRFLLVEAAWSAVQHEEDLGRFFRRLRARKKPHAVTVVAVARKLVLRLYRMLREGIDYEEFRRRGRDARRARQCASPAQRG

SEQ ID NO: 359918 - protein, 385 aa, unidentified
MRSVGLDLGVRHIAYCEVASGAVMRRGSVRRLSELATVVGPETEPARVAFEASREAWHVHDTVHGWGHEPLIVDTTRVKQLGVGQHGRKRDAIDAEMLALALDGGRLPLAHVLSPERRALRARLSVRSELVDMRARQVTVIRGLARAKGVLIASSTTSAFLAHLEKAALDEQTRALIAPLVATLRTAEMQIAVVDQELATLAKADPTICLCATAPGVALVVAATFVSTIDDAKRFRDAHSVASYLGLVPGEKTTGGTKQRLGAITKHGNAQARCMLVQAAWHILRAGSKDDPLHRWGTNIATKRGKKVASVAVARRLAGVLWAMWRDGTVYDAALVGRASATGLRRASQDLGVIADAMSRAVKKIQNRERRAHAIRTKTSGAAMT

SEQ ID NO: 359919 - protein, 403 aa, unidentified
MKRIKRIKRIIAVGIDVSKDKLDVSIYDGKNHITKIYTNKEEGIENLIRDSKEASKKIIDSELHFVMEATGTYHTKVLFTLTNNNYPVYVLNPLISKRYSEEQLRRTSTDKIASKLLAEYAYSSISSHLLGIQNERYNILVSSKFDKSNEDRLNLKILLRTLEGLKKTKTRILNQLEALNQYPDQLGIDAIKSLKSILEEIDKEIKNLENKISEIVKKEENRNLYEKLKTIPGIGDRAASAIIAYFGSFSSFDSPKQAPSYAGLTPLIKKSGKSVGAKEIYHISKIGSPYLRQILFMASLSAARYNDQCHILYERLLKEGKAKKLIYVAISCKLLRQTFGIIKNGRVYDPNFGLMDVEKGNNSNNNDNESIKDNKVNIPFPKNPCLYNPLINKQGTSRCVAGF

SEQ ID NO: 359920 - protein, 370 aa, unidentified
MNRMIRFIGLDVHKDFISVAVADEGSSYVESYGEITNTASSISSLAKRLSRQDCDLCFTYEAGCFGFVIYRQLLGMGHSCIVAAPSLIPRKPGERVKTDTRDALKLARLLRSGDLTACHVPDEGDEAMRDLVRARADAVRAYRVSRQQLNGFLLRHGKAYDGKSRWGNAHMHWLLDIKLAHEAQQIVLEEYRRRVEHDRERIDTLTEQIRRVNESWRWMPVVNALQALRGVCLVTAVTVVAELGDLRRFAHPKQMMSAVGLVPSEHSSGGKRHQGAITKTGNGHVRRVLVESGWNYRFPARLTREIERRQRGCDKEVASMAWRAQKRLCARYRQLSLRGKNAKLITTAVARELCGFVWDIAQQVAPAARK

SEQ ID NO: 359921 - protein, 349 aa, unidentified
MELIGIDVHKRDSQVCILSAEGEPLLEKRIRTESGRFAELLGSRPKARILIEASTESEWVARCLERLGHEVIVADPNFAPMYATRSRKVKTDKRDARTLAEACRLGAYHPAHRVSDEQRQSRGRLAVREVLVRTRTRFIALVGALLRSQGLRVSSGSADRFVERVQRLALPGYLQSQIAPLLAVMLHLNQQIAFLDEVLARGAQRDEAVARLSTAPGVGPVVATAFVATLDKPERFRGAHQVESFLGLVPQERSSGEKQHKGPITKSGNGRMRWLLVQAAWAILRSQSEQAAPLREWASRLAQRRGKNVAVVALARRLAGILFAMWRDGKNYELKKLQAEPDSALPAAA

SEQ ID NO: 359922 - protein, 393 aa, unidentified
MVCVGIDVAKDKHDCFIISSEGEILADVFTIPNNAEGFDTLLQAIRRSTRPEDKIKVGLEATGHYSYNILGFLLNEGLPTYLINPLHTNLYRKSLSLRKTKTDRVDARTIAAMLMSDVDLKSYTDTVYHNEELKSLTRYRFDKVRERAKLKQSVSRLVTILFPELEKLVSSLHSASVYALLSEFPGAKQISSTHMTHLKAVLKNASQGRYGQEMAETIRNAARSSVGSVMPAKSLELQHTIRLIRELDAEIEDIETAIQAIVDEMQSPITTIPGMGVRMGAVILAEIGDFSRFDSPDKILAYAGMSPSTYQSGQLSLSGAYSHMEKRGSRYLRYALYNATKHVCHWDPTFAAYLAKKRAEGKHYNVALSHAAKKLVRLIFAMEKSQRPYCAAA

SEQ ID NO: 359923 - protein, 314 aa, unidentified
MSENPEIFVGIDISKDTLDIGFQPPGHTGELPHDEQGISEATRRLREAEPRLVVLEATGGLETELAASLMAAGVAVVVVNPRQVRDYAKATGQLAKTDRIDALVLADFARAIRPELRPMKDALTRELDDLVTRRRQLVEMRVQESLRLGRASKVQQKSLKSHIAWLDKRIEEIDTDLRQRLRASPAWRTKDDLLRSIPGVGATTSATLLAKLPELGTLDRKGIAALAGLAPLANDSGKQRGKRVIWGGRAEVRCVLYMSAVAAIRCNPVIHAFAQRLKAAGKPAKVVIVACMHKLLSIMNAMLKSNTPWNPKIA

SEQ ID NO: 359924 - protein, 390 aa, unidentified
MERPMQKLNDLSRSLTALELDSTLIAVIEMSLSNWLVAGIVPGIERQPLKKLAVDESALLKLLHRWREEAEKAGRRIERTAVAFEAGRDGFWLARWLKAHSIEAHVIHAASVAVSREHRRAKTDRLDSELLKRAFLGWLRGERDHCKMVAIPSIKDEDAKRPNRERENLVGEQNRIVNRMKAALVRLGIRGFNPKLKRAAGRLDGLHTPEGEPIPPNTLAELRRDMERRRLVSNQIRQIEEARLERLEQMPSDGPHAMVRLLARIIGVGIETADMLVQEVLSRNMRDRRAVARYAGLTGSPDESGRKCREKGLARSGNARVRRGMIQLAWRLLMFQKNSALAQWFRARTENARGTRKTMIVALARKLLIALWRLVREGVVPDGVVLRPTQ

SEQ ID NO: 359925 - protein, 378 aa, unidentified
MRFYNQAHAFYCGVDLHARTMYLCILNQAGTIVLHQEVTAEPAAFLEAIAPYRDGLVVACECLFCWYWLADLCQAEAIAFVLGHALYMKAIHGGKSKDDKIDSQKIAHLLRGGNLPIAYAYPKGLRETRDLLRRRMYLVHKRAEVVAHVVNTNSQYNLPPFGKKLIYAKNRQALKIPQRFAEASVRKSIELDVSLLDSLDELIGDVELYLQRTVKVDDADTFYRLRSIPGVGKILALVLLYEIHDITRFGGEGEFLSYARLIRPLKTSAGKVTGGGGGKIGNAHLKWAFSEAACLLARESDQAKRFLARKEKKHGKPKALGILAARLGRAVYHMLRQKKAFDPVRFWNGEPGVTPAKLKKSAVKRRRRAEGSRCVLEA

SEQ ID NO: 359926 - protein, 326 aa, unidentified
MQGKDMPEQSAEVKVYVGIDVSKTSLDVFLHPLGQVARIANTRQGLKQLKRMLAPHAVALIAIEATGKWHRSAHRTLHAAGLAVAIVNPYRSRKLADALGQLAKTDKIDARVLALFAESLNPRVTPPPARLLTDLQELVCARQKAVDEKTALSNRLGVAETAFLRRELKRRLKAVGGHIDRLEAECRRLVNSNAGLARRFEVLSSIKGIGDVVATTLVACLAELGVLDGKAIAALAGVAPMNWDSGDMRGQRHIKGGRSHVRKPLRMAALSAIRYNPSLKAFYRRLRDAGKLSRVAITAVMRKLVVLANTLISQDRLWQPEAPNCA

SEQ ID NO: 359927 - protein, 395 aa, unidentified
MQYFCYRKNKEIMNLKYSVGLDIASKKIDVCMSVIDRNQRVVVVSSSSFLNTLKGFKDLDDWIIRKQKEKEVPLVLCMEATGVYHENCALYFSERKYNTSIILPNKAKHYLISLGLKSKNDSIDAKGLSKMGAEQCLELWQPMGKFFYELRQFTRQHQNLQEQKTVFNNQLHALELAMYKNKKMIKQQKDIIKLFDKQVKELEKLMKNLIESDEVVKQKVANICKIKGIGLLSVATVLAETNGFELFKNYKQVVSYAGFDVVERESGMSTGKTKISKKGNSRIRRALFMPSFVAVKHKEKALVDLYERTFAKHGIKMKSYVAVQKKLLVLIYHIWKKNEEYNSDYQNNSPKNEFEAIQDNNLKSSFSKGQIYEKRQENEARNEKKEEIYIHCEVV

SEQ ID NO: 359928 - protein, 318 aa, unidentified
MASAAPAFVGIDVAKAELVIAIRPSGERWTMANDGAGIQTLVQRVRGHAPTLIVLEATGGYERAAVAALAAAQLPVVVANPRQVRDFARATGQLAKTDRIDADILALFAERVRPAPRALPDAAAQALDALLTRRRQVLEMLIAERNRLEHAVPAVRRGITQHIRWLERQLDDVDRDLDDTIQASPVWRAKENLLRSTPGVGPILSRTLIGELPELGTLPRKQIAALVGVAPLARDSGTLKHKRLIWGGRAPVRAALFMAALVGTRCNPVLRAFYRRLLEAGKPKKVALTACMRKLLTILNAMMRTNTAWRHSDLSRTT

SEQ ID NO: 359929 - protein, 355 aa, unidentified
MLYLGIDQHARQITISLRDESGDVLLARQVSTQPPKINEFFLQLTRETLRNDERFIAVLEVCGFNDWLIRMLYDYRCHKVILIQPEERKNRKTDRRDAATLSELLWVNRDRFLQGKPIRGLRQVDISSTTDREYRRLTTLRKNAGRVRTRIINTLRHILRRHNLQWEMPTKTFPTRLAIAWLKKLVLPEIDRLELDLLLADLEHMERRVEKLETVIGQRCCSREDVVILSSIPGVAAFTATSLACRVGRVERFPRSRSLANYWGLTPGCRNSGENDQRLGHITKAGSSMARWLLAQVTQKVLRKDARMREWFKRIKRRRGVSVARVAVMRKLCTIIWHMLTKRKTYAQCRALAAA

SEQ ID NO: 359930 - protein, 318 aa, unidentified
MSSAAPAFVGIDVAKTELVIRIRPSGDRWTVANDGAGIQALVKRLDRHAPALVVLEATGGYERAAIAALAAARLPLVVANPRQVRDFARATGQLAKTDRIDADILALFAERVRPEPRALPDEAASALDALLTRRRQVLGMLVAERNRLEHALPAVRRGITQHIRWLERQLQEVDRDLDDHIQASPVWRAKENLLRSAPGVGPVLSRTLIGELPELGTLPRKQLAALVGVAPLARDSGTLKGKRLVWGGRAPVRAALYMAALVGTRYNPVIRAFYLRLLAAGKPKKVALTACMRKLLTILNAMMRTNTTWRQIDQSQTT

SEQ ID NO: 359931 - protein, 348 aa, unidentified
MRFYTGQHRYYCGIDLHARTLYLCVLDGQGKIRLHKRLRCEREALLRALEPYRSDLVVGSECIFCWYWLADLCAREQIDFVLGHALYMKAIHGAKAKNDKIDSHKTAVLMRGGAFPIAYVYPPGMRATRDLLRRRLYFVRKRGELLAHIRNTFHQYNLPGPTGQLLYKKNRQGLAQAFDDAMVQRTIEADLALADRYDPVIRGLEHTIEEEARVHDSDTLERLRTIPGVGRILALTLLYEIHDIARFSTVQRFSSYCRLVKPEHRSAGKRVGSGGAKIGNAHLKWAFSEAAVLFLRDNPRGQTHLKRLTRRHGKGKALSILAARIGRATYFMLKNREAFDTERFYTST

SEQ ID NO: 359932 - protein, 356 aa, unidentified
MNKRSKLNFSGQAIYLGLDVHKKSWSVSIFTQHGEYKTFSQPPEAEALIQYLQRHFPGAQYYSVYEAGYCGFWIHDQLRERGIENIVVNPADIPTQDKERRNKRDRIDCRKLARGLRAGDLKGIYTPARWRLEDRSLIRTRLSMGRKQARCKNQIKSMLLFYGVSIPEQREMGHWSRRFIRWIEEIRMERSSGDVALKLHLEELCHLRQIIAKLNRSILVLARTEEYRLWISLLKTIPGISTLTAMIVLTELYEISRFRSLDQLCSYVGLIPDTQSSGEKEHVGGITQRHHSSLRWLLIEASWIAVRKDPVMMEAFNEYCKRMRKTKAIIKIARKLLNRTRYVLKNQAEYVTGVIE

SEQ ID NO: 359933 - protein, 403 aa, unidentified
MEQISEEQAEQYTRVCAIDIGKAGLVACVRVPHETNPARRVQEVREYATVTPALLQLADWLRCQQVQVAAMEATSSYWKPVFYLLEAEGFECWLLNARHVKNVPGRPKTDKLDAVWLAKVVERGMCRPSLVQPKPIRRLRDLTRYRRSLIRDQTREKLRLEKVLEDAQIKLDAVISDLHGVSGRKMLDAMIAGERDPHVLAELAHGRMRVKLPQLRQALAGYFDDHHAFLCASMLRRIDTLTADIAILDGRIDELIAPFTDAVDKLDEIPGIGQRSAQELIAEIGVTMTVLPTAAHLVSRAKFAPIDKQSAGRAKAASTGKGNPGWPEPSARSSPGWPAPTLSSATATTVWPAGAARRGPSSRSATPSSPSSGTSCPNRTPATRTSAPATTTRGSTSCADSGT

SEQ ID NO: 359934 - protein, 352 aa, unidentified
MEIISFDSHKRYSQVCVQDRTGRFLVEKRIEHQRGNILEFLSKWEKGDRVAVETIGNWYWIVDEIEAAGMVPKLVHAHKAKLMLGSVNKTDKLDARGLNRLQFTGTLPTVWIPPSDIRDIRELPRTRMFFANLRTKFKNRIHSVLDKYGLHTDFTDISDIFGSKGQEQMAETVKKLPPQTAHTLRCLLRELKLICEEIERIEKRMKKVFSETQAVKRLMTLPGIGFILAVVIASEVGDIDRFSSPERLASYSGMTPRIHSSGGHTRYGKLRSDVNHYLKWAYSEAGNSTAVNYKRFPNRHVSQLYGRIRLKSGHAKAVGAVGRHLAEASYWILTKDVDYKEPGPKSFSSTAV

SEQ ID NO: 359935 - protein, 345 aa, unidentified
MKYIGMDAHSKNSYFVVLSRSGKVLCREKVTTQEGPILEFVRSVTGPKKLSYEEGVMSQWLYILLKDEVDELVVCQPPKSKGAKNDWLDATEIADLLRVNRLKSVFHSDDVIMNLRVLISGYDDLLQEIVRTKNRYKALYREAGISIKDEDIYEDQEPLLQLDTEQRQLVGSSLYEQLQILEQHKQKYVKQLNQNVHDYKPVKLLEGIPGIGTIRSNHIVAVMVTPYRFARKGNLIAYSRLTKHGRMSDGKLYGRRRSLGQPVLKDAFRGAALSALCGKNAFQREYDKQRASGRNDKEARNKIAKMVAATVLGVWKSGKPYDDNYWEVTRRSNQSCCRHMLESLN

SEQ ID NO: 359936 - protein, 346 aa, unidentified
MDSGYDGRQVAGMDLHRRRSVLVRMTEDGRRLGMAKITNSPVELRKEIARAGRAPRVVLEATYGWYWAADTLAAAGAEVHLAHPLGVKAFSYRRVKNDERDAADLADLLRMGRLAEAWPAPAPVRELRELTRYRHRLVSLRSSCRNQVHAVLAKLGVPVTCSDVFGVAGSAWLDSLQLPQPYAGKITSLRQLAGELSTEIGMLTDVIGDLLAGDRGCQVIQALPGIGPVLAAHIVAEIGDVTRFATADRLCSWAGLTPRHRESDVKVSRGRVTKQGSRLLRWAVIEAVQHIPADSPIGAAKAAIVARRGAQAKNIAKTAAARKLLTLIYYGLRDHQIRCLGAPVAA

SEQ ID NO: 359937 - protein, 341 aa, unidentified
MATITLFGLDIGKHSFHLVGQDANGKPLFKRQFTRSSLIHYLAQHPACRIVMEACCGAHWLARQLACFGHQVQLIAPQYVRPFVTGNKNDFLDAHAICEAASRPSMRYVGVKTPEQQASSALHRLREARIADRVQTTNQIHALLLEFGIVLPLGARGIKQVPDIVMNASADLPHTARQILSAQYEHYRYLAELIAGLDSQIGAQAKADVLTSRLMTIPGIGPITASQLAADAGNAQSYGSARHFAASLGLVPRQHSTGGKSKLLGISKRGDKSLRRLLVQCARVVMQNAAKWQSAVAQWTQQLMTRRHSNVVACALANKLARIVWAVLVRGEEYRPNPNAA

SEQ ID NO: 359938 - protein, 355 aa, unidentified
MQSNKISFKGQNIYVGIDVHLKTWHVTTLTESGYKYSFAQHADAKELFERLNKKFPGAHFKSAYEAGFCGFSAHYALTELGFENIVVHAADIPTTGKEKALKTDAVDAEKIAWSLKRDELTGIYIKGKDYMDDTNLMRLRQRLIKDLSRQKNRTKHLLYTQGVTYPERFCKNGTHWSRNFMKWLREEVVLLSGEKRTLMLLCDQVEHIRKDILAVTREIRRLSTSDKYKENFSLLNSVPGFGLITSMSMLTEFDNDLMRFPNERKFVAMLGLIPTCHDSGQKKVSGEKINRGNKQLGPLIVEASWVAIHRDYQLGCYYTNCCQSMKPQKAIIKVARKLACKAYAVMKAKKPYVLS

SEQ ID NO: 359939 - protein, 443 aa, unidentified
MSKLKNSLTVIKQNTAGIDIGSKEIFIGIDGMPVKSFGTFTTAYQSAIEYLKENNIKSVAMESTGVYWTVLYDLLEEAGFEVFLVKSNAAKNVPGRKTNVKDCQWIQQLHSYGLLKNSFIPPAVIRTLRSYVTLRRKNIQLASDHIRRAQKALDLMNIKLHFVISEIHGISGMKILKAILKGQHDPQILVMLCDKQILKNKKQSVIESLNGNYKDEHLFALKQAVEGYEYYQKKILECDKEIEKLLNTMTKDLPMPDPARLYKPKAIRRNKPHIENLHTMLMQLTGGVDPSRITGFTDSVLLELISRVGLDMSKWFTAKYFSAWTGLAPNQNDTGDKKKNKKLKNKSAAGQIFRVAAQSLANSKYSAFGLFYRRLRAKKGKAFAMKATARKLAVTYYNIMTKGIDFVEEGIISYQKKLKEQRIKSLYKQARYLGLTISNGDAS

SEQ ID NO: 359940 - protein, 392 aa, unidentified
MFYVGIDIAKRKHEAVVTDDKGDIVVKAFSFTNDLTGYNYLLGKIKLVTISREQIVIGMESTSHYWLTLYTRLIKDGYNVHIFNPIQSDALRGMYIRQSKTDARDSFIIAEVIRFGKYSESNVPQEKLFALRELTRNRYFMVDSVSDLKRKTTALIDQVFPEYEKLFSNNFGVSSMALLLKYPTPEKLKNVSLQSLAKLLSKASNGYFGLGKAKEVKETAKSTFGVIDNCGIYATLISTYIKQILFIQDQVKEINSQIAEIMSELDSKITTINGIGQALGAVIISEIGDISRFQNSDKLAAYAGVDPTVKQSGDYCAVRNHMSKRGSPYLRRAIWQASVIAVGCDPMFKAYYDKKAAEGKRYMNIIGHCTRKMISVIFAVLRDDKEYIPMAA

SEQ ID NO: 359941 - protein, 347 aa, unidentified
MEYFAGLDVSLETVNVCIVNAAGDILLEKKIAAEPAAIVHLLKSFGSPFKRIGLEAGPTSSWLYGELRAAGYGAICLECRHVKAGLSAMRNKTDRNDARGIAQLVRLGWFRQVHVKSEEAQRTRMLLVNRQQLLTKALDIENSLRGSLKVFGLRIGVVARRGFEARVLELVADDPILLAVTKPMLRVRQALLEEFERLDRLCQQLARRDPVCRRLMTVPGVGVVVALTYRTGVDAPERFSKSRDVGAHFGLTPKRYSSGQTDYDGRISRCGDEMVRTALYQAANVLLHHGRWSSLRSWAMRIAKRGSVKGAKVALARRLAVVMHRMWTDGTDFRWSDTSRMTAPTAA

SEQ ID NO: 359942 - protein, 337 aa, unidentified
MNVTLIGIDLAKSVFQVCAVNQAGKPVFNRQVKRQRLLAMLLEYPKAIVAMEACSGSNYWGRTLQRHGMDVRLIPPQHVKPFVKGNKNDRNDAFAITEAAQRPHLRCVPPRTLAQTDLTQVHRVRERQVNQRTALTNQIRGLLNEYGIVLPQGRRRLQSALPGLLENADNELTPEARVLLEELLVEWHQRDAAINRLDRRIDRQAKGSDAAQRLMTVKGIAEKTATALVAHAGDGRAYRNGRELAANLGLVPREHSSGGKQNLGGLTRRGNTYLRRMLIQGAWSVLRNAHRNHDRLSCWARQVAERRGKHKAVGAIANKMARISWALMYYQQSYRSA

SEQ ID NO: 359943 - protein, 433 aa, unidentified
MLKLNYMSTLFVGIDVSSKTNAVYAMDFEENKYISSSFGNNQPGADKLVNMIAECMHKHKNLDTVLIVLESTSVYSVHISSFLSTSEVLMPYKPYVFCVNPKATSNYRKSYIGMEKTDPTDAYLIADFGRVGRTKKLEPWRGGQFISLKRLTRHRMHLSECITREKTYMVSNLYLKFSELQLLEGDDKPFGSLYGATSSAVLTEFLSPQEIIDMPEEELLTFLAGKSRNRISDLSKTSELLRKAARDSYRLDKCMYEPLSISLASSFNCIHAYQKEIKLIEQAIEKCINGMNPNALLILQSIPGIGPIWASGILSEIGDITVFHSSDALAKYAGLYWPKGDSGDFTSEDNKMSKAGNPYLRYYLGEAANSVRKHIPEYADFYARKYAEVTKHQHKRALALTSRKFVRLVFGLLVKNQLYTGEKLDTEYNIESN

SEQ ID NO: 359944 - protein, 354 aa, unidentified
MQIVTAYVGLDYHSDSIRVCVMTEEGEVLLNRSVPSVVGNVLETVASCADQGRHAEAAMVSVRGVAIEACTGSAEFAARLAAASEWTIKLAHAGAVHRLKQGPDKTDHGDAWHLANLIRVNYLPEVWLADETTRQLRHLVRYRQSLMADAKDIKLRIRSLLKEDVIAETCPQGAWTKAWLEWVKAVQLPQHSRWILDQQLALLSHLQEKLQEVDSRMQEATQDDSLVQKLLDQAGIGLVTAMLLRAIVGRFDRFKNGKQLSRYCGVTPCNASSGKRQADRGLVRAGHEDLRAALIQLAKRLPRQDAHWKDFKARLGTRKSANVVAAAIANRWLRRLYHQVLNTTESDPEVANAA

SEQ ID NO: 359945 - protein, 311 aa, unidentified
MTEITIGVDISKEALDAHRFPDGESRRFDNTAKGHKALMRWIGSEVTRIVYEPTGPYHREFECRLAEAGLPLVKVNPRQARRFAEATGKLAKTDRCDAAMLARMGAVLALTARPLRSPLLNELKDLHMARAALIKDRTAARNRVKTLNLALLRRHNGERLKQIQRQLGDIDQTILTLIKADPDLAQRLDILTSIPSVSHATAFALIIDMPELGTLEPPEAASLAGLAPVARQSGTWTGRAFIRGGRANVRQALYMPALVAMRFNPDLKAKYQTLKAAGKPPKVAITALMRKLIILANALLKAQRKWAPKTT

SEQ ID NO: 359946 - protein, 341 aa, unidentified
MEHVAIDLGGRESQVCVRGADGQIVEERRIRTDRIRSYLEKRAPSRVIVETCAEAFSVADAVRAVGHQVRVVPATLVRALGVGDRRTKTDRRDAQKLSEASCRIDLPSVHIPSRLARERKTLCGMREALVGARTQIANNVRGWLRTRGMRVPSGMVGTLARRVRELRDPLPTYVERNLKALESLSEQIVEADKELEQLAKQDPTCRRLMTVPGVGAATAMQFVATLDQVERFPSAHALESYLGLVPGESSSSERQHRLSITKAGSPRMRSLLVQCAWAARRTRGAHPMAAWAHEIEKRRGKRIAIVALARKLAGILFAVWRDGSVYARDRAASPPSLSPAL

SEQ ID NO: 359947 - protein, 387 aa, unidentified
MHLITSATVVATTARANDITLFASLELSKSKWVVTINSPGSEKFSKHVVEGGDGACLLDLLSRSRAKAEQRYGAPVKTVVIQEAGLDGFWIHRLLLANGIESHVVDAASIAVARRHRRAKTDSIDGETLLRTLMAWARGERRVCSMVRAPSPEDEDRRRLTRERGTLLKERIQHTNRVRGLLSGQGVRDYNPLRRDRVERLEALRTGDGRELPPMLKAEIRRELDRIALATTQLAAVERARDALIRTEAEEPNNPAALLLKFKGLGPEFASLLWLESLFRSFGNRRQVAAYGGLAPSPWQSGGVERDQGISKSGNRRLRKTMIELAWFWLRHQPDSALSRWFQARVGAAKGRIRRIAIVALARKLLVALWRYVTQGVVPEGAVLKAA

SEQ ID NO: 359948 - protein, 343 aa, unidentified
MQVSTIGVDLAKNVFQVHGVDSAGKVVITRQLRRKQVIEFFSKIPPCLVGMEACGTAHHWAREVSKFGHTVRLMPPSYVKGYVKRSKNDAADAAAICEAVTRPSMRFVAVKSADQQALLMLHRTRDLLIRQRTQLINALRAHLAEFGLIAETGREGLAQLAAIITDESNREALPSAMKQALQAIVDQLAALELQIGTLDRAIHAQHRANDMSCRLETVPGIGVIGATAITSTVTDPSGFKSGRDFAAWIGLVPRQHSTGGKERLGGISKQGDRYLRRLLVIGATAVVRHARQRPQKHPWIMRLLAKKPAKLVAVAVANKMARIAWAIMAKGGHYRAPELAIAA

SEQ ID NO: 359949 - protein, 427 aa, unidentified
MPYKIAGIDVHKRMLHVVVSDVQVDGEYDFTRRIFGSLPEALCSLAAWLVEQQVQEVVMESTAQYWKPVWGTLERYWKPSCQTRKGALATTGALHLAQALSNRGRRGRKKDFRDAERLVKRLVAHELVLSFVPDVEQRLWRTVVCTKYQLTRNRVQLQNRLEALLEEAHIKLSSLVSDLFGASARRMLGAIADGETNREALAALADRGLRATQEQLQDALGVCQELNPVYRRLIRMVLDEVASIDKRIDQLNQEAANLLRPHEDQVKRLAEMPGLGVDSAQQVIAEVGATAATFPSEKHLSSWVGACPGDEESAEVNRSRRSPQGNRHVRRILNQAANAAVKLKGSIFEILYRRYVPRLGHNQTIGIIAHKLCRLVWKILHRGIRYEERGPEVKKASKQKRTRKMIQALRRLGYRIEPGPSQSAITA

SEQ ID NO: 359950 - protein, 366 aa, unidentified
MKKNSTVTRGRKQIFKQAKLTIGLDLGDRTSHYCMLDEAGNVILESNLPTTSNGIRQAFRRIPRCRIALETGTHSPWVSRQLAQMGHEAIVAHARNVRLIGESSRKDDQFDARTLARLARIDPGLLGPVRHRSAQAQIHLTVIRARAALVSTRTALVNAARGLTKSYGQRLNQCGTEQMNRDSSKGLSQELREALDPLLREIESLNERIAEYDRRIEQIAKEVHPEVARLKQVKGVGTLIALTYVLTLDDPHRFRRSRDAGCYLGLRPGRRNSGQSEPQLHISKEGDRYLRTLMVQGAHYILGPFGQDSDLRRWGLKLAERGGKNAKKRAVVAVARKLAVLLHKLWVSGEVYEPLRNNHKVRSAVA

SEQ ID NO: 359951 - protein, 350 aa, unidentified
MLIIGCDYHPGFQQIAYVNTDTGELSEARLGHKEQAEQFYYDLKTHGVPVRVGMEASGHARWFERLLAELQFELWIGDAAAIRTKRVRKQKTDRQDAQLLLGLLLEDRFPRIWVPDAENRDLRQLLWHRHRLVQMRTRVMNQLHVVALNEGLRRKKALWRPAGRRELEALSLAPWASRRRQDLLDLLDRLTPKIHELNEKLEQMVARRPVTRQLSTHPGVGPLTALAFELVIGTPERFACAKQIASYVGLVPAEESSGDRRRLGHISKQGNALLRFLLVEAAQVTVRSDAQWRSQFFHLAMRRGRKIAKVATARKLAVELYWMWRHGWDYHEMQQLGSHAGAPGNRHGVQ

SEQ ID NO: 359952 - protein, 368 aa, unidentified
MGKYIMVGCDLHDASMLLKVAVDRQESEKLYFDNDPEGRQKMIAELKRRKKAAKADRVYMAYEASGLGFTLHDELTEAGITCFVLAPSRMERSVKQRRNKTDEKDAERVLKDLRGHVLGGNELPAIWVPDPQTRDDRLVVRARLDVGQKRTGVKTQIRSLLKLHDVPRSSRTPGGRTKAYRAWLQHLSDSQKALPWGARIALKTLLAQLAVLDQELARLDGAVRQMSEFPRYAEAVRGLTECTGVGILMAMVFLTEMGDLSRFPNREAIGAYLGLAPSADESGEQEDHKGHITGHGSGRVRYMLCQVTWVRKRLDAVTKERYERIAARNPKHKKIAVVAMMRQLAVVLWHIGLEAQRRAGVFAKGTAA

SEQ ID NO: 359953 - protein, 346 aa, unidentified
MTIVGEERPVTGGVDTHLHVHVAAALDGLGGLLGVESFPTTPTGYRKLLGWMSAFGPVGQVGVEGTGAYGAGLARYLHRQGVRVIEVDRANRQARRQAGKSDPADAVEAARAAQSGRARGVAKTRDGNVEAIRALLVTKRSARAVRIKSLCQIRHLCFTGPDELRRRLQPLSAIMLPREAAALRPRPGGDIVAYATKVSVQTLARRVLALDEEVVRIDELLAELVAAPAPGLLVLHGVGVDGAAALLVAAGDNPERLRSEATWAHLCGVSPIEASSGKVTRHRLNRGGDRQANAALWRIVMVRMVSHAPTRAYVERRTKEGRSKLEIMRMLKRYVAREVYRHLPRA

SEQ ID NO: 359954 - protein, 435 aa, unidentified
MDEVTDEPLYRDRVCGIDIGKAQMVATIRVPSDRDPARRAAETGTFATTKRGVLALADWCRSWQVPAVVMEATSDYWKGPFYRLEAEGFDCVLADAKQVKNLPGRPKRDPADSRWLAACFERGAVTPCFVATPEFRIIRLHTRYRRDLIEERTRDKQRAEKLLESAAIKLSSVVSDLHGVTGRDIMDHLIAGERNPKVLAQLARTAARRKIGELEEALEGAEFFTAGHAGLLTAMLERIDRVTADIARLSEVIEQLLAPYEEQLAQAESMPGWRRRSAEDAIAETGAGMTRFRTGAHLASWGSRAPLDHQSGTRKGRARSKKGNRYLAGILGETAVAAGRTQTREGARYRRLARRLGKPKAQVAVGNTQLKVLHKLLSNPGMQYEDLGPDYYERRASLRRQIHHHVTHLESLGFEVTLCRTPDPQPGPADQAHAI

SEQ ID NO: 359955 - protein, 407 aa, unidentified
MKEKNVIEFEQVVECGCGMDVHKDLIVATILGKGIKMQTKSFNAFTSSLIKLKEWLLKNGITHVAMESTGIYWKPVFNIMGDDFTVLLVNARHVKNVPGHKTDKKDSRWLAKLLLSGLLKGSFIPERPIRELRDLTRYKTKLTNQVTAEKNRFQKILEDANIKLSSVLNDVFGATGTKIINHILEHESYRPEDIIQYVHGKVKSSREDIKEALTGYITPHHRFMLKTIMRNISRIESTIAEVDTQIEVCIEPYKVERELLESIPGVSKVGSTCIIAEVGVDMGQFPDQNHLASWAGVCPGSNETAGKNKSGRITHGDKYLRSLLVECGWAASRTKNTYLSAKYKSLVGRRGKKKAIIAVGHKILIATYFIIRDKIEFKDLGPDHLNNFRRDRLIAYYKQQLEKLTAA

SEQ ID NO: 359956 - protein, 348 aa, unidentified
MDHIIRIGMDTSKHVFQLHGVNAAEEPVLRRKLRRNDMVVFFERLAPTIIAIEAAGASHHWARLLRSFGHEVKLIAPQLVKRYVKRGKNDAADAEALCEAMSRPTMRFVPVKTAERQAALMLLGLRDRLVRNRTQLANAIRGYAAEFGLAAAKGIAHLAPLLARIQSDESLPGLARELFAAHAQEYAQLQAQIDEVEGKLMAWHKTNPGSRRLAQIPGIGPIGAAMLIMKTPAPEMFRSGRQFAAWIGLTPKDHSTAGKVRLGVITRAGDEGLRSALVVGATAVIRHLRNGKGRSMLSAWVEQLLKRKPPKLAAVALANKLARIAWKLMVTGETYTAKPRPIASAGIA

SEQ ID NO: 359957 - protein, 343 aa, unidentified
MTQSNLIAIDLAKNIFQVAQLKGNKLKFNKPMKREPMFELLAKAEGSKVVMEACGSAQHIARKALSLGHDVMLLPPKFVKAFRQGQKTDANDVLAIASASQAYNVKPCKIMTVEEQTLQSLSQARTLVDKQKTQLSNQIRGLLLEFGIVINQGDAALTQVVPDILEDAENALPIALKQALAVSYDLYKTQCDAKAQLHKQVEAITKQNESCQRLMALEGVGPITAIELLSFLGNTSQFSNARGAAACAGVTPTQHSSGGKAKIGHIPKRRGNTLRKNLFLGARTVVSRLKHKEATTEKERWIKNLLAKKSVKCVAIALANKTVRTAYALLKNGSTYEPKILAV

SEQ ID NO: 359958 - protein, 313 aa, unidentified
MATERVHIGVDVSKGSLDVFIPGGKTFRTKNTAPAVRRLVRRIKAEQPSAMFCCESTGGYERTLLDACREEGQPVCLMNALQVRRYAEHRGTLEKTDRIDASVISMAADDKNPAPLVHPDERQRKLKELWTLRTQLTGARDAERNRLEHLREKKAVAAIRKIIAVYDKQIAELERLCRESVSQDEASRALTERLQLVKGVGPLTALALAALLPELLFLEDKRLAKLAGVAPICDQSGTLDGPRHIMKGRTLVRRSLYWAAVTASRHNRILSAVYDRLVKAGKAKKVALVAVMRKLLCLMRRIAQNPDFVPAST

SEQ ID NO: 359959 - protein, 389 aa, unidentified
MLLLGIDIAKLNHVASFVDSDSGELIFSNFKFQNNMPGFFSLYEKIVTFPIKNITIGLESTGHYGENFINFFFQKGFKIAVINPLQTSHLRKANIRDTKNDHLDSINIAKALLFGNHKFISQNNVSNFALKKLTRFRKNLVKQRTRTKIQLASLLDIIFPELQYVFKAGIHTKALYYLLKKYPSTEKIAALREKSLFSILSRASKGHYDMENALLLKRQAKSSVGVKDTSISIHIPQLIELIELLDEQIKSIEEEIKSSLDNEAPILTIPGISNVAAASIIGKINDISNFDSASKLLAYAGLDPKVRQSGNFNASSCRMSKKGSSYLRYALVFTAWNLVRNSKIFKEYYLSKRAQGKSHYNALGHVAHKLVRTIYALLKKNISYEELII

SEQ ID NO: 359960 - protein, 329 aa, unidentified
MDHFAGLDVSVKDTSVCIVDDTGRIVREVKVASEPEALLAVLKNPAYRFKRIGLEAGPLSQWLFSALAEAELPVICVETRHMQALLKAQINKTDRNDARGIAQMMRVGLYRPVHVKTLRSQKLRMLLTHRMLLQSKAIAIENDLRATLRNFGLKVGMVGKVKFEARIKELVENQSDLAILVEPLLIVRRVLREQIVILHRRLLAIVRDDGVCRRLMTTPGVGPVVFRKSRAVGAVFGLTCSKYQSGEIDRSGRISRCGDEMMRVMLYEAAQSMLRSKKWSWLKAWAMQIARRRGMKKAIVALARRLAVIMHRIWVDGTEFRWTREQAAA

SEQ ID NO: 359961 - protein, 461 aa, unidentified
MSRNKPAGKQRRSAPKKVDWKALEIVHPDAAGIDVGGNVHWVAIDPQRDTEPVRSFGCFTADLREMAKWLVEKGVRSVAMQSTGVYWMPVFEILEQHGLEVFLVNARHTKNVPGRKSDVEECQWLLKLHAVGLLNNSFQPTDEIRIARTLWRQRGNLVAEASTTIQRMHKVLTEMNVQLGSVLSDISGVSGMKVIGAILEGKRDPWQLAALVQPEVKASPKDIAKSLEGNWREELLFVLRQHVELYQTFQKKISDCDLQLRKHLESMGSKVDLPSEPLGPRPKGKKGSKNAPQFDLRAELYRITGIDWAQVNGIDVLTAQTVIAEAGPDLSAFPSEKQFSNWLGLSPTNEQSGGKILKRRTRKVVNRATVALRNAASTLIRSQSYLGAQYRRLRTRLGAPKAITAMARKLACLFYRLIKHGQQYVDKGTEYYEARYREQQIRSLAKRAQKLGLQLVIPKTA

SEQ ID NO: 359962 - protein, 428 aa, unidentified
MDEVNRNRLEEFRQLRHEVRHSEEYLIVGIDVAKERHHAFFGTATGKTLLRRLVFNNDYEGFRKLLDQVEALRVRHGLKKVVYGMEPTANYHKPLGEYLITLGRTVVLVSGVTVKRNRESLDGRWDKHDVKDAANVADLISQGKCLYYEYPSAGLRGLRGLLSLKRRLKKQEHGYRVRIRNHLITQYYPEMDGDYERLGAEGLSVVRWCFPPSQMTEIDVEPFIQRVTSRRISMEKRRRLEGVWEKAGETIGCDGVPGVEHEARVMVEGLRQIREMIKETEDKIQELCNEFPEYKYLLTIPGFGPDVSAKVFGAIGEPDRFQNGKQVLKLAGLDLSADRSGKDSDKAIPEISKRGKADLRYALYQAALIASTKNQNFLRYYTRKLRGREKEKGIQPKMRVKLSAKMLLIAWTLMKKKEAFDPAYLKVE

SEQ ID NO: 359963 - protein, 353 aa, unidentified
MSGLDSRIAAIGIDIGKNAFHVVGQDGRGALVLRQKWSRGQVEARLANLPPCLIGMEACVGAHHLSRKLQVLGHDARLMPAKYVRPYSKGQKNDFRDAEAIAEAVQRPTMKFVATKTAEQLDLQALHRVRERLVGQRTGIINQIRAFLLERGIAVRQGLRFLRAELPTVATRSDALSPRMLRLIEDLADDWRRLDARIEAISGEIEELARKDQACERLMTVPGIGPIISRAMVAAIGTGDAFSKGRDFGAWLGLVPKQISTGDRTILGPISKRGNRYLRALFVQAAWVVLVKLGKKWERYGLRSWIEAAKKRLHRNVLAIALANKLARIAWAVLHRGRAFECAKTDVMAPRSA

SEQ ID NO: 359964 - protein, 417 aa, unidentified
MSVFKIVYPICCGIDVHKTFVVATIAATDKKNVTTYKTKRFSTFTKGLYDLALWLQDNQCPEVCMESTGKYWVPVYNILESSCRITLAHPKYVKAIRGKKTDKKDSVWIANLHKHGLVPGSFIPPADIRALRDLMRYRSKLVSFRSSEKNRVQDSLTVSNIMLSNVVSDTFGKSSSAIIQHLIKHPGDRNFDFRPLIHGSMLKKQDDIALAIDGTIDEVQAGKIKLCLSHIDDLKYYIARIEETAMRLAAHHSGALRIIESEPGIDQIAALTVLSEIGADMSVFSSDKHLCSWAGVAPSNDQSANKKKSVRISHAGAYLKPVLVQCAVAAIRDKNFPHYRARYEAIKVRRGHKRAIIAIARMMLTAIYHMLSNGEMFNPALYERVNCKPGFVASTEGHAVKLLQRLGYSVVKLPESA

SEQ ID NO: 359965 - protein, 438 aa, unidentified
MSNKVIFNLDELFISVGIDVGADFSWMSIVLPNQQFVGTPYKILHNSIDSLSTAVSKIKETEELYSLESRIFLESTGIYHYPLFCYLRDKGFNCSVINPIITKNSTNMNIRKVHNDRFDSKKAALVGLKPDLKVSIMPSDLALNCRNLCREYYNLMDNRSAYVNKLQGELRMAFPQYLGIFSKVTINTSLTLLETYTSPAAFIEADKQEIIDTIKSTARFGLTYAKAKYNAIIQAANEAHEFGYIIDSNITRIRLYISFIRKYDEEIKGILDAMHELVDSNEDSNFVKQIHLIETFKGAGFLSSVSLMGEIGDFFAFSKPKQLFAYFGLDPAVKQSGKFEGNKVKMSKRGSSIARRVIHTLTLQSISISRSGEAKNPVLHDYYLAKCEAKPKLVAMGAVSHKVCNMIFAILRDKKPFEIITPKEHIKQYNAVKCDKAA

SEQ ID NO: 359966 - protein, 430 aa, unidentified
MKSNTQNAKIEAITEKTLVLGIDVGSETHYARAFDYRGIEYSKKPFKFSNTEAGFVTLKEWILDLKERHEKDKVVPGMEPTGHYWFNLGKFLQDNEMKPVLVNPHHVKKSKELDDNNPTKNDRKDPKVIAGLVREGRYMIPYLPDGVYADLRTASNIRFQLQAELTRIQNRISRWFNVYFPEYKTVYGKPDAKSGMLILKAAPLPEDILTLGIDGVNQIWRDAKLRAVGKARAKILIEAAEHSVGSKEGAVSARMEIRMLLEDYESRNICLQEVMTLIEGLVKQIPMAEKLLEIKGVGIKTVSGFLAEVGDISRFNTPKELQKLAGLALVESSSGKHKGETTISRRGRKRLRYLLFEVAMSLVAKNPEFRELHNYYTTRRLNPLKKMQSLMAIAAKLIRVFYAMLTKGVDYDPKKMVSDIKRPAVYLQAA

SEQ ID NO: 359967 - protein, 353 aa, unidentified
MSEDKYIAFDVHQATTVVSVVNAAGREVNTAILPTQAQALLGFVEGLRGRLHLTLEEGTYAAWLYDLLQGRVGELVVCDPRRNALLKEGSKTDRHDARKLADLLRTGMLRAVYHGERSLRNLQELAHCYQALVQDTTRVMNRIKAFYRSHGIDCAGRGVYSRKQRESWLVRLPAGASRVRGELLHDQLEQLRSLRRRARHELLAESRRYTVAARLRGVPGFGPVRVALLIAGMQTPCRFRTRSKLWSYAGLGLVQKGSSEYRLVEGRAVRRPGALQLRGLNRNRRAGLKEIFKSAALAAIRQPGPFKDYYQSRLQRGVDPAILRVSVARKLAALVLSLWKKGGRYRAEGMKQA

SEQ ID NO: 359968 - protein, 349 aa, unidentified
MAMTIVEAPPGITGGVDTHLDTHVAAALDPLGRLVGTESFPADAAGYRSLLAWLEEFGQVTKVGVEGTGSYGVGLARFLRRKGVEVVEVNRPNRQARRNHGKSDPLDAVEAARAVISGRASGAGKTKDGPVEAIRVLVVAKRSARQARVKAIVQMRHLGITAPDQLHSRLKGLTVTALVAEGAKLRSTRSSDPVTAATKASLSSLAHRVQSLDQEIAELDKKIESLLLATVPDLLALFGVGPDTAASLLVAAGDNPERLHSEAAWAHLCGVSPVPADSGKNAGHLRRHSGGDRQANSALWRIAMVRIAHDPETTHYFDRRVKEGRTKRDVIRILQRYIAREVYRYLPRG

SEQ ID NO: 359969 - protein, 388 aa, unidentified
MTQTSVSLPHPVALDHNETLVLAIELSNKSWVLAAQVPGLTRVKAKQTIEPTAEALLAALQGYRERAKVAGRQVERVVATYEAGWSGFWLARLLTTHGIETHVVQPSSVLVDRRARRAKSDGIDAEQLLRTLLAWLRGEPRVCSMVPIPADGDEDARRCVRERTELIAERVGLVNRIGAVLATMGCGDYDPLLRNRRQRLDELRTALGTSLPPHAHAKISRMLDRLDLVRKQIAELEQDRDAVLEEEVPDKAGEMIQQLTKLRGIGVQSATVLVREAFVREFANGKALGSYAGLCATPYNSGGTDREQGIGKAGNRRLRTVMIELAWLWQRYQPGSAVVNWFRARVSGTGARMRKVMVVALARKLLIALWRFATQGVIPEGAVMKPAP

SEQ ID NO: 359970 - protein, 445 aa, unidentified
MNGVMSNQHTTYMKTMSKEVLYLGLDVHAESIAVAIAEAGRDGEVRNYGEIPNTFHSVDKLMRKLGQPDKELRVCYEAGPCGFVLARFLKKKGIACDVIAPSLTPKGSGDKIKTDRRDARMLARLHRAGELTAVHVPDERDEAIRDLCRARTDAVQDQRSARNQLKAFLLRNGYRYAEKTSWSAAHMRYLRELILPHPAMKIVLEEYLQCIDATTERIERLEVQMRALLDEWHMKPVVLALMGFKGYQTVATMITVSEIGDIHRFAHPRQLMAYLGLVPSESSSGGSRAQGGITKCGNGHLRWIFNECAQHYRLPPKVSQELTTRQEAIPKAHRRQVIEISWRCQNRLHERGRKLAARGKTRQKAQIAMARELAAFVWEVMRTVMPKADGSHAASTARPPKAAESAKPAAKKNVREYTLKPKGKAASSRTLGGSDAPLRARKNPA

SEQ ID NO: 359971 - protein, 343 aa, unidentified
MNQYIGLDVSLKDTAISIREDGKRIWRGKCPSDPKLLAETIRKHAPHARRVVFETGPLSTWFYHALTNEGIPAICIEARHAQKVLNETLNKTDANDADGLAQLAEAGFYKAVRVKSFDAMTTRALVAARDKLVHISTQLGNQIRGVMKTFGFIVPEGKGRIFDGNVRELVAGNDNLARIILPLLDAWRDIRKRAAILDRQLLAAARQSQSAKLLTTIPGIGAITAISYVAAIEHPQNFRTSRSVGAWLGLTTRRYQSGEVDYDGHISRRGDNHLRALLYEAATVMLTRTGARTESRLKDWGLKLRERLGFKRAAVAVARKLAVIMHTMLKTGEIFNPSASAIV

SEQ ID NO: 359972 - protein, 409 aa, unidentified
MEVIYARCCGIDIHKKTAVACVINTDPNGGPRKQIRTFGTMTDDLLALADWLAAEGVTHAAMESTGVYWKAPYNLLEGQFEVLLANAQHIKAVPGRKTDVQDAEWIADLLRHGLLKASFVPDRPQRELRELTRYRTAVARERATEANRLQKTLEGANIKLGDVASNILGQSARQMLEGLVAGTDPVSLAQFARGRLREKIPQLERALAGRFAAHQRFLIAQQLAHIDYLDEAIERLNAEVAERLAPFVSTIERLDAIPGIARRTAENVLAEIGPDVRRFPTAGHLASWAGLCPGHHESAGKQKRGTTRPGNPWLRAALIEAARAAARSKDTYLAAQYQRIARRRGGKKAAVAVGHSILVIIWHLLQHDCAYVDLGATYFDEHDRAFAKRHLVRRLEQLGYTVNLSRSAA

SEQ ID NO: 359973 - protein, 412 aa, unidentified
MPDDQSLPNLSNLSWEVYVAFKIFRKNCCGLDVHKTWIYACMGITDTNGRTEYKQARFSSFTKGLQKLADWLAKYDCNDVCMESTGKFWIPVFNILEKTCWVTLAYPKYTKPQKGNKTDHKDAKWICDLYMCDMVNPSFIPPPDIRQLRDLMRYRSKLTNIMTSEKNRALNCLTVSNLKLDDVFSDVFGKSSRSVIRYILEHPGETFQVAPFIDRRCKHPVEEIQAVIDGTISHQQAVKLRECLQHLDELEVHKTNVEKEILCLVQQYPYQLELLQTVPGFSVNIMTAIALISEIGADMSVFPSAKHLISWAGCCPRNDQSSKKVKSTRISRAGVYLKPLLVQVAIQPFTANADELSAAGAVEIRCQICDGRFLSMWAALFIFLGCPLPPCPKNLHVHNGRIVILASVAWIF

SEQ ID NO: 359974 - protein, 415 aa, unidentified
MKVHRNCCGLDVHKQTIAACLIREDGMGNTCKEKRLFGTMTRDLRELAQWLRGAEVSAVAMEATGVYWVPVWNVLEREGLHLLLINPEHYKAVRGKKTDLKDGERIAELLQDGRLEGSFVPSTPLRILRDLTRYRVKLVEHQSAVACRIQKLLEQCNIKLASVASNVLGVSGTAMLQALARGETNPERLAELAKKQLRKKIPALRLALDGHLLPHHRFLLRDMLDELAHIEGQLARLEAEIERNMPPFQKTLQAWMSIPGIKQRVAWTLVAEIGPDMQVFPSPAHIASWVGVCPGNNESAGKRKSGKTRKGNCWARRALCEAAWVAAKAQKTYLAAQFRRLAATRGSKRAIIAVAHTILTIGYHILQRGTLYQELGANYFDQRHVLRTTKRLVKRLQALGHRVILESPLPNTRIA

SEQ ID NO: 359975 - protein, 457 aa, unidentified
MSKRRKRAQSKSFNLKSLPKQLQHINLNAAGIDIGSERHMVAVPEGRDEVAVREFGAFTADLIALADWLQQCGVTTVAMESTGVYWIPLFELLERRGFEVKLVDARHVKNVTGRKSDILDCQWIQQLHTYGLLAGAFRPADELCVLRSYLRQREMLTQTASMHIQHMQKALQQMNLLLHNVVSDITGVTGMKIIKAILAGERDPQVLASHRDNKCHHDSATIAKSLVGNYRIEHLFALRQAVDLYEIYQTKIGDCDEAIVTQVSAQPDVTDEPPPPEQKRTSARDRQRGGVNVRDLLFQKSGVDLFAIPGLAADTLLVLSSEVGFDLSPWKTVKHFSSWLSLCPGTKISGGKVLSRRVKRNPNRAAQAFRMAAATLSRSNSALGAFYRRIKARSGGKQAITATAHKIARIYYALLTQGATYVELGQQAYDQKYQERRFKHLMAQAKSLGFQLVPSQT

SEQ ID NO: 359976 - protein, 349 aa, unidentified
MSAKFNSEIAVIGIDIGKNSFHIVGLDRRGAIVLRQKWSRGQVETRLANLPPCLIGMEACVGAHHLSRKLTSLGHDARLMPAKYVRPYSKGQKNDFRDAEAIAEAVQRPTMKFVATKTAEQLDLQALHRVRERLVSQRTGIINQIRAFLLERGIAVRQGLRFLRAELPRILATPHDVLSPRMVQVIEDLAGDWRRLDERIERLSSEIEVLARQDVSCERLMRVPGIGPIISSAMVAAIGGGDAFSKGRDFAAWMGLVPKQISTGDRTILGKISKRGNRYLRVLFVQAAWAVLIRPKSWDRHGLKPWLEAAKKRLHHNVLAIALANKLARIAWSVLAHGRAFEAIRIQAA

SEQ ID NO: 359977 - protein, 348 aa, unidentified
MIVLGADMHKGSHSLAAVAGETGELLDDKLVRVGERGFAAALDWARALADERVWALEDCRHVSGAFERFLLVCGERVVRVATRLMAGERRGGRERGKSDLIDALAVARAALREGLERLPLAELAGVELDIRLLVDHRERLVRMRSALNNDLLWHLHDLWPEQTLPGSALLSNKWATRMGRRLARHEQGARVRIARDELRQLRELSRTIDALEAEISELVAKVAPQLLAEPGFGPLTAGKLIGEIAGVERFSSDAKLARAGGIAPIPVSSGKTNRHRLDRGGNRQINTAIHRVAITRARCHPETRAYIERKRSEGKTNRDAIRCLKRHLARRVWLLLQPQDLATRPSTI

SEQ ID NO: 359978 - protein, 413 aa, unidentified
MLKIVYPICCGMDVHKNFIVACIATTNNVGITTYKRRRFSTYTRDLHLCAKWLLENNCKDVCMESTGKYWIPVYNILEITCQITLAHPKYVKAIRGKKTDTKDAQWIADLFKHGLVSGSFIPPADIRQLRDLVRYRWKLTNFTTGEKNRAQNCLTVSNMKLDDVFTDVFGKTASAITDRLLESSEPFDVTPYLSRRIKTPKEKIQAAVDGSMCPEQAEKLRIIRSHMENLQLCKANLESLILETAQKYLPQLELVMTVPGIQAYSAIGIIAEIGVDMSVFPTSKHLCSWAGLTPQNNESAGKKKTTRISRAGAYIKPLLVQCALTVCKSSKHPEIKNRYLALKKRRGHKKAIIAIARMMLTAIYNILKKNEPYNPELYLRCNNTPPEHRAVSVEEAIFILQRQGYLVTPCAPG

SEQ ID NO: 359979 - protein, 379 aa, unidentified
MLVLSLTAFDVVDGARSRHRCAIGCFVGSESHEGAVQMQISTIGLDIAKNVFQVHGIDANETVVVRKRLRRSQVLAFFKALPPCLIGMEACATAHYWARELTKLGHRVRLMPAKDVKAYVKRNKNDAADAEAICEAVRRPTMRFVQVKSAEQQGQLMQHRTRDLLMRQRTQSINALRAHLAELGIVAAQGDKGVKELLSIVADEKDARLPIDARASVIVLAAQLQAVQTLIGSIEKRIKTQHRSNEASKRLETIPGIGVIGASAIAATVADPTVFRSGRNFAAWIGLVPRQDSTGGKQKLGPISKQGDRYLRRILIVGAISVLRRARENPGKYPWLTQLLARRPFKVVAVALANKMARMAWALLAHGGTYRAPVLAAAA

SEQ ID NO: 359980 - protein, 410 aa, unidentified
MEVLYPHCAGLDVHKQTVVACARHMVNGTVTREVRTFGTTTKELLALSEWLASHGCTHVAMEATGVYWKPVWHILSDGEFTLVLANAKHVKNVPGRKTDVNDATWLADLMAHGLIRGSFVPDAHTQELRGLLRTRKQFVRERSCQVQRLQKTLEDANIKLDSVISDILGLSGRAMIEALIAGETDPGALAALAHRRIKALPAVLREALRGRVTKHHRFLLQLHLCHIKALDTALEAIDREVDTQIEPFRIAVLLLTTIPGVNDLGAQVIRAEIGGDMTRFPNEAHLLSWAGFCPQSDESAGKRRSTRLRKGAPWLKTTLIQCAWAATRKNGSYLQAQFRRLRARRGAKKAICAVAASILTAAYHMLKDGTVYHDLGPDHFDHRAKAVHTRRLLTRLQNLGYAVQITPLAA

SEQ ID NO: 359981 - protein, 343 aa, unidentified
MNSVSHFVGLDYHQNSLQVCVMDQHGHVRLNRQCGNDLASLLPVLGEAGPVNKIALEACEGAADLAEALTRAGDWAVELGHPLYVAKIKGSPDKSDYSDARLLADLARVGYLPRVWLAPEKIRQWRQLINHRQRLVATATRLRRAEDRRALKLRVGAALRNNRVKVEGARWTKKWIDAVRRHPDLSETSRWLIEELLDELAYVLEKLTRVESRLREATRDDPVIARLRTIEGIGEVTSWVLRAVVGRFDRFRNAKQLCRYCGLTPRNISTGNRQVQGELIDVVDRRLRAILIQAAQRLIRTVDPWRALADRLIEAGKPRNVAVAAVANRWMRTVHRRMTCMAA

SEQ ID NO: 359982 - protein, 357 aa, unidentified
MGKSIQKLSSVTRLGLDLAKKVFQVHAVDANGEMVVARKLARGRLVDFFSQLPRCVVAMEACSSAHHWGRQLLALGFEVRLIPPAHVKPYVRRNKNDAVDAAAICEAAGRPSQRFVPVRSIENQAELMRHRARELLAGQRTAALNALRGHLAEIGVIAPQGVQHAYDLKRLAVDGFDEYGEVVVPDCVRVALRPLVSQIDALDAAIGAIDNEIAMSVKADETAKRLMTVPGVGPVTASAIVATIQDTGDFASGREFAAFLGLTPRQSSTGGKPRLGRVTKMGDRYLRKLLVVGACSTLSHRKGHNDALRRWASGMLERKTVRYKFKLTAVALANKVARIVFVLMTRGGQYDDRPVAA

SEQ ID NO: 359983 - protein, 350 aa, unidentified
MDIVGAFDVHRKQITFDYIEVESGELHRGKIQPANRQSLREWLESFVERFPGKQTAIAVEASTGWRYVVEELGRVGVEPHLAEPAQTKSLQGRKKRAKTDRLDAGHLRDLMVIERLPESWIPPDHIQEVRTLMRLRHSLIEERTTHKQRIHAQLFHNGYPQQKNLDSMEGRAHLEEMELPGAARQVVDLSLAMIEHINEELKPIEKLLRDYARSQAGCQALMEHYGVGEFTSVALLSELGDTRRFSSSKQAVRYAGLDITVHSSDEKRAAGKLSRQGPPVLRWAAFEVAKRAWRKGSPDHDYYLKNKERIGANRAALSIARKLLRRAHHTLRELGEEAISEPVVLASNSA

SEQ ID NO: 359984 - protein, 390 aa, unidentified
MILVGIDVAKDKHDCCIINSDGEFPEEVFSILNNREGYETLYKRICSLAVDLAKVKVGLESTGHYSGNLLAFLLDKHLTAYVINPLRVNLFRKGQSLRRTKTDKIDSRNIAHLLMTDSSLKPYSLSSYHMEELKSLTRYRASMVRERTKLKTSIARLVTILFPELEQLVSSIHIHSIYAMLEEFPGSAYIAAAHLTRLAALLLKASRGRFGRETAIRIRDTARRSIGAVSPAKSMELQHTIAHLRAYDQEIGEIESEIEKIMGDVNSPITSVPGIGMQMGAVILAEIGSFRRFDSPDKILAYAGMSPSTYQSGKLTGSYSRMEKRGSRYLRYALFNVTRYVCHYDPGFTAYLSKKRKEGKHYYVAISHAVKRLVRVLYAMEISGNRYQTA

SEQ ID NO: 359985 - protein, 356 aa, unidentified
MAAQVPGLPRTKAQRTIEPNKNALLAAIDGYRARAAAVGYAVDRVIATYEAGWSGFWLARWLVAQGVEVHVVQPSSVPVDRRLRRAKSDGIDAELLLRTLLAWLRGEPRVCSMVPIPDEADEDARRCVRERTELLSDRVGLTNRIGAVLATLGVNDYNPLLQSRRRRLAELRTGLDEPIPPNALAKIERLLARLELVLAQIAELERERDEVAAADAPDRAGKMIQQLASLRGIGVQSATVLVREAFVRHFPNGKALGSYAGLTSTPYSSGGIDREQGIGKAGNRRLRTVMVELAWLWQRYQPGAAQVAWFRDRVGSTGRRIRKVMVVALARKLLIALWRFVIDGVMPEGAVMKPSI

SEQ ID NO: 359986 - protein, 408 aa, unidentified
MMMEFLFLLLFFFVDKYNFVNKYIKKEWGELSCRTDFKDLSLVLVPILSNQVTKDQIEYHFLPNKGFSQSNHNKYKIMKILDTIGIDISKLNFDVRIHSTQFYQQFENSNKGFVTMLKWVYKNSSFSKENILFVFEHTGLYSHQLSVYLTDKEVPFSLIPGLEIKRSLGIARGKNDKVDATKIALYAYRLRDEIELTILPTEQIRSLKTLLSLRDRIVKQRAGYITSLNEQKRVLVKNKNEVILYTQEKIIKHLSKQIKVLEIEIQEIISSDEQLSNQFKLITGIKGIGTQTALFVIAYTHGFTRFKTWRKFASYCGIAPFPNASGTSIRGRTKVSNLANKKIKSLFDLCAKSAIQHSPEMKVYYTRRLEEGKNKMSTINIIRNKLLSRIFAVVERQTPYVDIMKYAA

SEQ ID NO: 359987 - protein, 337 aa, unidentified
MTLYCGIDLHSNNSVVAVLDEQDRTVYEKRLPNDLETITEALCIYQSELAACVVESTYNWYWLVDGLMATGFSVRLAHTSALPEYSGLKYSNDFSDARQLAHLLRLGLLPTGYIYPREDRALRDLLRRRLLLVRQRSLHHVSLQSLIARHSGQRLNTLQIKQLTKGRLADYLQGHALLGGEITFQARCWLEEAVNRIERELQQHIKPREDYQLLQSIPGVGAVLGTTIALETGTIERFASPGNYASYARCVKSEKISNKKHKGQGNKKNGNKYLAWAFMEAAHYGAIWNPGIKRYYQRKQAKAHILVAKKAVANKLARACYHMLKRGEVFDVTRAFS

SEQ ID NO: 359988 - protein, 409 aa, unidentified
MDVLFDRVAGIDVGKATVTVCVRTPGTGRKRDSETRTFRTMTRSLVVMADWLEECGATLAAMESTATYWKPVFYCLEERMECWLLNAAHMKAVPGRKTDVKDAEWIAQLLEHGLVSPSFVPPPQIRQLRNLTRYRSQLMGDRTRDAGRLEKLLEDASIKLSAVASNITGTSSREMLAALVAGERDPAVMADLAHSTLRRKIPDLTEALIGRFDEHHAVLVGALLTRLEHTEAALRQIDAELAVRMMPYARQLELLQTIPGVGVVTAQVFIAETGGDMTRFGSPEQLSAWVGVAPAVHESAGKRTPAGSRRGNKWLCSMLVEAANSASRTKNTYLASQFKRIASRRGQGRAAVAVAHSMLVSAYWMLERDEPYQDLGPDWLTKRNDEAHARRLVAQLERLGHTVVLDPAA

SEQ ID NO: 359989 - protein, 352 aa, unidentified
MHYIGVDYHKRYSYLVVKDEQGRVEQRGLVGNDKEELGEFLRPYRSGKAVLEATRNWGLIYDWLEEMLDEVVLAHPLKTRAIAEAKIKTDKISADILADLLRADLLPRAYVPDRYTREVKNVLRQRMFFVRLQTMVKNRIHIILDRHPEVKSGAPDVSDRYGATGMKWLKQLVLTGEDNRLLPSELDLLEVLKRKISESDNWVKELAKRDVRVKLLMDIPGIGPFFSVLIVYEIDDISRFTDEKKLCSYAGLVPSTHASGGKIFHGRITKQGNKWLRWAFVEAVQNAIRGDSELYAYHERIRLRKNTNTATVATARRLLTIVYRVLSQRRPYQRNAGGARQNLIPAASSLSS

SEQ ID NO: 359990 - protein, 399 aa, unidentified
MYDTSGIGVFLGLDVGKGEHHAHGLTPAGKKVFDKRLPNTEPRLRAVFDKLTEKFGTVLVIVDQPADIGALPLTVARHCGCQVAYLPGLAMRRAAEMYEGEAKTDARDAFVIADVARTNPRTLRQITVADETQAELTMLVGFDDDLAGESTRTSNRLRGLLAQIHPSLERVLGPRIQHEAVLELLGRLGSPEQLRKAGTSQIAKVLKPKAPRMAERLAAEITEALAEQTVVVPGTKASAIIVPSLARQLAEILEQRRMLKGQLEALLEAHPLSRLLTSMPGIGVRIAATLLVTVGDGSTFPDADHLASYAGLSPVTKSSGSSIKGEHAPRRGNRQLKRAMFLSAFAALRDPASRAYYDRHRAAGKTHTQALLRLARRRITVLFAMLRDSAFYQPGTATA

SEQ ID NO: 359991 - protein, 389 aa, unidentified
MVYVGIDVAKDKHDCFIVNSDGEVLYDVFTIQNDMDGFEDLLFKIKTASKDLSKVKVGLEATGHYSCNILGFLKSKGLYTIVINPLYTSLSRKSVSLRKTKTDKVDARTIASMIMSDVSLKPYSDTVYHNEDLKSLSRYRFDKVSDRSKLKQSVSRLVNILFPELEKLVSTLHAKAVYALLSEFPGAHQVASANLKHLTALLSTASKGHFGREKANEIREAARRSISSYLPAKSLELRHTIKLIHELNAEIAEIETEIKKIMDSIDSPTLSVPGISYALGSVIVSEVGDFSRFDNPDKLLAFAGCSPSTYQSGQIYSTHAKMEKRGSKYLRWALLNAAKYVCKWEPTFAVYLRKKLAEGKHYNVAVSHAAKKLVRLLYHLETTGEKYIP

SEQ ID NO: 359992 - protein, 398 aa, unidentified
MTARVTQLFPVIYVGIDVGCDMHSIAIANDSGELLKEFEIKHNYQGFKKLLNVLAKYDSSECLIAMEGYNGWARPLDEILLKKGYKLYNVNNLKLNRFKEIFPASAKTDKIDARKIIELFILKKHLTIAKDVLQEIRVSNNTHQKLKKLTRRRKQLIKERASITNRLGGELQAQVPELKAIAPRVDTNWFLTLLTLKEDIRDLKHLKAKTFKKIKYIKDEYIEQILKWQKESIFSEEIEYISEIIYEDAIRVLELNSKIKKLDKQISMTLEDSKMAKRIITIPGFGNTTAAELSGEIGDIDRFKSEKSLALYLGVTNLDKSSGKQKGSKTNKASNRHAKIAILTATRLHAMRVKESKDYLDKKIKEGKKYQQAIRSLARHLVRVIWKMIVEDRDYEIK

SEQ ID NO: 359993 - protein, 324 aa, unidentified
MIDGILGIDVCKNTLDVSISSYTKVRTKSFTNSPDGWRHLLDWLIAQKIQRVHACLESTGRYSLGIACALYEADHVVSIINPAQIRDFVRTKLGRNKTDGVDASHIREYCELFKPSPWVPPSEAHRRLGELQTIRSGIVAGLTEWKNRKNSGIVDGEAQALADATISHFTSQLGAVDKAIALTIDNDRDLQSKRDLLLSISGVGETLAGVVLAELPGPDVLRSSAEVVAYAGLNPRQHQSGTSIDRATRISKIGNAVLRAALYMPALSAMRYNSAIVALVSRLKSRGRLKPKQIVVAAMRKLLVLCFGVLKTGRPFDAAIAMGG

SEQ ID NO: 359994 - protein, 347 aa, unidentified
MKHYVGLDVSLKEVSICVVDADGSVVAEGKVATDPSEILSWIERRAGAVDRIVHESGPLSIWLTRELVRRGAPVVCIDARAAHKALSARMNKSDRADAEALAQLARTGWYREVYIKSEASDRLRLLLGARERMIRIRKDIEAQARGALKAFGIKLGPVARRRERAGFRAQLRAVTAGDPFLEALAASLIAVHEVVCAQAAMIEDELLVLARDSDLARRLMSVPGVGAIVALNFIATIDDAGRFVRASDVGAYLGLTPRRYQSGEVDYSGRISKRGDGAMRALLFEAATVLITRVHRFSPLKAWALRLAARKGFKKAAVATARKLAVVMLRLWRDGTSFAWSQEEMPA

SEQ ID NO: 359995 - protein, 417 aa, unidentified
MHDDFSILASPGQADCGRPSQKTNIMNTSPPYDLVIGLDRSDQKADLHLITTATGQRRSVVIDTAPEALWEWLRQLRQQQPQARVGLCLEQPAVHLIAFLEAYEWITLYPINPITLQKYREAFVTSRAKDDTQDAFYLAELLLNHHHQLKVWAPEDSGTRAVQQLVFHRRAVVDERTGLTNRLIALLKSYFPQALVLCGDDLWRPLATRFLLKWSSLQAVQKTKPATLKTFYYLNGSRSAKLLEGRLALVAKAVPVTDETALIESFALRVQLICRQLQLVVGTIADYDRQIASAYAAHPDHTLFASLPGAGPVLGPRLLASLGSQRDRFAAAADLQHYTGIAPVTKRSGGSCYIHRRYLCPKFHKQSFHEYAKESILWSRWAARGTNQREPRSGTGGAIPRCLQRFDTPFKALWFFC

SEQ ID NO: 359996 - protein, 408 aa, unidentified
MGKRRSKRRNKVIDIDALEQINLNAAGIDVGAEEVYVAVPKGRDEESVRAFLTFTEDLRQLADWLATCGVETVAMESTGVYWIPIYEILESLGFEVYLVNARHIKNVSGRKSDVLDCQWIQQLHTYGLLQPSFRPPEQICAIRSLVRHRDMLIKYRSAHIQHMQKALTVMNVRLTNVLSDTLAPHCVWCSAGVTGVTGMKIMRSIVAGERDPHVLASYRHGACARSEAEIAKSLEGHYKREHLFALKQALELYDYYGQQLCDCDLELEALYQEFDLPDEPGTPPLGPRKSKRRKNQPHFDLAQYLYRMTGVDLTCVDGLDSLTVQDILSEIGTDMDPWPTVKHFASWLRLSPNNRVTGGKVKQRGTLPSQNRANTAFRVAAQSLARSNCALGAFYRRASVPDMVPLRR

SEQ ID NO: 359997 - protein, 387 aa, unidentified
MAQVNDLSRSLAVFDPISTLVVIVEMGKASWLVRSVVPGVERQPLKKLEPNATALLRLIERWRSEAVRAGRPIKRVALAYEAGRDGFWLARWLIARGIEVHVIHSASVAVSRERKRAKTDRLDTAMLMRVFLGWLRGERGHCGMVSIPTMEEEDARRPSRERESLVNERSRIINRMKSALARLGIRGFKPHLRRAPERLACLQTAEGTSLPANIIEELRRDMARLALVREQISSIEKTRAEQLERAPDTGPHAMVRLLSRVIGIGIETADMLVREILSRKLRDRRAVARYAGLTGSPDESGLKSREKGLAKAGNARVRRGLIQLAWRFLMFQKDSALARWYRMRTEGPNGVRKTTMIVALARKLLIALWRLVTTGEIPDGVELRPAA

SEQ ID NO: 359998 - protein, 408 aa, unidentified
MEIMYPRCAGLDVHKETVVACVRCVSEPPHSEVRTFSTMTSGLLELNQWLESHGCTHVAMEATGVYWKPVWHLLEGSFELVLANAQHIRNVPGRKTDVNDAMWIADLLAHGLIRSSFVPPAPIQELRDLTRTRKQLVREMSQHTMRIQKVLEDANIKLDSVLSSVVGKSGRAMLKALIDGESDPERLADLAQGHARKKHAALIEALRGRVTKHHRSMLKLHMQMIDAIESALREVDGHVGKALEPIRACAHLLTTIPGVSDIVANVIVAEIGTDMSRFPTPGHLISWAGLCPRNDESAGKRRSTRTRKSGTWLKTNLVTAAWSAVRVKATYLRAQFLRIKSRRGAKKAVMAVAASMLQAAFFMLRDGVEYRDLGFDHFDRRDKTKAIGRLIRRLGDLGCQVEIKTAAA

SEQ ID NO: 359999 - protein, 360 aa, unidentified
MNAVGIDVSKGKSMVAALRPFGEIVAKPFEVPHTSSGFHQLVDQLSSLDGSTRIIMEHTGRYYEPMARWLSDSGFFVSTVNPKLIKDYGNNTLRKVKTDKADSVKIARYALDNWQDLRQYTSMDIIRNQLKTMNHQFSFYMKQKTSYKNNLISLLDQTYPGINDFFDSPARSDGSQKWVDFVSSFWHVDCVRSLGLAAFTERYQKWCKRHGYNFQPEKPAQIYSFSKELISVFTKDSVTKFLVKQAVEQLNTVSFTVEQLRLEMNRLAAQLPEYQVVMAMKGVGPSLGPQLMAEIGDLSRFSHREALTAFAGVDPGVNQSGTYEARSVRTSKRGSPQLRKTLFIAFWTRNVQKGSRTMST

SEQ ID NO: 360000 - protein, 349 aa, unidentified
MIIGVDYHPSFQTIAFFVEETGECGEQELNHSDGQAERFYRDLKQRGICVRVGMEATGYSRWFERLLAELGFEVWMGDPAEIKAKRVKKQKFDREDARLLRRLMLENNFPQIWVPGPENRDLRQLLWHRHRLVQMRTRIMNQLQALAMNEGYRWKKKLFSEQGRAQLEKLTLAPWASRRRQELLELLDRMNPTIEELTAAVEREARKRPEALRLMTHPGVGPLTALAYVLIIGTPTRFQRGKQIGTYVGMIPCEASSARKQRLGHISKQGNSLLRFLLVEAAQAAARIQPDWRRRYLHLAMRRHKSIAKVAMGRRLAVRLYWMWRNGCEYSPSLEFGSYVGQLGTGHGV

SEQ ID NO: 360001 - protein, 408 aa, unidentified
MDKLFVGIDVGSRDNAAYIMLPNGDKHSSFPVQNNLGGAMTVSKRVVSALTEHGLPCASIGIEATSVYGENLIYFLREDGALARFERKLFILNPKQVSKFKASYSDLPKNDPVDAFVIADSLRFGRIGNPIYNLDDYRYIALQKLTRARFYAVQNLTREKQRFMNHLFMKCSGLAQEKVFSDNYGVAALAVFEEFESPDDIVNVDVEELAAFISMKGKNRSPRPVEIAKAVQAAARGSYRLPKTVNDSVNQVLSISISSMRAMQAQVKALDKEIERQFVNIPNTLTSIPGIGPVFSAGIIAEIGDINRFDNQARLAKYAGLVWKENKSGMFEGQITRQIKSGNRFLKYYLCEAANSLVRCDTEYRRFYDLKYKEVNKYQHKRALALTARKLVRLVFRLLKDNRLYIPA

SEQ ID NO: 360002 - protein, 330 aa, unidentified
MQQINRLGIDVSAANLSTICQEAGGQQRQAIFDNDPAGHRKLIAWATRKGAPAQVCLEATGVYSLDLALAWHHHPKTQVMVVNPRAIKAFAGPLLQRAKTDATDAQVILAFLQRMPFQPWQPPAEEVMPLQALTRRIDQLKVTLTQETNRLHAPDYRHTPPTGISQDLQHHLRYLQGRINRLEAQALDLVQQHPQLQATFTRLISVKGIATTSAMQLMAELLVLPDDLQPEQWVAQAGLDPRPRDSGTSVHKPRFIGKARNAYLRAALYMPALVALQHQANVSAFYQKMLRAGKKMMQALVAVMRKLLRRLWAILKYHQDFDGNKFYQLT

SEQ ID NO: 360003 - protein, 407 aa, unidentified
MIFVGNDWAEAHHDVWLMDEVGDRLAYRRLSEGIEGVSGFHELVGGFVSDPADVVVGIETDRGLWVHALVAAGYQVYVINPLAASRYRDRHHLSGAKSDRADAKMLADLVRTDRHLHRQVAGDTPHVEGIKVVARTHQTMVWEKRRQTNRLRSALREYYPAALEAFNDLAHHDAIAVLAVAPTPTVGARLTKPQIRAALKRGGRQRNLDRRTVEIQTALRVPHIAPAHQLADGFGTAATAILAVIATIDTQISELEKTIADALHAHPDAAIYLSMPGLADVLGARILGEFGDDPNRYANAKSRRNYAGTSPLTKASGTTKTVIARYIRNDRLYDATVRWAFTSLTSSAGSRAFYDERRAKGDHHAQALRTLANRLVGILHGCLKHRVNYDEHTAWAHRQPAIETIAA

SEQ ID NO: 360004 - protein, 329 aa, unidentified
MEWTVAIGVDTHRDAHVAVAVDRLGRRLGALEFAVDEAGFEQLRRFASALGQPAFAVEGTGSYGASLARALLADGFAVFECERPQRRRRSDKNDLIDAELAARRLLAGERLALPRSGKEREQLRLLLVERRSAQHARQQALNQLKAAIVTLDPHLRAQLERRRPDTLARSTLLQRPQLTPLRRLAKRIVLLERELAETDQELSELTRALCPQLLHQPGVGPLCAAQLLVSTADPHRIRTEPAFAALAGVSPVEASSGPIKRHRLNRNGDRQLNWALHMTALNRIRYHPETRSYYQRQLDRGKTKREAIRIIKRALARRLYRTITAEPAT

SEQ ID NO: 360005 - protein, 426 aa, unidentified
MEILKPHLSLIRSVRGRANKWCVVSRLWERRSPERRWYGSNPEQLRALSEWLIEQQIEEVVMESTVQYWKPVWGALERYWKPRCQSRESAGRMSGTLHLAQALSNRGRRGRKKDFRDAERLVKRLVSQELVLSFVPDTEQRMWRTLTRTRYQRTRDKVRLQNQMEALLEEAHIKLSSLVSDLLGASARRMLKALADGETDPAALAALADQRLRATPAQLHDALGACTELNPVYRRLVKMTLEDLQLVEQQISQLDQEMASLLRPHQDAVERLAVVPGLGVDSVQQIIAEVGAKAATFPSAEKLSSWVGACPGEEESAGVNRSRHSPKGNRQMRRVLNQAANAAVKHKGSIFEIVYRRLVPRLGHNKTIGVIAHRLCYLIWIILHKGVRYEERGPSVSEKSRQRRTARMVRTLRILGYRVEPLANPA

SEQ ID NO: 360006 - protein, 410 aa, unidentified
MYYVGLDVHESRSSIEILDCNGKLFKRTEVKGRWPLLIEELKKVPKPFAICYEASCGYGHLYEQFSKLAQEVKVAHPGTLAWIFKSKRKHNRIDAIKLAKLLFLDEVPAVHVPSASVRTWRQTIEFRQKLLRSRVMAKNQLRAFLRERGIASPKSLWTRKSQAWLKTLELEEGEAIRRDLLQDQLEESDQKLKRVDKYLNKIAANHPGVTLLKTIPGVGPRTAEALVAYIDDARRFGGLKRAGAYFGLVPCQDASADKNRLGHITRDGPSTVRKLLCEAAWTGVRCSPTIRSYYQRLTHDDPDRKKIAIVAVAHHLVHVAVSMLKTGQCWKESTKENSSPKIHRGGVENPSRPQGFSPPPITTDGSSQASPPPPLSASPFSPEAAEGQGSQRDRLSHEEQPVERPETVGA

SEQ ID NO: 360007 - protein, 422 aa, unidentified
MLSFEKRERAQCAAACVGVDAGKFRHALVVRPRGHADSKPFTFPTTRAGFDDAVRQIRSCVPDAAPADDLIGIEFAGCYGFTLAHYLDQLGFPVVSVLPASTKQWKHVVHGQPLKTDPKDALVITDLLAQGQFVTFPFLKPAYADLRYLSAARQRLSLRRRAVISQIRTLLQVIFPEFETVFPYMLKKTPLLLLRQYPSPQDLLAAPKRTVLRFPREHSRGQFKAETCDKLLAAAEATIGLPGAQSRLRSDITRSLDRLALYERQLKEIDGELVEALAAVPEAQHLLSIPMVAPVTAAIFLGSIGDPQAYETAEQVLKVAGLSLIERSSGILHGTQRLSKRGRPLLRAIAYMFAVRSVTEGGLFRQEYEALLERNGHKPIKALAAVMRSALKLMFSIARDRRTFTPEPPPWRRRLPAGGVAV

SEQ ID NO: 360008 - protein, 303 aa, unidentified
MEYGAVDLHKKESQVRIITERGEVIDRRIPTTRGHLTTLFWGRPHARILIEASTEREWVAQHLETLGHDVVVADPNDALMYGYRSRRVKTDRRDVAALVEACRQGMYRPAHRRSAQQRNIQWQRNVRRELVAARTRGISLTRAITRHAGYRIAGGATETFLQRVAALPRPPVLDESLSPVRNVMEVIDEELSRVDTHFESVIADDPVVKRLTTCPRIGAITATAVVAAVDDVGRFAGRRGAAQVTSYLGWVPREYSSGEQQQRGRVMRSAQPVCPIVARPSRLAGMSVLRPARSRPSELGTGD

SEQ ID NO: 360009 - protein, 315 aa, unidentified
MDHNKAVYGVDVAKRNLVIAEYDAQTPVVVPNLAESIAAWLAQLARGATVAMEATGAYHQVLAHLAHTAGMQVYVLNPQTLKHYAAAIGQRGKTDGCDARMIARYAVHEQAKLRRWLPPAPAADRLSQLLERRHTVVSTRQTLAQSLAVPMLKAPRQSLLANVDRILRRLEILIRHEIARLPGMAALYERLKGIVGIGPVVAAQLVAVFSTLNFAKADSFIAYTGLDPRPDDSGDRRGRRRLSKRGPPLLRCLLYNAGMAAANSRLLKPVYKQLRARGLQTTEAIVILARKIARIAFALYKSGHCFDAQKHLKTA

SEQ ID NO: 360010 - protein, 410 aa, unidentified
MRRDKYIYIRLDLHKFQHTAVILDCWNEKLGEMTFLNKPSVFPSLLEYVNRYLTEDLTPVFGLEDVGGYGRDLALYLIERGYIVKFVNSSLSNAERNSYAMTEKNDGWDAQCVADVLIRKLPYLPDATSSNIHWIIAQLVGRRNALVKAQTALKNQLHMQLNYHYPSYKDFFSEVDGKTALAFWESYPSPSHLEGATVEDLRTFLLEASSNACSTRKAEQILSLVQADGEIKREYQTSTDFIIQSMVRDIRFKKQEIQKVDKELKVTIQTLGMKLETMPGIDVVTSSALIAEIGDIHRFANSDKLARYAGIAPIKMGSGGKETMKKTKQGNRKLYDIFYNLAVQQVQVCKGSKIPRNPVFYAYYNQKLNEGKSKSQALLCIMRRLVRIIYGMMKNKTAYIMPEMPEAKVS

SEQ ID NO: 360011 - protein, 381 aa, unidentified
MKKNTIAKLQGSKSQIRRKAAKKGLTIGLDLGDRSSCYCVLDAVGEKASEGKLPTTKAGLDSVFGKMGPCRIALEVGTHSPWVSRHLAEMGYEVIVANARKVKLITQSLKKNDRIDAEHLARLARVDPKLLSPIRHRGKEAQADLAVLRARAGLVDVRTELVNTARGLTKPMGERMKKCDPDYVKEVLADELSETTQNAIRPLLKSVEAINEQIEVYDRKIQEMEKRYPEVELLKQVYGVGSLIAVAFILVIEDKERFAQSRDVGPYLGLTPKQRDSGESSPELRISKAGDPLLRRLLVQGAHCMLRKGAPDSDLKAWGMTKLEGSKKGGKKRKKKAVVAVARKLAVLLLRLWATGEVYDPLYNRKAAAAAKAKAKAKVAA

SEQ ID NO: 360012 - protein, 392 aa, unidentified
MEKIADRPAEPTAVRTDLGAIFVSLELSRSSWVVTALLPGGGEKMSRHGIPGGDIAGLLARFAQLRDKAQARTGRHFPIIVIQEAGLDGFWIHRALVNEGVESHVVDPASIATSRRRRRAKTDRLDGETLVRTLLAFKRGEPRVCAMVRAPSPEDEDRRRITRERKVLIAERVEHVNRIKGLLFAQGIRGYEPLRRDRRARLEDLRTGDGRDLPPHLKAQILRELDRLELLLEQIKAVEAERDAALAEEPQDGETPAAAKMLLDIRGIGPEFAALLWSEGLFRHFDNRRQVAAYAGLAPTPWQSGAVSREQGVSKAGNPRLRSTMIQLAWLWLGHQPQSALTRWFRARVEQNGGRLRKTAIVALARKLLVALWKYVTSGVMIEGAAMKPSTP

SEQ ID NO: 360013 - protein, 342 aa, unidentified
MTQHKLIAIDLAKNVFQVCLMNKNNTVVVNTQLRRSELMAYIQKQEPTTVAMEACYSSHYWARSFQEMGHEVKLIPAQFVKPFVRGNKSDRNDAVAIAEAAQRPNLKAVPIKSLHQQDIQCLHRIRERCVRNRTGLVNQTRGLLSEFGVIAPQGLSSFNQLLRELMEPKENRLTPIFKNQLGRIADEYYAITDRLDEINKELKTLAETIPACRLLMTIPWIGCINATGLYSAIGNGSQFNNGRELAVWLGLNPRQFGSGEKQTSGGITKRGNRYLRKQLVHGARAIASRYKNREDRVAQWCNALMERRGKHKAYVGLANKLARIVWAVLNKNEPYKLTMPAA

SEQ ID NO: 360014 - protein, 400 aa, unidentified
MMTPDDIDVWVGLDVGKSAHHAHALDHDGNTLYDKPLKQDEKAIRTMLGKLSKHGRVLLVVDQPNTIGSLPLTVARNMGIAVAYLPGTAMRRTAQLLPGDAKTDRRDAHVIAWAALKLPETLRDAGPDDETLAALKLLAGHDEDLAHESTRHVNRLRSLLLQTHPAFERALKGERITRDATLALLERYGGPMGVKRAGIEDVKDWARSNGLRAGRIIDDMFKAIGEQTVTVPGTLMAETIIPSIAHDIKTIRDRRREVGRQVEKLLEDHPLLTVPASMPGIGVRTASSILLGIGGDIANFKSAAHLAAYAGIAPVTGQSGTSIKGERPARGGNKRLKNALWQSSFVASTKHPPSIAYYKRKREQGKHHNAAVICLARRRCDVIYSMLKNGALYQEPALAA

SEQ ID NO: 360015 - protein, 389 aa, unidentified
MPLDHHSEEPTAIRTNLGAIFVSLELSRSTWLITSLSPGGGEKMSKHSVSAGDIAALLSRFSELKQKAFARMGQSFPIIVIQEAGLDGFWIHRVLQSEGIESYVVDAASIATSRRRRRAKTDRIDGEALVRALLAYKRGEPRVCAMVRAPTPEDEDRRRLCRERKTLTVERVQHVNRIKGLLFSQGVSGYEPLRRNRRQRLGELKTGDGRPLPPHLKSQIGRELDRLELLLGQIKAVEAERDALLTATETEGMPAPQAMLIDLKGIGAEFAAVVWSEGLCRSFANRRQVAAYGGLAPTPWQSGSVAREQGVSKAGNPRLRTTMIQLAWLWLRHQPNSALAQWFKERVKRNGGRLRKTTIVALARKLLVALWKYVTAGVVVEGAVMKAVS

SEQ ID NO: 360016 - protein, 357 aa, unidentified
MKSKIKQLDFTGETIFTALDVHKKNWRVTIGSKEFELEHYTQNPNAKDLSRHLKKNYPGAKYMVAYEAGFCGFGIQRSLKEEGIDCIVVNAADIPTSNKEKRRKQDKVDSRKIYKRLAAGDLEAIYVPQTEMEHARSLVRERSRIVSDQTRCKNRIWSLLMFSSLSVDTDKPKQYWSRKFVESLKQLDCGSKPLREALDLAIDEYILIRQLLTKATKKVRELSNDKLFAEIQELLRSIPGIGLINAMVIHTEIQFICRFKTLDHLCSYAGIVPDSDSSGDKEKITGITHRSNNYLREAIIESSWTIVRKDPAMLMLYKRYCARMDENKAIIKIARHLLNRIRFVWEKQTKYEIGIAA

SEQ ID NO: 360017 - protein, 314 aa, unidentified
MSTELFVGIDVSKDKFDLATTASCKQKQFGNDKRGIAAVVRWLDRRQPTLVVLEASGGYERALVSALGPAGLPVAVTNPRKVREFAKADGRLAKTDAIDAAVLADFAQTMRPQPRPVPDEQALELKALATRRRQLVDMIVAESNRLENVPPSIAKGIRKHLRWLEKQRDLIEKQVEEVIRSNPLWREKVALLQSAPGVGPVISFALVAELPELGELSDKPIAALVGVAPFNCDSGRHKGKRVCRGGRSDLRRSLYMGVLSATQHNPPIREFYQSLLARGKPKKLALIACMRKLLCHLNAMIRDNRPWQESPCQA

SEQ ID NO: 360018 - protein, 402 aa, unidentified
MRDSPTRFFGLDIHKEYFVAVAVNQERETVFGPQRVSNYQLEEWARRVLTSQDAIVLEMTTNTYLFHDTLLPLVHSVIAVHPPNVPLVTNVHVKTDKKAAETLAQLHAVGMLKGVWIPPHEVRDLRALIAHREKLVHLSTMAKNRLHAMEHRKHLVLPDNPFSPDQRTWWENLEFSTTEKLLVRSDLDTLEFAQKQVEQVEECLKQKSAQDEHIPLLIQLPGVALLTATTILAAIGDITRFPNAKKLVGYAGLGTRVHDSGMTHSSGRITKAGRKDLRRAMVNAANHAVQDHPHWKAEMERLEPHLGRSKAIVAIARKLLVAVWHVLTKQVADRFADPQNVARSFLNHAYRVRIKNLPKGQSAPAFIREQLDRLGIGKDLQKISSGSTLIKLPPSKLLPQKE

SEQ ID NO: 360019 - protein, 258 aa, unidentified
MDEPRPACCVGIDVSKDRLDVHLRPSDEAFAVARDGKGLENLVERLAALDVSLVVLEATGGFETTVAAALAGAGLPIAVVNPRQIRDFARALGKLAKTDAIDAKVIAIFAEKIRPQARPIASQEAQRLAELVARRRQIVEMIGMEANRRKRAADKRLGKKIDRHLAFLEKELAEVDADIDAGVRASPAWRETEDLLTSVPGIGPVTARTLIAELPELGRLDRRKLAALVGVAPFNRDSGRINDFHLADPRPHDQDRRG

SEQ ID NO: 360020 - protein, 312 aa, unidentified
MEKLSYGGIDVSKDRLDVVVLPEGWFFSVSNDTAGWAELVARLRPLAVCAIGLEPSGGYERGIIRASLAAGLSVRRINPNKLRQFARARGVLAKNDRLDARLIAEYVAIMPTRVVQRDGAVERLAEVVTMRRQLCDEHVAVENQAAHLQDAMLRRLSKRRLVRLEADIRLLDKRLAEMVATNAAFAQLYELLTSMPGVGPVLAFTLIALLPELGKMSRKQIAALVGLAPYDFDSGKLRGHRSIYGGRMPIRNVLYMAALSASRYNPALKTFSNRLAHANKKSKVIIVAVMRKMITTLNAMLRDNAAWQPRSA

SEQ ID NO: 360021 - protein, 351 aa, unidentified
MMIIGVDYHPSFQTIAFLMEETGECGEQELNHSDGEAERFYRDLQKRGIRVRVGMEATGYSRWFERLLAELGFEVWMGDPAEIKAKRIKKQKTDRKDAQLLLRLMRENNFPQIWVPSPENRDLRQLLWHRHRLVQMRTRIINQLQALAMNEGYRWKKKLFSEQGRALLEKLSLAPWASRRRQELLELLDRMNPTIEELTTAAEQEVKKRPEALRLMTHPGVGPLTALAYVLIIGTPERFHCGKQIGTYVGMIPCEDSSARKQRLGHISKQGNSLLRFLLVEAAQAAARCNPQWRRRYIHLAMRRHKSIAKVAMGRKLGVRLYWMWRNGCEYSPSLEFGSYAGQLGLGHGAK

SEQ ID NO: 360022 - protein, 321 aa, unidentified
MLANKSRRSFIGIDVSKQLLEIGVHKSNYRLCCPNDPKKFPALIAELIALRPARIVLEATGGLETPLLQGLHAVGLPAVRINPRQVRDFAKALGLLAKTDRLDARVLAHFAAAVQPPLRPIKATEDIELDALMGRRNQLSDMLGAEKNRRGSAATDAARADVEAHIEWLEQRLKALDKQLKDQLKCSAVWQQKDKILQSVKGIGFVTSVSLLADCPELGKLNRHQIAKLVGVAPLNRDSGKQRGARHIFAGRAQVRAKLYMATLTAIRCNPLIKAFYQRLLAKNKLKKVAIVACMRKLLTIINVMVRDNKLWNVKAQSVSA

SEQ ID NO: 360023 - protein, 373 aa, unidentified
MNNHTTVYIGMDVHKESFTLSSFVLGEKEPGHVQTIPSDYILVVKYINRLRKVYGEETEFICGYEAGCLGYTLYHQLTDCGLECVILAPTTMMEEKGKKRIKTDKRDAKKIAKCLAYHTYNPVHIPTDEDAQVKEYIRMRDDIKVNLKRTKQQILSFCLRHGLVYTQTKSTWTQAHLKWLNCQKLDGLYQEILNEYILQLSKLMETVERLDKRIEELSNRETYRESVNCLTCFIGVKRPTALAVIAEVGDFKRFATAENFSSYLGLVPGENSSGDDKNRLGITKAGNTHVRKLLVEAAQSYGRGKIGYKSKALKDRQAGNTPQVIAYADKANERLRRKYYNMLFRGKRANIAKTALARELACFIWGMMNERLA

SEQ ID NO: 360024 - protein, 363 aa, unidentified
MDGSSEQPQMTAGLDLGDKYSYLCLIDQESGEVIEEGKLRTTPEAFRRRFGSEQPPMRIAIEAGTHSPWASRVLEECGHEILVANARKLRLIYANKQKTDEIDAENLARLARVDPKLLYPLKHRGEESQAHMAIIRSREALVGCRTQLVNHVRGAVKSFGARLPKCPARSFHNKAAEHIPEVLRPALGPILEQIGSLTERIRDYDRKLEEISKVSYPETDLLRQVEGIGPLTALTFVLTLEDPYRFERSRSVGAYLGLVPAQDQSGDRDPQRRISKEGDEMLRKLLVGSAHYILGPFGSDSDLRGHGEKIASRGGKNSKKRAAVAVARKLSVLLHSLWISGELYDPLYNTHRRQKQQQQQGAA

SEQ ID NO: 360025 - protein, 343 aa, unidentified
MQVSTIGVDLAKNVFQVHGVDSVGNIVITRQLRRKQIIELFGKIPACLVGMEACGTAHHWAREISKLGHTVRLMPPSYVKGYVKRSKNDAADAAAICEAVTRPSMRFVSIKSADQQALLMLHRTRDLLIRQRTQLINALRAHLAEFGLVAETGREGLAQLAEIVTDESNRDALPPAMKQALQAIIDQLAALELQIGALDRAIHAHHRVNDMSCRLETVPGIGVIGATAIASTVTDPSNFKSGRDFAAWVGLVPRQHSTGGKERLGGISKQGDRYLRRLLVSGATAVVRNARQHPQKHPWIMRLLAKKPAKLVAVAVANKMARIAWAIMAKGGYYRAPELAVAA

SEQ ID NO: 360026 - protein, 343 aa, unidentified
MQSISTVGLDIAKSVFQVHGVDAAGQVVVRCQLRRRYVLAFFQKLPPCLVGIEACASSHHWSRELQGLGHTVRLMPPAYVKPYVKRQKNDSTDAEAICEAVTRPNMRFVPTKTVEQQSCLMLHRARHLFIRQQTAAINSIRAYLAEFGIVAPVGRRGVEQLLEVVADTADHRLPEVARACLAALGNQLRALKAQILEFDQRIIAWHRSSATSKRLDAIPGVGPALATALVASIADPKAFRSGRDFSAWGGLVPKQNSSGGKDKLGSISKQGDRYLRTLFTAGALAVIRYAKIHSTDHRPWLTRLLARRPTKVAAIALANKLAWMAWAMMARNERYKQPAALAA

SEQ ID NO: 360027 - protein, 335 aa, unidentified
MTCLPDSINLPSSSSELPVGIDIAKLTIEVAIGVDGGTFALGNDAAGMDSLLARLAAFKVSLVLMEATGGLEAAAASVLQAAGYAVAIINPRQARDFARSLGQLAKTDSIDARTLAQLAHVIDQHPQRHKYVKALPTAEQKELGGLVTRRSQLVAMLVAERNRFGMAPQRAKVSIQIIIDALTQELDRTDEEMGKFVKDNFADLAALLAGVKGVGKTTVAMLIAEVPELGKLSRQEIAALIGVAPINRDSGMMRGRRSIFGGRAPVRRMLYMAVLSAMRFNPAIKQFYQRLIAAGKPSKVAMVACMRKLLTILNAMVKSGQPWNGSINVTEVNIA

SEQ ID NO: 360028 - protein, 427 aa, unidentified
MSVAQNEKIRQVTETTMVIGVDIARDTHWARAFDWRGLELSKAVKFENSAEGFHYFLCWASELAAEQKKGRIMVGLEPTGHYWFTLAAYLQGGSMKLVLVNPYHVKCSKELDDGHPSKSDKKDPKTIAKLVLEGRYVLPYIPQGLYAELRVAMNCRWRVQKELTSVQNQIQRWLKIYFPEHKTVFGEFEGIGSMALLHAAPLPSDLVALGVDGINQIWRQMKLRCAGLKRAQRAFEAAQNSVGCTTGIEAARMELQILLEDYDAKLQQYERIMKVVESLCRQIQEVEELLKIKGIGLITVAGIFAEVGDLRRFSFPRQLQKLAGLAITENSSGKHKGQTEISRRGRAHLRAILFRAVMPLVARNEEFQKLHHYLTTRAENPLKKMQSIIAICCKLLRVFYAVATKGCAYSAEKMLADIRRNQPLKAA

SEQ ID NO: 360029 - protein, 368 aa, unidentified
MIVRIITYERSTLVNDEKYIGLDVHQATISVAVMDATGKVVMESILETKAATILEFFAGLRGTLWVTFEEGTWSVWLYDLLNARVDKLVVCNPRKNALLKDGNKSDRIDARKLAELLRGNQLKPVYHGETGVRMLRELSRSYLTIVKDLSRVMNRLKAVYRSWAIPCAGRDVYYRRHRAQWLAKIREAGVRRRAERLYEQLDMLQHLRQQARRELLAEGRKHAITAKLRQIPYLGPIRSVLAVALMQTPHRFRTKRQLWAYSGLALETRTSADYRYVEGQLRRSKKVVSIRGLNKDHNHDLKGLFKGAATMASVRPGPFQDFYQAALAKGIKPTMARLTLARKMAAITLTLWKKGENFDAEKLKSQAA

SEQ ID NO: 360030 - protein, 349 aa, unidentified
MRFYNHQHRFYCGVDLHARTLSLCVLDTAGAIVLHQTFAAGPDAFLTAVAPFRDGLAVACECMFAWYWLADLCADEGIPFVLGHALYMKAIHGGKAKTDKIDAHKIAVLFRGGMLPQAYVYPKGMRETRDLLRRRTFLVRRRAEALVHLTNINSQYNRPPFAKKLVYAANRAALDLAERFDDPSVRKNVELDLALVATYDEQISALELYLTRTAKVDDPQAFHRLRSVPGIGKVLALVLLYEIHDIRRFPEVGQFLSYARLVRCAHESAGKKQGTGGNKIGNAHLKWAFGEAACLFLRESDQAKKWLARREKKHGKARALGALAARLGRAVYHLLRKQEAFDVKRFFAT

SEQ ID NO: 360031 - protein, 415 aa, unidentified
MITDRVPCRKFIQEVPVWIKFTTKCCGIDVHKKLIVACFRCGKQQEVRESGATTRELLELADWLKEGGCEMVAMESTASYWKPLYNILESSDLKAMVVNARHMKAVPGRKTDVKDAEWIADLLQHGLLQPSYIPGKDQRELRELVRYRKSLVGERTGELNRLQKMLEGANIKLSGTVSDINGKSARSILEYLLTGKSIDGSKYDEMYEQKIIAHNLKATKEQIVDDLNGVMSPLQRRMMKELLVHLDELNVHIKNLNDEIDNFMKPEEKQASQAIQDVTGIGNTSAQAIISVIGSDMSRFPTDRHISSWAGLCPGDNESAKKRKSGKTRKGNALLRTTLITCAHAAVKNKKSYFYAQYMRISAHRGPKRAYVAVAHSMLISIYHILKDGVMFKDLGADYYNQFNKERKINAYLKS

SEQ ID NO: 360032 - protein, 476 aa, unidentified
MSKGSGTTRGDRRRNERRERLRRVLPRDGAVIGIDLAEEKQAIAVIDHDVRVLARKTVRVKTFRLGEALDWAVDQARAKGFEHVAVACEPTGPRWLQVQQLCAERGLPLVCIQPLVSHIAREQQDYTPHKTDEADCVMIARLAAELHCYLPEQLDETWAHLRHLGRRRAQLITAATASVQRIRDFLSVAWPTVTEACAQPLESVTWLAALQVVTSRCGGQPGRLAGMGPQAFTALVRGTVPGWGGQRVWGKICDRIFAALTDTEGVVVSCRRGLLRRCADELGDLQRTRAQLRAVEADMVAVLAELGLSRLADIPGLTAVGAAAILAETGDPRRYDSSSSLVRHAGLSPSDNSSGAFYGEARISRRGRPGLRLTVWRAVWPLLTHNPVMAAKYQAMTQAADTAAQAAATQADAMSRQVSAAAAAVRARRAKARVACAASLLRWIYSMVVHDTSWDPAIAAGAAGSRHVLRDQPEAA

SEQ ID NO: 360033 - protein, 340 aa, unidentified
MAVTVLGIDLAKNVFALHGVDHKGNTVLCKPKVSRAKLLETVANMPPCLIGMEACSSAHFWARIFEKVGHEVRLIAPKFVSPYRLSGRTGKNDAADAQAICEAVQRPHMRFVCIKSEEQQSMLCLHRARQGLNEERTAVCNRIRGLLSEFGVIAPLSPERLRTEFEAMKLHLPPLAITSIDELFLHVDNIERRLLRFDRLIKTAAEQDERCQQLMQLKGIGAITASALVSAIADGKEFSNGRQLAAWLGLTPSQYSSGSKQKLGRITKAGDSYIRSLLVQGARSVMASAGRKDDPLSKWVCDVKDRRGYWRAAIALAAKNARHCWAILHYGESFESCYST

SEQ ID NO: 360034 - protein, 394 aa, unidentified
MTNVTPQEFAAFIGLDWADAQHDVCLQVAGSDKREGKTLAHQPEVIEAWVTDLRQRFEGQPIAMALELNKGPIVEALRQYDGLVLFHINPLMLARYRQAFTPSRAKDDPTDAELQLELLLRHRDKLKPLMPQSPEMRALAQLVEHRRRLVGDRVRITNRLTSTLKTYFPHVLQWFPHKDTMLFCDFLSQWPTLKAAQLARRRTLERFFHQHHVRDEQRIHECLAAIKSAVPLTTDEGVMMPNALMAQALMTQLRVCLAAIERFDHAIAERAQRHPDYALFEALPGAGPVLAPRLLVAFGEQRERYGAAEEMQQYAGIAPVLERSGKQSWVHWRCQCPKFMRQTFAEWAAESMQFSALITALATLPPFRLSQCSSRRTERRWRYLDSLGICIFCV

SEQ ID NO: 360035 - protein, 345 aa, unidentified
MNRCKVAHSDRKGKGRSNESFDHYLALDWSMKVMAVAHMTKRMREPRVFERRSDLRELKEYLTGLNGRKVLAIEETTTAQWLYLELVDHVDHIIICDPFRNRLLSDGPKTDKIDAAKLCLLLRAGLLKAVFHSASDLYELRHLVSAYDDLVKAGVRAQNQQTALRQGHGDTANSAPFILEHLTNSIALYRSSKQQYEQKFLDLSRHNKQVRNLLEVTGIGIIGAVKIVAIVVDARRFPRSGHYLSYCGLVEHEQISGGRSYGRRRPRFNHPLKTVYKLAAMAVINSKNNALRAYYEYLLANGVAEHNARHALARYIARVTYGMLKTGKRYRPYQQRSQATERQVA

SEQ ID NO: 360036 - protein, 372 aa, unidentified
MERIIERCAGLDVHKSSVTACVRIPEESDALHQEIREFATTTPGLLLLRDWLASFEVRLVGMEATGVYWKPIYYMLEDDFELWLLNARHLKNVPGRKTDVKDAEWICQLVEHGLVRPSFVPPKEIRELRNLTRYRKAQIEERTREVQRLEKVLQDAGIKLSSVATRVLGASGRAMLDALVGGTTDPEVLAELARGRLRSKLPALRDALEGCFSSHHALMVGKILAHIDYLDETIGDLSVEIERVIAPFSDEVELLDTIPGVNRRTAETLIAEIGVDMSQFPTHRHLASWAGMCPGNEESAGKRRSGKTRKGSKWLRSALTESARAAARSKGTYLAAHYASLRGRRGSKKAAVCGGALDVGDLLPRAGALGAL

SEQ ID NO: 360037 - protein, 354 aa, unidentified
MNYLGVDFHKNYSTVTIIDQKGKVLQRLKLYNSKDSFTEFLRPYQQEVLAVVEACRNWHVAVDLLDGLVKEITLAHPFKVRAIAEAKIKTDSIDSETLVQLLRADLIPQAYLRDKANQIKQRILRSRSFYVKLKTQIKNRIHYIIDAQGEEEIREGAKGFSDLFGKKGLEWLGSLELCEPDNKLLKNLLETYEVICQKISETEWLIKEIMAKDRDCQLLLTIPGIGDFLCVLVKVEIGDISRFRTSSHLCSYAGLVSSTYSSGGKSWNGRITKQGNKWLRWAMVEAVVPAINSSGELRSYYERIKSRKGSKVAKVATARRLLCIVYRVLKERDSFRVNKKDIRKKFSGAAFNPE

SEQ ID NO: 360038 - protein, 418 aa, unidentified
MKSIKAEKIKTINEKTLVVALDIGKKVHYGYFRTPKNQDVKPFPFYNSGRSFNKFWEKLCRFKEKHMLDEVVIGFESTGPYAEPIANYLRKKPVKLVQVNPMHTKRIKELTGNSPNKTDKKDPRVIADVISLGHSLTVVVPEGAAAQLRRLTHARERAMERRTAMNNQLQDLVFVIFPELGDIIKPSTKTGMYLIKNYPGPERIVSIGNETLCNIVRKISRGKFGIERAEKLYNAAKESVGITEGKESILLETSHLVSNIETENRYIKSLEEQMIVYLDQIPYSHSILSVKGIGNITVAGLIGEVGDFKKFKTISEVMKLAGLDLFEVSSGMHKGKHRISKRGRALMRKLLFFAAINAVKSHGIMHARYQKMLNNGTPKIKALIAVSRKLLRIIFAIARDNAQYEENYNRKHDYKLAA

SEQ ID NO: 360039 - protein, 406 aa, unidentified
MELVPIHKRVIGLDIHQAQITACAIIEESGGETRIEQRQFGAFKRDRRELAVWAAALDPDEVVMESTGIYWKSPYAALEAVGIRATVVNARHVKQVPGRKTDVGDAQWLATLARAGLLRGSFVPPAQLRELRLIARQRQKLVGLLSSEKNRMHKVLTDAGIRLGVVVSDIHGQSARAMIKGILRGQAPHEVLQLASRRLKASREELHDALQGELTASHVFVLDELLRHIEELEARIARFDARLLAELASEHNALALLQTLPGVDLIGAAMLLVEIGSDMSVFGTSDRLASWVGLCPGNNESAGKRKSGRVRKGNPYVRRLLCEFAHAASRTKSAFQAKFQSLIVRRGHKRAIVALAHKMLRTIFFMLKRGEHYRDSATNYEQLSVQRNASRWIKALTRFGFIPAAA

SEQ ID NO: 360040 - protein, 393 aa, unidentified
MKLVGIDIEKKHFFCIMDKDSGEVLLQPSSFSNTKDGFDSLIQKLSSYSKDSILIGMEDTGHYHFALLKYLLEKNFTVALINPKTTDYTRKIQNGITKNDKLDTLTICDVLDTPVRKKQYRITKVNSFDLYEQKQLTRHHHNLKEELNVYTNRLQKCIDIVFPEFNSLFSSKYGIIYMNVLKTFGSAENIASTDIRTIRKCFEIKGRGNRISLTAQQLKDSAKSSIGISSAAEVIKIKHLISQIELINEQLAETDKKIEEFSIQNNSPILSIPGISHFSGTSILAELGEISNYSKPSKIIKAAGVAPYHYESSQYNAQHTAITKKGSPYLRKTLYQIILPVINNNPVFKQYYDLKISQGKGHRCACGHCVRKLLRIIYHLSSTNQQFDDALLR

SEQ ID NO: 360041 - protein, 343 aa, unidentified
MRHYAGLDVSVKETSVCIIDESGKVCRETKVPSHPENLARALHDRAWCLERVGLEAGPLTQWLFSGLAATGLPVVCIETRHTKAFLQAQVNKSDRNDARGIAQMMRVNLFRPVHVKTLTSQKRRALLTARKLLQEKALAVDNDIRGLLRNFGLKVGPIGASKFETRIRELVEGMPELAEIIDPLLEARRKLRELFAVLHRKLLVIVRDDTVCRRLMTVPGVGPVVSMAFTATIDVPARFKSSKAVGAALGLTPILNQSGERKRIGKVSLCGDGMTRTLLYEAAQVMLTRTTKWSWLKAWAMKVAARRGLQKAIVALARRLAVILHRIWVSGTEFRWTRDAQST

SEQ ID NO: 360042 - protein, 458 aa, unidentified
MSRKRNTRTKSEQQEWSLNLEVVHPNAAGIDIGNESHYVAVAPNRDPNPVRQFACFTEDLHRLADWLKSCGIDTVAMQSTGVYWLPVYETLAEKGLEVYLVNARHTKNLPGRKTDVQECQWLLQLHTFGLLNNSFRPPEQICVLRAYWRHRGEHVAAAGACIQRMQKVLTEMNVQLANVISDISGLTGTAIIQAILNGERDRYKLADLADPRIQATREEIARSLEGNWRKELLFILQQERNLYQTYQQQIAECDTALAAHLQTLEDKVEPGSQPPAAKPSKKAGSNAPTVFDVRGELYRISGTDLTQIDGINIMTAQTIIAELGVDMSRFPTEAHFASFLGLCPDNQITGGKVRHRGTKHVQNRAATALRMAASTLWRSKTYLGAKFRRLRARLGAPKAITAMAHMLARLVYRMLKYGEQYVDKGMQYYEEKYRAHEILSIQKKAKQLGFEVTLSPAA

SEQ ID NO: 360043 - protein, 366 aa, unidentified
MKKSSTRKPSMKSKAIKSKPERTVGLDLGDRTCYYCLLDSAAELMEEGRIQTSEASLRKQFDNEAQMRIALEVGTHSPWIAPLLESMGHEVIVANVRKVRAISSNENKNDREDALLLGRLAAADPKLLHPLQHRSIQSQQDLGLIRARAAVVRARTLLVNCLRGLVKSSGYRLPSCSTEALPEQARQHLPADLKPACLPLAEQIGKLNQTIAEMDRKVVQLGNTYPEIGVLRTVPGVGPLVAACYVLTLDHPSRIRDSRQAGAYLGLRPRQEQSGDSNPERGIAKNGNTYLRSLLVQAAHYTLGRFGPDSALRRWGLKLAGTSKRNKKRAVVAVARKLAVLLHRLWRSGQTFVPFPHPLTAAVAAA

SEQ ID NO: 360044 - protein, 338 aa, unidentified
MKLYAGIDLHSINSVVSILDETDHIVFERRLDNDLERIKCELGPYREQLEGIVVESTFNWYWLVDGLQEAGHRVHLANPAGNKQYSGLKYTSDQHDARWLAHILRLGILKEGYIYPKQERAFRDLLRKRMQLVRLHTTQILSIQNLIYRNAALKVSSNDIKRLNQEQLENLLSVPQQSLAASTNLVVMQSLEEQINLLEAAIKEHVKPRAEMGYLKSVSGIGDVLGWVVLLETGDIHRFKSVGNYASYCRCVESRRESNGKKKGENNRKNGNKYLAWAFVEAANFAVRYHEPVKRFYQRKKAKRNGIIAIKAVAHKLARATFHILKNGEPFNLARVFP

SEQ ID NO: 360045 - protein, 329 aa, unidentified
MGNVTTVGIDLAKNSFSVHGIDAAGAVVLRKTVSRARLLELLMSQPPCLIGLEACSGAHEWARRLQRFGHQVKLMAPRFVTPYRKNGKNDGNDAEAICEAVSRPSMRFVPIKTVEQQAVLCLHRVRQGFIEERTATINRLRGLLAEFGVVLAQSPAAVRREAESVVERLPPRAARSLRDLLDHVRLLDTRVREYERSIQEHARQNQATQLALQRQGIGPITASAIIASVGTLREFKNGRQFSAWLGLVPRQHSTGGKQRLGHITARGDPYLRTLLVMGARSVLQRAIGKNDALSRWALAVRTRRGYHRACVAVAAKNARVLWAMLSHSA

SEQ ID NO: 360046 - protein, 376 aa, unidentified
MSVYVGIDVHRKRSQVAVVTEDGKVQVNRNVPNGVEPILKVIGDLPTGTPVAFEAAYGWGWLVELLEDYGFDPHLVHPLRCKAIASARLKNDKVDAATLGQLLRADLLPEAWIAPKDVRELRALLRHRVALVRLATRLRNRIHAVAADHGHDRPDRQWTGAYWTGPGRQWLAELPLPAVSRQIIADSLGFIDALTPTIAALDREIHARAKADPRVKVLTVLPGVGEFTAMVLLAEIGDIGRFRNARALASWAGLTPTVRGSDLIVRHGHISKQGSPYVRWVLGQAAQIAKRHPEFADTYQDIATRRGSKIATVAVARKLLTRAYHLLAEPSGETTTNSTCVARTPPARSQTGRVTKPRTRSLQRHEPATSRARASD

SEQ ID NO: 360047 - protein, 397 aa, unidentified
MYIVGIDIAKRKHEAAVIDGEGTVIIKPFSFTNNYSGYNRLLAMLTKAKLPLDEVSFAMEATGHYWLALFTRLQKEGFRVQVINPVQTNSIRSFYIRQVKTDPRDALLIAEVIRFGHFSESTLHPENIYELRELCRGRHAIVSMQADVKRKVVALLDQVFPEYETAFTNLFGDTSMAILQTCPTPKELSETPLEELCHLIEVSSHKRFRMAKAQEIQALARGSFGFAMAGDVFSTMIRLYAKHLVFLKQQVREMDRKIAEIMETLDTPITTITGIGPTLGAYILSEIGDISRFSSAAKLAAYAGIDPTMRQSGEYNGVRNRMSKRGSPYLRHAIWLAASSAVLHDPALKLYFQKKRDEGKPYMASVGHACRKMVSIIYAVMRDNKAYTPCIPNEISA

SEQ ID NO: 360048 - protein, 374 aa, unidentified
MAAQGRERWGGRPLTASKCQSGGVEHTTAKEASVGEVSMIGLDLAKSVFQAHGADASGGVVFRKRLRRDKLLAFFAGQPRCVVAMEACASSHYWAREIAALGHETRLIPPAYVKPFVKRQKNDMADAEAICEAAQRPTMRFVTPKSAEAQGAAVVFRTRDLLVRQRTQLINALRGHLAEFGFIVRQGSGHVSKLIDLVADPSSELPAEARAVLAVIADSLQAIQARISVLDREIAARAKADPLVRRLMTIPGVGPIVATALVALAPEASTFRRGRDFAAWLGLTPRQHSSGGKERLGRTTKMGERSLRRLLILGASSAAKNAGRDGSRASPWLVGMLARKPRMLVTVALANKMARIVWALMAHGGTYRAPVAAV

SEQ ID NO: 360049 - protein, 353 aa, unidentified
MKYVGLDWAYRTAQWCALAPGGEIAGEGRIAADRDGLARLVLELGDEVTACLEMMSGALWVRDQLVDCGWQVEVADARKVKTVAPLAAKTDKVDARLLAELSRRELVPALWLPSLDERALRERLRRRMHLVRLRTSAKGRIFGLQTQWGVRVSLARLRRADGLTLLERAGVPEVWRRSVGECLALIDFLDARLEPLDAELRPFAKADPRAVLLDTIPGIAELLALTIAVEVGEISRFASPEKLVSYGRLAPRVRQSGQARPRSGPLSKSGSRLLGWAAVEAAQQAWRESNPWHGLYVDVSARSGNRNSAKAAVARKILIAVWHMLSRNEPFNPAPRSTRGDSVPASSRLALAA

SEQ ID NO: 360050 - protein, 343 aa, unidentified
MDHFAGLDVSVKDTNVCIVDDTGRLVREVKVASEPAALLPVLTNPAYHFKRIGLEAGPLSQWLFSALAEAGLPVICVETRHMRAVLKAQINKTDRNDARGIAQMMRAGLYRPVHVKTLRSQKLRMLLTHRKLLQSKAIAVENDLRATLRNFGLKVGMVGTVKFEARIRELVENLSDLAVLVEPLLVVRRVLHEQIGVLHRRLLAVVRDDEVCRRLMTVPGVGPVVALTYRATVDVPARFKNSKAVGAVFGLTPSRYQSGVSDRTGGISRCGDEMMRMMLYEAAHSMLVRSTKWSWLKAWAMKIARQRGLKKAIVALARRLAVIMHRIWIDGSEFRWTREVVAA

SEQ ID NO: 360051 - protein, 418 aa, unidentified
MSYKVAGIDIHKKVLMVVVATAANEVADAAGEGLEFECRRFGAAASERRHLCRWLQERNVSEVVMESTAQYWKPVWLDLEPHFGKLHLAQAHSNRAPKGRKNDFRDGKRLTRRLLADELLLSFVPAGEQRAWRTITRGKQQLVRDRVRLQNQLEAMLEEARIKLSSVISDLLGVSGRRILQAMADGETDPDRLAALGDDRLRCSKPELMDALNGSLEPIHCQVLKLYLKRLELLDEQIGKLDQMIAAALQQHQDAVIRIAEIPGFGVDSAQQLIAEMGIDAEAFLSAGQFTSWAGLCPGTEVSAEHNHSSRSAKGNRFVRRILTQAAQAAVKKKGSHFQALFRRFVPRLHYNGAIWAIAHRLGRLVWKILHDGVRYTEQGEQSNPKAKKRRAQKLAQALRKLGYSVALTPLAPEPARA

SEQ ID NO: 360052 - protein, 477 aa, unidentified
MNKTQSGNLQQPKTKSKRRRRNKGMCLEDRPVLEPNAAGIDVGAREMFVAVPPGRDEKPVRVFATFTEDLERLTDWLEQCGVTTVALESTGVYWIPLFEILEQRGIRPCLVNARHMKNVPGRRTDWHACQWLQFLHSVGLLRAAFRPGQDVCAVRTVLRHRNELVAAASQHVQHMHKALTQMNLQIHHVISDITGSTGRAIVDAILAGQRDGAELAKLRDPHIKADTETIRKSLEGNWRPEHLFTLGQSRDLYRIYQQQIVNCDLEIEKMLRGFEPRTDPVERPLPPDRKRNRAGSKRRRKNGHPHPEFDLRTETYKLFGVDVTQIPGVEENALPLFSEVGRDMSRWPSAGNFVSWLALCPDNDISGGKLLWRGARKIKNRAGHLFRMAAFSLHHSLTPLGNYLRRMKAKLGPKAATVATAHKIAVIFYTMVKKRVEYDETIWDTRDAQREKRLEAKLKRQAKQLGYELVPIEPQAA

SEQ ID NO: 360053 - protein, 450 aa, unidentified
MMREVQEIEDEEHEQILERVCAIDVAKAPGKVCTRVPHPSRPGARRTRVWDVDATTNAILELGEHLAGEGIEKVTLESTSDYWRIWFYLLEAAGLDVQLVNARDIKNAPGRPKTDKLDSVWQAKLTERGMLRPSFVPPAEIRRLRDYTRLRTDLTRERTRYWQRLEKLLEDSLIKVSTVASSLDTLSVRDMLEALIAGERDPKVLAGLARGRMKAKHAALIEALTGRFDDHHAELARMLLDQVDALNAQIGKLTTRIGELIAAIPSAQGVDADGTTGPTAGTSPGAPVLPAVARLDEVTGIGPDGAQAIIAEISLDMSRFPTAGHLVSWAKLSPRTIQSGTSSRSGRTGKGNPYLKGILGEAAAAAARTDTFLGERYRRIVKRRGKLKALVAVARSILVIIWNLLANPAARYHDLGSGYHASRTDTGKKVRNHIRQLEALGYTVALTQAA

SEQ ID NO: 360054 - protein, 350 aa, unidentified
MLIIGCDYHPGFQQIGFVDDVTGDCGERRLEHREEAEQFYRQLGGRGCKVCVGMEASGHARWFERLLGELQFELRLGDAAEIKSKRVRKQKTDRQDAQLLLRLLVEERFPTIWVPDWNNRDLRQLLWHRHRMVQMRTRVMNQLQAVALNEGVRRKKTLWRAEGRRQLESLSLAPWASRRRQDLLALLDELNPKILELTRVLEHAVQQRPVARQLMTHPGVGALTALAFELVIGTPKRFSCGKQIASYVGLVPSEASSGDRRRLGHISKQGNSLLRFLLVEAAQAAVRSDSQWRRQFLHLAMRRDRRIAKVAMARKLAVRLYWMWRRGWNYERLSKFGSHAGGLGNRLGVQ

SEQ ID NO: 360055 - protein, 387 aa, unidentified
MRQVDDLSCSLVAFDQDATLIVVVEMSEASWLVAGMAPGVDRQPLKKLGPDPDALLRLVERWRDEAVKAGKMIERIALAFEAGRDGFWLARWLQARGIEVHVIHSTSVAVSREHRRAKTDRLDTAMLMRVFLGWLRSERGHCGMVAIPTLEDEDARRPSRERESLVGERTRIINRMKAILAWLGVRGFNPKLRKAPQRLDELRTPEDLPLPPNTVDELRRDMARLAMICEQIKALEQARLANLEQAPGTGPHAMVRLIANVIGVGIETADMLVQEVLSRNLRDRRAVARFAGLTGAPNESGSRRRERGLAKSGNARVRRGLIQLAWRFLRFQKDSALAQWYRVRTEGPAAARRTKMIVALARKLLIAFWRMVTVGEIPAGFTLRQPA

SEQ ID NO: 360056 - protein, 324 aa, unidentified
MLLTLGIDISKDSFHVELSINHKLRHRRFANRKEGFAELGAWLIKHKATVVHACLEATGPYSEAVALYLHEQGHTVSIVNPAQIKAFGQSELLRNKDDRPDAGLIRRFCEKQQPAAWQPPPAHLRELQALTRHLENLLETRQQQVNRLEVATTKDVLKSLRKLVAHLDAEIKRTEQQIDDHIDRHPDLRQQCQLLESIPGIGKRTATKLLAEIENISRYKSARQVAAYAGLTPRNNRSGTLRGQTRLSKTGNARVRKALFLPAMVAKRHNPVVRSFCQRLARHGKNKMQLVGAAMRKLIHIAFGVLKSGKVFDPKHELLLKSVS

SEQ ID NO: 360057 - protein, 478 aa, unidentified
MAKVKQSAFDRLRMGARLNRKERRVVEQRLSAADPALEIVHRDAAGIDVGNESHYVAVPRGRDAQPVREFGSWTAALVEMAQWLVRCGIRTVVMQSTGVYWIAVHDVLQKHGLEVYLVDARGTKNVPGRKSDVQECQWLMRLHTYGLLRACFLPAPEIQRVRTVWRLRDQHVRDSTRCIQHMQKCLIAMNMQLHNALSNIAGATGQAIIRALLAGERDPQALAALRDRRCMASKEEILHSLQGVWKPDVLFELQQAVDAYDFYRQQMAKCDEQLKQYLALLPARSVEAVDPPSADISKKSRRPHKPQGNEPRFDLEAELERILGINATTIDGINVMTVQTVLAEVGPDLSAWKTEAHWSSWLNLAPKRDVSGGRVIRHVREHRTNRVGIAFRMAAQALIHAHSYLGARCRYLRAKLGGHKAIKAMARILACVYYRLVMKGQRWVDQGMEEFNRRSEQRELDLLRRKANKHGMQLVPAA

SEQ ID NO: 360058 - protein, 316 aa, unidentified
MKSSQPFVGIDVSAKRFDVAVLPAATHFTVAHTDEGIASLVCRLQKLDPQIVVLEATGGYEIPLAYAMSEANLPVVIMNPKVLRHFAKSTGKLAKTDKLDARVLAHYAQAIQPPVRPLKDPEQAELATLMSRRRQLRDMIVMEGNRRRTSTPKVRGNIDQHLAYLRQLLKDLDRDIHGAIRRTPLWHEKSEILQSFNGVGPKVSASLIADLSELGTAPRTQISALAGLAPMNRDSGQWRGKRTIQGGRPAVRQALYMAALVASRRNPVIREFYQRLRQAGKPAKVALTACMRKILVILNAMLKNRTYWNPQLPLAA

SEQ ID NO: 360059 - protein, 441 aa, unidentified
MADTTVTTPEPAWAAFLALDWGGQKHAWILQPADGGKRNEGYVDNTPEAIAVWAAGLHQRFGGRPVAVALEQKRGSVVNLLLPYAHLVLFPVPASMSASYRKTFVPSGAKDDPTDAGWILDLLLRHRDRLRRLAPDDANTRLLLMLVEDRRQLVDDKTSLTLRLQDCLKQYFPQLVQWFDVDTPLVADLIQQWPDLQHLQRCHDGTLRKFFRKHHGGEKLTGERIEAIRAAVPATDDPSVLEAGSMKARHLTESIAALRGQITQLERRRDELVADHPDAPIFASFPGAGPATVPRLIAAFGTCRERYRCAFDVECDSGIAPVHIRSGKVDLVSMRRACQKFTRQTFHEFAGQSIPRCQWASAFYHAHCTKPEEHHAAVRALAFKWIRIMFRCWKDRKPYEEQLYLTSQRRRGALLGPGLASVTSLEWKNVAGFSKLSEKTS

SEQ ID NO: 360060 - protein, 335 aa, unidentified
MDYCGIDLANKTSAICVMTNDRRIVHEVDCPTDDDGFGQALKGYAGLRCVIEASPLSEYVAELLELQGHEVVVIDPRKAKGVITTKKKTDKLDARNLARMAQTGWYTVVHRKSPDARLLRSHLIARKGLVDTLGAQRCRIRGLLRAHGIVLGHVSAGRFEARVLERVASRCPALLPAIRPLLDCWVLLRRSIAELTKQLKEMARQDPVCGLLMTVPGVGPLVSSAFVATIDDPERFKRGDQVAAYVGLVPSVSQSGEREHRGRISKEGDHLLRWLLVEAAHILLAHYRGDNALKAWGKRIEQRKGPAKAKVAVARKLAMILHRMWLTNTPFQAQP

SEQ ID NO: 360061 - protein, 455 aa, unidentified
MPRKSAKASPELTRHIHGAAAIDIGSRMHMAAVSPETAKNPIRSFGTFTSDLHTLAEWFRACNVTSVAMESTGVYWIPVYEILEQHGFEVILVNARYARNVPGRKTDVSDAAWLQQLHSYGLLRGSFRPQADIAALRAYLRQRERLVEYAAAHIQHMQKALMEMNLQLHHVVSDITGVTGMQIIRAIVGGERDPDTLAASRDIRCRSSAEVISAALMGNYRDEHVFALTQALELYDIYQERIVACDRRMEGLLLRLRHKSAKPAADLPKPRIRTKQVSAPSFDVRSILYRLLGVDLTQIHGIGVSLALKLVAECGTDLRAWPSAKHFTSWLCLAPGNKISGGRLLSSRTRCSSSRAAALLRLAATTLGRSDTALGAFYRRLSARVGKAKAVTATARKIAVLFYNTLRHGMAYADPGADHYDEIHRKRIVSNLHRRAQSLGFILQPISGDPQPAVS

SEQ ID NO: 360062 - protein, 359 aa, unidentified
MQTQRKELNFEGQSVFVGLDVHLKSWTVSIFTEKLHHKTFSQPPKAEILSDYLKFNFPNASYFSTYEAGFCGFWAHFKLEELGIRNIVVNPVDVPTTQKDQMRKSDPVDSNKLGRSLRSNELKGIYIPRQETLEDRTLIRVRFTIVKDMVRLKQRIKSFLNLYGIEYPDEFQNTNTHWSKRFINWLKTIQLQYSTGTEALNLLIKEAEQQRLILLEATQKIRALSKTERYSKNMILITSIPGIGLITGIMLLAEIEDIKRFENSDKLAGLIGIVPDCHSSGPSEKKGEMTKRGQYFMRKGIIECSWVAATRDPALSLAYYEYCKRMEPNKAITRIARKLINRIFSVLKNEKKYEFGIIK

SEQ ID NO: 360063 - protein, 423 aa, unidentified
MMKLKYSICCGLDVHKNVIVATIVTTNKDGISEYLQKSFSTINSDIQRFHNWLIENNCYHVCMESTGKYWIPIFNYLENDIDVCLTHPKYVKAIKGKKTDKKDSKWIADLYKFDLVRCSFIPPKDFRQLRELSRYRFKLVCMKSSEKNRIQNCMTISNVGIASVLSDPFGKTATEIISYLLEHTADSMDEKAVRKLIKKGAKSKSDEIIEAIKGYTIETDQAKKLELARGHLEYLDDMITQTEVELYVRIKPYYEFVEFVSTMPGMTELSSTIVLAETGVDMDIFDDAKHLCSWCGLSPANNESAGKKKSVRIAKAGDYLKPMMVQCALAAIKNKKQPYFAIKYGRIKKRRGHKKAIIAIARMMMVCIYHMVSEKKPFTPADYEELMKPQNHVERVVLNENNVFAYLESLGYDSSKLVKRNDN

SEQ ID NO: 360064 - protein, 346 aa, unidentified
MNHYAGIDVSLECSSVCVVDASGKILREAKVASEPEALIAWFRSLGFGLERIGLEAGPLSQWLFAAMKAAGLAVELLETRHVRKAFEAMPVKSDRNDARGIAQLMRLGWFRPVHCKSLGAQETRTVLTARKLVQSKLRDVENSLRGILRGFGLKVGPTTERSFCGRIRELVVGHPSLETVTEALLAVHAVLLREFNGFEKQVRRMARSDANAKLLMSTPCVGPVVSLTYASAIDDPARFRSSKQVGAHFGMTPKKYQSGETDYTGRISKIGDASVRTALYEAAHIMLTKPVKGCSELKSWAMRIARRAGMSKAKVALARRLAVIMHRMLVDGTPFDPAHKQVTAAA

SEQ ID NO: 360065 - protein, 370 aa, unidentified
MTIRKYVGFDVHLATVSFCIVDEAGKILWESVFRNTGETIRDFLGGIRGEVHLTFEQGTQAAWLYDLVKPLVSNVLVCNPRYNRVVLCGDKSDRIDARKLAEQLRLGALRPVYQTEYSLRPLKQLVLGYEALIRDSVRTMTRIRSLFQGRGVSCMGGGLYNPAKHDFWLEKIKEPGLRFRLRILFQQLDSLMPLREEWKKQLLLESRKYPAVKLLKRIPCLGPIRSAQIVAVVATPHRFRTKRQFWPYCGLAVVNRTTSDYEVVNGRVQKKIRKASTRGLNRDYSRILKRVYKSAALQGTTHKLLGPIYRSLLQKGLNPDMARLTLARRLSSTSLAIWKKEAKFDPDRFIVITTDSKHRKEEKKRKQALS

SEQ ID NO: 360066 - protein, 336 aa, unidentified
MNETTCVVGIDVAKRTLDIALLVNGKTKFNVFDNIPAGHALLQQWLAERGTPQEHTHICMEATGPYSEAVAIALVEAGWHVSVVNPARIKGFAQGELARNKTDRADAALLARFCAAMCPSLWTPPSPAWRELHAWVDRLQALKDMHQQESNRLEAHEASGQLLLVKAVQAHLDWLGQQIDELERTINGHIDRHPDLKGDAELLHSIPGIGKTTVAKVLAYAGDVRRFANAKALAAFIGVTPRQRVSGSSVKGRTMMSRTGHADLRRALYMPGLVARRHNPVLRVFGDRLRLTGLAPKAVVGAVMRKLAHLIYGVIKSGQPFDANFTRARLDFQDGI

SEQ ID NO: 360067 - protein, 392 aa, unidentified
MRFAGIDIASETHVLAIIDADGAVEVKATPFAEDAAGYEKLLNLLGAPADLLIAMEATGHYWQNLFAVLAAAGYRLALINPLRTHRFAGEDMTRTKTDAIDALGIARFAAQKRPSVAPLPDALTEELRELVRLRQRLLQDFGDRVRQLHRLVDLGFPEFTRYVRTLDSELASAILRAYPTAAAFRGLSVKRLAALRYDERHPVGLELARTLIDAARRSVGQHHSPAYRLQIRYACDDLDVLRRRLRELDRDLDDTLRQHEIARLLLTIDGIGPHTAAYVIAEVGNPAHFKSPAAFAAYVGAIPGLKQSGKRSPNRAALTTIGNARLRAALWMPTLAAVRFNPWLRAHYLRLRARGKLPKVALVACRLLFAIYSVAKHRRAFVPQLAAPGTVQ

SEQ ID NO: 360068 - protein, 348 aa, unidentified
MMLIGCDYHPSWQQICWLDTATGETGEKKLEHASGEAQKFYRGLPGPALIGMESTGNCQWFVEMATTAGHDVWIGDAAKIRAADVRQQKHDRRDAALILKLLLEGRFPRIWTPSGEEKDLRQLLIHRYKLVRIRAQVKTELQHLAMNQGITKKRKLWSKAGEKVLRELPLKPWASRRREDLFRIREMLNGQIGLLDQAVVEAAEKNEKARLLMTQPGVGPVTSMAFVLTMGDVSRFQRGKQVASYLGLIPREYSSGGHRRYGSISKQGNRFMRMLLVEAAQGAVRCDPGMRSEYLHRCHRKAKGVAKVAAARKLAIRLYWMLRTNTGYPEIVRVESSSRVALVVRHGG

SEQ ID NO: 360069 - protein, 435 aa, unidentified
MRREQVSVFRERGLRAGVSRSAEPQCLVTNSNTERKTDTMKSYILLQPEPVQSQITIAPAGSKSSVLFVGLDVHNDSIAVSIAPSDATEVRRYGIIGGEHDDVLKLVKKLQAAHPAATLKLCYEAGPRGFALCRCLRSHGLDCILVCPSKVPRKPGERVKTDRRDADQLARLYRAGELTGIYVPEPEDEAMRDLIRARYQVGKAQHRARQQLKMYLLRHNLRYGGQTAWNAAHLRYLAQIKMPFPVQQIVFQEMLEVITEATERLERYDQEIERAVPGWRWEPVVRALMALRGMALLHAATLVAELGDFHRFDHPSPLMSYLGLVPSEHTTGTDRQQGGITKMGNGPARRALVEAAWQYRAPARLSPHLKKRQEGLPKAVTAIAWEAQRRLHHRYTHLTRVGKKKSQVAVTAVARELAGFVWAIARQVQPRPAKL

SEQ ID NO: 360070 - protein, 434 aa, unidentified
MPRKKRKTDEIVEVVYERCCGMDIHKENIVACLNINGKREVREYSTMTDDLLLLANWLKSKNIEMVAMESTGSYWKPIFNVLECECIPAMLVNAQHVKALSGTKTDRKDAKWLSGLLRHGLLKPSFVPTRDMRELRELIKYRISLTEESARVLNRMEKVLQGANIKLSNVISKTGTKTELSIIKALSEGVYDERILADLAKGTLRNKKEELIRSLRGLMGEHQRFLLKSMHNQLESINKEISNVESEIEKRMEKDHELLERLEEIPGVGKTTAQVIVAEIGTEMEQFPDEKHLASWAGVCPGQNESAGKRKSGKTRKGNSILKKTLVQCANSASHSKDTYLSAQHKRIVARRGRKRANVALAHTILVICFFMIKNGSSYSELGGDYFDKRNKTYAINRSIKRLEALGFDVELTERVANLTEPSDLNDKPPDKIN

SEQ ID NO: 360071 - protein, 419 aa, unidentified
MFSDTALIVGVDVHRRTNVVLVMDGHGEVVDSHRRFANNGSGTGRLAEYLDQIAQRGGFHTIHVAAEATNNFWLPFFHHLSQAALLAHRPVTLYPFNPRLVHNFKKALGEEDKTDLRDAGVIAERLRFGKELPRPFDMEEMYLSLRTLTRYRYHLVRELVRVKSYCLSLVYLKVTDYSDDKKRPFSNVFGATSQAVLREFATLDEIANMPFDELVEWLDVKGKRRFPNPEENARKLQKVATDAYHLPHEWTAVIHDIIALNLRHIALLENLIQRTETAIAQQMEAIPHTLDTIPGIGPVFAAGIIAEIGDLARFEYNEAKVASYAGLKWPRTQSADFEAEDTKLSRSGNRFLRYYLCEAAQVVRLHAPEYRDYYHRKYQEVRKHRHKRAVVLTARKLVRLVVRLLTTNEPYRLRQAPND

SEQ ID NO: 360072 - protein, 350 aa, unidentified
MIIIGVYYHPEFQQVASVNTETGDFREVRLQNPEQAEQFYRELSGLSTQVRIGMEASGHARWLERLFSELQFDLWIGDAAQICSKRVRKQKTDRQDAQLILQLLVEDRFPRIWVPGSENRDLRQLLWHRHRMVQARTRVMNQLQAVALNEGLRSKKRLWRERERQQLESFQLGPWANRRRHDLLHLLDELNPIILELTQAVERESEKYSQARRLRTHPGVGALTALAFVLILGDVERFYCGKQVASYLGLVPSEKSSGSRRRIGHITKQGSSILRFLLVEAAQATVRSVPEWRRKYFHLMQRHGRNIAKVAMARRLAVRLYWMWRRGWSYEQLQKFGSHVGEPGNPYGVQ

SEQ ID NO: 360073 - protein, 355 aa, unidentified
MDKYIGFDIDSKKVSVCVVESGKKDVYATIGPDVGSMKQFLLFQKKDGSRLHLAFEISTQAGFIYDCLCDCVESIAAANPYKMTWIYRTDKKNDRIDARKMAILLSIGELPTVHMPSIEVRQWRQTILHRKNLVANITQVKNRIRASMRSRGHVRAANKGSWWKKLNISWMRQCVEESCGQIWSMQIEQLVDELEFLGEQLFKLTRRLDEYLKSKPGAALLMTTPGVGPRTAEAVLAYTDDVSRFGTSKQFCSYYGLTPKLDESGSCRRLGHISKHGPSVVRWVLCEAGWKVIGKSAAMRKFYERVMAGQAGRKKIAIVAVSRKLLSIMRAMLTTGEVFNESLVGRHCGDVTKVA

SEQ ID NO: 360074 - protein, 331 aa, unidentified
MKITETVGIDVGKMKNEVRIHTNQKNKSFDNTKKGITSMVKWAMSSSKCTKEEMLFAFEHTGIYSQQLAVYLSENSFNYVMLPGLEIRRSMGITRGKDDKIDAKKIALYAYRRKEELQTYKLQAKNVMEIKKLLHLREKLVKQRSGYKATIGEYKLFLKRKENALLFTIHEKLIKELTKQITKIDNNLIDIVNNDENLKKLYKLITSIKGIGNQTALFMIAYTGGFTRFDTWRKFTSYCGIAPFPNTSGISIYGRTKVSNLANKKIKSLLDLCAKSSIQWNSEMKLYYEKRIAEGKPKMSTINIIRNKLLSRIFATVKRGTPYVSTLNYCS

SEQ ID NO: 360075 - protein, 465 aa, unidentified
MSTAYRRCCGIDVHKKSAMTHVLPPQGQSDGRALEREFRTFSRDLRSLRGWLKHCRVTDVVMESTGQYWRAVWNILEEAGMRLVLVNPAHVKALAGRKTDRIDARRLAQYLQNGDLDASFVPPREIRELRDLTRWRVHLLQEVNRVKNRIGQMCEAGNIKVSSVASDLFGLSGRRMLHAIVEGKREAGWMADYAQGRLRSKRKELAQALDGTFTQHQRWMLREELQHLERLESQMAGGEAEITRRMQPYAEMIRRLRTIPGVDRIVAWTMVAEWGPDMTVFPDADHAASWGGMCPGNRQSGGKRLSGRTRKANPYLRRALAEAAWAATHTKDSYLAALYRRLRGRLGHNQAIFAVAHQILRVAYTMLRRGEDYRELGGDYFDRQNKPRVVHRMLERLTRLGFQVQLQALPAPPETGDPVPPLTTPADPKRRRGRPCHCAERGIRCRHGANSPAVPNKQPSENKYC

SEQ ID NO: 360076 - protein, 337 aa, unidentified
MSSIHILGIDLGKHCFHAIAHNRCGVEVLRRKFNRNQLLIFLSKIEPTTIAFEACGGAHWLARKCGELGHHPRLIPPQYVKPYVKGNKNDFIDASAIAEAVSRPTMRFVAVKSEEAQVIAAIHRVRDSYIKERTATMSRIGAILLEFGLSFPKGHAKMKSLFQWLAEQTVSLPKSLLCELISIHEHYKYLNEQIKTQDIKLQTIVNNNESAQLLKTIPGIGDLTSTLCIADVSSPSNFTNGREMAAWLGLVPRQFSTGGNTKLLGMSKRGNKHLRTLFIHGARAVLSRLETTGKVFGEWLVNLRATKPFNVVVVALANKLVRIAWAVLYHRQAFKAV

SEQ ID NO: 360077 - protein, 433 aa, unidentified
MLKINYMSTLFVGIDVSSKTNSVYAMDFEENKYLSTSFGNNQPGADELVNRIVACMQKHKHLDTLLIVLESTSVYSVHISNFLASSEVLMPYKPYVFCVNPKATANYRKSYIGMEKTDPTDAYLIADFGRVGRTKKLEPWRGGLFIALKRLTRHRMHLSECITREKTYMVSNLYLKFSELQLLEGDDKPFGNLYGATSSAILTEFLSPQEIINMPEEDLLAFLAQKSRNRISDLSKTSELLRKAARDSYRLDKCMYEPLSISLASSFNCIQAYQKEIRLIEQAIDKCIKGMNTNALLILQSIPGIGPVWASGILSEIGDITAFHSSDALAKYAGLYWPKGDSGDFISEDNQMSKAGNPYLRYYLGEAANSVRKHIPEYADFYARKYAEVCKHQHKRALALTSRKLVRLVFGLLAKNQLYTGEKLDTEHNIESN

SEQ ID NO: 360078 - protein, 322 aa, unidentified
MSGAVIGVDIAKRKFDVALFMNGKFKHKTCVNTRQGFEELSQWLTRQGVKRVRVCMEATGTYGDELATYMHDAGHTVSIVNPARIKGFAQSELLRTKNDKVDAALIARFCVAMHPAVWTPPPEEIRRLQLLVRRADALIVMRTQEQNRLGTAHETIESSIKEHISYLDQEIEKLKRQIAKHINSDPNLKTKKDLLSSIPGIGEATIAVILAALHIFEGVDRVQKTVAFIGLAPREMISGSSIKGKPRICKIGHARLRKALFMPALVAMRYNPLMIDFGNRLRRQGKNGKVIVCAVMRKLVHIIYGILKSGKPFDPNYKPNFA

SEQ ID NO: 360079 - protein, 359 aa, unidentified
MQTQSNKIDFTGQHIYAGIDVHLKSWKVTIMTERLPFKTFSQDPKPELLHDYLTRNFPNAIYHSAYEAGFCGYWIHNKFTALGINSIVVNPADIPTTDKEKDQKADKRDSRKIAKALRNGDLKGIHVLSLKTLEDRCLIRTRAILVRDLTRNKNRIISFLHFHGIELPEKFQQGHHHWSKRFMVWLKSIEMTQQSAKKSLELYIAEAVHLRTSILEATREIKQISQHATYANKVSLLEGIHGIGMLTAMIILTELETINRFGNFDKLCSFIGLIPSTHSSGEKENKGKITHRGNSALKGALVESAWIAARMDPALNKAYHDYCKRMEPNKAIIRIARKLLNRIRFVLKNNQAYVCSVVK

SEQ ID NO: 360080 - protein, 462 aa, unidentified
MTVPKTKGRRKRATPVPTSLPAIRSLVAGLDVGSSEHWVCGPARADGQPNVRCFGTTTDQLQELADWLADHRVESVAMESTSVYWIPIWELLEARGIEALLVNARQLHNVPGRKTDVSDCQWLQLLHSCGLLRGSFRPGEAITRLRALQRQLANLVAERTRCVQWMQKALDQMNVQVHRAVTDLTGTTGLAIVRAIVGGERDPARLAQHRDPRCRKSAAEVARYLTGTWRAEHLFNLASALRLFDALEAEIAAYDAQLLTAIESLQPPDRQAAPVPPHPNLAKEKAIRTHGEQPARTTLWRFAGVDLTRIDGIGAGAAQVVLTEVGPDLAAFPSEDQFVSWLRLCPRTPISGGKPLKKPRNGLGANRIAGVLRLAATSLQRSKTALGAAFRRIARHKGSAVAVFATARQLAKLIYRMLRYGHDYVDIGEQAYDRQFQTRRLAALTETARSLGYTLLPNAAAK

SEQ ID NO: 360081 - protein, 366 aa, unidentified
MSEVITTFVGLDVHKDSIAVAVAEEGRAAPRFIGTCGPAVGEVLKTLSHLGKPRHMLVVYEAGPSGYGLVRSLRDKGFRCEVVAPTKIPRRAGDRVKTDRRDAVTLAHFARAGDLGSVMVPDEADEAIRDLSRAREDALRARTRARHQLKAMLLRHGRHYVGKVGWTLAHERHLSQINFAYPAQNIAFTEYRSAVTEANERLERIGAALQTAVSEWRLRPVVQALMGLRGIDFISATTIVAELGDLRRFAHPKQLMSFLGLVPSESSSGQSRSQGGITRTGNTHVRRILIEAAWSYRYPARIGREMLIRQQRLPQKLRTISWQAQLRLCQRYRRFAARGIHLNRACVAIARELSGFIWDVARHVTH

SEQ ID NO: 360082 - protein, 400 aa, unidentified
MKYYVGIDIGKYVHQTILCDEEAKPIAQSLRFHATYEGYQLFTTYLKKIVEPKDFGNITVGMEATGSYWLSLYEYLRKLGLKIIVLNPLQVKAYRNEGIRGAKTDRIDAQLIVKVLRFGDYKISDIPKEDIFALRQLTRLRSDLVEMTTDLKLKTISIFDQVFPEYKDLFYDIFATTSKALLGKAVIPQEIGAIPIRKLTILLDKASRGRQGEKEAKHIKTVAQQSIGVTIGLDAFALSLKILLAQITHLEKEIEKLDKETIERVALRQTTLTTIPGIGENIAGTIIAEVGNFERFKDDKNGAEKLVALAGIDPKVKESGKYKGKAKMSKRGSPYLRKAIRQAAFVAACGPRHDPMFSAMYEKKIREGKPFEVALSHVENKMLHVIYSLLKSKKEYKPNI

SEQ ID NO: 360083 - protein, 334 aa, unidentified
MWHIGIDLHRRTVVMSAVNDSGEVVSPVTIECLNTNAILDFLQPLKPFRAVVESTATYRWLYKLLSEEGTILLAHPAKLRLMIQRRAKTDRLDCQLLVNLLRINQIPLSYIPPDDYQQLREITRHRAGLARDRAQIKIGLRALLARNNQDAPYRIPFGPRGIKWFRDQSFSSIDNLIRDELITRLDHFTEQINVIDQQLEELQVSFPQVEALLNIHGIGLYTALVIVAELGEVERFRSAKQVGAYAGLTSKVNQSGGHCYYGSITRQGPPWLRWVLTEVAIHVIRRDVPLKRFYTRIRKRSGAKKARVAVACKLAEISWKRLFRWQTEHSVQPV

SEQ ID NO: 360084 - protein, 418 aa, unidentified
MTRKDDSKVIRIVHPICCGLDVHKESVSACVIFPDGTGEEQYEIKVFGTFTDDLVRLREWLTAYACPVVAMESTGVYWRPVHNVLEETVQVVLVNARDMRNVSGRKTDIGDSRWIAGLLRHGLLKSSFIPPQTVRQWRDLTRLRKKYVQSAGDYRKRTHKLFESANIKIDSVVSDLFGVTGRNLMQLLVTDRKLTLSDIQTCVRGKLKGKEAELFRSIQGFFTDHHRFVLKTILKTIAMLEAQIGALDHEIRRAMKGHEALLDRMKAAPGISDISSCDILAEIGPTLDSFPTDTALVSWSGLCPGNNESAGKRKSGKSPVRKHHLKTIMLEVAWAAVKKKGSYFKDKYYRLKARRGAKKAIVAIAHRILLGIYHVIKDGATFRDLGEEYLSRRNKSRKLSHLHRQALALGFKLVPQTA

SEQ ID NO: 360085 - protein, 416 aa, unidentified
MDVVVERCCGLDVHQETVVACLMVGEFGKRAKKEVREFRTFTADLEALRDWLVASGCQQVAMESTGVYWMPVYAVLEGSVEIVVGNAAHLKNVPGRKTDVKDAEWIAQLLRAGLIRKSYVPSKEIRTLRKFVRHRRSLVAGRTDERNRLQKLLESANIKLGAVASDVFGKSGWLMLKALVDGAKSPGEMAELAKGQLRKKLEPLAKALHGKLDDDDRWLLRSQMDRLERVDADIAAVEAKIDAHLAPHAALRERLTQIPGVSRIVAAIVIAEIGANVGAFPTDHHLAKWAGLCPGNNESAGKRFSSAASKGNEYLRTALVEAAQAAVRVKGSYYKAKFHRLKARRGYKRAIFAIAHKILRAIWHMMKWARDFKDLGEAYLDLRDQRRLTRQHVARLEALGYAVTLTARLPEVAVPP

SEQ ID NO: 360086 - protein, 325 aa, unidentified
MGLNTEQIQPQLIQFALGFDVSKATITFFDTHSGEICTLENSKVALKAILKPYAGRLDTLAICEATGGYEDNLLDVLEDLAIPAHRADAARVKAFIRACGANAKTDAIDARHIAEYGLSRAQSLPRWRPSQPREAKIKLLVLRRTDLVSMRVQEENRLKAPRNKPIARDIAGHITEIKRRIEAIDKQIETIMSLDKRLKDRKAILQTVPGIGKVIAPVLLALMPELGHIDRKQAASLAGCAPHARDSGARKGRRFTKGGRRQLRPLLFTAAMAASHSKSQLATTYKRLLAAGKSKLTALGAIMRHIIVIANARLKEYHIAQIRLT

SEQ ID NO: 360087 - protein, 338 aa, unidentified
MGYFVGIDLHGDNNYIGILDEEDRRVFKRKNRNDIKEITRVLEPYQEEIKGIVVESTFNWYWIVDGLQEAGYRVHLANTAAMQQYEGLKYVDDTRDSFWLAHMLRLEILPEGYIYPKETRSVRDLLRKRMMLVQQRTAHILSMQTMVSRNKGVSISSDTIKTMSDEEVEGLFGDEHLVMSAQCDHEVVGVLSGQIDKIEKAVLKEVKLKKPYKKLLTVPGIGEILAMTIMLETGDIERFREVGKYSSYCRCVSAKKVSNGKNKGKGNRKNGNKYLAWAYVEAAHFHVRYCEEARKWHQRKASKSNAILATKALSNKLARACYYIIKEQIPYDKKRMFG

SEQ ID NO: 360088 - protein, 426 aa, unidentified
MSGSEVLRQEPQFAALVGIDWADQKHAWCLQAAGTTQRESGEVEHTPEAVEAWIGQLCQRFGNRPIAVAVEQVKGALVFMLSKYEPLHLFPVPPAMSAKMRAALYPSGAKDDPRDADLLVDLLLQHRDKLRRLSPDSEATRRVQNLVEERRQLVEEKTAQSNRLTNHLKIYFPQMLEWFDRLDTELVCALLEQWPTLEELQKVPPARLRTFFRKQRCHYPELVERRLVGIRQAMPAIRDRAVIEAKSAVVKVSAQVIRSLIRGVADLDRKIEEAAAAHPDFFIFESLPGAGAVLAPRLLAAFGSQRERYANAEEVQAYSGIAPVTERSGKKKWVHFRWACPKFLRQSFHEWAGHSIAHSQWARSYYQQQRERGKAHHAAVRGLAFKWIRIVFRCWKDRVTYDESKYLAALAKRSSPLAAVTGGTIL

SEQ ID NO: 360089 - protein, 372 aa, unidentified
MKQNLIHIGLDVDDTQYHGAAFNKDTGEVIDFKCRPTLKGLLQQLDRLARHFAGCTIKLCYEASYIGYCLQRDLISNDIHCDVVSPSSIPSPRGKAIKTDRIDAGYLAQFYANDLLTIVQPPDEEQEQDRDLLRSRQKVMQLRNQLRKHLQAVLRRSGLHYKAETGHKSHWTKIHYFWLARTIDGLSGSLKINLQLLLRQLKALNEVLTEYGQQIEVLANSPRYEPAVQSLTCYKGIKNIFALTMIAEIGDIKRFSHPRKLVSWIGMDIREYSSGGKHNRMGITKHGNRYLRTAFIEANQRGYRTARISKDVKARRKDIAPELIHIADRCLRRLNKKGNRLLLAGKHPNKVKVACAREMVGFVWESLNKVAA

SEQ ID NO: 360090 - protein, 343 aa, unidentified
MQHVAIDLGGKESQICVRSSDGSVIEECRKPTAALGRYLERQPRSRVVIETCAEGFATADLAIRLGHEVRVVPAALVRALGVGARGLKNDQRDARALSEASCRLDLPSVHVPSIHSRQRKSMCGLRQVLVEARTKLINSVRGYLRTCCQRIHGRSSESFARRVREHFASEQSELPAMVERQLKAIECLTEQIQEADRALAKQALADPVCKRLMTAPGVGPVTSVRFVATLDEVGRFSDAHAVASYLGLVPGERSSSDKQRRTGLTKAGPAQMRWLLMQAAWSVMRSRGEPPLKRWALEVSKRRGKHIATVALARKLSGILFALWRDGSEFQAVRAARWPSASA

SEQ ID NO: 360091 - protein, 344 aa, unidentified
MHIASIGIDLGKTTFHLVALGERSKVLVRKKFSRTQLLAHTANLQPSLIGLEACSGAHFLGAALREQGHEVRLIPAQFVKPYRKSNKNDFIDAEAIAEAVTKQNMRFVPIKSQEQLDVQAMHRVRDRLVQRRTALINEIRGFLLERGITFPAQPIHLRQNLPTVVEDCEQNLTPRLRWLLDRLWQEWKQTEIDIETVTAEIERIGSEDERCRRLRQIPGFGPLVSTAMVAAIGNGAAFRRGRDFAAWIGVVPRQYSTGGKQKLFGMSKRGNIYLRRMLIHGARAVLFRVKYDTGGLGQWVHRLSQRAPRNKVVVAIANKLARIAWAVLSSGKDYRHQPLQRAAA

SEQ ID NO: 360092 - protein, 311 aa, unidentified
MKYFAGLDVSLEETSICVVDESDRIVKERRAASDPAALSKALHEIGLALDRVGLKVCSLTAWLHDGLHAGGWPAICIETRTANAAMKTMPNKTDRNDARALAQIMRTGWYRQVHVKSRQCWLWRSLLVARRTVLNEMRSIENVVRAILREAGVKLGLPSRSAFAGRVRELAGGDAEVMTMVELLLSVLSTMLREFARLTKRVLDIVRKEAVCLRLMSAPGVGPITALCFRATIDRPERFGSSRAVGAHLGLTPAHYQSGEPPVEGSRLARMLTGKPRMLVAIALANKMVRRIWAMLTKQEDYRDPVLAAVV

SEQ ID NO: 360093 - protein, 376 aa, unidentified
MSQNLRFLGLDVHAATITAAVAEPDGSVRELGTIPNRPEAVRKLLAKLGPPERRRVCYEAGPTGYALYWQLVRLGIHCDVVAPSLVPTKAGDRVKTDRRDAAKLARCYRAGDLTPVWVPDAATEALRDLVRAREVAKQDQLRARHRVGKFLLRHGRQRPEDLRSWTLRHLRWLAQQRFDSPVLQAAYDEYRAEVEHVAARVRRLEQAIEQALPSLSATQQALVGALAALRGVQRVTATTLVTELGTLRRFATARQLMAYAGLVPREHSSGGSVRRGAITKTGNAHLRRVLVEAGWAYRHHPTTTGVLRQRQADQPAAVVAVAAKAQHRLCKRYRTLVAKGKAPLYVATLVARELLGFVWAIGQLVELAAPESARAA

SEQ ID NO: 360094 - protein, 357 aa, unidentified
MLSSNVKYIGLDVHKEAIAIAVVNGAGRLVMESIVETKSSTVLDFLHGLRGELHVTLEEGTWAAWLYDVLKPHVREIVVCNPRRNALLKEGSKSDKIDARKLAELLRAGLLRAVYHGENGLQTLRELARCYLTISKDLKRVKNRLKALYHSWGICCAGKQVYAVRHREQWLSKIAQVGVHRRAELFYQQLDGLLVLRHAVYGELLAESRKHQAVKILRQVPSIGPLRSALLLALMQTPHRFRSKRQLWTYSGLAVVTHDSAQHRYVDGQLQRSKKPQQIRGLNQNHNHAMKEIFKGAALNASRCVGPLQDFYARLLAKGMKPDMARLTLARKIAAITLALWKKGGSFNAEHLKSQAA

SEQ ID NO: 360095 - protein, 440 aa, unidentified
MSKRAYRATRVNDVNWDQLAQGKDGLDITLGVDVGKFSLWAVCRWADGRFERPWRVQNPVEIPTLLALLKRVSAGRKLVVAMESSGTYGDALRQALADNQIELQRVGGKAAHDYAEVFDGVPSQHDGKDAAVVAELAALGKAMPWEYQPADPWEQELAYWVEWMVAHRQMLTIWQGRLEGLLARHWPEATQVLKLSSGTLLRVLKRYGTPQALAADGEAAKLLARWGGAFLAPEKIEKLLAGARASVGVRLGEWQQRQIQNYAQQALAARQEANRAGRRLRSLAEGHAVLQAQGKVVGVPTACVLWASTGDPRKYHAAGAYRKAMGLNLVERSSGTYQGKLRISKRGSPRTRQWLYFAVLRLVQKCGVRSWYEAKKDHDEADARRALVAVMRKLAVALYYVGVHNEEFQPRRLFGRIRRHRGSPGEQKSRTKRRSRAEQI

SEQ ID NO: 360096 - protein, 414 aa, unidentified
MEPVYRSIAGIDVHKKMLAIVIRQERNGQVCYTKRKFGTTRSEVEHVAAWLQHERVGEVVMESTAQYWRPVWYGLESHFRLHLTHPLKTRAPRGRKRDFRDAQRLADRWSSGDLNESFIPGAEERSWRWLTRTRVQIKRKLGVIRSQVEGLLEQGGIKLAAVASDLFGASGWAMLSQIAQGETDATVLAAQARGSLRKKAEQLKEALAGELEPVYRLLLRQQMDQVELLWRQILEINTALAAAMQEHTAALHRLSQIPGVDVYAAQELLAEIGPTAATFASAEQFASWAGVCPGSQESAGICYSHRSPKGNRYLRRLLCQIAWAAIHTKDTFFAGLFGRLKPRIEGKGAAWAVAHRIAKVIWLVLHNGADYQEKGTAVLNPRTLTRKLRRLLREFAKAGIDARELLSQTASAPA

SEQ ID NO: 360097 - protein, 387 aa, unidentified
MIYVGIDIAKQKHFAAAMTADGEVLVPPFSFTNDAEGFNTFLSKIKSFDKSDTLIGLESTAHYGENLVCYLFSLGYRISVINPIQTSTLRKTNIRKTKTDKVDCLLIIKSMIVNKTRLYSKSDIDSLRLKSLCRFREKIKKSKAKLKIQLVTYVDVIFPELQYFFKSGIHINTCYMLLMKHSAPDEIAALHLTYLVNLLRKASHGRFGKEEAIALKSLAKSSVGTGNTAVSIQITQSIKQIELLEQQMNIVDENIKSIMLELDSVIMTIPGIGFLNGAMILGEIGDISRFSNPSKLLAYAGLDPTVNQSGKFTAKSTKMSKRGSKLLRYALINAAWNVSLNNKTFDDYYKLKRSQGNNHYAALGHVAHKLVRIIFKILKDNVAFNLD

SEQ ID NO: 360098 - protein, 370 aa, unidentified
MGKSVLYVGLDVHKMSMDVAIAEAGPGAEVRFYGQIGGDLDSLDRVIRKLRATGAQLQFAYEAGPCGYVVYRHLTAQGWPCLVAAPSLIPRRPGDRIKCDRRDALSLARLFRAGELTAVKVPDADDEAMRDLTRAREDAVSVERRAKQRTGALLLRHGRRYPGKTTWGRGHWRWLLQQVMDHPAQQIVLQEYLDAVREASARVQRLTGQIQELLPQWRRAPYVAAYQALRGVSLIVAATMVAELGDLSRFNNPKELMAYLGLVPSEHSSGASVRRGRITKTGNGHARRVLVEAAWAYRLRARVTRPVLQRQEGLSTGVKEIAWKAQLRLCARYRRLLARGKAKNTVATAIARELAAYIWAIGQAVEPLTA

SEQ ID NO: 360099 - protein, 341 aa, unidentified
MEHTTIAVDLAKSVFQVAVSHRPGHLDEERRLSRDRFLAFFAQRPPATIVLEACGSAHYWARQLQPLGHVVRLLPAHDVRPYVRRNKTDRTDAKGLLEANRNEGIHPVPVKTIEHQAIASLHRLRSTWLATRTARLNTLRGLLREFGIFIPTGSQRVVPRVRALHEDPAVPPLLHATLAAACDEIERLEMNIRAVERQLAALADDMPDVQLLQTVPGVGLITATALVALVPDIRRFPSGRHFASFLGLTPREDSSALRRRLGAISKQGDVYVRMLLTHGARSLVWHAKAAAQPTSLQQWALQTEQRRGRNVAAVAMANKLARIVWAVWVQQRPFAADHRRG

SEQ ID NO: 360100 - protein, 372 aa, unidentified
MEKNTRYVGLDVHAETIAAAIGEGKGKVRNLGQFANRPEAVRRFIEKLGEPQSLRVCYEAGPTGYALYWQLTKMGIACDVVAPSLIPRKPGEKIKTDRRDAEKLAECHQSGTLTSVWVPDAAHEALRDLVRARGAAKKDESRAKHRLVKLLLRHGLRHPTNCRAWTHPWWDWVQELEFKFEPQKVTLRDCIAEVLHQRERLDRLDLAIDRAIEAAPPEKKAVVEALQALRGVAKLTAVTIVTEVGTFQRFRRATELMGYTGLVPSEYSSGSRQAKGGITRTGNAHLRHVLGEAAWHSRHRPWLNVRMKKILPTLPPGVAEIAWKAQERLHRKFTKLTFHRKPAGKVATAVAREFVGFIWAIGRLTEDQARAA

SEQ ID NO: 360101 - protein, 373 aa, unidentified
MNSTQNKKIEQVKETTMIVGIDVGSEKHYFRAFHWRGIELTRKPVAFSNSMEGFNSFCNLVVELIQKNELKEALVGIEPTDHYWFDLGQFMSEKNIKFVMVNPHHVHKTKELDDNSPSKNDRKDPRVIAGLVRDGWYFYSYMPTGVYAELWNASNRQFVLIEEQTRAKNRLQKWVAVYFPEYKGIYTHIDAKGGLLVLKQAPTLEEIVRLGVEGIIKIWKDAKLRGNGHKKAMLILNAAMKSIGLKAGLTEARMEIQDLIEDYELQTKRLERVNDLIKELCQQVRYADKLLEIKGIGITTVAGFIAEVGDITRFDSTKELQKLAGLELVADSSGKHNGKVSDIYFLRQRYRWWERMKNSKKYTDIIPPGKRIH

SEQ ID NO: 360102 - protein, 331 aa, unidentified
MQAGEGIIGIDISKDSFDVVLRSVRGETHRVFANNQKGFVAMVIWLEKQPERIERICMEATGSYWEGLAEHLYQGGYTVSVVNPYQIKRYGDHLLNRNKTDKADARLIAEFCEKDLERLRVWKPYPAEIKALRSMERRLDELQTMKQQEQNRLKSGVSDPVVIESLEENLKHLEEQIKALKEKIEDHMEQHPELKTKQRLLTSIPGIGKQTANKLIAEIRAIEDFASASQLAAYAGLAPKQFRSGSSVYKQTRISKQGRVELRNCLYMPAVVAADHNPIVIDLKKRMLASGHAKMEVIVAAMKKLLHLVYGVLKSGKPFDPDYGKQLCFSS

SEQ ID NO: 360103 - protein, 266 aa, unidentified
MEQANTIGLDIAKQVFQLHGADAAGHVLFRKRISRRKLLAFLAVQTPCVVAMEACAGAHYWAREIGKLGHTVRLIPPAYVKPFVKRQKNDVADAEAICEAAQRPSMRFVPVKSEEQQANGIVFRARDLLVRQRTQCINALRGHLLEPIVSTAITALVPAPQNFPAGRAFAAWLGLTPLEKSTGGKQRLGAVSKRGERTIRRLLIIGASAVVQQASRRGAPKGSWLAQMLARKPKMLVTVALANKMARIVWALLVKGGIYRVPVAAV

SEQ ID NO: 360104 - protein, 350 aa, unidentified
MTNCTRWVGIDLHRRRSQIAIVDEHGELTLSRRIVNDPETFKELLGDPDGTHVALEATYGWEWLADLLEEAGYEVHLAHPLRVRAIAAARVKTDAVDAPTLAHLLRAGLLPEAYIAPPELRDLRDLLRHRATLVHLRTSIKNRVHALLARQGILPDHTDLFGTAGREFLAAVELPEGSRRRLDSLLSLIGDFDREIVATTGEIDQRAKTDERVKLLCQIRGIGRYTAMLIIAEVGEVKRFPTARHLCAWAGLTPTVRSSDGKARLGHISHQGSTILRWALTEAAQHTPTGGGPLRATFERIAKRRGRKIAKVAIAREILTLAYYGLRDGEIRCLARRSRASAKEKLAAAA

SEQ ID NO: 360105 - protein, 325 aa, unidentified
MSITVGIDVSKLKFDICILKSDGTKSHAEFDNKKSGFVKMYKHLKNECDKHFALEATGIYGENLCAYLYMKKQSVFLLNPVQTNRYFQCMMRRTKTDKCDAINIAMFLKHHKDELTPWKPRSKTFNTIKNLYHCLQDIGEDRKRVLGRIEACTHTDQDGRTQALRHYKKQEKFYNVQKESILKQLRLLVENDPEVKAQYDLLISIPGVGELTSFGLLGMLPDITRFKCAKQLAAFAGLNPAVRESGTSVKGRGSISKTGSKNLRTVLYMPALVCKKCCKPMFKFSERLLEKGKKPKVAVVAVMHKMLRIIFAVLRKKEVFNVDML

SEQ ID NO: 360106 - protein, 353 aa, unidentified
MSSLTDLREVVDVVIGVDTHVHTHSAAAVDTRTGGVLDEITVDATAEGYTELVEFADEHAALRAWAIEGTGGHGAGLTRHLERGEEVVIELDRPERAKRRHGAKSDPLDAIRAAREALSRPRLGGPRSGGDRQALSVLLAARRSAVIAAADAQRQVFSLVIAAPEQIRERFRGQKLPAMLRTAASLRVHASWDVETTTTVTVLRSLARRAQSLTEEAGEHEKAIGAIVRSWRPDLLAQLGVGPIVAATVLCAWSHPGRIHSEAAFAMLAGVAPIPANSGQVTNRHRLNRYGDRQLNRALHTIVLSRIRYDQTTRDYAARRTTEGKTTREIKRCLKRYIARDLFRLLEHRPIRA

SEQ ID NO: 360107 - protein, 343 aa, unidentified
MEYYVGIDVSLKESHLCVVDSKGKIVRESKVASDPEALAHFITEIGFPITRVGLEAGPLSQWLREGLISAGIEVVLLETRHVKAALSAMTVKTDRKDARGIAQLLRMGWYRPVHGKSVDSQEVRALLVGRKLLQAKLLDVELSIRGILRGFGLKVGEVSRGRFDARVRELADGHAMLEAVIGAMLQARGALWNEFTRLHREMLKIARADNVCRRLMSAPGIGALVAITYRSAVDDPCRFGKSRTVGAYFGLTPKKYQSGETDIDGGVSRVGDAMVRTALFEAAHIMLTRATRFSTLKRWAIGVAKRRGMKRAKVALARKFAVVLHRMWTDATEFSWGKDAAAA

SEQ ID NO: 360108 - protein, 343 aa, unidentified
MAYCNLVAIDLAKNTFQAAQFKGNKLMSNKSVNRQTLLELLVKAKPSVVAMEACASAQHFARTAQSFGHDVILLDPLFVKAFRQGQKTDANDAIAIAVASRVPNVRSCKILTIEEQALQSLSKVRALADKQKIQLSNQIRGLLLEFGIVINQSEAAFKAAIPDILEDAENTLPLELKHALALSYSLYKQQCDNKVELQKQIERIAKQNDGCQRLMALEGVGPITAIELLSFLGNTTQFNDGRSAAACAGVTPLQHSTGGKAKIGRIPKRRGGALRRNLFLGARSVVSKLKNREATTEKERWIKNLLIRKGVKCAAIALANKTMRTAYVLLKNGTSYEARLLTA

SEQ ID NO: 360109 - protein, 338 aa, unidentified
MDKITTIGLDLAKNLFHVVCCDEHGKVVRKKMLRRSKVLGYFSNLSQCLVGMEACASAHHWARALEALGHEVKLISPQHVKPYVRGNKNDYNDALAIAEAVMRPEMRFVEIKTEAQQDIQALHRLRERRVQERTGLCNQLRGLLAEFGLILPKGISAVRRRIPALLEDAENGLSDLFRRLLAQSYQQLLELDAHIDVYGEELKRYSAQSEACQRLQTIPGFGPVVASAFASHVATGESYRRGRDVSASIGLVPRQHSSGGKQVLLGISKRGDRYLRCLMIQGARAVVYRADRKDDPLSCWINRIRDRRGVNRAIVALANKMARMGWAILRNRTVYQAA

SEQ ID NO: 360110 - protein, 313 aa, unidentified
MAMETSDFIIGIDVAKAELVVHFQSHGTQMSLSNTKPEIKRWLKQQPANTALCVEATNVYHLDVVEMAHEKGFKVYVVDGFQLSNYRKGIGGRSKTDASDAALLGRYLERESRDLRPWAPPPAVYGKLQSLLRRRAALVTMRTALSQSWGNEQLLKAAFKSFTQQMDKLDLLVQKKLKELLKEAGLLEQVARCQAIEGIGFLTATALVMAFIRGEFKNSDAFIAFLGMDLRVSDSGQKTGLRRLTKRGCPEIRRLLHNASMSASRSAAWKETYEHYRNKGKATTEALVILSRKLARVAFALMKKKEEYVSRTA

SEQ ID NO: 360111 - protein, 336 aa, unidentified
MYNFIGIDVAKRTLQIYIEVNDSSVEINNEEKSLKTFYKTLKKLYKNDKPFVFIYEPTANYSVALTKFCAENNVYAYMVNTFVSSNFSKSLGNRNKTDISDAQMLFNMQMMINKKDIAVPVKNPTVDALRELVGYYRFLQKQKVAFKNYNEAVTTNKSSNYILKDVKKNIARIDKEQQELINKAKAIITNDEVLKKAFAHIISIKGVGTLVGIFLLHLFLNYPNANRQQITALLGLDPITIESGTSIKKRSRISKRGLSMYRGVIFYSILSTVRFNEEFRTYYEHLKDRKKHTTLAQIAVMRKLILLAHSLYKNNVDYNPEQFKLKKVAQKEICVA

SEQ ID NO: 360112 - protein, 418 aa, unidentified
MKKDNNSAKKSERTVKRAKSRAPVQRDAKEVLAEVLGKLTGKLDAPAVSTRAKENGRGNTVGPNRDRLTVGVDLGDRWSQYCILGLEGETLAEGQLRTTKEDVGEFFQALTAARVVIEVGTHSAWVQDVITELGHEVLVANPRLMEGSKRRKRKNDRIDANKLARLGRVDPQSLYPIRHRSREVRQDLVVLRARDALVSVRTELINTTRGLVKSMGRRLPRCSSPSFAEKAQDAIPVEVREALLPLVQLVETVNDYIARYDQKIEELGREKYGHTTLLRQVKGVGPITSLAYVLTLEDPQRFSSSREVGPYLGLVPKQEDSGDSQPQLGISKAGDRMLRRLLVGSSQYMLGAFGPDTDLRRYGLRLCERGGKNAKKRAVVAVARKLAVLLHHLWVTGDVYEPLHRSGAGTGTAHAAAA

SEQ ID NO: 360113 - protein, 354 aa, unidentified
MNTYIGVDLHKDYSFFTAINRDGKIMAPQRRIVNREGDILEYLSLFKNPKLTLEATLNWYWLVDLLQDYNYDVTLAHPKKAKAIASAKIKSDKISSKILADLLRSDLIPACYIPDREKRTLRDFLRHRAVLVSIRTSLKNRIHAVLRNFNFHCPYSNLFGKSGRAWLKQVPLQTYYKTITDNFLSLINAVEPKISEVTKIIKELAEDNPQARLVDEIPGIDYYSALLIVLEIGDIKRFPDHRHFCSYIGIVPSSHRSGDIDYTGKITKEGNSWLRWIIIEAAQTSQSFLNNPYHSLFLKISNKKGAAIAKVAVARKIATAIYYMLSKNQHFKLPKSLRSQVSGVSPVLAIAQRG

SEQ ID NO: 360114 - protein, 337 aa, unidentified
MQKRYLGIDVSKLSFDLSLLIVKKGVKQAMLTTKFENNKDGLKAFKKYLVDNGVGFTENSLLVIENTGIYHRLLWQFCSKQGLPIYIGNAADLKWSFGIARTKNDKVDSIRLCDYAYKNREDLKPTPALNKNFIILKDLLSNRSKLLRQLNGIRQTIKELKTSNDKGTQKLMDNMNKAAIEGSKISIKLIEVEMRKMIKADAEVLANYELMVSVPGIGEITAIFILCCTNNFAIKISGKQLASYAGVVPCEHSSGTSVKGRNKVSHMANKELKSILTMGALSAVQAYPEFGDYYERKKKEGKHHNKILNAIKNKMLLRVMSVVNSGTSYVNNYKKAS

SEQ ID NO: 360115 - protein, 417 aa, unidentified
MNPFSEYAAIIGIDWADRKHDLCLKTPDDDSLEYSVLEHKPEAIEDWANELRVRFEGKPVAICIESRKVPLIHALLKYDFLVLFPVNPQTLCRYRRALTPSRAKDDPSDARLLLDLVFRHPDQFLPWQPQSAQMRTLAQLVEHRRTLVADRVRTTNRLTACLKLYFPQALDWFEDKATLVFCEFLEKWPTLQAAKRARKGTLERFFHEHNSRYAEVIEKRIQAIKSAIPLTTDPGVIEPNQWMVVALVHQLALLLGHIDHFDEKIAACFDDFKDADLFRNLPGAGKQLAPRLLVAFGEDRSRFASAQALCCYAGIAPVTERSGNKSWVHWRYSCPKFLRQSFIEWTNQTVRFSFWARAFYKAQREKGKTHQMAIRALAFKWIRILWRCWQDRKPYDEATYLMALQKQGSPLVKELAS

SEQ ID NO: 360116 - protein, 370 aa, unidentified
MKSIVYIGADVHKKSYSLCAIDGDTGEILGETKISPDVKLIEKFINNAMKKAQKDADVLVGYEAGCLGYSLYWQLKEKGIACDILAPSTMHRSAKNKVVKNDKRDAQMIATNLANKSYKSVYVPNDHDVEVKEYIRMMNDFKGESKKVKQHINAFVLRLGYRYEGKSRWIPSHIKWLKELKLDPMYREILDEYLSQLELLETKIGRFQNKLEELSQEEPYKEKIGELRCLKSIDTTAAMTLHAEISDFNRFPTANAFSSYCGLTPGEDSSGDKNKRLSITKQGNAVVRETLVECAQVLVRGTVGKKGKKVISKQKGQDVKVIDYADKAVIRLQKKYHRMILKGINRNIAITAIARELSCFVWGIETGHIN

SEQ ID NO: 360117 - protein, 363 aa, unidentified
MKAEKVKETRYVGIDLGKRSYEIAIVEKGRVKMSNGKTHAAGRQGLYRKLRPHDKVALEAGNLAFIIAKEIEAAAGCRVYVLNPSHLPLIYKSMKKTDKEDSLKLAHILEDFREDRLPVVPVPSDKEMQRRKLLASYRRAQQSRNREINRLHGLFLSQGITTIRKGNLSSGEAREEAIRVLTGIELAEAKYLVQCLDLHEQRIKTLDRQMKEESAGDEVIERLQSVPGVGPTVAFAFVSHIGADRFENASQVSNYLGLVPRVYMSGETVRYGRITKRGNGYLRALLVQGAWALTRAKKGGKLKERYEYMTIEKSISKKKAIVAVARRMAELLYTLMRDGTKYEARPFIREKKGEEIARLAMSA

SEQ ID NO: 360118 - protein, 355 aa, unidentified
MEYGAIDLHKKESQIRIVTETGEIIDRRIVTTRDRFTATFWGRPRMRILLEASTESEWVAQHLETLDHEVIVADPNYAPMYGQRTRRVKTDRRDVAALTEACQRGIYRMAHRRSARQHAVQSQLNVRQELVQARTRAISLARAITRAAGFRVHSGRTETFLTRLDALDLPIPMKATLVPLRSVIEVLDDELASADDQFAALVANDAVVKRLTTLPSIGPITASAYVAALDDVSRFAGAGQVTSYLGLVPREYSSGERQYRGRILRSAHPHVQSLLVQAAWRLSRSSSPATAGLRTWAQAITRRRGKKVAMVALARRLARILFAMWRDETEYHANRIRATQSDPAAITDRQARAAM

SEQ ID NO: 360119 - protein, 366 aa, unidentified
MAKGTRNTALTYVGLDVHRDTISAAVLDGSHDRIEVQRLAHDDVSVRRFVDSFGDRARIRACYEAGPTGYELQRLLTSLGVSCSVIAPSMIPVAPGDKVKTDKRDAKRLARLLRADELVAIRVPIPAEEAVRDLCRARAALVADRRRARQRVVSFLLRHGQVYRAGSSWTQRHREWLDSRRFDDAALSATYQRYLAVATIRAADVAAVEDELDVWFRAPIFADPVARLSAYRGIDRLGALHLATEVCDWRRFATAPQFMAFCGLVPCEHSSGRREWRGSLTRAGNVHVRTQLVESAWAYRYPPRCNRALIARQDGLEPAVIARAWKAQLRLSRRFRQLDARKAVRGVVCAAVARELAGFVWTEMTQ

SEQ ID NO: 360120 - protein, 339 aa, unidentified
MKLYTGIDLHSSNSYVAIIDGDGRRVFQKKLANDATLLISALAPHKSEIEGVVVESTYNWYWLVDALMEEGYKAHLANPAEIKKYTGLKYADDRHDAFWLAEMLRLSILPEGYIYPKEDRAIRDLLRKRSHLVRLRSSLIISLQNIISRNNGFRPNVNDIKARREDRVSQYLTDNEDINLAGRVSKESIDFLSRQIASIEGVVEKKLELCAPYANLLTMPGIGKILGLTIMLETGPISRFPKVGNFASYCRKVSTKWLSNNKKKGKGNKKSGNKYLAWAFSEAAELARRYHPEPKAYYDRKKSRTNRMVAHSALAHKLARAAYFIMRDNVPFSPERVFV

SEQ ID NO: 360121 - protein, 356 aa, unidentified
MSHEVKYIGMDVHKEAMVIAVLNGSGKLIMETIVETKASSILQFIHGLRGELHVTWEEGTWAAWLYDLLQPQVHEVVVCNPRRNALLKEGSKSDKVDARKLADLLRTGMLRPVYHGENGLRTLRELARSYQTIGKDLTRVMNRLKALYRGWGIPCGGTRVYAPRYREEWLSKIVQAGVRRRAELLYQQLDGLQALRRNLRPEFLAESRKHRAAKLLRQIPCIGPIRAARLIALMQTPHRFRSKRQLWTYSGLGVETHDSAQYRFVRGQLQRSKKPQQIRGLNRNHNHEMKEIFKSTATRASGGTGPFRDFYAALLTNGMKPEMARLTLARKIAAITLTLWKKEERFDAEQLKTQAA

SEQ ID NO: 360122 - protein, 381 aa, unidentified
MRSVALDLGVKKIAYCEVSAGEVVDRRMVNSLSSLEPTLGPGAKPARVAIEACREAWFVHATLTAWGNEVLVVDTTRSRKLGIGQHRRKNDRIDAEVMARAVESGGIPMAHVLSPHRQELRRQLSVRRTLVETRSQYVTTMRGLACALGARLPSCDTEQFSAKMRKAPLNPDVRTAIEPLLALLSPLQEQLAMVEQGLEELCALEPVVAQLRTVPGVGPIVAAQFVSVIDEAKRFRTAHEVESYLGLVPSEDTTGGKRRLGAITKHGNTYLRALLVQSAWSMFRQPGRTDPLQKWALAVAERRGKRIAIVALARRLAGVLWAMWRDDTVYDAELAMRSGVRGLRNAAQSIEFRAQALERAAAKLRQHRARSAKITEVTSSN

SEQ ID NO: 360123 - protein, 337 aa, unidentified
MEQPTQYVGIDLHRRRSLIVRRNYAGETLDTVRIDNDPEALAAELAKAGEHPEVILEATYGYYWAADVIEACGGKLHLAHPLGNNWGNRRLKNDERDATDLVDLLRMGRLAEGWVAPPQLRELRELIRYRAKLVHLRTSCKAQVHSVLAKEGVVVPMTDLFGVAGRELLNHLQLAPAYRHRVDSLREFISHFDAEIAHLESEITPAFADDIGYHAIQAISGVGPVLAAVFVAEIGDIGRFGSAPRLCSWAGLTPTHHESDEKVRRGHITKMGSRLVRWAAVEAVAHHRGATALRAFQHRVEDRRGNKIARVAAARKLLTLVYYGLRDGEIRCLAQTG

SEQ ID NO: 360124 - protein, 346 aa, unidentified
MPIVGGLDIHRKQITFDYLDTETGQVQRGQISPADREHLRAWLARFAGRQDVAFAVEGCAGWRYVAEELAAAGIAAHLAEPADTAFARGRKRHAKTDRTDARHLRVLLAEGRLPECWIPPARILECRALLETYNDLRRERTAWAQRIHAVLFHQGAPALGEGALRTEKGVTALREVAAAHLSPAGQLQVATALEVIDALEARLHVVRHQLTDAARHLAGARALAARLYGVGPVTALALTCWLGGAGRFSSSRQAVRFAGLDITVHSSDRKGPPGRLSRQGPPVLRWAVYEAGKTHARTSAPDHRYYAQVKDRKNSKRACLSEARKILRQAHHILAELGDDALAPAA

SEQ ID NO: 360125 - protein, 405 aa, unidentified
MYKPVLSIDVSKSKSFAAAFLNNGEPYLKPFPFKHSPKDAGLLIRHLQSLEWETGVRPDVVLEATGNYSKPISGFFEKSGYNVVVLNPLQTHQQKAKSIRKVKTDSIDATRIAQVYYLYNCKANNPLPDCIADLRNLCRQYAALIKLYTETQLHMQNILDLVFPNYASVFTHICCKSSIRLLSEYSSASEFLSADRYHLVEIIKSSAGTHSLQWAEDKVDRLLTAARESLPNQQAQQSNARVLKDYIRILLTYQDVLADLRAQMILQASLSPVYPLLRSIPGVGELTAITILAEIGDVNMFPTSKQLVAFAGLDPSVFESGKFKASNNRISKRGSAYLRKALYQAVIVGITAHSEKPVNPALHAFYTKKITEGKAGKVAMIACCNKLLRIIYGVWRNGTPFINVQ

SEQ ID NO: 360126 - protein, 343 aa, unidentified
MKYIGLDLHKKSIFATVMGGDGKILSKVNLGSKREDLSFYLKAQGKNDDLSVAIEASYNWLYYYRILEDITPNIVVAHPLKTRIIGEARVKTDKIDSEALAYMLKADMLPKVYVPTKPAMENKMLLRSRISLVRIRTAIKNKIHAIVDKNRDSYPGLENLSDIFGKTGIFILSNTKIASPDYMILTNYLDLVADINKKIAIVEEEIDKRIAPDKDIELLKTIPGIGSFTAFLLKSEIDDIARFISKEKFTSYAGLIPSVHQSGNKSYTGKITKQGNKFIRWALTEAAQSSIRYSEYFRYYYNKIRAKQDANKATIAVARRMAEIAYVLLKEKRGYIEKPIIFS

SEQ ID NO: 360127 - protein, 420 aa, unidentified
MGMAVLLGEKTITEQRLHVAFELSASKWRLGLSDGKSVRQVVIEAGDVKALAVELEKARRRFGLEPRSKTVACYEAGRDGFWLHRWLASVGVENVIVEAASIQVDRRARRAKTDRLDVEALLRMLVRFAGGEQDVWRVVRVPSEAAEDLRRESRERERLKCEEVQHRNRIRGLLALHGVRLVVAKRFREAVTQVRRWNGEPLPAGLLAEILREFDRLEFIQAQLARLEKEHRNRVSPPKSAGKPAKKAKARKTTTTAAKETKTAEAGKAAEETKTADAVTVKIRRLMELRGVGIISATVLVHELFGWRTFRNRREVGAIAGLCGTPYQSGGPGREQGISKAGNPRVRRTMIELAWGWLHWQPASKLARSFYEYVGKGDEKTKKRFRKVAVVALARQLLVGLWHYLEHGVLPEGAVWRSVA

SEQ ID NO: 360128 - protein, 334 aa, unidentified
MARLGQEGRIQQRQIWHQGGVTLSIFAGIDVSKQHLQVGLAPGGENWEVTNDDTGIAAVVERLGKEAVSLVVVEATGGWELPVVAAAAAAGLPVVVCNPREVRDFARALKRLAKTDRLDAAVLAEYAQRVQPQVRPLVDAATQELQALVTRRRQLVGMLTAEKNRLGAAPPRICANIQANIDWLERCLAELNQDIEDTIRSSPMWRAKDRLLQSVPGVGPVLSMTLLASVPELGTLTRQQLAALVGVAPFNQDSGQFRGRRVIWGGRAAVRATLFMATVVAVRRNQVLQGFYARLRLAGKPPKLALTACMRKLLSILNAMARTNTPWQPRFIQA

SEQ ID NO: 360129 - protein, 351 aa, unidentified
MTKDKYVAMDVHSAITVIEVQDASGKVLNQTLMETKTEHLRDFFTGLSGTVHVTFEEGVQAAWLYDVIKPLVAELIVCNPRENRLMHTGNKSDKVDAHNLADLLRLGRLKSVYHGDGRTRDLKERVRSYDGLSRDCMRVMNRIKAIYRGRGINCKGTAVYREGVREEWVKKVKDPGATDRLDLLYKELDCLSGLRKEARKGLVKEVRRQSAFKVLMQVPTLGPIRIAYIIAIVSTPFRFRTKRQFWPYCGFSVVTSTSSDYELVQGKFRRSKKPIGTRGLNRNYNRNLKYVFKSAAVAAKSREPFKQYYDRLIERNVKPEIARVSLARKISAVTLAVWKKGEGFDANRIGA

SEQ ID NO: 360130 - protein, 406 aa, unidentified
MTVGIFVGIDWAEHHHDVAVVNAEGAVLAKFRIGDDVAGLSRLSRALAGLSSSPAGVQVALETDRGLLVAALVAAGYRVFSVNPKSVDRYRDRYSVSGAKSDPGDALVLAHLLRTDGVRHRSLAADSQAVAVIAVLSRAHQDAIHLRQREASRLRSLLREFFPAALTAFPAVATRSAMVVLGAAPTPQAAARLSCAELHKLLQSTGRRGVPVKAAERLRQIFTAEQLRHPAAVEDAMGCAVRTILTSLIAYDNAIKDLEAELEKHFEQHPHAEILHSLPGLGVVLGARMLSEFGDDPDRFTDPAARRCYAGTAPVTRASGKSRIVLMRRARNERLADACRWWAFNAIGKSEGADAYYRRRRAAGEPHEAALRRLANKLLGQLHHCLQHHQLYREDIAWPTQVDHAA

SEQ ID NO: 360131 - protein, 360 aa, unidentified
MSRQRTFAGLDVHARSVTVHAMDECTGEVWQQRLPSEPAQIWEWLQSLPQPVKATYEAGPTGFGLARFLRGRGIGCVVAAPSKLQRPAGNRVKTDARDAEHLCRLLRLDEIVEVIVPDIEQEAARDLVRAREDVRGDLMRARHRVSKLLLRHGIIYAGGKTWTGAHEHWLHMQRFDAPARQLAFEDAVEAVLWTTRRRSRLDAAIEQMAANSSYTPLVRRLGCLRGISTLTGFGLAVEIGDWHRFSGSSIGAFLGLVPTEDSSGESRSQGSITKAGNTHARRLLVEAAWHHRRSYNPIRTMQKRWQLAPVPAQIRGHEGNRRLHQRWQTFQARHKKNTIAAVAIARELAGWSWSLAVMDD

SEQ ID NO: 360132 - protein, 421 aa, unidentified
MKGLKSKRVRAVKEDTLIVTVDIGVASNTGYCVTLGGRDIKPFKFDNSREGFEKFWHMIVASKNRFGCGDVMVGYESTGPYAEPLAHYLMDKPVTIVQVNPMHTKRMKEVHDNSPLKTDDKDPRVIADIIRLGRTLAVIVPEGDAAYLRRLNNARERHVGEQTALLNQLQQLVFVIFPEFKTVLKDIKGKTARYLLTRYTTPEKISTVPREALGEEMRKRSMGKFGNKDAELLIGLARNTIGIKEGLAGIAMDIRHILLQLEAEARFIAEIEAEMAVTLQRIPRSGRLLSIKGLGVVSVAGLIGEVGDFSKFRTRSEIMKLAGLDLYEVSSGKRKGQRRISKRGRSLLRKILYYASIQMVRKNGIMYDYYTRLTNRGMLRLKALVAVARKLLGIIHAIVRDDRDYVGAYHAPKRRLIQKAA

SEQ ID NO: 360133 - protein, 344 aa, unidentified
MQITTIGLDLAKSIFQVHGVDAAGQAVVRKSLRRSQMLPFFAKLPSCLVGIEACGTSHYWARELIKLGHEVRLMPAAYVKPYVKRGKTDAADAEAVCEAVTRPTMRFVPVKSPEQQAALSMHRTRDLLVKQRTQLINMIRGLLAEFGVDIPKGLERALLMARQIVDGKAPEVPMEAARIVTTLSQQALDIHVRLREIDRDLAVCLRGNDVARRLMTIPGIGPIGATALAASVTDPHQFRSGRQFAAWLGLTPLQKSSGGKERLGRISKMGDKYLRKLLIVGMTSLVRRAKYNPGKVDPRLADLLARKPTRVATVAMANKTARVIWAIMARGETYRTGHQPALAA

SEQ ID NO: 360134 - protein, 331 aa, unidentified
MSNIIGIDVSKASLDCAFLRDAEQKRTKRLRCENDVSCFASLLAWATARSGLPVQALAFIIEPTHVYHEQLVQFLHKAGATVYLVNPGRVRKFAEGIGILSKNDLVDADLLTRYGLIARNLIAWTPVAQELNDLRSLLNRLDVLERNLRSELNRQEKVGKAMVFHRLEQQSIARAVKRLKAEIITFKRAIRQCIKSTTVLQQHFDLLCTIPGVGAKTAWVMIVILGSRDFRSAPEVASFLGLNPIEKRSGNSQYRRPRLSKSGSGHYRQKLYFPAMVATRKNPDIKDLYERLLAADKTKMCALGAAMRKLVHICYGVVKNQTPYQAQTIPS

SEQ ID NO: 360135 - protein, 317 aa, unidentified
MNTPENQTLINIGVDVGKANLDIALHPSGQFFTIPNSTTHIRELVKILKGYTIERIVVEATGRHEHAMVQACSQAGLPIIVVNPISVRRYAQAIGVLAKTDRIDAQVIAKYAATLKPEFKPIPDKASQKIRDLLARRSQLMDMSTMEKNRLQILPKSLHSSINSLLKTLQTQIKNITRQIEQEVAKVDHWQSKTDILTSVPGVGKVMAFTLLSELPELGDLNRREIAALVGVAPINRDSGKLTGKRRIRGGRHRVRTVMFMAMMSGIQCNPVFKQFYERLKAQGKLPKVALIACMRKMIVMLNTMVKNQEPWREIAA

SEQ ID NO: 360136 - protein, 347 aa, unidentified
MSHKTTASVAHTIGIDTGKNTLHLIGLDDKGAIVLREKIARGRIAARLANVPRCLIGIEAGMATHYVARELIALGHDVKQVPPAYAKPFRQGHKNDFRDAHAIAEAVQRPSTRCVPVKTDDQLDLQALHRVRSRLVGQRTAVINQIRGFLLEHGIAVRQGLRFLRQQLPDIMAKRSDVLSPRMVRIIEDLSADWRHLDGRIEHVTEEIEVLAQGSEGCRQLMTVPGIGPLIASAMVAAIGNGAAFAKGRDFAAWLGLVPKQMSTGDRTILGRISKRGNRYLRTLITQGARVILLRPANWTKHSFGPWLTAAANRLHHNVLATALANKLARIAWTVLMQARSYEARVN

SEQ ID NO: 360137 - protein, 287 aa, unidentified
MRIIGCDFHPSWQQVAWLDAATGETGEQKLMNGNGEAERFYRSLAEPALVGVEACGNSQWCIELLQQLGHEVWIGDAAQIRASYVRKQKTDKRDAAHILRLLVEGRFPRLWMPSAEQRDVRQLLIHRHKLVEIRTRVKNGLQHLMLNRGVQKKSRLWSAAGQQALRELPLQGWAARRRADLLGLLKSLDQQVGELDRAVEEEAQRDKMAQLLRTQPGVGPITALAFVVTMGDVSRFQRGKQVASYLGLIPREHSSGGRQRLGGDQQAGQPVYAHPAGGSGAQRQPAG

SEQ ID NO: 360138 - protein, 411 aa, unidentified
MENPFSYDHFVGFDWARDHHHVVVVDRQGRVLQQLRFEHSIDGWKAFDELVARYPSSAIAIETSSGVVVEQLFQRQLAVYPVQPRAAKSYRERKAPSGVKDDLLDAWALADALRVDGQQWRRLRPDDPVVLELRLLCRDQVVLIEQQTSLINQLRQALVEYHPALLDAFDDWGSPVAWKFLTEFPTPAKLAKTKDKVRRTILKELGCCRPDTIAQRLAALARPHLVVSDAVVAAKSLFALSLAHQWLALESQLKVYRQRIADLFEKHPDHELFGSLPGAGEKLAPRLLAELGDEERDVTIVQAYAGTAPISFQSGQIHKVRFRQACNKHLRAAVHLWADLSRLRCAWANVYYQQKRREGKSHACALRCLGQRWLKILCKMRSTHARYEEALHTQNQLRHGSWVFQLLPAKG

SEQ ID NO: 360139 - protein, 340 aa, unidentified
MSEVSTVGIDLAKSVFQVYGADASGGVVFRKKLRRDQVLPFFSTLPRCVVAMEACASAHYWARELAEVGHDTRLIPPAYVKPFVKRQKNDMADAEAICEAAQRPTMRFVQGKSAEAQASAVVFRTRDLLVRQRTQLINALRGHLNEFGYIVRQGVGHVGKLVEIVADPASDLPAEACPVLAVIAQGLQALQEQIALLDREIASRAKADAVAKRLMTIPGVGPVTATALVALAPAASTFRRGRDFAAWLGLVPRQHSSGGKERLGRTTRMGERSLRRLLILGASSATKVAARKPDKASAWLAGMLARKPRMLVTVAFANKMARIVWALMAHGGTYRAPAAA

SEQ ID NO: 360140 - protein, 354 aa, unidentified
MLIIGLDYHPGFQQIAFVDTETGELQERRLQHREEAEKFYRDLAAQGVRVRVGMEASGHARWFERLLAELNFELWMGDAAEIRTKRVRKQKTDRQDAQLLLRLLLEDRFPRIWVPSWGNRDLRQLLWHRHRMVQARTRIMNQLQAVALNEGLRCKKRLWGEAGREQLESFPLAPWASRRRRDLLELLDRLNPTIAELSQAIEQEVEKSPEAQRLMTHPGVGSLTALAFVLIIGTAERFRSGKPIASYLGLVPAEESSGDRRRLGHITKQGNSLLRFLLVEAAQVTVRSSPEWRSRYFHLAMRRGRKIAKVAMARRLAIRLYWMWRKEWDYEQLTKFGSHAGQPGNRFGVPLNTE

SEQ ID NO: 360141 - protein, 523 aa, unidentified
MVTKTRKRKFAGSKKRFVGKPTGQIQERVQAVGPEHFGIVAVDCAKRRSKWMLCNFYGKVLVEPTSVEHTTGGLRAMTQSIAAACQAEGLTDTIVAVEMTGIYHKLVQRAFRKAGFDTRIVHPFASNHYRRPLHPDAKTDDHDLEAIFHAAVKGYGLTTLPVGEIYQSLQAVSRHRHNLVKQRARLMVQIRRLLHQTLPGFADLFEDDKLFRKSIGLAIVLKFSSAEAIRRAGVDGIARHLSQTKVRFQSRTIERIVAWATSAAEPAELAAMYTRQWQQLNDVRRLFDEQIAATEREMAGFLVKTPYVLLLSVTGINVVSAARLAGEAGPIEHYASARAINGRAGLYPSRYQSDEVDHADGSLVRQCNRQLRGAAMLVAENLIKCHPYYRGLSALWMQQKVDPRDRRCRIANRAMRMVYQLVGGRQLWRGKGVDREYLLAKLQEFHRVHETPLDQAIRDLHEAFAWLPKSAYAEEAKPLAELARKSRRGLQRIGDLMIPLLMRLGVGVPDEVKSNLSEARSSD

SEQ ID NO: 360142 - protein, 488 aa, unidentified
MVLPTAEELAELKKPKPLSKNKLKKIERKKKEQIKKQRRKNKKKKIKVESLKQISEDSAGLDIGISEIYACIPEGRTDKNVKIFDTFTSDLCKLADWLSDNDIKTVAMESTGVYWIPIFEILEKRGFDVNLINARQIKNLPGKKTDILDCQWIQQLHSYGLLNSSFRPDEQMSALRAFVRNREMLIKYRAIHIQHMQKSIEQMNIKLGTVIKDITGKTGMKIIRAITEGERDTVKLAQFRDPRCFSSEDQIAKSLEGNYKPEHLFTLKQAVSMYDFYTELIHDCEREIEQNYTAIKCYKDNLHELPPLPKKRNRNLKNKPSYDLRTHLYNLCGVDLTDIDGIDALTAQTVIGEIGLNMDKWKTVKHFTSWLGLCPYNKITGGKVIFSGTKKVRNRATLALRVAARSLYRSKSALGVFYRRMRAKHGSLKANLAAAHKMARIIYSMLKTKQAYKDPGEVYYLEKYRKRIVSNMKRQAASLGYELKKVEA

SEQ ID NO: 360143 - protein, 347 aa, unidentified
MLIIGCDYHPSMQQIAWVDTETGETAERKLEHSSGEARGFYAALVAPALIGVEATGNCQWFLDLMIELGHQVWVGDAAQIRASYVRKQKTDRRDAGHILRLLLEGRFPALWVPRGAERDSRQLIVHRHKRVQMCTRVKNQLHALALNQGLRLRWKLWSREGLEQLRALPLLPHAAARRADLLKQLEEMNAEIDRLDRAVRQEAAARPAAVRLMSHPGVGPVTALAFVLTIGDARRFEKSRQVASYLGLIPSEHSSGGKQRLGHISKQGNSLMRFLLVEAGQSAVRKDAELRRFYMRVQHRHSTGVAKVAVARKLALRLYWMLRRTMAQAQFQAGPYAGKPESFCGRS

SEQ ID NO: 360144 - protein, 341 aa, unidentified
MDIAVLGIDLGKNSCSVAGLDASGKVILRRRMQRKTIVGLASKLSPCVIAMEACCGAHHLGRVFSAQAHTVRLMSPEYVRPYVKAQKNDDRDAEAIAEAATRPTMRFVTLKSEEQLDMQTLHRARDQAVRERTSLMNQLRAVLLERGVIVPQGRAKLRLRVTELLRHGTGELSSRIQLLIEDMLTRWQGLDERIAVFDAEFTAEAKRDEAARRLTSIPGIGALNATALVAAVGDAETFARGRNLAAWLGLVPRQATTGGKPRLLGITKRGSKYLRKMLIQGARAALPTLSRSNTRLGQWLRGLLARAHSNTVVVALAAKMARIVWALLRYGTTFEPRAIAI

SEQ ID NO: 360145 - protein, 363 aa, unidentified
MERMHYIGADAHCASTDLAVVTQTGRLTGRDRCTTTIPDLARCIERVRRPRQVIVEEGPLADWIFRGLGALGETVVVCNPRRNALIAKAGDKDDAIDAEKLAQLARGGYLEPVHHPESTARMQLKRLVAAYHDRVRNRVRQANRIMAEFRQQGVFIHENAFAEPDKRPALLRRLPGSLLVRDTLAIYLTGYEAAVLQEEQLRRKLVQRARRQEPIRRFVALPGVRWIRAATFYAFVDAPFRFKTKQALWKYVGIGLERHQSGGPLQPAALRVTRGGNRILKDMILGAAKSAIASRKDRTFADMYGRWLDQGISPRNARRNVARSLAAILWSIWKTGATYRPERVGVATRSLAATLSDRVSSRF

SEQ ID NO: 360146 - protein, 416 aa, unidentified
MTFKVVRFICGGMDVHKNLIVATIGTTDRQTLITEYIQQSFSTFYSDLIRLKEWFISHDCYDVCMESTGKYWIPIYNVFETELNICLTHPKYVKAIKGKKTDKRDSKWICDLYKCDLVKHSFIPKKEIREMREIARYRCKLVYMRSSERNRYQNCLTVSNISLASAVSDPFGKTATNIMKELMQSEVIEDDKILKLIHKNCKEKDKILDSLQGYHIESDQRFKMDTVMNHIEYLDKQIQACEAELIKRAYPLRDYFQHITHIKGISALSAILIVSEIGTDMNQFESDKQLVNWAGLSPANNESANKKKSVRISKAGQYLKPLLVQCALSSIKDKNSYFGIKYCRIKKRRGHKKAIIAIARMMLVCIYHMILTGEEFNPCDYESLTNPKPKKEPIMTVESALQFLKDSNFDFSSIQL

SEQ ID NO: 360147 - protein, 357 aa, unidentified
MTNDKYVGLDVHQASTSIVVLDCNGKVISEAVVRTRADAIRDFIKGLSGTIHVTFEEGTQAAWLYEVIRRLVAELVVCDPRQNKVLAAGNKGDRIDAKKLAELLRAGMLKPVYHSNHDTKALKQLTHNYDSLVSDTTRVMSRIKAVFRGQGIPCSGRDVYYKLNREQWVSRLGEPSLRIRVEFLFDELEPLKALRRAAKRVMLKEARQHKAFKILSEVPTLGPIRIAQIIAAVSTPHRFRTRRQFWAYCGFAVVTRSTDDYRFDENGPLRRSRPPATRGLNRNFNRRLKHVFKSAALQGAGKEPFKSYYQARVAAGMRPEMARLTLARKIANITLTLWKNGGQFNEHKLSERHDRTT

SEQ ID NO: 360148 - protein, 355 aa, unidentified
MNKVNSNFEGQTIFVGMDIHKSSWNLGIHLGDMFIRNVHQKPNPHIMASYLKQHYPGAQYKAAYEAGKFGFWIQRQLTALGIECLVVNPADIPKSQKDSLQKTDPRDARNLALRLQSGVLHGIHIPDEQQEADRVFFRHRKRILKDLNRCKNRIKGLLAFTGIDIPEQYDNASWSHNFINWLKALDCKQTSRRRALDYMIAQMEYLRKELLSLSNELRKMMREKRYNKNYYLLRTIPGIGPLTAASILVEIGDVKRFETFYHLNSFVGLLPMEHSSGQSENKLSLTVRKHRQLRSDLVESAWTARRTDPAMALYFQEQIKRKDSKIVIIKIARKLLNRIRFVLINQQPYEFGIVK

SEQ ID NO: 360149 - protein, 308 aa, unidentified
MIMQNYVGCDISKQWLDFFDEASSRYQRIDNQADAIAAYVAGLQPGRDFVVMEATGVHDRLLRHALAKAGIAFSRHNPAHTHHYAKSTARRAKTDRLDARMLSGYGRRYHPDAEPAPSEEGERLQSLARLRDQLVEIRAKLKKQLSEAFDETVISEFEELIATFTTRIKALESRIAEVIRQTEDTARDNALMVSVPGVSRVTAFSLLANLPELGLRSPKSIAALAGLAPFDNKSGKLNRRSQIQGGRSRVRRALYMAALGAIRACERFRVFYSAIAARSGSKKLAIIAVARKLLVVLNAIIRDKKAFA

SEQ ID NO: 360150 - protein, 402 aa, unidentified
MNAVGIDVSKGKSMVAIMRPFGEIVSAPFEIKHTASDIHSLVELINSVEGESRIVMEHTGRYYEVLAHQLLEANLFVSAINPKLIKDFDNDSLRKVKSDKADAVKIARYALDKWQNLKQYNVMDELRNQLKTMNRQFGFYIKHKTAMKNNLIGILDQTYPGVNTYFDSPARSDGSQKWVDFASTYWHVDCVRKMSLNSFIDHYQNWCKRKKYNFSQSKAEEIYGKAKELVPVLSKDAITKLIIKQAVDQLNSASTTVESLRTLMNETASKLPEYPVVMAMKGVGTSLGPQLIAEIGDVSRFTHKSAITAFAGVDPGVNESGSYEQKSVPTSKRGSSDLRKTLFQVMDVLIKTHPQDDPVYQFLDKKRAQGKPYYVYMTAGANKFLRIYYGRVKEYLSSLPES

SEQ ID NO: 360151 - protein, 459 aa, unidentified
MGNARKGKIPAQLVEDEDYQLRYERVAGIDIAKAKADVCTRLPPPRAGGRRASRVEEVPATAREILALAGRLLADGVELAVMESTSDYWRIWFYLLEGAGLRVQLVNPRHARQLAGRPKTDRLDAQWIARLAEMGLLRPSFVPPPEIRALRDLTRTRLQLVRDRTREWQRLEKLLEGALVKLSSVVHSLARTKTARVIVEAIAGGESDPDALAGLAAGRVRGGRGAIREALEGMQVRGHHCTLIRVHLDHIALLDRSVAAVEDEIEAALDAIPAAWGADATGETGPGAGRGADPAVLPAAQRLAEIPGVSPALARAIIAETGLDMSVFPTAAHLASWAGLAPVASQSGPRTRKPGKGHGDAYLKGYCTQAATGAAGTGTFLGERIGRLSRRLGGNRARCAVARSILVIIWHLLSDPGARFADLGPGWHDSRAGRDRKIRAHVRQLQALGLNVELSDATA

SEQ ID NO: 360152 - protein, 386 aa, unidentified
MQKLNDLSRSLIALEPAGTLIAVIEMSLSSWLVAGIVPGVERQPLKKLAVDESALLKLLHRWREEAEKAGRRIERIVVAFEAGRDGFWLARWLKAHSIEAHVIHAASVAVSREHRRAKTDRLDTELLKRAFLGWLRGERDHCKVVAIPTLKDEDAKRPNRERESLVGEQSRIVNRMKAALIRLGIRGFNPKLKRAAGRLDSLRTPEGEPIPPNTLAELRRDMERRRLVSNQIRQIEEARLERFEQAPNDGPHAMVRLLARVVGVGIETADMLVHEVMSRNMRDRRAIARYAGLTGSPDESGRKRREKGLARSGNGRVRRGMVQLAWRFLTYQKESALAQWFRARTENALGARKPMIVALARKLLIALWRLVWQGVVPDGVVLRPAQ

SEQ ID NO: 360153 - protein, 415 aa, unidentified
MLILGCDVGSETHYLRAIDTRGRELSKSDFSFSNNADGFSKAKEWAVKIAAEYDKKQIVLGLEPTGHYWFCLATWMISNGISVVQVNPYAVKQTKELEDNSQLKDDTKDPKLIANLVKDGNFGMPYLPEQLYADLRRLSMFRDQLNEDRIRSINRLHRELKIYFPEYKEALGKTEGTFSLELLKQAPFPDDLAALKEDGIRQIWHNAKLRGRGYSRAGEILEYAKASVGIREGKETGKLVVQWFVQKILELDAELALIETQINQKCLEIPHTDKVLEICGIGENTLSSMVAEMGDISRFDDVKEIQKLSGLGLVASSSGKHKGETKISHRGRKRLRYWLFQAAKSAVAHAEEFKKLHVYYTTREQNPLKKMQSLIAIACKLLRIIFTILKKGIKYDPRKMLKDIRRESRQESVAA

SEQ ID NO: 360154 - protein, 313 aa, unidentified
MAQLVPHVGIDCSDARLEVHVHPQEIGFSLGNDPAGWCELERRLDALGARIVALEASGGCERGICRFLVERSYSVRLLDPYRVRQFARAAGQLAKNDRIDAAVIARFVATLPTRPLVRRKELESLAELVTARSQLVAQLTVVRNQARRRENGVLRRLDTRRAKAAEADIATLDRLIAQAVDAHAGLKAKNAILRSMKGVGPVLAHTLLALLPELGQLTRKQIAALVGLAPVEDQSGKRQGGRAIKGGRPAIRAPLFMAAMIAGTHNPLIKPFRERLRAAGKKPKVAIVAVMRKMITTLNAMIRDQRKWSPANA

SEQ ID NO: 360155 - protein, 293 aa, unidentified
MSSDMARTGMKGRPMFFGVDVSKRWLEVAAAGKEETTPFPNDTAGCDAILEKVRGATLVVMEATGRYEARLATHLAAQRIPIAVVNPRQTRDFARSVGKLAKTDGVDARVLADYARRIQPAETVLKEEEVLELEALMMRRRQLVDNRTAELNRREHATGAVLKSIDQHIVWLNARIKETDSDLGKRLRDSPLWNARVELLKTAPGVGSVVARTLVATVPELGFLTGKKISALVGVAPFNDDSGTLTGPRRIHGGARSRGWCCTWQPSQPSGAHRSSRSSMDAWYAVEKRRRWR

SEQ ID NO: 360156 - protein, 401 aa, unidentified
MHGLPDRTYAVYLGLDVGKDTHHATALDTSGKRLHDKALPQDEARLRALYEQLSTVGPVLVVVDQPASIGALPVAVARAAGVDVAYLPGLAMRRIADLHPGAAKTDARDAFVIADAARTMPHTLRRVDMNDDALADLEVIVGFDDDLAGEVTRVTNRLHGLLTQIHPALERALGPRLHHKAVLELLARFGGPEGLRTAGRRRLTSVAKPRAPRSYERIIDAIMAALDEQAVTVPGTRAAELVIPKLATQLAGLLEQRATVAAQVEEILDAHPLSQVLTSMPGVGVRTAARILLEVGDGTAFPTPGHLAAYAGLAPVTRRSGSSIRGEHPSRSGNKNLKRAFFLSAFAALHDPTSRAYYDRKRAQGKKHNAALICLARRRCDVIYAMLRDGTLYQAPATAAA

SEQ ID NO: 360157 - protein, 366 aa, unidentified
MKIIHWIGIDDHADKWTIAQFKGEEEKPAKEFELVPDDAGYRKLIKFLKELEGEVRIVYEAGPCGYELYRRLKKAKLQCEVAAPSLTPRKPGERVKTNRRDASKLGRYLRSGMLTLIAVPDERRESLRDLIRARHTVQKDVVSIRNQILKFLLRYGHRYRQGKTGWTERFWAWVGQIKLEGEHSQFVLNEMIRAHRQRLEQRARYDDAIEAAASKPEYAAYVAALSVLRGIDRLSAMTILSELGGLRRFATAPQLMGAIGLVPSESSTGDTTSRFSITKTGNAHVRHIAVEAAWQYQRRITTGPTIKRRRKDQPQALVDIAEKCDLRLNRKFHRMTSRGKRSTVAAVAVARELMGFIWAIGQIVHP

SEQ ID NO: 360158 - protein, 412 aa, unidentified
MARSIGLDACRDFCEVAVADGGRARSAGHVAARPEDLKVFAESLAPDDRVVLEATGNALAIARILAPHVAEVVLAHAQQVRAISHARVKTDKVDARVLADLLAADLIPPVWVGDERVRMLRRLVSRRRGLVKRRTQVKNEVSAVLLRNLKGRPPASDPFGRKGRIWLAAQELPADERLTVDAALRQLDFLGAELAEIDRLVAVQAQGDEDVRRLLTVPGVDVTTAVTLIAVIGDARRFPTSRQLVGYLGLHPRVRQSGSEPARHGRLSKEGSAAARHVLVEAAWTAARSPGPLHAFAARVAARRGRQVAAVAVARKLCVLCWCLLTRGEDYAFARPSMVRRKLRRLELAAGAPRRKSGPQADPVWNTDADTRERRLAEQAERAYERLVADWKVMQARAGASATPGRASLGLQ

SEQ ID NO: 360159 - protein, 275 aa, unidentified
MTSRGAEKMNNDTIGVDVSKDHLDGHRLADGATRRFANDKGGHKALIKWLAETPLCRVVFEPTGPYHRAVERALGASGVPFVKVNPRQARRFAEATGKLAKTDRLDAAILARMGALLELEARPARSEVLLELKELYVAREALVKDRTAAKNRGKVLTLSLLKRQNAQRLEQIDRQIATVEAAILQIVEADASLADRFAILTSIPGVSNITAFALLIEMPELGALEAGQAASLVGLAPIARQSGRWTGAPSFEAVAPTCDRRSTCQRSSPLGSIPI

SEQ ID NO: 360160 - protein, 340 aa, unidentified
MNATTYGLDIAKHVFQMYWVDVQTGEMANRRFRRDELISFLVRQPAGRVALEACGSAHWWARKIKAIGHEVVLLHPKFIRPFVQTNKTDAADARAIWTAVQQPGMRTVATKTEEQQAMLCLHRMRSLLIKFRTMQVNQLRGLLYEFGASFRVGRAAGLAEIRARMAELEDSLPGIMLNSLQDQLKRIDGIEQDIDQLEKQISGWHKQEAACQAIAAVPGIGRLTATALIATMGDAKTFKSGCEFASFLGLVPRQSGTGGKVWLGGISKRGDPYLRTLLIHGARSVMYHSKVPTAWQKAIQERRPANVAAIAIANKMARTAWAILAHGSSYEKHHISVKPA

SEQ ID NO: 360161 - protein, 412 aa, unidentified
MQVIHCRCAGLDVHKASVVACVMITVSDGTVHSEVKTFGTMTRDLLELGDWLKAQQLTHAAMESTGSYWKPVYNLLEGQIELLVVNAHHIKAVPGRKTDVKDAEWIADLLRHGLLRGSFIPAKPQRELRELVRHRSNLVGRRAQSVNELHRTLESTNLKLGNVVSDITGVSATEMLQAILAGQTQPEVLAEMARGRMQRKKELLHKALEGRVEEHHRLMLSQLLVDIANYDDQVNEVGALIAKRLEGQQELLDRLDQIPGVNRRVAEVIVAEVGTDVKRFQSAAKLASWAGICPGNNQSAGKRRSSHIRPGNRSLRAALVEAANAAGKKKDCYLATMYHRLAGKRGKKRALIAVARTILQSIYYMIQRGLAYQDLGADYYDRRDPEGLARRLARRIEKLGFAITLEPLAKVA

SEQ ID NO: 360162 - protein, 426 aa, unidentified
MWDAKRRVLKIKSLKHGIIQDKRGNVMRAVFGIDVSKTSCEVAILVNGEKVHGYTILNDAFGFNRLLGDLKTVHNPEIIFEATGVYSRRLQAFLEEYGYAYTRLNPLEAKKQLDSLRVRKTDKIDAEKLAKSQLVHNRKPTYVQEEVYQHLRDLSRFYQNMTEDLVRTKNRLHKVLQVTFPELENLLSTPTGEQYWNLVMAFPCKEFVLSLSQSNLCEIIRQSTSKRISEKRIAYLTDKLIKLAKQSFCAVKKNSPMLEEVRYYAQELLRLSERRQVVLNDMVTLAQPLPEYDILRSIPGIAETTATSIIGELGDIRRFQSSNQINAFIGIDLRHYESGKFLAKEHITKRGNPYARKILFKCIHNIASASHTNPCHIADFYEKRKRQSTIASTKPHAIASIHRLIRTMYYLITHNKLYDYSLTQNR

SEQ ID NO: 360163 - protein, 346 aa, unidentified
MKQISRIGMDTSKQFFQLHGVDTAEQPVLRRKLRRKEVVAFFAKLPLTVIGMEACGASHYWARELGQLGHEVKLMAPQHVKAYIKRNKNDGRDAEGLCEAMSRPTMRFVPVKTQEQQAALMLVGVRQQLIARRTQLGNAIRGYAAEFGLTAAKGIDKIEPLLAQIAQDESVPVLARELFAIQGQDYARLQVELKAIEVRLLAWHRANANSQRLAQIPGIGPIGATALVMKTPDPRAFPSGRHFAAWLGLTPKDHSTGGKTRLGKITRAGDEVLRSVLVAGATAVIQQARRGRGRALPWLIALLSRKPPKLAAVALANKIARIAWKLMVTGESYDGARMPGASAFAA

SEQ ID NO: 360164 - protein, 340 aa, unidentified
MKLYGAIDLHSTNNVTVVIDEQDRVVYQKRLPNDLALVLKELSVYQSELEGMVVESTYNWYWLVDGLMAEGYKVHLANTAAIQQYNGLKYTDDNSDARWLAHLLRLGVLPQGYIYPRADRPVRDLLRKRSQMVRQRTTNLLSIQNLLTRNTGSSLNANRVKGLDVQQVDELLSDGDLALAVKANLSVMLSADEQTKILERTVIERVQLRPQFCFLKTVPGIGKILSLTIMLETGDIRRFASVGNYASYCRCVGSQKISNSKKKGKGNTKNGNKYLAWAFVEAAHFAIQFNSTIKSFYQRKKAKTKGVVAIKAVAHKLCRASYYIMRDRVPFNITKAFGQK

SEQ ID NO: 360165 - protein, 367 aa, unidentified
MKKVSTRAAAQSRNISQQKLTIGLDLGDRNSWYCVLDESGQIQLEQRVRTTAKALQEVFGTMPRSRIALEIGTHSPWISRLLSELGHEVIVANARKVRLIGESRQKDDRLDAQTLARLARIDPKLLYPVKHRSAQAQADLMMIRARAGLVRARTGLVNTARGLAKSYGERLRGCNVRNMNPEKAESLSPELQAALEPLLNAIESLSERIVEYNERIEQLAQQSYPQVALLKQIKGVGTLIALTFLLTLEDPHRFRKSRDVGCYLGLQPGRRNSGRSEPQLHISKEGDPYLRTLLVQGAQHILGPFGIDCDLRRWGLKLAERGGRNGKKRAIVATARKLAVLLHHLWVSGEAYEPLHNSSRTTVAAAA

SEQ ID NO: 360166 - protein, 406 aa, unidentified
MEVVHPRCSGLDVHKKSVVACVMVPGRKQVRTFGTVTAELLRLADWLQEEGVTTVAMESTGVYWKPVFNVLETTGLELLVVNAQHIKAVPGRKTDVKDAEWIADLLRHGLVRASFIPSRPQRELRELVRYRKTVVEQRSHLVQRMQKLLEGANIKLSDVASDIVGVSGSAMLRALAIGESDLDRLVELAKSSLRNKREELRLALEGSFGSHQRFLLGKQLDQLEFLDRQIADLNLEVEQRLRPFEALLARLDAIPGIGQRNAEQILVEVGTDMSRFPSAAHFASWAKLCPGNDESAGKRRSGRTGLGSRWLRSTMVEAAWSASRVRNSYFAAQYHRLVPRRGKRRAAVAVAHSMLIAIYHLIKDGTIYQDLGPNHFDELDRQRITHRAVRRLQALGYQVTLQEASA

SEQ ID NO: 360167 - protein, 340 aa, unidentified
MSEITRVAIDTSKSVFTLHAVDAQDRPVLRRNLRRQDLVPFFAKLPPVDVSMEACGGSHYWGRTLQALGHRVRLIPAQYVKPFVKRSKNDRNDAQAISEAAARPGMQAVAVKSADAQARAMLLTVRELLVRQRTQLVNALRGHATEMGLVAPVGGKGLAALRSEIEADATLPEAAAEALQLLGREIDRLEARLAQIDKNLLAQHKTDPDSRRLSAIPGVGPMSALSFSRMVDATQFKSGRHFAAWLGLVPREISTGGKQRLGGISRAGNERLRQLLVLGATAVIRFAKPGHPGASAWLLALLERKPRKLAAVALANKMARIFWAMLTRGEDYRAVKPVVA

SEQ ID NO: 360168 - protein, 342 aa, unidentified
MNKYDGKQFVGIDLHRQRSVIVRQSDSGEQLSAVRIVNDPVALGLQLEDAGADPEVVLEATYGWYWAVDVLQAHGAQVHLAHPLGVKGFRYRRVKNDVRDAGDLADLLRMGRLPESWIAPPATRELRELVRYRAKLVAIRSGLKAQVHAVLAKAGVLISVSDLFGATGRQRLAKVPLAAAYAERVRSLLELIDILDGHEARFAALIAERLDTHRGYQAIQQVPGIGVTLAAVFVAEIGDVGRFTGPAQLCSWAGLTPRHRESDTVVHRGHITKQGSKLVRWAAIEAVQRHPTTAKIAADKDRIEARRGKNIAKVAAARKLLTLVYYGLRDGHIRALDQDRAA

SEQ ID NO: 360169 - protein, 358 aa, unidentified
MNSSSISKAMNKNKQSIMEFDHYIAFDWSQENVALARMTRKAAEPKVIEWDKSDIKAIKEYLSHLRGTIILTFEETTNSQWLYVEFKDMVNRIIVCDPYRNHLLSTGPKTDKIDARKLCLLLKAGFLKEVYHTNDRLYEYRCLLSAYTDLVKAGVRIQNQRNAVYRARGMNLKKQDPEELKHRIAGFPLRNFVIDWQNRVIENYSEDKKLFEEKIEQIVKSNKNVKNLTHIPGIGVISAFKIFAIVIQPQRFKGRGCYLSYCGLVLYEKSSGGRSYGKRSPRYNRELKAVYLMAARAVIQGGNNPISEYYEKLIEKGLSSKQACLQIARYIARVSLGMMKNGQKYDAYRWRKDEIAVA

SEQ ID NO: 360170 - protein, 364 aa, unidentified
MDPPLKDGVIMRQHRISIFKKRRRSMKDIKILGVDIAKDVFQLCGIDEWGKVIYTRRVKRAQYVSTVASLKVGCVVMEACGGANHWYRTFMGMGIPTQLISPQHVKPYVKSNKNDRNDAQAIAEAASRASMRFVRGKTVEQQDVQALLKIRDRLVKSRTALINEIRGLLQEYGLTMARGAKRFYEELPLILASEAVGLTPRMKRVLNCLYTELLNRDEAIGDYEEELKAVAKANEDCQRVQSIPGVGYLTALSVYASVGDIHQFHRSRQLSAFIGLVPRQHSSGNKEVLLGISKRGNVMLRTLLIHGARALLRHVKNKTDKKSLWLKALIERRGMNRACVTLANKNARIIWALLTRQETYRCGA

SEQ ID NO: 360171 - protein, 328 aa, unidentified
MYFIGNDVSKKSLDLAFFDQQRKRWSKPCSLGNDPKGWDALIQWAEKQTQAPREDICIVMEATGVYHLKAAAHLSRKGLNVIIANPQLASQYAKSQNQQNKSDKLDARSLQEYGSQLKKYHLFTHDSQEISQLKALLSRMRQLGKDLHRERNRLEKCDFQEGSSWTRTSIERLIGFITSEQKLTQQQIDQLIKQNQVLRHNQKLLCSIKGIGKLTSQWLLPILSTQRFNNARETAAFLGLVPCHKSSGTSLKTRGRLSGRGDADLRARLYMPAVCAITYDPTMKAFYQQLVAKGKPSKVALTAVMRKLVHICYGVIKHQTPYVENYAA

SEQ ID NO: 360172 - protein, 438 aa, unidentified
MSNKVIFNLDELFISVGIDVGADFSWMSIALPNQQFVGKPYKILHNSIDSLTTAVSKIKEAEELYSLESRIFLESTGIYHYPLFCYLRDKGFNCSVINPIITKNSTNINIRKVHNDRFDSKKAALVGLKPDLKVSLMPSDLALNCRNLCREYYDLMDNRSAYVNKLQGELRMAFPQYLGIFSKVTINTSLTLLETYTSPSAFLKADKQEIIDIIKSTARFGLTYAQNKYNAIIQAATDANQFGYIIDSNIKRIRLYISFIRKYDEEINSILESLHELVDANEDSDFVKQIHLIETFKGAGFLSAVSIMGEIGDFSAFSKPKQLFAYFGLDPAVKQSGKFEGTKVQMSKRGSAIARRVIHTLTLQSISISRNREAKNPVLREYYLKKCDSKSKLVAMGAVSHKVCNMIFAILRDNKPFKIIAPQEHIKQYNSAKCDIAA

SEQ ID NO: 360173 - protein, 357 aa, unidentified
MTRISVGVDVSKNRSTVCIMDQDGKVIMRPFLVWHSTEELDFLADTLKRLNGEVRVIMESTSIYQYPIALHLKEKGIFISIVNAYKVNKFANTDFRGGKTDKKDSRTIASYGISYWDKLVEWQIPKDTYFNLDLLNRTYMNAKKHRQIILQELQHYIDCAMPGMDKELHSLNLNTKKDFMLDFVEKFWHRDEIVNMTEAEFTEVFTAWAKEKGYRPGKGKAAKIYAIAKSCIPYYPANPTVKTILQCIVDKLSGVNRTLVTIVTQMIEEAKKLPEYQIVREMPGVGDPLAARFFGSAGDIRRFKNSKALVAYAGIDSPPDESGDLSSTHRHITKKGSKVFRDTGYEIMMALRSQKRT

SEQ ID NO: 360174 - protein, 362 aa, unidentified
MQSTTIIIAFDQHAATTVAAVLLPAQRTPALHPLTSDTTTILRFVARVQRQGAVRCCYEAGPCGFELRRALEARAIPCDVIAPALIPRRAGDRIKTDRRDASQLAVLYRAGALTAIHMPTEQEEAARDLLRCREDIRADLLRARHRLSKFLLRHGRRFTGTKNAWSKRHDAWLRAQTWSLPALDQTHRAYLRAVDEVLARLRDVETDLQALLDLEPLRPRVQRLRCFRGIDDLTALTIAAELGDPRRFASAPSTMAFVGLVPSEHSSGTKRVQGGITKTGNAHLRRVLVESAWHYRHHPFVSATLRARQRGAPAAVIARAWAAQQRLHRRYQRLAARGKPKQHVVTAVARELTGFVWAALTQ

SEQ ID NO: 360175 - protein, 342 aa, unidentified
MAIVAGFDVHRAQITFDALNTETGEVSRGRIDATPAAVGRWLARFGGQEIDVAVEACTGWLFVCDALVASGAVAHLAEPVETRALRGRKRRAKTDREDARWLRELLSDGRLPEAWIPPEHVRQWRSRARLRHTLIDERTQWMQRIQATFYHHGISGTPEKLRTRAGRAFLVALDVPADARERIQIALAMVDAIDAQIAPLERELRQLARRQTGCRALMGLYGMGELTSLVTLCELGDVGRLSASRKAVRMAGIDIGVHRSDRRARVGKLTRQGSPQLRWALYEAALSACRPSSPDHADYLALKARGLSHTRASLTIARKLARRSFHVLRELGPAALEPIPTR

SEQ ID NO: 360176 - protein, 345 aa, unidentified
MSIVGGLDIHRKQITFDYLDTVTGQVRRGQVSPADREHLRAWLARFAGCEDAAFAVEGCTGWRYVVEELAAAGVTAHLAEPADTAFARGRKRHAKTDKTDCRHLRMLLAEGRLPECWIPPGHILECRALLETYHDLRAEHTAWVQRIHAVLFHQGAPALGEGTLRTEQGLAALRSAAAGCLSPAGQLQVATALEVTEALEARLHELRHQLLDAARHLTGAKVLAARLYGVGPVTALAMTCWLGGAGRFSSSRKAVRFAGLDITVHSSDRKGPPGRLSRQGPPVLRWAVYEAGKTHARSSAPDHDYYAQVKDRCNGKRAALSEARKILRQACHILAELGDDALSAA

SEQ ID NO: 360177 - protein, 363 aa, unidentified
MQDYIRNEGRVSVAEYDLHVGLDVDKSSLSVTVRDKECLLRSLKMPYDAGILLSFVEKNYSEKRVIYAYEAGPTGFGLYDSIVGAGHSCLVVSPGSVPSAPNSRVKTNRLDSKKLAELLSGGQLRGIHVPRRSIRDLRSLVHLRYTYMQDIRAYKCRIKAELLKEGLKFPKAPKGSQWSKKVMEELRNLECSEVIGYKISSMLNNIEHVLDAMCLTEVALRSYINGDERLKRCASYLMSCPGIGWRIACYALARMGDGESVRSSKEAGAFFGLVPTENSTGDRTDRGSITKCGDPRLRSMLIQGAWAAIRKDSELRAFYNRICASHSKKVAARVAIVAVARKLAERMHCVLKEQRNYEARVAA

SEQ ID NO: 360178 - protein, 403 aa, unidentified
MNAVGIDVSKSKSVVAIMRPFGEIVSTPFEIKHTASDIHSLIELINSVEGESRIVMEHTGRYYEVLAHQLLEANLFVSAINPKLIKDFDNDSLRKVKSDKADAVKIARYALDKWQNLKQYNVMDELRNQLKTMNRQFGFYMKHKTAMKNNLIGILDQTYPGVNTYFDSPARSDGSQKWVDFASTYWHVDCVRKMSINAFIDHYENWCKRKKYNFSKSKAEEIYGKAKELVPVLPKDEITKRIIRQAVDQLNSASSTVEELRTLMNDTASKLPEYPIVMAMNGVGPSLGPQLIAEIGDVTRFTHKGAITAFAGVDPGVNESGAFSQKSVPTSKRGSADLRKTLFLVMDVLIKTMPQDDPVYQFLDKKRSQGKPYYVYMTAGANKFLRIYYGRVKEYLASLPQSE

SEQ ID NO: 360179 - protein, 389 aa, unidentified
MIYVGIDVAKDKHDCFIMNSEGEVLFKPFVIRNNRAGFDSLYEKICSAAESPDKIKVGLEATGHYSYNILGYLLDKGLPTYVINPLHTNLYRKSLSLRKTKTDKVDAHTIAAMLMSDVDLKSYSDTLYHNEELKSLTRYRFDKVKERAKLKTSVARLVNILFPELEELVPTLHIASVYALFKEYPSARLIAQVHLTKLTNLLSEASKGRYGKEKAQTIREAARSSIGSHMPAKELELKHTVKLIQELDSEIDEIEIRIKEIIDEMDTPILSIPGISYRMGAMILAEIGDFERFSSPDKILAYAGLSPSTYQSGQLTSTHSHMEKRGSRYLRYALFNATKFVCNWAPDFNDYLEKKRKEGKHYNVAISHACKKLVRVIYHLQTTGEEYNP

SEQ ID NO: 360180 - protein, 370 aa, unidentified
MKTLHKRCAGVDVHKAEVVACLRLITNRKVEREVRRFPTTTYGLLELAEWLEKARCTHVAMEATGVYWKPVWHILDGRFALILANAAHVKTVPGRKSDVNDASWLADLLAHGLIRPSFVPPAAIQELRDLTRTRKQLTREVVQHSQRIQAVLEEANVKLCSVITDILGASGRRMLKAMIAGETDAHKLAALGSERLGCVPVALVEALTGRMREHHRFLLAQHLRTIEQLEETIRVFDTRIEAKLVPFRDIVERLKEVPGLGTTAAEVVLAEIGTDMSPFPSAGHLLSWAGFVPRLDESAGKRRSTRIRKGAPWLKPVLVQAAWGAARKKNSYFQAQFLRLKARHGAKKAAIAVAASILTTVYHGGGQQKQ

SEQ ID NO: 360181 - protein, 376 aa, unidentified
MERGSLMLNTTTFVGLDVHARSIKAVALDAMTGEVRSATFGHDAAEVAGWVSSVDPSAKCVYESGVTGFDLQKRLSSMGIDCVVGAVSKMIKPPADRKRKNDRNDAEFLARMLSVGNVVEVWVPDDGCEAARDLVRALDDAREDLKRCKQRLSKFLLRHGYVFSETTPTGRRKGNWTAAHWAWIKSISFPEKADNDVLAYYVDAVRQAMEDKARLERLVEAEASKPRWKRRIDSIRCLKGIDVTSAADLVFEAGEFSRFKSARSFAAWLGLTPSEHSSGESVRQGGITKAGNKHLRRVLVESAWHYLGCSPHSKDLAKGQVPDPAARRHAAKGVRRLVERRRAMLERGVHKNKANVATARELACWCWAVGRMVENG

SEQ ID NO: 360182 - protein, 340 aa, unidentified
MTQIAMDVHRKRSVLAYQTPAEEEPKVVRCYTTRAGLAKVLGALPRPWRVCLEATRQSSAVVRWLRELEAESIELVDPKGLKAFVKGKPKTDARDAKDMLALLQMGRLPKAYLAPPAVQEVRALTRTRGYVRRASTSLRNQVRALLNQHGLEVPARDLCGVGGRRQLAESVAQLGPLGQTAAGQLTPLLLATEQALDVLDGQVREALAQQPVARALMARPGIGPVMALALAAELGEIERFEDVAHLWSYAGVAPRAHDSDEYQAPRHLPHRCNKRVRHLAVQAAQAAARSRQPSPAKRTYERLCRRGLHHNTAKVAAARDLLKDVYYAWHQAIRVTPTSA

SEQ ID NO: 360183 - protein, 353 aa, unidentified
MSPSRTRFIGMDVHKDTMAVAYVAQEHGAEVTSLGTIGTRQCDIDQLIRKRQSKATHLIFIYEAGPCGSWLYRYLRKKDDDCWVVAPSLIPTKAGDRVKTDRRDAMQLARLARSGDLTAVYVPQVQAEAMRDLTRAREDALSDCKDATFRLKAFLLRHDIRYTGRANWGPAHLRWLSEVVCPTPTQQIVFQEDVRAVQEHTERLQRLEHELHEHVQAWRLYPVVEALQAWRGVPCTVAVTLVAAMGDLTRCDTPRALMKFLGLVPSEYSSGEQRRQGTMTKVGNTHARFGHRRRRLGLSLSRESQPTFATATRNPIQNHPGHQWESPSAALSTVLTPRGTRQTRQGRDRGHGP

SEQ ID NO: 360184 - protein, 381 aa, unidentified
MENILVFIGIDVHKDTHAYCTFYPSTGAYLYEYSSKATTKDALSYINKVKKGIKKDTNRECEVVCGYEAGPTGIKLKRDLVKKGIDCKVMAPTTILSPKAGKRVKTDQKDAQELSKALCWKTYSEVVPLDEENEAVRDFARMRSDFKDGLKVKKQQLKSFLLGKGIRYPGTGNTWTIAYIKWIKSIEFEHPLAKETCESYMAEISRLIQKIEELDKRIEELAQGEKFKEPVSKLRCFAGIDTMVALSVVAEIGDFSRFPSAKHFSSYIGLCPGQHSSGLKVKMTGITKAGNSRVRTLLTESANSMARTYTNVKSKRLKSRQSGMSEEIIDYADRGNKRIRYKMNKLKKLGKNHNVAKTAAARELSCFIWGMMTNKIYGEIA

SEQ ID NO: 360185 - protein, 354 aa, unidentified
MITIGVDAHKRVHVAVAVDEAGGEIARWHGPNSVAGWQGLAAWAATLGPDCRWGIEGAWNYGRGLAQQLVAAGAAVYEVNPRWTAEGRRHARRSDKNDHLDAHAIALYLRREAAALTALVAEDDTTVLALLVTERDDLVAETTRLRNQLHQLLLHLDPEYTAHLPSPRTQAGVRDLEGYTSASPCPLRQQRAAGVRRLAQRLRLVAEQAKALAAQIRALAAQRFTRLTAICGVSLLTAGALAGLLGPGRRFASDAQLAAFAGVAPLEISSAGRVRHRLNRGGNRRLNAILYRIALTQLRHSAQAQAYVARRVTEGKTKREALRALKRFIVRAIWRQWQQCQDTQTVAMVPAAVA

SEQ ID NO: 360186 - protein, 345 aa, unidentified
MQQSNKTIGIDLAKNVFLAAEADAHFHVTGTRRLSRNQFHQYVIRQPATHIIMETCGTAHYWARVCQGLGHTVTLLPAQHVKPYVPRNKTDRNDAIALIEASRNPRIRPVPIKTEYQQAIQSLHRLREQWKLTRQSRINTLRGIMREFGISIPLGPKAAIKIAGSSLEHIPTIIQSAIRDVLQEIHLLDQRMSDVEAQLKRIAKQDEVVQGFMQISGIGLLTATAMRAAIQSPTQFKNGRQLSAWLGITPREYSSGEKRYLGRISKRGDSYLRTLLIHGARSVMARIKTLQRQQRPLNAIQQWAAKLEQRVGMNKATVALANKLARILWATWMHQRTFDGNYVAH

SEQ ID NO: 360187 - protein, 410 aa, unidentified
MEAMIERCAGLDVHQETIVACALFGPLDKKPEKSIQSFSTTTPGLLELNDWLTSLKVTDLVMESTGVYWKPVWNILESDFQLILANANHVKNVPGRKTDVKDAEWLAKLLRSGLIESNFVPPEDIRDLRDLTRYRKKLTHQRTAEQNRIHKILQDANIKLTSVLSNIFGLSGRRILEAIINGEKIEKKNLQEMVHWRTKASLDDIAKAINGRVRRHHRDMLQYHWDHMLYIEGMIQNLEEQIDQSLAPYRKEVDLLDTIPGVDQSGAATFIAEMGVDMSVFKSSKHLASWAGLSPGNNESAGKKKGSKTTKGNKALQTMAVQCALTTARQTNRISAHQKRIMKRQGKKKAHFASAHLIVTIAYNILKTGEPYQELGPEYVHQRQENKELKMIEHLKKKGYTVSSADPETA

SEQ ID NO: 360188 - protein, 349 aa, unidentified
MEQFVGLDVSQKLTHICVVDREGKALWRGSSPTTPEDIAAAVRAHAPGAVRIGLETGALSTWLWHGLKKIGLPIVCLDARHAKAALSMQVNKSDRNDAFGLAQIVRTGWYREVGVKSIESHQIRAVLGARAQLVGMRTDLRNQIRGLLKIFGVVLERHSDKSFEDRVKEVARAAPEILAMSLRSLLAILQPVCTQIALLDRLVMTQAKGTAMARHLMRVPGVGPVTAMAFVTAVEDPARFRKSRSVGAYFGLTPRRYQSGEVDASGRISKWGDPLVRTYLFEAATALLTTCKKWSALKAWGLRIAKRSGMNKARIAVARKLAVILHQMWTTGEDFRWSNKGNETEVAAA

SEQ ID NO: 360189 - protein, 328 aa, unidentified
MKHVSTIGLDLAKHVFQVHGADDEGSPVFNRKLRRSEVLRFFEKLPPCLVGMEACGTAHYWAREVAALGHEVRLIPPSYVKPFVKRGKTDAGDAEAIGEAVTRKTMRFVPVKTAGQQAATMVLKTRALLVRQRTQAVNALRAHLAELGIIVAVGMAKVAALGAIVRDETDDRLPPAARFALLAVVDQIDALADQIDRLERSIVTEAKRDEDMRRLTTIPGVGAITAATIKSLVPDPGGFRSGRHFAAWLGLAPRPHSSGGKERLGRISKMGNPELRTLLVIGATSVLRIVRNDARTRSWLTQRFSPGGPSRWSLSRWPTKWRGSSGRF

SEQ ID NO: 360190 - protein, 282 aa, unidentified
MNYSHFVGLDVGKKTFDASLMSADEKELSHKSFDNTPTGIQSLLDWIAGYHLSLSKLLFCAENMGSYVTELSVSSVSMGFSLALVCPLTIKKSIGLQRGKNDRIDAKRIANYAVLHYRKLELYKLPDKDLVRLRGWIIIRDNLVKQKVSSIKLLETFSWMAKLADVTESISFLEEQLKSIKERILEVEEDMEQLIAASTSLYTNYLLLRSIKGIGIINAIVLLYVTDNFQRFDNPRKFACYCGVAPFEHTSGISIWGKTQTSSLANKEVKVYLTWAAITAIS

SEQ ID NO: 360191 - protein, 345 aa, unidentified
MKNATARKRTPITIGLDLADRRHTYYVLDGAGKMAREGSLGNTREPLATMARSYPGATVVMEAGTHSPWVSRFLQELGLRVIVANPRKTRAIYQNERKSDRRDAMMLARLARMDPTLLHPVEHGSQEAQQDMLQLKLRDSLVRARVALINAVRFTLKSLGYPVSNPSSERFHKLVLSEVPESIGEMIAHNVAAIAELTQRIKALDVSISRLAAERYPETIYLQQVSGVGPITSLYFVLKVGTPGRFQRTRDIGAFLGLCPRRDQSGETDKELRISKCGDQYLRGLLVNAAQYILGPFGTDSALREHGLRLAQEGTARAKVARKLAVLLLTLWKSREPYESFPTMA

SEQ ID NO: 360192 - protein, 321 aa, unidentified
MSAPSAVTVGIDVAKAHVDVSVLGANLDIRRFNNDAEGHSALAVALQPLNVQLVVMEATGGYETELACALQGAGLPVAVVNPRQARDFARSMGRLAKTDAIDAHMLAELASVLLRRDDLSRLLRPVPDERQQWLAALVTRRRQLLTMLLSERQRLQITPVGLHPSLLAIIAAIQAQLDDIDAQMVAHVRQHFGELDRLLQSTHGIGPVSSACLIAELPELGRLNRRQIAALVGVAPIACDSGLRNGRRRVQGGRFAIRRVLYMATLTATRYNPAIRAFYQRLKAAGKLSKVALVACMRKLLTMLNAMVKTNTPWDDSLHRA

SEQ ID NO: 360193 - protein, 405 aa, unidentified
MPMNMQYERAFGLDLSKKTFHGCILDGPDLGSRHFFTGEMGQQGKAKLAGRLCKGDLVLMEAGTASFSLARFLLENTESEVVVLNPAKLYNIFNSTLKTDKSDSEKIAKIARTMPREEWPTVSIPSREEQAERSAVSLEVFLAKEITMLVNRLYALFNSMGHPFVKKSDLKTEESRLILANRLLCEDSLAIEQAIMLSDQIGHVTNQLEQCKQRLRDICLSHPKEALSLLSIPGIGLMTAASQIAFLGDGSRFDSPDSYVNYVGLSERRFDSGNKISKGHISHMGNTCIRRNIIQAAWVATKTSKGNPLARKYDDLRLRGKSKPVAAVAVAKKMIQLSYILVKSNGIYEFTKQQGLAAFRRRLQYHKLAQLLDFLPEITKRQMEEIDRTKRKEAAATTSRPKKFA

SEQ ID NO: 360194 - protein, 410 aa, unidentified
MELLHPHCAGLDLHKDTVVACIRHMVDGKATTEVKTFKTTTQQLMELSDWLSAQGVTHIAMEATGVYWKPVWHILCDGEFELVLANAAHVKNLPGRKTDVNDATWLADLMAHGLVRASFVPDEPTQQMRDLLRTRKQFVRERSSHTQRIQKTLEDANIKLDSVITDIVGLSGRRMIEALIAGETAPQALAALAHGRIRATAAELEAALRGRVTPHHRFMLQLHLDHLDAVNAAIARIDKEVDGNVEPFRAAIEMLTTIPGISSLAAEVMVSEIGIDMSRFKTQGHLISWAGLCPKNDESAGKRRSNRMKKGAPWLKTTLIQCAWAASRTKGSYLQAQYLRIRSRRGPKKAIGAVAASILTAAHHMLKDGTLYQDLGANHFDSRDKGKQALRLVNRLQSLGFAVQITSMAA

SEQ ID NO: 360195 - protein, 408 aa, unidentified
MLNAVGIDVSKGKSTIAVLQPGGVVIRKPFDVLHNQEELNELVSYIRSLNGETKAVLECTGQYHKPILQALHKGKIFVSAVNPHLIKNYGNNTLRKIKTDPADAKKIARYTLDNWAELLEYSVMDFKREQLKIMNTQFDFFMKQKNAAKCNLIALLDQTYPGVNELFDSPVREDGSQKWVDFAYAFWHVECVSKLSSNAFLERYKSFCRKYGYNYSETKGSQIHESSRHLVPSLAKDNSYRDLIRYSIDQLNLESANVEKLRKQMNELASELPEYPVVMKMYGVGETYGPQLMAEIGDVMRFTHREALTAFAGVDPGKDDSGKRMAKSVQASKCGSARLRKVLFQIMTTLLQKMPEDDPVYQFLDKKRKEGKPYHVYMTAGANKFLRIYYGRVREYLKKLEEEQTTTG

SEQ ID NO: 360196 - protein, 348 aa, unidentified
MINLKVMKQKYVIGIDISKSKLDCAVIDFEYKIHYEMIIENTQKSIESFFKSMLKLLRIKGDELLICCENTGIYNRPLEKTASQSEILLWVEHPVKIKKATTDLRGKDNKKDALRIAQYAVRYRDKLIAYEEPSSVIIQMNILTKSRDSLLLQKTALENQLREAKSHDCLEFKILNESYSKVIKTFKTSIKKIENQLFKLMETQEEVKKNMDLLTSIPGIGTQCAINFIIVTNNFKSFENAKHLACYAGVVPFKNQSGTIVKKERISKIAHQKLKKLLHMSAMASIDKEIKAYFKRKVEEGKNKMSVLNAVRNKLVHRIMAVINRKQPFLQREEFLSLKNSNSSCILT

SEQ ID NO: 360197 - protein, 374 aa, unidentified
MEVLHACCCGLDVHKKGVTACVLWAEGKGKKRKEKRQFGTMTRDLLALADWLRACGVTHVAMESTGVYWKPVWNVLEGQFEILLVDAQHIKAVPGRKTDQNDAEWIADLLQHGLLRRSFVPPTAIRELRDLTRYRVSLVQECNRLANRIQKVLEDANIKLASVATDALGASGRAMLKAMIEGEGDAKKLAEMSRGFARLEQEIGEHLRPFEEEMEQLGTIPGVDWVTASGLIAEIGVNMNQFGDPEHLGSWAGVCPGSYESAGKRKSGKTRKGNAWLRRCLCQAAWAVSTKRNNYLSALYRRLAARRGTKRAILAVAHKLLQIAFYILRDGKCYRELGADYFDRLHPYRVKRHLVRRLESLGFQVNLVPASQAL

SEQ ID NO: 360198 - protein, 510 aa, unidentified
MILPPNHSNPPSSKARKRLLAATWEQIQKRRAAAQKKPQKPSRKSKASRSLPVDAPLMPAELKQINLNAAGIDVGATMHFVCVPQGRDPQPVRSFGAFTADLEALGDWLKQCGVTTVAMEATGVYWIPLFELLERRGFEVKLVEPSRLKHVPGRKSDVLDCQWIQQLHTFGLLCGSFRPDDSICVLRSFARQRQMLVRSLSRCIQHMQKALTQMNLKLQHVLSDITGVTGMAILDAILAGERDPQQLAKLRDGRCSKDEATIALALQGNWREDHLFALKQAMDTYRFYQEKLIEVDEKIRAHLETFTDKSQGKPLQRPSGTNKHRVNDLAFDLRTQLYTMIGVDLTEVDGLEAKTVLAVISEIGLDMSRWPTEKHFTSWLTLCPGVNKTGGRSESKSGRTRPSSNRAAAALRMAACTLMRADCALGAFARRMRARLGAPKAITATARKLAIIIYNMLKYGKAYVDRGAEYYEEQCRAAMVKNLKRRAKQLGFEVVEATAPSVVPQTTLPA

SEQ ID NO: 360199 - protein, 348 aa, unidentified
MSTIALIGLDLAKSIFQLHGVDCQGNAVLKKRLTRAQLAEFFAQLEPCIVAMEACGSAHYWARKLTALGHQPKLIPPQYVKPFVKTNKNDAADAAAIATAARQADMPMVSVKTMEQQAVLSIHRARDGLVKSKTATCNQIRGLLAEFGLVLPQGAHQLLQVHTLLENGENDLPVLLRELIGRLCGHLKHLAQEIEQCETMILAWHRQNEASQRLVAIPGVGVLTATAVVATVGDAKQYRNGRQFAAALGLVPRQHSSGGKERLLGISKRGDGYLRRLLIHGTRTVWRFREKNPDFEQTWLGKLAKRRPTNVALVALANKRARTIWAMLFHGRQFDPGFKPCQAVTPQA

SEQ ID NO: 360200 - protein, 338 aa, unidentified
MELYAGIDLHANSNYLGIVDEQNRIVFKHKLTNDLRKILVVLEPFKQQTNGVVVESTFNWYWLVDGLMDHGYRVHLANPAAIQQYKGLKHVDDQRDALWLANLLRLGILPEGYIYPKQDRPVRDLLRKRSQLVRHRTSHILSIKNMVSRTLGLRMRSNDVKRLDEHWVRDLFKEEHLFLAVNTSVGVMRYLGERIKEIEKVVKQRMRLRKEFGGLLTLPGVGDILGLTIMLEVGDIGRFAEVGNYSSYCRCVRSTRISAGKSKGEGNRKNGNKYLSWAYVEAANFAIRDYPVVQRYYQRKAAKTNGVVAIKAISHKLARASYYIMRDQVVYDAKKLFQ

SEQ ID NO: 360201 - protein, 373 aa, unidentified
MKGRPNGSNLELFYDLKYRPKESPMRTYYVAMDVHSASIVIAVLNGAGKVVMESVVETGAERVRGFLKQLRGKVYVTFEEGTQANWLHDVVRPLVTEVVVCDPRHNKLLQSGNKNDRVDAKKLAELLRNGSLKAVYHGDNGVRTLKELVRTYDCLVSDTTRVMNRLKAIFRGRAIACGGHEIYRQKRRGQWLAKLSEPGAKQRAGFLYDQLAALKPLRHKAKLAMVKEVRLQPAYLWLMSVPKLGSVSVAQLIAIVGTPHRFRSKHQFWTYVGLAVVTSSSADHEVVNGVLRRSTKPIATRGLNRNHNHLLKRVFKNAATSACQSGPFKAGYEVRVSRGMAPNLARLTIARQLAATTLVIWKRQEQFDPERKK

SEQ ID NO: 360202 - protein, 343 aa, unidentified
MEITIKWRFIVGIDISKKTLDISLFDRQNGHGSNWQVPNTREGFRTLAEWMEDHKVTKSQTILISEHTGRYGEQLLRWSTQTGWPHAVVKTTALKKVSWEHHRKTDEFDASQLAEYGVRFSDRLRLEEAPKPTAGQLKRLQAERRKMVDRRAALKSKLGEADFHDADMSQLTKMWNQQVHLLTQHIEQLEYTMDELIRQAPTLCKRHQTMRTAPGIGPVIGRFWLCLFAGKDQLNPRKISSRFGFAPHGRSSGSSVKSPDRSTGYGNSEMRRLMHQAARSVANHKPHYHDYYEQKIDEGKHELVAINNIINKLIRLYCAMWNNQAEYDPRHIQKMNKKYKKSA

SEQ ID NO: 360203 - protein, 319 aa, unidentified
MSTIVGVDVSKDSFDTAFEKDIKKFVQGKFDNCSEGFCLFYDSLPQGDRVVVMEATGPYYLKLAYFLHEKGEKVSVVNPLKIRRFAQMRFERVKTDKADARIIASYGKSEEIKLWEPMEEHIVDIRQICSVMERMVKDRTAWMNKQEALNNDPKHSLIAMREVEEMIAYITKKLEDMENKLDEIVKDHFDDQNKIIRSIPGIGPKTAIILLALTNGFTRFDTYKEFISYVGLSPRIYDSGTIKGKAHICKLGMSRARQLLYMAARAASKYNTACKLLYDRLLEKGKAKKLALIAVANKLVKQAFALTSKSELYAKDFAL

SEQ ID NO: 360204 - protein, 342 aa, unidentified
MYYIGLDVHKKTISYCVKDVSGQVHQEGKVGATRWELDDWMKTLPQPWTVAMEATIFTGWIYDHLLPHAQQVKVAHPLMLRAIAAAKKKNDRIDAGKIADCLRCDFLPECHMASTAIRDRRRTLRYRHLLVRQMVQMKNRISGLLMETGVSHNKQRLHKVGYFRELLTSNEEVNESIRPLLRVSRDSIVRLQKTEYALVSSLQRDPLLAERVKRLRTVPGVGPITALTWALEIREVSRFPSIRQAISYCGLCGDEKSSADKVTRTPLSKQRNKHIQRVLVEAAKLAPRQDHNLALVYEREKQKGNANRATLAVARKMVAYLLAVDRGQRDFVPFADSQSAAA

SEQ ID NO: 360205 - protein, 341 aa, unidentified
MSVYVGIDVHRKRSQVAVIDAGGEVLANRNVPNGAEAILKVIGGLPPGTPAALEAAFGTGWLVAMLEDYGFAPHLVHPSRGKAIASARLKNDKVDAAILAQLLRADLLPEAWIARPAVRQLRALLRHRARLVRLRTSLRNRIHAVLADHGHDRPAGCWGGPGRAWLACLELPAVSREIVDDGLGLIDAVEARIDRLDWEIRQRARSGPRVKVLTQLPGVGPFTALAILAEVGDVSRFGSARKLASWAGLTPAVRGSDRVAHYGHISKQGSAWLRWVLCEAAQTAKRHPPFAASYQAIAKRRGKKIATTAVARKLLTRAWHLLTDAEHAAAPQPAAPPTAAR

SEQ ID NO: 360206 - protein, 465 aa, unidentified
MDCHSRFIEVCICYRNGKLIQKSQATFSTQWKDLVAARDWCIAVLKTKANPTPDLSEPLHYLVESTASYHMPVCMAFGGNPTIINPTIAGATKRKSDVLDSRMLALHDQLNIWRECYIPDEDIKTLRVIIAQRDRCIRDATVAGNRINNILTRFGFTLGRSGSVVKDSAVRAVVEDQISDNPSDIEGLCPTPVPMEVRKVLREEYEKYDYYTAQAAEYKEKILEKARSMEWETDTGTLPGDEMIRILATAPQVGELTAVIWLARIITPRRFHNAKALAAYCGFDPSLKICAGKVTSTTMRGGNKALHRALNMSAHRLIHRHNEMFGIWGYNLQQQTGKKKKAANAVARKLSVAMFYMMKTGTEFTYDSYHSIRNIDVFNIPVDDLVLINPDFKRYIRILKENGINTTVDLATAYISCSLGSCKGLGKKFYGLLKDFLDHHVTYKQMYDEIQEKLNHKEDNDNAKE

SEQ ID NO: 360207 - protein, 311 aa, unidentified
MRITIGIDISKDTLDAYQLPDNQHLQVANDKAGHKTLARWIGKYDLPLVVFEATGAYHRNLEAALTASETAFAKVNPLQARRFAEATGRLAKTDRVDATTLAKMGAVLELKGHKPRSEALLVLRELITARRALMKDKVAAKTRLQTTTQTLLKNQINARLKQIDIQIRQVDVTIAQKVAQDEALSHKLGILISIPGIAEATAFSMLIEMPELGTLEGKQAASLAGLAPISRQSGKWQGKERIQGGRAFLRRAIYMPALVATRYNPDLKAKYDQLIGAGKPGKVAITAIMRKLLITANALLRDGRKWSAIRP

SEQ ID NO: 360208 - protein, 415 aa, unidentified
MEIVYPRVAGIDVGKKIVAVAVRTPGDRPGQRHQQLRKFKTFYPVLREMVGWLVAQGVTQVAMEATGVYWKPVFHALCEAEQLEVLLVNARHVKNVPGRKTDAKDAEWLAELCEVGLLRGSFIPPAEIAAVRELTRYRKKLTQARTSELQRLCKVLEDGGVKLDSVASSITTVSARAMVEALIAGERDARVLAELARGVMRKKIPDLAMALQGRFGAHHALLARMHLEHVDQLNGMIQRLDGEIDQVVAPFAEQVGLLRTIPGIGERTAQVLIGEIGVDMSRFPTADHLASWAGLCPGNNESAGKHHRARTRKGNREVREALVEAAWAAGRTGSYLGARFRRLHRRFGKQGGSKAAVAIAHNLLVIVWFVLHDRAGYRDLGADYFTRHDNPDAKKRRLIRELQTLGYTVDLTPAA

SEQ ID NO: 360209 - protein, 348 aa, unidentified
MTTNKNQITIGLDLGDRRNAVCVLDNAGQIIAEESQPNTRGSLEQLSERYPKATIAMETGTHSPWVSRLFEERGHPVYVANARKVRAISQSVTKSDEQDARMLARLCRVDPSLLSPIKHRSERCQRDLVQLKARESLVRARVDLMNSTRFLLKSLGLTVPSQVKATAFVRKLRPLLDDAATALVEPLLQSIDALSAQIKTLEDKLEALTCNQYPDTERLQQIPGVGPITALAYVLTLETPTRFAHNRDVGPYLGLVPRRDQSGTTDKPLPITKAGNTHLRCLLVNCAHYILGPFGPPSALREAGLRIATRGGKSAKKRAVIATARKLAVTMLALWRTGSEYQALTYAA

SEQ ID NO: 360210 - protein, 424 aa, unidentified
MKKHSKSSQRSEPTLKRTKARGPVQRDAKEVLTEVLGKLTAKLDAPAKLDAPAVSTSAKENRRGDTIGPNRDRLTVGVDLGDRWSQYCILGLEGETLTEGQLRTTQEDVRGFFQALSVARVVIEVGTHSAWVRDVITELGHEVVVANPRLMEGSKRRKRKSDRIDAHKLARLGRVDPQSLYPIRHRSREVRQDLVVLRARDALVSVRTELINTTRGLVKSMGTRLPRCSSPSFADKVKDAIPVEVKEALLPLVQLVETVNECITRYDQKIEELGREKYGHTTLLRQVKGVGPITSLAYVLTLEDAQRFSNSREVGPYLGLVPKQEDSGDSQPQLGISKTGDRMLRRLLVGSSQYMLGAFGPDSDLRRYGLRLCERGGKNAKKRAVVAVARKLAVLLHHLWVTGDVYEPLHHRGAETRIAQARAA

SEQ ID NO: 360211 - protein, 464 aa, unidentified
MKKKQNKPSPHGSEKEIEGFPVLRPNVAGIDLGSTTHWVCAPRPDGSGREVETFGATTPDLERLAEWLKQRHVESVAMESTGVYWIAPHEVFEQHGFEVLLVQTRELANVPGRKKSDRIDCRWIQRLHSCGLLHGSFRPAEEICMLRTLVRDKGTLIAERADWIRRMQKSLDQMNVRVHRAVTDIDGATGMAIIRAIVKGERDPARLAQLRDPRCKNSVEEITKQLSGHWREDHLFSLEQGLKMFDAISERIQVYEQEIFRKLTELERTECHGQTAPPLQNQNKANLVRKHGEEPMRQSLFRMNGVDLTAIDGIGVETVQVVVSEYGPDLSRFPTEKHFVSHALLAPRTAVTGGKPVKTKKKRGSASTRVSAALRMAALCLSHSQTALGAYYRQVARRSGGDVAVFATARKLATWIYRLLRWGHAYVDEGAAAYELRYQKAHLARLGTIAAQLGFELTPKANPV

SEQ ID NO: 360212 - protein, 320 aa, unidentified
MNSIIVGIDVSKETFDAAVLINNKVQTRKFNNNSEGFNKLVTWLKSRGTGHVCMEATGIYWKNLAKYLYDYGYKVSVVNPARIKGFAMSKLSRTKTDKADSVLIADFCKAMKPEAWYPQPLYIQELQQLVNRLNVLIKHKTQETNRLEGASKAIANNIQMHIEFLETQIKEIEQLINDHIKNNKDLHNKAMLLESIPGIGAKTQAVVLAFLADIEKFSSAKQVVAFVGLNPKHRQSGSSVRGASRISRTGNSDLRKSFYMPAMSALRHNCIIKQFSQRLSDTGKPKMLILIASMRKLLHIIYGVLKHNSPFNPNVLINQK

SEQ ID NO: 360213 - protein, 347 aa, unidentified
MDVHKEAIVIAVRNTRGHVVMESIVETKANSILQFIHGLQGELHVTWEEGTWAAWLYDLLKPHVHQVLVCDPRRNALLKEGSKNDKVDARKLADLLRTGMLRPVYHGEHGLRTLRELARTYQTLSQDLNRVMNRLKALYRGWGIACGGTQVYAPRYREEWLGKIEPVGVRRRAELLYQQLDGLQALRRTLRPELLAESRKHKAAKLLRQIPCIGPIRAARLLALMQTPHRFRSKRQLWTYRGLGIETRDSAQYRFVRGELQRAKKPQQIRGLNRNHNHEMKDIFKGAATRASCGVGPLRNFYVALLDKGMKPEMARLTLARKIAAIALTLWKKEERFDAEQLKMQAA

SEQ ID NO: 360214 - protein, 385 aa, unidentified
MAPPRMPEAVIGLDVGKSSHWACVATRDGEILLSAPVANREGDLDSLFGRFPDALVVVDQSRNIGALALARAKAAGMSAAYLPGLAAHGAARLFAGDAKTDERDAMVIAKTALGIPDALLPVGDPGPTIAAARALAAQRNFLTCENTRNKNRLRSILLESCPAFEALVDLSDGPQLRLMASLGGAWSVADAGPRRAAALTRGAARGKIEALVRSTASSTRPDAAAIAAEDRAVRLLARRISENSAEIDVITAEISALLEGDDTYRCLLTVPGIGPKTASELAISIDIEDFPSHDRLASYCGLAPRNRQSGTSISSVTASRQGNKRLKNLLIFSCNCLTRTEGRWGDYYARCRERGMPHGKALKALARKRLKVIYAIMRDRVPYAA

SEQ ID NO: 360215 - protein, 318 aa, unidentified
MEPNAFVGIDVSSKNLDVATRPTNKQLRVGNDAQGHLAIVEMLREQAVLVVLEPTGGYERPLVVALVEAKIPVAVVNARQVRDFAKSRGKLAKTDKIDAQMLAAFAEANRPEPREIPDEETRGLEALVNRRRQLVDMRATEMARRDLAPEIVRPSIEKVIKLLSAEIDETDRDLGTRIKKNSVWRAKDELLQSPKGVGPVLSRTLIALVPELGTLDRKEIAALVGVAPFNNDSGTKRGRRSCWGGRAAVRSVLYMAAVVAATHNPTIAATYRRLVGRGKLVKVALVACMRKLLTMLNAMVRDGRPWSPPLLAEGAQNA

SEQ ID NO: 360216 - protein, 351 aa, unidentified
MMIIGVDYYPSFQAIAFFVEETGECGEQELNHGDGQAEKFYRDLKQRGICVRVGMEATGYSRWFERLLAELGFELWIGDPAQIKAKRVKKQKFDREDARLLLRLMREDNFPQIWVPSPENRDLRQLLWHRHRLVQMRTRIMNQLQALAMNEGYRWKKKLFSEQGRVQLEKLPLAPWASRRRQELLELLDRMNPTIEELTAAAERETRKRPEVLRLMTHPGVGPLTALAYVLIIGTPARFQRGKQIGNYVGMIPSEGSSAGKQRLGHISKQGNSLLRFLLVEAAQAAARINPDWRRRYIHLAMRRHKSIAKIAMGRRLAVRLYWMWRNGCEYSSSFEFGSYAGQLGTGHGVK

SEQ ID NO: 360217 - protein, 344 aa, unidentified
MEYYAGLDVSLRSCALCIVDTKGKVLFERELACEIKDIAESLSGFPHPIERVGFEAGTMSQHLFFGLQAQGFDVVCMEARQVNAALSAMRNKTDKNDARGIAQVLRTGWFSPVHMKSREAHGQRALLSTRKALLNKTIDLANEVRGLLKIFGLRLPKSVSHGSFDDIVRPVIQMDDVLTHALLPLLDARIALYQHYLELDRRVKRAASHDDVCMRLMTVPGVGPIAALTFKAAIDDPSRFKSSRTVAAHFGLTPRRYQSGEVDNPGRISRAGDRDVRSTLYSAANAMLMRTMAGSQLKSWGMRLLRTKGRRRAVVAVARKLAVLLHRMWVDGTEFRSEGWEGIA

SEQ ID NO: 360218 - protein, 386 aa, unidentified
MSRPSNILVRAINYDHTLVLAVELSNKSWVLAAQAPGLPRTKAQRTIEPNKNALLAAIDGYRARAAAVGYTVDRVITTYEAGWSGFWLARWLVAQGVEVHVVQPSSVPVDRRLRRAKSDGIDAELLLRTLLAWLRGEPRVCSMVPIPDEADEDARRCVRERTELLSDRVGLTNRIGAVLATLGVNDYNPLLQSRRRRLAELRTGLDEPIPPNALAKIERLLARLELVLAQIAELERERDEVAAADAPDRAGKMIQQLASLRGIGVQSATVLVREAFVRHFPNGKALGSYAGLTSTPYSSGGIDREQGIGKAGNRRLRTVMVELAWLWQRYQPGAAQVAWFRDRVGSTGRRIRKVMVVALARKLLIALWRFVIDGVMPEGAVMKPSI

SEQ ID NO: 360219 - protein, 310 aa, unidentified
MYYIGLDVHKKTISYCVKDASGQVHREGTIGATRNELDCWVRTLPQPRIMAMEATIFTGWIYDHLLPHAEQVKVAHPLMLRAIAAAKKKNDRIDAGKISDCLRCDFLPECHMASTEIRDRRRTLRYRHLLVRQMVQMKNRISGLLMETGVSHNKQRLHKVGYFRELISNSAEIHESIRPLLRLRRETVVRCQKTEYALVSSLERDPLLAERLKRLRTVPGVGPITALTWALEMGDVSRFRSVKQAISYCGLCGEEKSSADKVLRTPLSKQRNKHIQHVLVEAAKLAPRQNHELSWSMKERSRRAMPIARP

SEQ ID NO: 360220 - protein, 412 aa, unidentified
MDVVVERCAGLDVHRDSVVATVRVPGKSRRRREQRTRSFGTTIGQLETLADWLADFGVTLVGMEATGVYWKPVFYVLERRFECWLLNAQHLHNVPGRKSDVIDSAWCCQLLEHGLVRPSFVPPPEIRRLRDLTRLCIAQVEERTRAIQRLEKVLQDAGIKLTSVASATYSASARAMLEALLGGVTDPDQLAELAKGKLRAKIPQLREALANRFELAHHGVLVAGLLAHIDALDQTVATLDARIEAATEPYAELVELLRTIPGVSVNTARVLIAECGVDMSVFGSAEHLVSWAGICPGINTSGGRRRSGKTRYGSRWLRKTLTESARAAARSKGTYLASHYWQIRGRRGDAKAIGATRHDILIAYYHITRDRVPFRELGADWLARRHSVEHRTRRLVRQLEALGHTVTLEATA

SEQ ID NO: 360221 - protein, 403 aa, unidentified
MVEAGTVSNPTSTNTRKGDQHMSPHDKFIGLDVHKDTIQIVVADAGRDGEVRHLGAISSDLHALERVITKLRADGATLHVAYEAGPTGFGIYRHLIAMGIDCIVVAPSKMPVPAGKRQKTDPRDAELLARLLRAGELTCIGVPDDVDEAIRDLARTRDDAVDDTRRTKQRLKSFLLRQGYHYTGAANWGDAHLRYLRALSLPLPAHKAVLQEYILAYEHCTDQVARLNDLLAAHVVQWRMYPLVQALMTLRGFQLVAATVLVAEVGDVGRFKQARDLMAFFGLVPHEESSGQTRRMGSITKTGNSHARRMLIETVQCAFNEPNVSAELSKRQEGQSTQLRDLSWKVQVRLYKRGRHLLARGKMKHKIVVALAREMAGFVWAMLQLVPSPVPTPQPAGPGLRRA

SEQ ID NO: 360222 - protein, 411 aa, unidentified
MRRVIGIDVHRTFGEVVIWEDGILRHAGRVDMTRTGLEGLGKSLRSTDEVVIEATGNSMAVSRVLAPFVRRVIIANPLQVKAIAQAHVKTDKIDAGTLASLQAAGYLPQIWTPDAETERKRRLVARRYQVVRHRTRLKNEVHSILHAHLIPKCPHADLFNARGRAWLTAQQLPDDERAAIDRHVRELDRLAEDLALLDREIAQDAINDSAVNRLMTITGVNVAVAAGIVAAIGDISRFSSPQKLVSYFGLNPRVRQSGLGVAHHGRISKIGRSHARAMLVEAAWAAAKSPGPLHAFFVRIRARRGHQIAAVAVARKLTVLCWHLLTRGEDCLWARPALVANKTRAMQLQAGHPQQKGNRRGPAYAYNIKALRDHEMSIAAQAERSYERFMSRWKARRPKTGARAPQSGKTR

SEQ ID NO: 360223 - protein, 338 aa, unidentified
MTVVTVGIDLAKNVFAVHGVNAAGKAILVKPLVRRAKLLELIATLPACLIGMEACSGAHYWAREFQKMGHTVRIMVPQLVSPYRMGGRHGKNDAADAAAICEAVARPNMRFVPVKSIEQQGQLFVHRAHQSYVSERTTLINRIRGLLSELGIVLPQAFKAFLSGVAQVLEDLPGYCNQVIGDLLNELFHIEEKIKNSEKLIPQLARDNSAAQLLMQFRGVGPMTATAIVASIGNGHDFRNGCQFSAWLGLTPRQQSSGGKARLGKITKAGDSYLRTLLVLGAKSVLLGAAKNDDPVSKWALQLKERQGYGRVLVAIVAKNARMCWVMLHLKDEFRFPS

SEQ ID NO: 360224 - protein, 342 aa, unidentified
MEVTTIGLDLAKNVFQVHGVDDEGTVVIRRQLRRSRVLPFFEKLPPCLIGIEACATAHHWARQLIRLGHRVKLMPPHYVKAYVKRNKNDAADAAAICEAVTRPTMRFVAVKTMEQQSVLMVHRTRELLVRQRTMLVNAIRGHMAEFGIVAPVGIPRVKELFAVIADGDDERLPAIARACLEGLARQFMTLHEEIAIAERRIHAWHRSNQASRRLETIPGIGPIIATALVASVSDPSVFKSGRELAAWIGLVPRQGSTGGKQRMGRISKQGDQYLRWLLVAGAMSVIRHGRKTNFEKNPWLGDLVRHKPTKVAAVALANKIARTAWAVLVTGETYRQPAPVEA

SEQ ID NO: 360225 - protein, 424 aa, unidentified
MEKIKAKKLGRVNAETLIVTIDMGKTTPVGYCRCPDRTEVKPFEFTNNRAGFTKLWNCIVQTQAAKGLKEVVVGYESTGCYAEPLLHFLQNKPVRLIQVNPLHTKRLKELQGNSPHKTDQKDPKVIADIIELGHGLTVVIPKGAAAELRRLTQARERELKRRTALYNQLQDLVFLCFPELLQIMKNVKTKTTQYLLQHYPTPVLLLAQGVESLAFTLRRISKGKLGLERAKALSAAAGHSVGITDGLIGLNLEIQAILAAITVSDTYITSLEHEMRHHLEQIPYSPLLLSIKGLGLVTVAGLIGEVGDFTKFHSQKEVLKLAGLDLFEISSGKHKGQRRISKRGRSLMRKLLFFAAMNTVRTGGIMHQQYQQYLQNGMKKIKALVAIARKLLGIMFALVRTQSEYYENYQKVPAEAEPQLLLAA

SEQ ID NO: 360226 - protein, 432 aa, unidentified
MLPARDGEALDRWLPPGGGDGRRGRPIEAWGKGSETANGRPRVLARRRPSGHIEQKVTLVIAGIDTHKDTLAVAVVDDAGRLIAGGDIPNTELGFVQLVDMFDTHHVLRVGIEGSGNFGRTVAVHLVLRWLPDWPVAVVEVPTLMTSRERRGQLGKGKTDPVDALAIARITARERQLPPVRLTVGPAADLRALLDYREDLVRERGGLVNRAHSELGGLRPGYQQQIPILTTRARVRAALELISHDTSVRATLCRRRLERVITIDTETAELKRQITGLVAAADTTLTDLYGVGPLIAARFIAEVVDIHRYPNRNAFAAANGTAPLPASSGRTVRHRFNPGGNRQLNRSLYTIAITQIRGDTEGRVYYERERAAGKTKREALRCLKRRLSDIVFTTMRHDAANAAARTNQPPPPAWPILAKVGAVDANEARLTA

SEQ ID NO: 360227 - protein, 415 aa, unidentified
MLNIYYYNCCGIDVHKKMLVATIAKTDEHKVTTYQTKQFSTITKDIEHLKQWLKDNDCKDVCMESTGKYWIPIFNILESTCHVIITHPKYVRAIPGKKTDKKDSIWIADIFKHGLVNPSFMPPLDIRQLRDLMRYRFKLLNCRKSENNRFQNSLTMSNIMISNVVTDTFGKTAQSILKKMLSKNDNLTLEELSPLLRKNLKSTPQEILESIQGNLTKEQNSKMEICLDHYDYINKCVEKLEEAILPLVAKYQNEINLLLTIPGIEDISAIYILSEIGSNMDVFVDDKHLCSWAGLTPQNNESAGKKKSVRISRAGVYIKPLLVQCANCAIKDKECEYFKLRYEAIKKRRGHKRAIIAIARMLLTCAYHMLSKNEPFNIDLYKKLTESNFKSKHSTLNINNAIKFLQQQGYDIKHT

SEQ ID NO: 360228 - protein, 367 aa, unidentified
MMGWMAPLRHLSAKLLSDRISSEWEPSMSEVATIGLDLAKHVFQVHGVDAEGATVLRKQLRRAQVLTFFSRLPPCLVGLEACATAHYWARELRALGHEVRLMPAQYVKAYVKRNKNDAADAAAICEAVVRPTMRFVPVKTADQQAAVLLHRGRERLVRQRTGLVNALRGHLAEFGVIAPQGLGNVGKLIAIVRDEGDARLPDLARQVLQVLAVQIEQLEAAVAALEKQLMAWHKSNPVSQRLASVPGIGPIIATAIAATVVEPSGFRSGREFAAWLGLVPRQNSTGGKHRLGRISKRGNQYLRRLLINGASANLLRSKATNADPWVIGLRRRRPSLVVAVALANKTARIAWAVMHRQENYRRVAAAA

SEQ ID NO: 360229 - protein, 317 aa, unidentified
MGGVNAAIEVGKHELKVCLGSEGELFSEPNQPRAINRIIKRLSQAGCARVLIEGGSYQSVLIAALRAAELPVVIVNPRRVREFAKSIGQLAKTDEIDARVLALYGERTEPPLRELPDEQCQSLRAQWVRREQLIEMLVMEENRLEHVPAKAKAVRYNLRSHIDYLRKQIKQADDDLDREVRNSPLWDKYEMLSSVPGVGRVLSVALLSDLPELGRLNRGEIAALAGVAPFNCDSGTLRGQRQVAGGRRRLRRALYMAAVSSVRCNPVLKPFYLRLRTAGKPAKVALVAVMRKLLLILNAMLKTRSAWRALPCPTANS

SEQ ID NO: 360230 - protein, 412 aa, unidentified
MEVLYACCCGLDVHKKSITACVLWAEGKGKTRKEKRRFGTFTRELLQLADWLRACGVTHVAMESTGVYWKPVWNILEGQFEVLLVNAQHIKAVPGRKSDQKDCEWIADLLQHGLLHGSFVPPKEMRELRDLTRYRVSLAQEENRIANRVQKVLEDANLKLASVASDPLGVSGRAILTAILAGEEDTERLAEMSKGILRKKIPDLRLALEGRVTEHHRFLLQELLDHQEFLEKKMAEVEAEIGKRMRPFEAEVERLDTIPGVDRVTAWSLVAEVGVRMEQFPSAGHLASWAGLCPGSFESAGKRLSGRTRKGSASLRRCLCQVGSVVSHLRDNYLSAQYRRLAARRGGKRAVLAVAHTVLVMAYHILKRKQNYQELGADYFDRLNADAIRRSLVRRLERLGHRVTLEPILQSA

SEQ ID NO: 360231 - protein, 373 aa, unidentified
MNYNTVYVGMDVHKESFSLCSFTIEEDKASHAQKVESDYKQVLKYLEFLRTIYGKDAYFICGYEAGCLGFTLYHQLTEHHVNCVILAPTTMLQQRGKKKIKTDKRDAALIGRCLAQHNYSPVHIPTEQDEETKEYLRMRTDHKLALKKIKQQILAFCLRHNYRYERGGSHWTQTHIKWLRALTPDGLYKEILDEYLLTFDHLSNKLERLEQRIEELGSREENGEDVKKLTCLLGVKTQTALSVIVEVGDFKRFATADRFASYLGLVPGEDSSGDGRQRLGITKAGNTHVRRLLVEAAQSYSRGQIGYKSRELKARQSGNTPQLIAYADKANERLRRRYYKMVLGQNKRSNVAKTAIARELACFMWGMMTNHIA

SEQ ID NO: 360232 - protein, 461 aa, unidentified
MRKTWRRGRKPGKKIGEVGAGMEILRPHAAGIDVGSAEHYAAVPPGRANPSVQTFGSFTADLHRLAQWLKECRIETVVMQATGVYWMALYEVLERYGLQVYVVNAQYTKTLPGRKTDVLECQWLQKLHTYGLLNNSFLPPEEIRVLRTYLRQRENLVAAAGSCIQQMQKVLTEMNVQLANVLSDLSGASGMAILKAILSGQRDPQHLAALADPHVRASRKEIAQSLEGHWRDDLLFVLRQVHDLYFFYLESIADCDRHIEEHLKTLQPKVDGAAPPLPLGPLPPRRKHIPQTNLRQELYRITGVDLTRIDGIQVQTAQVVISEVGVDMTRWPDEHQFASWLGLCPNNRITGGRVIRRGRKKVCNRAADALRLAAQSLHHSKSYLGAKYRRFRSRMDGPVAITAMAHLLARLLYRLLRYGTEYHDKGAAHYERRYRETQMQWLKKQAAQLNMQLLPATGVAK

SEQ ID NO: 360233 - protein, 431 aa, unidentified
MTISNTIPADAVLVAIDIAKVRNEVLIEAPGDKRRRRLQVLNNRAEHDRLIEILQAYGRPVACGFEATGNYHRPLAWRLAEADFEVRLVSSLALARTREALHNSWDKNDPKDAQVILHMLRIQATQAYHDPLRAGINDVQELSKTHEAIAKAKTEIQHRILTHYLPLYFPEIERIRGNSRSDWFFAFLDAFPTPASITALTKEDFVAAAWDVVGRKVSKTQILMDIYEMARTSIGLPLPLDTPAIRMFRMVVAEARSLIRQRNEIEAQADELLRHSHDYQLLRQIPGIGPINALTIIAEAGDLRRFHHHRQFLKFCGLDLSTQQSGQYRGQTRLSKFGNARLRRTLWIAGQVAVRQRENGFRHKFERYIARDRDNPDLRRKAMTAITAKMARVVHAVIKGGSDYRPFVEGRVPGGRTSVSRAVRASQTMTL

SEQ ID NO: 360234 - protein, 395 aa, unidentified
MTQEGPDRLSHYCLVPAIGFGESLFNNIIRKWGAEMNNPSSSNHQGIVGGVDTHKDLHFAAVVDAYDRVLANNSFPTTRYGYKSMLNWMQSFGEVKRIGVECTGTYGAGLLRYLQQFDIKILEVTSPDKTVRRKRGKDDTIDAENAAHAAFAGIRTVTPKTRDGMVESLRVLKLCRKTAIAARRIALQMIQMNIISAPEAIRELLRTMTRMQLIRTLAAWRPDLSGYRDISTAYKIALKSLARRYLELHDEIADLDAMISVIVDELAPELIAGKAIGYESAAQLLITVGDNPERLKSEASFAALCGVNPIPASSGKVNRHRLNRGGDRAANSALHIIAIGRLRTDARTKEYVEKRVTQGHTKLEALRCVKRYIAREVYYTLRKRNNVVNSTQIAT

SEQ ID NO: 360235 - protein, 323 aa, unidentified
MNKDIKYFGIDISHLVFDVTDSDGNYYQFKNSLIGFKKFMKLLDFNSHCVMEATGYYHYQLAYYLQENSVVLSVENPLSVKRFIQMKLSKIKTDKSDSKLICEYAKQVDLKLWQGNSKHQLECLQMTRLLSVYTKQSTMLKNKLHGEAVLGHPSKLVVTSLKRNLRQLKKEIDTIEEKLLLLVNEVHKDVLTRLKSIPGIGKKTSLMLVVLTDGFDRFKSGSELCSYAGLTPIIRQSGSSVNGRARISKIGNQKLRNLLFMCSFNACKYNKACKAIYDRIVAKGKSKKLALIAVCNKLLKQAFAIAKSGLIYDDTYRSTLVKN

SEQ ID NO: 360236 - protein, 357 aa, unidentified
MGEVVIGVDAHKRSHTLVAVDEIGRKLAERTVGTASEDHLKVVEWASQWPDVRFALEDCRHVTRRLERDLLTAGRVVVRVPTHLMAVARRSGRERGKSDPIDALAVAQAALREPELPVARLDGPAREVKLLADYRHTLVVQRTELINRLRWHLHELDPALQVPSRGLRRYCVIDDLAERLRAFDGVVARIAREMTARCRELTTQINDLERELRDRVRMLAPSLLDIPGCGVLSAAVIIGETAGAQRFRSKDAYARFTGTAPIPVWSGNTTGKVRLNRGGNRAVNYALHMIAVTQARGIGPGKTYVDKLIAGGKTRTEAMRLLRRRLSDVAFRALLSDERAAAHHADSNAQENLAQAA

SEQ ID NO: 360237 - protein, 386 aa, unidentified
MTKSNDLNMSLVPFKQDACVVAVVELSQSNWLVAAAVPGIERQPLKKLEPDEEALLRLLHRWRDESAGKGHEINRIAVAYEAGRDGFWLARWLRRHGIDVQVIHPTSIAVSREHRRAKTDRLDTALLMRAFLGWLRGETGHCRMAAVPTLAEEDAKRPSREHETLAGECTRTINRLKSALVRLGIRDFNPKLRGAQGGLEALLTPEGEPIPPNTLREMNNELARLAFIRAQMKATERARLERIKEAPNAGTNSMVQSLTKVVGIGIETADMLVHEVLARDLRDRRAVARIAGLTGSPDESGARRREKGLSKAGNARVRRGMIELAWRFLQHQKESALAAWFRSRVEAPSVRKKTMIVALARKLLIALWRLVQTGEVPRGVVLRQTA

SEQ ID NO: 360238 - protein, 365 aa, unidentified
MTRYYVGLDVHSKQSAFVIEDEGGKVITRGEVPTTPDGFSRLQATYHLSPGTQVALETGTVAFFVARQLSRLGLDAVVVDAHEVRLKAHRPNQKSDRRDAFELCEGLRRGIYRSIVHVPNQEVSRLRDTLSRRRHFVRLQAAQVGAVKALLRAAGLGRLSRSLGSEAGWSRVIAALAQHQELRTYAEQHRAVWRCAREQIAVLEASLARQQQESFASQTRRLQTMPGVGPIVASTAIAVFSNPERFPDAKHAASYAGLVPSTYQSGDREAHGRITKRGSAELRAMLCEAAHHASRPDQPLNPYFARLCARRGYKMAITAVAHRLCRIIFAMPRHHSDFDVNKLGVERGRFERKIVRTYRLKASSK

SEQ ID NO: 360239 - protein, 311 aa, unidentified
MAREKVFVGIDVSKERLDVATWPTREGLEVRNDRDGWRALIRQLRRLPVEAIALEASGGYERGPLRALLDAGLPARLVNPLRVRQFAKACGTLAKNDRLDAVAIARFVAAVPQRQYQRSRTTEALAELVTARHQLTDELARAKNQAQHSGQPVIARLAKRRIERLKADLLLLEKAITTAVAADAELARKNALMRSVPGVGPVFAHSLLALMPELGTLTNRQAASLLGVAPFDFDSGAFKGQRRISGGRRDLRDVAYMAAMVATSFNPIFKAFSERLKAAGKRPKVAIVAVMRKLITTLNAMLRDNLPWRYA

SEQ ID NO: 360240 - protein, 435 aa, unidentified
MNRRERREMIRKMQSEDLSLEVVHPHAAGIDIGNESHYVAVPPTRDPQPVRRFGCTTAELKTMAEWLKQCAIRTVAMQSTGVYWIAVFDILEEAGLEVYLVNARETKNLPGRKSDVQESQWLMKLHTYGLLRNSFRHIQRMQKVLTQMNIQLANVISDISGTTGQTIIKAILAGERDPHELAAYRNARIEASEEEIAQSLEGNWQDDLLFVLGQEQSAYEFCQKQMMECDRQLSHCLAQLEDRSQGATMPQETRKNRLRSKKGNKPQFDLRAELFRRSGTDLTQIDGVDVMTAMTIVSEVGWDMTKWKTENNFVSWLKLCPDNKISGDKVIGKGRMPTNNRATSALRMAASNLRLSGTYLGAQFRRLRSRLGAPVATKAMAAKLARLIYRMLHYGMRYVDQGAEFYEAQYRKQQVSYLKRKALKLGLQVIEVVAA

SEQ ID NO: 360241 - protein, 414 aa, unidentified
MEQMVERCAGLDVHKKSLTACVRVPGSDGARVQQTRTFRTTTAGVLALRDWLQAYAVSLVGMESTGPYWKPVYYLLEDEFDCWLLNAHHLRNVPGRKTDVKDAEWICQLVEHGLVRPSFVPPKPIRELRNLTRYRKVVIQDRTLEAQRLEKLLEDAGIKLSSVASDILGASGREMLRALVGGSRDPDALADLAKGVLRRKIPALREALEGRFEPQHALLVAEMLGRIEHAEETIERLSAEIERLMAPFAEQLALLQTIPGVRQRLAEVIVAEIGVDMNRFASAAHLASWAGLCPGNTQSAGKRGSGRTRRGSKWLRTGLVEGAHAVARGKPSYLGSQYWRIAGRRGKPKAALAVGHSILVIAYHVLDRAEPYHELGAEYLLLRESQEAHTRRLVRQLERLGHKVTLEPTEAAAA

SEQ ID NO: 360242 - protein, 322 aa, unidentified
MSIYTDYFGIDISKETFDVVDKKGKHYQFLNDNRGFAKFKKIITDGSICVMEVTGIYHLRLAKFLYSKNIATAVVNPLRIKRFSQMLLRRNKTDKADARMICLYAQDQQVDLWKPAPKVIEQSKDIYQTMEQYIEFKAGLKNKLDALKVKKAASFLIDSVTNQIKVISESIDALQNELDSLVKIYNPVMLQNITSIVGIGQRTASLLIIATEGFQHFDSAKQVSSYFGLAPTETTSGTTINGSRQITKMGNPLVRKKLYMCSLQASRYNLSCVNLYQRLLAKGKPKKLALIAVANKLLKIVFAIAKSGLPYDRLYKSYMTIV

SEQ ID NO: 360243 - protein, 329 aa, unidentified
MKVQHIIGADLSKKTIDLFCYQLSTHIQIENASLGFTTLVKWMREQNINGSNTMIVMEHTGLYSFCFENFLHQHHIPFCKVGALAIKKSMGIVRGKTDKLDAARIATYGYEKRDKLTADVPVDNALKRLQMLYSTRERLVRQRAALINAVKEYEHIGINKTDIIMQAQLKLIKTFETQIQKVMKEMQAVIEKQESLKQNYFLLKTVKGVGEVIALIMIIKTNNFTRFSNARKFACFCGTAPFEHSSGTSIKRNSRVSPLADKKMKSLLDLAAKSAIQNDKELKGYYLKRTKGGKSKMSTINIVRNKLLYRMFAVIKRQTPFVENYLQAA

SEQ ID NO: 360244 - protein, 370 aa, unidentified
MNKCHSNTELSSLEGTRCQFNGGRCAIKLGIDVHQDFYVVVEQMGGTNPKPPQRFGKQAFLHWATKLKQSGAEVHAVYEACGFGFSLQRQLSALGIVCHVVCPQKLDERNKRVKTDGLDAKALCLKLDRFVQGNRAALAIVRVPTEEEERSRAIHRQREQLVGARKRLEAQGRSLMVNHGVEPVQNWWKPRTFASLPVPQWVRELLANSQPILLALQEKIAALTLQLQSAAAPNQPRGLGAMTSVIIDREIGDWHRFNNRRQIASYTGLCPGEYSSGNTRLQSCVTKHGNPRLRAALVELAWRLVRFQPNYKPVRKWRQILAKGGANRTGPIATGAARKKAIVAVARQLAVDLWRVRTGRCKPEALGLVI

SEQ ID NO: 360245 - protein, 352 aa, unidentified
MPKRTRIVIGGVDTHGRTHHAAVLDEQGRLLGDQEFPANRGGYRQLLSWLGHHGQVGVVGVEGTGSYGAGLARYLLDQQVRVVEVDRPDRRIRRQRGRSDPIDAEAAARAVLAGTATAAPKRRDGIVESIRALRTARSGAVKARTAAINQLKALLVTAPANLREALDGRSTPALIAACGRLRPDQNALADPAHATKAALAMVAQRIQLLEAEITLADQRLAILVGRAAPRLLGLLAIGNDHAGQLLVTAGQHPERLRGEAAFAHLCGVAPIPASSGKTHRHRLHRGGDRDANRALHLAVVVRMRFCPRTRAYVQRRTREGLSKPEIIRCVKRYLAREVYHALVADFEALHTT

SEQ ID NO: 360246 - protein, 326 aa, unidentified
MLPTLGIDISKDSFHLELSINEKLRHRKFANRKEGFGELCAWLAKHKAIYVHACLEATGPYSEALAIYLHEQGHIVSVVNPVQIKAFGQSELLRNKDDRPDAGLIRRFCEKQRPAPWTPPPPHLRELQALTRHLENLIETRQQQINRLEATNTKNVAKSLRKLVAHLDTEIKRTEQQIDDHVDRHPDLKQQSELLDSIPGVGKRTAAKLLAEIPDIAQYKSARQVAAHAGLTPRNNRSGTIRGKTRLSKTGNARVRKALFFPAIVAKRHNPIVRAFCQRLARNGKNKMQVVGAAMRKLLHIAFGVLKSGKMFDPNHELLINPSIDF

SEQ ID NO: 360247 - protein, 343 aa, unidentified
MQTITTIGLDIAKSVFQVHGVDAAGQVVIRRQLKRRYVLAFFQKLPPCLIGIEACASSHYWSRELQALGHTVRLMPPAYVKPYVKRQKNDATDAEAICEAVARANMRFVPTKTPEQQSCLMLHRTRHLFIRQQTAVINSIRAHLAEFGIVAPVGRKGVTELLHIVADPSDKRVPEVARACLAALGNQLLSIKEQIVEFDRMIMVWHRSNETSKRLHYIPGVGPMLATALVASVAHPRTFRSGRNFSAWIGLVPKQHSSGGKDRLGSISKQGDRYLRSLFVAGALAVIRYAKIHGTKHRPWLTALLARRPTKVAAIALANKLARMAWAMMAKGERYKEPVALVA

SEQ ID NO: 360248 - protein, 340 aa, unidentified
MTITTVGIDLAKNVFAVHCVDQNGKTVLVKPKVSRAALPELIASLPPCVIGMEACSGAHYWARVFRQYGHEPRLMAAKFVSPYRMAGKSGKNDAADAQAICEAVRRPHMRFVPVKDESQQAMQCLHRTRQGFIEEKTATYNRLRGLISEFGVIAPQSTDALRHIVSEQKNSLPLQVQQCVDDLLEHINRIEDNIAEYDRILSRMAKTDHRSQRLMELKGIGPTTACALVATIGNAHDFKNGRQLAAWLGLTPSQYSSGGKSKLGRITKAGDSYLRTLLVQGARSVLIGAEKRTDSFSRWVCKLVERRGYWRAVVAIAAKNARLCWASLHYGDDFRLYSAS

SEQ ID NO: 360249 - protein, 343 aa, unidentified
MKLHVLGIDLGKTVFHLVGLDSTGKVVIRKKCSRTQLLAFTANLQVQLIGMESCSGSHFLGRALREQGHEVRLMPAQYVKPYVQTNKSDFLDAEAIAEAVQRPRMRFVPIKTEEQLDLQALHRVRERWVMRRTAVVNQIRSLLLERGLTLPKGRSYVDRQLPRILEDGELRLSGSFRVLLAQLKLELEQLTARMEEMDRVIQKTAQENEDCQRLTEIPGIGPVTATALIAAVGNASAFQKGRNLAAWMGIVPGEYSTGGKQKLLGISKRGNKYLRTLFIQGARSVLQQRHKQAPGLSHWLAQLLGRTHQNVVIVALANKLVRMAWAVLCKNERYRAPVLAVTT

SEQ ID NO: 360250 - protein, 339 aa, unidentified
MHVTTIGLDLAKNVFQVHGVTEAGEIAFNRSLRRAQMHRFFESIPRCLVGIEACGTSHYWAREIAKLGHEVRLIPPAYVKPYVKRGKSDAIDAAAICEAVTRPTMRFVAIKTPEQQALLALHRVRDLIVRQRTQIVNMLRGVLAEFGVVVRQGAGHAIAFAKHCLEGVEQGLPDLAQDIVTNLCHQLVALHRRVLWYGRQLNRAAAKDERVSRLRTIPGVGPITASAIVASIGDGHQFSNGRSFAAWLGLTPLNRSSGGKERLGRISKMGDRYIRRLLVLGMTSRIKQIQQRPDQFDPWFSDILERKPAKLAAVAMANKTARIIWAVLTREQDYRIRAI

SEQ ID NO: 360251 - protein, 351 aa, unidentified
MTETAVTVVGIDIGKNAFHVVGLDHRGAIVLRQKWSRRQVESRFANRPPCLIGMEACVGAHHLSRRLRALGHDARLMPAKYVRPYSKGQKNDFRDAEAIAEAVQRPTIKFVATKTVDQLDLQALHRVRERLVRQRTGIINQIRAFLLERGIAVRQGRLSLRTALPHILAAPSDVVAPRMVRIIEELAGDWRRLDERIRALSDEIEAIARRDVGCERLMSVPGVGPIVSSAMVAAIGGGDAFAKGRDFAAWLGLVPKQISTGDRTILGSISKRGNRYLRALFVQAAWVVLVKRKSRERLGLDRWLEAAKKRLHRNVLAIALANKLARIAWSVLAQGRSFQVGRLAEAHGQTA

SEQ ID NO: 360252 - protein, 366 aa, unidentified
MKKTSTVRANKNAIFKGHKLTIGVDLGDRWSCYCVLDEAGEILLEQKLATTPEAIKQSFEKIPRSLIALETGTHSPWISRLLGELGHQVLVAHAQKVQLITKSNRKDDRHDARTLARLARIDPELLGPVRHRSARAQIHLTVIRARAELVRARTALVNAVRGLVKSYGQRLPKCGTQQVSRELAAGLHAELREVLEPLLKEIESLNERIKEYDERMEKIAKASYPQVELLKQVKGVGTQIALTYVLTLEDPQRFAKSREVGCFLGLKPGRRDSGESEPQMRISKEGDRYLRTMLVQGAHYILGPFGEDSDLRRWGLKLASRGGKNGKKRAVVAVARKLAVLLHRLWVGGEVYEPLRNSQKVIRAAA

SEQ ID NO: 360253 - protein, 415 aa, unidentified
MSYMIAGIDVHKRVLMVAVADASLSPDDMEFHCRQFGTTEKELQHLAAWLQQCGAREAVMESTAQYWRPVWLALEGLFTLYLAQAWSNRAPKGRKTDFKDAQRLVRRHAVRELTLSFVPEAQQRQVRTLTRRRVQLVHDRVRLQNQLEALLEEMRIKLSSLVTDLFGVSARRILTALSQGVSDPEALAELGDARLQCTREQLRDALPGPIPELSRQLLVLLLEQLTLLDRQIERLFQLAASAMQEWQAAIGRLMEIPGIQMLAAQQIVAEAGPDAAAFPSAAQFTSWIGLCPGTNESAGENHSSRCPKGNRYLRRSLCQAAQAAARTKNSRFQALFRRLLPRLGFAKAIWAVARHVAIVVWLVLHNAVRYQERGGLSTPQAIKRRTQYLLKSLREAGYTVEIRSPLTAPSVQSGA

SEQ ID NO: 360254 - protein, 363 aa, unidentified
MRFAGIDVDSEHHTIAIVDEHGDPIQRSLSIKEDADGYRRLRDVLGDPTDCLVAMEAPGHYWRNLFASLTTDGFTIALLNPIRTRRFAEEELQRTKTDNVDALGIARFAAQKRPKATQLPHQATQELRQLVHLRRQAIQHLGDRVRNLHRAIDLTFPEFTRYVRGLDTELANAILSRYPSALSLAAVTVTKLAKLCFDGRRRVGPTLARALIAAAKQSVGSLQTAPFELEVRYACQDICEMRERCRQLEGDIQRRIDSHDLGKLFTTIKGISTLTAAAIIAEAGDPARFPNAATFASYVGVVPRLHHSGKRKFSGNGAIPLGNARLRHALWMPVLVAIRVNPWLRAYYQRLRAVGSGSDPKSP

SEQ ID NO: 360255 - protein, 371 aa, unidentified
MNTVIHIGIDVHKDTYSLCSFNFSNQKSFGQTKITSKSALVVKYVRKLQKEHPECTVLCGYEAGPTGYGLYRDLAKADIPCVIMAPTTLPKAPGNHVKTDRTDAEGLARHLAWGTYSAIHIPTPEDEAIKNYTRLRNTRQKALRRAKQNLLSFLLRHGRCFTGGTNYWTKVHYRWLKEQLFQDVVDQETFNEYLQEIHDQQEKVDRCNQRIEELAAQDAYQDRVSKLRCFRGIETHTALSFIAEVGDFCRFANPQQFSSFLGLVPKENSSGQRERRGSITKAGNQRLRLLLIEGANSTLKSNIYGKKSKRLLARQKGNEPDVIAYADNANRRLHRVYNHLVARGVHHNKATVAVARELSCFIWGMMNNRIN

SEQ ID NO: 360256 - protein, 343 aa, unidentified
MEFITIGVDLAKNVFQVHGVDAEGDVVIGRQLRRSRVLPFFKKLPPCLIGMEACATAHHWARQLIGFGHEVRLMPPHYVKPYVKRGKNDAADAAAICEAVTRPTMRFVSVKGMEQQSVLMLHRTRELLVRQRTMVINAIRAHMAEFGIVAPVGVLQVKKLLGIIADTDDARLPSLARTCLESLARQFLSLHDEINTAEKRIHAWHRSNEVSRRLETIPGIGPITASALAASITDPEVFKNGRELAAWIGLVPRQTSTGGKQRLGKISKQGDQYLRWLLVAGAMSVIRHAKRRGTTNLPWLAGMIARKPTKVAAVALANKTARIAWVVLMRGATYQKPVAVQAA

SEQ ID NO: 360257 - protein, 411 aa, unidentified
MNPVVGLDVSKGDSQVQAFLDKGKPYRKSFKVPHTVEGLGLLLEFLEEIKIETGQKPSVVLESTGHYQTPVVHYLEDRGYLLIIINPLISYKAKGTSLRKVKTDAIDAYLLCELFYKEELEPYKKRGVQLLNLRNLTRQHENITGVMIQTKLQFQAVLEQVFPEYIGVFWDLYSVVSLLTLSEFPSSEDILSADEEIITNKIREFCKSRSSKWAKEKAKQLKAAAIRNPFEKTVYQSHILSLGMYINILLQYKEHLSKLESEIDALAKEVEEYNIIKSIPSIGEKIAATIISEIGEIDRFNNPKKLVAFAGVDPSVFESGKFTATRNKITKRGSSRLRHALYMAVRCAIRDCRKTKTTDEIIPRNKRMREFYDKKREEGKPFKVAVIACLNKLLHWIFALLKNNTVFQDIA

SEQ ID NO: 360258 - protein, 466 aa, unidentified
MENNYILYVGMDVSKGKADAAILKVSDRRSVKPKFLRKKLSFKFVKSEVASFLETVRSYSDVNCTSICFALEVTGIYSTNVYDYIKANLYENESIKFLNTDFVNQWRIAHNIAKSDPLDAQTISTIIGTDLDVQYVNDNVFENKNGYQDLKALVHRHYQIKKIYSQEINRLIAQCDCLFPELQYVFEPKSAAFIAVLSSYPTTHDIINASRLEVFNVVYEATKHRCSMDKIDKLFDLCHDTLVPDNISSYGRSIILDLVENIKNIKGQLKMIERYIRDVASLNPAYKLLLTITGCGPLTAATVIAETGDIKRFKNADCFVSYSGTSPRNKRSGTSVETMGKISKKGSRYLRHAIYIIAEFARRHNPVLKHQFERIKNGNKKRHKLANIAIANKIARYIYSIMKNESSFVILHEHIMRLPEETQNTFFNSISLDFPKNTRKQIYQYSDINGEVHKFVYTKLEETMII

SEQ ID NO: 360259 - protein, 414 aa, unidentified
MELVVERCAGIDVHQAQLRVCVRLPGNGRRARMEEFATFGTTTPDLLELSEWLSQRGVTHVAMEGTGVYWKPVYYVLEADFDLWLVNAQHVKNVPGRKTDTSDAAWLCRLLEHGLLRKSFVPPREIREVRDLTRYRKALIRERASEINRLHKVLEDAGVKLATVASDIMGVSGRNMLAALVAGATDPDVLAEMAKTRLRARLPELRKALNARFREHHGFLVAQILAHADYLDEAIGQVDERIAAALEPSQAAMTVLLSIPGIQRRTAEVVIAEIGTDMTRFPSSRHLASWAGLCPGNNESAGKRKHGRTTKGSPWLRTALVEAALGATRKNGYLQAKYRRVRSRRGHQRAVIAVAHAQLEIIHTLLSRGELYSDLGADFFERQQAEQITRRAIRQLERLGHQVILKEAITTQTA

SEQ ID NO: 360260 - protein, 362 aa, unidentified
MNSFTHVGLDVHKDSTAVAVLRGDGVEPDHRVIASTPEAYRKLVARLDIGKVVFCYEAGPCGFDPYRILTSLGARCEVIAPSLIPRRPGDHVKTDRLDARNLARLHRAGELTPIRVPSELEESVRDLIRVREDIKDDRRRAILRLKAFLLRRGTRAAKGWHTGHDNWARGLRFDLPAAQEAFDALLGAVQTRDVQLRSLDAKIVDWSTREPLAEPVARLRTLRGIATLSAATLAAEVGDFRAFGSAPAFMGFTGLVPSEHSSGARTQRGSITKAGNHHVRRVLVEAAWSYRHRPAVSYVLRRRQDNQPQALIAHSWAAQHRLHAKFVTVAARHNRNVAVVAVARELAGVVWASMTEHYATEN

SEQ ID NO: 360261 - protein, 416 aa, unidentified
MKIYPRTRAIQRYLALDIHKEYVLAGGMSATQEWLLPPRKIEMSRFGEWAVKNLCETDAVVIETTTNVWDIYDLVQPVVGHAVVAHAGAVRQIAEARVKTDKEDVKRLIRLLIADIVPEVWVPPQHVRELRGMISYRQQLVKTGAMIRNRLHSLLHRHNLVLPEEGLASQAWWEEQEKISPLEKMQISQEIAMLEQIEKHKADVDQELGRQSLGETWSRESVRLMQLPGIGVVIAMTVLSAIGDIHRFESAHKLVGYSGLGAGVHDSGKEHIEKRITKSGRKELRWAMVEAAWRAVRMSPYWKEQYEKYLRRMRRPNQAIVVIARKLLVAVWHVLSKEETDERASEEDLAYKMLLWSWSMSADVRQGLTHKQFAKYALMRLGVQTDLTRFVRKNVPRRIAPRDEVLVRMAELGLTD

SEQ ID NO: 360262 - protein, 359 aa, unidentified
MARTSQPDSTRQVVVGVDTHKYIHVAVALDQHGARLGELSVGADSRGYQELHDWARGYGRVKTFGVEGTGSYGVGLSKFLRRAGVRVLEVNRSDRQLRYQHGKSDPLDAESAARSVLNGTATNTPKSAEGACEMIRQIKVARDGARKARSAALIALKSIVINAPSELRESLASLTTAAFVQRCASYRPGDVDSVHASTKYTLRSLARRWITLGEEIVDHDKLLDRLTEETAPTLREAFGIGPDVAAEMLIVFGDNPERIHSEAAFAKLCGVCPIPASSGLTNKHRLYRGGHRQANAALYRTIVVRMQYHAPTIAYVSRRTEEGLTKKDIIRCLKRHLAREIYQRVMADHHARMSNAEAA

SEQ ID NO: 360263 - protein, 381 aa, unidentified
MQPTLVKDFTRDEAILAVSLELAKSSWKVALYDGRREQPAVHTVAHPQAGGRLAEAMRVVEERKHAWGLGPATRVVVIYEAGQDGFWVARALTGQGYEVQVVDPASIPVARRARRAKTDRLDALRLVLSLWAWLGGERDRLRVVRVPKLEDEARRHWVRERGELQKEIGQHRDRMRKLLRTVGCWDEVDGEFERRLRQGAVVCYDDGALPAELRVRLARECERLALAQRQLAALEAELHQALPAPVQQCIARLMQLKGVGRVGATRLQLELFWREFDNRRQVGACVGLVPQPYNTGESRVDQGISKQGNRRVRALLVDMSWLWLRYQPDSALTRWFMRRTQGGQKRGKRIAIVAVARKLVIALWRYLKDGVLPEGAVLKAV

SEQ ID NO: 360264 - protein, 332 aa, unidentified
MMYVGLDYHKRYSVATKMGEDGEVLEQVKLLNHAPCLLEFLGGLPRDVKIALEATGSWYWFYELLEDRGTEVHLAHPLRTRAIAEARIKTDRIDSRILAHLLRTDLLPAAYIPPRAVRDVREILRYRASLISMRTQVKNKVHAILSKNGIRPRYTDILGKGSLRQLQALDLRPAYALELRGYLRLAEALQRLIAEADARVEEIAKDDPRAMLLTTIPGIGYYSALLIISEIGDIARFPNARKLCSYAGLVPRVHSSGGRTRYGPITKQGSKYLRWIMVELSPHFVRGSSRMERLYRRVCLRHGKNAARVAVAREMLKVIYYMLRDERPFFKD

SEQ ID NO: 360265 - protein, 365 aa, unidentified
MQNSITWVGMDVHAENIVLAALRDSSDTVLFRAEFPNTPKGRERLAGKLAENAPVRCVYEAGPCGYELRRFLEGRGIECDVAAPALIPRKPGDRVKTDRKDAEKLARCHRLGELATIFVPTPAQEALRDLLRTREDAREDLLRRRHRLSKFLLRQGRRYTEGERWTTRHWDCIRAQTFTERNAQTVFREYIVAIEQEVERIRRIELQIVEESRSPEVGNAIARLRALRGVDTITAMTIITEVIDLNRFRSPRELMAFIGVVPRERSSGGRERRGSITKTGNAHIRRVLVEAAWSYRHRPYVGQALAKRLENQPPNIVAYSWAAQCRLTGRFRKLTQTKGQNKAVVAVARELSGFVWGMMTGRTAI

SEQ ID NO: 360266 - protein, 421 aa, unidentified
MQSATSTTLPETPLNDVTAGIDWAVDDHAACIVDGRGREIARVMVEHTTTGLRDLVIFLAKHGVDEVAIERPDGPIIDVLLEAELTVVVISPNQVKNLRGRYGSAGNKDDRFDAFVLADTLRTDRARLRRLEPDTQATTALRRACRTRKDLVAHRVAAANQLRAHLSIVFPGAVGLFADLDSEISLAFIARFDTQERADWLSPARLGKWLASVGYSGRTDPAVLHAHLTQAPRGLTGPAATAEAGSTHAMIALLTTLVEQIKILGRQIGDQLDAHADGHIFTSLPRSGRVRAARLLAEIGDCRAKYPTPESLACLAGVAPSTRQSGKMRVVGFRWACDKQLRDAVTDFAGGSRHANLWAADLYDRSRARGHDHAHAVRILARAWLYVIWHCWQDNAAYDPDKHHALQRVLTIRRATQNQAA

SEQ ID NO: 360267 - protein, 332 aa, unidentified
MMTIGLDISKSWFQIHWITEDGEIVRKKLARGKVLDFFSRLPSCLVGLEACGSAHHWARELINLGHKARLMPARYVRAYVKTNKHDAADAEACWEAVQRPGMRFVPVKSVQQQGILMLHRVRDLLIRQRTGAINALRGHLGELGIVTGKGKANARELMALVEVDERIPDSARRALSILVDQIEDLELKIERSEKVILATARDNEVCRRLMKVAGIGPFAATALAASVDHPQQFASARHFAAWLGLVPKQHSTGGKERLGGISKRGDGYIRKLLIHGARAAVHRVRIHQVTNTWITELLDRRPFNVVTVALAHKTARIAWAIMANGEEYRAPV

SEQ ID NO: 360268 - protein, 392 aa, unidentified
MSQHFRFDASRSLTALEQDSTIIAVIEMSQTKWLVAALVPGVERQPLKKFDAQEEMLLKLLHRWRCEAGKTGRNIKRIVVAFEAGRDGFWLARWLRARDVEAYVIHPTSIAVSREHRRAKTDRLDTELLMRVFLGWLRGETRHCSMVAIPTIEEEDARRPNRERQNLVTEQTRIINQIKAIFARFGLRTLRPTMRKLAEGLEDLRTAEGTSLPQNTLSELRRHLARLRFVRDQIRAVEQERLRKLAVAPAAETKSPDAMVRLIARVFGAGIETADMLVNEIFSRHWRDRKAVARYAGLTGSPDESGSRRRERGLARAGNVRVRCGMIQLAWRFVRFQKNSALAQWFAARTADGRASTRKTMIVALARKLLIALWRLVTRGEVPQGIVLRPAS

SEQ ID NO: 360269 - protein, 302 aa, unidentified
MKRKVYVGMDVHKETIQIAYLTSNTKEMVKEQQIKHNEVHIKKFINKLKTEWNEIHCCYEAGVTGYPLYRYLKSLGVNCILVAPGKIPRQSSDKIKTDKRDAIKLARLLRSGDLESIHVPSEEDEAVRDYLRSRDSLRLDLGRNRQRLMKFLLRKGNVYSTTKYWTVSHYKWLNNLHFENEILHETFNDYYSRVRVQEENLKAMDQKIQEIAKSEAFRERVGILRCFRGVDYLTAMFLLSEVNDFRRFKTAGSFMSFLGLVPGECSSGSKRKQTGITKTGSPRLRRILYGSCLAASLPRNRK

SEQ ID NO: 360270 - protein, 402 aa, unidentified
MKPSKQYLRFCGIDIAKRKHVACIIDQDGRYILPPRSFHNNAEGFRQILNCLKRTGRKKSVLAGMEATGHYWYTLHDFLARQGYRVAVLNPIQTAQQAKQAIRKCKTDKHDAFHIATLLRTDQYKSALVPGELAMTCRQLTRLRYRMVRQGALIKQLVNSRLYPAWPEYETFFADKFGATSRKLLHAAACPQELLMLEPQALTELIHKASRGKLGPALAQRIRQTAGNSVGVRRGRYGRSTCIRILLEYIEAFGPVRKKLEAQIEGLADQLPGYLYTLPGATPMGIVSLYGEVDPIEAFTGPSQLVAFAGLDPKVFQTGQYDAPRRHVSKRGSPYLRRTLWQMAHRAICQEGELRDYWRRKRRQNKHHLVAVTATANKLSRIVWRIMTDRRDYVPRQSDPNS

SEQ ID NO: 360271 - protein, 414 aa, unidentified
MQPWSKITHYAGFDWAHDHHEVVIVNPSGKIVADFQIEHTAEGWQRWGEQVAALGAGLAACVETSQGVVVEQLLESGVVVYPVSPTSAKSYCQRKVPSGNKTDHGDAWSLADALRVDGHGWKALAKEDPLVAELRLLCRDEVALIQERTALINQLQSALREYYPAALEAFEDWTLPSAWAFVEAFPTPQALASAGKRKWEKFLHTERLARPQTYEKRMEIFAHATGFVSGQALTRAKSRLALARARMLRVLQSQIDSYRAEIEKLFAQHPDHDLFGSLPGAGPKIAPRLLGEIGSDRSRFEDPTALQCLAGTAPVSYQSGKIHKVYLRRHCNKLLRHAVHLWANLSRQSSPWAAVYYEQLRTRGKNHPCALRSLGQRWLKILWKMWQTGTRYDAELHARNQLKHGSWVLKIQHA

SEQ ID NO: 360272 - protein, 416 aa, unidentified
MSKSKAYRSTDVKNVVLDEVLSKASLGRVTVGTDIGKFFIFAVIRFSDGTFLRPWKVGNASEIEFFVWLLQRLAKVHDVTVAMESPGTYGDALRSELAEVGLPVALVSGKAARDYAEIFDGVPSQHDGKDAAVVAELCALGKSRPWSYQAPNEEDAEMAYWGDKLDAQQRVQNLWTGHLEALLARHWPELTRRIDLASVTLLSAVAHYGGPAALAAVPEARRQLRRWSRNGLKEATIEEIVSSAAQTFGAGQNGYDVKRMREAAASALAALREKQVAHARLEELAQANEVLRRQAQVVGSVTACVVWVAIGDPRGYHCGQAYRKAKGLNLKERSSGQYRGQLKISKRGSSMVRRWLYFAALRTVQTPAAHDWYEAKKVKDKGRGKGALVAVMRKLSLAMYAVGARGETYCVGTQIK

SEQ ID NO: 360273 - protein, 484 aa, unidentified
MAKRKLSTFERLQRGERLNRKQRREVQQRLNLDDPGLDIIHRDAAGIDVGNESHFVSVPTDRDPQPIREFGSWTAALEEMAQWLKDCRIRTVVMQSTGVYWIALFDVLQRHGLQVNLVDARGTKNVPGRKSDVQECQWLRKLHTYGLLRPCFLPPPEIHAARTLWRLHIQHVRDAGRCIQRMQKALIQMNVQLHNALSDISGVSGQTIIRAVLKGERDAKVLAKLRDHRCQASEEEIMQSLQGNWKDDVLFELQQAVDAYDFYQCQMKKCDQQLRRYMAALPTRAPVPAPASAPSLPSPKEGKQGRTRKSRRQGNQPAFDLAAELERILGVNPITIDGIDVLTIQTVLAEVGPDLSAWKTEQHWTSWLNLAPKRDVSGVRVIRHVRQHHTNRAGNAFRMAAQSLVRSQTYLGARYRYLRAKLGGVKAVKAMARYLACLYYRLLTRGQIWVDRGTEEFNRRSQHRELAALERKARKHGLKLVSAA

SEQ ID NO: 360274 - protein, 408 aa, unidentified
MKRYYIGVDWGDRLHQVYVGDHEGKKIREMKVPETVEGLAEIGRWLDEQRAEGFELWAAIEKPAGRIVDFLLDHGVEVYPVNPKAVDRVRDRYRMSGSKSDAFDAYVLAEFLRTDQAHLKVLQPSSEKAQELKMLSRDHRRVVRHKTRLLNQLTTTLKEYYVRPLEAFENIETEVALDFLTRYPTPAHLGALKRKEFNRFATQNHSLSKQRCEQLWEKLQKPQLAVPEHVVRAKAQLVEVLIDQLRASIKAVKTYHHKVESFFASSPAAEVAKTLPGGKSGTLVAAIWAELGDAQGRWESSGHLQAEAGAVPVTKASGKSHVVHFRFACNKHLRYSMYWFSFISVNNSEWAKLYYRGQRDKGHNHPQALRALGAKWLKIIFVMWRDHKPYDEQFHLANIALQKMRQAA

SEQ ID NO: 360275 - protein, 366 aa, unidentified
MTTYCGVDFHARQQLVKWCNTDNGEIHERQLWHESIDEVREFYVQFKGEVIVGFETSGYSSWFEAMLEELGHQVWIGHANEIRRRARARQKTDRRDAELILDLLLKHEFPRIHRVSAESREVLRQLRYRHRLVQQRTRSYNSLQAIALGAGVSLKAKLRTRKGKERLLGLAVSEAHGQQRQEWLELITQLNGYIERVERELESRAEADERVQLVRTHPGVGLLTGLALVHTLSPVSRFANSRKVAAYVGLEPREYSSGERQQFGGISKAGSRLLRLLLVEAGHKAINKDAQLKQLYYRVLHRREKAKAKVAIARHLLVRSYIMLRDQIDYAEFVRRGVAVQSARVSYRPQVPGKLIERLASAQQLS

SEQ ID NO: 360276 - protein, 423 aa, unidentified
MEVMHKRVAGLDVHKETVVACVRLMVGRKSTRECRTFATTTEGLLALRDWLTASRVTHVAMEATGVYWTPVWKILSEGEFGLVVANAAHIKQVPGRKTDINDAMWIADLQACGLIKASFVPEENVQELRSLTRTRKQLVREQTRHVQRIEKTLEEANIKLGAVISDLMGVSGRRMIEAMIAGECNPHRLAALAERTIKASPKALYDALHGRLREHHRFLLKVHLRQWDALDAAIREIDRQVAGQIERMDAEAADGQPPFRELIQRLSAIPGVARLSATAILAEIGRDMGRFPTAGHLVAWAGLCPGQNESAGKRKSARLRRGAPWLKTMLVQCAWAAKRAKDSYYMAQFHRLRGRRGPQKAICAVAASILTAIYHMLKSGAAHRDLGADYFDRRAPEAKAKRLVAQLAKLGFAAQLQPLVDAA

SEQ ID NO: 360277 - protein, 452 aa, unidentified
MAQAKPQVIDDEEHERVYERVAAVDVAKDSGMVCTRTPHRSRPGARQSTVWTVKARMTAIRALGRQLTKDGIEMVTLESTSDYWRIWLYVLEACGLAVQLVNAAQARNLPGRPKTDKLDAMWLARLTEMGLLRPSFVPPAAIRALRDYTRARTRLVQERTRCFQRLEKLLEGALVKLSSVASKLTTESAKDMIKAMIAGERDPHTLAALARTRMKAKHDQLVEALAGMFDDHHGELAQILLDQAAFCDARIAQLTARITAAVAAMPAAWGVDADGTTGPDAGTGPDAAALPAVQRLAEIPGVSPDLARSIIAEVGLDMSRFPTAAHLVSWAGLCPRARQSGPRTRAGKKNQGDSWLRNSLGQAAIGAARTTTTFLGERYGRIARRRGKAKAQVAVARSILTIIWHLLADPAVRYADLGAGYYQTRTDTDRKLRNHIRQIQALGFEVTLTKAV

SEQ ID NO: 360278 - protein, 403 aa, unidentified
MNAVGIDVSKGKSMVTILRPFGEIVSSPFEIKHTSSDIHSLIKLIHSIEGESRVVMEHTGRYYEALAHQLSAADLFVSAVNPKLVKDFNNDSLRKIKSDKADSVKIARYALDKWQSLEPYSITDELRAQLKVMNRQFHFYVKQKTAMKNNLIGLIDQTYPNANTYFNSPTRSDGSQKWVDFVSTYWHVDCIRKMSLNAFVEQYQNWCKRKKYAFNKSKAEEIYTKTKELVPVFPKNEITKHIIRQAIDQLNSTSVTVETIRTLMNETASKLPEYSIVMQFKGIGPSLGPQLMAEIGDVTRFTHKGALTAFAGVDPGVNESGSYAQKSVPTSKCGSSNLRKTLFQVMDVLIKTMPQDDPVYQFMDRKRTQGKPYYVYMTAGANKFLRIYYGRVKEYLSVLPDPS

SEQ ID NO: 360279 - protein, 335 aa, unidentified
MHYLYYVGLDVSKETFDASLVAFEDANEMAHRKFANSRKGICSCLHWVEKRHGIRLDDVIFCAEDMGSYISEMAVCASDRTLNFNFSLISPLVIKYSMGIARGKTDRVDARRIAEYAITHYRKIALYLPAEKELCQLRTWLILRAYLAKQRVAKLVLLEKLDYKEKFADVSIQRSMLQEEIAYAEIHMKTIEREMKELIAADSNICRNYKLLTSIKGVGPITAIVMLCSTLNFTKITDLRKFACYCGLAPFEHSSGTSVRGGCHTSSMANRDIKVQLNRSALIAIRCDPQLKAYYERKVAEGKHKFSVLNAVRAKIAARCFAVVRRGTPYVALQI

SEQ ID NO: 360280 - protein, 331 aa, unidentified
MKKVTQTIGIDVSKLTLDVFIKTTNVHKQISNDTKGFKELISWLSKQKINLEETLFCFEHTGWYCLMLSYFLYENKYRYCCINAIEIKRSMGLKRGKSDKADAWEIATYAWLRREELEPSTPPAKNLIELQRMMSLREQLVKHQTANKNLLKGMIEIVENELNDVSMTILKESIHHLEQQILATEKAMNELIKQDETMINNYKLSKSVKGVGMVLAVQMLLHTHNYTRFESSRQFAAYCGLVPYPYQSGTSINGRNKIHPISDRKMKSLLSMSAISAIQHDKELKLYYQKRVEEGKPKMVVLNIIRNKIVSRVFATVNRGTPYVEINKFLA

SEQ ID NO: 360281 - protein, 353 aa, unidentified
MEYIAFDAHKHYTLASVARPDGQVVREERIEHERGSWRDFLERCERGSPVAVETIGNWYWIVDEIEAAGCLPKLVHARKAKLMMGEINKTDRLDARGLNRLQRNGTLPTVWIPPGELRDQRDLPRTRMVLVRQRTQLKNRIHATLSKYALHDLEVSDFFGVRGRALLRQRFALLPPHTAYASQQILEQVESLDRQLREFEHRIQAVFEPTSAIQLLLTLPGVGLTLAVVIALELGDVARFATAEKLAAYAGTTPRIHASGGKTRFGPARPDVNRYLKWAFVEAANAICIGRGRAPQRHVSRLYERLARRKGHAKAIGAVARHLAEATFWILSKHEPYREPKPFRPRGISAGGP

SEQ ID NO: 360282 - protein, 350 aa, unidentified
MKKLSKTQRQMDVETIGIDLGDKISHYAVVDRDGEVVEEGSFRNQASSIEKHFGGERRRIALEAGAQSAWIARELEKLGHEVIVANARQVKWITASDQKNDRIDAKKLALLARADVRLLSPVEHRSAEQQAELCVIRARDAMVRARTLLVNAARGIAKGFGQRLPATVTATFGKRAVAVVRQMLSAALEGILTQIDELGRQIQEYEKRIAEVGALHPELERVVSIPGVGTLTALTFVLTLGRAERFAHSRDVAGYLGLRPKRRQSGGQDPQLGISKSGDKYLRKLLVQCAHHTLGHWGLDSALRQWGLAKTGGAKGATKRAIVAVARKLAVLLHRLWVTGEFYKPFPNMA

SEQ ID NO: 360283 - protein, 317 aa, unidentified
MEAELQGLCVGIDVAKNHWDVAVTGQRHVRRFTADASGLAALLTWLMQFGPSLVCLEATGGYERALCEAFHRQRLPVSVVNPRQVRDFARAQGELAKTDTIDAATIARFAATFHPEPDDPPTPAQQRLRALRARRQQVVHSRTQEKNRLATAPDEEARESIQEAIEFYDQQLRELDRRIAELTSADPAFRHRLALLVTVPGVGRVTAAGLLAELPELGTMNRGQAAKLVGLAPINRDSGSLRGKRMIGGGRTHVRRSLYMATIVATQHNTLIRRHYRHLLTRGKTKMTALVACMRKLLLILNAMIKNNSPWKEALDY

SEQ ID NO: 360284 - protein, 345 aa, unidentified
MKQVVITIGLDLAKQIFQAHGADAEGSPLFTRRLRRAEVLRFFEKQPPCLVGIEACSGSHYWAREIGALGHEVRLIPPAYVKPFVKRGTTDAADAEAISEAVTRKTMRFVPVKSPEQQAAAMVLKTRALLVRQQTQTINALRAHLSELGIIAGIGTAKIASLIAIVRDETDARLPNAARFALTAIADQIDALALQINKLERELVAEVKHDEDMRRLATIPGVGAITSASIKALVPDPGGFKSGRHFAAWLGLTPRSHSSGGKERLGKISKMGNPELRTLLVAGATSVLRHARGNHKAPRWLVALLARRPFKVVAIALANKMARIIWALLTKGGTYRGLESSAASS

SEQ ID NO: 360285 - protein, 420 aa, unidentified
MSSWAEINYYAGFDWAKDHHDVVIVDGPGRIVADFQIEHTDQGWQRWREQVAALGPGVAACVETSQGIVVEKLLESGGLVYPVSPASAKGYRQRKVPSGNKTDRVDAWSLADALRVDGHGWKALAKEDPLVAELRLLSRDEVRLIEERTALVNQLQSALHEYYPAALEAFEDWTLPAAWAFIEAFPTPQALQAAGKRKWEKFLHSHKLARPETYQQRMEIFARASEFVSGQALTRAKSRLALARARMLRTLQNQIDAYRAEIEKLFAQHPDHDLFGSLPGAGPKIGPRLLGEIGSDRSRFEDFSGLQCMAGTAPISYQSGQIHKVFLRRHCSKPLRYAVHLWADLSRRSCPWAAVYYDALRQRGKSHACALRCLGQRWLKILWKMWQTRTPYNPELHTRNQIKHGSWVLRLQPSSEPTSL

SEQ ID NO: 360286 - protein, 309 aa, unidentified
MKQSVVYIGIDVAKAHLDVAWAQTVRRLPNQRSGHAALIRWIKQSTTPVQLICEASGGYEQALLESLEKSALKVTLVQAVRVRQYARATGILAKTDKIDAKVLAAFGSAIKPQPMSPRSVEQKRLRQYEAQRRHLSRILVAEENRLAQLSCAQLRTLSRSLMSKIKNQIETLDRRIGELIAQDQTLWEKAQKLTAISGVGARTAALLLAQMPELGQLNRRQAAALAGLAPFNHDSGSIRGKRAIFGGRRALRSGLYMAALSAARFNPILSRFYQRLRAKGKPHKLALTAVMRKLLLALNHSLKPEPILA

SEQ ID NO: 360287 - protein, 371 aa, unidentified
MKSILYVGMDVHKENYTLCCYDFNEDRLLYQQTVAPDYRLVLKYLEQLRGRYDSEIEFVCGYEAGCLGYVLYHQLNDHGTKCVILAPTTMAITNKNRVRTDKRDAGNIARCLAFRTYSEVYVPTDEDNSVKEYIRMRDDQKKALKIIKQQILALVLRHGQRFEDGKSYWTIKHVKWLKTLDLGCVLQEALSEYLVTYEYLTDKIERMDKRIEELAGGERYQEKVRKLSCLIGVKTHTALSVIVEIGDFKRFAKPDKLAAYLGLVPSEDSSGEKRRRGSITKAGNSHVRRLLVESAQSYTRGAIGHKSKDLKRRQNGNTPQVIAYADKANERLRRKFYKMTLRNNIKRNVAATAIARELACFMWGMMTDNVA

SEQ ID NO: 360288 - protein, 389 aa, unidentified
MLFDHLSDGLTAIRTQFGAVFVSLELSRSNWLITSLSPGKGEKISRHSVPAGDAAGLMKLFADLVRKAEARTGGSYPIITIQEAGLDGFWLHRVLQQDGIESHVVDPASIAMPRRRRRAKTDRLDGETLLRALLAYKRGEPRVCAMVVAPSPEEEDRRRICRERQSLIAERITHVNRIKGLLFAQGISDYEPLRRDRRARLEALRTGDGRELPTHLKAQIDRELDRIELLLEQIKAVETERDGLLAAARKPASEEVAPDAVTMLLALKGMGANFAAVLWSEAFYRQFSNRRQVAAYAGLAATPWQSGGIRHEQGVSKAGNPRLRTTMIQLAWLWIRHQPQSTLTRWFKERSQQGRKRAIVALARKLLVALWKYVTQGVVIEGAAMKPTV

SEQ ID NO: 360289 - protein, 282 aa, unidentified
MQIHFVTEDGEITDKSAKRAEFLDFFRNRGKCLIGMEACGSSQDWARKLEAMGHEVHLMSPKAVKPFVSGQKNDHNDAIGIYKAMFNGVRRVPVKSTEIRDLQTLRRIRSQVTKDKVKEINHVRGLLAEYGIVMGKSLNAFNKDISSALEILTERGDVSPLVAEELRTTVEAIKAKIERQKKLDQEIEQLARGCKNYENFLKTPGVGPFTAAMLCVLLCDPSIFANGRQFAAYIGLAPRSRGSGGKNYVTGIPSKFNCDSESRAVLVECAQAIARVKISRSG

SEQ ID NO: 360290 - protein, 354 aa, unidentified
MIIIGVDFHPEFQQVASVDIETGEFQEKRLAHREEAETFYREVAAAGQKVRVGMEASGHGRWFERLLAELQIELWVGDAAEIRTRRVRKQKTDRQDAQLILKLMLKDDFPQIWVPSWENRDLRQLLWHRHRMVQARTRIMNQLQAVALNEGLRCKKRLWREHGRQQLESFRLAPWASRRRRDLLELIDRLNPTIAELSQAIEQEAEKCPEARRLMTHPGVGALTALAFVLIIGKAERFRCGKQIASYLGLVPLEDSSGSRRRLGHITKQGSSMMRFLLVEAAQVTVRSVPEWRSKYLHLMMRRGRKTAKVAMARKLAVRLYWMMRKGWDYQQWSKFGSHAGQPGHRDGVQSIPE

SEQ ID NO: 360291 - protein, 351 aa, unidentified
MKYYTTATKFNCGIDLHARQMYVCVMDRDGKKLVHTNIRGNDFQYFLKLVAPYRHDMTVVCECTFNWYWLADACFDANIQFVLAHALYLKHIHGGKNKNDRIDSEKLAHLLRTNLITPAYVYPSEFRPMRALLRQRMSYVSQRAALMTRLSMNQSAEGLTPAAKNGDNRDVWIERITAQYDNPLHRFGASCQMDLIRVYDSQIDKLKNEIIRLAKHHECRNYNLLITVPGIGRILAMTILFEIGSIERFPTVKDFISYARLVKGSVASAGKIKGLTGGKMGNGYLRWAFGEAAIICKRHHPLLTPYADRLIAKHGKFKGNAIMANKLARAVYFMLQNGTGFDPEQLVAHAA

SEQ ID NO: 360292 - protein, 324 aa, unidentified
MTIIGIDVSKAKLDCAWLRDENKVKTKACVNNPEGWKELVTWAQAHTGGVISELHFVMEATGIYHENLATWLHDSGAKVSVVNPAHAKHYAQSLGARTKNDKKDSVLLARYGSKESPAFWQPAPLEIRTLKALLTRLAAVEKDLQREKNRQEKAIVTDTPASVLKSIGQMIGHFKTEREELEKLIDDHIKAHKNLKENKALLESIPGVGKVIAQQMLMVLGSHQFESASQCAAYLGLVPVHKESGSSIKGRPQLAKNGNPAIRAKLYLAAVTATRYNPDIKAQYERLTGKGKSKMSALGAAMRKLVQICFGVLKHQKTYQPQMG

SEQ ID NO: 360293 - protein, 345 aa, unidentified
MKVTTVGIDLAKNVFQVHGVDERGKSMLRRQLKRKDIVSFFANLPLCVIGMEACGSAHFWARKLSELGHTVRLMAPQFVKAYVKTNKSDRNDAEAICEAVGRPNMRFVPVKTAAMQAVLALHRARQGFVKARTAQANQIRGLLAEFGIVIAKGICHIDVRLPEILEDGDNGLPGMMRELLQRLGENFKNMDREVGEIERQIKLWHRDNEQSRKLEAIAGIGPITASAMVATLGDAKSFKNARQVPAWLGMVPRHEGTGGKAKLGSISKRGDVYLRTLLIHGARAVITAHERKRNQADGWLKRLLARRNKNIAAVALAAKNARIAWALLARERGYQHDYVATRKAA

SEQ ID NO: 360294 - protein, 435 aa, unidentified
MKNNRMQTQKKFAATIGLDWADDHHDLWLQPADGSKPEHIILEQKPEVLHQWIAQLRARFENQPVAFAIETSRGPVISALLGYDFITVFPVNPKALSSYRESFRVSGAKDDCSDARLLEQYLRHYGDQLKPLCPDTVLTRQLAGLVEKRRALVDLRTQLVNQLHAELKMYYPLAHTLLDDLALPLAAVFLKKWPTLAALQKAGPQKLRAFFYAHNCRSAQKMEARLQALASARALTNDPGLILPASLKVQALCALLQSLHPAIAAFDDEIQKAMDAHPDAPIFRSFPGAGPALAARLLVAFGTQRDRFASAQEVQQLFGLAPVKKESGQSQAIYMRYRCPKFGRQSFHENAGQALKKEPWARAYYDQQRQSKKHHTAVRALAFKLVRIYFACWRDRKTYDPHTYIGSLKKHGSPLVKAMNKTAEGIRGAHLAADE

SEQ ID NO: 360295 - protein, 343 aa, unidentified
MDHFAGLDVSVKETSVCIVDDTGKIVREVKVASEPEALLAVLKNPAYYFKRIGLEAGPLSQWLFSALAEAELPVVCVETRQMRAVLKAQINKTDRNDARGIAQMMRVGLYRPVHVKTLRSQKLRMLLTHRKLLQSKAIAIDNDLRGTLRNFGLKVGMVGTVKFEARIRELVENLPDLDLLVEPLLVVRRVLREQIGILHRRLLATVRDDDVCRRLMTVPGVGPVVALTYRATVDVPARFRNSKSVGAAFGLTPSRHQSGESDRPGGISRCGDEMMRAMLYEAAQTMLVVSTKWSWLKAWAMKIAKHRGMKKAIVALARRLAVIMHRVWVDGTEFRWTRDVATA

SEQ ID NO: 360296 - protein, 368 aa, unidentified
MDEPITCFVGLDAHAESTAIAFAEAGRAAPRFVGTVGPKLSELTKALGKLGQPGSLLIVYEAGPCGYVLARELQARGYRCEVIAPSKIPHRPGERIKTDRRDALKLAAAARAGELVAVTVPDERDEAIRDLSRARVDAMRARLKARQQLNALLLRHGRRYSGKTAWTAAHERYLADVSFAHQAQDIAFAEYRLAVGDGEARVRRLTQALAQEVERWRRRPVVNAVMTLRGLDLVAATTVIAELGDLRRFARPRELMGYLGLVPSEHTTGSKRRQGAITKTGNGHVRRVLVEAAWNYRYPARISRTLQLRQESQPPAIRTIAWRAQLRLSHRYRRLKARGVQHNKICVAIARELAAFVWDIGRHVDPSA

SEQ ID NO: 360297 - protein, 314 aa, unidentified
MRAVASLTQSRGLPSKALFGSAYMCWEAPVFIERTSVGLDVHARSVVAAAIDGVTGEVFRARLTPGNEVVVGWVRALPGPSAVVYEAGPTGFGLSRALTTAGIRCEIVAPSKIQRPAGYRVKTDARDAMHLARLLRLDEIVSVTVPTVEREAARDLVRARDDVRGDLMRARHRVSKLLLRQGIVYYGGRAWTGAHLVWLQAQHFDAPGLQFAYDAAHEAVLQAEARRGRLDKAITAMAAASEFTPVVHRLGCLRGVSTLTAFGLAVEVGDWDRLTGATIGAYLGLVPTESSSGQSRSQGSITKTGNTHARRLLV

SEQ ID NO: 360298 - protein, 317 aa, unidentified
MTTPSEAYVGVDVGKTWLDVALWGSEAVWRVSNDDEGVAKIMARVAAMEPQLIAVEATGGYEQLLVQSMLLNSLPVAVVNPTRVRALSKATGKLAKTDVIDARLIAEYAFKVQPEALAPKEAHEIRLNALVTRREQLVEMRTAEQNRLGTAQNSMQADIRQHIEWLSVRIEELEAQIKELVDSLPEWREQAQRLDSIPGVGMITAVTVLAEMPELGQLDRQKIAALAGLAPFNRDSGQKRGKRRIFGGRKGIRRVLYMACLSAKKCNPVIRSLFERLMKKGKVFKVAITACMRKMLTIMNAMTRNQVNWRAPAPIPV

SEQ ID NO: 360299 - protein, 341 aa, unidentified
MKKFIRIGVDLAKNFFQVHGIVREGAEAVSRKFTRTKFGEFFLSVAPCRVGMEACGSAHYWARELRSMGHDVVLIAPAYVKPYVKRGKNDAADAAAICEAMSRPDMRFVPIKSADQQAALMLHKTRELLVKQRTMIVNALRGHLSEFGLIAAKGIQRVHELVALALGEEGLPEAARQAAALLAEQSEQLEGTIDTLEKKIAETSAKYPMVRLLKEIPAIGPLISSAMAASYPDPGVFASGRDFAASLGLTPSQHSSGGKEKLGSITKKGNRYLRKMLVVGCTSVLRVAHKYKGALAEWIVAIKARKPERVAAVALANKLARICWAMLSTGEGFREELYTRA

SEQ ID NO: 360300 - protein, 346 aa, unidentified
MVSKPLRRSEAVRTRKGDEMTAFMGIDVSKHKLDCAWLREPATGKVKTKVMNNSADGWSALQDWLVDQTGQALADCHIVVEATGVYHEGMAYALHNAGATVSVVNPAQIRYFGQGLGVRGKTDAKDSVVLARYGATQRPARWQPEPPAVRELKARTARLEALDTDIQRECNRREKAEVTQAMGIMASIDTVLAALRAERARLARDIDDHIDGHPELKQDRALLESIPSIGPAVSLRLLTTLRSRPFANARQVAAFAGLVPVPWHSGDTVNKKPRLSKAGSPKLRRLLYMAAVVSLRYNPDIAAQYRRLTGRGKTSMSALGAAMRKLLHIAYGVLKTQSAYQAQVAQ

SEQ ID NO: 360301 - protein, 424 aa, unidentified
MVGRSIGLDVHRDFCQVAIADGGRARSAGRIATTPEQLELFAQSLAPSDRVVLEATGNALAIARILEGHVAEVVLAHAKQVRAISHARVKTDKIDAKVLADLLAADLIPAVWIGDDRVRMLRRLVSRRRGLVKRRTQVKNEISAALHRNLKGRNPASDPFSGKGRAWIAAQQLPVDERLTVDAGLRQLDFLDGEWRDVDRLIAQQVLEDADVRRLMTIPGIDAVTAATLVAVIGDVRRFPSSRHLVGYLGLHPTIRQSGNGPARHGRVSKEGPAAARHVLVEAAWSAARSPGPLRAFAQRTAARRGRHVATVAVARKLAVLAWQLLTRGEDYAFARPSLVRRKIRALQIKAGAPRAKPGPNANPIWKTSTDANEKRLAEQAEAAYRRLVADWQASGPKVGAGATPERASQRPSKGKAARQASCS

SEQ ID NO: 360302 - protein, 418 aa, unidentified
MGDTFEWLVGVDWGSETHDLCVLDAAGMIRGRRSVPHTAEDVHAALQWLAEITGATPEQIAIAIETPRGVLVDTLIEQGFPVFAVNPKQLDRFRDRFTAAGAKDDSRDAHVLGDALRTDRRAFRRVRPDDPLIIELREVTRLREDLQEDEGRLANRLRDQLYRVDAGWLDVAPAADEPWLWALLAEYPDPAAWPQLARRRIAPILRAHRIRRLTAEDLVQRLRAPRLATAPGVSDAVAVRVAALAPQLRLIHEQRLTAERRIDRLLERLGAAESTETEPGEHHDVEILLSLPGVGRMVTATMLTEATGPLAERDYATLRAHTGTAPITRRSGKRIHTVHMRYACKGRLRQAMYHWARTSIQHDAATRQYYEALRARGHHFARALRSVADRWLRILIAMLRSRSLYDSKRFNLVDATTT

SEQ ID NO: 360303 - protein, 338 aa, unidentified
MQIVRIGLDIAKNVFQVHGVNEQGKVVVQKQLSRRKVLAYFAQLPACRIGMEACGSAHYWARELQKLGHDVRLMAVHLIKPYRTKQKNDRNDAEAICEAVSRPQMRFVPIKTVEQQAVLTVHRARELLVSERTAVANQIRGLLLEYGVAIAPGLQRLRRELPAVLSAENEGLPTLARTVVTELQTRLLELDERIAGHDRQIAQVARQNEAAKRLMRVEGVGPITATAIVATVGDAKAFDHGRQFAAWLGLVPKQFSTGGKPVLGRITKRGNVYLRTLLIHGARSVLQFTSQRTDAKSVWVEEVRRRRGDNIAAVALAAKHARILWALLAGGQEYRVAA

SEQ ID NO: 360304 - protein, 345 aa, unidentified
MVVLGADLHKRSHTIVVIDETGRKLAEKTISATAEGHLELRRWAAQWPDRRWGLEDCRHLSRRLDAELVRAGESVVRVSPKLMAGVRRSTREPGKSDPIDALAVARAVLREPDLPVATLDGPDRAVRLLIDHREDLVGERTRHEQRLRWFLVELAIAEPSPRSLGRALVQTTLASVLAGRTEPVARFARDLLARIVELSTTIRALEHEIEILVRTLAPTLLALPGCGALTAAKIIGEAAGISRFRSKEAFARHNGTAPVPVWSGNVVRHRLNRGGNRQLNVALHRIAITQIRLAGPGKLYLEHRQASGDTRTEAIRALRRRLSDEVFRRLRADEAAASTGLAAAA

SEQ ID NO: 360305 - protein, 344 aa, unidentified
MHITSVGIDLGKNTFHLVALGERNKVLVRKKFSRSQLLAYTANLPSSLIGLEACAGAHFVGAALREQGHQVRLIPAQFVKPYRKSNKNDLLDAEAIAEAVTKQNMRFAQIKTLEQLDIQAMHRVRDWLVQRRTALINEIRGFLLERGITFAVRPIHLYKNLPTVIEDAEQNLNPRMRWLLQRLWQEWKQLDRDIETITDEIERISDEDVLCRRLRQIPGFGPLVSTATVAAIGNGAAFRRGRDFAAWVGVVPRQYSTGGKQKLFGISKRGNVYLRRMLIHGARAVLFRIKYNTGGFGQWVQRLTQRAPHNKIVVAIANKLARIAWAVLSSGKDYRHQPLAATAG

SEQ ID NO: 360306 - protein, 405 aa, unidentified
MNHTCGIDWASDHHDVSIVNEHGMEVKQLRIEDTLEGYQELLGVLKTLGGDIPVAIECKEHLLISFLVGEGYTVYPINPKSAERYKDRYNVGGTKTDPVDAFALADILRTDRHKHLSLAYSSDEVRRLQLLCGEYDKLLKNKNILEGQLFDALSKYFSLALNLFGSNSCKILYRLVMEYPTYEKLKAVSFDELSSFLKKNHYLLPKHIGKIYQKIQKSVYYHNDIFDEVLSVTAIGLSKVLLAVTEQLEMLKKKMSRITSSHVLGPIFSSLPGGGPVMSAKLLALMGDNQELYSDPAQVQAYTGVAPIIKRSGKVSRVVFRFACNKAHRDTITWFAFCSMQHCSWAREFYDRKRQEGKRHYEACRLLAFKWLRIIFQLWKHGQRYNEDVHVGYLNKFKERRLKIA

SEQ ID NO: 360307 - protein, 369 aa, unidentified
MNKTIKNIGLDVHKNSISIGIADDDRDGDVRYYGKIDNDMNQLDKVIRKLISKGAVLRFVYEAGPCGYSIYRYLTRNDIDCVVVAPSKIPQQSGNRLKNDKRDCLSLARLHRAGELTPVYVPSEEDEALRDLVRAREDATRALRTAKQQLGAFLLRYDSVYSGKTKWTKAHFNWLADIAMPHPAQQIVFQEYIDTVADCSNRVQRLTEQVRQQSKQSRLYELIKALQSMRGISLLVAATIAAELGDLTRFETPEKLMAFLGLIPSEHSSGERVKKGSITKTGNRYVRKALVEAAHAYRFPARKSRALRKRQEELTKGVIDISWKAQCRLCTRYQYLTAKGKKANVAKTAIAREIAGFSWAIARELPRAA

SEQ ID NO: 360308 - protein, 418 aa, unidentified
MEDERNWFVGVDWASKTHHVRVSDAKGRKVGERAFAHGGQGLAEMAAWILKSTGATPDAVFVAIEVPHGPVVESLMERGFRVHAINPKQLDRFRDRFSPAGAKDDSRDAEVLADALRTDPHCFRPLAPIDPTVVELREWSRIADDLRAERNRLGNRVRELLWRYYPQFLELTDDIAAGWFLDLWRLIPTPDKAMRVREATVDRLLKRHRIRRLTAAGVLERLKAPAIPAAAGTVNAATAHLEAVAQRLDLVNRQIGEANDRIDHLTERLADGEENAKGQLDEQRDVTILRSLPGVGRIVLATLLAEATDALRRRDYHALRCLSGVAPVTKRSGKSKIVLMRQAAHVRLRNAVYHWARTAVQHDQRSRVKYAALRARGHGHGRALRSIADRLLAVACAMLETRTIFDPNLPPKRTSAAA

SEQ ID NO: 360309 - protein, 406 aa, unidentified
MEIEAINRRVIGLDIHQAQITACALVEDERGGLRKEHRQFGAFKRDRRALADWCAAIDPAEIVMESTGIYWKSPYAALEKVGIRAKVVNARHVKNVPGRKTDIGDAEWLAMLSRAGLLRGSFVPEADHRELRLVSRQRQKLVGILASEKNRLHKVLTDSGIRLGVVVSDLHGQSARAMVKAFIEGKPPEEVIQLASRRLKASRDEMMDALHGELSPTHRFVLDELMQHIEDIEERIRRFDQKLLEGLSGAGDALMVLQTIPGVDLIGAAMLLVEIGTDMSVWENEERLSSWVGICPGNNESAGKRKSGRMRKGNPYVRRLLCEFAHAASRTESTFKAKFQGLLVRRGRKRAIVAIAHKLLRTIFFMLKRGQHYRDTTVNYEEMSVKRNAARWIKKLTEFGFLPKPA

SEQ ID NO: 360310 - protein, 405 aa, unidentified
MTVFVGDDWAEDHHDVHLMTSDGVRLEAKRLPEGVEGLARLHGLIAEHAGDPSEVVVGIETERGMWVQSLIDAGYQVYAINPLSAARYRERTNVSGAKSDAGDAKMLADLVRTDAHNHRQIAGDTEAVNGLKILTRTHQRLVWDRTRHLNRLRSDLREFFPAALIAFDDLSHSDALAMLAKAPNPAQAAKLSVTQIRAALKRGGRQRNLNSRAAAIQVALRAPQMTAPTAIAAAFATSTQSLAQIIDGLNTQIEVLEIELTREFEQHPDSDIYQSMPGLGPILGARVLAEFGDDPQRYDSAKARRNYAGTSPVTIASGRKRAVSARHVRNKRLYNAVDRWAFSSLRNSQGCRDFYDHRKALGDLHHQALRALGNRLVGYLHGSLRTRTHYDETTAWAHRQDTVAA

SEQ ID NO: 360311 - protein, 313 aa, unidentified
MNHGNLVVGIDVAKNSLEVATERERFTVGNDEQGLQQLIARLLPLKPELVVLEASGGYEKAAWLGLWSAGIKVARINPRDAYHFAQASRQLAKTDRLDAQGLRRFGEQLRPAPTPVPSDADQELQELVRRRQQLVTIITAERNRDQQTRNSTIGKSIQRTIRNLEREKAAIEHAIGQKLEQLSAKRVALLESMPGVGRVTSAILIARLPELGTLSAREVAALVGVAPYTRHSGQWRGESHIFGGRADLRCALYMAAHNAVRCAGPLRDFYQRLRAAGKPRPHALTACIRKLIVILNAMVKHNTYWSPQCPTPA

SEQ ID NO: 360312 - protein, 402 aa, unidentified
MNAVGIDVSKGKSMVAIMRPFGEIVSAPFEIKHTASDIHSLVELINSVEGESRIVMEHTGRYYEVLAHQLSKANLFVSAINPKLIKDFDNDSLRKVKSDKADSVKIARYALDKWQNLKQYNVMDELRNQLKTMNRQFGFYMKHKTAMKNNLIGILDQTYPGVNTYFDSPARSDGSQKWVDFASTYWHVDCVRKMSLNAFIDHYQNWCKRKKYNFSQSKAEEIYGKAKELVPVLPKDDITKLIIKQAVNQLNSASTTVESLRTLMNETASKLPEYPVVMAMKGVGTSLGPQLMAEIGDVSRFTHKSAITAFAGVDPGVNESGTYEQKSVPTSKRGSSDLRKTLFQVMDVLIKTHPQDDPVYQFIDKKRAQGKPYYVYMTAGANKFLRIYYGRVKEYLSSVPES

SEQ ID NO: 360313 - protein, 359 aa, unidentified
MATMTDPIPTVTIGVDTHKDTHVAAALDDVGRLLGTASFPTTLAGYRELYRWARSWGEVTAAGIEATGCYGVGLTRHLTSAGVCCVEVNRPNRQHRRRHGKSDTTDAIGAARAVLSGEATAEPRGNNGIIEALRVNRVARRSATKARTQAINQIRSLITTAPEPLRARFASPDGKDLSASALINIAAAMRPNRHAIDPINTTKTALVALARRARYLQEELDDLARQRQALIDTAAPAELLAEHGIGPAVAADLLIAFGDNPHRIGSEAAFAALCGVSPIDASSGRQQRHRLNRGGDRHANNALWRIATVRLAHHQPTRTYMTNALANGKTKREAIRNLKRYIARHIWRTLTTHQPPRHL

SEQ ID NO: 360314 - protein, 427 aa, unidentified
MSYRIAAIDVHKKMLAVVVADVAGEGEYQFERRKFGATPGELHVLAQWLVGQEVEEVVMESTAQYWKPVWGALERYWKPSRQKREGASKMCGTLHLCQAKSNHGPRGRKNDFADGERMIKRLVAQELVLSFVPDPEQRLWRTVTRRKHQLTRAKVSFKNQLESLLEQAHIKLSSFVSDLLGVSARRMLKALAEGETDPAALAALADHRLQATPEQLRDALGACAQLHGVYRRLLKMVLEELQVIETHIEQLDREALGLMQEHQDVVHRVAEVPGFGVDSALQMIAEVGPQAAAFRSEKALSSWVGVCPGNEESAGESHSTRSPKGNRPMRRLLNQAAQSAVKVKGSIFEVAFSRLLPRLGYKQAIWAIAHRLCRVLWLILHKGVRYEERGPAVSAKSKRTRAARMIKELQKLGYRIAGGPLPPVARA

SEQ ID NO: 360315 - protein, 363 aa, unidentified
MKKLERRPVLFQGKSVGLDVHQSTTVYSVLDNEGEEIAKASVPSTRAGLETLLDRIGGVEDVQFALEASGSSLWVYDFLVSHADEEDVHVAQSNVIRPIINSQEKNDENDAWWLAFFLWQGRLPTTYVAEGEVRELRIATRELSRLIEERSQMVCRFRSHLRQEGIQVPANFQTKKTRAAVPEAIEETSGARREALQRLLARIEAADAEIAHWEEMVEEMCKDLQIVQTMIEHIPGLGIRTAPVIYAEMGDPRRFRSAKAFAKATGLPPGYRESGGKISSTGITREGSAAARWAFTRAVIACLRCQHSAGWAIKQWILARVRRQPKKKAYVATARKLSEGVWRLFAFGEEFDLAKAFPAKKAG

SEQ ID NO: 360316 - protein, 397 aa, unidentified
MYIVGIDIAKRKHEAAVIDGEGTVIIKPFSFTNNCSGYNRLLAMLTKAKLPLDEVSFAMEATGHYWLALFTRLQKEGFRVQVINPVQTNSIRSFYIRQAKTDPRDALLIAEVIRFGHFSESTLHPENIYELRELCRGRHAIVSMQADVKRKVVALLDQVFPEYETAFTNLFGDTSMAILQTCPTPKELSEMPLEELCHLIEVSSHKRFRMAKAQELQELARNSFGFAMAGDVFSTMIRLYAKHLVFLKQQVREMDRKIAEIMDTLDTPITTITGIGPTLGAYILSEIGDISRFSSAAKLAAYAGIDPTMRQSGEYNGVRNRMSKRGSPYLRHAIWLAASSAVLHDPALKLYFQKKRDEGKPYMASVGHACRKMVSIIYAVMRDNKAYTPYIPNEISA

SEQ ID NO: 360317 - protein, 349 aa, unidentified
MILLGVDPHKSTHTATAVELESNQQVGTMRIEASLTDYRRLLAWAKRWPQRKWAVENANGLGRHLAQWLIARGESVVDVPAAATSRVRELSRGGRRKNDQIDAAAAATVACLQGDGRDVEPEDHTTALALLDERRVNLAQARVRTVNQLHALLRDLLPGGAPTQLSADLAAKLLRSVRPAGDVETVRKDIAWDLVAEIRKLDKQLTDNAARMQSLVEASGSALMDTPGIGPVMAARLIGRTRQAHRFPTSAAFANYAGAAPVEIASADKARHRLSRSGDRQLNSVLHTIAVVQIRMPNSPGHAYYQRKLSEGKTAKEAKRCLKRRLADHVWRVMIADERKAKSLPAHGT

SEQ ID NO: 360318 - protein, 326 aa, unidentified
MTLSHSLDNTFIGIDVGGAKLDVAWHRGDSAHYANRPDAIATLVRRLQAQPQITRIVVEPTGGYEKALVQALRRAKLPVEIIHTSRFTAYRALVGVKAKSDTSDARLLASYAAAPDEVRGRKAGHVELPEDAIREALSELASRRDQLKHMIHAETCRLGTVRLAELREAITTHIETLRAEDKQMHQKMLALVRQRADLQHDQRLLKTIKGIGTKSALVCLALVPELGRVDNKVAAALIGSAPFIRQSGTMNAPAHIHGGRAAVRSILYMAAVTASRHNPVLRPFYERLIAKGKPPKVALIAVLRRLVVFANAVLKSRQPWRGANAT

SEQ ID NO: 360319 - protein, 364 aa, unidentified
MKEQNQRFVGIDLGKRSMAVHFIDHNEKHESWTCMTDVEGRLRLLKRLTPLDTIAMEACPLAFILEALITKQVGSKVLVLNPHGLALIYRSTKKTDREDAAKLAWVIQRLPENELPLVTVPSQKEQELRSLVAEQVNLAQSRTSEINRLHALFVQDGITTVTKKDLHSEQNRSNRYPELSDMARNRATRLERIISSYEKNLEEVESLITSLVAEHELTPYLMSLPGVGPNLVAAFIGYIGDGQRFKQNTITAYAGLVPRIDCSGDSNKYGPITKIGCTVLRRDLVQAAWSLARSTNNGVLGIKYQQLLLTKGKSKAIVAIARKLLETMWILATRKEFYFDYDPVRYNRKMVRYNIHSFGGVGVA

SEQ ID NO: 360320 - protein, 372 aa, unidentified
MSAEHITWVGMDAHRDSIKVAAFFPKRPEPVEWTEATTVEAVRRLARKLQREAPGEVHCCYEAGPTGYALQRQLRAAGIGCTVIAPSLIPVKPGVRIKTDRRDARKLAELFRAGLLTEVHPPSETDEALRDLCRCRDDVRVDLLRARHRLSKFLLRRNCIYRQTKHHWGTRHLTWLEQLRFDDPMSQATFDSYQLAVQQLQERQLQLDVQLAEFGGQEPYREPVAWLRCFRGIDTVTAVCLVAELHDFRRFRSPRQLMAYVGLVPSECSSGERERRGAITKAGNRHVRRLLVEAAWHQRFRPALSAPLRRRREGQPARVLAIADRAQERLYARCRRMTALGKTSPKIVVAMARELAGYLWAVLHPAAAATRV

SEQ ID NO: 360321 - protein, 341 aa, unidentified
MELKRIAIDTSKHVFTLHGVDQRDRVILRRDLRRAQLEPFFRKLLPTEVVLEACGGSHHRGRFLSGFGHTVKLIPPQYVKPFVKRGKNDRNDAEAINEAAARPSMRFVPVKSAAQQGGTMILKTRELLVRQRTQLINAARGHAGEFGVAVARGTASVEALLDRVAGDETLPLEAREMIALLGEQIENLNVRIAALEARMKQAHKTNPVSQLLEGIPGIGPIGALSLALTVDPTQFRSGRHFAAWVGLTPKERSTGGKQRMGGISRAGDERLRHLLVIGATAVIRHVKPGSRNASAWLLSLLERRPRKVAAVALANKMARVVWAMMTSGEAWRGARSVPLVG

SEQ ID NO: 360322 - protein, 316 aa, unidentified
MIEALAKRIAGLDVHKKIVVGTVLIENAHGQIEKQTREFGTFRKELNTLAEWLSESEVEIAVMESTGIYWKSVYEALERKEVKAYVVNARHVKNVPGRKTDVQDSEWLAELARCGLLRASFVPPRDLRELRLLTRYRGKLVGTLSAEKNRLHKILDGCGIRLGNVVSDIDGVSAREMIDALIEGNKEPYDIVLLARGRLNKKIPELIEALDGELSDRHRFLLKQIHSHIRWLEDRVREINRQVVAAMKPYKEEWHLLQTIPGIDELCAAMLLAEIGPDMSCFGSKDHLSSWAGMCPGNNESAGKKKVVKSGRGIST

SEQ ID NO: 360323 - protein, 417 aa, unidentified
MTDEFRWFVGFDWAMEQHRACLLEAEGRFVAEREVTHGGAGLQEFCSWLLKTTGARAQEIAVAIEAPRGPVVEVLLERDFQVFAINPKQLDRFRDRFSMSGAKDDSRDAEVLGHSLRTDRRAFRRLSIDDPLVIELREWSRMYEELKQEQSRLANRVRDQLWRYYPQAGELGDPAANWFLDLWEHVPTPAKAVRVSEKTIARILKNHRIRRFDAAEVLRILRQPPLTVAPGTVEAATAHIRAVAARLRLVNQQIKEAEHRLDELCAAIEAAAEITPGQICEQRDMAILRSMPGLGRITIATLLAEACEPLRSRDYHVLRVLSGQAPVTRRSGKSCIVLRRFACNRRLQNALHHWGRSAVQHDPVSKQRYAELRRRGHGHARALRTIGDRLLYVLCTLLERQILFDPSHKSSQTAIAA

SEQ ID NO: 360324 - protein, 338 aa, unidentified
MNLYCGVDLHGDNGYYGIVDEDNRRIFRKRLPNKLDTVLRELEPYRKQLKGIAIESTYNWYWLVDGLMENDHKVGLANPAVMEQYSGLKNSNDETDAFFIADQMRLGLLKYGHIYPKEERPVRDILRRRMLFVQQKTAQILSFESLFSRQTGGKINGSQVQQLSGKDIEDFFPDEHVRLMAQSSIETIRFLTERISLFEKTALRQCRPKEEFKKLFTVPGVGDVLTLTIMLETGDINRFAHVGNYTSYCRGVKADKYSNEKKKGKNNRKNGNKYLAWAYVEAAHYMIRYCPEAKKWYQRKLARSGKVVALKALASKISKACYFIIKDQVDFDMKKIFG

SEQ ID NO: 360325 - protein, 323 aa, unidentified
MSAQKTKKRVKHFIGIDVSKRLLEVAVHESDYHFSCANQASGFAALIAELIDWRPALIVLEATGGLEIPVTTALNAAGLPVVVINPRQVRDFAKALGQLAKTDRLDAGVLAHFAAAIKPPLRPIKSASEQQLDALLGRRKQLIEMLTAEKNRLGSAANPNIREKIEEHIEWLEQDLAALDEQLQALLKASPTWQLADEILQSVPGIGPVVSVSLLAELPELGKLNRQRISKLVGVAPLNSDSGQHRGTRHIFGGRTHIRSILYMATLSAIRCNPVIKEFYQRLLANHKLPKVAITACMRKLLAIINVMVRNCTRWKEAEAVSP

SEQ ID NO: 360326 - protein, 455 aa, unidentified
MSKAKRSSRKRAISPVHPHAAAIDIGATSHVAAVGPDRDPEPVRSFGTFTADLHRLADWFERCGVRTVAMESTGVYWIPVYEVLEQRGFTVVLVNARDAKHVPGRKTDVSDAEWLRRLHEYGLLRASFHPEAGIAALRDYLRQRERLLDYAASHIQHMQKALTQMNLQLHHVVADITGASGLRIIRAIVGGERDPAVLAALRDHRCKASVETIRQALVGNYREEHVFALAQALERYDVYLAKVAACDARIAAVLDRLQAERPVPTAPLPAPRHRTPNAFAFPARAALHRILGVDLTRIHGLGPYLALKLVAECGTSLTAWPSAEHFTSWLCLAPSNKISGGKVLSSKTRRSNNRAAALLRLAAVAVGRTETALGAFYRRLSGRVGKAKAVTATARKIAVLFYNALRHGMAYTDPGASYYEERYKQRVLANLRRRAKSLGYVLQVTDPTPPVAEVS

SEQ ID NO: 360327 - protein, 465 aa, unidentified
MTRHRRRPLSQPRRTSTMLDQINPNAAGIDCGAAMHVVAVPPDRDPNPVRTFRTFTGDLLQLADWLTACGVTSVAMEATGVYWIPVFEILEARGFHVSLVNARHVKNVPGRKSDVSDSEWIRDLHMVGLLRGSFRPTAEIVALRAYLRHRASLIENMSTQVQRMQKALTQMNVQLALVVSDITGETGMRILRDIVAGRTDPQALAKHRDRRCRASEAEIAAALTGHYRPEHVFVLQQQLQLFDVHQDQLAACDRAIQAQLDTLTRAAPAPSTPLPPSRKRRSAHSNEPQFDLRTPLHHLTNTDLSQIDGIGPHTALRLVAEIGTDMTRWPTEQHFTSWLTLAPRNKISGGRLLSSRTQPSANRAAAILRMAAMTLGRTSTALGAFYRRLSSRVGKAKAITATARKLAILVYRSLKGDLLYDDPGADAYDAQHHAQLVRRLRTRATKLGFALVDLETGELIEAVVS

SEQ ID NO: 360328 - protein, 354 aa, unidentified
MERYVGLDSHAESCTLGVMSAGGRRLRSLVVETNGRELVEAIRGIGGRVHVCLEEGTQSAWLYELLKPHVAEVVVAVAPEKKGPKDDRRDAWARANELRTGAIETRVFKAPEHLAGLRNAVRAYGFAVTDVVRAKNRLKSVFLSRGIGTDASVYDATKRTAWLKKLSTPHRELAEWLGRQLDQLEPLREEAEGLLLAESKKHPIIRKLATAPGMGPIRTAQVVAIVATPERFRTRRQLWSYSGLGIVTRSSADWVQDRAGKWIRAQCIQTRGLSRKRHPRLKAVFKGAATTVITQLADDPLHADYERMLKAGIKPTLAKLTLARKIAATVLSMWKHQEAYDPKRHRPTPQPEQK

SEQ ID NO: 360329 - protein, 319 aa, unidentified
MTTVHLFVGIDVCKRWLDAFAEPLGYRRFANSPEGVDELAAWIGGSEASVGLEATGPHHVLAAERLSEAGCSVHVYNPRRVKQLAGGLGFLAKTDRVDARVVACCVAIVQSPFEARSEAGKRLRDLSRHIDYLTRTRADLKKKKGEPGQSDLVAESIRRQLDALDAEIALLEAAWRELVETSPLHAERYRNLLTVPRIGPKSARAVASELPEDLSRYSRKQLAAYFGLVPYDDQSGDSRRRSRLKCGNPHLRRPLFMAATLASYFDPECKAFADRLRAKGKHHLCVVCAVMHKLARRAIAVVLRNGPWRENMPHPLDKP

SEQ ID NO: 360330 - protein, 358 aa, unidentified
MPDTTTSPVVIGGVDTHTDLHVAAVVDNHDRVIATEAFPTTRAGYRAMLRWMRSHGDIARVGIECTGSYGAGLMRHLNQAGIEVLEVTAGDKADRRKRGKNDTIDAEQAAHAAYARRRTVTPRAHDGMVESLRALKIARSTAVKARRVALQMIHALIISAPEELRDQLRNMTRMQLIRTLAAWRPDTTRYRDPVTATKMSLKSLARRHLELNDEIADLEVAMHALVDELAPDLITRPGIGYESATQLLITAGDNPNRLASEGSFAMLCGAAPLPASSGKTTRHRLNRGGDRAANSALHMIAISRWRIDPTTKAYVARKKTEGHSNPEILRLLKRYIAREVYYLLRNQQRAVNQGTLAA

SEQ ID NO: 360331 - protein, 417 aa, unidentified
MIRTAYLGVNVASRENQFALLSQEDNLLCPSLRLPNSVLGVEELLLKLRPFLKEHDIQKLLVGTEATSMYDWHLLEYLAQSTLAQELTLVLYRLNAREIRNFKKALPNKGKTDRLDAVAIAERLRFGNLKEPYQAQSPYMPLQRLTRFRVHLVETLVREKSFFTANLFLKFSSFKPVKPFGESVFTKTSLAAIHEFHSSEEIAQIPLEDLIDFLIRHGKNRFREPKKVAEALKRVGRESYRLRPEIRPTVDLILAETLNNIRALEKSVKHTSEAADHAFKAFPSTLTSIPGIGPVIASGLLAEIQDIRRFEKEAQLAKFAGLVWNPFESSDFKAEERRLSKNGNRYLRYYLIEGANLVRMHAPEFRTFYELKYREAAKHHHKRALVLTARKLVRLVFALLKKGELYMPKEVLSTNTF

SEQ ID NO: 360332 - protein, 288 aa, unidentified
MSISMIGLDTAKSVFQIHGVNEAGKVELRRKVRRSDLITFFEKQERCTVVMEACGAAHHWARILSGLGHTVKLIAPEAVKPFVKKGKKNDAADAAAICEAASRPNVKFVPVKTVAQQGILALHTARALLVKQQTMLANAIRGLATEFGHIVPKGLHNLEPLVALVDTDEAMPEQARQAVAELHKRFAELANGIEALEKEIVKHARTDPTARRLATIPGIGPITASLIATTVVDISRFKSARQFAAWLGLVPRQHSTGGKTRLGRITKAGNKEVRPESPETHHTWAMAA

SEQ ID NO: 360333 - protein, 427 aa, unidentified
MSYRIAGIDVHKKMLAVVVSDVEGDGEYQFERRLFGSNPEQLRSLAEWLLEQEVEEAVMESTAQYWKPVWGALERFWKPMRQRRGGAGPMSGALHLAQAQSNRGPQGRKRDFPDAERLVKRLVARELTLSFVPDGEQRLWRTVMRRKYQLTRNRVQLQNRRECLLEEAYIKLSSLVSDLLGVSARRMLKALAEGETNPASLAALADRRLRATPEQLCDALGACMDLNPVYRRLLKMMLEELRLIEEHIGKLDQEMADLLHPYQDQVKRLAEVPGLGVDSAQQILAEVGVRAAAFPSAKQLSSWVGACPGDNQSAGVNYNHRSPKGNRAMRRILNQSANAAVKAKGTIFEVVYRRSVSRLGHKQMIGAIAHRQCRLIWKVLHDGVRYEERGPTVSKGSKQRRAWRMIRELRGLGYRVELESPQQPNPA

SEQ ID NO: 360334 - protein, 263 aa, unidentified
MAQQTLIGIDLAKHVFQVCMVTPTGRLKTNTTVARGKLLALIARQPPALIFIEACGGAHDWARRFRAVGHEVRLLAPQYVTPFRRGQKNDPNDALALTEAGQRPNIPTVPIKTIEQQDLQALHRVRERLVKHRTALVNQVRGLLLEYGIVLPQGIARLRKRLPRVIEEADNGLSILMRDLLQRLQSELSALDTRITDVTCQLTRLSHELEACQRLQAMEGIGPLSATALVAALGNGHDVQTGRQVAAWLGLVPRQHSSGGTTR

SEQ ID NO: 360335 - protein, 396 aa, unidentified
MFDTFVGIDISKNSFDIAVVNSYNSVILKNRKFSMTQDGFLQFLNILSKYDSSTTLIAMEATGCYHFNLLDFLLSYSFNTTVINPFLIKSFSSSFSVRKTKTDKKDALTIAFFAKEKSAFLHLSVKSQFDSIRTLIKAREAVTDDIASYKVRLSALLSVTFPELTDTVSDIFTKTILNILIQAPSAKAVTAKGFDFINSIVANSFIRTPSSAIWEAATSSIGTTNQYIEMLIVSYIEILLKLIEQREVLEAQMKEIASADNKLAENIAIIASIPGIKPKSALCILAETGIFDKEVTDVFANHRKLTAFFGTDPSVKQSGTSVRGNGSISKRGNPILRKKARNLAFTIVLNVKIFKDYYNKKISEGKCHTQALIAVWNKVLRVIFAMLKNRVHFIQA

SEQ ID NO: 360336 - protein, 389 aa, unidentified
MLYIGIDVGKRNHEATILDESGKELCESVKFPNSIAGAEKLLSKVPNPKNAMFILEATGHYWLSLYCYLASKELSTQVINPIQSDSLRNLYIRRSKTDKKDSFIIADIARINRMPKTKLADENILKLQTLTRLRFELIDQITALKARIIGVLDRIFPEYESIFSNVFIKSSRELLKNSACPEEILEFDLSELAESLNKASKGRFGTVKAKELQSKAANSFGITLGLDAFRLEIKLLLSQVEFIEAQIETIDSSIKELLQEFKACFITTIPGIGDVLAASMLAEIGDINRFNDVKKLVAYAGLDATVHQSGQFTGTKAKISKRGSPYLRRSLWSAANSARRFNPVLRDFYQLKIKQGKHPQVALGAVARKLTHLVYYIILLPINKSSFLS

SEQ ID NO: 360337 - protein, 351 aa, unidentified
MTTLASTIDGVIGVDTHRDTLAAAATDMVGGLLAQTSVSTDAAGYRRLLDFARAQVPGRRCWAVEGAGSYGAGLTAFLQAQGERVVEVGRPKRPTRRGGAKSDALDAVRAAREALAHDHPLAPRRRGDREALRVLLATRRSACRAKVCAINQLKALIVGAPEELRAELRGLATRQQVRRCATLRDRPTRSLEHRMTVRALRLTAQRIQLLAAEAAELRAELDRLVAAVAPWLLELPGIGPISAAQVLASWSHVGRLRSEAAFAALAGANPIPASSGQVTRHRLNRGGDRQLNRALHTIVLARLRDDPDTRAYAARRRAEGKSSRDVRRCLKRAVARQLFKLLERTTDQRSR

SEQ ID NO: 360338 - protein, 335 aa, unidentified
MNRYIGIDVHQDKCHATVQNCDGEIVKQDYFQNSPSGYDDFFDGAGEGMVAIEAGDAWQPIYDWLDEKGFEAKLADPHKTRIIAEVKIKTDCRDSEALADLVRADLIPEVYVPCDEKRDLRRTVRHRGKLVKDRSKLMNRIQAVLRERGIELDVDLRTEKDRRKLLELGIDSVDDYLEVIETLDDRIGELEEEIEKTAGDMEEAQLLMTIPGVSYYSALTIIAEIATVERFPTSSHLCSYAGLVPSVNQSGSKEVHGSIQGGRPLLRWILYQCTHVHIQNAPESHITKFYKRLVRKKPKKLAKTAAARKLTKVIFWMLKLKEEFHPEGFDPRNSH

SEQ ID NO: 360339 - protein, 352 aa, unidentified
MTVTNLARSVTGGVDTHLDVHVAAALDERGALLGVESFATTENGYKKLLGWLSDFGVVELVGVEGTGSYGAGLTRHLQAERVRVVEVDRPNRQRRRLKGKSDPQDAISAARAALSGDACGEAKTRDGNVESMRVLRVARASARKGRTQALNQMRNLVSTAPDSIRAELRGLNVFHLLERASTYRPGSKRDIVSLTKFSLRMLARRAMTLEEEITEIDAILKPLVKETAPELISTLGIGTDAASALLVAAGDNPERLRNEAAFAHLCGASPLDASSGKSQRHRLNRSGDRQANSALWHIVITRMVYDPRTTEYIDRRRKEGLTKKEAVRCLKRYVAREVYGLLPHEKLGLDSP

SEQ ID NO: 360340 - protein, 323 aa, unidentified
MNKDIKYFGIDISHLVFDVTDFEGNHHQFKNNPSGFKKLEKLLGVDSHCVMEATGYYHYQLAYFLLESGIKVSVENPLSVKRFIQMKLSKIKTDKSDSKLICEYAKQVELKLWKGNSKHQTECLQMTRLLSVYTKQSTMLKNKLHGEAVLGNPSKVVVGSLKRSLKQLQKELRTLEEKLMVLVKQEHQEVLTRLKTIPGIGNKTAVMLLVLTDGFDRFTSASELCSYAGLTPIIRKSGSSVNGRSRISKMGNQKLRNLLFMCSFNACKYNKACREVYERIVAKGKSKKLALIAVCNKLLKQAFAIAKSGLIYDDTYRSTLVKN

SEQ ID NO: 360341 - protein, 358 aa, unidentified
MKDRTILTHGCTVGVDLGDKYSQYCVLETDGEVVQEGRVRTTAQALRGWCSSLEACRVALEAGTHSPWVSRLLKELGHEVIVANPRKLRLIYQNNDKCDQVDARYLARVARMDPTLLAPLHHRGAIAQADLAILRARDALVTARTQLVNHVRGAVKSFGGRLPTGSTHAFAKKMGAHVPQELKPALEPVLRAIQELTDRIADHDRKIEGLTEKYPETKNLCQVAGVGPLTSMSFILTLEDPARFKKSRTVGSFLGLRPRTKDSGERESQLGITKAGDMFLRRLLVGSAQYILGPFGPDTDLRRWGMALAQRGGKNAKKRAVVAVARKLAVLLHRLWVSRQPYEPLRNSRCNKIQVVSA

SEQ ID NO: 360342 - protein, 365 aa, unidentified
MSRMTVTTSPVTGGVDTHSQTHHAAVIDQLGRPLSDREFPATPAGYRGLLGWLREHGELERVGVEGTGAYGAALARHLRAEGVTVMEVDRPNRQTRAAVGKSDPLDAHAAARAALAGTACGVPKTRDGAVEAIRALRVARRGAVKARTQATNQLKALLLTGPAELREKLRPLSTAALIDTCARLHPTGPLSDPEQATKLALRRLARRHQHLTEEITAADAELKGLVTATAPGLLTLLGVGVEVAGQLLTSAGDNPERLHSEAAFAHLCGVAPIPASSGKTHRHRLNRGGDRAANNALYTVALSRLRCDPRTRRYVERRTKEGLSKPEIIRCLKRYLAREIYHALLTRPPSSSSRPPHRPQRAGQP

SEQ ID NO: 360343 - protein, 371 aa, unidentified
MSKNITFIGLDVHKNSIDVALADAGRDGDVRFYGTIGGDLDSLHKVVRKLQSTGSELRFAYEAGPCGYDIYRSLKSQGLDCIVAAPSKIPRKSGDRIKNDRRDALNLARLHRSGDLTEVYVPTVEDEAMRDLSRGREDAVKALRVARQVLLAFLLRHGHRYSGQSYWSKTHNSWIAGVKMPHRAQQIALQEYVHAAQEQLERVQRLTRQIQELVPQWQLAPLVKALQALRGVSLIVATTTVSELGDLTRFDSPKQLMSCLGLVPSEHSSGGTVRRGGITKTGNGHVRRALTEAAHTYCHPARESRNLLARMEGLPQKVRKVAWKAQVRLCARFRKLMARGKNRKTVITATARELAAFMWAIACALLPEPMV

SEQ ID NO: 360344 - protein, 454 aa, unidentified
MGRKSNMEKMPIVNPNAAGIDVGSKSHFAAIGQSDDQIREFGCYTEDMRELCQWLTDNGVTTVAMECTGTYYKGLFVMLQEYGIEVLLANGRQTKNMKGKTDVKDARWIQKLHALGLLTGSFQPPEFTEAVRKYSRHRQGMVQDAATYIRKIQQALRLMNLRLDVAISDVTGKSGRAIIEAILAGERDAQKLAALCDRRIKKSKEEIARALTGHWRSEYIFELKQSWEIYQFYHTKIRECDTEIERLLEQGVEDNERQDGEQRQEYDEKARPVKKLNKNDPKFDIQQLAFQLSGGVDLSTIPGVGRNTILSIIAEVGLDMSAFKSAKAFASWLRLAPNNKISGGRTLSSHVPKGATPLANALRKAANVIGGLKTGGLMHFFKRIAYKKGRPAAITATAHKLAVIIWNMITKKENYNYYNDEQYESKIRELQIQNLNKKIRALGIQAHEINFATN

SEQ ID NO: 360345 - protein, 323 aa, unidentified
MNKYSETFGIDISKDVFDCYGSTQGHLQFKNTESGFKKFQKILSKDSLVVMEATGYYHYRFAQFLYHQGFVVSVVNPLSIKRFIQMKLAKVKTDKSDAKAICNYGLSQEVPLYNALTEVQSECLQLFRWMDSLLKKRTATKNKIHGEKVLGIPSKYVYHSLNRTLKHLDRELQGIDKKLLSLVKQDQQKQLTLLKSIPGIGVKTALFLIVITDGFKKFETASQLCSYAGITPTIRASGSSVRGRSRISKVGNRKLRNLLFLCAFSAYKHNKGCRELYERIVNKGKSKKLAMLAVSNKLLKQAFAIAKSGIPYDETFVSALMAK

SEQ ID NO: 360346 - protein, 343 aa, unidentified
MKISRVGVDLAKNVFQLHGVDRHDQTVLKRRLSRDKWISVLIKTAEPGCEIGMEACGGAHHWARLLMAKGFKVKIIPPQFVTPYVKSNKNDANDAEAICEAMTRPGMRYVKAKTVAQQDIQATHRIRKELMGHRTAKSNQIRGLVTEYGLVAPVHMASLRAAIPRWLEDAENGLTRRFRTLLHGLWEDLVTLDGRIETLTGEIGSIAKNDPVAQRLQQLRGVGPLVATALIATVGNGEQFDKGRQMSASLGLTPRQHSSGGKDRLLGITKRGDVYLRSILIHGARAVVAQAKHKEDPLSRWMTELAKRRHPNVAAVALANKTVRMAWAMMRHDADYDPGFAVG

SEQ ID NO: 360347 - protein, 389 aa, unidentified
MIFVGIDVAKDKHDCFIISSEGEVLADVFTITNSKEGFKYLLQTINTCTGIGEKIKVGLEATGHYSYNLLGFLLDNDLPTYVINPLHTNLYRKSQTLRKTKTDRVDARTIASMLMSDVSLKPYTNIAYHNSELKSLTRYRFEKVSQRAKLRTSVSRLVNILFPELEKLLPTLHIASAYALLSELPSAKHIAEVHLTRLTNLLYTSSKGHYGREKAIQIRETARNSIGTYMPAKALELKHTIKLIKEFNNEIAEIESEIQSIMEKIDSPITTIPGISLRMGAMIIAEIGDFNNFTSPDKILAFAGLSPSTYQSGKLNNCYAHMEKRGSRYLRYALFNATKFVCNWCPSFADYLAKKRSEGKHYNVAISHAAKKLVRLIFAMQKSGQPYSA

SEQ ID NO: 360348 - protein, 345 aa, unidentified
MPIVGGLDIHRKQITFDYLDTVTGEVRRGQIAPADRVHLRAWLARFAGRDDVAFAVEGCAGWRYVAEELAAAGITAHLAEPADTAFARGRKRHAKTDKTDARHLRMLLAEGRLPECWIPPARILECRALLELYNDLRRERTAWAQRIHAVLFHQGAPQLGEGALRTEQGVAGLRAAAAAHLSPAGQLQVATALEVIDGLEARLHAVRHQLLDAARHLAGAKVLAARLYGVGPVTGLAITCWLAGAGRFSSSRQAVRFAGLDITVSSSDRKGPPGKLSRQGPPVLRWAVYEAGKAHARTSAPDHRYYAAVKDRKNSKRACLSEARKILRQAHHILAELGDDALAVA

SEQ ID NO: 360349 - protein, 362 aa, unidentified
MPKMIWLGMDVHAASITVARYEDQAATAMVQTIANDPAQVRRLVRRLPAGCDVRACYEAGSCGYGLHRQLTALGVHCDVIAPALIPRRPGERIKTDRRDAEKLGRFHRSGELTTITVPTPSQEAVRDLVRAREDVRRDRTAARQRLAKFLLRHGHRYPGSHWTKRHWEWVCGRPFEGAARTVFVHYCDHVLALNERLAHLEREIHTFADSPVYQPVVARLSCLRGLATLSALMLIAELYDLRRFRTPRELMAYLGLVPSEHSSGARERRGRITKTGNALARRLLIEAAWAYRHPARQTRRVHQALITQPPAVHAISDRALHRLTARYRRLLSRGKTPHHAVTAIARELCGFVWAIALVPNLA

SEQ ID NO: 360350 - protein, 451 aa, unidentified
MTSPSLDRSVPQIAPDAAGIDIGADTHWVSVPPERDEQSVRSFGCFTKDLYALADWLQQCGVTTVAMESTGVYWIPVFQILDARGFEVCLVNTHHVKTVPGRKSDVLDCQWLRQLHSYGLLAASFRPDNAVCVLRSYVRQRERLTQNATVHIQRMQKALTEMNLQLPQVVSDITGATGMRIIRAIVAGERDPQRLAAMRDPRTKRSTADIAAALAGDYRAEHLFVLQQELLLYDTYCQQIAQCDEQIQACLATFEDKSAPDVPLSPRPKGRQASRNAPQFDLRAHLYRLCGIDITQIDGLEALSVQTILSEVGLDPQRFPSLKHFTSWLGLCPGSRISGGKVLNSKTRKVVNRAAKAFRIAAQSLARSQTALGAFYRRIRSRLGAPKAVTATAHKLAHLFYRLWSTGDAYEDMGVEAYEQQYQQRVLKHLKHRAQQMGFELIPQSSLPEVS

SEQ ID NO: 360351 - protein, 339 aa, unidentified
MDYIGLDVHKAFCQASTQDVEGNELANERIDTTQAAINLFLDRFTDAKFVLESTNVWEFIYELIEARGFEVLLAHPLKVKAIADAKIKTDKIDAKTLCDLLRANLIPTSYVPKKEIRDMRELLRHRTTLVRKATAFKNRIHAELLRRGITRPIGMKTAFTAISKKWMRSLEILALDSNLVCLEAIEGEISKLNLRLREEFRKRPEAVLLATLKGIGYYTALTLVFEIDNINRFPSPEKLCSYVGIVPTVKQSGTKAYYGSITKQGTSHLRWLIIEAVHTHVRSCPNSDLTRFYERILKRKGKGKAIVATARKMLHIIYWMLQRGEKYHSHGYNPVDPPA

SEQ ID NO: 360352 - protein, 387 aa, unidentified
MPQPNDLSRSLVALDQNSTIIAVVELSQSSWLVAGMLPGIERQPHKKLEPSPERLLGLLHRWQDEAVRAGRTITRIAVAFEAGRDGFWLARWLAARGIEAHVMHASSVAVSREHRRAKTDRLDTELLKRGFLGWLRGERGHCTMARVPTIAEEDAKRPNRERDCLVGERTRIVNRIKSTLARLGIRNFKPTLRKSAERLASVHTPEGVPLPPNTLAELQRDMARLGFVVGQIREIEDARQKRLEQQHETGPHAMVRRLARIVGIGVETADLLVHELLSRPMRDRRAVARYAGLTGSPDESGARRREQGLARAGNARVRRAMIQLAWRFLMFQKESALALWYHARTTDSRSGTRKAMIVVLARKLIIALWRFVTTGELLEGVVLRPAS

SEQ ID NO: 360353 - protein, 428 aa, unidentified
MSKKDYSSQLEKRQRIKEGTLIVGVDIGRQFNAVGFMNKEGKVLGKYPKVYNSRAGFDYFVKIVEEVKAEHGLTEVLIGLEPTGHYWRNLAYFAKDRGYAVRFIRTTALKHQRELDESSSAKNDLRDAITLANITREGKYIDTVIEDGIYRQLRTLCKARERIKRYNVGSKNTLTAALDDYFPELRNIFWSAHSRGLWAILEMCPFPEDVLTVNILKIKRIIAKSSRRGKTAYDKAVDLHKAAKESIGLKNIGNSDRYRIKICLQEVKRTEEMLKEIQNEMKGLLKQIPYAQYILSIHGIGPLSAAIFLGELGDPGNFKNARQIIKYSGYDPQERDSGQRVGRKRISKKGRWLLRKTLFFMGMRVVVKKGYFKDYYQRKLETKNRFDHLIKKKEGLCAVVIKLIKVMFALMRDRRMFDDKADALPLAA

SEQ ID NO: 360354 - protein, 343 aa, unidentified
MDHFAGLDVSVKETSICIVDDTGRIVREVKVASEPEALLQVLGNPIYRFKRIGLEAGPLSQWLFSALAEAGLPVICVETRHMRAVLQAQINKTDRNDARGMAQMMRAGLYRPVHVKTLRSQKLRMLLTHRKLLQSKAIAIDNDLRGTLRNFGLKVGVVGTVKFEARIKELVENLPDLAVLVEPLLMVRRVLREQFAILHRRLLAIVRNDEVCRRLMTVPGVGPVVALTYRATVDVPARFRNSKAVGAVFGLTPSRYQSGEINRTGAISKCGDEMMRVMLYEAAHIMLVRLAKWSWLKAWAVKIARHRGMKKAIVALARRLAVIMHRIWVDGTEFRWTHEVTVT

SEQ ID NO: 360355 - protein, 501 aa, unidentified
MAAKKNAKTKADSAGEGVQAHGGVAAEVTDEVTQVVEYAAGIDVAKGFGMVCTRVPGSRRGSKRQKVWRVNATFKEITALMDHLVCEGIQRLVLESTSDYWRIWYYLAEAAGLDVWLVNARDVRHLPGRAKSDRQDAVWLCKLNERGMLRRSFVPPRAVRDLRMLTRTRSRLAQDQARHQSRVEKILEDALLKVSAVISDLFGVSGRRFLDALVAGERSPAALAALGDYRLKASKAKLEETLTGQFRDIHATEIAVHLRLIDAINAEITGLDAEIEKALPQVPRTAPVCTACGVAGGGHAPDCQNLGVLLLGLAGRLDEITGIGPVNARVLIAELGTDPSQFPTPGHAAAWAKLTSRLMQSGESSWNGRAGKGNPHLRGALGQAVMSAAKTDTRLGAMYRRIARKRGKQKAIVAVARVICEIAWRLICDPGARYIELGPDYYQPRSARQRTRSSIRQIEKDNPGKKVVLIDDPAIAGTPGSAGPAEPAALPAVLSRLPVTY

SEQ ID NO: 360356 - protein, 409 aa, unidentified
MGLYCGIDWAENHHDFAILNDLGEVVSRGRVDNDAAGFARLLEAFAEAGDTAENLIPVGIETDHGLWVAGLRASGRVIYPINPLAASRYRSRHSVSGSKSDSADAVMLANIVRTDAVAHRPLPADTDSALAIRVLARAQQDAVWSRQRFGNEIRSLLKEYFPAALTAFQSLEDGLTRPDARSVLAAAPTPTAAAALTRPQLKAALKRAGRSRFLDRDVERLRAIMRAPALRQPPQIEAAMGISLMTLLRQFDAACTAAETLAAHVSVLFSEHPDAKIITSFPGLGPLAGARVLAEIGDDRNRFATARGLKAYAGAAPITRASGKKTFVLHRHVKNRRLAAAGTIWAFSALQASPGARRHFDARRAGGDWNHQAQRHLFNRFLGQLHHCLTTREFFDELHAFPPPLPIAA

SEQ ID NO: 360357 - protein, 369 aa, unidentified
MGEYSEIFVAFDVAKRKHAVAVAESGRRGEVRFLGEIENSEAVIERTLKKLASRHGRLHVCFEAGPTGYGLYRQVQALGHACTVVAPALIPRRAGERVKTNRRDAVTLARLHRAGELTGVWVPDAVHEAVRDLVRARQAAADDLRRKRQQLLSFLLRQGRIYGAGGHWTLAHRRWLARQSFEHPAQQIVFQEGVDAIEDAAQRLHRLEKQLAIIVPSWSMAPVVTAYQAMRGASFLVAVIFAAEVGDVRRFDTPRQLMSFLGLVPAESSTGDTIRRKGLTLAGNRRARRALVEAAWTYRFPARVSEALRARLDGLPKGIRDIAWKAQIRLCARYRRLSAAGKKLPVVVAAIAREIAAFLWAIGREVAPM

SEQ ID NO: 360358 - protein, 370 aa, unidentified
MLDTTTFIGLDVHARSIKAVSLDVMTGEVRAATFGYDAGAVAEWVRSVDPRARCVYESGVTGFDLQKRLSGLGVDCVVGAVSKMIKPSADRRRKNDRNDAEFLARMLSVGNVVEVWVPDDECEAARDLTRALEDARDDLSRSKQRLSKFLLRHGLAFDERTPTGRRKGNWTRAHWSWIESIRFAERADNDVLAYYVDAVRRAAEEKARLEGLVEAEARKPRWRRRVDSLRCLKGVDTATAADLVFEAGEFSRFGNARSFAAWVGLTPSEHSSGESDRRGAITKAGNKHLRKALVEAAWHYLTCSARPKEPARGQAPDPGARRHAAKGVRRLVERREALLARGVHGNKANVATARELACWVWAVGLMAEEA

SEQ ID NO: 360359 - protein, 344 aa, unidentified
METIHARCAGLDVHKKTVVACVITPGSKGGWHREIRTFTTMTRQLLELSDWLFTHGCTHVAMESTGEYWKPIFNLLEGNFEVMLVNAQHIKAVPGRKTDVKDAQWIAELLQHGLLRPSFIPPVTQRELRDLTRHRTSFIRERVNLVNRIQKVLEGANIKLASVASDVMGVSGRAMLKAIVAGETDPRVMAGLAQGRLCHQRDQLIEALEGRVQPHQRFILSDLLCQLDQLEQTIARFDEEVLKYRQPFEDVIELLDTIPGVGRQTAEMIVSEIGADMSRFPSAAHLAAWAGLAPGNYESAGKRLSGKTRKGNQTLRAGLMQSAHVASRSHLSCRSVSTHCPSTR

SEQ ID NO: 360360 - protein, 387 aa, unidentified
MTQVDNLSRSVDAFDQNASLTVVVEMSEASWLVTGMVPGVDRRPLKKLKPDPDALLRLVERWRSEAEKTGRTIERVALAYEAGRDGFWLARWLRVRGIEVHVIHSTSVAVSREHRRAKTDRLDTAMLMRVFLGWLRGERGHCGMVAIPTLEEEDAKRPSRERESLVGERTRIVNRMKSALARLGIRGFKPKLRKAPERLAALRTPEGSAIPANMLDEFRRDMARLAVVREQIEEIEQARLERLEQAPAARPNAMVHLLARIIGVGIETTDMLVREVLSRNLRDRRAVARYAGLTGSPDESGSMRREKGLARSGNARVRRGLVQLAWRFLLFQKDSALVRWYRSRTEGPKGARKTTMIVALARKLLIALWRMVTTGVVPEGVVLRPVA

SEQ ID NO: 360361 - protein, 420 aa, unidentified
MNNTILSSLFIGIDVDSIYNVVHMMNFNQKDLNHFKVKNDLNGVTAIKNNTIETIKKYNFTNAIFVLESTSIYAFHTATFLSSNEELLIYNPKVYCINPKISCNYRASFADTNKDDFTDAKLLVDLVRVGRCDKLTPWKGAQFLALQRLTRHRKHLADMLAREKNYILNNIFLKFSGLCTASSSESPFSDMYGATSTAILTEFLSPEDIINTSIEDLVIFVNDKSNNKISNPEETIKLLKQCATNSYRLDKVNLLPINLAITSSLNCIRSFENEIKAVSREIQALIKGFNNEEYICLTSIKGIGPVFAAGIISEIGSIDQFDDDDALAKYAGITWRKTQSGKFESEDNPLTKTGNKYLRHYLIEAANQVRKFVPEFNDYYNKKYNEAKPPKELRAQILTARKLIKVIYALMKNKSLYKSR

SEQ ID NO: 360362 - protein, 346 aa, unidentified
MKKVMAGIDLHSNNAVIGIMDTDGKRVASSKLPCDLKEIVKFLAPFKTRLEKIAVESTYNWYWLVDGLQGLQYPVVLANPAGMEQYSGIKHADDTNDAFFLAELLRLGILPTGHIYNAQLRPVRDLLRRRLTLVHQRTALMLSFKSLYTRTTGQEMALNALKKLEVKAAQDLYEHPANQIIAGMQIKHIEQLTESIRKIEKVVMASARELPSYGKLTTLPGIGIILGMTITMEVGDIKRFASPGDFASYCRTVQAQRTSNNKKKGENNSKCGNRYLAWAFIEAANFARRYDQQCRKWYDRKAAKAGKIIATKALACKLAKAAWYLMAQGTDYDAQRMFGQPAQTNR

SEQ ID NO: 360363 - protein, 285 aa, unidentified
MSVYVGIDVHRKRSQVAVIDQDGRVLANRNVNNGVTPILSVIGGLPPGTPAAFEAAYGWGWLVELLEDYGFEPHLVHPLQCKAIASARLKNDKVDAAILAQLLRADLLPEAWIAPPAVRQLRALLRHRAEVVSDALALIDALESVTGRLDLEVRQHARSDPRVKVLTQLPGVGPFTALVLLAEIGDITRFASARKLASWAGLTPTVRGSDRTVRHGHISKQGSVWVRWILCEAAQKAKHSPQFAASYQSIARRRGTKIATTAIARKLLTRAYHLLTDAASGGAPH

SEQ ID NO: 360364 - protein, 330 aa, unidentified
MRKTVIGIDISKSTIDATIVFLDQEQSYHDSFLNKLLGFKQLLKWAKENCQKEVLFCIENTGHYGRSLCKYLDKYNQEYTLLNAVEIKLSMGIKREKSDKSDSKMIALYGLKFPERLRTGTLLKEELLGLQLLLTQRKLLQAKELDFQRNIKLLKHCLSDDNTAKTILKENARHRKYLQKERKKIEVKIDKYVISRPLLNRNYKLLKSVSGIGTIIALQVLVQTHNFQQITQARKFSCYCGVAPFKNESGSSIRKGTRISFYGHKKLKQLLNFGAMNAVKCDPQLKEYYQRKVEEGKNKMSVLNAVRNKLIHRMYAVIKRGTPYVIQQTF

SEQ ID NO: 360365 - protein, 358 aa, unidentified
MPTEAASKVYAGLDLHKHSVFCGLIDQEGQPLYRRRLPAELPPILQALEPYRPQLQAIAVESTFNWYWLVDGLQAAQYPVQLANPAAMTQYRGLKQTNDETDALWLAELLRLGILPTGYIYPAAERPVRDMLRRRLLIVRQATQTVLSLQSMVTRHTGQSVSATKLADWTLVEVRAKFADAYSQQTATALLELLGEQRRLQHSLEKQVLAVAKPTEPFQRLVSLPGIGPILGMTIALETGPIARFASAGDYASYCRTVNSRRESAGKKKGENNRKNGNAYLAWAYVEAAQFAQRYSPRAHAWFASKMARTGRVVAIKALACKLAKAAFYVLRDQVDFDEEKLFGAIAGGDCKPEPSLV

SEQ ID NO: 360366 - protein, 362 aa, unidentified
MPDGIRWVGLDVHARESTIATFDQETGELSTKRVVGRPHELLPVLREIARPARMVYEAGPTGYGLTRRARAEGIELVVCAPGRTERPPADRIKTDKRDAIRLARLLAAGQLSLVTVPSVEREQLRDLVRCREDIRVDLMRARHRLGKFLLRREIYWDGPGEAWSRRHRAWLAGLRFADHASRLTLADYLHAHDVLVARRDQLETELEALAASAPCRAAIARLRCLRGISTLSAVGLCAEIGEWDRFDHPDQLSAYLGIVPSEHTTGQQRRQGSITKAGSTHARRLLIEAAYHYRRQPGVGRALEERQRDQPPETINIAWRAQRRLNARWRQLKDARRKPNGIVAVAIARELAGYCWEIVLTE

SEQ ID NO: 360367 - protein, 327 aa, unidentified
MTDVSVQPVFVGIDVAKGSLEVALAQSGATTRLSNDEQGIDALLALLADKPVALVVLEATGGLERPCAQALYLAGLDVIVANPRQAHDFARSQGYLAKTDAIDAKVLSHFAQTLHTSERRARMLLKLAAPEQQQLDALVSRRSQLVRMRVAESNRLEQAHPLAARSIRDIIKVLDKQIGALDKDIGGRLKMHFGKQMKLLEGFKGIGDGTKAVLMAALPELGQLSSRQISKLVGVAPLNCDSGKMRGKRVTWGGRADVRSALYMATLSATRFDPTIKTFYERLRAAGKPAKVALVACMHKVLTIINAVLKSGVPWQASYPHAGATSK

SEQ ID NO: 360368 - protein, 414 aa, unidentified
MNAAGIDVSSRKSTIAVLRPFGEVVKVPFEVSHTAEGLASLARQLKAIDGETRVVMEHTGRYYESVANVLHESGLYVSAVNPLPIKEYGGNSLRKVKTDKADAMKIARYALDNWCDLRDYTPMDTVRYDLKTLNRQFQLASKQKTASSNNLIALLEQSFPGIRKCFEGPVRKDGTQKWVDFAHTFWHADCVRKLSLNAFAERYRKWCKRNRYQFSTEKTDEVYELAKSAVVLVSKTEVTKVLIKEAANQLTSISRSVETYRTEMNRLASQLPEYPVVMEMYGVGESFGPQLMAEIGDVRRFERKQSLVAFAGIDPMPNQSGEKNVRSNKSSKRGSPYLRKTLFNIMTVHLQRAPANESVYQFLDTKRAGGKPYYVYMMAAANKFLRRYYAKVRDYLASLDSLPPVDMDSTGLNK

SEQ ID NO: 360369 - protein, 328 aa, unidentified
MKTVVMGIDVSAVRLELAARVDGSLVRKSVANDAAGHRQLIGELQKFGMARVVMEATGIYGIDLALALDEAAGIELMVANPRAVRAFAKSLLQRSKTDRADALAILEFAERMPFHAWRRPSKQAFALRAISRRIYAVNDMIRKEKNRDHISEHLDALPRSVTQSVARMLRLLEQELERLRESALKLIADDAALAQKYELLLSIKGVGNASAINILGELALTAPDMSARQWVAHAGLDPRFYDSGTSVHRQPHISRQGNKHLRAALYIPAVVAANCEPAVTSFRNELLARGKKKRQTHVAIMRKLLHAIHGMFVTGRPWDPTRFRPSAA

SEQ ID NO: 360370 - protein, 374 aa, unidentified
MKEYITFVGLDAHKEEHHVCLRVAGKEKPEEFVVSNHPQEIKRMVKRIRKQAPGPIRMCYEAGPCGFALQRQIKAAGASCVVVAPSLIPVKPGDRVKTDRRDARKLVDLFQAGLLTEVHPPTEEEEAVRDLCRCREAAKAAEISARHQLSKFLLRHGRIYREGRLWTQKYFRWLRNLKWENAIEHRVLSDYLQEVERRMDRVKALDEAVEEVAQQKPYATPVGWLRCFRGIDTVTAMGIVSELFGFARFTCPRDLMSYLGLVPSEDSSAGKRRRGAITKTGNRRVRRLLIEAAWHQRHWPITSKALRKRREDQPMWVIHVADRAKQRLHRRYWHLVKNGKTEPVAVTVVARELVGFIWSVLHRQVETVPDKGVT

SEQ ID NO: 360371 - protein, 334 aa, unidentified
MDTHADVHVAAALDPIGGLLGVQEFPATPEGYGRLLGWLGGFGTVSLVGIEGTGSYGAGLARHITWAGVRVVEVDRSDRQDRRRQGKSDPLDAISAARAAQSGRARGASKGRDGAVEAIRTLMVVKRTARSERTQTINQARSLVLTGPDDIRVRFIHHTTAGLVADLAGLRPRPGATVGYATRIALRELGRRAQFLGGQLASLDELIIPLLTAHAPGLLALYGVGPDTAALLLIAAGDHPERLRSEAAWAHLCGAAPIPASSGKTVRHRLNPGGDRQANHALWRIVITRMSSHPPTRAYVERRVKEGLSKTEIIRCLKRYVAREVYPHLRPPAR

SEQ ID NO: 360372 - protein, 420 aa, unidentified
MKVYNVDNFAVLIGIDWADKKHDICEHPLDSGKYHYSIIKSKPEALHDWAMRLKKRYPNQKIAVVCELKKGPLIYALTKYDHLTLFTVNPSTVAKYRKAFTPSGAKDDPSDAFIQVEILTLHMDKLSVIEPESASVRSLAQLVEYRRSLVQDSVDLSNKITATLKNYYPQALEWFKEKDTFIFCDFISKWPSLAKIKRVRKQTLLDFFNAHNSHYAAVNEARIVSIKEARPLTQDAGVIEPNQLLVEILITQFKVLLKGIEKLDKIIKLAYKAQDDKFIFDSLPGAGPQLAPRLLVAFGSDRSRYRDASELQKYAGIAPVIERSGKKMWTHWRYSCPTFLRQTFVEWAGFSIRYSFWAKAYYEQQQSKGKPHNSIIRSLAFKWIRIVFRCWQTNTPYDESKYLEALKRRGSPLLKFAINS

SEQ ID NO: 360373 - protein, 418 aa, unidentified
MNLFVGLDVSSEKLDVCFLSDDNQLTILLEASLGNDVKGAHQIKQKILEFQNVYSFSQIVIGMESTSMYSFHPATFFNEDRELKRINTVVTIENPFRIKQFSRIFDEDKTDKNDAMRIADFLRIQRFTTSPIKEEKYMALQRLTRTRYQLIGQLVETKQHFLENLTYKCNTLTRELKNSETPSSVFGATLIALMTEDYGLEELAQMPLTDFASLLQEKGNGRFKNPEGLAKTIQRAITMSYRLGEVAQESINIILSILAREIRALEASIKDLDKAIEQLVIVLPEYQCLTSIPGVGKVYAAGLLAEIGQIQRFEDQTKLAKYAGLSWKIKQSGNYQSENTPLTKQGNRYLRYYLVEAANSVRRYLPEYQAFYQKKYKETPKHQHKRAIVLTARKFVRLVDTLLRNHQLYTPPRGVIEK

SEQ ID NO: 360374 - protein, 318 aa, unidentified
MTHTTQTTALYVGIDVSQNTLTVAIYPTDEVWTLVNDPHSHTALVQHLAQLPVQRVLLESSGGYEKAVVSALQQAGLPVVVVPAQRARYFAKSMRGDLKTDRADARMLAYFACCYPVQPVAPCSPVQAELKELWARREQLVQELEREKKRLQTGMSEAVRASLERMIAVLKDEIAQIEARVAELIASDADLSQKAALLQTAVGVGRVVAYGLVAELPELGQVSHRAIAALAGLAPVRCESGAWVGRARVRGGRPRVRRLLYQAAVVAATHDGRWRAVYEALVGRGKAKKVALCAVARQLLVVLNAMVRDGRAYERVQE

SEQ ID NO: 360375 - protein, 357 aa, unidentified
MESQEVKYVGVDCGKKSIEVVRINSENSLERRQFSTTESGINNLLQWLTLNDIVGLEAGSQSFRIAKSILNKGVQVIVLNPGNLATIYQSLKKTDKEDSLKIARLIQRFPIEELPVVPIPNDEEEDNRRLCTEHENWTKQLTQGKNRLHSLFTQAGLTQITKKHLRTKVSREASVTLLSDRYKKEAERILKVLDLVELNLKLIEEEIQEALKKNKAYVQTIMSMPGIGMITSLAIMSYMGDCKRFSSAKQAAYYAGLVPRVDISGDTVRYGRIINRGCHSIRRVIVQAAWSLVRCQHGGKVKEFYQRLYLKKGAKKSIIATSRKMIEVLYAMIRTGKLFDSMPENILNRKLTQYGLM

SEQ ID NO: 360376 - protein, 383 aa, unidentified
MSEFSTLHVGLDVHKESIDLAVADPGLQGEVRHIGTIGGDLTSLDKALRRLISKGMPLHVVYGAGPCGYVIWRHLTAQGISCEVVAPSSIPKRAGDRVKTDRRDAMLLARLSRAAELVAVRVPDVVDESIRDLVRAREDAVRECRNGRHRLKALLLRNGIGYAGKSAWTAAHLRWLATVKLAHSAQQIAFQEYLHSITQSTERIARLEKSMIEALPQWGLRPVVQALQAMRGIQLIAAMTLVAELQDFLRFDSPRQLMAYVGLVPSEHTSGPKRRQGGITKAGNSAARRMLVEIAWQYVHSPRVSPIIAKRHEGLPDAVIEIAWKAQLRLSGKFKRLLARKVLKTKAVVAVARELTGFVWAIGREIQTSRWPGLKGDQVTSVA

SEQ ID NO: 360377 - protein, 425 aa, unidentified
MRNGNTKKVKRINEETLLVTIDMGKVKHTGYYRFPDGAEGKIFEFSNSRNGFEDMWQRVCQAKKSRNLTEVIVGFEPTGPYAEPLLHFLRKRNVRLVQVNPFHTKRLKELQGNSPSKTDQKDPKVIADIIELGHALTVIIPEGTAAELRRLTQARERGIQRRSMLMSQGQDLVFLIFPEFMPVMKDITTKSTQYLLKHYPRPQDVVETGVELLTQSLKKVSRGKLGKERAEALYQAAEASVGLREGQESIVIEIKEIISVIENIERFVKELEKHMSKHLKDIPYSRFILSIKGIGEITTAGLIGEIGDFRGYSTISEVIKHAGLDLFEISSGKHKGTRRISKRGRPLLRKLLFFASINVVRKGGILHQQYLQHLDKGMPKIKALIAISRKLLGIIFALVRDHSVYIDQYSEIQPLSEIQQLKEAA

SEQ ID NO: 360378 - protein, 342 aa, unidentified
MYYIGLDVHKKTISYCVKDAAGKIHIEGKIGSTRRELDAWIKTLPQPRMMAMEATIFTGWIYDHLLPHAEKVKVAHPLMLRAIAAAKRKNDKIDASKIADCLRCDFLPECYMTSTEIRDRRRTLRYRGLLVKQMVQMKNRISGLLMETGVSYNKQRLHKVGYFTELMSGNEEIDCVRPLLKLSRDTINRSQKLDYALVSSLERDPLLAERLKRLRTVPGVGPITALTWVLEIGDVVRFRSIKQAISYCGLCGAERSSADKVMRTPISKQRNKHIQQVLVEAAKLAPRYSHELALIHEKEMQRGNRNRATLAVARKMVAWMVAVERRKQDFVPAEKFGGTAAA

SEQ ID NO: 360379 - protein, 375 aa, unidentified
MSPNSITWVGMDAHKNSIKVAALVPEQADAVEWTEDTTTEAVRRLARRLQRVAPGEVQACYEAGPTGYALQRQLRAAGVGCTVIAPSLTPVKPGTRIKTDRRDARKLAELFRAGLLTEVHPPSETDEALRDLCRCRDDVRVDLLRARHRLSKFLLRRHLIYRQTKHHWGSRHLQWLEQLRFDDAMSQATFDSYFLAVQQIEERQRQLDLQLAAFGSREPYREPVAWLRCFKGIDTVTAVCLVAELHDFRRFRSPRQLAAYVGLVPSEHSSGEREQRGPITKSGNRHVRRLLIEAAWHHRHRPALSAPLRARREGQPARVLAIADRAQERLCTRYRRMSEAGKVHPKTIVAMARELCGYLWAVLHPAAAATRSKAA

SEQ ID NO: 360380 - protein, 378 aa, unidentified
MNRIIKIGMDVHTTNYTLCIFEPSFEHDGTVHCITQVKPEVKNIIRVIETFKKKHENEELNIVCGYEAGCLGYSLYHELKEKGIECVILAPTTMKTEKGGRKLKNDYRDAKMIAECLAYGGYSAVHVPTELDNSVKEFIRMRDDIKENLKSIKQQIIAFLTRNGKQFEGKSFWTRKHIDWINTISFSEPLLQDTLKEYMIEYNHLCDRVETLDKQIEEISLKEEYVEKVQQLQCLIGIKTHTALSLIVETSDFNRFKKGNMYSAYLGLIPGDDSSAGHENKLGITKAGNSHLRKLLVEAAQGYKRGKVGFKSKDLKSRQEKCSSEVVAYADRANERLRRKYYRMTLRGKRYNVAKTAIARELACFVWGIMTDHIDLCN

SEQ ID NO: 360381 - protein, 374 aa, unidentified
MARTARRPSARQHHTRRSSRGRSAPLAQMHLNAAGIDVGATEHWVAVPEDRDEEPVRRFGAFTADLYVLAEWLRQCQIETVVMESTGVYWIALFEVLEERGFDVKLVDAHDARQVPGRKTDVKDCQWLQELHTYGLLHGAFRPEDQVCVLRSYLRQRSMLVAMASRAVQHMQKALEQMHLKLPEVVSDMNGKTGMEILHAILAGERDPQRLASHRDRRCTHDQATIAKALEGHWRAEHLFAFQQALEQYEFLQQQLQACEMQIEACLQTFVTHVDVDTPPPAPARTRRARQRHAPGFDVHGYLAAMTGVDLTQIDGIDALTALKVISEIGLDMTRWPTGKHFASWLGLCPGNKVSGGKRSRMRSKPTANRAASA

SEQ ID NO: 360382 - protein, 366 aa, unidentified
MKKISTMQVFSNEILKEQKLTIGVDLGDRWSFYCVLDEAGKIILEQKLPTTPEAMKQTFAKIPRSLVALETGTHSPWVSRLLTELGHEVIVAHAQKVELITKSNRKDDRHDARTLARLARIDPQLLGPVRHRSAKAQIHLTVIRARAELVSARTALVNAARGLVKSYGQRLPKRGTYQVSRELAIGLSAELRDVLGPLLKEVESLNERIQEYDERMEKIAKEEYPEVSLLQQVKGVGTQISLTYVLTIEDPYRFPKSRAVGCFLGLRPGRRNSGESEPQKGISKEGDRYLRTMMVQGAHYILGPFGEDSDLRRWGLKLAERGGKNAKKRAVVAVARKLAVLLHRLWVSGEVYEPLRNSQKAMRAVA

SEQ ID NO: 360383 - protein, 334 aa, unidentified
MDKVTTVGIDLAKSTFSIHGVDANGKEAVRKTVSRAKLVAFIAQLPPCLIGLEACSGAHEWARRFQALGHEVRIMAPRFVAAYRRSGKNDGNDAEAICEAVQRPSMRFVPIKSVEQQAILTMHRVRQGFIEERTAAINRIRGLLAEFGVVLPARAIEVKRRAREAAEDLPHMARSSIEDLISHLAVLDERIASQDRQLEALARSDETVKRLMTVPGVGPLGALATVATVGHAHEFKDGRQFAAWLGLVPRQWSTGGKPRLGHITKRGDAYLRTLLIMGARAVLQMAAHRNDKLSRWAVALKERRGYHRAVVALAAKNARILWALLTRGSEFKAA

SEQ ID NO: 360384 - protein, 347 aa, unidentified
MKKIIIGIDVSKEKCDATAIFVGKGLLEVAKLDYFVFENCPKGFRSMLSWAKKLMSDVLQEEFLFICETTGAYDRALCDYIYSKGLDIWRESALQILMSSGVRRGKDDKADSLMIAEYAAHHMDKMHLYESPDNRILEIRALFLYRRKLEQEKTSKLVRIKELEATAGKSKTLTFILRDAKKSVRQLEKSIKVCEEKIRELMKEDEALQKSYDHLDSVKGLGIVNITALIVYTNNFKAFRTSRKMATYWGVASFRSKSGTSVDKRVDVRNLSSSMLKSYLTQAALHTIAKGGIYHDYYQRKIREGKNHSIALNNTKNKLLHLAMSLVTNDMDYEENHEFLRTQRNEM

SEQ ID NO: 360385 - protein, 389 aa, unidentified
MKYVGIDLHKKTISGCVVVKERGKKKVAARKRLECRDEAGIKSWFSELGKFEVVVEATASYEWFVKLVEPLAQRVVLAHPKKLRIIAESKRKSDKLDAQVLAEFLASDEIPLAYRPCPRVREHRTLVRWRYFIQRRITGAKNKLRHILAAYNADVPHLFTAEGREHLAAVELSAADRFVADQLVGELDQHQERLGTANRRLREFATSAPLPEREARAILDSIPNVGPVTMDVLLAELGDWRRFRSQSDVACYAGLAPGFRESAGKAKQLGITKEGSRLLRWVMIEFAWRMVGTSRKWGGNYHRLEARVGSKKAIVAIARRLLGMTFALLRTGQKYSLALESPRPASCRSKSPRDTNPSDPARLRGQPRQASSLGAGVDYGGPLSVPERE

SEQ ID NO: 360386 - protein, 360 aa, unidentified
MDGKENSDACIVIGGVDTHKDLHVAAVIDEKDRVLATRSFPTTRQGYRQMLAWMRSFGALARVGVESTGSYGAGLLRFLQQAGVSVLEVTTPDRQDRRKRGKNDDFDAQNAAHAAFAGQRTVTPRSRDGMIEALRVLVACRKTAVTARRIALQMIHNTIVAAPDGLREQLRAMTRMQLVRTLAAWRPDLTAYRDVEAAYRISLKSLGRRYLELHDEIADLDAMIAAIVEELAPNLIERNSISYIGAAQLLLTAGGNPERMRSEASFAALCGVSPVPASSGKTVRHRLNRGGDRSANSALHIIAIGRLRTDQRTKDFVARRIAEGRSKLDAIRSLKRYLAREVFNLIIQRHKEINATRITA

SEQ ID NO: 360387 - protein, 400 aa, unidentified
MIDISGIGAFLGLDVGKGEHHATAVTPAGRKAFDKRLPNSESKLREVFAKLKTKHTTVLVVVDQPASIGALPLAVARDTGCEVAYLPGLTMRRIADLYPGEAKTDARDAFVIADAARSMPHTLRAIEPADETVAELEMIAGFDDDLAGEATRISNRLRGLLTQIHPSLERVLGPRVQHPAVLKLLDQFGSPALIRKAGRRRLVNLVRPKAPRMAERLVDDIFTALDEQTVVVPGTDAATLIVPSLAGSLQAVLDQRKLLAMRIEELLESHPLSKVLTSMPGIGVRTGARILIDVGDGSSFPSAAHLAAYAGLAPATRSSGSSIRGEHPSRRGNKQLKRAFFLSAFAALADPVSRAYYDKKIAQGKHHTQALLCLARRRADVLFAMLRDGTLYHPKPAPTG

SEQ ID NO: 360388 - protein, 352 aa, unidentified
MNFYNNLHPYYCGIDLHARVLYVCIIDQAGQTRVHKEIPAKPDPLKILLEPYLGNIVVGVECMHCWYWVSDFCEDLGVDFILGHALYMKAIHGGKAKNDRIDSFKIANLIRGGNFPLAYTYPKEMRATRDLLRRRTKLVRHGAHLKAHVSNTTSQYNLPTHKVNLKNVGAREQLKTAFPDRVVQRNIDLDMSVLDCYAKELSKIECFLEQQAKRHNPLHWHLLKSISGIGRILALTIIYEIGHIDRFESVQKFASYARLVKCKAESAGKSYGTQGNKIGNAHLKWAFSEAAVLYLRGNEKAQKYLLRLQRRMSKAKALSVLAHKLGRCVYFMLKNGTVFDEKQFLKVSHAMG

SEQ ID NO: 360389 - protein, 337 aa, unidentified
MLFCGIDLHSNNSVVVVTDDADKVLYSRRLPNNLTEICDALSPYLKDLFGVVVESTFNWYWLVDGLIEAGHSVHLANTVAIKQYDGLKYRGDESDARHLAHILRLGLLPEGHIMPPPLRAVRDLSRKRMQLVQQRTTQLLSIGTCLAQQTGGQISGDSIKRLTEADIDKMPIGSTEAIGVKANLAVMDALQTQIDGIEKVLMAHCHNSPGYRLLNTVPGIGSTLATVILLETGDVGRFADVGNYASYCRCVSSTHLSNGKKKGEGNTKNGNRYLAWAYIEAANFAIRFCEPARKFYQRKKAKRNAIVATKAVAHKLARACFLMLKTGEEFSVERCFT

SEQ ID NO: 360390 - protein, 341 aa, unidentified
MQITTIGLDIAKNVFQVHGIDAAEKVVVRKQVRRGQVMKFFTALSPCLVGIEACATAHHWARELTKLGHEVRLMPARDVKAYVKRNKNDAADAEAICEAVRRPTMRFVGVKSAEQQGRLMQHRTRDLLLRQRTQLINALRGHMGELGMVAAQGREGLKTLLAIIAKGADEHLPVDARASLIVLAAQLEALQTMIGAIEKRIVGQHRASEASKRLASIPGIGFLGASAITATVTDPSAFRSGRDFAAWIGLVPRQDSTGGKQKLGPISKQGDRYLRRLLVIGAHSVLRRAKQSPQNYPWLTQLLARRPFKVVAVALANKMARVAWALLARGGTYRVPQLAAA

SEQ ID NO: 360391 - protein, 397 aa, unidentified
MDYDVVIGLDVGKAAHHACALDRGGKRLLDREITNTESSLRAIFTSMAAKGRVLVVVDQLHSIGALPVAVAQAMGVAVAYLPGLSMRRLADLHPGNAKTDARDAYVIAHAALTMPHTLRTLDVPSEAQADLAMLLGYDDDLAAQVTAAINRLRGLLVQIHPSLEKALGDNVAHAGVLHLLIKAGGPDGLRTMGKARIDTALRKYAPRIHERLATEIWDGLAAQTVIVPGTSAAAKVLPGLAAQILQLRDQRKEIAKDVEKVLDAHPLAEILTSMPGVGVKIAARLLAEIGGDVTAFPTAAHLAAYAGLTPVTKRSGTSIRGEHPNRGGNKRLKNAMFMAAFTSLRADPASRTYYDRKRAQGKKHNAALICLARRKTDVLFAMIRDHQPYTPSQPSAA

SEQ ID NO: 360392 - protein, 361 aa, unidentified
MKSTTIIAFDQHAATTMAAVLLPGHRTPALHSLTSDTPTILRFVQRVQRQGTVTCCYEAGPCGFELQRALTAHRIACDVIAPALIPRCPGDRIKTDRRDAGHLAVLYRAGALTAIHIPTDQEEAARDLLRCREDIRADLLRARHRLSKFLLRHGRRFTATKKAWSKRHDAWLRAQTWPIAALDQTHRAYLRAVDEVLARLRDVETDLRALLDLEPLHPRVQRLRCFRDIDDLTALTIAAELGDPRRFATAPSTMAFVGLVPSEHSSGSKRAQGGITKTGNAHLRRVLVESAWHYRHHPFVSATLRARQGGAPADVIARAWTAQQRLHRRYARLTARGKPKQHIVTAIARELTGFVWAALTQ

SEQ ID NO: 360393 - protein, 423 aa, unidentified
MIKLKYSICCGLDVHKNVIVATIVTTNKDGISEYKQKSFSTINSDIQKFHNWLIENNCYHVCMESTGKYWIPIFNYLENDIDVCLTHPKYVKAIKGKKTDKKDSKWIADLYKFDLVRCSFIPPKDFRQLRELSRYRFKLVCMKSSEKNRIQNCMTVSNVGIASVLSDPFGKTATEIISYLLEHTADSMDEKAVRKFIKKGAKAKSDEIIEAIKGYTIETDQAKKLELAQGHLEYLDDMITQTEVELYVRIKPYYKFVEFVSTMPGMTELSSTIVLAETGVDMDIFDDAKHLCSWCGLSPADNESAGKKKSVRIAKAGDYLKPMMVQCALAAIKSKKQPYFAIKYGRIKKRRGHKKAIIAIARMMMVCIYHMVSEKKPFTPTDYEELMNPQNHVERVVLNENNVFAYLESLGYDSSKLVKRNDN

SEQ ID NO: 360394 - protein, 360 aa, unidentified
MAQVRSWAGFDVHAAKVVAATVDGPSGELRFARLSGVTREVVEFCGALPGPVKVAYEAGPTGFGLARELQAAGIECVIAAPGKIPRAPQDRVKTDRRDAERLVRLLMAGELHPVRVPSTSEEALRDLVRAREDLRGDLMRARHRVGKLLLRHDLRFAGHNWTQAHRAWLASVELPEPVAQAVLLDGLGAIDALTVRRDSLERQMTALVPTSPWAQEVARLRCLRGIDTLTALGLCAEIGDFDRFRRPGQLMSYLGMVPSENSTGDKRRLGSITKSGSQHARRLLVEAAWHYRRPPRVGRELARRQAGQPQHVTAISWQAQRRLHRTWQRLDHERGKRRTIVAVAVGRELAGFCWAVTTAD

SEQ ID NO: 360395 - protein, 424 aa, unidentified
MKITYQTCCGVDVHKSFLVATIIKTTNGFEPSYQKKRFSTFNNSILQFKNWLLENNCYDVCMESTGKYWIPVFNLLEDNINVTIANPKWVKAVKGNKDDTKDSKWIGDLFRLGLVRGSYIPCKKIRILREYTRYRYKLVSCRSSEKNRYQNALTVCNVALDSVVSDIFGKSSTSIIDYLLEQSGASINHEEIASKLLRRLKSKEDSVIESIEGYQMTDSQKYRMRLIRAHLDYITAEINDVDSMIENMISSDSDYNNAVQLLCTIPGVKHDSAVTIISEIGIDMSQFCNSKRLCCWAGLTPGSNESGGKKKSVRITRAGVYLKPALVQCAHAAVKSDKSPYYKKKYESLVKRRGKKRAIIAIARMILTAIYQMLSTGETWNPSDLYKIDMPQALVDKQKAKAIKQAKKLLQQEGIIPLDEPIAS

SEQ ID NO: 360396 - protein, 372 aa, unidentified
MKDTTKYVGLDVHKGKISVAIAEEGREKPRYWGVVPHKYESIRRLVKKLGDPTSLRICYEAGPTGYKLHRFFLSLGIECDVIAPSLIPQKPGERIKTDKRDAVRLAQLFRAGELTSIYVPTEDDEALRDLVRAREDAKEDESRAKHRLTKFLLRHHIYPPEGVRTWTYKYREWLSTLTFERSASSTVFQESFHQLQEIEQRVKRYEEEIKTQATEGVHAQKIQALQALRGVALITATSLVAEIGSFKRFVHPKHFMAYVGLIPSEDSSGDRRNQGNVTKTGNRHVRRLLIESAWSYRYQPAVKGQLKKRQEGQSASVQAISWKAQNRLHKKYYRLLSRGKESGKAITAVARELAGFIWAITQEMEDVPTSNL

SEQ ID NO: 360397 - protein, 345 aa, unidentified
MKKGITIGMDLGDKKHQVCILDKTGKIMAEEEVAGHRTATASYFKQYRGAVVAMETGTHSRWVSQVAAAAGLEVLVGNARKLRMIWQSRQKSDTRDAVMLARIARFDPALLCPIRHRGEQVQMDLEIIRARDLLVGERTRMVNHVRGVVKNMGERLAACSAESFGRKAKLPEALNEALKPMLEMIRELTKKIRGYDLMIKETAANKYPETEQLRQVGGVGPLTALAYVLTLEEPERFAKSRMAGAYLGLVPRLDQSGQIDKQLHITKHGDGYLRRLLIGSAHYILGPFGPDCDLRTFGLKLMQRGGKNAKKRAVVAVARKLAVLLHALWRSGQPYEPKRIQPLAA

SEQ ID NO: 360398 - protein, 394 aa, unidentified
MKLVGIDVGKNSHHFCVMDKETGEFNVTPTSFSNNKEGFDFLINSLKPYSKKSILIGMEDTGHYHVALLKFLLSNGYTVASINPKTTDLTRKMEGGITKNDKLDTITICDVLDTPERKKQYRITKVDRFDLYEQRQLTRHHHNLKEELNVYCNRLQKSIDLVFPEFNTLFSSKYSIVYMNLLKTFGSAEAIASTDIRTIRKCFEIKGRGNRISLTPEKLKECAKNSIGISSEVETIQIKHLVSQITLIKEQIAEIDKKIEEFSITNNSPILSIPGISHFSGTSILAELGDIGNYSKPSQIIKFAGVAPYHYESSQYNAQHTGITKKGSKYLRKTLYQIILTVINNNPVFKKYYLLKISQGKGHRCAQGHCIRKLLRIIYHLLETGQSFDPALLR

SEQ ID NO: 360399 - protein, 359 aa, unidentified
MTGIVGHEGSRLDVQVIIGVDTHQDQHVAVAIDQRGVRLDEKHVPVATCGYEELERWARSLGQIRAFGIEGTGSYGAGVARFLTSRNYTVIEVNRPDRSVRRRKGKSDATDAEMAARSVLAGVADATPKSGEGEVEMIRMLKSTKDSAVKARTQAVNQIKALVVTAPSELRETLDGLTTAALITRCKSFRPGRLDDPRAAAKYALRSLACRYRQLSKEIQDLREELGRLIRTAAPALVEAFGVGPDSAAALLVAAGSNADRLRSEASFASLCGVNPIPASSGKTNRHRLNRGGDRQANAALYRIVVVRLRYEQRTQAYLQRRTEEGMTKTEVIRCLKRYVVREVYSVIQRPNQILEKAA

SEQ ID NO: 360400 - protein, 427 aa, unidentified
MNDSKYKPTLCVGADVHLDEIVLRAVDKALGHEVLERFRVTNNLPGAQRAAATIAQTAMDLGYARIEIGWESTGMLWIPFHRYLSTEPLLQPFELELVCFNPKLVAKFKDGLVLRSPKNDERDAFDVAARLRFGELPVSYVPSDFWQGLRRLTRYRYRLSKALSQEKNRFQSYAYLKCSDWKRVKPFSDIFGATSIAFLTEFTVAEVQQMTHDQLVDLITRRGRGRFDDPTATARALRQTLRTSYPIDPKMDEMVTATLAAGWDHIRYLKRAMKRLDHLIARYIDLVPNPIITIKGLGAVITAGILAEIVDVLRFPEEKHLAQFMGLTWRKDASGGFVSQNTRLTKVGNVYLRYYFVLGANLLRQHNLEYKAYYWRKYQEVSKYQHKRALVLTARKLVRLVHALLTKNEPYVRPRTTRQDQEDNGLQ

SEQ ID NO: 360401 - protein, 383 aa, unidentified
MVRAKEFDSFTITNDLGGFNVLLDQLQCYANPVVVFEATGVYSLPLQSFLDRHNYNYVRLNPLKAKKLMDNNLRHLKTDKLDAKHLAELQFNSPQQLSPKQDYRYHEMQNASRFYEELTNDLVKWKNRLHRALQSTFPQIERLTSSHSGEVYWQIVNLFPHAKFVLNSAYDQIVAQLNQIKGIGHAKANTLACSLQTIAKRTCYYDDYDSITVELGKYCIERLRGIEQRRKHILEYIKEIAPNPRDVQLYATIPGIADTTALRIYAELGDLRRFNNRNQINAFIGIDPGRSQSGDVDNHLSVTKHGNAIARKILYRTIGQMETVKSSQPCHITDYYDYKKQLSKARGYKKAAIASMHKLIRTIYALIINDQPYDYRKSLHNQS

SEQ ID NO: 360402 - protein, 344 aa, unidentified
MEEYVGFDVSKEETAFCVMDKAGKILSQGKALSDPRSLFEALRENTLCPDRIVLETGTMSAWLARELRGLGLAVDVIDARQAHAVMKLQHNKTDANDAVLLAEIARTGFCRPVSVSSEAAQVQRMLVKARTHLVRQRRDTENAIRGFLRALGIRFAKGSGKLAGRVREALEERPDLKVMIEPLLASVEALKTQIKRLDEDVVLKARGSPACRLLMTVGGVGPITALAFAATIDDAARFAKSRAVGAYLGLTSRRFQSGEMDYSGRISKHGDAMLRSLLYEAANSMLTVVRRAHPLKDWARRIRKRSSHKKACVALARKLAVIMHRMLVTGEPFRWPQMEAAATA

SEQ ID NO: 360403 - protein, 356 aa, unidentified
MEQLTTVGIDLAKDVIAVCVLDVHGAIIERRVLRRAAFERWAEQLPSCKVAMEACGSAHHWGRWFAARGHSALLIAAEFVVPFRKGGKNDTADAEAVAIAARQLTMRFVPIKTIDQQAILAWHNVREGWKEERTALLNRVRGLLAEFGIVIGRSSDRLLTELPRLTEDSRLPDGVRALLLDAREHFAALHARLARCDAQIAVHARTSPAAQRAGELLGVGPLTSSALAATVPDAKVFKSGRQFSAWLGLTPRQHSSGGKTRLGRISLRGNVYLRTLLIQGARSTLQSAINTEPARASRLQRWIIELYGRKGYYKTLIAIANKHARILWAMLAKDESYDASAWQRHPMNQPSLAGNA

SEQ ID NO: 360404 - protein, 423 aa, unidentified
MMKLKYSICCGLDVHKNVIVATIVTTNKDGISEYLQKSFSTINSDIQRFHNWLIENNCYHVCMESTGKYWIPIFNYLENDIDVCLTHPKYVKAIKGKKTDKKDSKWIADLYKFDLVRCSFIPPKDFRQLRELSRYRFKLVCMKSSEKNRIQNCMTISNVGIASVLSDPFGKTATEIISYLLEHTADSMDEKAVRKLIKKGAKSKADEIIEAIKGYTIETDQAKKLELARGHLEYLDDMITQTEVELYVRIKPYYEFVEFVSTMPGMTELSSTIVLAETGVDMDIFDDAKHLCSWCGLSPANNESAGKKKSVRIAKAGDYLKPMMVQCALAAIKSKKKPYFAIKYGRIKKRRGHKKAIIAIARMMMVCIYHMVSEKKPFTPTDYEELMDPQNHVESVVLNENNVFAYLESLGYDSSKLVKRNDN

SEQ ID NO: 360405 - protein, 309 aa, unidentified
MTIVEPRRAVIGGVDTHLDAHVAAALDPVGGLLGVAEFGTTTAGYEGLLVWLSAFGPVLRVGVEGTGSYGAGLARFLLDHGVEVVEVDRPNRQERARKGKSDPVDAIEAARAAQSGRASGRAKTRDGAVEAMRALLVVKRSARNQREGGDLVGHATKVALRQLARRVQGLNAEITEARRLLRPLVAGTAPGLLALYGVGIEVAAVLLVAAGDNPERIKSEAAFAQMCGVAPLEASSGKVTRHRLNRGGNRQANHALFRVVVTRMGSDPRTIRYVERRRKEGKSTPEIMRVLKRYVARETFKYLPRHHVA

SEQ ID NO: 360406 - protein, 408 aa, unidentified
MESQIIFGIDVSSKSSTVCVVNDRIKQGESFRISNDSFGYQKLYEQLNQYLITPLVVFEATGVYSLSLQAFLEDYHIKYLKLNPLKAKKLMDNNLRHNKTDKVDAYHLALIQFNAPQKLRDPQPREYHELQNASRYYEELTRSIVTTKNQLHRNLQSTFPQIEEILSHPSGRIYWALVSLFPHAGYVLEKNETQVTQMLNSISGIGQQRARYLTTRLYAFAREAYPYDSKDSIIVRAIQRNISNLFSLQQERDYVINYMEKLAKAVNARALSIYLSIPGVARITAVRLVAELGDLRRFSTSAQIDAFVGIDPGRYQSGEKDSSLGITKHGNHIARKILYRVIIQMETVKATQPCHITDYYDKKKRSSNSQGYKKIAIASVHKLIRTMFALIKHDQLYDYNIATENKRL

SEQ ID NO: 360407 - protein, 425 aa, unidentified
MKISQAAKKVNVNRAMDVSVDVHKDKLNIFFEAGNKEYADECQNRSTVIEGRLGCYRQIAEVNGMNTLRIICEPTGEYHKKLFRMARGMGFETCFVNGESVAKFRVIETNDTGKTDTKDPRVIRTLGRLNKVIADRTIGENYMVLRKLGMMYDEGDQANTRIRCRIDRLLVELFCDYSFKKDFLYTPSGMALVEICGCNPYRIVKAGYGRFSARMRRAAPRIREESLKRLWNDALSSVRTGQPEEYTATLESHFHHLIIDWQWQKKRKDDLVQRMIETLNRLREKDPKIPTAVFGVISDKNMARLLGETGPLCDFPHWRTLMRYAGLNIRMRQSGKYQGLNKISKKGRPLLRRVLQNIALPLVRKGCLYGSYYAQKKDEAKMPGNKAMTCVARHFLKKFYGWYKSGEAFNKDRFFSCESQYKEVA

SEQ ID NO: 360408 - protein, 380 aa, unidentified
MGDDISAFVAFDTSKLRNAVAIAEEGRTGEVRFFGEIDNTAEATARLVKKLAVKYERLVFCYEAGPTGYGLYRQITALGHECVVAAPSLIPKKAGDRVKTNRRDALDLAKLLRAGQLTAVWVSDPRHEAMRDLTRARGAAVQDARMKGQQVSAFLLRLGRHYPGKTAWTKKHMSWLASQQFDHPEQRIAFEEMLLAVRQAQERVARLEEAIRVAVPDWSLAEVVQALMAMRGIDMVTATAFLAEIGDLSRFRSPRELMAYLGLVPSERSTGDRVERGPITKAGNRRARRLLIESAWAYRHPPRVGKDKQAKVAAAPRAVREIAWKAQHRLYARYRALTRKGKLKTVAITAMARELAAFIWAISREIANTRGAAAQQGIRG

SEQ ID NO: 360409 - protein, 377 aa, unidentified
MERSIIYVGLDVHKDTIAVALAEAGLRAEVREHGKIANTPAALKALSVKLAGKNRALRFCYEAGPCGYGIQRQLSAVGHKCAVVAPSLIPRKPGERIKTDRRDAINLAKLHRAGELTSVWVPDPSHEAIRDLVRARQAAVRSLRQARQQLSGFLLRHGHHYHRPAWTLQHRRWLASLKFDQALHYIVLEDCIATIEAAAARRDRLEAQIEAALPEWSLAPVVQALQALRGVGLVAAATLMAELGDITRFSNPRQLMAYLGLVPSEHSSGRTRRQGGITKAGNGAARRMLIEAAWSYRFPARISREQLLRQERLAKPIRDIAWKAQERLCRRYRKLARAGKLPTVITAAIARELVGFIWAIAKQVQSTAGQRQDEVSK

SEQ ID NO: 360410 - protein, 453 aa, unidentified
MEQYYLGGDVSKGYSDFVILDNKKRLVKENFQLDDTIAGHSLLYDRLLDFFEEHPDAELCAALESTGGYENNWHKTLSKFQGSLNVKTARLNPAGVCKNNEAGLKRIITDKISAQGVAEYLIAHPEKVIYQQQDYWASLRKQWSFIKMLTKQKTQLLNQLESLLYSANPEILKYCQEGMPGWVMTLLKQYPTAAKLGKARATSVARIPYISASRASELVAGAKTSIASATDAITGQLICATVGQIQHLQKTIKAQTKILAEECNFPEVELLKTFTGIGDYSAIGLMLEIQAVERFSTVKKLASFFGLHPVYKVSGDGVGAVRMSKKGRKEPRAILFMVAMSAISSNSLIRELYQQNVAKGMEKMAAIGLCMHKILRITYGMLKNSTPFNPEIDLDNRAKASTQPPKVGKDKSRRYQDFDAHAPISRRQRKKREERKLSQNAVSVECGISTPVL

SEQ ID NO: 360411 - protein, 366 aa, unidentified
MKKVSTAAARQTKNFSDRKLTIGLDLGDRSSWYCVLDEAGEVLLEQKVGTTPKAMKEVFGGMPRSRIALETGMHSPWVSRLLSELGHEAIVAHARNVRLIGESRKKDDRLDARTLARLARIDPQLLAPVKHRSAQAQAHLMVIRARAGLVRARTSLINTARGLTKSYGERLRGCNPRNMNREKAQGLSPELQAALAPLLAGIESLSEQIRESNERIEQLAQTSYPEVARLKQVKGVGTLIALTYLLTLEDPHRFRKSRDVGCYVGLQPGRRNSGQSEPQLHISKEGDPYLRTLLVQGAHHILGPFGADSDLRRWGLKLAERGGKNGKKRAVIAVARKLAVLLHRLWVSGEVYEALRHSHRALPAAA

SEQ ID NO: 360412 - protein, 372 aa, unidentified
MNYNTVYVGMDVHKESFTFCAYTIDAEKGSHFQRTEADYKNVLKYLEFLRTVYGNDANFICGYEAGCLGYTLYHQLIEHHVNCVILAPTTMLEQCSRRRIKTDRRDAEIIAKCLAQHNYSPVHIPTATDEETKEFLRMRADHKLALKKVKQQILAFCLRHNYRYDGNSHWTAAHIKWLKSLKPEALYKEILDEYLLTYTTLSDKLERLDKRIEELASKDEYRESVKKLCCFIGIKTHTALSVLIEVGDFQRFASAQKFASYLGLVPGEDSSGDEQTRLGITKAGNRHVRMLLTEASQCYARGQIGFKSKELKSRQAGNSPQVIAYADKANERLRRRYYKMVLGKSKKHNVAKTAIARELACFMWGMMTDHIT

SEQ ID NO: 360413 - protein, 383 aa, unidentified
MHASNVRAPINDRHSMIFVALELSQKSWLVTMHSPDRDRISRHKLDGGDHAGLLALLERVRARAMRALGSTPTVVSCYEAGYDGFWLHRLLTSAGITNHVLDPASIAVEQRARRAKTDRIDGEQLLRTVMAYCRGEPRVARVVRVPSREQEDARRDTREEDRLTKEQGAHTNRMKSLLRLLGMAVGNPRRRDWLAWLAKQRDWRGEAVPPRLMAELEREHARLMLLGEQLAALKKPPMAAELTPAVAEMTRRSNLLFQLKSLGPAFSRKLTNEVFYKDFRNRREVGGYFGLGGSPWRSGNTDREQGISKAGNRRARHAAIELAWLWLRHQPDSALSRWFRQRTADASKRTKRIAIVALARKLMVALWRYLTTGLVPEGAVFKA

SEQ ID NO: 360414 - protein, 420 aa, unidentified
MRHLVSRELPAETLVVAIDCGKVANRVMLATGERGVIGEPVSLPILRAGVDELQRLVGAAGGKGHPVIAVEATGSLHHAWVAELERRFAGSLRLFAPSETQAARAGLGSRRTKTDDRDCAALITLARQGLGRPPEGETVAAMLGAVRHRRALVETRKSAQQRLHDQLNALCPGLSAPSGHGRALKLEDTSGQAVLACAVAFAGRAPAPRSLIARAPGRFTKANAHYWSARWKALLPPPPDAGLRAERLRGDLERWRSLQRDIAAVDEQIAVLLAATAGEVLTSLPGVAQTRAAAFAAHALPVERFSSADRLYSATGLAPATYESATLRRRGRISRAGLAEFRDALMGIAWGLSQSCAAFRFRDRQLRERGMAPIQARVALARHACRLCFALLQTQEPFDEERYVRMRHGASGDGVSGYAA

SEQ ID NO: 360415 - protein, 460 aa, unidentified
MPRRPKAPLASNASLSLPAQLQHLNLHAAGIDIGSTAHFVAVPPDTDPQPVRQFGAFTADLHRLADWLTACGVETVVMESTAVYWIPLFELLEERGFHVLLVNARHVKNVSGRKSDVLDCQWLQQLHTFGLLSGAFRPADEIVVLRSYLRQRTTLVQGASAHIQHMQKALQQMNLVLHHVVADVTGVTGMTIIRAILAGERDPQVLAQNRDPRCKNSAEVIAQSLVGNYRAEHLFALQQAVTLYEVYQAQIAACDEQIDRYLATFTPVCEEPPPTPAKPRQRSGNPFHFDAHAQLYRMTGVDLTRIDGINSVTALTVLGEIGTDMSRWKTVKHFTSWLGLCPGTKVSGGKVLGSKTKPTANRAAAALRVAAASLSRSQSALGAYLRRMSARLGKPQAVTATAHKLARLVYSMLKHGTEYVDAGQDYYERQYKERVVQNITRRAKELGFVLMPEPAETAVT

SEQ ID NO: 360416 - protein, 420 aa, unidentified
MSFKIFRKNCCGLDVHKTWIYACIGVTDTNGRTDYKQARFSSFSKGLSELCDWLAKYNCSEVCMESSGKYWIPVFNILEKADISVVLAHPKYTKPQKGNKTDRKDAKWICDLFMCDMIKPSFIPPADIRHLRDLVRYRFKLTCMIVGEKNRAQNCLTVSNFKLDDVFSDIFGKSARSITEQMLAHPGEIFDVAPFVHGGCKTPIEEIQAAVDGALCPEQAVKLRQCLNHIDELRLHIDEVEREILCLSDKYQAPLDLIRTVPGFNKNPMTAIQVLSEIGGDMSVFPTAKHLVSWAGCCPRNDQSASKIKSTRISRAGSYFKPVLVQVANALLKSKKHPEFITRYRRIKARRGHKKAIIAVCRMLLTAIWHILSDLKPYTLEGFLESRPVNKSKILTTSQALNLLKQRGYIIKDEAAPAMN

SEQ ID NO: 360417 - protein, 411 aa, unidentified
MNERKSWYAGVDWASRHHHVRLIDRDGRDLGERVFEHSGQGLTAMADWLMAASGAERPADIAVAIEVPHGPIVETLLERGFCLHALNPKQMDRFRDRYFPAGAKDDSRDGLVMASALRTDPHCFRPLAAADPVIVELREWSRIAEQLGEQRGRLASRLREQLWRYFPAFLDLDDALAAPWMIELWRAVPTPRKAKRVSNSTITAILKRHRIRRFDADKVLAILRQTPIAVAPGTAEAAQANITLLVQSIRLINQQIAQAHHQLDALPKHLADKDPEPGQIKQRDAIILASLPGLGRINRATLLAEATDALQRADYSALRALTGVAPVTRRSGRACSVSRRYACNKRLANAVYHWARTATQHDPISKAKYAALRARGKTHGHALRVVADRLLNVACAMLRNGTTFIKQSPST

SEQ ID NO: 360418 - protein, 309 aa, unidentified
MIADGMVAGIDISKDWLDLYVAPSGQALRLSNTASGVKDLIGRLKRLGVRRVGVEASGGYERGVVRALGGAGLACHVLSPARVRALAQAMGRHAKTDPIDAAMIARFVQLNPDQPVYRPDPARERLDELASLRRQLVAERNRLASRLDIAGDPMVRRMLGRMQLNVAANIARLDAEIASHIRQSHLKARYDILIGVPGVGPVLAAALLCDLPELGKADPKQLASLVGVAPHARQSGKSTRPGRCIGGRASLRNVLYMGTLSAIRANAPALRPFYDRLRANGKPFKLAITAAMRKFVTILNAILKQNTVA

SEQ ID NO: 360419 - protein, 343 aa, unidentified
MRKYAALDVSMEQTAICVVDESGKKIIEGKVQTDPDTVTTWLAEKAGSLEKVGMETGPLAVWLWNELRARGLSIVCLDARHASAALAMMPNKTDRHDAAGLAQIVRTGWYKEVRIKSHAAYVVRALLSARDALVGIRGKIENEIRGLLKTFGVMFGRKVGGFTRRAEEIVAGELAASPEIKRIIEALLEARRAILDRIKVLDSRVRSVAKANATARLFMTAPGVGAVTALSVASAYDDPARFSRSSSAGAYLGLTPRRYESGEISRNGRISKRGSKLTRKHLFEAANALLTRVGKFSSLKAWGLRLAKIAGFKKAKVAVARKLAVILHAMWKARTPFRWSAAV

SEQ ID NO: 360420 - protein, 270 aa, unidentified
MDIAVLGIDLGKNVCSVVRLDGSGRVMLRRRVRREMLERLVDGLPRCVVAMEACCGAHHLGRVFGGQGHEVRLMSPEYARPYVKAQKNDDRDAEAIAEAATRPTMRFVPVKSVAQSDVQALHRARERLVAERTALINHLRALLLERGITVPQGRRKLAVAVGDARTFGRGRDMAAWLGLTPRQRTTGGKPHLLGISKRGNRSLRKNLIHGARAVLPRLADQPTPLGRGARGLLARAPKNVAIVALANKLARIVWAVLAHGRAYDAEFAAA

SEQ ID NO: 360421 - protein, 366 aa, unidentified
MYEGITCIGLDVHKRSISVAVRQPGGLDVSEERLPNEPPAVRRWAQGWKRRCGDQLICAYEAGACGYALQRQLEKLGIRCLVVAPSLVPRRPGERIKTDRRDAGKLAEYLAGGHLTEVRAPTPAQEAARDLSRAREDAQQDRMRCRHRLSKFLLRRGRTYTPGRKSWTGAHRAWLQTLSFEDPVEQVVFDDYRLAIAQVDARIEALDRRLEALAQEPPYRATVGALRCFRGIDTRTALGLVTELHSIEHFDRPRRLMAFVGLVPSEASSGDRQRRGAITKAGNGHARKLLIEAAWHARHKPAIPVALRQRRAGQPPEVIAMADVAMQRLHRRYWRLVQRGKPATVAVTAVARELTGFLWAALHAVA

SEQ ID NO: 360422 - protein, 392 aa, unidentified
MTLINIVAANQKYYAFNLLSVFIMVFWSVQYLLQHLLVQTQLSDQLLQPLILIFQLPQTPQFRHARPGKFFLPVNGMDYLLPLRLTVRNVLTKRITMNIVFLGIDLAKNVFQLCGLNQAGKPVYTKRTGRKELLQTLANIPACLIGIEASTGAFYWQREFEKLGHKVKVISPQYVKPFVRGQKNDGNDAQAIAVALMQPTMQFVPPKSPEQQDIQALHRARQRIVNHRTATVCQIRGLLLDRGIPIGSAVSRARRAIPLILEDAENGLSSRMRRTIAELYDLFNDLGRRIHFFDKEIETVFRQSEACQHIAKVKGIGPKTATAVAAAIGKGTEFKNGRHFAAWLSLVPRQHSSGDRQVLMNMTKKATSICGHFLFMVPALSSGLPRITMMVI

SEQ ID NO: 360423 - protein, 389 aa, unidentified
MKIFVGIDIAKLNHFAAAISSDGEILLEPFKFTNDADGFQLLVSKLESFDKNSIIIGLESTAHYGDNLVRYLVAEFYQVCVLNPIKTCQMRKNNVRKTKTDKVDTFVIAKTLMMQDDLRFITFFDLDMMDLKALGRFRQKTIKQRTRLKIQLTTYVDQVFPEIQYFFKSGLHQNAVYALLKEAPSPKEIASMHMTHLANLLKVNSHGHFTKEQAKELRVLAQKSVGANDSAISIQITQTIQQIELLDSQLDKIEAEMTDIMKFNDSVIMTIPGIGYINGGMILGEIGDIHRFSNPNKLLAFAGLDPSVYQSGNFQAKTTRMSKRGSRVLRYALVNAAWNVVRNNATFKAYYDAKRAEGRSHYNALGHCAGKLVRVIWKMLTDEVEFNLE

SEQ ID NO: 360424 - protein, 354 aa, unidentified
MADETTVIGGVDTHTDFHQAAVIDSIGRHLATEAFPTTHDGYRRLLQWLRSHGEVMTVGVEGTGAYGIGLARVLRANQVTVIEVDRPDRRARRANGKSDPVDAFAAATAVLSGRAGGTPKTRDGIVEAIRALRVVRRSAVKARTQIINQIRTLIITAPGEVRERLRTLAPAELIRQLSRSRPGADTRDPACAVRIALRRLARRHQYLTEEIADADAELKSLVAEAAPSLVALSGVGTETAAQLLITAGDNPERLTSEASFAHLCAAAPVQASSGRTNRHRLNRGGDRRAKHALHMIALVRMRYDQRTRNYVARRTAEGMSKKDILRCLKRFIAREVYQHLTRPHHTPKPLTQSA

SEQ ID NO: 360425 - protein, 413 aa, unidentified
MRVEYERCCGLDVHKETVVACVIVPDAAGRAAKETRTFGTMTEELRALAAWLRAQGVTQVAMESTGVYWKPVFNVLEGEFDLLVVNAGHIKKVAGRKTDVSDAEWIADLLRHGLLRGSFIPSAQQRAWRDLTRYRTRLVDERTSEVNRLQKVLEDANLKLASVATDIMGLTGRLILQQLIAGETDPAILAGLAQGRLREKRALLAQALQGKVTPHHRFMLVEHLSHIDYLDEAIGRLDTEIEEQMRPFEEVLARWDQLPGIGPRIAQIMLAEVGVDLKQFEDAAHLASWAGLCPGNQESAGKRKSGKTRKGSRWLRRALTEAAHGAAHTKHKYYQAMYHRLVGRRGKKRAIVAVAHSLLVTGYYLITRKRDYQDLGHNYFDERQREAVKRRAVRRLEQLGFQVSLIPASEPVT

SEQ ID NO: 360426 - protein, 354 aa, unidentified
MSQKLNQETGQQPEEQSEKRIWQWFGVDVSKDSFTVAFYDGLSDATSEVLKFASTPKGVKSFLSWRKKHASKIIPSGIVMESTGYYSARLAALMRKLDRSLRVSICNARSASYYIKSHSANKTDPSDARLIARYGYDFQPAELKVKSSEERLLHELVSERGKLVKIMTMLTNKAKSLEFSEIMEINKSVIGHLKEKIKELDQRIVEASQQSEEMNAEIELMDTVPGVARLSAAVIYGTLGSLKQYTRLQLSALSGLYPKISQSGSSPIRSKLSKNGPSYLRQILYLDATQAMKKIPTLRNLRERLLARENSRKMTARCACMRKLLLIIKGVVDSGIPYNPNFQQKKQEISKKTA

SEQ ID NO: 360427 - protein, 324 aa, unidentified
MNKDIFYVGIDVGSQELWTSIEGTKPKMFSHSKKGITSLYDWSVKKSNQSQVRFCMEATGVYSMSVANLLVEKHQAQLSIVNPAQIKTFAAMQMRRSKTDQIDAEIIRNFAETQSPRLWKPNSKQLQQLTALVTQADAIKESLGQWRNRHHAQGFIPGLPNEVKKAQRSIERSLETQLEKIEMAIKNLCAQDSTLAHQVALLCTIPGVADQTAVKLLAYGQNWLTVKSAKALTAHAGLAPKHHQSGTSVNRKARIDKRGNPKLRKTLFMPALVAVQYNPDLKRFYQRLLENGKPKKLALVAAMRKLLILSRAILISQKPFVPQN

SEQ ID NO: 360428 - protein, 334 aa, unidentified
MTFELLAIDLGKSSFHLHSIASDGAILSRKVSRSKLAETVNALAPKTIAMEACASAHHWGRQFKDNGREVLLINPRFVKPFVRGSKNDAVDAAAIYEAATRPTMRFVPVKSTTQQDLQSLHRVRERMIIQRTSLINHARGLLAEYGIVLPQGPWRFVSQAPAAVESADLSDLGRELFLELLDQLTDVNDRIAKIDRKISEICREREDCRRLSELPGVGPIIATALVASVEDGRHFKSGRELAAWIGLVPRQYSTGGKPRLGGIGRRANHYLRRQMIHGARAVISRLASHDDRRSQWLQELVSRRGYNKAIVALANKTARIAWALLTRQERYAAQ

SEQ ID NO: 360429 - protein, 372 aa, unidentified
MNPLYVGIDVSSKSNVVYLMLPNGDKLSNFELKNSQDGSSQLVKRILSALTSHSLDTVLIGLEATSVYGDNLVYFLREDATLAPFNRKIHVINPKQVNKFKESYNDLPKNDYVDSFVIADCLRFGRINKEVYLGDYRYLALKNLTRARYYAVCNLVKEKQRFMNVLFKKYSTMTQEKVFSDNFSTTALSVYEEFESAEALAKMDLQALTDFIMEKGKNRFPDPDSAAKAIQKAARSSYRLPKTVNDSVNQVLSISITSMKALESQIKEFDKAIAAQMELLPNVLTSIPGIGPVFSAGIMAEIGDINRFGNHAQLAKYAGLAWKQHQSEGFEAQTTRLINSGNRFLKYYLCEAAFSLVRCDKEYSDFYHLKYK

SEQ ID NO: 360430 - protein, 316 aa, unidentified
MKQYIGIDISKSTIDVYDGKKSYKYENSISGFKEILPLVENIKNTVFIFEPTGIYSYALTEFCSKKKIAVVMVGPKESRDFARSLKVRSKTDKIDAKILYKYQSHVEPNMIKVPTVNHHAIKIQEMLNVYEGIQASKLRLKNQIESVNKTHKDLHRTLNRIINDLDTEAIKLFNKIELLLFKDEETKERYDAISSIPSVGQKSALYLTAFFLKYPTANAKQITALAGLDPVMKDSGLFRGKQRISKHGGQQLRNLLFLPTLSAIQHNSRIKVFYERLTSQAKTKKLAVIAAMRKLVLMAFSIFKSKEEYQPLLATI

SEQ ID NO: 360431 - protein, 427 aa, unidentified
MRCEEDSRLEAFRQFRKEIRGSKGYLIVGIDIAKEKHHAFFGTATGKTLLRRLIFDNTIEGFRKLLEQTEAIQATHKLKKVVFGMEPTANYHKPLGEHLIRRGRTVVLVGGVAVKRNRELLDGRWDKHDDKDAANVADLISQGKCLFYEYPAIEIRDLRNLLSLKRKLKKLEHGYRVRIRNQLIAQYFPELDSYSGYAETESIVRWCLDPSQIAGFEKDQFKDRVSTTGRQTLMKKKRLDDIQKLAIASIGCEVGQGASFDAKIMVEGLRHTRKAIQETENKIEATCRQFPEYDYLLTIPGFGPDVSAKVLGAIGNPHRFFNQQQVLKMAGLDLGADRSGKTSQNAVPVISKQGKADFRYALYQAAFIASSRNKDFMFYFARQLQGREKEKGIKTKRYVKLSAKLLVIAWTLMKNQEAFDIKHLRQE

SEQ ID NO: 360432 - protein, 398 aa, unidentified
MDQDRFDVFVGLDVGKEHHHATALNSAGRRLHDKALPQDEAALREVFDKLTVHGSVLVIVDQPATIGALPVTVARAMGIEVAYLPGLAMRRIADLHPGNAKTDARDAFIIAEAGRTMPHALRRVGGDDDLIADLAVIVGFDDDLASEVNRVSNRIRGMLTQIHPALERAIGANIGHPAVLALLAKFAGPTGLAAAGRRRLTTTTKPLAPRMHTQLVDAIIKALTEQTVVVPGTRAAELVLPQLAAQLQGLLAQRAAAAKQVEEALDAHPLSQLLMSMPGVGIRTAARLLLDVGDATAFPTAGHLAAYAGLAPVTRRSGSSIRGEHPSRAGNKHLKRALFLSAFAALHDPDSRAYYDRKRAAGKKHNAAIICLARRRVDVLHAMLRNGTYYQPRPAVAA

SEQ ID NO: 360433 - protein, 338 aa, unidentified
MKKFSGIDLHSDNSLVVVSDEEDRIVYQRRLPNDLAGIVQALAPHREELIGVVVESTFNGYWLVDGLMEAGYRVHLANTAAIKKYEGLKYSGDAADAAYLAQLLRLGLLSEGYIYPREARAARDLGRKRLPLARCRTAQILAIENILARQTGGRMRSNEIKRLTAEGVEALGFSADVTLALQANLAVMHVLQSQITVLEARLRERVSLHENYALLTTVSGIGQTLATTIMLETGSIARFAKVGHFSSYCRCVDSLRESNGKKKGEGNAKNGNPYLAWAFVEAAHFALRYCPQAKRFYERKKRQRNAIVATKALAHKLARACYPMLQEHKAFEVERCFA

SEQ ID NO: 360434 - protein, 371 aa, unidentified
MSGSGDAFIGLDTSKAKNAVAIAEDGRGGEVRYLGEFENTAPATRKLVSRLAEKYDHLHFCYEAGPTGYGLYRQLQDLGQDCAVVAPSLIPKRSGERIKTNRRDAVSLARLHRAGELTAVWVPDTLHEAVRDLSRARETAMEDLRRKRQQVTSFLLRQGRSYAGRTTWSGRHRRWLAEQTFDHPEHQLVLQEATAKEAEARLDRLGAALAEIVPTWSMAPVVAAYQAMRGVNFLAATTLVAEVGDLRRFDNPAQLMSFLGLVPSEHSTGDTTRRGAITKTGNRRARRVLVEGAWSYRFGARVGRQLLERMTDLPKEVRDIAWKAQLRLCKRYRVLTARGKRTTVVATAVAREMAAFLWAIAQVVAPKEAAS

SEQ ID NO: 360435 - protein, 430 aa, unidentified
MKYNTQNAKIASITEETLVLGIDVGSATHYVRAFDWRNYEFSDKPLAFSNDEAGFLTFMAWVEDIKEKAGKTAVIPGMEPTGHYWFNLGKFLQDSGMRPVHVNPHHVKKSKEMDDNNPDKNDRKDPKTIAALVNEGRFSYPYIPTGVYAEIRSLSNLRFQTQEEITRIRNRIARWISIYFPEYKDVYGKLDAVSGMMVLKEAPLPVQIKELGAGGINQIWRDAKLRGAGMKRAKTLLSAAEHSVGSQEAPEAASMEIWNLLEDYEKYSSRMDDLMARIEEKIKEVPYVDKLLEIKGIGLKTVCGFIAEVGDLSRFDDPKQLQKLAGYAIVKNSSGKHAGESHISYRGRKRLRYVLYEAAISVIGKNGEFRESHRYYQTREKNPLKKMQSVVAIACKVLRVFYAILTKGVDYDGEKMLGDIRRPAMSVQAA

SEQ ID NO: 360436 - protein, 324 aa, unidentified
MKEFSFYVGIDVSKSWLDIAVLQPSMGIVEEKRIANTSHVVEDFLKGFQKALKVDLGEVLFCLEYTGKYGNPFLEVAAIKQANVWLELPIQIKRSQGLVRGKTDRWDARRIAEYAYRFSDKAQLWKPLSKSLEQLKAYQSKRDLLVKTHTQLSQEDKNDVVFKKPLEALKKAIHEIEQKMEQLIRENHLFLRQYQLLQTVSGIGKQTAIALIIITDGFSRLTDARKLSCFAGVAPFPYSSGSSIKGRNRVSKMGNMKLKTLLNMCAWNAIRATGDLKAYYERKLAEGKHKLSIINAIKNKLLAIAISVINRDTPFAKQYSVPVS

SEQ ID NO: 360437 - protein, 322 aa, unidentified
MEAQAKFVGIDVSKARLDVGVWPGAESFSLSNDERGIAQLVERVRRLAPQAVVLEATGGLESVAAGELLAAELKVAVVNPRQVREFARSLGRLAKTDRLDALVLAQFAQSADSNGRLASMRTLDPAQAELKALVARRRQLMQMLVAETNRRERAPKIIRKSVVQSIKGLKRAIAVVEQQVAEVIANAPVQRAKAKLLRAVPGVGPELTAGLLADLPELGELGRRAIASLVGVAPHAHESGSFHGRRMIWGGRAHVRTKLYMAALSAVRFNPLLRAHYDALLERGKARKLALVACMRKLLLILNAMLRDQQPWRPPLELQHSR

SEQ ID NO: 360438 - protein, 426 aa, unidentified
MADVVKWLVGVDWARSMHQVCLLDLSGAVLGEKVFPHGGAGLADLCDWLPAKTGGRAEEIAVVIEVPHGPIVETLLERHFLVFAINPKQLDRFRDRFSVAGAKDDRRDARVMADAGRTDRHRLRQLTPNDPVTVELREWSRMGAELQQEQTRLTNRIQDQLWRYYPQALKLTDDLAADWFLSVWALAPTPAKAARISEKSIARVLKEHRVRRIEAAGALQILREKPISVAAGTTEAATAHIRTLMVRLRLVNRQIREVERQLDQLCQRVGEAGDDEPGQPGKQRDATILRSLPGIGRIVVTALLAEGADPLRRRDYRAMRPLCGVAPVTKRSGKSKLVLMRRACNPRLRNAVYNWARVAVQHDIISQKRYAALRRRGCTHGRAIRQVGDRLLKVACAMLNAGTLFDPNYRNSHRGTVGSDGTPSSA

SEQ ID NO: 360439 - protein, 370 aa, unidentified
MDVHTTNYTLCIFEPSFEHDGTVHCITQVKPEVKNIIHVIETFKKKHENEELNIVCGYEAGCLGYSLYHELKEKGIECVILAPTTMKTEKGGRKLKNDYRDAKMIAECLAYGGYSAVHVPTELDNSVKEFIRMRDDIKENLKSIKQQIIAFLTRNGKQFDGKSFWTRKHIDWINTVSFSEPLLQDTLKEYMIEYNHLCDRVETLDKQIEEISLKEEYVEKVQQLQCLIGIKTHTALSLIVETSDFNRFKKGNMYSAYLGLIPGDDSSGGQENKLGITKAGNSHLRKLLVEAAQGYTRGKVGFKSKVLKSRQEKCSSEVVAYADRANERLRRKYYRMTLRGKRYNVAKTAIARELACFVWGIMTDHIDLCS

SEQ ID NO: 360440 - protein, 476 aa, unidentified
MGRALLPSSTPVRFSVPDRGPRASRVLLREVQEIEDEEHEQILERVCAIDVAKASGKVCTRVPHPSRPGARRTRVWDVDATTNAILELGEHLAGEGIEKVTLESTSDYWRIWFYLLEAAGLDVQLVNARDIKNAPGRPKTDKLDSVWQAKLTERGMLRPSFVPPAEIRRLRDYTRLRTDLTRERTRYWQRLEKLLEDSLIKVSTVASSLDTLSVRDMLEALIAGERDPKVLAGLARGRMKAKHAALIEALTGRFDDHHAELARMLLDQVDALNAQIGKLTTRIGELIAAIPSAQGVDADGTTGPTAGTSPGAPVLPAVARLDEVTGIGPDGAQAIIAEISLDMSRFPTAGHLVSWAKLSPRTIQSGTSSRSGRTGKGNPYLKGILGEAAAAAARTDTFLGERYRRIVKRRGKLKALVAVARSILVIIWNLLANPAARYHDLGSGYHASRTDTGKKVRNHIRQLEALGYTVALTQAA

SEQ ID NO: 360441 - protein, 353 aa, unidentified
MKNRNSLGTRSKVTIGMDTSDKKNAVCILRNDTGEVIKRISVANTPEGMTAFFSRFSPTSVAFEVGCHSPWINDVLTGLGHDTVVANPRQVALISRSIRKTDKHDAELLARLLRADRELLRAIKHRTRDGRIDLALLRTRNRLIGTRTGLIASIRGTVKSFGERIRGMDASVFHKHAAQDIPEDLLPQLEPLLEVLTTLAEQINSVNKEVTRLCREKYPETTLLRQIPRVGEITSLTFLLTIEDPERFEKSRDVGAYVGLIPRKAESGDRSPELPITKAGDRELRRLLVQCAHQVIGKLGPPSDLKDWGLALAARGKKQAKRRAVVAVARKLAVLMHRLWVTGEVYRPRRDVA

SEQ ID NO: 360442 - protein, 343 aa, unidentified
MSVQMIGPKIAKSVFQVHDVDNAGQPVLRKRLAKGQLAGFFAKLPPCIVGVEARSSAHHWARELTRLGDEVRLIPPQHVKPYVKRNKTDAADAGAICEAVGRPTMRFVPIKSVSQQAVLALHHTRALLVRQRTATVNALRGVLGEFGLVAGKGAARLEDLRRRLAQANKDTVPVDARQAITSLFEHVDQLRERAEAVEAEILTWHKANAVSRRLAEIPGIGPLTASALVAAVGNRKQFQSSRHFAAWLGLTPRIRASGDRQRIGAISKGGDRYLRTLLIHGARALVGLTKRPGVALRPWLATLVGRRPFPVAATAVAHKTARIVWAMLSREAAFRPWTPAMAA

SEQ ID NO: 360443 - protein, 381 aa, unidentified
MNNHSIIFIGLDTHKTFTQLAVLKDERGAKAEFFGKIKTNKSALIKFVRQLQSKYPKATLHFIYEAGPCGYWIYRLLTSLGHCCYIIAPSLIPKKSGDKVKTDKRDAAKLAKLFKAEELTTIYVPEAEDEAIRDLSRARETAMNDLKDAKYQLKGLFLRNNIKCVVKDNWSNQHLRWLTELILPHHSQQIVLQEMIQTITKRVARLVNELEHQVKQWRYYPAVKAIQAMRGVRMLVAVGTIAELGDLRRFDHPRKLMAYLGLVPSESSSGDKRRLGRITKCGNGRARRLLIEGAQTYKHKANISTEIQKRQEGLSKEIVDIAWQAQLRLCGRYQRLMQLGKHRNVVVTAIAREMIAYIWAISREVVITPVDPKTRIARLPA

SEQ ID NO: 360444 - protein, 468 aa, unidentified
MDLATLEPPDRTGARMSRQKTKLQSVIQPPMVRLDAAGIDISPEVIYAAVDPRKDTKPIRHYGTVTAELYRIANWLKACGVRTVAMESTGVYWIPLYQVLDERGFEVYLVNAQHYKNVPGRKTDVCDSAWLQYLHAVGLLQGSFRPAQEICAFRTILRHRASLVEAASKHVQHMQKALDQMNVQVHRVLSDLTGVSGLAILDAILAGERDGHRLAALCNRRVQASEESIVAALEGDYRTEHLFTLRQSLDSYRHYQKLIADCDRQIREQLEALEGQGGDEEPPAGRKKMRTAKDEQLRQQFFRIVGVDLTAIPSINVGTVEVMLGEVGPDLKRFRSGGAFANWLGLCPNNSITGGKIQSSKTKKCANRLAGALRMAAESLCRDKSYLGQFYRRMKMQLNGGPEAITAAAHKLARIIYAMVNKRTEYDETRFAEIEKRNHERARQRLTKQARKFGFVLAPIQAPTEFVS

SEQ ID NO: 360445 - protein, 354 aa, unidentified
MQYIAFDSHKRYTYAVVEEKEKGRVMEKRIEHRRGEIGAFLSQCEVGSPVALETIGSWYWIVDEIEAAGMLPRLVNARKAKMMIASSKKTDRLDAKGLNTLQRTGTLPTVWIPSSELRDIRELYRTRMVLTQMVIRLKNRILSCFSKYGISFDETSDAFNIKGRASLEAALEILPTQTCFALKELLRQLDLLQEAVKEFEARMLQVQSNDPEIKLLQTIPGVGPILSYVIAYETGDIHRFPSASCFASYAGTTPSVHASGGKVRYGHTPSDVNHYLHWAFIEAANVISMRHEVLRFRHTARLYERLRQAKGHGIAVGAVARHLAEATYWILTTKTAYREPNQNKQVVVVSSKEG

SEQ ID NO: 360446 - protein, 345 aa, unidentified
MNITTVGIDLAKNVFQMHGVDARGKVALRRQLRREQVASFFGNLPPCLIGMEACASAHHWGRTLERFGHTVRLMAPQFVKPYVKANKNDVADAEAIGEAVGRPNMRFVSIKSIEQQGILSVHRVRQGFVKARTAQANQIRGLLGEFGLVIPKGICHVVRCVPAVLEDASNELPLAFRQLIDRLTGHLKDLDQQIRELERQIIAWHRGSELSRKLEKIPGVGPLAATALVASIADARSFKNGRQVSAWLGLVPRQNSSGGKSTLLGISKRGDVYLRTLLIHGARSSILAAKRQRENKNVWLANLLNRRHANIAAVALANKNVRTVWALLAHGRDFKPDYVPIRAAA

SEQ ID NO: 360447 - protein, 429 aa, unidentified
MTSRQNNKNELILVAIDVAKHSHEVLILWPDGHQKGYRVANSFEDFAKLTALLKSQGVPVRAALEPTADYHRCIANWLLQHGVDVHMVSSLACSRVREALFNSWDKNDRKDAKVILYLLEQGVSEPFHDPLLQGFMHLQEISNTYHQIGLARTRCQHSLLNHYLPLFFPEFEKYFHSSRTEWFCRFLEKFPTPLCITSISKEDFLTQAWNLVGRKVAKDRFLEEVYELAQKSVGLPIMENCPELYGFRIQLQRHLQLTAQRNDLEKLSIGILANNPDYHRLQTIPGIGPILALIILAESGDLRRFAHHRQYLSFCGFNLSGSQSGQSKSRYRISKRGNARLRYAFWLAATVAIRQRENSFRRKYETYIAQDRNNADLKRKAYCAIAIKVARVAHSLIKNAMDYRGYHDIEIPGGRICSMGRWTLSGQIP

SEQ ID NO: 360448 - protein, 333 aa, unidentified
MLPPNCGTATPYILRNTVGLDISKLTFDATAIVGNAEYSAKFDNDSKGLNQFSDRLKSLGCQNLHICMEATGNYYEEVADYFAQYYSVYVVNPLKISKYAESRFKRTKTDKQDAKLIAQYCRSAQESELVKRQKPTDEQYRLSRMTAAYAQIKSECAAMKNRHHAAKDEEAAKAYAEIIKAMNEQLEVLKEKIKEQTEKPNCKEGVKRLETIPAIGRMTAAVLFHHLTSSKFETSNKFAAFAGLSPQQKESGTSVRGKGKLTKFGNRKLRAVLFMPAMVAYRIRAFPGFIKRLEEKKKPKKVIIAALMRKLAVIAYHVHKKGGDYDPSRYKSA

SEQ ID NO: 360449 - protein, 348 aa, unidentified
MKFLAIDAHSQHCELAVLNENGKLNQCRSIPTSERGLIEAVRSVTGPKKLAIEEGSITGWLNLLLRPYVDELIVADPKQNRWISKNEQKDDPGDAVRLAQLLRLGVIKPVYHSQDQRWVEFRSLMQHHQDLTQHLVRTKNQLKAHLRSVGIDCSGKAIYQSAEDEEELAEWLGKIQDYPQLQFEVGQIVRLLAQQMDLLDETNVLIKKQSAQWPIIEAWQREQPGVGLIVASTVAAALITPERFSKKSKLCAYAGLSVFKQRSAGKVLRSGATRGGNRDLKRALMQAANAIGRMKVDRHVLAASYQSMKCRGLSSLTAQRAIARKLLFQMVAQWRRALVNQPKQPLTA

SEQ ID NO: 360450 - protein, 388 aa, unidentified
MNVGADKSEPLTAVHTDLGAIFVSLELSRSSWLITSLSPGGGEKMSKHSVRGGDFAGLMERFAQLQEKARRRTGQSFRIIVVQEAGLDGFWIHRALQNEGIESHVVDAASIATSRRRRRAKTDKIDGETLVRALLAYKRGEPRVCAMVKVPTPGEEDRRHLCRERKALTAERVRHVNRIKGLLFSQGVSGYQPLRRDRRQRLEELQTGDGRAFPQHLKALVNRELDRLELLLKQIKTVEAARDALLAVGQTAKPAPAAMLLDIRGIGPEFAAILWSEGLFRHFENRRQIAAYAGLAPTPWQSGAVDREQGVSKAGNPRLRTTLIQLAWLWLRNQPRSALSVWFHERISRNGGRLRKTTIVALARKLLVALWKYVTDGVVIEGVTMKVA

SEQ ID NO: 360451 - protein, 418 aa, unidentified
MKSMEITAVGIDVSKRKSTVAIRRPGGVIVACPFDISHSSHDLEKLVSILKTTGGDIRVVMEHTSNYWKPIALTLKNAGFYVSVVNAMLIHDFSDNSIRKLKTDRADSLKIANYALTFWNQLPPFNDEDETRLVLKEQSRMYERLASTATSLRNGLIALADQTFPSIDQAFGHAIKNADGHEKWVDFFSIYWHRDCVLRLSIEKFTESYRKWCLRRNYKFRTNTAHKLYALAQDAVPTLPKNNGTKALVLQACKSLNAVCEAKQSTQEEMNRLASLLPEYEVVMQMEGTGPITGPALMAEIGDVRRFKNKKALVAFAGIDAPPFQSGNFESKSRHVSKRGSPHLRCTVFLVANIILTLSHKDNSVFCFMDKKRAEGKHYYVYTIAGSAKFLRIYYARVSEYLRTQEPPAAAICLDCKD

SEQ ID NO: 360452 - protein, 338 aa, unidentified
MKIIRVGVDLAKNVFQVHGVDRNEQPVWKRKLKREEWIKVLLEKIEPGCEIGMEACGGAHHWARLLQARGYTVKLIAPQFVKPYVKSNKNDANDAEAICEAMSRPNMRFVSIKTVQQQDAQAVHRIRAGLMEQRTAKVNQIRGLVSEYGLVAPLQVSHLRAAIPEWLEDAENGLTGLFRKLLNGMWNDLLSLDQCLKELDQEITALAADPVAQRLQQLRGVGPMIATALLATVGDASQFANGRQMAVSLGLTPKQNSSGGKEKLLGISKRGDSYVRCLLVHGARSMISASKGKDDRLSQWVMRIATTRHPNVAAVAMANQTARIAWAMIRRGSDYQPA

SEQ ID NO: 360453 - protein, 447 aa, unidentified
MSHGIGPSRGDRRRNARKARLRSLVPREYAIVGVDLADEKQVFAVCDHDGGVHGRRSVKARAWQLDESLRWAQATAATAGFSGLVVACEPTGHRWRVMLDQCDALGLTMVCVQPMLVHREREREDLTRDRSDPKDAVLIAGLAAQLRCYEPERPTAQWARLRHLGARRIELVTAGGAIRQRLRSLLECVWPAALTTAARPLACTTWRAAMAVIMSRCVDGDLTAVRRMGWCRFQAAVRRELPRWGGKRVAWRIARALWEATRDSTGVAVHRHGALERVGDALADWQRLRVQRDDVEARMVRVLDDLTLTSLVTSIPGLSAVGAAAILAETGDPARFDSARALVKHAGLAPRDNESGTFKGVSRISGRGRPELRLAAWRAVWGALPHNTVLAARHHHLRMRDTNRLTDHQARVAVAGSLLRQLHAVIVHRVPWDARVAAGVKEVKPAA

SEQ ID NO: 360454 - protein, 412 aa, unidentified
MDILYSCCCGIDIHAKTAVACLIKDGKKQTLTFSTMTDDLLKLLDWLQQAGCTHVAIESTGVYWKPVFNILEGVMEVILTNARDAKGFKARKTDVLDAEWLADLLRHGLLKPSFIPPRHIRELRELTRYRESLIRQQTALANRIQKLAESANIKLAQVASHALGVSGKLMLRALAKGETDAEKMSHLAKRSLKRKQPELQRALAGRLTEAQRWVLSELLDQYEQVEAAVKRTEQRIDQEVQASPDPFVSEAIQLLDGIGGVNETVARIVVAEIGVEMSQFPSARHLASWAGMCPGNNESAGKRKSGKTGKGSRYLRAALVQAAWAASHQKDSYLAAQYRRMVKRMGKKKALVAVAHSILVIIYHVLKERTEYKDLGGEYFERRDVEKQRKRLIKQLESLGLKVTVEEVAKAA

SEQ ID NO: 360455 - protein, 398 aa, unidentified
MFYCGIDIAKRNHEASVIDAEGKPLLDSISITNTQEGCDKLYTLFERLDIVKNDIIIGMEATGHYWLSVYEHLIEQDYDVRVINPIQSDAFRKMYIRQTKNDSKDSFIIAQVMRFGQYSETTLSDENIVAMRQLTRFRMALVDNCGDCKRRIIALLDQVFPEYEGLFSDTFGTTSKELLLKYPTPDDMLSVSTKKLTALLSKASHGRFSEGKATELRHVAAHSFGVGFAKNAFSFQIRQLVEQLNFTETQIEELDKQISYLLKQTNEVITTIPGIGDTLGAIIVSEIGDIHRFDAPNKLVAFAGLDVKVTQSGEFSGTKQHISKRGSPYLRRAIWLAANRAAFCDPILSEYYQSLKARGKHHLTAVGAVARKMCNIIFTILKENRPYEAKPPKKGAIQ

SEQ ID NO: 360456 - protein, 347 aa, unidentified
MNQITRIGMDTSKYIFQVHGVDASEQPVLRKRLGRKQMLGFFAELPPTVIGMEACGSSHYWARELKQLGHEVKLIAPQHVKPYVTRNKNDGRDAEGLCEAMSRPTMRFVAVKTPEQQAALMLAGLREQMITRRTQISNAIRGYAAEFGITVAQGLNQIEPLLARLAQDESVPGLARDLFALQGRDYAQLQMELKAIEARLMAWHRANADSRRLAKIPAIGPIGATTLVMKTTDPGAFASGRHFAAWIGLTPKDHSTAGKTRHGKITRAGDERLRSVLVAGATAVIQQAKQGRGHPSPWLIALLMRKPPKLAAVALANKTARIAWKLMVTGESYDGARMSKASVAAAA

SEQ ID NO: 360457 - protein, 342 aa, unidentified
MSIVTIGIDLGKSSRSLAGLDERGAVVLRRRMQPATVVSFASKLSPCTIAMEACCGAHHLGRVLTAQGHTVKLMSPEYVRPYVKAQKNDDRDAEAIAEAATRPTMRFVELKSQEQLDIQTLHRVRSRLVTARTTLINQLRAILLERGATFAQGRRKFETGLDAMLADAERLPPGRIRQLIVDMREEWSALDRRIVALDEEFAVLARTDEAARRLTSIPGVGALNATALVAAVGRAESFDHARDLGAFLGLVPRQHTTGGKPRLLGISKRGNAYLRTLLIHGARAALPSLAKSETALGAWLRSLLARCHHNTVVVALANKLARIAWALLRREETFSIGRATMA

SEQ ID NO: 360458 - protein, 375 aa, unidentified
MGEITRVLIARVGVDLAKLVIQVHAVDAAGRRVLSRALKRDQFIGWCQQLPAGCLVAMEACSSAHHWARKLGALGLDARLIPANFVTPYRMEGKSGKNDMTDAAAICEAASRPTMRFVPVKTCEQQGVMSLHRVREGFKEERTACINRIRAVLGEHGLVFGKSPKALRAVLADVIEDAGNDLIPRARLVVQRAFEHWRELDEHMRWCDQQVGTHVRSSPEAKRAAKITGIGELTASAMVAGVGDFKQFKAAHQFGAWLGVVPSQDSSGGKTRLGRITKRGDDYLRTLLIQGAKSAVMSAGKRDDPISRWLVQLVARVGWQKACVAMANKNARILWAVMTRELGFDPRHVSIKPDAKQTALEKINPAHSALASCPA

SEQ ID NO: 360459 - protein, 331 aa, unidentified
MRIRKLTGHEPKVKSSTRDYDYCVAVDWSERTMATAVMAADEALPLVWEGRSDVARLQTMVQDLPGRVILTFEESTAAHWLYGKLLPYVERLVVCNPGYNRLLCRGPKNDTIDAIKLCLLLRQGSLKEVYHSTSKLYELRELVSAYEDTVRAGVIAQNQFKACDRGRRTTGRSGIMITEQLRARIEQYRHEKQQFEEAFTRWAKRIPVLRQLKRLPGIGLRGAVKILGHVIDGRRFPNRSHYWSYCGLVWHHKMSGGRRYGRRRPQYNHQLKAVYKTAALVAIKGSGPVADYYRNLVAQGRAEHNARHAVARYLARLSYGILKQGVQHNNS

SEQ ID NO: 360460 - protein, 378 aa, unidentified
MQPKEFRHTKSDLEALVTKLKSFDEEVHVVMEATGNYHLPMASYLKDAGYHLSIVNPLEMKRYRCQGIRNPKTDNIDAMNIAQYGLDNWSHPLRSFEMEEIRSELKLLGTQYCSFMKTRQERCLALCHIMDRTMPGIYGILDDFNNYNGRDKQSDFVYDFYHAERITRYSENKFCEKYQAWTKKKGYIFREKEARQLYLIAKDSIPTLSMSENTKLVVREIISVLREVNASLYGILTQMNSLAKQLPEYSIVMSMKGVGQSLGPRLMAEIGDTRRFHSAKALIAYAGIDAPPFQSGKFIGTERHISKRGSRILRKLGYELMDCINKHQKSFFMDPVCIYFLKKRAEGKHYRVAMFAAYNKFLRIYHSRVSAVLNQAEI

SEQ ID NO: 360461 - protein, 367 aa, unidentified
MSSVASQAGLIHLGMDTSKNAIVVATLLPGEQSPVTDRIANEEAAVRRLVGRFADRSVLRAWYEAGPGGYELCRLLASMGVACQVVAPSLIPKGSSDKVKTDKRDSRRLARLGRAGELTPVRVPSEGEEAVRDLVRARDAMLADRKRAQQRLTAVLMRHGRVWRGATYWTAAHRSWIAAQRYGEPALAAAVGYYRATLAVREAELAAVEAELLPWAGREPLAGPVARLGCYRGIAELGALTLAAEVVDWRRFPAARAFMGWTGLVPAEYSSGERTRRGHITKAGSEPVRTALTEAAWAYRFQPAIGAGLRRRQHGAGPDTLARSWKAQRRLHDRYVHLTRDGGKAAPEAAVAVARELAGFIWAEMTA

SEQ ID NO: 360462 - protein, 350 aa, unidentified
MIIIGCDYHPGFQQIALVDTDTGEVRELRLEHREPAEKFYRSLAAQRAVVRLGMEGSGHTRCFERILREPNFEVWMGQAPEIRTKRVRKQKTDRQDAQLLLRLMVEDRFPRVWVPSWENRDLRQLLWHRQRMVQARTRIMNQLQAVALNEGLRAKKRLWREAGREQLKSFPLAPWASRRRGDLLELLDQLNPTIAELTQAIEQQVEKYPEARRLMTHPGVGALTALAFMLIVGEAGRFRCGKQIASYLGLVPLEESSGNRRRLGHITKQGNSLLRFLLVEAAQVTARSLPEWRNRYFHLMMRRGRKIAKVALARRLAVRLYWMLRKEWDYEQVKQFGSHAGQPENRHGVQ

SEQ ID NO: 360463 - protein, 346 aa, unidentified
MDYYAGIDVSLECSSMCVVDANGKIVREAKVASEPEALIDWFRSLGFGLARIGLEAGPLSQWLYAAMKQAGLAVELLETRHASDAFKAMPVKSDRNDARNIAQLMRLGWFRPVHCKSMSAQEIRAMLTARKLIQAKLQDVENSLRGILRGFGLKVGKTTKRSFATRIGELVAGHPALEAIAAATLAVHMILLREFNGFEKRVRAMSLLDAKARLLMSTPAVGPIISLTYASAIDDPTRFTSSKRAGPLFGLTPKKHQSGETDYSGRISKNGDASVREALYEAAHIILTKPIKGCAQLKSWAMRIARRAGMSKAKVALARKLAVIMLRMLKDNVPFNPAAKATAAAA

SEQ ID NO: 360464 - protein, 410 aa, unidentified
MVLLFLGDDWSEEHHDVELQDQTGRVLARAKLPEGMAGMTRLHAMIGEHVSDDGDDVGVLVGIETERGPWVQALIAAGYQVYAINPLQVARYREGDGVSGAKSDPADAHVLADMVRTKHARLRPVAGDSELAEAVKVLTRAHKTLIWEQSRHTLRLRQALLDFFPAAVAAYADLAAPDSLQLLTIAPDPASAARLSVQQIIEALALARRHHRAARAQEIAAVLRDGQLTQPPMVAAAYAASVRAQAAILSVLHTQIAAMEQQVKAHFGEHPDVQVYLSQPGLGQLLGARVLAEFGDDPQRYRDAKARKNYAGTSPITRQSGKRKVVLARWVHNDRLVDAVGLQAFCALKASPGARAYYDRQRARGAGHRAALRQLGNRLVGILHGCLKTGTCYDENTAWAQHQENLAATT

SEQ ID NO: 360465 - protein, 315 aa, unidentified
MSEFEAVVVGIDVAKAALDVAVRPDRAERHLPNDAQGIAEIVAWLQGIHPQVIVLAATGGYEAPVVAELCLAGLPVAVVNPRQVRDFAKASGPLAKTDRLDAQVLAHFAAALRPTPRPLPDAQAQELAALVERRRQLVAMRTAEQARLGVTRVPRVRAHIQAHLAWLDAEVAGLDADLRRLVQASPLWRAQDNLLRSVPGIGPIISRSLLADLPELGRLSHAQIAALVGGAPLNRDSGTLRGRRTVWGGRAAVRAALYMGTLRATRCNPVILAFYRRLVQSGKPKKVALVACMHKLLTILNAMVKHQALWQAQAA

SEQ ID NO: 360466 - protein, 411 aa, unidentified
MYIVGIDIAKRTHVGAIIDDTGKRYGKAFKIDNSVEGFNILLDKIAEISQDISQFVFGMEATGHYWLNIYTWLCDRGFTVHIINPITSDAARRLEIRRTKTDPIDAFLIAEVIRMGKYTKTQLADDDMMSMRDLCRQRFYIVDMASDVKKKVICLLDRMFPEYQSLFSDIFGRTSRELLKEGASPEEILALDTTKLAEILRKASKGRFDKEKAEELQNQARNSFAVLLSSQTVSLLIKQMIEQLELLESQVDEIDKLIADLYSSFNVKLTKIPGIGTTLAAAIYSEIGDISRFEKPKQLVAYAGLDPELKQSGDKRGEGYHISKRGSPYLRRALWLASSCVIIHDKSFAYAYQHKLSQGKTKMQALAFISHKLLNVFFTILKNNIDYVPVFPPDVDVSKLAQKALDSQSSN

SEQ ID NO: 360467 - protein, 408 aa, unidentified
MMAERWLVGIDWATEKHQVCVLDADGELVAEKQVPHSGSGIADLCSWLEEIAKGQLENVHVAIEVPHGAVVEMLIDRGTMVYAINPKQLDRFRDRFTVAGAKDDRRDAWVLADSLRTDQRCFKHLEIDSPVLIELREWSRMTEDLQQERIRLGNRVRQQLRRYYPQMLELNDDVAADWFLSLWEKAPTPATAARVQKATVAAVLKRHRIRRHDAASALKILRQEPLKVSPGTVAAATAHIGSVADRVRLVNQQLKQAHRRLDELCDQLLEEEDDSGLTSEQRDISILRSLPGIGRIVLATLLAEASQPFTARDYHALRMLTGVAPITKRSGKSCRVEMRHACNPRLRNAMYHWARVAVQRDPISRARGHSYARALRSVSDRLLCVACSMLRNRTLFAPQHSLNSRSVA

SEQ ID NO: 360468 - protein, 391 aa, unidentified
MTDGMDSPVFFGINVPAGFHLTWETALNPKESEMNATARIQKIQSCTGVVVGVDIAESVFQVCEADTNWRRRGSHRLSRTQFERWFDNRDVALVIMEACGTAHHWARWLQRRGIDVELLPPHYVRAYVKRNKTDAADAAALLEAARCADIQAVRIKTVEQQALQALHRTRSMWMGWRTATINAMRGACREAGLQVSKGAKAGLSQMGKLIADEQSAIPALLRGTMKSMLEEVRQLEDRIEGIEKELTAVVRHSEPCKLLQSVPGVGLLTTTAMAAATGGDVTHFKDSRGFACWFGITPKEHSSGLRRKLGRISKQGDTYLRMLLVHGARSVLRAAAAAQAQGKPLDALKRWALQVQARTCHNKAACALANKLARICYACLRDKKPYQAKLA

SEQ ID NO: 360469 - protein, 315 aa, unidentified
MVTGIDCSKDYFDISVLKESKEIFTGRFDNNQEGFESMLPHIKDTRVAMEATGPYYFQLARFIYEQGGKVSVLNPLSVRRFSQMRMSRAKTDRKDARLIAQYTEMTDPQPWRLPEGQVLRIRNLETYITGLKKRKHLLHGQLHALEASGTLDKDLQKEIESELDGYDVRIARKEKEIAALIDENYKELAQNLQSIPGIGPRSAALLIILTDGFDMFEGYRQLISYFGLAPRIYESGSSVKGKSRICKMGMGTMRKVLYMAATSAIRCNRACKELYERLRAKGKPHKVALIAAVNKLIKQAFAIAKSGKPHQVQLP

SEQ ID NO: 360470 - protein, 342 aa, unidentified
MLHAATVHTVTAIGIDMGKNTLHMIGLDPRGAIVLREKVSRERITSRLANLPPCLIGIEAGMATHYVARELAVLGHDVKQVPPAYAKPFRQGHKNDFRDAHAVAEAVQRPTTRFVPAKTDEQLDLQALHRVRSRLVSERTAVINQIRGFLLERGIIVRQGLRFLRQALPDILAKRTDVLSPRMVRIVADLASDWRQLDERIEVVTDEIETLAKSDSSCRRVMTVPGIGPIISSAMIAAIGSGAAFARGRDFSAWIGLVPKQMSTGDRTILGRISKRGNGYLRMLFMQAARVILLRPASWPKHGFGVWLARAAQRLHPNVLAAALANKLARIAWTVLAQRAQL

SEQ ID NO: 360471 - protein, 465 aa, unidentified
MGKTLGIDLACRAAHQASLAGSDGSVEWSGRKFFTRPADLERLWADLDLTDPAELTVVMEPTRNAWVPVAAWFRRRGAKVTMVPTSQSADLRAYYSKHTKNDRLDSKILARLPLLHPEGLREHTGHGPSVPLHRVVRQRASVVKRRTAIYQRLDAQLELLGPAWYEALSSDYGKTALAVLARYADPNSLIRLGKNRLTRFLIRHSRGAWRENQADLLLKAARESLALWGTDSIDFAELAADIAVEAEQAQVLTEQIEDLDERIANLYEETDPDGIIASAPGVGPVVSGVIAGRIGDPHRFHSLAAVRAYSGLVPKVNQSGLAEHHNGITKAGDTVLREAIWSAADQARRTDPQLAAKYKRLMDTERHHDSAICHVATTLLTRIIACWRSGEHYVLRDTDGRVSTEKEGRQIVRNKHKVDARTRQHLADQRRSQRLKGRTGREHKESPSAPASRPATNSLKATPVA

SEQ ID NO: 360472 - protein, 381 aa, unidentified
MKIYVGIDIAKLNHFAAAISSDGEIILEPFKFTNDADGFQLLVSKLESFDKNSIIIGLESTAHYGDNLVRYLVAEFYQVCVLNPIKTCQMRKNNVRKTKTDKVDTFVIAKTLMMQDDLRFITFFDLDMMDLKALGRFRQKTIKQRTRLKIQLTTYVDQVFPEIQYFFKSGLHQNAVYALLKEAPSPKEIASMHMTHLANLLKVNSHGHFTKEQAKELRILAQKSVGANDSAISIQITQTIQQIELLDSQLEKIEAEMTDIMKFNDSVIMTIPGIGYINGGMILGEIGDIHRFSNPNKLLAFAGLDPSVYQSGNFQAKTTRMSKRGSRVLRYALVNAAWNVVRNNATFKAYYDAKRAEGRSHYNAPWSLCRQACQSHLEDAH

SEQ ID NO: 360473 - protein, 368 aa, unidentified
MMGWMAPLRHLGAKVLVGENQSADKEPSMNEITTVGLDLAKNVFQVHGVDAEGTTVLRKQLRRAQVLAFFSRLPRCLVGMEACATAHYWARELRALGHEVRLMPAQYVKAYVKRNKNDAADAEAICEAVVRPTMRFVPAKTAEQQAAVLLHRGRERLVRQRTMLVNALRGHLAEFGVIAPQGLRNVGRLIAIIRDEEDARLPGLARQVLQVLAVQIEQLEAAIAALEKQLMGWHKSNPVSQRLATIPGIGPIIATAIAAMVAEPSGFRSGREFAAWLGLVPRQNSTGGKNRLGGISKRGNQYLRRLLINGASANLLRSKATNADPWVIGLRRRRPSLVVAVALANKTARIAWAVMHRQENYQRMATAA

SEQ ID NO: 360474 - protein, 382 aa, unidentified
MQASTIDTPTAGHCGTIFVAIELSQKTWLVTLHSPERDRISRHKLEGGDHAGLLALLESIRARAAAKLGSAPQVVSCYEAGYDGFWLHRLLTAAGITSLVFDPASIAVEQRSRRAKTDRIDGELLLRTLMAYLRGEPRVVRIVRVPSIEQEDTRRTSRERDRLITEQTGHSNRIKALLRLVGMAVGNPRRGDWPSWLKRQRDRQGAAMPPGLLAEVIREHARLMLVREQLAALEQAPRAAETSATALMAERRDLLLRLKGLGPVFAATLTNELFYKDFRNRREVAGYCGLTPSPWRSGSIDREQGISKAGNPRARLKAVELAWLWLRHQPDSALSHWFRARTANAGKRTRRIAIIALARKLIVALWRYLVTGLVPDHAAMKA

SEQ ID NO: 360475 - protein, 320 aa, unidentified
MQMQPIPLNIGADVAKEEIVLACAEQSFAPRAIANCRVALLAALKRLPAGSRIGMEATGSYHELLATLAHKLGLLVYVLNPKDTHHYAKAVGQRGKTDRVDAQLIARYIAHEHAKLYLWIAPSPEQRQLGRLLRRRAKLSNIQAALAQSLKGLAGFASDLKVLRTRIELTIARIDAKIRTLIEASAPRQEAYVRLQSIPSVGPVVGSGLLIHLERLPFRNADAFTAFTGLDPRPEDSGEHRGRRRLSKRGPSELRRLLYIAAMSARRTPAWKPIYEHHRAKGLSTTAALVVLARRIARTAWSVYTYKTKFDPQRITTGLT

SEQ ID NO: 360476 - protein, 466 aa, unidentified
MMPGRKERENSDKSRRQLEGLPVIRRSVAGIDLGSERHWVCAPTLDRSGREVASFGATTAELIRMAEWLKARQVESVAMESTGVYWIAPHEVLEGQGLEMLLVDTRQLARVPGRDKKSDPTDCEWIQRLHSCGLLRGSFRPEEAVCMLRTLVRDKANLVAERSDWLRRMQKNLDQMNVRVHRAVSDINGATGMAILRAIAKGERDAQKLAELRDPRCSKTQQEIAEQLRGHWREDHLFSLQQALKMYDAVEERIAAYEQEILRKLGEMEREEQRGQTAPPLNNTNKARAIKQRGHEPRRHALYRMSGVDITQIDALAVETVEVVLSEYGPDLSRFPTEKQFVAHLTLAPHVATSGGKPVRKKKRNSASTRVAAALRMAALSLRHSQTALGAYYRRIAQRRGGDIAVFAAARKLATLVYRLLRWGQPYVDEGAAAYENRYRQHRIGRLAATAKELGYQLTPVTAPVT

SEQ ID NO: 360477 - protein, 343 aa, unidentified
MGEVSTIGLDIAKSVFQIHGVDVDGAVVIRKRVSRAKLVEFFAALRPCLVGIEACPSAHYWSRRLQVLGHTVRLMPPSYVKAYLKRSKNDANDAAAICEAVTRPSMQFVSTKSEQQQSVLMLHRSRQLLVCQRTMLSNAIRGHMAELGIISAKGRNGTAELLEVIANEEDDRIPAAARLSLAVLARQYAVITTEIGAIEKHIHAWHRSCEESRRLEEIPGVGPIVATALVAEVADWTAFASGRSLAAWIGLVPKQHSTGGKDRLGGISKQGNRHLRWLLVAGAMAVIRYARRHGTKRPWLVRLMGRRPTKVAAVALANKIARMAWAMMVRGERFKEPKLLPAA

SEQ ID NO: 360478 - protein, 383 aa, unidentified
MTKKHTQTTLDVSIEYAVIGLDLAKYDVSLAAVTLNEGEIIRIDRVTYAELYELADKLSPTLFAIEPCCGYSQLALELEARGHEMRVISGKAVKMWIDTHMSGQKTDINDALALARLTADPDLRPIRAKSLEECRIMTVQGVRQQLVGQRTKTIVFKGFAQAWGIGIPTGRRNLKKMRETVEAKAEMMGAAVVSALTALLDRIKTLDDQIHQLDKDLDALVSANANGRLLKSVMGVGTQIAGRFITVVGDVKRFDKPRSLVAYIGCVPKNIITGHVNKPRQKKSTAPDLSHKGQGRISRRGDKMLRSLLMQGAAVIYMLYCKKQLPDCQLTKWIDKQLAVKLIRIAWAVLTYGEKFNIRRAGVSRSVLAAMAGQPCNEAAAAA

SEQ ID NO: 360479 - protein, 391 aa, unidentified
MFYIGVDIAKYNHEASIIDSNGKLVSEAFSFSNSIRGLEKFQKFISSFSIDSNNCIIDMEATGHYWLSLYSFLIDLGFYCVVINPIQSDAFRKMYIRQTKNDSVDSFVIAQILRFGEFSLSHFSDEDTFALRNLSRFRFALVDEASDWKRKLVAILDQVFPEYSSLFSNIYGVASKELLSKYPLPEDMISIPADELAMLLSKCSKGRFGIDKAKEIQEKASNSFGVKFALKSFSFQIKQIIAQISFLEDQIIELEDEISSMINSLCPVITSITGIGDVLGAAIFSEIGDISRFERANQLVAYAGLDVAVKQSGNFNATDTKISKRGSPYLRHAIWLAASVAAFKDPALSVYYQKLRQRGKAHGTAIGAVARKLTNIIFAVLRDNKAYMPNI

SEQ ID NO: 360480 - protein, 403 aa, unidentified
MNSVGIDISKGRSTVAVMRPFGEVVISPFEVRHTDSELSELARQLKSLNGETRVVMEATGNYHAPVAKLLHDAGLYVSVVNAKLVHGYGNNELRRVKTDRKDAVKLANYGLDRWLTLPRYVPEEDTRLLLKNCYRQYRQYSKVQTVLKNNLISLLDTVFPNVNRLFSSPIREDGSEKWVDFVAEFWHCRCVSEKSEMAFANKYLRWCRKHGYNFSEAKVHTIYAEASGHIDVIPKSETAKLLVEQAVAQLRATSAALAALKHEMQALASMLPEYPVVMDIFGVGPTLGPQLMAEIGDVRRFYSKKALVAYAGLDAPPNDSGDVTGRHKSMSKVGASSLRRTLFLVMSVYLQNAPLDEPVYQFMDKKRAEGKPYRVYMMASANKFLRIYYATVKAYLESLEHTA

SEQ ID NO: 360481 - protein, 363 aa, unidentified
MHESTTVAVGLDVHARSIRLAAVRADELLEEQTLPYDEEAVERALRRWPGVRCCYEAGPTGFGLHRHLVARGIDCAVVAPGLVPQRPGDRVKTDPRDARKLARLLAGGLLEPIHVPSRELEAARDLVRAREDARLDRMRDRHRLSKFCLRHGRGLPGLSWGVVRRTWLGEQRFEFAAQQQTFDTYVHALDLVDRRIEALERAIRETAEQGPWRALVARLRCLRGIDTLSALALAAEIDDFDRFQRAEELMAFVGLVPSEHSSGERRRQGSITKVGNSHVRRLLVESAWHARRRPKVGYELARRQRGQDALVVERAWRCQQRLYSRWQRMAARGKPPQKIVVACARELAGFVWAIATEQPLRSA

SEQ ID NO: 360482 - protein, 382 aa, unidentified
MDVLHACCAGLDVHKRTVVACVRRVDPAGKVSRNIKTFATMTGDLLNLSDWLAAQGIAVVAMESTGSYWKPVFNILESRFPVVLVNAHHIKQVPGRKTDVKDSEWIAQLLQHGLLRASFIPPRPTRELRDLTRQRTRLVQEKTSVGNRIQKVLEDANIKLGSVASEVLGVSGRDMIGAIIRGELDPVKLADLARRRLRSKIPQLQLALRGSVTEHHRFLLQTQMDHLDHLERLIRRYDERIEEALGPFSAQVGRLITIPGIDLRVAEIVLAEIGLEMDRFPTAGHLSSWAGLACGNNESAGKRRSGRTSPGNRWLKTALVQSAWAAYRAKGTHLSRKFRRIAGGRGKKRAALAVAHTLLVIIYHLLKEGTNYREIVEGVEAA

SEQ ID NO: 360483 - protein, 431 aa, unidentified
MLKINPLSTLYVGIDVSSKSNYVCALDFYKNKYINSSFANNQPGAEELALKILECLKEHPDITTIVAALESTSVYSIHIANYLSSCEELMRFKPYVFVLNPKCTANYKKSYIGLGKSDPIDAFVIADYARAGNIESEPWRGSQFLALKRLTRHRLHLVECMTREKTYLVSNLYLKFSELQMLEGDDKPFCDIYGATSSSVLMEYLSPEEILVSSEEDLIAFLAEKSRNRIKDISKTADLLKKAARDSYRLDKALYEPLNVSIASSFNCIETFKREIKVIDNAIEKEIKGLNPNAFIILQSIDGIGPVFAGGIIAEIGDITAFHSSDALAKYAGLTWKSNQSGDFDGEDTPMIKAGNRYLRYYLGEAANSMRKHNVEYGAYYRKKYNEVPKHQHKRALALTSRKFVRLVYGLLARNQLYSGVSLDTSIKESN

SEQ ID NO: 360484 - protein, 408 aa, unidentified
MDLFVGIDVSSEKLDVCFLDSKKHILNESSLGNSIVGASLIKDSILLYQQQYNYDQVTVGLESTSVYSFHPSMFLHEDEELKALDIIVSVINPKKVHRFKQMFDEDKTDRIDAFRIADFLRIDVHQTSLIKQEKYVALQRLTRSRYQVTKQLVECKQHFLENLYYKCNTLTKEVSTSVFGSTMLELFTNDITLDELSKIPLEDFVSHLQKAGKGRFTNTEKLVKSIQKAIRESYRLTPMVSESVDQILSMYAQLIRTLTKQIKTLDKGIEQVVKTMPEAQLLLSIPGIGPVYTAGILAEVGQIHRFTNEAKLAKYAGLYWNKNQSGNFTASNTSLAKTGNHILRYYLIEATNSVRRYVPTFSNYYSKKTKEVPKHKHKRALVLTARKFMRLVDTLLRNHQIYTPERSV

SEQ ID NO: 360485 - protein, 309 aa, unidentified
MSAYAGIDVSKATLQVALFPKADELCVPNTEEGLASIAEYLSAHQVERVLVEATGGYEKLSVKLLANAGFKVQRINPVRSRQFALAMGKRAKTDPIDAQMLAMFASSLEAKGFAKPDEEREVLLELVNLRNNLLQQRDDNRRRIKQAILPSVVDIYLALEASLKVQIKAVDQLVDAQARKVDSELLQRLHAVKGVGPVTIASLFCYLPELGDLSRGQIAALAGVAPYNNDSGSKAGKRQIYGGRTKLRRATYMCALVMVRYNADFKERYARLRAKGKCAKVALVACMRVLLIRLNAMVRDGTPWRDHAV

SEQ ID NO: 360486 - protein, 394 aa, unidentified
MFLVGIDIGKLSHMFCILDASNNEVIVKPVSFKNDKLGFDFLMNQLKSYPKDHLLIGMEDTGHYHFTLLKFLLDSGFSVALINPVTTDLTRKIQLSSTKDDDLDTLTICDVLASNQRRKGYRISKIDSFDLYEQKRLTREHHDLKEQLNVYTNKLQKCIDIVFPEFNSLFRSKYGSVYMNVLKTFGSADSIAHADIRNIRKCFETNRKGRRISLTPEALKEAARNSIGFPSKAEVIELRHLIDIIELINVQISEVDKKIEEFSVQNNSPILTIPGISHFSGTSILAELGDLRNYSKASQVIKFAGVSPSKYKSSQYEAQHTAITKKGSRYLRKTLYQVILPVIRYNPVFNAFYRHKLSQGKGHRCAQGHCVRKLLRIIYHLVTTDQSFDSKLLR

SEQ ID NO: 360487 - protein, 433 aa, unidentified
MNASTPTPTTNFAAFIGIDWADKEHEIWLRPADGSPARRSTLSQNPAAIQEWVSQLRQQFGGQLLALSIELSHGPLLAALLGVEFLVIYPINPKSLARYRQAFRPSGAKDDRSDAELLCEFLRHHYAQLKPWQPEDAQTRLLGGLTQVRRHWVDEVTGAVERVRANLKHYYPVILELFTEGLAQPMVVHFLQRWPNLKSLQAASQSELRKFFYGHNSRSAQLLDARLQLILKAKALTEDPAVLGIYQTDTLVIAELLGVLLKKIKEIQKQIAKLFAAHSDAFIFQSLPGAAQVLGPRLLTACGTQRERFAQAVALAQLSGIAPITVQSGQSEYQMFRFTAPQFMHQTFWEFAKCSIKYCLWAKAFVDQKIHNGMGFNAAVRALAFKWIRIIWRLWQNREAYDETKYLAGLRRAKPAFVQPVVTSVSSLDSALL

SEQ ID NO: 360488 - protein, 322 aa, unidentified
MSVSVLGIDIAKQKFDAALLVEGKTKHKTCKNSAEGFETLRLWLEKQGIQEVHACMEATGNYGEALAIYLHEAGHVVSVVNPARIKGFAQSELLRTKTDKLDAALIARFCLAMKPGAWIPPSPEIRSLRALVRRVDSLIDMRSQEKNRISTAHESVSLLIKEHIAYLDQEIEKIRKQIADLIGQDPNLKRKKELLDSIPAIGKVTIPHILAELDDLEKFNHVSELVAFIGLAPKETLSGSSVKGKPRLCKIGHARLRKALYMPALVSIQCNPVMIAFYNRLKDKGKNGKVIVCAIMRKLVHVIFGVLKSGKKYDPNFKPVAA

SEQ ID NO: 360489 - protein, 337 aa, unidentified
MKYSGIDLHSNNCVICVADQEDKVVAEKRVPNDLNRILQFLQPWQQELAAVAVESTYNWYWLVDGLQQAGYNVKLANTVAMKKYDGLKHSNDETDAQYLAHMLRLNILPTGTILAPEQRAIRDLARKRLQLVRSRTSHILSIENIAARQQAIRINSNQVKRLQTEDVDKLPLPADVALAVKSNLTVVHTLNEQIALLEKRLQEEMDQRPEYDLLLSIPGIGRILAVIILLETGPIERFAAVGNFASYARCVDSKHTSNGKKKGEGNTKNGNQYLSWAFVEAANFVLRFNAAAKRFYERKKAKTNTSVAIKALAHKLARACYYILKEKKPFDETRCFA

SEQ ID NO: 360490 - protein, 349 aa, unidentified
MKITTSGIDVAKSVFQVHGVDERGNVVLRRQIRRAQLLLFFSRLEACLIGMEACASSHYWARRLTALGHTVRLMSPQFVKPYRKNDKNDGNDAEAICEAVQRPSMRFVPVKSPEQQAELAVHRIRRRLMGQRTALINQLRGLLAEHGLVLAQGANQVRSKLPALLEDGSESLPPLAVELFRDLYEELVQLEQRIAACDRRVERLYRANPLCHRLGEIEGIGALTATAFVATVAHAAQFKNGRQCAAWLGLVPKQDSTGGKTRLLGISKRGDVYLRTLLVHGARSAMRHTPKGADPKSRWVEQLRKRRGENIAAVALAAKHARILWALMVKGESFPPPAIHSDPLEQPAV

SEQ ID NO: 360491 - protein, 412 aa, unidentified
MVTCGIDWAQDHHDIAIVDADGRLVAKRRIPESVAGFSELTAMLADAGDDPEDPIPVAIETARGLLVAVLRASGRPIYPINPKSVARYRERTSMSGKKSDHADAVTLANILRTDIDQHRRLPADTELAQSISVLARAHQDATWRRNRAGNELRSLLREYFPGFLHTFTHRPGGITAPEARAVLAIAPTPAKAARLSKPQIAAALRRAGRQRGLTTLAATIQQQLRLPQLRQPVPVEDAFGVQAVALLATLDAECASVDRLGEATAAAFTQHPDHRIITSFVGLADLTGARLLAEIGDDRTRFADARGLKAFAGSAPVTKASGRSIRITHRHVKNNRLAAVGFVWAFIAAGCEGPTRAHYLARRDRGDRHPAALRHLYNRMLGQLYHCLQTDQTYDPIKAYGPPPTHPTRAAA

SEQ ID NO: 360492 - protein, 350 aa, unidentified
MQYVGIDWAYRRAAWCAKQADGTIFGEGFVPADEDGLARLVIELGPEVRACLEMMSGAVWVRDQLAGAGWQVEVADARKVKNVAPLACKTDKVDARVLAELCRRELVPALWIPSLEERALRERLKRRLHLVRLRTSAKNRVFGLLTQWGLRIPADRLRRPDAMELLETRGVPEVWRRSVAEALAVIELLDERIAPLDRELGPLARADRRVCLLSTIPGIGPLLGLTIAAEIGDVARFPSPRKLIGYSGLAPRVKQSGERSRTGELSKAGSRTLRFAAVEAAQGAWRETNPWHRLYSDVKARTGKANPAKSAVARKVLIACWHVLSLDEPFKPPHPQTDPVPASSLCFLAA

SEQ ID NO: 360493 - protein, 415 aa, unidentified
MSLKIVYKICCGIDVHKTFVVACIASTNDIGVTSYESHRFSTYTSGLKTLLQWLLNRNCKDVCMESTGKYWIPVYNILENDCSIVLAHPKYVKAIRGKKTDKKDAKWIADLFKHDLVAGSFMPPADIRQLRDLMRYRFKLTCFQSSEKNRLQNCLTVSNIQLGNVVSDTFGKSAQAILDKLLENPADTSFDLEPLVYKSLKKKLPELRDAIDGYITPEQAGKLKVIKAHYESLESRKAELEELILALAAPYQQELAILQTAPGIRSDFTAIGIISEIGTNMEAFPSAKHLCSWAGLTPTNNESAGKKKSVRVSKAGCYIKPLLVQCANAVVTSKKHPEIRNRYLRLKKRRGHKKAIIAIARMLLTALYHMLKNGETYNAELYRKSDLPPVDREITVEQAIIIARNQGYKIKSATA

SEQ ID NO: 360494 - protein, 344 aa, unidentified
MAAKETFCYWVGLDVGKQEFSAAIDLSMDDLKLDVLRLPCKTFKNTEKGVSQFLKWVDRMIPEYPFKVVMETTGHYSVSLCKLLHAKRKGLECCIADSYRISNYLKSLNLPHKTDSFDAQGIARFGRERQPEPTMLPTREEEELKEMSRQRAQLVKAKTAFKNRAESLASESVRRLNADFLKTLEENIDSIDRMMAKLARKIPWAQKQIKLAQSIPGVGMVTAVGLTAELGDLTKYTRKGVSASSGLSPRLFESGTSVKHSKISKRSPGRIRQLMFMCSTHAVDKIPYLRVMYDRLVSRGKTKMQARCACMRVLMQIIRSVVVNERPYTERLSYQSLEKNRKTA

SEQ ID NO: 360495 - protein, 368 aa, unidentified
MKKSITFVGLDVHKNSIAVAIADAGRNAEVRNYGIIGGTLEDLDRLVKKLSSSDKELHFVYEAGPCGYEIFRSLTLRGLECAVCSPAHIPKSPADRIKTDRRDAMMLARLHRAGELTYVFVPRADDEAMRDLTRCREDAKRAQRVAQQQLGGMLLRLGFRYSRDNWTKAHFGWLADQKMPTPSQQVVFQECIHAIKETTDRVDRLTNQIETLVPTWRMAPVVTALQALRGVSIIVATTTIAELGDLTRFESPKKLMAFLGLVPSEHSSGEKKQRGKITKTGNGHARRVLVEGAHAYSYPARMTRLILKRQEGLSQEVRDIAWKCQVRLCARFQRLVAKGKSRNAVVTAIARELAAFMWAIANKTPIAV

SEQ ID NO: 360496 - protein, 376 aa, unidentified
MKQFNDIYVGLDVHKDTIAVALARGLRSKPNYFGEIPNTPAAITKLLHQLSPDGEVLNFCYEAGPCGYEVYHQLTRLGQSCCVVAPSLIPRMPGVRIKTDRRDAMSLAKLHADGSLTAVWVPDKEQEGIRDLSRAREDFKQTQTKARQRLGAFLLRNGKVFTGKSKWTVAHWRWMETLTFETPMQHIVMQEYVEALKEASRRVLGIEKQILLAVRGWSLEPVLNSLLAMRGVNTITAVTLLAELGDITRFDNPRQLMSYLGLVPSEYSSGSKRQQGAITRTGNGHVRRVLVEAAWNYRFPARKSRTIEMRAEKTSDRVQAIAWEGQKRLCGRYQRLLSLGKLKQKVCTAVAREMVGFVWAIACEASGRVHGSRATA

SEQ ID NO: 360497 - protein, 336 aa, unidentified
MSEFKTFIGIDVSKKTFDAALLRSSPELTTVHQCFDQNIQGYRAFTQWLKTNDVILGDNDVLICLEHTGIYINGIVNFLLSFTGSIWVEMALKIKKRIGLQRGTDDKIASVNIALYAYRYQDEVRLWQPMDSTLQQLKNLVAQRDRIVQCINQLGVPVNELEETGNKQQAAELRKLQSKAVKGLRDSLTAIEKTIDVSIEQDEIIRHKINQASSVKGVGKQTAIALFVYTRGFSVFESGKQLACYCGVVPFNKQSGTSVRYKPGVSPFANKKLKKLLHLCALAALRFDPGLKAYYERKIAEGKNKMSIINAIRNKLVLRIFAVIRDNRNYVDNYAY

SEQ ID NO: 360498 - protein, 387 aa, unidentified
MSWQAYVFFLALLCIFCLQKTVHAKTIVVCALWGEEDHIQKEIETFSTFTKDLFRLLKWLEDREITHLAMESTGVYWKPVFNILEDYFDITLANAQRIKNVPGRKTDVSDAEWIAKLLRYGLIEKSFVPPAPIRELRDLTRLRKKWVGQLIAEKNRIHKVLECSNIKLGTVISDIFGVSGRKLLTRLMEQGYIEEADIDACLHGRMKGKKQQIQESLFGTLTEHELFMIRQSWKHIEYLESLIQEMDQRIDHLLQPYQQEVDLLMTIPGVKKETAAVIIAEIGVDMGQFPTPQRLASWAGVAPGNHESAGKRKSTRTVKGNPHIKSALCEAAWALSRCRNQPLAAKFWSLAARRGKKKALVAIAHRMLVTIYCMLSRKEPFWGPQVS

SEQ ID NO: 360499 - protein, 407 aa, unidentified
MVAVMIGVDPHKGSHTAVAIGAAEEALGELRVRASAAQADQLVAWAAGWPERTWAVEGARGLGSLLAQQLVAVGERVLDVQPKLAARVRLLAAGDTNKNDPGDARSVAIAALRSSARREVKLDDHAAILKVWSKRHRDLGRTRTQVACRLHAVLCELVPGGLSKDITAAHATRVLESVKPSGAIVLARCELAAEFPGDLRRIDAQMHDTRKRLTSAIRATGTTTTGIFGVGPVIAATVIGCAADVSRFASRDHFAAYNGTAPTEVSSGNRKIYRLSRRGNRRLNHAIHMAAITQIRYRHSDGRAYYDRKLAEGKTHKEALRSLKRRVSDAIFARLQADARRAAASARTEGPGGQPGSDSVASAAGSHPEHRLFGPATPGPQSTLRPRPDPQTGKAHARAKRKTTRTP

SEQ ID NO: 360500 - protein, 392 aa, unidentified
MVVSVGIDVSKDKHDCFILNSEGEILSDVFTIPNSLDGFTILLQRIRDCSSSQDNIKVGLEATGHYSYNILGFLLDNGLPTYVLNPLRTNLYRKSLSLRKTKTDRVDARTIAAMLLSDAGLKPYTDTVYHNEELKSLTRYRFDKVKERAKLKSSVSRLVCILFPELEKLTPTLHMPSVYALLDEFPGAKQIAEANLTHLKAILHNASKGRYNRDKAIDIRESARASIGAVMSAKSLELRHTIRLIRELDAEIEDIEAAIQSIMNEMHSPNTTIPGIGTRMGAMILAEVGDFSRFDSPDKLLAYAGMSPSTYQSGQLKNCYPHMEKRGSRYLRYALYNATKYVCLWAPTFAAYLAKKRAEGKHYNIALSHAAKKLVRLIFAMEKSRQPYCSAT

SEQ ID NO: 360501 - protein, 525 aa, unidentified
MSEVSLMHQTKYRGIITEAGSLTTPPWEPAFRLVKPLRKSVSPFGGDLCFGWLGSPRLYLYKPLGCVSAFWKWIPARKDKTMHYQKVLLMLQSIPYLSVGLDVGADFTWMSIMLPNGTLTGKPFKILHSDPHSRDLGVAKIKEAQETYSLESRCFLESTGIYHIPLLCFLRDKGFDCSVINPIITKNSTNMNVRKLHNDKFDSKKAAKVGLDASLKTSIIPDDAVIDLRNLVRDYYYFKDLQSAVVLKLTAELKVSFPAYRNVFCKATTQTSLKLLDAYPLAQDLLAAPKGTVVEMIRSTARFGEKYALAKYDALYAAAEDAAIFGRALPSNALRIRLYIKLYREYQEHLDGILEELHKAVDRLKGTPVHNRISLLQTLPGIGFLSAVVLLAEMGSFDLFSSPKKLYAYFGMDPGVNDSGKFHGDRVHMSKRGSSLARRILHMAAINNLKVDKAAKMPVNPVIYDYYVRKCAGKKKIVAVGAVMHKICNTIFAMLRDNKPFELITPEEHCQRYAAEHQGSVSTAA

SEQ ID NO: 360502 - protein, 338 aa, unidentified
MNVTTIGFDIAKGVFQVHGVDGAGEVTLRRRLSRAQVLTLFEHLPPCLVGMEACGSAHHWARAISALGHDVRLISPAYVKPYVKRSKTDAADAAAICEAVSRPHMRFVPIKSRDDQALALSYKARSLMVAQRTAAVNAMRAHLSEFGIISRQGPIGSAELVSLIRNGDERLPDLARENLAEVADVIEVVEAKIAQLDAKLADIAKKDERCRRLIKVPGIGPVAAGTLIALSGDMKRFRSGRDYAAWLGLTPRQNSSGERVRIGRMSKAGNRDLRVLLVLGQMSVMRRARSNPPRISTWVLDLMKRRPPLVVAVAMAAKTARIIWAMLTRGEEYRLQAA

SEQ ID NO: 360503 - protein, 316 aa, unidentified
MTKAERFVGIDVAQATLEIAVRPTGESWQVANDEVAFGALVDRLCELAPTLIVLEATGGIQLPVVGALAAAGLPVVAMNPRQVRDFAKATGKLAKTDRIDAQVLAHFADAVRPEVRPLPDAATRELAILVARRRQLLEMRVAEQNRSRGVPPRIRAQIREHITWLNRCLAELDRELGQLVRSSPVWRERVDLLRSTPGVGPVLSATMLADLPELGTLSHKQIAALVGLAPLNQDSGKKRGKRVVWGGRASVRGALYMATLVATRRNPVIRAFYQRLLATHKPKKLALTACMHKLLTILNAMVRRQTRWAPPAALAG

SEQ ID NO: 360504 - protein, 370 aa, unidentified
MGKSVLYVGLDVHKMSMDVAIAEAGPGAEVRFYGQIGGDLDSLDRVIRKLRATGAQLQFAYEAGPCGYVVYRHLTAQGWPCLVAAPSLIPRRPGDRIKCDRRDALSLARLFRAGELTSVKVPDADDEAMRDLTRAREDAVSVERRAKQRTGALLLRHGRRYPGKTTWGRGHWRWLLQQVMDHPAQQIVLQEYLDAVREASARVARLTGQIQELLPQWRRAPFVAAYQALRGVSLIVAATMAAELGDLSRFNNPKELMAYLGLVPSEHSSGASVRRGRITKTGNGHARRVLVEAAWAYRLRARVSRPLLQRQEGLPEKIRQISWKAQLRLCARYRRFLARGKHKNTIVTAIARELAAYIWAIGQAVEPVTT

SEQ ID NO: 360505 - protein, 351 aa, unidentified
MTSHHDQPTQTFASIGIDIGKDVFHIVGFDTSGKVVLRKKFKRLALETELTKLPRSIVGLEACLSAHFVSRTLRRLGHSPRIIPAIYVKPFSKGQKNDYNDAEAIAEAALRPNLNVVREKTQDQLDLQALHRVRARLVSRRTATINQIRAFLIEHGIAVRTGAHALRNSLFAILEKRADELSPRMISIIQGLCDDWRHLDERIDAITSEIEEVSHKEKNCRRLMSVPGIGPMISTAMVAAIGAGDAFERGRDFGAWLGLVPRQYSTGGKPILGRISKRGNKYLRTLFIQAANVILMRPQNWERFSFGAWLTNAATRMHRNKLATALANKLARIAWSVLRHRTRFDEALTAV

SEQ ID NO: 360506 - protein, 346 aa, unidentified
MKKSEGQQLKYPFIVGIDVSKESIDICMIEMITQHSNCITLTNTSEGYTKLRRWLKQHGNDDHEHTLFCMEHMGIYTRNLVKYLLGRGGKVWLESSLHIKRSIGLARGKSDKIDAERIARFAMLHQQEAKLIKLTHPTLERLQNLMRLRSRLLKSKLSQERAIEEIGHFDKKGAMEIRRLSKSSLEGVAKSLKKVEEKMLEVISIDKEVRSLYELITSVKCVGKVLATDLIIYTHGFTRMLDGKKLACYCGVAPFEYSSGTSIKGSPGTSNFANKILKYHLHMASMSAIRHCPELKEYYQRKREEGKGKMTILNAIRNKLLHRIVAVVKRGTPYKDRIVLNKVEMT

SEQ ID NO: 360507 - protein, 352 aa, unidentified
MKILGIDMGWSKSMSCILDSDTGEAVYQAIVTGKEPFAKRIEQAQCDLVVIEAGPMAGWVRDLCEQRNQKLLVLNTSDEPWLWQKVKKKTDRQDALKLCRIAMMQQGSEVHVPRQEVRQQRQLIFYRDTLMGEMTSIKNRLRAVLLQEDIRLASGKKAWSGEDYQKLVAMGRALTECSGEESWRGIVKLELDRLEQLMEQVQTVETKLNALAKKDSRVQRLQQVPGVGARTAELVVAMIDEPERFGRGREVASYGGFTPKKYQSGKMDRDGRISRAGNGLLRKYLVQAAWSGKRACLAMQAIYQRVRKNSPKRSKQAIVAVARHLLIWLWAMLRDGTDWKHQQRQQAATAMT

SEQ ID NO: 360508 - protein, 344 aa, unidentified
MGEVITIGLDIAKSVFQAHGVDEAGAVVIRKRVSRAKLLEFFASLQPCLVGIEACPAAHHWGRELQALGHTVKLMPPSYVKAYLKRSKNDANDAAAICEAVTRPSMRFVPIKTKEQQAALMLHRARQLLVRQRTMLSNAIRGHLSELGIVSAKGRKGTGALLEIIADAEDGRVPPAARGILDVLARQYSAIGAEIGSIDRSIVAWHRSCEASRRLEEIPGVGPIVATALVAEIGDWKAFGSGRNLAAWIGLVPRQQSTGGKDKLGSITKQGNRYLRWLLVAGAMAVIRYAQKHGTLKRPWLGRLMERRPTKLAAVALANKMARMAWAIIVHGDRYRETKPLLAA

SEQ ID NO: 360509 - protein, 393 aa, unidentified
MSCTTSRANLVQTAAHSDRATLFVSLELSKSKWLATVLLPGGDKMSKHTVTGGDWDALIALLLRARVQAETRVGKLVEIVAIHEAGLDGFSVHRVLQMNGVESHIVDPASIAVPRRKRRAKSDRIDGETLLRTLLAYKRGEPRVCSMVVPLSPEDEDRRRLSRERQTLVSERVQHTNRIRGMLMAEGIADYAPLRRDRRERLDALRTADGRTLPPHLKARILREIERIEVVVRQIAEVEAERDALLRPETKVGVAGVSETAAALLMKLKGIGAEFATVLWFEAFFRRFDNQRQLSAFAGLAPSPWKSGKIDREQGISQAGNPRLRTTAIELAWMWLRHQPGSALSCWFRERVSAERGRTRRITIVALARKLLVALWRYATQGVIPDGAVMKTA

SEQ ID NO: 360510 - protein, 356 aa, unidentified
MAIVAQAHPFVIGVDTHARTHTYAVLSATTGELLAAEEFPTTPASMKRAVSWAARRTGGDLATLWVIECVATFGARLARVVADAGYQVAEAARMDAKAHRNVGKSDPLDAHRIAAAVLPLSTDQLRCPRADDGIRAALRTLTTAREHMGTERTACINALTALLRAADLGLDARKPLTGSQITEVAAWRSRTEHLAVSVARTEAVRLAKRIRALDDELADNHSQLTTLIQQSKAAPLLNTTGIGPVTAAVAYAAWSHPGRVRSEAAFAVLAGVNPIPASSGNTTRHRLNRGGDRRLNRAFHMATITRMARDPETRAYVEKRRAEGRTTKEIRRSLKRYLARQIYRKLEALHAQPAPA

SEQ ID NO: 360511 - protein, 401 aa, unidentified
MVKVRERIWVGIDVGKASHHACAVDETGKVVFSQQTANGQAAIQALIARAGKAGGEVSWALDMTSGTAGLLLALLWQTGQPVRYVPGRLVNRMAGAFAGEGKTDAKDAKTIAETARLRTDLVTVTAADPIVADLQVLTAQREDLMGDWVRGVNRLRALLVSIFPSLERAFDYSTRSPLILLTGFQTPTSLRDAGHDGVQTYLTEHGAWPKGIPAMADKDLDAAGEQTVVLPTEKVTAPLIARLAADLLDLDRRIKDLDKQLTDRFEEHGHATAITSIPGFGPILGAQFLADTGGDLQRVFGTPGRVAAYAGIAPGPRDSGRVKNNLHRPKRYNRGLRRVFYLAAFSSIRADGPSKTFYQRKRSEGKVHTQALIALARRLVDVIWALIRDNREFQPTVAAAA

SEQ ID NO: 360512 - protein, 427 aa, unidentified
MNNVTYQPTLCVGADVHLDEIVLRVVDKALGHEVVDRFRVTNNLPGAQLAAATIAAAATELGYTRIEIACEATGMLWIPFHRYLSTAPPLQPFELELVCFNPKLVAKFKDGLVLRSPKNDDRDAFDVAARLRFGELPISYVPSDFWQGLRRLTRYRYRLSKAMSREKMRFQSHAFLKCSDWKRVKAFSDIFGATSVALLTEFTVAELQEMTHDQLVDLITHRGHGRFADPTATARAVREALRTSYPIDPRMDEMVTATLAAGWEHIRYLKRSMKRLDQLIARYIDLVPNPIITVKGLGAVITAGILAEIVDVLRFPQEQQLAQYMGLTWRKSSSGGFVSQNTRLTKVGNVYLRYYFILGANLLRQNNLEYKAYYWRKYQEVSKYQHKRALVLTARKLVRLVHALLTKNEPYVRPRTTRQEQEDDRLQ

SEQ ID NO: 360513 - protein, 436 aa, unidentified
MTLINFVAANQKYYAFNLLSVFIMVFWSVQYLLQHLLVQTQVSHQLLQPLILILQLPQTPQFRHARPGKFFLPVNGMDYFLPLRLTVRNVLTRRITMNIVFLGIDLAKNVFQLCGLNQAGKPVYTKRTGRKELLQTLANIPACLIGIEASTGAFYWQREFEKLGHKVKVISPQYVRPFVRGQKNDGNDAQAIAVALMQPTMQFVPPKSPEQQDIQALHRARQRIVNHRTATVCQIRGLLLDRGIPIGSAVSRARRAIPLILEDAENGLSSRMRRTIAELYDLFNDLGRRIHFFDKEIETVFRQSEACPRIAKVKGIGPKTATAVVAAIGKGTEFKNGHHFAAWLGLVPRQHSSGDRQVLMNMTKKGDKHLRTLFIHGARAVVRVATNNNDGHMNQWVNQLKERRGFNKTTVAVANKNARIIWSMLRNDTGYQVVCN

SEQ ID NO: 360514 - protein, 392 aa, unidentified
MDSPPPRHHSATVAFEEANGSEGETMKKHSSKHDSLSSTDVELCTTICVDLAKQVFQLAGEDATGRVIYEDRIKSRQAFHDFLTRLPTTVAVLMECGPGAQAWARLLQTKGNPVRILPAQRVAEHRSGAKNDRNDAHAILRAGRDTSIASVPIKSTTALAIQALHRIRRGNIKRHTALGNQIRGLLLEHGVSMPQGDAAISQQVPRALEDASLPLPDLLRELLDELLTDWLSLGERIAALSGRLEVTAQQDKVAQRLITIRGVGPIIATAIVAKQTEPSRFASGRMYSAFFGIVPDQHSSGNKIRLGRMSKRGDGYIRSLMIQGAHAVLSQLRPDSDQPDDRRLLRWLSRLGRKEAAIRLANRNLRIIWALLQSNQVYQRKPNNNPEAAMSL

SEQ ID NO: 360515 - protein, 339 aa, unidentified
MNITTIGIDLAKTSFSLAGSDKHGKIVLRKTVNRGRLLSVIAQCPPCLIGLEACSGAHYWAREFEKLGHQVRIIAVKFIEPYRKGSKNDNNDAEAICEAVRRPNIWFVPVKSADQQASLCVHRVRQGVVRDRTSWVNRLRGLLSEFGIVIPKGRYSVQSAIPAILSDQDNDLTELARQMIHDLWLCIQDANEQILSYDRALSRMAREDETARRLLTIPGVGEQIATGVVASVPDPRLFKNSRQFAAWLGLVPRQYTTGGKIRLGRITKRGDKYLRMCLVHGARAVIAKLGDKQDHVSCWVRDLIERRGYLRAVVALAARNARLIWTLMVKREDYRAVKI

SEQ ID NO: 360516 - protein, 390 aa, unidentified
MVVSVGIDVSKDKHDCFILSSEGEVLVDGFTIPNTMDGFNCLLQRIQDCTTPQDKMKVGLEATGHYSYNLLGFLLDNGLTTYVLNPLRTNLYRKSLRKTKTDRVDARTIAAMLLSDAGLKPYTDTAYHNEELKSLTRYRFDKVKERAKLKSSISRLVCILFPELEKLVPSLHIASVYALLAEFPGAKQIAAAHLTRLKALLETASKGHYKRDMALEIRDAARNSIGSWMPAKSLELQHTIRLIRELDDEIVEIEERIQAIMDELNSPITTIPGLGFRMAAMIFAEVGDFTRFDSPDKLLAYAGMSPSTYQSGQLKNCYPHMEKRGSRYLRYALYNATKYVCHWDPTFASYLAKKRAEGKHYNIAISHAAKKLVRLIFALEKSRQPYCSAA

SEQ ID NO: 360517 - protein, 410 aa, unidentified
MEVVHKICAGLDVHKESVVACVRTVENGKVTREVRTFGATTAELLALSAWLAEAGVTHIAMEATGVYWKPVWHILDDGAFVLVLANAGHIKNVPGRKTDVNDAAWIADLLAHGLIRASFVPELPIQELRALMRTRRQLVRERSSHTQRLQKVLEDANIKLDAAISDILGVSGRAILQALIAGETDPDALARRANPRVKAAPQRLREALHGKVSAHHRFMLGLHLGQIDAINAAIAALDAEVDAQLAPFRAAVSLLITVPGVAPLSAASILGEIGVDMSVFASADHLVAWAGLCPRNDESAGKRRSTRLRKSGNWIKAIMVQCAWAAARTNGSYFQARFQRLRARRGAKKAVCAVAASMLVAIYHMLRDGVVYRDLGADHFDRRGREAKTRRLVRQLAKLGFEAHLQPIAA

SEQ ID NO: 360518 - protein, 281 aa, unidentified
MFIIGIDPHKGSHTAVAVDRSETVVDTIRVDADRHQRSRLLESATRFEPRTWAVEGATGMGAMLAQQLVGVGEQVVDVPAKLSARVRLLERGRIDKTDPNDARSAAIVAWRTPALNIVTASDEHRVVLRLLADRDHQINAQRTRSICRLHALLCLLIEGGTGRSLTVTRAEELLASVHVDGPITTERIATARQLIDEVRTLDAARVEVRRRHVTALEASKTTVTEVFGIGPLMAAIIVGRVGDVRRFPTSGHFARHNGTAPIEASSGPKKRHRLNPRGADS

SEQ ID NO: 360519 - protein, 319 aa, unidentified
MNTIHVANSRTTERNVGIDVGKDVLDIAILELSTHWQIANDDDAVRELVKQLRRYKLTRIVVEATGGYERRVAEACAAKGLPLIIVQLMKVRQFARAEGLMAKTDKIDAHLIARFGKALELEPRPLPDEKIRKVRDLLARKRQLTGQRTRELNRLHKAQKFLQASHQRSIKVIEKEISWVEKHIVSIVATVEEWQDTYKIITSVPGIGDGVAYTLLGELPELGQLTHKQIAALTGLAPFNRDSGTMRGRRRIRGGRAPIRTMLYMAMLCGIQHNPVMKQFYNKLVAQGKHKKVALTACMRKMITILNAMVRDQREWKMV

SEQ ID NO: 360520 - protein, 356 aa, unidentified
MAEGTWVGLDVHARKVVAGVLDAVSGELRSWRAPTLPVETVEWLRQFPAPVRVAYEAGPTGYGLARACVAAGIVCTVAAPSKIPRAPADKVKTDRRDAERLARLLRLGELVAVRVPEPHEEAARDLVRVREDARGELMRARHRLSKLLLRHGLVYDASAWTLAHDAWLRRQRFESRPLALAFDESYAAMLQAKARRDALDRAIVELAADPPFVDTVGRLCALRGVSTLTALALTVELGDWTRFRPRSLGPFLGLTPSEDSTGERRRQGAITKTGNTHVRRLLVEAAWQQRRPLRESATLERRRQGQPAAVRARADQSARRLHQRWHALERRGKRRTIVAVAVARELAGHCWALATM

SEQ ID NO: 360521 - protein, 339 aa, unidentified
MIISPHCVGIDVSKRMLDIFDDAVGRPERIANTLQAITERVAGWRCGNVFVVFEATGVYDRELAEALRQADIRFARINPARARDFARADGRLAKTDAIDARMLAIFARKMMPAVEPAPEPARSALASLAKRRDQLVQIRAQEKNRRSEATDRTTIEGIQRHLDFLNGEIKAIEASIKTLIKAEPDISEQARLMRSAPGIGPVACMQLLAKMPELGCLGSKQVAALAGLAPFNVDSGSYRGKRAIGGGRKRVRDALYMAALNAVRRDLTMKAFYQKLRTVGKPAKLALIAVARKLLTTLNAIAARPQSLRPAPTHITVAGSRPGRRCGYYLHAARKSWRP

SEQ ID NO: 360522 - protein, 347 aa, unidentified
MEQIIRIGLDTSKHVFQLHGVNTAEQPVLRKKLRRTEMMTFFQKLPSAVVAIEACGASHHLARLLTSYGHEVKLIAPQLVKPYVKRGKNDAADADALCEAMSRPTMRFVPIKTEEEQAHLMLVGVRERLIRNRTQLANAIRGYAAEFGLIAARGIWKIEMLIERIAADQAIPVLARELFASQATEYRQLEKQIDKIETRLADWHRGNERSRRLAKIPGVGPIGAALLTMKTPSPSLFASGRGFAAWIGLTPKDHSTGGKIRLGVITRAGDETLRSVLVAGATALLRHVRDRRGKNASPWLIELLKRKPPKLVAVAVANKIARIAWKLMVTGEHYRGAVALSMPAKRT

SEQ ID NO: 360523 - protein, 424 aa, unidentified
MKYKMQDKQNQLIERISDQHLVVGVDIAQQFHVARAVNYRGIVIGDPLTFENDEVGFARLQEWMNELKDSKGYSTEIVGMEPTGHYWLNLSKWLYDQGIDVVTVNPHLVKRNKENRDNTQSKSDKKDALVIADMIKNGYYSIIHPTSEAFEKLRVLMSNRDVIVKRLVSSTNQINRWVDIVFPELREVFKDVKGKGAIATLRLFPTPNELRLMEPQDIIKGWKTLMKRQPGLKKARSLIRLAKNSVGTTQALDAYKLHLEQLLEEFDLATTQLEKVEKEAANALKQITFANKILVMKGITEITLGGILGETGDLSKFAHGNSLLRHAGLNLAEASSGKWKGQIVISKRGRSRLRRYLYLATMSLVANNPEFKELHAYNVQVKKMKKMKSIMKLIGKFARILVGIARNNEPYCPEKVQPLTSVAA

SEQ ID NO: 360524 - protein, 424 aa, unidentified
MKVTYQTCCGVDVHKSFLVATIVKTTCGIEPSYQKKRFSTFNNSILEFKQWLLDNNCHDVCMESTGKYWVPVFNLLEDEINVVIANPKWVKAVKGNKDDAKDSKWIGDLFRLGLVKGSYIPCKKVRILREYTRYRYKLVSCRSSEKNRYQNALTVCNVALDSVVSDIFGKSSTSIIDYLLEQSGTSINHEEIASKLLRSLKSKEAAVIESVEGYQMTDAQKYRMRLVRAHMDYITAEINDVDKMIENMISSNPDFENAVQFLCTIPGVKRDSAITIISEIGTDMSQFSSSKRLCCWAGLTPGSNESAGKKKSVRITRAGVYLKPALVQCAHAAVKSDKSPYYKKKYESLVKRRGKKRAIIAIARMILTAIYQMLSTGEQWNPSDLYKIDMPVALVEKQKAKAIKQATKLLQREGILPPDEPLAS

SEQ ID NO: 360525 - protein, 337 aa, unidentified
MIVIGVDVHKHSLTAVAVDELGRTLAERTGQVEEELVDWARSLSEERMWALEDCRHVTRALERTLQDEGERLVRVPPRLTAPQRRRGRTRGKSDAIDALAIARAALQEPELDGPRAGEQTLRELKLLVDHRDDLVDERRRCQQRLRWHLHELDPGLHVPLGALDRAVWLERLSRRLSRGEQTTQVRIARELIARCRSLNRSIGELERELQERTTTIAPRLLALPGCGPLSAAKLLCEIGPIDRFRTDAQLARHAGVAPLDASSGKHQRHRLDRGGNRQLNCALHRIAVTQGRVHAPARAYLERKQKEGKSRREAIRCLKRQLARTVFSTLKVEPALT

SEQ ID NO: 360526 - protein, 424 aa, unidentified
MKVTYQTCCGVDVHKSFLVATIVKTTGGIEPSYQKKRFSTFNNSILEFKQWLLDNHCHDVCMESTGKYWVPVFNLLEDNINVVIANPKWVKAVKGNKDDTKDSKWIGDLFRLGLVKGSYIPCKKVRILREYTRYRYKLVSCRSSEKNRYQNALTVCNVALDSIVSDIFGKSSTSIIDYLLEQSGTSINHEEIASKLLRSLKSKEDAVIESIEGYQMTDAQKYRMRLVRAHMDYITAEINDVDIMIENMISSNPDFENAVQFLCTIPGVKRDSAITIISETGTDMSQFSSSKRLCCWAGLTPGSNESAGKKKSVRITRAGVYLKPALVQCAHAAVKSDKSPYYKKKYESLVKRRGKKRAIIAIARMILTAIYQMLSTGEQWNPSDLYKIDMPVALVEKQKAKAIKQAKKLLQREGLLPPDEPLAS

SEQ ID NO: 360527 - protein, 415 aa, unidentified
MALKIVYKICCGIDVHKTFVVACIASTDSNGVTTYEHHRFSTYTKGLKDLLQWLLKHNCKDVCMESTGKYWIPVYNVLENDCTIVLAHPKYVKAIRGKKTDKKDAKWIADLFKHDLVAGSFMPPADIRQLRDLMRYRFKLTCFMSSEKNRLQNCLTVSNIQLGNVVSDTFGKSAQAILDKLLENPADTSFDLEPLVYKSLKKKLPELRDAIDGYITPEQAGKLKVIKAHYENLESRKAELEELILALAAPYQQELAILQTAPGIRSDFTAIGIISEIGTNMEAFPSAKHLCSWAGLTPTNNESAGKKKSVRVSKAGCYIKPLLVQCANAVVTSKKHPEIRNRYLRIKKRRGHKKAIIAIARMLLTALYHMLKNGENYNAELYRKSDLPPVDREITVEQAIIIARNQGYKIKSATA

SEQ ID NO: 360528 - protein, 344 aa, unidentified
MDHFAGLDVSVKATSVCIVDETGKIVREVKVASEPEGLLAVLKNPAYHFNRIGLEAGPLSQWLFSALAEAELPVVCVETRHMQAVLKAQINKTDRNDARGIAQMMRVGFYRPVHVKTLRSQKLRMLLTHRKLLQSKAIAIDNDLRGTLRNFGLKVGMVGTVKFEARIKELVDNLPDLAVLVEPLLVVRRVLREQFVILHRRLLAIVRDDEVCRRLITTPGVGPVVALTYRATVDVPARFRKSKAVGAVFGLTCSKYQSGEIDWSGRISRCGDEMMRVMLYEAAQSMMHSKKWSWLKAWAMQIARRRGMKKAIVALARRLAVILHRIWVDGTEFRWTREQATAAA

SEQ ID NO: 360529 - protein, 316 aa, unidentified
MSEPVYVGIDVAKASFEVAVSGEAQTLTLGNDEAGHAELCQVLVPLAPRLVLLEATGGHERLLALALAAAGLRVSVINPRQARDFARCMGKLAKTDRIDAQVLRGFAALLDAQGHEPRALLDEQQRELTALVTRRRQLVAMLVAERQRLALAHPKAKASILAIMDAIAAQLHDVDGQLREHVQAHHADLAKLLTSVKGVGPTTASTLLAQLPELGHLNRKQITSLVGLAPMNRDSGTLRGQRHIFGGRADVRRVLYVAALVGTRFNPVLKAFYAKLLAAGKPKKVALVACMHKLLIILNAIARTKSPWSHEIAGIA

SEQ ID NO: 360530 - protein, 358 aa, unidentified
MKYVGIDVHKKMCQAAILGDDGELLDEIRFPNDADGIEEFSGKLSSFNDEVKAVVESTGNLWIQIHDRLEEHGFDVALSNPSKTRLIAEAKVKTDKVDARTLAGLLRADMLLTCYVPGEELRSRRELLRHRLNLVKIRTEVKNRIHSLLDKHGLRMPGTTPFSKGNIAWLRGLSLGFMDDAILRSDLAVLEAVDGQVLLIEEKIAALAAEDRRVRLLMTMTGVGYFTAMLVLSEVGDIGRFRGDKEFASWMGLVPSVHQSGEKTRIGGVSGPGNKRLRWALVESAQTAVRHDPRLGGMFERLSRRRGAGCAVVAVAHEMARIMYFMLVRGEPYRGENRGLTERKLKNMGKRALDGLRN

SEQ ID NO: 360531 - protein, 377 aa, unidentified
MHSENIAAYIGLDVHKETLAVAIAAPERLGEVRYYGTINNEAQAVRRLFQKLQGLYGNILSCYEAGPCGFGLYHQLTAMNIKFLVIAPSRIPKSPTDRIKNDHRDAISLARLLRAGELTPVWIPDLTHEAMRDLIRARAAAKRDSRVARQRILSMLLRTDKRYAGKHWTGKHRTWLANQSFSQPSQQIAFQHYCQSLEQIEDRILQLDQEISRLLPEWSLCNLVCQLQALKGVGQLIAITLVAELGDFSRFSNPKQLMAFLGLVPGEYSSGNSIRPRGITKVGNSELRRLLYEAAWSYRTPAKVGAWLIYYRPDSVTQYSKDIAWKAQQRLCSRYRTLTAKGKKSQVAITAVARELTGFMWDIALAAQSSFSQQKQN

SEQ ID NO: 360532 - protein, 349 aa, unidentified
MNNLSKCKLDDKISMFVGMDLHKNYLQIAVMNEKGKVLENSRINNNLKQVGRFFDENIKKSNEKVRVVMESSSVWYNIYSYLSEEKHLNVVLSNPVKTRAIASAKIKTDKLDAAKLANLLRGGYIAECYVPDRRIMDLRELVRHRAALVRMRTKLKNKIHSIVLMKGIQISRKHCSFTHLYNEELKELNDYRINGYLHLIESLDSEIKDVSKKILMLAKEDEMASLLMTIPGVGYYSALLIVSEIGDITRFPDSYHLCSYAGLVPSTHSSGGITYHGSITKRGSKYLRWIMLECVHVHIRTNKNSNITRFYTRLAKIKGSSKAAVAAASKLLKVVYWIMKEKRKYHHHS

SEQ ID NO: 360533 - protein, 415 aa, unidentified
MAALVRWVGRAIGLDVHRDFCVVSICEDGRVRSGGRVPSTPEGLLALAQSLLPTDRVALEVTASCWEVTRILEPFVERVVVVSPEDTGISSARAKTDKLDARTLAVLLWKGELEAVWMPDDRCRILRRRLARREQLVHARSRAKNEISAVLQRRLIERPAFADLFGVTGRRWLAEVLLPVEERESVDAGLRQIAFLDTEIKAVEKLIAQQALGWPEIRRLMTVPGVNLICAATFLGAIGRADRFFTSRKLVAYLGLDPKVRQSGETPARSGRISKRGSASARWALVEAAWSVVKQPGPLRAFYERVRARRGHGKAIVATARKLAVLFWCMLSRSEDYAHQRPALTKKKLRELELTAGAKPRTKAAAGIWSTNRTIRDAERALTLQAEVSYKRMVTDQQAGRPARKVGASATPERA

SEQ ID NO: 360534 - protein, 355 aa, unidentified
MYGLKHQKEKRSMDHFAGLDVSVKETSICIVDETGKIVREVKVPSTPEALLAVLKNPAYHFRRIGLEAGPLSQWLFSALAEADLPAICVETRHMQAVLKAQINKTDRNDARGIAQMMRVGLYRPVHVKTLRSQKLRMLLTHRKLLQSKAIAIENDLRGTLRNFGIKVGMVGKVSFEARIKELVENLPDLAVLVEPLLIVRRVLREQIIILHRRLLAIVRDDEVCRRLMTIPGVGPVVALTFRATVDVPARFRKSKAVGAVFGLTCSKYQSGEIDRSGRISRCGDEMMRVMLYEAAQAMLRSKKWSWLKAWAMQIARRRGMKKAIVALARRLAVIMHRIWVDGTEFRWVREQAAAA

SEQ ID NO: 360535 - protein, 323 aa, unidentified
MTSPTHELDPAAGHAGIDVSKERLDVHLLPKGEAFAVNNDPEGIDELVERLLQERPELVVLEATGRYERPAATAIASAGIAVAVVNPRQARDFAKATGRLAKTDKIDAQILARFAAAIEPSPSVLPDHEAQALQAILTRRRQLLLMLVSEKNRLLMAPEAVAKRIRAHIRWLEKELTRTDRELDEAVQESEVWRRNEELLRSVPGVGPVLARTLLAELPELGTITHKRLSALVGVAPFNRDSGKMRGKREVWGGRAPVRATLYMGALVATRHNPTLKEFYERLLAAGKPKKVALVACMRKLLSILNAVMRDRAIWRCPHILTP

SEQ ID NO: 360536 - protein, 447 aa, unidentified
MAQRKRPATQAAITLTHPNAAGIDIGSAAHFVAVPPERDDEPVREFASFTADLHRLADWLDACGVDTVAMESTGVYWIPLYELLESRGFTVLLVNARHVKNVSGRKSDVLDCQWLQQLMSFGLLRGAFRPADQVCELRSLSRQRTMLLRSQGRFVQHMQKALTQMNIQLANVISDVAGETGQRILRAIVAGERDGRALAQLRNARIRASEDEIAKSLQGNWRAEHLFALKQALDAFDFCGTQLAECDAQIQAQLQALHVREDAPAQGKKRGRARNAPKFDLRTQLFQMCGVDLTRIDGIDVTTALAVVSEVGADLSKFPSDKHFASWLGLCPGTKITGGKVMSGKTKRCANRAAQALRLAAAALRSSQSALGAYYRRLCARMDKPKAVTAAAHKLARLIYAMLTHGQEYTDRGQDYFEERYRQRVLHNLAQKAKAMGMQLVPSDAPA

SEQ ID NO: 360537 - protein, 373 aa, unidentified
MYKDTTVYIGMDVHKESFTLSSFVLGEEEPGYVQTIPSDYILVVKYAKRMRKVYGEEAEIICGYEAGCLGFSLYHQLTSCGMNCVILAPTTMMEEKGKKRIKTDKRDAKKIAKCLAYHTYSPVHIPTDEDEQVKEYIRMRNDLKAELKRIKQQTLAFCQRHGLKYTLTKSPWTQAHLKWLRSLRLEGLYQETLDEYLLHLSQLTEKLERMDKRIEEMSNLEPYRESVDHLTCFMGVKRPAALAVMVEVGDFRRFASAQHFASYLGLVPGEDSSGGEQTRLGITKAGNTHVRKILIEAAQSYGRGRIGYKSAALKARQQGTPPQIIAYADRANERLRRKYYSMLFRGKKANVAKTAIARELACFFWGMLNNKVI

SEQ ID NO: 360538 - protein, 319 aa, unidentified
MNPYNIASKYAGVDVSKKKLDCWKPATKNKGGIHKSFDNDGKGIAALVRWLPEGGHVVLESTGCYGELLVLMCHNLGVPVSVVNPESVRDLARAHGQRAKTDKIDAEFIARFAEAVNPEPLPKPTKAQMALRSLVDLRESLVEERTGHLCRLAAERNPAARLHLQETVAHHNKTIAAIEKQIDAIIASCPRMSAMRKELRKIPGIGPVISATLLALLPELGTLSRKQVAALCGLAPYARDSGAKKGKRYIFGGRVKLRRRLYMGAVSAVKTRSPLAAQHKAMVARGKEKKVSLIAVARKLAIRANTICKPLLPIPYANH

SEQ ID NO: 360539 - protein, 343 aa, unidentified
MKLSRVGIDLAKNVYQLHGVDCSGETMWTRRLKRHQWLKVLLDKTEADCVIGMEACGGAHHWARELQACGYTVRLIPPQFVKPYVKSNKNDANDAEAICEAMSRPNMRFVAVKSVEQQDIQATHRVRAECMAHRTAKGNQIRGLVSEYGLVAPQQSAALRTAIPCWLEDAENGLTSRFRALLHGLWEDLIRLDERVAALDADIALIAKTDPVAKRLQQLRGVGPLIATALVASVGTGEQYAKGRQMAAALGLTPKQHSSGGKDRLLGISKRGDCYLRGLLIHGARSTLWHAKHKEDRLSRWMNDLSARRHPNVAAVALANKTVRMAWAMMRNESDYDPEFATA

SEQ ID NO: 360540 - protein, 455 aa, unidentified
MARKRKSNPKSDQKTGASLLSCLNLNAAGVDIGATEIYIAVPGDRDPQPVRCFSTFTEDLHAAAAWLKACHIETVAMESTGVYWIPLFQILEARGFKVFLVNAHHVKNVPGRKSDVSDCQWLQYLHSVGLLRGSFRPEQAVCSVRSILRHRDSLVQMASSHVQHMQKALDQMNLQLHHVISDITGLTGIAILEAILAGERNPHTLAALRDRRIKASADTIAKSLVGDYRREHVFTLRQSLAAFRHYQELIAACDREIAQSLEEFESKLDPPPGSTSLSKDGSQPKTSEPGFDLQTHLHRIFGVDLTQVPGINVLTTQTLLAEIGPDFSHFANGPALTSWLGLCPDNRVSGGKVLSVKTRKVKNRAATALRMAAQSLHRSQSFLGHFYRRMRTKLGAPKAITATAHKLARIIYHMVTTGHAYDETICAQNEVQNRHRMEARLRKQARELGLQLVAI

SEQ ID NO: 360541 - protein, 473 aa, unidentified
MEATKRLTRKQKNELGRRIWSADPGLEVVHRDVAGIDIGSRQHYVAVGPDRDTEPVRVFGCFTADLQGMVRFLKGCGIKGVVMQSTGVYWIPVYDVLEEAGFEVWLVNARDTKNLPGRKSDVQESPWLMKLHTYGLLRRSFRPTPEIRAVRTCWRERAEYVQQAGMCMQRMHKALTEMNIQIGTVLSDLSGTTGMGMVRAIVGGERDANNLADFRDPRVKASRETIVLSLQGTWQSEQVAILKRQLADWDHVQKQIRACDQDRKALMRKLPDAQVAPGDRPPAPEQPGKRGHKKNGKSSRNEPGFDLAAELKRVTGVDLTRIDGVKVNTIQTVIAEAGLDMSRWLTENHFVSWLGLSPRNDTSGGKVLNRGTRKVVSRLATALRMAASSLRNSDSYLGAQFRRLRTRLGAPKALTAMAAKLARLIYRLLRYGQEFVEKGAAAYEKKYCQQQIELLAKKAAQHGFALVEIGQPA

SEQ ID NO: 360542 - protein, 416 aa, unidentified
MNAVGIDVSSRKSTVAVLRPLGEVVCLPFDVTHDIVGLASLAEKLKTIDGETRVVMEHTGRYYEAVAKALHEAGFFVCAVNPLLIKEYGANSLRRVKTDKADAIKIARYALDNWADLRDFTPMDAIRYDLKTLNRQFQLASKQRTASANNLIALLEQSFPGIRKCFDSPVRSDGTQKWVDFAHSFWHVDFVRKQPFAAFCERYRKWCKRHAYLFKLSNAEEVYALAKRAVVLTPKSKVVKVLVQEAANQLISISRSVEVYRAEMDRLAAMLPEYPVVMAMYGVGKSYGPQLMAEIGDVRRFERKQALVAFAGIDPMPNQSGDKNVRSNKSSKRGSPYLRKTLFNVIRTYLQCAPQDEPVFQFLNRKRAEGKPFYVYMLAAANKFLRRYYAKLRDYFASLDTLQSVDPIPATLKASL

SEQ ID NO: 360543 - protein, 417 aa, unidentified
MPLGPTLYVGTDISEATNRTRFLDPGETEVGRGFSSANDLPGSEQLAEEALRRAREIGAGEIRWGLEATNLFWWHLATYLTTHPDLLSAGLKCWVFNPRQVAGFKDAYGDLGKGDWVDALIIADRLRFGRLPAECYLDERYQPLQRLTRHRRHLVKTLVREKQVALGYVYLKLSAYNLTKPLANTFGATSQVLLTDYLTPDEIVAAPLEDLAAVIARESRGRVADPEEVAEAVKQAARRSYRLPAKMVEPVNLVLSSSLATIGTLTAQLKPIDRAIAAELKAVPAQTVDTIPGLGPVFAAGIVGELGDVRRFEDEESVAKFAGLTWRRFQSGEFEGEDRPLTKTGNVYLRYYLIEGANSVRLHCPEFRSYYDRKYGEVTRHQHRRALVLTARKLVRVIDSLLRSGQIYRPPSARKAS

SEQ ID NO: 360544 - protein, 346 aa, unidentified
MKKIFIGIDFSKEKFDATLIKAEGLKECAHSVHEVFDNKTSGFRRLVKWVKAQSESASVDSWLFCGENTGGYSIGLSNHLYASGYDMWLECAYRIKHSAGIQRVKNDKADSKAIAEYAMRNYDKMILYKPQSSSLTCLREVFLYRHSLVRQKVSLQVRRDEKRLTQERSDARAFMSFTSKHLITEVNKAIAKCDQKIKDIIAADDELREIFDIITSMPGIGIQNATCLMVYTDNFQKFELNARKIGCYYGIAPFGRQSGTSVNSRPQVSPFANRMIKSLLSQAALAAIKFDMNVYNYYQRLKERGKHPLLIHNNIKNKMLHALVAMVRDRVKYNPDYVYRTNKEIS

SEQ ID NO: 360545 - protein, 311 aa, unidentified
MANIFKVLHSTCCGIDVHKRNVVVCLLKADEFGEYTDIIRTFSTMTPDLENLKAWLKEQGCEKIAMESTGIYWIPVFNILEDAFEIVLSNAKQIKNVPGKKTDPNDSRWIAKLLALGLINGSFIPPKELRELRELTRYRDKLIAMRTSEKDRAHNILESCNIKLSSVATDIFGVSGMAMMKALIENNVEAHPEVVAELAKGRLRNKIPELVKALTGNMDFHHAQTLSMVLDHLAFLGEQIAKLEQRIEEKVQPYQQEIELLDTMPGIDKISAQSVIAEIGTDMSVFETPERLASWAGLSPGNNESAGKKKY

SEQ ID NO: 360546 - protein, 356 aa, unidentified
MQNKTSKNLDFSGHNVYVGLDVHGTSWAVNILIDEIEHRKFTQPPDPIVLHNYLVRNFPGATYYSAYECGFCGYHHHRSLLELGINNIVINPADLPVTDKERINKKDPVDSRRISRALQNKQLKGIHIFNPKHEQFRSLNRMRWKAAKEHRRVKNRIRSFLYYYGIIPPPELNPEYWTIAFVNWLRQLKLPDQSGTLSLGYLMDSYQDTKDLLLKVSRHLRQQVKLHYPDIYKCLMTVPGIGPINAMCLIAEIGDMSRFKSCKQLASFVGLVPRSHQSGPKDPNCSLTYRSNKYLRTALVESAWMALRFDPTLLKYYKDRISKYKSQVVIIKVAHKVLNRIRYVWLNKDTYHTGLA

SEQ ID NO: 360547 - protein, 381 aa, unidentified
MLAELVHHVIGVDPDRDWITLAVVDAHTTGVTAHDRFPATAVGYAEAVEFVDGHSVDTERAWAIEGTASYGRGLSVALSRLGEWVIEFDRPTRKTKDGAKSDHLDAVRAARETLGRDRLSEPRAHQGAREAIRVHAVTRAGAVRARTAAINELKAMIVSADEELRGSLRGLRTSQQVARCARFRERASMSIEGRGTRLSMRALARRIEHLNDEIDDHDRALKTLLDDTAPQLLTKRGIGYITAAAFYLAWSHPGRCRSEAAFARLGGTSPVEATSGQSRPATDSTAAATANPTGLSTSSPSPVAAATQQPGPTSPGAPPTESPNALPSAASSASSPDASGDSSSTPNQHLTRHRSITLEQATCPALSARPWPAHGRRAGTA

SEQ ID NO: 360548 - protein, 410 aa, unidentified
MDTLIERCGGLDVHKDTVVACVRVPARGGGREQFIQTFGTTTVQLLALRDWLVAQGVTRVGMESTGVYWKPVYYVLEDALECWLLNARHLRNVPGRKTDVADAAWICQLVEHGLVRPSFVPPKPIRELRNLTRYRKAQIEERTREAQRLDKVLQDAGIKLSSVASDVLGVSGRAMLRALIAGTRDPETLAELARGTLRRKIPALRQALHGRFGPHHALLVGTILAKLEFLDEALEHLSAEIEQVIAPFAAEAALLRTIPGVDRRTAEAVVAEIGVDMSRFGAAGRLASWAGWCPGNNESAGRHGPGKTRKGSKWLHTYLTEAAKAAARTKGTYFGAQYARLRGRRGPARATVAVGHSILVAAYHILDRHEPYRELGPDYFRRRHSREHQTRRLVRQIEALGYHVRLEEVA

SEQ ID NO: 360549 - protein, 282 aa, unidentified
MDKELYFGVDVSKKTLDLAYYDGETIDWKNAHIKVSNDDAGFKKIGSWVAKVGKDFDTFLFCMEYTGLYNQNFRLWLESKEYIYGMVEPRKMHRFEPDLDDDQRSLDRIKTDELDAFRIAIYCEQNHKKILRNPSKLPSPVYFKLKRLLAERKQNTKQSTLYKQQLHDICAYDTDLSVERKKLLLKNMQENQKAIDKEIDSYMNEDTSIRKNYNLLTSIPGIGRIIALETIVLTENFTAISNPRKYACYIGIAPFKKESGTSVRKKTGVPRKAFLKPRQTYP

SEQ ID NO: 360550 - protein, 479 aa, unidentified
MARRGLSTFERLQRLRRGEKLDRRERRELQRQLQSCDPELQIVHPDAAGIDVGNASHFVSVPKGRDAEPVREFGSWTADLHNLANWLLSCGIRTVAMQSTGVYWIALQEVLEQTGLEVYLVNAQGTKNLPGRKSDVQECQWLMKLHTYGLLRNSFRPPEQIRGVRTIWRQRSRLVEEAGRKVQQMQKALTTMNVQLANAISDISGKTGMAIVRAILGGERDAHALAKLRDGRIQASEEEIVQSLQGHWREEVIFELKQVVEGYDFLRKQIAACDAEIQKPMGILQSRDTQPRGKEQAVGKKKPLGKPPKNQPGFDLKSELHRIFGVDLTRIDGIDVMTAQVILTELGPDLSAFPSEGNFSSWLELAPRNDISGGKIIRHKARKIRNRVANALRMAAEALIRSDSYLGARYRRLRARMEGVPAVKAMARYLACLVYRLLTKGQEYVDRGAAHFERKRQERETANLHRKAAELGFRVVPVR

SEQ ID NO: 360551 - protein, 414 aa, unidentified
MDVVYARCCGLDVHKRGVVACLVTPGADGAPTKEVRAFTTMTDDLLALADWLTAAGCTHVAMESTGISWKPVYNLLEDGFALLLVNARHVKAVPGRKTDAKDCEWLADLLRHGLLQASFVPDRPQRELRELRELTRYRTSLVRERTAAANRLQQTLEGANIKLAAVATDILGTSGREILAALIDGQTDAADLAQLARGRLREKLPELERALAGRVEVHQRFLLAEQVAHIDFLDAAIERVGVEVAERLRPDEAAIANLDTIPGIGRQVAACLVAEIGTDMGRSPTAHHLASWAGMCPGNHESARKRQSGKTRKGSPWLRALLVQAAHAAARTKGTYLAAQYRRLATRRGTSRAAVAVGHTILVIAFHLLRDGTTDRDLGPTSFDHLDRQHIERRLVPRWRDLGYRVTLAPLAAD

SEQ ID NO: 360552 - protein, 430 aa, unidentified
MEIVYPRSCGVDVHKSFIVAVICISESVKPKYIKKRFSTFNNQLIQFRDWLIENNCQNVCMESTGKYYIPVYNALEGHISNVVVANPKWVKAIKGEKDDNKDAKWIADLFKFGIVRSSYIPEKDIRVLREFTRYQYKLVNMRSSEKNRFQNALTTGNCKLDIVFSDIFGKSASAIVDTILSNAPYTSEDILSKVHARCKASHEDILSAVDGIQLTQFQKARIRIVQKHMEYLDSLLDEIQHHIDLMVANYEEYIQILCTIPGINRKSAITIISEIGTDMSQWSSHRKLAAWAGLAPGCNESAGKKKSVKISKAGVYLKPCLVQVAHAAVKDKNCDYYADKFNKISKRRGKKRAIIAIARKILTAVYHLLKTGEVFNPTDMADVETTKKQRIEYVKNNLRNAFNQLSRTGLSEAEILQLIRKESTNSPQIE

SEQ ID NO: 360553 - protein, 330 aa, unidentified
MQITRVGLDLAKRVFQVHGVDVHGKTKLSKKLARGEMLQFFAQLPACVVGVEACGGAHYWARELGKLGHTVRLMAAQFVNPYRKSGKNDVNDAEAICEAVGRPNMRFVPPKSEEQQALLMVHRARSLVVANRTAQVNQIRGLLGEFGLVVPVGLRRLRTQLPQILEDAENGLPVLARHVFAQLLQELHALDEKIQRYDRQLQELARQSEPARRVMALEGIGPITAVFKNGRQFAAWLGLTPRQYSSGGTTRLGRITKRGDRYLRMLLVHGARAHLRFVERKNDPKSLWIKGLRARRHVNVAAVALAAKHARIIWALLAKGTTYRLPAAAT

SEQ ID NO: 360554 - protein, 340 aa, unidentified
MGEYIGLDVSLKETAVSIRRDGKRVWRGKCASDPQLLAALIRKHAPEVARVVFETGPLSVWFFHALSAEGLPAICIDARHAKAALDMAANKTDANDADGLAHLAEVGFYKEVRVKSFDSMLARTLVAARTRLVRIGTELSNQIRGLMKTFGLVVPPASGSKFERQVEALLADNADLGRIIRPLLEAWHAVRLRAAELGRKLLADARRSDACQLLMSIPGVGVVTATSFITAIENPTNFKRSRSVGAWVGLTTRRYQSGEVDYDGHISRRGDSHLRGLLYEAATVLLVRSRSECDLRKWGLQLRERLGFKRAAVAVARKLAVIMHTMLVTGEPFQETRTSA

SEQ ID NO: 360555 - protein, 339 aa, unidentified
MNNIVFCGIEVSAQELVVALPGKRGEALLQRYPNTAAGHRALLGALTRGGKRVRACMEATGMYGLDVALLLSGREGIELMVANPRAAKHFAMATMQRSKTDRLDALMLREFVTRMEFQSWARPGERSLELWSIARRLQALRKQRVAEKNRQHAAGISQATAECVRKSVARMLRAFDREIKQLREQAQQCIASEERLQRRYGLLRSVPGIGETSAIEILAELVMLPEDRDVRQWVAYAGLDPREYSSGTSVRKYTRISKVGNRNLRCALYMPALVASRCEPHLRGFYQHLQQRGKSKRQALVALARKLLHAIFGMFRSGHLYDGARLYTLPNPVLNHKTA

SEQ ID NO: 360556 - protein, 388 aa, unidentified
MTHLPVPYPVPATPDYDRTLVLAIELSNASWVLAAQVPGLPRVKAKRTIEPTAEALLAAIQGYRERAHAAGRQVERVVATYEAGWSGFWLARWLATHGIETHVVQPSSVPVDRRARRAKSDGIDAELLLRTLLAWLRGEPRVCSMVPVPDEADEDARRCIRERTELVAERVALVNRIGAVLATLGVDEYNPLLRNRRECLDVLRTALGTSLPPHAHAKISRMLDRLDLVRAQIAALEQERDAILDDEVPDRAGGMIQQLATLRGIGVQSATVLVREAFVREFANGKALGSYAGLCATPYSSGGTEREQGISKAGNRRLRTVMVELAWLWQRYQPGSAQVSWFRERVGGMGARMRKVMVIALARKLLIALWRFATQGVVPEGAVMKPAS

SEQ ID NO: 360557 - protein, 349 aa, unidentified
MQDITTIGVDLAKEVFAVCVLDTTGAVVYSKVLKRDAFISWAEQLSPCSVAMEACGSAHHWGRWFAARGHTARLIAAEFVQPFRKSVAAKNDRNDAEAIAIASRQPTMRYVAIKSVEQQSILAWHRMREGWKEERTALLNRLRGLLGEFGIWPDRSSDKLIRALPGLSEDERLPLGVRAMVIETREQLTTLHTRLAHCDQEIARHAHTHPGAKRMKEIVGIGTLTASAAAATVVDAKGFRCGRQFAAWLGLVPRQMSSGGKTRLGRISRRGDAYLRSLLVQGAKSALQAALRQPPEKANRLQRWIVDVYGRVGYHKTLVAIANKHARMIWAMLAKDEGYDPTAWQRLSL

SEQ ID NO: 360558 - protein, 384 aa, unidentified
MQTVADRPEAPTAIHTDLGAIFVSLELSRSTWLITSLSPGGGEKMSKHVVRGGDVAGLLERFAQLREKTRARTGNVFSFVVIQEAGLDGFWIDRLLQNEGIESHVVDPASIATSRRRRRAKTDRIDGEALVRALLAYKRGEPRVCAMVKAPTPEEEDRRRLCRERKVLIAERIRHVNRVKGLLFSQGISGYEPLRRDRRERLVTLQTGDGRLLPDHLKAQVCRELDRLELLLEQIKAVEAERDVLLAAQQAPAAMLLDIKGIGPEFAAILWSEGLFRHFDNRRQVASYAGLAPTPWQSGSVDREQGVSKAGNPRLRTTLIQLAWLWLRHQPQSALALWFKERVRRNGDRLKKTTIVALARKLLVALWKYVTAGVVIEGAVMKAA

SEQ ID NO: 360559 - protein, 352 aa, unidentified
MSIIAFDSHKRYTFARVENDNGEHPQEFRIEHRRGNIAGFLSSQQPGSPVAVETIGNWYWIIDEIEQAGMEPRLVHARKAKMMFGCINKTDKLDAKGLNILQRAGTLPTVWIPPAQVRDKRELPRTRMVFAKGRTRLKNRIHSVLDKYGLQDAFEDISDIFGNKGRQVLGCVLVQLPPHTCYTTELLLEQLDQTEQKIQAIEARMKKLFKETKRHMLLQTMPGIGFILAVVILQEVGDIGRFGSAERFASYCGVTPRVHASGGKIRYGRLRPDTNHYLKWAFSEAGNSVAVNRNRFPDRHVSQLYNRIRGRKGHAKAVGAVARHLAEATYWVLTKAEVYRDRGVLEVSPTGA

SEQ ID NO: 360560 - protein, 358 aa, unidentified
MQSNKKSFKGQKIFIGIDVHAKTWAVETITESGFTKRHSQEASAKVLFDFLSRNFPDGEYHAVYESGFCGFSTYYQLKEYGINCVIVHAADVPTTQYEQIMKTDKIDSGKLARALRNGTIKPIYIRERENLDDRAGMRIRKTIQKQLSGYKARVKHLLHNNGVKLPARFDKPGTHLSRAFMNWLKDEVVLLSSTRHSLDLLIKQVESMRKNLLEATRYIRKLATSDKYKANYELLLSIPGIGFNVAMCLLTEIYDFKRFSNENSFAHYLGLIPTCHDTGDKHSTGGMTFRGNKVIGPMIIEACWVAIYKDYGLSLAYCSYRQRMKPQLAIVKVARKMSNIIFSVIKNGKKYEPYKWEI

SEQ ID NO: 360561 - protein, 420 aa, unidentified
MKTNDYAAYLALDWGDSQHAFALQMADNQNIEKGHFGAQPEEIHDWLKELGGRCGHARVACAIEAGGDALVSALLEHKWIEVFPINAAMSARFRKALIPSGAKDDVPDANVLLTLLVRHGDQLKPLQLDSAQTRELAALVLARRGAVDRRSQLGNQLRAVLKGFSPQALMLVGDELHGIMALDFLERWPDLDTLQRARPATVQSFYLQHRVRRPELIKARLDLLARAQALTKDTAIIGPAVLQVQMLTSMIRTLQRHIARFDESIAEQFAVHAESSLFRQLPGAGPQLAPRLLVAFGDNRERYPDAPSLQKYAGLAPVKEKSGRQLWVHWRWTAPVFVRQTFVEWAGQTVVYCGWAGAFYARQKRAGKGHHAIIRALAFKWIRVLWHCWKHQEAYDETRYLAALRQRRSPLIEDLDQATT

SEQ ID NO: 360562 - protein, 342 aa, unidentified
MFYAALDVSLRSVAICIIDEAGKVRLERSVPSDVPDVVRCFNEFGEPIHQVGLEAGTLTQHLTYGLTEAGFDVVCMEARQVNAALSAMRNKTDKNDARGIAQLLRSGWYSRVHVKSIESHYIRALLTSRKVMQRKCLDLENEIRGLLKVFGVKLPIRLRGGAFEEAVRGTIENDPSLSHALLPMLEARQMLLETFLELDRRVRKAANQDAITTRFMSVPGVGYVTALSFKAAVDDPARFKSSRTVGAHFGLTPRRFQSGEKDNPGRISHAGDADVRATLYAAANAMLMRSIAWSSLKAWGVRLMKTKGRRRAIVAVARKIAVLLHRMWIDGTEFRFGSEAAA

SEQ ID NO: 360563 - protein, 461 aa, unidentified
MREKRTGKVSPGVELEGLPVIRPRVAGFDLASEVHWGCAPGMDETGREVEKFGATTPELERMAEWLKARNVESVAMESTGVYWIAPFEVLERHGLEVVLVNTRDLARVPGRKKTDRVDCLWIQRLHSCGLLTGSFRPSEAVVILRTMVRDRANLVAASGDWLRRMQKSLDQMNVRVHRAVSDIGGATGMAIMRAIAGGERDPGKLAKFRDPHCKRSGEEIAEQLTGHWREDHLFSLGQALKVYDSLQAAIADYDGEILRILAEMEKEELRGQQAPPLNNVNKAKKIKSRGEEPLRQALYRMSGVDATTIDAIGVRAVEAVLSEYGPDLSRFPTEKQFVQHATLAPHKPTSGGKALKKKRRGGASTRVAGALRMAATSMRTSKTALGAYYRQTARRLGPDVAVFATARKLATLVYRLLRWGQPYVDEGAEAYERRNQEGRVKRLTATAKSLGFQLMPNTARA

SEQ ID NO: 360564 - protein, 329 aa, unidentified
MKKDWYVGIDVSKKWLDAAIFVENSDLMGYFHTQVSNDKAGYKELLRWLNEHDVDASTCMYGMEHTGFYSDGLQHFLDKKGYRYTMLEPAVIKHYPIQPREKNDRLDAAKIADYLFRFKETIKLSRVPDKTMEELRNLHRERKFYVEDRVVYLNRKQVVGKEEAKRLDKMIALLDKQVESVEEKIREIIRNEKSLMESYLYLTSITGIAFVNAVNAIVITQNFTVFKTARDYASYIGVAPHTKKSGTTVRWKPKPYKHCDLTAKADISQAAKIAIVHDVELKRFFERKLGGKEDADTIRKAMNAVKFKLVLRMFAVVKQKHEYRQFTTI

SEQ ID NO: 360565 - protein, 355 aa, unidentified
MNSEKYIGLDVHQATIVVAVMDSSGKVVMESILETKAATILQFFAGLRGTLSVTFEEGTWSAWLYDLLNPHVDKLVVCNPRKNALLKDGNKSDRIDARKLAELLRGNQLKPVYHGETGVRMLRELSRSYLTIVKDLSRVMNRLKAVYRSWAIPCAGRDVYYPRHRAQWLAKIREAGVRRRAERLYEQLDMLRYLRQQARRELLAESRKHAITAKLRQIPYLGPIRSALAVALIQTPHRFRTKRQLWAYSGLALETRISAEYRYVEGQVRRSKKLLSIRGLNKDHNHDLKGLFKGAATMASVRPGPFQDFYQAALAKGIKPTMARLTLARKIAAITLTLWKKGENFDAEKLKSQAA

SEQ ID NO: 360566 - protein, 415 aa, unidentified
MKQAEYLVRVGIDWASQSHQICILDKDGNRTEHTVPHTSAGLMALATELTALNPEDPGRVAVAIEVPRGPVVDTLLERGLHVFALNPKQLDRFRDRHTVAGAKDDRRDAFVLADSLRTDRPAFRRVQLDDPLIVELRELSRLDDDLREELSRLSNRLRAQLHRFCPETLALCPAADEPWFWALLDRAFPPPRPKPLSIKAVTAVLKVHQIRRLTVDTVHAALQVPPLRVAPGTIEAACTHIALLLPRLRLVHDQRHRTVGARIEKLLAELAKEDGEGKHRDVTILRSLPGVGRLVAATVLAEASRPLAERDYQTLRAQAGSAPVTRQSGKKATVSMRLACNRRLRNAVYHWARVSVQVDPRCREHYDRLRQGGHAHARALRGVVDRSIGVLVAMLITRTRSTTPSGATQKQLDKW

SEQ ID NO: 360567 - protein, 329 aa, unidentified
MSAFVCGLDVHKDSTCATILDCDGRVVSQRRIVNERVLSYLSDYQIDRIGMEASNQVAPLYRKLTRNGYTVSVSHPKKTRYIAEAKIKNDRVDSKAIAELVRLNALPQAYMPDEETAKLREQVRRRAFLVRERVRLRVKIKNILTYEGIKPPTNHGLFTQKGVEWLHNLNLEPVESYLRVITPLDEEVKLVSKILKEQATIDEDVKLLMTIPGVGYYTALLIKSEVGDINRFSDGDKLCSYAGLVPSTHSSGGVTRHGGITREGSRWLRWVMVEAAMTHVHKYDTSITRAYHRIAERRGRQVATVAAARRLLMCCWSVLKNQQPYHDRA

SEQ ID NO: 360568 - protein, 364 aa, unidentified
MPDNLVSRRPGAARMDKGGTVNKQAVADMRPAVVHLEDPMTLLPLGIDIAQNKYDVALLVDGRTHTAQFANTPDQFAQLTAWLQQHGALQVHACLEATGRYGDALAAYLHAAGHRVSRINPARAWAYARSKLTRNKTDRVDAALLADFCRTQQPRVWTPPAPERAELQALVQHLEALKQMRTQELNRQKAKPPAPAVTQLLAAHLAFLDDQIAQLQAQIQALIDAHPTLSQQQALLVSIPGIGAMTAARLLAIDLLNFASTRAVAAYAGLSPSQHTSGTSIHRQTHLSKVGNADLRKALYLPAVSAIRWNPVLADFAKRLTERGKAKMVIVGAAMRKLLCLAYGVLKSGRAFDPLFARSAQAAA

SEQ ID NO: 360569 - protein, 429 aa, unidentified
MSYRIAGIDVHKKMLAVVVSDVEIDSEYQFERRRFSSNPEQLRSLAAWLLEQEAEEVVMESTAQYWKPVWEALERYWKPICETREGARRKSGTLHLAQALSNRGRRGRKRDFPDAERLVKRLVARELTLSFVPDAEQRLWRTVTRKKYQLRCDRIRLQNQLESLLEEAHIKLSSLVSDLLGLSARRMLKAIAEGETNPATLAALADERLRATPEQLCDALSACTELNAVYRRLLNMALEELRLIDEQIGRLDQEMASLLSEHQDAVQRLAEVPGLGVDSAQQIIAEVGPTAATFPSEKCLSSWVGACPGDDESAGVNYSHRSPKGNRHMRRLLNQAANAAARTKGSLFEIVYRRSVSRLGHNQAIGAIGHRQCRLIWLILHQGVRYEERGPAVTKRSKQLRTWKMIRQLRNLGYRIEPPNPQPSQARAQ

SEQ ID NO: 360570 - protein, 361 aa, unidentified
MSNERTTVGLDVHARSVVAEAVDWASGRVFSQRLVPANDVVLGWVAQLPGPVAVGYEAGPTGFGLARAFGSAGVRCEVVAPSKLERPPGDRVKTDRRDARRLARLLHIGEICGIGIPSVIQEDARDLVRAREDARADLMRARHRLSKLLLRHGIVYYGGRAWTGRHERWLRAQRFELPGTRVAFEEAFDAVLSVSARRDRLDEAITVTAAAPQWAPVVSRLCAVRGIATLTGLGLAVEIGDWDRFTGASIGAYLGLVPSESSSGNSRSQGPITKTGNTHARRLLVEAAWHHQKPLRAPSKALAARRAGLSPPARARGEAADRRLHHRWSTLAARKKRPTVIAVAVARELAGWCWSLATLHD

SEQ ID NO: 360571 - protein, 414 aa, unidentified
MTNPLIVGVDVHRKTNTFCLMDASGQEVRSRFTLDNNRPGTQAFVQQVAELMEADGFSELQVAAEATGWYWFHFFQSLQQEALLAAWPVDLHVLNPRLTANFKKSYVDVDKTDPIDAFVIADRLRWGRDIGTPFEYDEVYLALRFLTRYRYHVVHNLAREKAYCTAILYLKASEYSRQDKKPFSNLFGAASQAVIQEFASIEEIAAMPFEELVEFIDVQGKRRFPDPSENARLLMQVAQDSYSLPQALQQPINLVLNLSLKQISALENQAERLDTAIAERMAAIPNTLQTIPGFGPVFVAGILAEIGNPQRFNYDQGKVAKFAGFKWRKTASADFTADETRMTRTGNPYLRYYFCEAAFSVQRCDREYGLYFQRKLQEVRKHAHKRATVLTARKLVRLVMRLLATNQPYRPRRL

SEQ ID NO: 360572 - protein, 349 aa, unidentified
MIRNKPRDADVYGVDIGKNIFHIVGVDAAGAPIQRVRCRRETLIQFFQRAAPALVGMEACPGSQWLARKIQSCGHTVKIVPAQFVKPYLKSNKNDTLDAEAIAEAVTRPTMRFVEVKAVEQIDTQALHRARDQMVMHGTRLISQMRAFCLEYGVAIRQGAGVFKLDLPRVLGDESNDLSPAIRRLLAELFEDLHRLEGRIAQVTREIEAVVSRDEVARRLMTIPGIGPLGASALIAAVGQGRQFKKARDLGAWLGLVPRQYSTRGKPTLLGISKRGNGYVRRLLIHGARSCVMHLDRNRTKLGAWIDQLEKRMHANKVVVALANKIARIAWVVLNRPGTLYERIDPAFT

SEQ ID NO: 360573 - protein, 455 aa, unidentified
MKMGIAKEKASLYNKATQTYKEAINMIRNYSTQREKTERITEKTLIIGIDIASHRHYAQALTWRKVEVTKGLCFNNERQGFEEFLEWVNHAKQKMGASNIIVAMEPTGHYYFALEEYLERMGIEVVIVNARDVNQMGKYYHNHRSKSDPRDAMLIGYLCSEGRYAVTTRPKEGPYAELRELTVRREQLVKKQMASINELHCLFTQLFPEYKQIKTSGISEGLLVIFLELRTLEAIQAAGWEGLYDILKRHKKYQIGKDKVKQIHALSISSIGIKGKVKATQTVLTSVIEEYQFYQQQIKAIDDDIIAQLNEMDVAKRLMAIPGIGPIITATFLAEVGDIANFKSAKQILKLAGYAICTNESGNHKGTRRTSKMGRKRLKKIIYQASLATISNNDDINQIYMYYTQERKEPLKKMKAVIAIGCKLVRIFFSLLKYNHHYDGQKMLSDIKRPQGQTA

SEQ ID NO: 360574 - protein, 359 aa, unidentified
MKSISLTEPSSNVIIGVDTHKHVHVAVAIDDAGQRLGEHRIPVDTVGYQDLERWARSWGRVSSFGIEGTGSYGVGLASFLRRQGLRVIEVNRGDRRARRSNGKSDTLDAELAARSVLAGTSSNVPKSADGLVEMIRQIKVARDNAQKERTSAIVTLKTVVVNAPQEIREQLDHLGDKALIERCAGFRLGKVEGATSSTKHTLRSLARRWVFLDHEIKEHDAILNDLTQGISPTLRDGFGIGPDTAAELLIVMGDNPDRVRNEACFAKLCGVAPIPASSGMTNRHRLAWNGHRQANAALYRTAIVRMQHHAPTKAYVARRTEEGLSKRDIIRCLKRFIAREAYGRIMVDFRARMAVLKAI

SEQ ID NO: 360575 - protein, 409 aa, unidentified
MRIIGMDIHRVFAEAVVLEDGEIKRLGRIGMTRDHLEDFARTLLPTDHVVVEATGNATAVTEILAPHVARVAVANPLQVHLIAKAKIKTDAIDARVLAQLYGAGFLPEVWIPDAATLARRRQVTRRRQLVRQRVRLKSIVQSVLHANLIPPCPFADLFGGKGRAWLRAQYLPDDEREAVERHVEEYDRLSEALKGVERDIARAALADTNVTRLMTIPGVDMVVAVGLMAAIGRIDRFDRPDKLVAYIGLNPSVHQSGTGPAHHGRITKRGRSDARHLLVEAAWQTVRGPGPLHAFYERVRGKRGNHIAAVAVARKLVVIIWHLLTKAEDYSWVRPSLHAKKIRDLELRAGYPPRRGQKGASYDYNIPQRRRDERNRAQQAEGAYRRMTTGWRRSGPRSEPTGATNEERQ

SEQ ID NO: 360576 - protein, 330 aa, unidentified
MNHIGIDVSGKALSIVISVNGKHRKAQSYENTPEDHKRLVALIQKLQGESIVCMEATGMHHFDLAVALSRSETITVTVINPKAAHNFAKALMQRCKTDSIDADTLASYAERMPLVEWQRPSEEALALRALARRISATNKIKAQVKNQLGALMVTQETPEVILAQTKSLIGTLEEQIASFRINALNIVNRNRELREVFALITSMKGIAEASAIQLLGELLTMPDDLTVKQWVAYAGLDPKHFESGSSVAKKTRISKAGNRYIRQALYMPALVASRSEPHVAAYYKHLQEKRGLLKIQAICAIMRKILHAIYGMLRSKQPFDGCMFFRMETV

SEQ ID NO: 360577 - protein, 412 aa, unidentified
MNALFAGIDVSLAENKAVFLDSTGEDVATKLRFPNNALGSELFLHKTLELCSQLNPERLLFGLEATSLYGWHLAMVLNQAAQLAQFHPAVYLLNPRIVKGFKKSYPRVPKTDWADAWVIAQRLRFGQLPTPFRFDQRYFPLQRLTRLRVRLAKDITREKNYFLTYLFLKCSGLTTEKPLSDFFGAAGSALVTEWYSVEDIAATSLESLAQFLIDKSGNKFANPVEVARQIQVAARHSYRLPTAVKGAVNHILASTLRHIRFLEGQLHEVSEAIAHEMKGLDNPLLTLPGLGPVFTAGILSEIGSITNFGNDDDLAAFSGLTWNRKQSGSFQGEDSHLSGTGNVYLRHYFVEGANRVRMHDPVFRDYYQRKFKEATIHQHKRALVLTARKLVRVVFALLRDNRPYSPPGKAGS

SEQ ID NO: 360578 - protein, 341 aa, unidentified
MESIYYIGLDIHKKTIAYCVKRSDGVLIRQGTVFAERKALLEWISGLPGSWIGAMEATMFTGWVYDFLKPHALELKVAHPEMLKVITAAKKKNDQADAEKITDLLRVDLLPECYMAPEELRELRRILRYRNMVVRTAVGMKNKISGLLMEVGATYDKRRIHGKRYFNSLLERVEDVPPSVKELLALSRSNLELFTAVQKKLLKTLKDNNLIRQRVERLMSIQGVGEVLALTWVLEIGEPSRFNSSRQAISYCGLCSAQHESAGKQYHGPISKKRNRHLQTMLIEAAKLAPRWNDQLAMVHAKELARGNRNRATLAVARKLVKYLLAVDRKNSDFEPLQQAV

SEQ ID NO: 360579 - protein, 309 aa, unidentified
MDAIFVGIDVSKDTLDVCVRPSGEAFAVSRDAAGIDMLLTRLRELSPRIVAVEATGGFETEVAASLAAAGRPVVVVNPAQVRDFAKALGRRAKTDPIDAAVIAHFAEATGVEPRPLPDAETQALADLLARRRQIIAMMVAERQRNSRASRRMQKSIARLLKALQAELSRIDKDIDEAVRGSPAWREKEDLLASVPGVGPGTARTLIAELPELGSLDRRQIAALAGLAPWTRQSGKWRGRSFIGGGRATVRTALFMSAISAIRHNPALKAFRQRLIAAGKPKMVAVIAVARKLLTILNAILRDKTPWQNA

SEQ ID NO: 360580 - protein, 448 aa, unidentified
MSKSKTKKEKVKRISQLTVINPTAAGIDVSDTEMMVAYPISSEQLEIRVFGCFTRDLHSIANCLKENGATTIAMESTGIYWIPLFLLLQEYGFEVYLVNAKHVKNVTGRKDDESDAEWIQKLHSCGLLSASFQPDNMERTLRSMVRHRKNLVRTSSTYLNRIQKALELMNIKLHTIISDIDGKTGLLILEAILAGERDPEVLADLRDKRIKASREDIIKSLEAHWTEEHLFELRQCYQLYCTHRQMIDECDKEIEKQLIAQIASKNEGLIPDIQKVKRKATAKHKVPFNLTAYLKEILGVDVTEVCGISEISALTILSEVGKDMSKWKNEHHFTSWLGLAPNTRISGGKVISSKIMKKKHHAGQAFRMAANGLYNSKSPLGDYFRRIRAKAGAPKAVVAAARKLAIIYYKMVTNKEAFNPKALEEYRQKYKEKKINQLKRKIALLEAA

SEQ ID NO: 360581 - protein, 301 aa, unidentified
MEEVVTVGLDIAKSVFQVHGVDAEGRVVVQRKLTRAKLVPFFEKLPPCRIGIEACATAHHWGRRLTELGHEVKLMPPSYVKPYLKRQKNDAADAEAICEAVSRPSMRFVEVKSPEQQSVLVIHRTRMTLMRHRIELSNTIRAHLAEFGLIAPIGRLGLQGLIEIVRDEADERVPVNARICLKLLADQLDLVNRQALETDRLILASARASEVGRRLMAVPGVGPVLASAMVASVPDPHAFKSGRNLAAWIGLVPKQNSSGGKERLGGITKQGNRYLRQLLVVGALAVIRYAERHGSRRPWLV

SEQ ID NO: 360582 - protein, 381 aa, unidentified
MKKNSIARLQVTKSQIRRMAGKQKLTVGLDLGDRSSRYCILNEAGEAASEGELPTTKAGVDSLLAKMAPSRIALEVGTHSPWVSRQLRAMGHEVIMANPRKVRLITQSVKKNDRMDAEQLARLARVDPKLLAPIRHRGAEAQGDLAIIRARAEVVECRTKLINAARGLTKPMGERLKGCDADSVKESLADGHSEATQAIIRPLLKLVESITQQIQVYDQKIQEMEKRYPETKLLKQVHGVGRLIALSFILTLEDAERFAHSRDVGPYLGLTRKLRESGESQPELGISQAGDGLMRRLLVQAAHCILRKGAPDSDLKAWGMTKVQAGAGKKGSKKRKTKAAVAVARKLAVLLHRLWVTGEVYDPQYNRKAVEAAKGKKPAAA

SEQ ID NO: 360583 - protein, 320 aa, unidentified
MSVCSVVAGIDVAKAHVDVDVVGVEFAPRRFDNEADGHSAIASALKALDVALVVMEATGGYETSLACALQGAGLAIAVVNPKQPRKFAEAMGYLAKNDRIDARVLAEFGQTLARRQDFSRFLRPMDDVDQQWLAALVTRRRQLVAMMTSERQRLQITPKKLHPSIEAIIAAIKAQLDDVEGQMVGHVKEHFGQLDAILQSVTGIGPVASATLIAELPELGKLNRRQIASLVGVAPFAKDSGTSKGRRRVQGGRFDIRRVLYMATLTAAFRNPVFKAYYQRLTAAGKLPKVALVACMRKLLTTLNAMVKTGSKWDPEHHGA

SEQ ID NO: 360584 - protein, 340 aa, unidentified
MEKRYIGIDLHRNRFTCCIRLENERTYVTEWALEDLARFAKKLRSSDQVAVEITANTRLFYDAVAPQVQRVAVVDTNQFGVISRSVKKTDPNDARLLSLYLSKGLLPEVRMKDKERAQLASLTQTRDTLVKQRSALKNKINNLLSARGLNLAKEALSSEKKLAEVSALPFDEVVRIELRVLVEQIRSLNQSITELEKTIGEEGSKLEGHQSLASIKGIGPLTSAILLSVIGDIQDFPDEGRLASYFGIVPRVSNSNETERSGRIHKRGTKLGRTALVQSALIAARYSPYLKRFYEQVKARRGAGKAIIALARKFLGIIYRTLKNKWVFADFPNFVLAEEP

SEQ ID NO: 360585 - protein, 454 aa, unidentified
MSKKRGKRQKKAVDIDALEQINLNAAGIDIGGEEVYVAVPKGRDEESVRSFLTFTVDLHQLADWLAACGIETVAMESTGVYWIPLYEILESRGFEVYLVNARHIKNVSGRKSDVLDCQWIQQLHTYGLLQPSFRPREQICAIRSLVRHRDMLIKYRSAHIQHMQKALTVMNVRLTNVLSDITGVTGMKIIRSIVAGERNPEVLASYRHSSCAKSEPEIAKSLEGNYKREHLFSLKQALELYDFYDQQLHACDVELEALYQEFDLPDEPGTPPPDPRKTKRRKNQPYFDLSQSLYRMTGIDLTQVDGLDALTVQTILSEIGTDVSPWPTVKHFASWLRLSPNNKVTGGKVKQRGTLPSQNRANTAFRVAAQSLARSDCALGAFYRRIRARHGGPKAVTATAHKLARIVYFILKNRQPYHDPGADYYEEQYRIRAIRNLQRRASKLGMRLEPVGAT

SEQ ID NO: 360586 - protein, 350 aa, unidentified
MMIGVDYHPSFQTIAFFMEETGECGEQELNHSDGQAEKFYRDLKQRGTCVRVGMEATGYSRWFERLLAELGFEVWIGDPAEIKTKRVKKQKTDREDARLLLRLMRQDNFPRIWVPDPENRDLRQLLWHRHRLVQMRTRIMNQLQALAMNEGYRWKKKLFSEQGRAQLEKLWLAPWASRRRQELLELLDRLNPTIEELTAAVEREARKRPEVLRLMTHPGVGPLTALAFVLIIGTWERFPRGKQIGNYVGMIPSEDSSAGKQRLGHISKQGNSLLRFLLVEAAQAAARIHPDWRRRYMHLAMRRHKSIAKVAMGRRLAVRLYWMWRNGCEYSQSVEFGSYAGQLGTGHGGK

SEQ ID NO: 360587 - protein, 371 aa, unidentified
MKEKLRFLGLDVHAETIAVAIAEPDGEVRSLGTIPNRAESIRKLIRKLGPAEKLRACYEAGPTGYVVYWQLAELGVQCEVVAPTLVPVKAGDRVKTDRRDAEKLARCYRSGDLTAVWVPDEGSEALRDLVRAREAAKQDQMRARHRLSKFLLRSGQRPPTGVRPWTRPYLIWVAQLRFTQIAQEATRQDYLHEVEHMPRLEQAITEAVKLASPALQQVINDLQALRGIADISAVTIAAELGQVARFGSARQLMGYCGAVPSEDSSGKRTRRGGITKTGNAHLRRIVVEAAWSYRRPPCIWYGLRRRQESISEEAKEIAWKAQHRLHKRYMKLGAAGKDQRKIVTAVARELLGFIWAIGTRAETISKQQVAA

SEQ ID NO: 360588 - protein, 423 aa, unidentified
MKEWKEITHYAGFDWARDHHVVVIVNQQGQIVADFEFEHSVEGWKSFGEKTAGFANLAVAIETSQGAAVDQMLQRDYTVYPVNPAAAASYRQRKAPSGTKTDHIDGWSLADALRVDGQGWRALQPADELSTQLRLLCRDEVALIAQRTLLVNQLQQALVEYYPAALEAFEDWVSPATWDFVLEFPTPEALTKAGKRRWEKFLHTHRLWRPETVEKRLAIFSQADQFKASAPVTKAKSQLALSLCKLLRTLQQQLDQYREQIEALFKNHPDHDLFGSLPGAKKMLAPRLLAAIGSDPGRYGTFQVLQSFAGTAPISFESGKIHKARIRWNCDKFMRHTMHLWADCFHRVSPWGQAYYRKKRQEGMTHACALRCLGQRLLKILFRMISDKKSYDAELHARNQKKHGSWVLALIEKPAAQIGEQLL

SEQ ID NO: 360589 - protein, 347 aa, unidentified
MKFYIKQHKHYCGIDLHARTMYLCILDSKGQVKFHKNIKTSPNALMKEIKPYLDDLVVAVECMFSWYWIADFCDDNNITFILGHALYMKAIHGGKAKNDKVDSHKIASLARGGTFPMAFVYPRDMRSTRDLLRRRMHLMRKRAELLCHIHNTNTQYNYDQICKNLRYKSNRKLVDGRFADPSVQKNVDLDIQLINFYDDQLTGVEYYIKKHAKINDYESHMLLNSVPGIGKIISLVILYEIYNINRFPRVQDFASYARLVKCKAESGGKSFGTSGAKIGNAHLKWAFSEAAVIFLRGNPKAKTYVNKMTKKHNKGKALSILAHKLGRAVYFMLKRKKPFNMEKFLPA

SEQ ID NO: 360590 - protein, 385 aa, unidentified
MDIMYERCCGLDVHKQTVVACVLLPGSGRQPTKDIRTFGTMTADLLELGDWLTANGVQHVALESTGVYWHPVWNLLEGQVELSLVNAQHIKQVPGRKTDVRDCEWIANLLRHGLLRASFVPMRAQRELRELTRYRTSLIRERAAEINRIQKTLEGANIKLGDVASDILGVSARRMLQALIGGATDPVVLADLAKDKLRKKIPQLQRALKGQFGAHHRFLLAQQLAHLDGLDELIDQLGSEIAERVQPVQHVVERVDAIPGFGRRTAEIVIAEIGTDLSRFPSFKHLASWVGLCPGNNESAGKRMSGKTRKGDVWLRSALIEAAHAASRSKDTYLAAYYHRVAARRGKKKAIVALAHTLLTIIYYLLTRDCDYEDLGPECLNEHDR

SEQ ID NO: 360591 - protein, 398 aa, unidentified
MQNGQACVAGIDVHKKMLAVVVRWEREGQTGYDKHQFGTTQNEIVHLVAWLQHLQVAEVVMESTAQYWRPVWYGLEPHFRLHLVHPLKVRAPRGRKRDYRDAQRIADRWRSGDLEESFIPGAEQRQWRWLTRSRVQLQRMIGIIRNHIEGLLEEGGIKLTAVATDPWGVSGWAMLPLLAKGETDVKVLAAEARAGMRKKKAQLEEALAGKLNAGYRFLLKQRLEQVELLRRQIGEINEELARVMKDHVPVLHRLSQMPGVDLHAAQELLAEVGPGATAFASAGKFASWIGVCPGSQESAGVCYSHRSAKGNRYLRRLLCQIAWAAIPAKQSFFAGLFGRLQGRIEGQGAAWAVAHRIAKLIWLIMHQGVEYQEKGSAPLHPKILQRKLGRLLKEFANA

SEQ ID NO: 360592 - protein, 340 aa, unidentified
MSLVLQSLLPDPHSCQGTSPHQQGWDTKMAMLSFCGIDVSKDRLDVVVLPEGWFFSVSNGTAGWAELVVRLRPLTVSAIGLEPSGGYERGIIRALLAAGLSVRRINPNKLRQFARARGVLAKNDRLDARLIAEYVAIMPTRVVQRDAAVERLAEIVTMRRQLCDEHVAAENQAAHLEDAMLRRLSKRRQMRLEADIRLLDKRLAEMVAANVALAQRYELLTSMPGVGPVLAVTLIALLPELGKMSRKQIAALVGLAPYDFDSGKLKGHRSIYGGRMPVRNVLYMAALSASRYSPALKAFHNRLADADKKSKVIIVAVMRKMITTLNAMLRDNAVWQPRSA

SEQ ID NO: 360593 - protein, 433 aa, unidentified
MTGEGAGDIPKNPNPIPTRKEVFPMKLFVGIDVSSRDLQCCLMDNNGDTLKLFAAENNLNGATHLRDQILTAADKLSCQEVHIGMESTSVYSWHPGIFLNEDEQLRGLGAKVYIINPKLIKKFKEAYTDLDKTDNIDAWVIADRLRFGRIPPTIVMEKQYIALQRLTRMRYRLTQNLTKEKQHFLQNLFYKCNAFSTEVESSVFGNAIMNLFLEKYSLDEIASMDTAELADYLQKRGKNRFRAPEEVAACIQKAARSSYRLSKCVEDSVDIVLATAIESIRTFTAQIKQLDKAIARIIDGIPNTLSTIPGIGPVFTAGILAEIGDIHRFNDQAAFAKYAGLAWSRYQSGKFEADETNLIKSGNRYLRFYLVEAANSVMRNEPEFRSYYLKKYHEVPKHQHKRALVLTARKLVRLIDALLRKDQIYTPRRKVGN

SEQ ID NO: 360594 - protein, 415 aa, unidentified
MALKIVYKICCGIDVHKTFVVACIASTNSKGVTTYESHRFSTYTRGLKSLLQWLISRNCKDVCMESTGKYWIPIYNVLENDCTIVLAHPKYVKAIRGKKTDKKDAKWIADLFKHDLVAGSFMPPADIRQLRDLMRYRFKLTCFRSSEKNRLQNCLTVSNIQLGNVVSDTFGKSAQAILDKILENPADTSFDLEPLVYKSLKKKIPELRDAIDGYITPEQAGKLKVIKTHYEDLESRKAELEELILALAAPYQQELAILQTAPGISSTFTAIGIISEIGANMEAFPSAKHLCSWAGLTPTNNESAGKKKSVRVSKAGCYIKPLLVQCANAVVTSKKHPEIRNRYLRLKKRRGHKKAIIAIARMLLTALYHMLKNGKNYNAKLYKKSDLPPVEREITVEQAILIARNQGYKIKSATV

SEQ ID NO: 360595 - protein, 345 aa, unidentified
MDHIGIDVHKRESQICIETGEGEVIEKRIRTERERFTEIFGKRPPAKILIEAMTESEWVARCLEDLGHEVVVADPNFASMYATRSRRVKTDRRDAMTLADACRLGAYRSAHRASDRQRHVRAELAVRDALVRTRVKCVALVGALLRRHGVHVPSGNVDGFVGRAEGQGMADEQRLEITPLLTMIRTASAEISAADRRIAAIAEDNPVIGRLRTAPGVGPVTATAFVATLDAWERFAGPHEVEAYLGLTPSEKSSGEKQHKGRISKAGNSRARWLLVEAAWAILHSRRDDTEPLRRWARRVALRRGTKVGIVALARKLAGILYAMWRDGTVYEKREGRTVEETAMV

SEQ ID NO: 360596 - protein, 407 aa, unidentified
MELSALYKCVIGLDVHQSQITACALIQQPDGGVRIEQRQFGGFMRDRRELAQWAASLNPDEVVMESTGIYWKSPYAALEAVGIRAKVVNARHVKHVPGRKTDVGDAHWLAMLARAGLLRASFVPPAALRELRLIARQRQKLVGQLASEKNRLHKVLTDSGIRLGVVVSDLHGQSARAMVKAIIAGHAPQQVIKLASRRLKASREEILDALQGELSASHRFVLDELMRHIEEIEARISRFDARLLEGLESERDTLALMQTIPGIDQIGAAMLLVEIGADMDDFGSADRLASWVGVCPGNNESAGKRKSGHTRKGNPYVRRLLCEFAHAASRTTSMFKSKFQALVVRRGYKRAIIAIGHKMLRTLFFMLKRREHYRDCATDYEALSVQRNAPRWIKALTRFGFITPASA

SEQ ID NO: 360597 - protein, 414 aa, unidentified
MGQWGARGVVSLTDRTSIDGNTKVDKAQTAWAGIDVGKTHHWVCVLDAEGNKLSSMKVANDQTEITATIATVGALADRIVWAVDIIGAPSAMLLALLIQAGQSVRYASGRVVAAMSAAYSGEGKTDAKDAYVIAETARIRRDLTIIDPGTDLVRNLELLTGHRADLIADRVRMINRLRDVMTSVFPSLEREFDYSSCKGALVLLTGYASPERLRRVGETRLAGWLQRRRVRNYAAVAARAIAAARAQSVTLPGQEIAAAMIAELATNTLALDQRLTELDAQIAATLDEHPQAEIIQSMPGFGPILGATLLVAAGDLAAFPSAGHLAAAAGLVPVPNDSGRRTGNLHKPRRYNRPLRHVFYLSAQTSMMREGPNRDYYLKKRRTGRDHTQAVIALARRRVDVLWAATRQPMLPAR

SEQ ID NO: 360598 - protein, 428 aa, unidentified
MLKQNTEPDPAPDFAAFLAIDWADEEHAFHLQVVGQSKIETGTLEQKPHVLGPWVAKLRERFGGRPIAVGLEQSRGALIHGLMSYDFLVLYPIHPTTVAKYREAFKSSGAKSDPLDAGQILEILTQHQDRLHRLNPDTVETRLLGRLVEDRRKAVDLRTTHVQALGANLKEYYPQALELTNDNLSSRLAGDLLIKWPTFEDFQQAKPSTLKRFYYGHNVRSPEVIERVLTLAQKSQALTTDPAIVESGRRLTQMYARLIQALHPAIADYDQRIQQVFNAHPEAKLFRDLPGAGPALAPRLLAFFGTDRSRYAAAFNVQSFTGIAPVTKSSGKSKVVYARAACPKFDRQTFHEFSRLSVTRCQWARNYVQYYTDKGKKYHTIVRALAYKWIRILFKCWQERTPYNEDKYLETLKLRGSIFATWHLQKKT

SEQ ID NO: 360599 - protein, 345 aa, unidentified
MTDPPTFFVGIDWSSTSHQVCIINAAGDVLAEKAFEHSGTGLNDLCLWLLARAGAEPGRIAAAIETCHGPVVEMLVERGFQVFAINPKQLDRFRDRFTVAGAKDDRLDARVLADSLRTDTRCFRHLLPDDAVVIELREWSRMAEDLQQERIRLSNRLRDQLWRYYPQMLDLGEDTDAPWRLALWQLAPTPERARRLRPGTVADLLRRHRIRRFDADAVLDRLRQPAVQVAAGTVDAARAHIGQLLPRLRLVHRQLDEALARLDALCARLTESGGNDTPGQSGEQHDAAILRSLPGVGRIVLATLLAEAGDVLRRRDYHGLRSLSGVAPITRRSGKHTIVQMRGIM

SEQ ID NO: 360600 - protein, 455 aa, unidentified
MAKRRRKRAGRVNVLHVVQSNAAGIDVGATAIYVAVPPDRDVEPVRHFDTFTEDLHKAAKWLKASGIESIAMESTGVYWIPVFQVLESYGFDVVLVNARHVKNVPGRKTDVQDCQWLQYLHSVGLLAGSFRPTEDVCAVRSLLRHRDNLVKMSASHVQHMQKALTQMNVQIHNVISNITGVTGLAIIDSILDGERDPQKLAALKDRRIKAEQATIAKSLQGDFRSEHLFALKQALQAYRYYRQMISECDREIEGHLNDFDSRINPDENPPPPSTSQHRKPQGNEPNFDLRTQLYRILGTDLTQIDGVNLLTAHVFFAEVGPDLSKFDNADHFCSWLALCPNNKITGGKILSSRTRPGKNRLAHALRLAAHGLYNSHSYLGTYFRKMRARHGPAKAITATAHKLARIIYHLVKTGKQFDESVFEHQEQLHRIRLERRLRIQAKHLGFQLIPCHQQA

SEQ ID NO: 360601 - protein, 448 aa, unidentified
MSKLHVGLDVSQLSVATRFVLDDGTEPVKGFSFEHNPAGVDKLVAKINTTAEELHIDQVMIGMETTGLLWWHLSEALRNCVELEHLHPQVYAINAKLVAHFKKAYVEMDKTDPGDAFVIADRLRFGRLPKLTEPDERYLAIQKLTRHRFHLMHSLAREKNRFLTHLFLKFSGFCQEEPLSDPFGAASSALLTEFLSVDEIAQMPIEDLTDFLVEKGKSRFADPEAIARAVRRAARNSYRLSKCLADPVNIVLAMTMENIRFFEKQIGSIDKPIARELAAFPGAQVLLSVPGLGPVFVAGIIAEVQDVNRFDTDAQLARFAAIVWKKNQSGAFEADDTPMMHSGNEYLRYYLIEAANSLRMHNEEYTAYYRTKYREATTHHHKRACVLTARKLVRLVHTLLRKGQLYQTPDQRKEAPAVLPAGMTPGELARHVVRRRQAKGRFRVHLDH

SEQ ID NO: 360602 - protein, 417 aa, unidentified
MAKLKIVHPVCCGVDVHRDFVEVCVASTNDKGVTSYNRKRFSTFSDELRTLREWLTEQNCKDVCMESTGKYWFPVHNILEDTCNVVVSHPKFVKAIKGKKTDKKDAMWISDLFKHDLVRGSFIPPHDIRQLRDLCRYWCKLTSYTTGEKNRAQNCLTVSNFKLDSVFSDVFGKSATAIIEHMLEHPGEQFDVAPFVDGRCRTPIAEIQRAVDGSFNEFQSGKLKIIREHMIDLDKLKAELEHLILTLAQPYTRQIELLCTVPGISEVMTAIRILAEIGTDMTVFESSKHLCSWAGLTPQNNESAGKKKTTRIGKAGEHIKPLLIQCALVACNPRSKKQPEILNKYQKLKKRRGSKKARVAIARNLLTAIYQMLLKDEEYSPYVAPAVESIPQERVMTQEQALAFMRAKGYIIQDEPA

SEQ ID NO: 360603 - protein, 345 aa, unidentified
MSEWYEGRQIVGMDLHRRRSVLVRMTEAGERLETVRISNDPDYLREVMTRAGEAPEVVLEACYGWYWAADILAELGATVHLAHPLGVKMFSYRRVKNDERDAADLADLLRLGRLPEAWIAPPATRELRGWVRHRAKLVGLRTSLKCQVHGILAGAGVTVPMSDLFGAAGQQLLASARVAVESRSRIDSLLRLITALDFEVELFAKLVAGRLRAHPGYQAIQVIPGIGPVLAGVFVAEVGDITRFGKPEQLASWAGLTPKHHESDTTVHRGRITKQGSRLVRWAAVEAVQRLPAHTRIGGIRDRVAARRGRNIGVVAAARELTELVFYGLRDHHIRALPDRTPETA

SEQ ID NO: 360604 - protein, 421 aa, unidentified
MGRTGRGNQPAADTTTGVPVCGIDLGRYTHHVVVLDGAGSAVENRTISHDQRGLAVLTGLLRARGDRPDRPIPVAVESPHGLLVTDLRRDRPVYALNPLAVRRYRERISNSRAKSDSADAYTLARLLFTDRDQHRPLPAVSAATRQVAALSLAHHRQVHRRTSAQLRLAEHVIGYYPAAAAIASRYEERFAHRDVRALLRAAPTPGQGRTLTRADIIALLHSAGRRRQLEDRADTLRADLRQDRWRDLDIEETAGTITLLLVEELDRSLDAEQSLQAALEAVFAAHPLAPTLVSFPGLATVLGARLLTHLGDQIPDQFPTPAALRAYTGMAPVTIASGTSLSAVVRRTRGNTALRDTCRNWAFSALASPGARQLYDHRRAVGDRHDAALRRVGYRLVSCLWHCLTHGRHYDEDLAWPSGKG

SEQ ID NO: 360605 - protein, 404 aa, unidentified
MWYTGIDWADEHHDALTIDEKGQQMGSIRVDHSPQGFAKLDNFLMQIIGSAPKEHMACIIETTHGLLILHLLEAGWPVYPVNPRTVDRRRSASGAKTDLIDAYLLAKTGRADFADLHRLTPDSEKVAELKQLTRDQDTLIRTQTRLVNQLTACLKAYYPVALELFSKLQQKSTLVFLQAYPTVETARAASLKDIQQQLKHTRHPHPADAAARVVELLHQPQLQADVVLTRTKSRLMLALVSQLLPLIEQLADYDKEISTLFLTHEDHAIFASLPRAGQHLAPRLLAEIGDDRERYQDAHSLQALGGTSPVLYQSGMYSKAHRRLGCIKPLRNALHQFAWQSTQSEAWAKDYYQRKRTEGKSHTVAIRALSNVWVRIIFAMWTHREGYQTATFELAQQQHARRAA

SEQ ID NO: 360606 - protein, 322 aa, unidentified
MHPFYLGIDVAKAKLDCALRLPEGKIRHKVVDNTPAGFAALRSWLAKQGADAVHVGMEATGIYWEAVAEFLAGVEMITVSVINPAQIKAFGASQLVRTKTDKADAKLIAQFCCERRPAAWQAPTPAEQALRALVLRLDALQTMRTQESNRLEVARAAVQAGITRHLEWLDQEIARLIKAIHDHIDADPTLHDKQRLLDSVPGLGERTIAVLLAFYGHLARFANARQAVAFAGLDPRQHESGSSVKAKPRMSKVGHAFLRKALYMPAVVTLYKTDWGKLFRERLAAAGKPPMLIIGAMMRKLLHVAYGVLKSGKSFDPAKHGA

SEQ ID NO: 360607 - protein, 393 aa, unidentified
MVNIIYVGIDTSKDYVDTAVIGLRGQELMATTRYSQNQEGFEELLGNARELERITGGELLFGIESTGIYHVPLYDFLTTRGYHVRVFNGLEIRGMRKTKIRRTHTDPIDARMIAKALRICEKPDKRPPLPIELRGLREFCRIRKRLLAKKTRIKNQLIRDLDLVFPGVTNMFRDKLSKSFTKLMERASTPKQIQRMSIEKLQKYIPLSKAKKLKAIAEKSQGALAFNKAMKFEISSLIKEGKRVQKEIKKIERQIESEFTKQSSPIRSIIGIGQVTSAVILTEFGDISKFENAKSLVAFAGIDPVIIQSGKRRFEYHISKCGSPQLRAALFQASFIGSQKNPVLKAYYDKKRSEGKRHKDALICCARKLCHIIYSVCRNNKPFYVPSNIISEN

SEQ ID NO: 360608 - protein, 340 aa, unidentified
MQISTIGLDIAKNVFQVHGIDAAEKVVVRKQLRRGQVLKFFASLRPCLVGMEACATAHQWARELTKLGHEVRLMPAKDVKAYVKRNKNDAADAEAICEAVRRPTMRFVRAKSAEQQGRLMQHRTRDLLLRQQTQVINALRAHLAELGIVAAQGREGLKQLLTIIADERDERLPIDARASLIVLAAQLQALHTMIGSIERRIVVQHRANEASKRLECIHGIGVIGASAITATVTDPSAFRSGRDFAAWIGLVPRQDSTGGKQKLGPISKQGDRYLRRILVVGAVSVLRRAKLNPEKYPWLTQLLARRPFKVVAIALANKMARIAWALLANGSHYRPRLATT

SEQ ID NO: 360609 - protein, 344 aa, unidentified
MTYYAGLDVSLRSVNICVIDDQGELIAETKLVSDVQDIVAYLDALELYIESVGFEAGTLTQYLSYGLQSAGFEVICMEARQVKGALSAMRNKTDKHDARGIAQILRSGWYSRVHVKSMESHHIRMMLSSRRAVLSKCVDLENEVRGLFKIFGLKLPPKLGHGPFDDTVRDIIEADEALSLALLPLLEARLALYRSFRELDNRTRKMAIADPVCQRLMTVPGVGFITALTFKAGVDDPSRFKHSRTVGAHFGLTPRRSQSGEMDNSGHISRAGDADVRSALYTAANAMLTRSSRWSSLKAWGMKVAKTRGHRRAVIAVARKLAVILHRIWIDDTQFRWGTEGARS

SEQ ID NO: 360610 - protein, 343 aa, unidentified
MEQYIGLDVSQKETAISIRQGGSRIWRGKCVSDPTVLAAIIRKQAPHLKRVVFETGPLSTWFYHALSAEGLPVVCIEARHAQKILNETLNKTDANDADGLAQLAEAGFYKAVRVKGFDAMLTRTLIGVRKQVAGMSIQLSNQIRGVMKTFGLIVPRSKGQVFEGHVRGMLAGNDNLAKVILPLVDAWRDIRKHVANLDRQLLAAARNSKAAKLLMTIPGIGAITSLSFSSAIEDPDNFKRSRSVGAWLGLTTRRYQSGEVDYDGHISRRGDSHLRSLLYEAAIVMLTRTKSRNDSSLKDWGLRLRERLGVKRAAVAVARKLAVIMHRMLKMGEPFNRLVVVPA

SEQ ID NO: 360611 - protein, 356 aa, unidentified
MTNVKTNFTEQTIYVGLDVHKRSWNAALFLNDHYLRNVHQPPSPQALWKFLQTNYPGADYVCAYEGGKFGYWIQRQLSGNGILCIVVNPADIPSTHKDEVSKTDTRDARAIAMALQCGQLRGIYIPTQQQEADRSLVRHRKKIWRDLVRCKNRIKGFLDYTGVELPDKFSNSNWSRNFLQWLSAIKFDYVSNRVTLDYMIREAELLRKELLHISNDIRKLMRSSAYKKMYYLLRTITGIGPLTAALLITEIGDMKRFSSFYQLNSFIGLLPSEHSSGEKELKGRLTIRRHRQLRSDLVECAWTAKRTDPALSLFYSDQLKRGKESKLIIVKIARKLLSRIRCVWLTEKPYERGIMK

SEQ ID NO: 360612 - protein, 311 aa, unidentified
MNTQDCFIGLDVSKDTLEVAVRPTEERKTFANQEDSLSLLIDFVKPFSPRLIVLEATGGLEKAAVCALAVAGLPVVVVNPRQVRDFAKAKGILAKTDKMDAGVIAQFGEAIRPEIRPLKTEEAQKLDALLSRRRQISQMITAEKNRLQSAPVWTRKDIQSHIAWMQKALDQFNQDLDRMVKESSIWRAKDEILQSVKGVGPVLSVTLISQLPELGTLQGKKIAALVGVAPLNRDSGKFRGRRTIWGGRAEVRSVLLMATRIAIRFNPVIRAFFERLKKAGKIRKVAETACMRKLLTILNAMMKNNTRWQAA

SEQ ID NO: 360613 - protein, 345 aa, unidentified
MSNNIHFSCICGIDIAKKVMQVFKVTSDGVVTNTSVSRKDFLEHFRNIPPALIGMEACATSQHWGRELQGLGHTVKLLSPKAVKPYVKGLKNDRNDAEGIYRALIMGVREVSIKSTAVRDLSLLQTMRAKRQRDKVATINHIRGILAEYGLVMGKSVRAFLSNAGTLIARLKESETTSQLVISELEKLLKEVKEIVSRIEELESSTKKIASENKNYDLFRSAPGVGPITAAMMVVLLCNPTVFKNGRDFAAYLGLAPMSFGSGGRNQVTGIPSKYRCHNEARSLLVQCAHSITRLKYKSDWVASILSRKPKKVAIIAIANKLARQLWVMAKKGDKFEKRLVLAAV

SEQ ID NO: 360614 - protein, 351 aa, unidentified
MKITRIGIDLAKHVFQIHGVDRAGMKRVSRQLKRAQMMAYFQKLEPCLIGMEACASAHHWARTLMSMGHTVRLIAPQFVKPYVKGNKNDANDAEAICEAVSRPNMRFVPIKRVEQQDIQALHRIRSELVHQRTAKVNQIRGLLAEYGLAVAQGVANLRGALPCLLEDAGNALRREFRVLLMGLREDLVYLDERIKRQDEAIVRLAQENAEARRLMQLRGIGPITATALVASLGSGKQFKRGRDASAWVGIVPGQHSSGGKEKLLGISKRGDVYLRTLLIHGARSVVKTCKNKDDALSRWVQRLCSRRNKNVAAVALANKTMRMAWAMLTSGADYDPRQGVKAAGLADGQPA

SEQ ID NO: 360615 - protein, 400 aa, unidentified
MIDTGDIDVYLGLDVGKGEHHATAVTPAGKKAFDKRLPNSEPKLREVFAKLQARHGTVLVVVDQPASIGALPLAVARDMGCEVAYLPGLTMRRIADLYPGEAKTDARDAFIIADAARAMPHTLRAVELEDETIAELEMIVGFDDDLAGEVTRVGNRLRGLLTQIHPHLERVIGPRIQHPAVLTLLERFGSPAQIRKAGRRRLVTLIRPKAPRMAERLVDDIFTALDEQTVVVPGTDAAALIVPSLATSLQAVLDQRKVLACRIEELLEAHPLSQVLTSMPGIGVRTGARILIDVGDGSNFPSAAHLAAYAGLAPATRNSGSSIRGEQPSRRGNKQLKRAFFLSAFAALADPASRTYYDKKIAQGKHHTQALLCLARRRADVLFAMLRDGTFYEPQPTPTG

SEQ ID NO: 360616 - protein, 470 aa, unidentified
MKYKQRRKDTWSKRRGPLSLLERIQPDAAGIDCGEKSHFVAVPPDRDAMPVRAFRTFTPDLHQLADWLVRCGVKTVAMESTGVYWIPVYEILEQHGLEVVLVNARHVRNVRGRKSDVLDCEWLQQLHSVGLLQASFRPAAAIVPLRSYLRERGILVEEVAARIQRMQKALTQMNVLLHTVISDLTGATGLKIVRSILAGERDPEVLAAHRDSRCHASREEIVAALTGNYRAEHLFSLRQNYTAYQFHLQQIGECDSAIEALLNTLAAQQPQPSAALPPARRKSNPKGHEPRFDIRTPLHRLTGGADISQIDSIGAQAGLQLIAEIGTDMSRWPSENHFTSWMTLAPNNKVSGGRLLSSRTTPSANRAAVILRRCAMSLARTPTALGAFYRRLAARTSKPTAITATARKLAVLVYRVLSGKLIYNDPGAAAYHELNRTRELKSLRKRASLLGLELVDRCTGAIVLKPDTVS

SEQ ID NO: 360617 - protein, 345 aa, unidentified
MELHTIGIDLGKTVFHLVGLNLRGEVVVRKKFSRKQLLHFTANRQVNLIGMEACGGSHFLGRALQEQGHEVRLIPAQYVRPYVKTNKSDYIDAEAIAEAVARPTMRFVPIKSDDQLDLQSLHRVRERWVTRRTAVINQIRGLLLERGITLRKGRCHVDAALPGILEDATTKLSGALRLLLAQLKLELDHLDMRIDEADGVIKKTAGENEACQRLIAIPGIGPVTATAVIAAIGNGAAFRKGREFAAWMGLVPREHSTGGKQKLLGISKRGNSYLRRLFVQGARAVLQQRAKQSSGLSAWLAQLTSRTHRNVAGVALANKLARIAWAVLAKNEAYRAPMLAGATTT

SEQ ID NO: 360618 - protein, 417 aa, unidentified
MKCFVGLDVSSTKLDVCIMLSDTSTPVTASLSNDLSGATEIKNHILDLNHTYHFERIVIGMEATSLYSFHPAMFFHEDSQLKELHVEIMVEQPNKIKKYRDAFEENKNDTIDAFYIADYFRIERFSPSFLKEEKYMALQHLTRTRLQIIEQLTRTKQHFIENIYYKCNTLAYQFKKEELSTNLWSSTMMTLITDEMTLDELANMPLQELADWLQQLGKGHFKDSEKLAQTIQAAIRGSYRLSKLQQDSVNVILGLLAREIRNLEKMIKEIDKAIEDMVETIPEYQCLTSIPGVGKVYAAGIIAEIGQIERFKDHPQVAKFAGLNWREKQSGNSNSQHTSLVNRGNRYLRYYLVEAANSVRRYDDEYKDFYKKKYHEVPKHQHKRAIVLTARKFVRLVVVLLRNHQLYTPPRRLMEDN

SEQ ID NO: 360619 - protein, 346 aa, unidentified
MNITTIGIDLAKNVFQVHGVDERGKAGLKKQLKRAQVLPFFANLPPCLIGMEACGSAHYWARKLNELGHTVKLMAPQFVKPYVKTNKNDPADAEAICEAVSRPSMRFVPVKTGEQQAVLSLHRAREGFVKARTAQANQIRGLLAEYGIVIPVGIDNIVKRLPDILEDGENNLPGVFRQLLQRLGEHLKELDRQVDELNEQIQLWHRENAASRKLADIPGIGPITASALVASIGDAKDFENGRQLAAWLGLVPRQHSTGGKQTLLGISKRGDCYLRTLLIHGARAVIRVSERKVEQADSWLTRIVDRRNKNIATVALANKNARIVWALLAHNREYQSDYVPVVATGA

SEQ ID NO: 360620 - protein, 412 aa, unidentified
MNRTTQVQDSAEKSVMYMALDVGNKTWVAAFATDLRSKPRVRVIKATAEKDKRAVLLDEVAAARAALGAESGTAVRSCYESGAEGNWLHRWLQAQGIDNVIVHPNSVGSQRRGKQAKTDRIDAQTLLGHLVRDHRGDATEPLRKVEVPPVEAEDMRAFTRGLADLHKQETILHNRLQSLLRSQGIDEAYHAGLAERLPELVAGDGRPLGPWLRLELERLCEQLAWTHGKIGEWEAERLRMVTEPETELEQKAQMLAGLRGIGPVAATVLVFEMLGWREFKNGKKVGSFLGLAPTPHASGTMDRDLGISKAGPSHLRALMIQLAWAWLRYQPDSQLSRWYQAHVGGTGKRSKRVAIVAVARMLAVALWKYAKFGEVPHGALEKTPLQRVRMAPVRITRRRTASTRRTRQGKAA

SEQ ID NO: 360621 - protein, 357 aa, unidentified
MTTYYIGADVHSNSTDLAIEKNKKIMARHKIPTTVPALSKVLDSLKGKKHLVIEESPMAGWLYRNLRQKVDTLTICDPRRNKLIDSDGDKDDKIDAAKLACLLRGNYLRAIYHSDDDHRTELKHWVNLYQDRIRDAVRNINKLRARCRMHGISIPRAVLRNPSGRNKWLSDIKHPVLAKQLNLLWIGYDATVRQVVMARGQLSVFGRKYDIIKLWGKLPGIGLIRATTLFAYLDTPWRFKKKNKLWKYCGVGLQRTTSGTDKKGRPKPAKLQLPWAVNRTLKNAVLGAATSAFNQKDNLFRSYYERMVQNGIMPGNARHAAARKLLTVMWAMWKTNSRFDENLCRRSVAPSATALSR

SEQ ID NO: 360622 - protein, 406 aa, unidentified
MQVVYECCCGIDVHKKMIVACLNQGGKQELRQFGTMTAELKDLRDWLLQNGCEMIAMESTASYWKPLYNLFELVGLNAMVVNAAHMKALPGRKTDAKDAEWISDLLRHGLLKASFIPDREQRELREISRYRKSMVEERARELNRLQKMLEGANIKLDSVVRNINGKSSRRLLDQIIAGRTLTEDEVSALLHGNMRKKLDQIILAIDGFATPLQRRLLAQVVDHIDDMTRRISDLDTLILDYMKQYEQAIAAIDALPGIARRSAETILAEIGVDMSRFPSAAHLCSWAGLCPGNNESAGKRYSGRITKGNQALKTALVECAKAARKVPDSFFNAQYQRISIRRGKNRATIAVAHSMLIAIYHVLRDGVPFVDLGSDFYAKFNRDKKIAACLKKLQDLGWQPTATAPV

SEQ ID NO: 360623 - protein, 366 aa, unidentified
MKKISTVQVFGNEIFKEQKLTIGVDLGDHWSCYCVLDEAGKILLEQKVAMTPEAMKRTFAKIPQSLIALETGTHSPWVSRLLTELGYKVIVAHAQKVQLITKSSRKDDRHDARTLARLARIDPELLGPVRHSSAQAQIHLTVIRARAELVRARTALVNSARGLVKSYGQRLPKCGTQQVSRELGAGLPAELREVLEPLLKEVESLNERIQEYDERMEKIAKESYPHVELLKQVKGVGTQIALTYVLTLDDPHRFAKSREVGCFLGLKPGRRDSGESQPQLHISKEGDRYLRTMLVQGAHYILGPFGEDSDLRRWGQKLSARGGKNGKKRAVVAVARKLAILLHRLWVSGEVYEPLRNSQKAMSAAA

SEQ ID NO: 360624 - protein, 462 aa, unidentified
MYIGWDWATETHDVTVMDNTGARVARWEFTHTEEGIARTLAKLAKYGSPADLPVAIETTRGLVVDRLLQAGHPVVPVHPNAFHAMRPRWGASKAKTDAGDSLKLADYLRTDGHFLPRLEPTEQATMELQALTRQRADHVAARIAAVNQLAALLDMHWPGGKAVFASLDSDIALAFLDRYPTPASAAKLTAGRLETWCKRHSYTGKRPGSVLIERLRSAPRPASRLGESVIEQLVGVQVQLVRSIRATIRVLDAAIADAVASHPYAPLLATMPRIGTTNLGQIIGEIGPILERSRTSEQFIAETGVVPVTRASGKSRVVSFRHAANRRARLAIVGYADEPARQRLGSEDLQRRASGPQTPSPRRPHPRPRLAARDVGLLARRNLLRPRHPPSQQQDQTRSRGDSGGIEVDSGNSQGLIRMGRREAGSRPVVGVREQSAIGAQRTRARSVRTAVRHGADPASLR

SEQ ID NO: 360625 - protein, 315 aa, unidentified
MSAACFVGIDVSKDHLDVHVRPQGDAWRAANDDAGIAALVERLAGLAPGRVVLEATGGYQNALVAALALAGLPVVVVNPRQARRFAEAVGRLAKTDRIDAATLAHFAEAVPAQPRPLPDPAAQEFRDLLARRRQVLQMRLAEQQRLPGATRRTRPAIARHLKFLERELRRLDDDLGAAVKASPAWRERDELLQSVPGVGPQVSRVLLAELPELGRLPGRRLAALAGLAPFNRDSGRCRGRRRIFGGRAVVRSALYMAALVAKRHNKALAAVFERLVAAGKAKKVALIAVARKLLTILNAIVASGTPWDEKRAARA

SEQ ID NO: 360626 - protein, 407 aa, unidentified
MRLFVGDDWAEDHHDVELMDAAGRVLARKRLPEGAAGMARLHELTGQHLGEDAEDAEVVIGIETDRGPWVAALVAAGYVVYAVNPLQASRYRERHGVSGAKSDRGDSHMLADMVRTDSHQLRAVAGDSAEAAAVKVLARTHKTLIWERTRQVQRLRYQLREYFPAALAAFEDLDAPDALELLARAPDPARARRLTRAQVSAALKRARRRDIPAKATAILAALRSAQLGQPEAVTAAYAVTARSLIAVITVLNEQVKTLQGQVEAVFGRHPDAEIYLSQPGLGPILGARVLGEFGDDPHRYASGKARKNYAATSPLTRASGKKKVVAARFIRNDRLTDALMAQAFTALSTSPGARALYDAERARGTEHNPALRKVANRLVGILHGCLKTRTLYDEATAWPHHENRLAA

SEQ ID NO: 360627 - protein, 444 aa, unidentified
MSDSLPSVTTEREWAAFAAIDWADQKHFWRLVPAGSQTGEQGELENTPEAVEIWARALEQRFGGRPIAVCLEQKRGALVYMLAKYAHLVLFPVHPTTAARYRETFCTSGAKADPSDTASLLDLLVRHRERLRPLEPDTAQTRLLQLLVEQRREVVDQKTAQSNRLTDCLKLYFPQVLRWFDDVASPLVGAFLEHWPSLQDLHRTRPDAMREFFHEHNCRGEAKIDERIAAIYQAIPATRDEAVLEAGVMNARGLVAVLATLRDNIAKLDRRIAQLVADHPEAALFDSLPGAGAALIPRLIAAFGTRRERYESAYQLQCYSGIAPVKVASGRTQLIRFRRACPKFLRQTFHEYALHSIQKSEWARAYYQLQRDRHKSHHAAVRSLAYKWIRIIFRCWKDRKPYDEAIYLQSQRRRSAMLGADVASVTAAGWKKVAGFNKFSAISS

SEQ ID NO: 360628 - protein, 330 aa, unidentified
MSGFVGIDVAAKTFDVVVRIDGKANKVEQFSQTPDGHAAVVRKLQMLAPELVVMEATGIYYLDLAVTLTRANLPVSVINPKSFHHFAAMKLNGNKTDAVDAALLAEFAQCMSPRLWNAPQDELLGLRDIGRQLNRLTASRTQAKNRLHALTSKSMTLPMLIEDEQDGIEQLERRIKRLTQAALALITGNATLAAHFSHITAAKGIGETSAIAILAELCVLPSTMKSPQVSRYAGLDVRHTQSGSSVNKPARLSKAGNVYLRAALYMPAMSAVRHDVRAKAFYEALTGRGNKKIQAQCAVMRKYLTGVWACMQTQTAFDSTLLFSEQHIKN

SEQ ID NO: 360629 - protein, 330 aa, unidentified
MIDTPPSSSQPVCSPFIGIDVALDKLDLARSDTDQLLTVANDAGGIRQLVDLLVGLRPTLIVVEATGGIERPLVDALLDAGLPVALVNPGHVRHLAKGVGILAKTDGIDARVLMHFGRLAAPRLTQKRSANQAELDALVTCRRQLTHVRTEQTNRRSRTGSKAALRAIDAVLKTVAKQIEELDRQIRKLIESDDDFNSTDRLLQSVPGVGPVLSSTLLADLPELGSTDRRQVGALVGVAPFNDDSGRHKGRRAIRGGRTAVRGVLYMATLAAIRFNAVIRTFARRLRAAGKLKKVVITACMRKLSTLLNAMLRDRLTWDQLDVVKNLQTA

SEQ ID NO: 360630 - protein, 321 aa, unidentified
MTQAVLGIDISKKKYHAALLRGGKFRDNSFSNDEEGFGKLAAWLDKQEVERVHACMEATGAYGEELAVFLCSRGHRVSIVNPACIKAYGESKLTRNKTDRSDAHLIAHYCESEKPGAWTTPTAEARQLQALVRHLDALSEMRVQEMNRLSSGVKEHLVIDSLKSHIEYLEREIEKITHQINDHIHKHPSLKENKELLTTIPGIGEDTAIKLMAEIPDVNRYTSARQLAAHAGATPRRHESGTSVKRASVMSKVGNVRLRKALYFPAMTAKRFNPIISRFCKRLEQRGKTKMAVIGAAMRKLLHQVFGVLKSGKAFDPNYGS

SEQ ID NO: 360631 - protein, 399 aa, unidentified
MAQPILWAGVDAGKAAHYCVAINADGQRVLSRRVVNDEAALTDLIRAVKELADGGSVRWAIDLNSGGAALLITLLLDDGQDLLYIPGRTVHHASGAYRGDGKTDAKDAAIIADQARMRKDLHKFRHRDKTAVDLRILCARRNDLASDRNRVINRLRAQLLEYFPALERAFDFAHRKGALILLTGYQAPDGLRRTGAARLERWLRDRGAYNASDIATRAIEAATAQRTTVIGQDVAASVVARLAQNVLDLNAELVEVDAMIEAKFGQHRLAGIIASMPGFGHLLGAELLAATNGDLTSFTTADRLAGVAGLAPVPRDSGRISGNLKRPRRYDRRLLRVFYLAANNSIKTCPESRNYYDRKRSEGKLHSQAVLCLARRRLNVLWAMQRDNTSYQPGSPRVA

SEQ ID NO: 360632 - protein, 473 aa, unidentified
MSKGSGNGTTRGDRRRNARRERLRGLLPRDGAVIGIDLAEDKQALAVVDHDVRVLARKTVKVKAFRLGEALDWAVAQAKVKGFKQVAVACEPTGPRWMQVQRLCAERGLPLVCIQPLVSHIAREQQDYTPHKTDESDCVLIGRLAAELHCYIPEELDETWAQLRHLGRRRAQLITAATASVQRIGDFLSVTWPVVTEVCAQPFKPVTWLAALQVVTSRCGGDPARLAAMGPEEFTAVVRAAVPAWGGKKGWGTICGRVFAALTDTEGVVAWSRRGLLRRVAGELGDLARTRAQLRAVAADMVMVLSELGLSRLGDIPGLTAVGAAAILAETGDPRRYDSSSSLVKHAGLSPSENASGAFEGQARISRRGRPGLRLTAWRAVWPMLRLNPVMAAKYAAMTQAADAAVASDAGSQPARAAASAARARRAKARVACAASLLRWIYSMVVHGTSWDAAVASGAAACQHAPRCQPEAA

SEQ ID NO: 360633 - protein, 311 aa, unidentified
MTTFIGLDVSQKKTSICVIAHNGNKICTVNVDMHPGVIADYLFSEGFDKSKVGLETGPLCVWLYHSLKNFGLDVDCIHARHVHAALSMQLNKTDQNDAFGIARLVLSGWYKPVHVKSLEWHQQRLILTSREKLVLLRVAVTNQIRGLLKTFGVVLPPGKNSVFERAILESSPSLETVKPTVIMLLDTREHLSGQIRKLEKIARKDPVCQILQSIPGVGVLTALSFKTSIDDPSRFRRVSDAGAFLGLTPRKYQSGEVDRNGGISKQGNRMTRTLIYEAASCLLTRYGTDTSLAINRRQKTKLWRALQDSNL

SEQ ID NO: 360634 - protein, 350 aa, unidentified
MLIGVDYHPSFQQIAFLDQETGECGERRLNHSDGEAEKFYRDLKQRGVHVRVGMEATGYSRWFERLLAELGIEVWIGDAAKIKTKRVRKQKTDRNDAQLLLQLLLENNFPRVWVPSPENRDLRQLLWHRHRLVQMRTRIMNQLQALAMNEGKRWKKKLWSEQGRAQLEKLPLAPWASRRRQDLLELLDRMNPTIEELTVTVEREAKKWPEVLRLMTHPGVGSLTALAFVLIIGTPERFHRGKQIGSYIGLIPSEDSSAGHQRLGHISKQGNALLRYLLGEAAQAAARCNPDWRRRYRRLAMRRQKNIAKVAIARKLAVRLYWMWRNSCEYSPSLEFGSYAGQLVTGHGVN

SEQ ID NO: 360635 - protein, 309 aa, unidentified
MFVGVDISKARFDVAVRPTGELFSQPNSPAGITEMVRHLQGLGPTLVVVEATGGLEQLLVIALAECGLPVVVVNARQVRDFARATGRLAKTDKLDAMVLALFAEAVRPQLRPLPDAAQRALGALVARRAQLVEMTVAERNRLHASHDPAVREDIQSHLAFLEGRLSQMDRELLEAIVANSALKTRFDLMVSAPGVGKVLAFTLLSELPELGRLNRRQIAALVGVAPLNRDSGQLRGHRGIWGGRASVRRALYMAAVAALRWNPVVSRLYRRLVAAGKPAKVALVACMRKLLVILNAMLRSGTRWMPEPR

SEQ ID NO: 360636 - protein, 348 aa, unidentified
MGEVSTIGLDIAKNLFQIHGVDADGTVVIRKRVSRARVLEFFADLPPCRVGMEACATAHQWARELRKLGHDTRLMPPTYVKAYVKRGKNDAADAAAICEAVTRPSMRFVPIKDVEQQSVLMLHRVRDLLIRQRTQLINALRAHLAELGLVAAKGREGLHQLVAVVTECGNEQLPSNARFACQAIVTQLHAVQIEISGLDKRITQTHRANADSKRLDTIPGFGVILSTAVAATMADPKAFRTGRDFAAWIGLVPRQNSTGGKERLGSISKQGDRYLRRLLVVGATSVINCARARPHKYPWVIELLGRRPTKVVAVALANKMARIAWAVLAKGQPYRAPTRSSNATVLAA

SEQ ID NO: 360637 - protein, 312 aa, unidentified
MPQDRVFVGVDVSKDRLDVAVLEGESFAVSNDAAGLRDLVRRLRAAKASLIGLEATGGYEKTAVEALLTAGLDARLLDPRKVRRFAQACGVLAKNDRIDAELIARFVALMPSRSARIDPAAARLAELVDARRRLIEEQARLDNAARMVRDPVLIRLAQRRRGRTRLDLVLIEKRLAQLIAEDEDLARKDALLRSAPGVGPVLAWTLLARLPELGDLDARQVAALVGVAPYDHDSGARRGRRAIRGGRPIVRNVLYMAALVGARFNPALAAMKARLAQAGKPPKVVLVALMRKLITILNAMLRDNASWRDANA

SEQ ID NO: 360638 - protein, 345 aa, unidentified
MDSMYYIGLDVHKKTISYCVKDVSGQVHQEGKIGATRRELDGWMKALPQPWTVAMEATIFTGWIYDHLLPHAKQVKVAHPLMLRAIAAAKKKNDRVDAGKIADCLRCDFLPECYMASTQIRDRRRTLRYRHLLVRQMVQMKNRVSGLLMETGVSHNKQRLHKVGYFREMLATNEEVNESIRPLLRLSRDTIVRLRKTESALVSSLQRDPLLAERIKRLRTVPGVGPITALTWALEMGDISRFPSIRQAISYCGLCGDEKSSADKVMRTPLSRQRNKHIQSVLVEAAKLAPRQDHDLASVYETEKQKGNANRATLAVARKIVAYLLAVDRGQRDFVPAEDHRRAAA

SEQ ID NO: 360639 - protein, 457 aa, unidentified
MARRSKSKGTRRQSKFNILHTRAAGIDVGSTFHVVAVPPELSPEPVQAFQSFTGDLYRLADWLVEIGVTTVAMESTGIYWIPVFEILEAHGLEVLLVNARHVKNVPGRKTDVSDAQWLQQLHSYGLLRGSFHPAQEWSALRAYLRQRDRLVEYAASHIQHMQKALMQMNLQLHHVISDITGVTGMTILRAIVAGQHDPAELATCRDRRCKASEETIREALTGHYRREHVFALRQALELYDSYQEQIEACDQEIEATLKSLQDEAISLEALPAARYKKTRQANEPRFEARELLFGVLGTDLSQIHGFSAYTALKLVGECGMDMSRWPTEKHFTSWLTLAPGNKISGGKVLSTKTRRSANRAAKIFRLCAVNVGQTSTALGAFYRRLASRVGKAKAVTATARKLAVLFYNALRYGMAYEDPGASYYEERYRERVLKGLRRRAKEFGYELTEVGAAEGVS

SEQ ID NO: 360640 - protein, 335 aa, unidentified
MNQARVHIGVDVGKECLDICYPDGSREHIGNTKRSRAKLIGKARAMSAIVSLEATGPYEENLADECLAAGVPAVRLDAWKTRKYAESQGMLEKTDAIDCEMIRDFAASLKPEQLRFVRPVSDGYRRLKRATSVRRNLIKAKALVVNQLENILDREVRASVSRAIDALERQIEKMDALCAEAIGSDDKMNALAVRFEQVVGVGPVLISTMLSSCPDIGSFTSKGIAKMAGVAPIENKSRTIRKRSRPRRGRRELRSALYMAAVSARHSNHLLEPVYKRFTDRGMPRRVALIALARHIAILMNYIAKYPDFNPAVDPKKSALPALPRRKPGRPRKNP

SEQ ID NO: 360641 - protein, 350 aa, unidentified
MKVYVGMDVSLKSSELCAVNEAGDKVWRGRAASDVEAISEALRAHVPGLTRIGLETGGQTPYLAHGLRAAGFEVVALDARAAKAVLKTRPVKTDKNDAATLAELVRSGFYRPVHVKSFAAHKIRALLLAREHLVGMRQQIMGTLRGLLRPFGLMIGKVGLSRFAMRVRELVAGDDLLKLAAEPLLLVLRTLCDQQRPLDAELMRLAKANPVCQRIMSVDGVGVVTALAYMASIDDPSRFKHARDVGPALGLTPGKYQSGEVERSGPISKWGDKLARRCLYSAANVLLTTVRARSELKSWGLRLRGKIGAAKAKVAVARKLATLLLCLWRDGTVFEPYPSTASGSSPSCPA

SEQ ID NO: 360642 - protein, 394 aa, unidentified
MLKIVHPICCGIDVHKKFVVATVGTTNKSGVTDYQTRQFSTFTENLHQLLDWLKSQSCINVCMESTGKYWHPVFNILEDYCDVVVANPKYVKAIRGKKTDKKDSIWLCDLHKHGLVPSSFIPPLLIRQIRNLMRYRFKLINFKSSEKNRIQNSLTVSNIMISSVVSDTFGVSSMKIINHILENPDDKDFEVSSMLHGRLKDKAETITKSINGNLTKPQADKMRVCLDHFDNIEKHKSDIESVVLGLVQPYLPQIGLILSMPSIKDVFTAIAIIGEIGTDMSVFHSSKHLCSWAGLTPQNNESAGKKKSVRVSRAGVYIKPLLVQCANAAIKSKKCPYFKMRYDQIKKRRGHKKAIIAIAHMLLNCIYHMLDKNEPFNYDLYKVDSKPNKLIRLR

SEQ ID NO: 360643 - protein, 317 aa, unidentified
MNFVGIDVAKDSMEVMVHENSKGWSFMNDESGLHKLIAKMRSLSPCLIVLEATGGYENTVATGLQCKGFSVAVINPRQIRDFARSIGTLAKTDILDARVIAHFAAKIQPPPRILPTEEAKRLGAILMRRRQLVTLLTAEKNRLLQANPAVRERVKNHVTWLKQELSDISKELKQMVQDDPEWKEKDKIIQSVPGVGPILSVTLLADFPELGTLNRKQIAALGGVAPFNRDSGKMRGKRTIWGGRGVVRTATYMAAFAAIRCNPLLTSFFDRLVAAGKPRKVALVACMRKLLCILNAMLKNRTRWTCYSPQLVGPCYC

SEQ ID NO: 360644 - protein, 278 aa, unidentified
MEYFAGLDVSMAETHVCVMNRDGAVIHEVKVPSTPAGIAAALAQAPVCRRIVLETGRMAPMLYHGLSRLRLPVVCIESRQAYQALKSLATHKTDRNDARGLAHLARTGFFKPVHVKSLPAHAVRSLIIARKKLVGQRVTLENQIRGLAVIFGVRLPRALSPVFVKQALRASEGIAGLSAAMQGLVAARTAVLGAIVAIDADIRRMVRASADCRRLMSIPGVGQLTALAFTAAIDDPERFRRSREIGAYFGLVPRRYQSGEVDYTGSISKSCLHATEGL

SEQ ID NO: 360645 - protein, 341 aa, unidentified
MDQYIGLDVSLKDTAISIRQDGKRIWRGKAPSDPKILAEAIRKHAPSARRVVFETGPLSTWFFHALTAEGVPAICIEARHAQKILDETLNKTDANDADGLAQLAEAGFYKEVRVKSFDAMLTRTLAGAREQLIRISTKLGNQIRGVMKTFGLIVPKGGGRVFEGHVRELLEKEDGLARIILPLLEAWRDIRKQAAVLTRYLLAMARKSREAQLLMTIPGVGSATAVSYLVAIEDPDNFGKSRSVGAWLGLTTRRYQSGEVDRNGHISKRGDNYLRGLLYEAAVALLTRTRSESSLKDWGLGLCERLGFKCAAVAVARKLAVIMHSMLKTGEVFNTSAGASA

SEQ ID NO: 360646 - protein, 352 aa, unidentified
MPDVASIGLDIAKQVFQAHGADARGETLFNIRIKRQELLDFFRNLSPCRIGIEACATSYFWGRQLSELGHDVRLINSSYVKPFVKRGKTDANDAEAINVALNQKTMRFVPVKTIDQQAAITIFKTRSLFVSQRTQLVNALRAHLAEAGLIAARGVRNAHKLIKLMDGATDTVLPLATKQALADVSEQMLRLDELVTKLDKEIERRVAGDQDARRLLTIPGVGPKTAMCVVATVFDIRRFPSARHFSSWLGLTPSTHSSGGRSVLGRITKMGNPELRTMLYMGASALLAGTSKTPLGFWASRLRARRPHRVAAIAVANRIARIIWALLTRGGIYHQTNVPSAVSVSDSQADRW

SEQ ID NO: 360647 - protein, 400 aa, unidentified
MNAVGIDVSKGKSTVTVLQPFGVVIAEPFEVLHTADELKKLVTFIKSLSGETKVVMEYTGAYYEPIANALYEAGIFVSVVNPIIINDYSTNRVRKVKTDKIDALRIAAFTLDRWLELRKYEPADTIRKTLKVMNRQCLNLNRILVMQKNNLISLLDSVFPGANNLFTSPCRETDGHEKWVDFVLKFPHVDTVAKLSLSAFKAKYHSWCKKEEYRYSEPKAEKIHKYARTLVSTIPPTESIKMVISEAAKALNSTLEALGKLHSEMDALSARLPEYEAVMDMYGVGKILGSQLIAEIGDIRKLHSGKALVAMAGIDPPPHQSGTVDTRSRSISKRGSPALRKTLFQVIGVYLQRQPKDEPVYQFLEKKRTEGKPYKVYMIAAAHKFLRIYYARIKEVMPTQ

SEQ ID NO: 360648 - protein, 482 aa, unidentified
MKKKNIYVNQSQELLTLFEEAGNSAKIMCVPIDYAKKDHVVMFCNGYGDILRKPFSVKNTPEGVNYLTEQVTRSCYNRSINPKHVFFGGEDVGSYAENFASTLRSGGWLVAGVNAHDAKKQRANLQASTDRLDLMGIATMLLNRRANCSPAQSGIYRNLRTLVRHRRRLVVMTTEVRNRIHAIVDRLFPGFLDERNSGISPFSKSSLSLMENRFSPPQIRRRRRKTLIEALRRLGTPKPDCAAVKLQEYAQRVLNTPQEYVGSLQLSLAQHVKHYRCLQENIDQLEREIALWLSQTQGAFLSSVRGIGIVLAAGVTAEIGDPFQQKPINNLVSYSGIIPRVIQTGGPEGEIYTGKVAKRSNRILKDYVVQSASHLGLHGPEDLMTDYKRRDSAGQHADFGIARRYLRMAMCLMRTSQIYLPSRLRKKDALPEERVGYYLMRWPYLRDKWQKLDALEAAFAEDRPLGRWRNMVQGIYDIKLKL

SEQ ID NO: 360649 - protein, 392 aa, unidentified
MYIVGIDIGKNHHEASIVSPEGKQIGRSLRFATTHKGADSLMSFIFKNIGNSPCVFGMEATGHYWYPIYSFLKAKGYTIYVINPIQSDSLRKMYIRQTKNDSIDSFLIAEVIRFGQFGTTSMADENILAMRQLCRYRDSVISSRTEIKLRIGTIMEQIFPEYEKQFSSLWVSTSMGILEKYLTPENIENTPIDELFEIIKDKSHNRLTRAKAISIKEAAADTFGIKIAQDAFSFQLKQLIDRMNFLDKQIEALDCQILEYYEKFDCYLHTIPGIGIIGAATILAEIGDISRFKNSSALVAFAGIDPTVRQSGEFNSTHNHMSKRGSPYLRHAIFLAATTCSFHNSPLNAYYKKKRDQGKHHLTATGAVARKLTTVIYAVLRDSKPYEPKKFC

SEQ ID NO: 360650 - protein, 338 aa, unidentified
MKLYGGIDLHSNNSVLSLLDENDRLIYEQRLANELDIILVELAPYREALVGLVVESTYNWYWLVDGLMEAGYTMHLSNPAASKAYEGLKHTDDRHDARWLAHMLRLGILKQDYIYPKTERAVRDLLRQRAQLVRLQTSQILSIENLLSRNTGRRLNSHRIKRLSPEELGELLAPPEPALAAQSNLVVLKTVMAQIKILEEEVKARVKPRSELRWLKTVAGVGEILGWTIVLESGDIRRFSQVGRYASYCRCVESKCTSNGKKKGENNRKNGNQYLAWAFVEAANFAVRYHDRVKRYYQRKRSRTNGIVAIKACAHKLARASYYVQRDQVAFDMTKAFG

SEQ ID NO: 360651 - protein, 345 aa, unidentified
MKIIGCDFHPSFQQIAMCDSETGEFQERKLSHADGQAERFYLELGGPALIGIEATGNSQWFLDLVGRLGYEIRVGDAAKIRASYVRKQSTDKRDARHLLTLLLEKRFPQLWTPSAAMREQQQLLRHRDKLVEIRTKVKNSLQHLAMNRGMQKKSRLWTRLGMEQFQQLAMPGWAGVRREDLSHLLKQLNCQIETLDRAVEQAACQHPQAQLLMSQPGVGPVTALAFVLTIGEVTRFAGSKQLSSYLGLVPSEHSSGSKRRLGAITKQGNRFLRKLLVEAAQTAVRKDEGFRKEYQHRCRRRPKGVAKVAAARKLAVRLYWMLRSNVSYPEIVRVESNPRVPLGDV

SEQ ID NO: 360652 - protein, 337 aa, unidentified
MNASIIGLDIAFQVHGEDAEGGVVVQKRLGRKGVIEFFSKLPRCVVALEACGTSHYWGRTLRALGHDVPLIPAASVKPFVKRNKTDARDAAAICVAAQRGDMREVAIKSEEQQASRALERSRELMVKQRTQAMNSLRAMLAEFGVAAAQGARGFAELRARLTSDDPGLPETLVGALRVVLAQLDTLTPAIAALETRIKAVVKADPDMRRLARIPSVGFLTAHAVVAAIGDGRRFRSARDFTAWGGMTPRETSSAGKRRIRGVSRQGESRLRKLFALGAATLLRNARSRDDRATQWQRGILARRPMKAAVMAQAAKTARIVWAVLASGKDYAPRAAAV

SEQ ID NO: 360653 - protein, 414 aa, unidentified
MKPWIEITHYAGFDWAKDHHDVVIVDRAGQIVADFRIEHTAAGWQHWRQQVAAFAQGLAACVETSQGVVVEQLLESDATVYPVSPASAKRYRERKVPSGNKTDQVDAWSLADALRVDGHGWKALSPEDPLVAELRLLCRDEVELITERTALINQLQSALHEYYPAALEAFEDWTQPSAWAFVEAFPTPQALQAAGKRKWERFLHTHKLARPETYQKRLAIFARAHEFVSGPALTNAKSRLALTRARMLRVLQTQIDAYRAEIEKLFAQHPDHHLFGSLPGAGAKLAPRLLGEIGSDRTRFEDPCGLQCLAGTAPVSYQSGQIHKVFIRRHCNKPLRHAVHLWANLSRQSCPWASIYYDQIRQRGKSHACALRCLGQRWLKILWKMWQTGTAYDPDLHARNQLKHGSWVLKIQPA

SEQ ID NO: 360654 - protein, 432 aa, unidentified
MKHSVCCPPDEDGSINVREFASDTPSLEALADWLSSRGVRTVAMESTGVYWIPLFELLAGRDFDVVLVDTRSLSRVPGRKTDILDCQWIQQLHACGLLKGAFRPGDDIVRFRALARLKRTLVREQADWVRRMQKELDQMNVRVHRAVSDITGVTGLAMLHAIVAGERDPEKLAALRDKRCRLDAESMRRELTGTWREEHLQSLAIGLKTYEFLSARITEVDGLIKPLLESFAAEAQHHGQAAPEPASASKAKTIRARGQEPMRQALYAMCGSDLTRIDGVSVETAQTVLSEVGHDLSKFETEKQFISYLRFAPGTAVSGGKPVRKGRKKLLGCSRVREALRMSALAVRNSHTALGGYYRSIAYRKGANVAVFAIARKIAQHIYRMLRYGADFEDAGLDAYEERCRERRIRNLKNNARTLGYTVTACAAEAGT

SEQ ID NO: 360655 - protein, 300 aa, unidentified
MDATTVGVDLAKNVFVACVADCAGRIVERREFNRAGFLTWLGTLPVGTVVGMEACGSAHHWGRTAQRLGLAPRLMAAEFVRPYRKRQSVKNDRADAEAILVALLSPGMRFIPVKTEAQQQRLAWHSLRIGWVEERTALLNRIRGLLAEFGLIVDPGPKHLRALLAEREFDTALSPTLRRLIQSVRDQLEALDTRIGECDRQITAQQADDPLAKRARDLPGVGLITADAVTASVGDASMFKNGRQFAAWLGLTPSQSAAARPGSGASPGVATTTCEPCSCRAPAAYWPRHSEKSGGSRPKS

SEQ ID NO: 360656 - protein, 447 aa, unidentified
MKTLHQRCAGLDVHKQEVVACLRLVTQGRVHREVRRFPTTTRGLLELAAWLEAARCTIVAMEATGVYWKPVWHILDGRFELVLANAAHIKGVPGRKSDVNDATWIADLLAHGLIRASFVPPQPIQELRDLTRTRKQLSREIVRHTQRLQAVLEEANVKLASVITDILGASGRRILKAMITGETDPSHLAELGSRRLGCSRDTLVEALDGRVRDHHRFLLDQHLKTIEQLEETMAAFDARIEAALAPFRDTVERLTQVPGLSTRAAEVVIAEIGLDMSRFPTAGHLLSWAGLVPALDESAGKRRSTRVTKGAPWLKPVLVQCAWAAANKKNSYFEAQFLRLKGRRGPKKAAVAVAASILTTVYHMLRDGTCYQDLGPNYFARRNPARTARKLADRIRSLGYIVEIRSGVTVYARVDEADRDLVRRISRGAPVVHDHCHCILADLLAKT

SEQ ID NO: 360657 - protein, 287 aa, unidentified
MSSHRGHEAPAIASIGIDIGKDVFHVVGFNPKGTVVLRRKIRRLALEREFEKLPPSLVGMEACLSAHFVSRTLRRLGHTPRIIPAIYVKPFAKGQKNDYNDAEAVAEAVLRPNLRVVQEKTQDQLDLQALHRVRGRLVSRRTATINQIRAFLIEQGIAVRSGAHALRQSLFTILDQRGDEISPRMHDLIGGLYEDWLWLDERIETVTRDIELISESEANCARLKTIPGVGPLISTAMVAAIGTGEAFERGRDFGAWLGLIPRQHSTGGRPILGRLSKRGSKYLRPPT

SEQ ID NO: 360658 - protein, 470 aa, unidentified
MAARKDKADGAGVPGHGGDGAEVAEELTQVVEYAAAIDVAKGSGMVCTRVPGSRPDRRRQKVWQVGATFGEVTALMDHLRCEGIQRLVLESTSDYWRIWYYLAEAAGVEVWLVNARDVKHLPGRGKSDTADCVWHCKLNERGMLRRSFVPPEAVRDLRMLTRTRTRLAQDQARHQARVEKILEDALLKISVAISDLFGVSGRRFLDALVAGERSPAALAALGDYRLKASQAKLEEALTGRFRDIHATEIAVHLRLLDAICAEIALLDEQIEQHLPSVPRTAPVCTACGLAGGGHAPDCDDLGILLLGLADRLDEVTGIGAVNGRAIIAELGTDPAQFPTPGHAAGWARLTPRSRQSGETSRPGRTGKGNPYLRGGLGQAAMTAAKTDTRLGAMYRRIARKRGKQKAIVAVSRVICEIAWILICDPSARYEELGPDYYHSRSPARQTRDKIREIERLNPGKKVILADDDAA

SEQ ID NO: 360659 - protein, 372 aa, unidentified
MGDYSVAYVAFDTAKLRNAVAIAEAGRTGEVRFLGEIENTEAATVKLVKKLAGRYQSLTFCYEAGPTGYELYRLIKRLGYDCVVAAPSLLPRKAGDRVKTNRRDALGLAKLLRAGDLTAVWVPDTHHEAMRDLTRAREAAVEDLTAKRQQVSSLLLRLSRAYPGKRNWTRMHMNWLASQKLEHAEQRIAFEEMLLAIREAEARVARLEQAIRAALPEWSLSDLVTALMAMRGFDLVAASALLAELGDLSRFATARELMGYLGLVPSEQSTGEKIRRGGITKAGNRRARRILVECSWSYRHPPRLGKEKLTKVAAAPREVREIAWKAQHRLTSRYRALTRNGKKPTVVVTAIARELSGFVWAINRAVRPAMTG

SEQ ID NO: 360660 - protein, 414 aa, unidentified
MVEYAAYVGWDWGQQHHAVDVAAPREVPWQMKIEQKPEAIRAFVDQLRKRYGGAAVALCIEQGRGAVMYALMQYEFLHLVPINPRAVARYREAVRLSGATDDPTDAWLIRELVQRHPEHFAVWSPDDPVTREMRLLSEWRRKLVDQSTATSQQLRDTLLQYFPQVLEDWVGELKSPMAAAFLEKWPTLESVQRARPDTVRQFYRQAGSRSAKKIEQRVEQIHVAEPLTRDTAVIAALSVVAICLARQIRSLENSIADLDQRIARIWADHPDREIFEALPGAGPALGPRLAVAFGTDRAKWGDASSMQCFSGVAPVVEQSGKQRWVHARWQCPTFVRQTFHEFAGQSIKQSAWARTFYDQQRARGCGHHAALRALAFRWIRVIYRCWKDRKPYDEALYSAALRRRGSPLAAALVA

SEQ ID NO: 360661 - protein, 453 aa, unidentified
MPKSDKIYTYMEKEKFKGGLPVLNLNAAGIDIGATQYDVAIIKEGTDYHSVEQFGTFTKDLLQLVEYLKSNNVTTVAIESTGIYWINLYLLLEKEGIEPYLVNAKHAKNVTGRKKDDTDAIWLQKLHSCGLLQKSFQLDSVFHTLRTYVRHREKTLQIGADSVRRMQKAMELMNVKIHNVISDILGKTGMEIIRAILQGVRNPEDFLKYKNPRIEASDQDIMDSLNGIWNEEYIFLLQQAYDAYCFSQKQAHECDEKIEKTLIQIYAKVKDGDISNIESSRKKRVSKNQFYFDAKKMMHGIVGVDLCKIDGLNEMTVVKLISEIGIDMKKWKSAKHFAAWMNLVPNTKITGGKIISSRMQKKKNHAGLILRMASSNLSKSKSPLGDYSRRMRSRVGGKGAVVASAHKVSKIVYHLISKQVEFKSSLLIEDQINWKQRQIVNLEKRLENLKRIA

SEQ ID NO: 360662 - protein, 342 aa, unidentified
MSSANTYIGVDLHKKTCYMTVMDKAGIVSKQTEIKNDKEAINKFFKCYGKGANVAVESTMNWIPFYEQVEALGFKVVLSNPLMTKAVAAARIKNDKVDSKILAELMRTGFLPTAYIQPKEIRDLKELIRQRVVYVEMRTRIKNKIHSVLFKTGTKQEFTNLFGKAGRKFLSEISLSDVYRTELDRYLLTLNNLDLQIKDMETDIEAKAKADYDCKLLCTIPGVGPYTALMIKSEIGDIARFASAGKLCNYAGLIPSTYASGEKIRTGRITKRGSKWLRKSLVDAVTSSCRNANKISVFYKKLKKSKGTGKAKVAAARKLCSVIFAMLTDKQPFKEFVPVKER

SEQ ID NO: 360663 - protein, 318 aa, unidentified
MSQPNQHCIGIDIAKLSLDIAGTGEFTSFTTSNDDDGFTIILKALQEMKISLILMEATGGLEASVACILQTAGYEVVVINPRQARDFARSMGYLAKTDKLDATMLAQLAQVIDRHPDRSRYIRALPDEARAVLTAMVVRRRQLNNMLVAERNRRYPSHPQSRKSIDNIIYALESELDRINEEMKQHVKVFFMEQAELIGSVKGVGEVTVASLIAELPELGKLNRREISALTGVAPLNRDSGKMRGRRTTFGGRAGVRAALYMAALVATQFNPAIKMFYQRLLSAGKPKKLALVACMRKLITILNSMIRKGEKWDASFK

SEQ ID NO: 360664 - protein, 387 aa, unidentified
MTVRTVTNLPAVTHGETVRCLFAIELSTMSWVVAFNTPLSEKISRHTLTGCKWKRLLELIEEVRARVSRETGRAVEVVSCYEAGYDGFWLHRKLEAHGIRNYVIDPASLQVDRRARRVKTDRSDTDRLLRSLMAYLRGEPKVWSVVRVPCVAEEDARRLHRERDRLVSERVQHVNRIKGLCALQGIYDYNPLRPQAMARLEQLRTAQGGAFPPRLKSEIMRGLQRLEMVVEMIATLEAERNAIVENEASTHLNAKKIQTLHKLKAIGPEFAAVLVGEIFHRDFNNRRQVASYVGLAPSPFQSGNVAHDQGISKAGNRKGRTTGIELAWMWLRYQPESDLSVWYRARVGATKGRIRRIAIVALARKLLVALWRYLETGLVPRGAVLKG

SEQ ID NO: 360665 - protein, 338 aa, unidentified
MKITTIGLDIAKSIFHLCAVNKMGRLVKKKQLKRKQVLAYMANLEPCLIAMEACGGANYWAREFIALGHEVKLIAPQYVKPYVKGNKNDYNDAEAIAEAAQRPNMRFVPIKSVEQQDVQNFHRQRERVKKERTALVNQIRGLLAEYGVVINQGVAAVRKSLPEILEDAENGLTARSRELFAELLEELWAFDQRFELCGQRITSLSQENAVCRRLDGILGIGPITASATYAAAGDGKDFVNGRHYSAWLGLVPGQHSTGGKTTLLGISKRGNAYLRTLYIHGARAVLRHSTNKTDRFSLWAQAVLARRGHNRACVAVANKMARMAWVIMAKGETYRVAI

SEQ ID NO: 360666 - protein, 400 aa, unidentified
MNRTRTVAGLDVHKDSIYLCIMGYDQAIIWENTYGVLTPDLRQMHHDMRAHGVTEAAMESTAVYWVPVWNELCESMELRLVNPYFIKQLPGRKSDVKDARWIAECLLKNLIKGSFVPEPIVQDMRKLNRRIMDLCEDTTYNSNKLDAALQRCGFRLSNYVATTKSKSYRSVLKAIIDGQTDPDELLSLVHGRILNKHGRERVKAALTGSFSETDLIVLRQLKETLDLIEEQTADCQQELVRLCKEHYPKPYERLQTIPGVKERAATAIIAETGVDMKMFATAASLVGWCGLKPRNDVSNGRFKSRKVTHGNRYLRQILIEIAWAASRTRNCFFSHFSYLQTTVKKKNKMKIQVAIARKILVAVWHMLSKEEDFIDIYLKRQEELKRTEGQIKLLESYMAD

SEQ ID NO: 360667 - protein, 423 aa, unidentified
MENSIARKIRQVPKGYLVMGVDPHKKKHAAVAVTQDFNTHSKFKFNNSRQGFEVALEKARAEMVRTGSRGVIFAIETGGHYWRNLAYFLDEKGIPFHFINQFTLKRRREGKDLNRRKNDYRDSEVAAQLLCTGEFTDTKLQYGVYAELRAAYNAYRRLVKERTRITNLIKALLDGLFPEFTQVFKDPCGLTALSVLSICPAPNIIAQMTEEEFVDAIRAKHQGRLMKKKLRTLHYASRTSIGVDAGAQSVSSEISFLVEKLCLIRRQVRSIDETLARLVDETEEGKYLLSIIGLNYISVAGLLAELGSFRFYRSAKQLIKMAGSNPTESESGGKRSAHTPMSKKGRPVLRYCAWTAVIPMLRFNPDFRVWAKKLRERPVYANPLGGREVVGAALNKLLRLAFALVKKQTFYQVPQPELVQTAI

SEQ ID NO: 360668 - protein, 347 aa, unidentified
MRFYTKQHPFYCGIDLHARTMYVCILDQAGETLVHRNMTATPEALLKAIAPYREQVVVAAECMFTWYWLADLCAEHGIPFVLGHALYMKAIHGGKAKNDKIDAQKIAVLLRGGMLPQAYVYPAEMRATRDLLRRRMHLARKRGELLAHVQNTNSQYNLPAIGKKIAYKANRDGVAERFADPAVQKSIEVDLALITYYDALLRDVELTIVKTAKHHDANTLYLLQTVPGIGKILSLVLLYEIHDIERFPRVQDFASYCRLVKCARESAGKRSGTSGAKIGNAHLKWAFSEAAVLFLRDNPAGQKLLTRLEKKHSKGKALTILAHKLARAVYYMLKRQTAFDLETFLHA

SEQ ID NO: 360669 - protein, 363 aa, unidentified
MKTILALDLGKFKTVSCLLTEDHSSIPVFKTIMTNPKTFEQFLIDVKPSLLVLEACGVSGWVVDLARKLGVEVLVAHPGGEAWQWGKVKRKTDKDDALKLAQMARINEIESVHVPSPEHRQFQQLVRYRKKLQSQATATQNAIRSNLMAQGEECAAGKIAWSKSYIENDLGKLRKPFEECTVSEYWRGTLDVQLTHLVATLKLMRCIEKQLALISKPDPRIDVVQSIPGVGIIGSQVIVAHIDDAKRFESARKVSSYAGLAPKKWQSGKMDRQNRISRRGPRLLRSVLTEVAWCAIRFNPYFKDLYDRVRGGSKSRKKQAIIAVARKILVTAWAMLRDGKNWSPRDAKLIAQSAPTLPSTSTA

SEQ ID NO: 360670 - protein, 355 aa, unidentified
MKYIGLDCHKKYDHATMIDTETGEIKSKRLAHTLEEFEEFIGNKVGTRAVLESCWNWAKTYELIKDLVEEVTLAHPLKVKAIASAKIKTDAIDSRMLTELLMADLIPESHLRDSENRVRQRVIRHRAFLVVMRTRVKCRIHDLVDSQILPADVLQARPKSLFSKKGLKWLRTLSWSKEEYRRMVESYLRLVDVISEEILTTKEMIDEIYGRDEDARLLATIPGIGMTLAVLISTEIDGINRFRSPSRICSYAGLVPSTHSSGGKTYHGNLTSEGNKWLRWAMVEAVVPASYADDDIRERLNALRKIKRPNVAKTIVARHLLKIVYHVLKERRPYVVDYRTSKNPGRLSLVLASSN

SEQ ID NO: 360671 - protein, 355 aa, unidentified
MNDAKYMGMDVHTATISAAVRDSSGNLVMEATLETKAETILEFVHGLRGSLRVSFEEGTCASWLHDLLKPHVSEVLVCDSRKNALLRVGNKNDREDARKLSELLFLNKLHAVYHGETGIRTLKELARSYLTITRDLTRVMNRLKAIYRGWGIACAGQQVYAPRYRAEWLAKIAEAGVRRRAEVYYQQFDVLAALRQEVRRELLAESRKHPAMRLLRQIPSIGPIRAALLIALMQTPHRFRTQRQLWAYCGLALRTYDSGEYRFVGGQLKRSKKAVTIRGLNKNHNHDLKNIFKGAATRAAATAGPFQKFYEARLASGMKAPMARLTLARKIAAITLLVWKKGVRFDAEQLKQQAA

SEQ ID NO: 360672 - protein, 482 aa, unidentified
MKKRNIYLSRSQELLGVFEQAPSGAKVMCVPMDYAKKDHIVMFCNGYGDILRKPFSVKNSPEGVKYLTQQVVRSCRHRAISRKHVFFGGEDPNSYAENFANTLRSQGWLVANVNAHDAKKQRANLQASTDRLDLMGIAVMLLNRRANCCPAQSGIYRNLRTLVRHRRKLVIMKTEVSNRIHTVVDRLFPGFLNERNTGVCPFTKSSLWLMENRFSARQIRRRRRPKLIEALRRYGTAKPEKTAAKLQEYAAQVLSTPPEYIGTLQLSLTQHIKHYRCLQENIDQAEKEIALWLAQTQGVFLTTVRGIGIVLAAGVTAEIGDPNEQKPVNNLVSYSGIIPRVKQSGGSEGKIYVGQVAKRCNRILKNYVVSSAVHLGFHGPPELMTDHKRRDAAGQHADFGIARRYLRMAMCLMRTSQVYLPRPLRSAKARPQERASYYLTMWPAVREKWKKLDALKAAFKKDRPLGQWRDMVQKFYEIKLTL

SEQ ID NO: 360673 - protein, 334 aa, unidentified
MIIIGCDFHSRFQQIAMLDTETGEITERRLENSEAGAFYGALPGGARIGMEATGYARWFERLLRELGQELWVGDAAKIRAGMVRKQKNDPRDARHILDLLNSNRFPRIWISGPQERDVWHLLRHRDKLVRWQTGLRNQLHALAMGEGLCQKKKLWSEAGRQQLQALELGDWGNRRRKDLLQMLDQMAPAIAELDQAVQQQVQQRPAAVLLQQQAGVGPVTSLAFALAVGPIERFANSKKLVSYLGLNPSEHSSAGRQRFGAISKQGNTLVRYLLVQAAQTASRNDPELRRDYKRLVFRRGTQVAKVAIARKVAVRLYWKLRKAGAPSASDSHAG

SEQ ID NO: 360674 - protein, 365 aa, unidentified
MNTQITAESKLYIGIDIHKRSWKVHCASSLFAGKTFSMEPDPRILKKYVDKHFPDHEVSTAYEAGCCGYSAHRSFETYGWTSLVVNPADIFRKGKERFTKTDKIDAQLISRELKNGHLISIEIPDKHREELRSLFRRRNDLVKDFRRVKSYIKMQLLYYGIEVPEQFDNDHWSHDYRKWIDDLEFNYSVGKASLQSRMRFFRFVDQDLRDVSSQLRAYCRKNYKHDYYLLRSIPGIGGIVACGILSELGDLRRFNTIKHLAGYVGIAPGVYQSADTYKKLGMTPRAHKLMRSYFIEASWQAIRTDPVMQGYYKKHYGKDTKKIIVKIARKLLSRTLAVIKTNTPYEIGVVAVSYTHLTLPTTPYV

SEQ ID NO: 360675 - protein, 398 aa, unidentified
MTESSDYESVQVFIGVDVGKDTHHAVAINRSGKRLFDKALPNDENKLRSLISDLKQHGQILLVVDQPATIGALPVAVARSEGVLVGYLPGLAMRRIADLHAGEAKTDARDAAIIAEAARTLPHALRTLKLADEQIAELSMLCGFDDDLAAQTTQASNRIRGLLTQIHPALERVLDPRLDHPAVLDLLQRYPSPEKLASLGEKKLAAQLCKLAPRLGKRLAADIAQALAEQTVVVPGTNAAAVVLPRLALQLITLRKQRDEVALAVEQRVLAHPLYPVLTSMPGVGVRTAARLLTEVACRAFASVAHLAAYAGLAPVTRRSGSSIRGEHPSRRGNKALKRALFLSAFAALRDPLSRAYYTRKMSQGKRHNQALIALARRRCDVLFAMMRDGTFYTPQAS

SEQ ID NO: 360676 - protein, 356 aa, unidentified
MSKVNQLRFDGQTIFCGIDVHKKSWRINVRNDEFELEDYSQDPSEELLLNHLQKRYPGASYQVAYEAGFCGFGIQRSLNKSGVNCIVVNPSDVPSSDKEKKRKNDKIDARKISRQLAQEALEGIYVPAIEMEHARTLVRQRSRLVRDQTRCKNRIWHLLMFSGLKLDADKSQQYWSRRFMESLRQLSCETEALRQALDIAIEEYLFVRKLLSVVTKQVRILSLQASFARIQKLLRSIPGIGVVNAMIIITELQDMKRFKTLDKLCSYVGIVPDTGSSGDNEKVKGITHRSNHYLRPAIVESSWVIIRKDPAMLMLYKKYCSTMVPNKAIIKIARHLLSRIRYVWLNQVEYEIGIVG

SEQ ID NO: 360677 - protein, 410 aa, unidentified
MEVFLERCAGLDMHQANVVCCILIGAPGRKAQKLLRSFGTTTRELEALRAWLAEHGVTHVGMESTGVYWKPVYSVLEGHFDLIVGNAHHIKNVPGRKTNVKDAEWIAQLVRHGLVAKSFVPPPAIRDLRELVRHRRTLIETRTAVRNRVLKLLEGANIKLSGVASDVFGVSGMAMLEALAAGTNNASEMASLARGRMRRKHAALEAALDGRMREPQCFLLAMQLRTLGTIDQDLDALDARIETQLEPYQAQHRLLMQIPGVDWVTAAFIIAEIGTDMDVFATARRLAAWAGVAPGNYESAGKSKGAGTRRGNVFLKSALFAAASAAVRTKGSYYRDKYNRLRARRGPVRAIMAIAHKLLIAAFHMLSTGEVFRDLGESYLDKIARKRSTTKLVQRLSNMGYDVMLVPKAA

SEQ ID NO: 360678 - protein, 447 aa, unidentified
MRRCIGLDVHREFAQVAIWEAGVVRQAGRIQTTPEALREFAGSLCASDEVAIEATGNTHAIARLLERHVGRVVISNPQKTRAIAEAKVKTDKVDAAVLAGLLAADFLPAVWLPDDATFALRRQVARRAHIVRQRTRLKNQVQSILHRNLVPRCPAADLFGNKGRAWLAAQHLPQHEQQAVGALLRQLDFHGQELRIVDAELGRVGLELTEVRRLLTIPGVDATVALAIVAAVGDFGRFPSPQRLVSYLGLNPRVRQSGGQPAQHGRITKQGRAHARGMLVEAAWAAAKTPGPLRAFYERVRARRGMQVAVVATARKLVTLCWHLVVKGQDYAFQRPSLTDKKLRALELRAGLPPRRGQKGSAAAYSLKEVRRRERALAEQAELAYRQLLGNWQPKPPPTQPTRKGVGVAAATGARRSSPQGGKAARQGSQPHDPALRSGVDHAQHRA

SEQ ID NO: 360679 - protein, 368 aa, unidentified
MTERTTTSPTAVTSTTIGIDIGDRTSHICVLDDAGNVIEAGVVATTPEAFAKRFERDDSTRIAIEVGGQSAWIDELLGGLGHDVVVANARRLRMIYENESKSDEVDAEQLARVARMDVTLLHPIQHRRRSTRTDLAKARSRDMLIATRTSLINHVRGILKSFGTKLGSRGAAYFHGWVREQIPDELRCALDPIVDTLEGVATQITVLDKELERLANEVYPEMMLLRQVNRVGLHTALRFVLTVEDPDRIKCSRNAGAYFGLRPRRHQSGARDPEMRITKAGDREVRRLLVQCAQQMLGPFGTDSDLRRWGLDLAARGGKSAKKKAVIAVARKLAVLLHVLWKTGQVYEPLRNANAKDAAQAAKTPVPA

SEQ ID NO: 360680 - protein, 409 aa, unidentified
MQSDFQYLVGIDWGSEKHRVCLMDRAGRIIEERWVEHSGNSLAELVDWLRRRTPESPSALAVAIEVPRGAVVETLLEHGFAVFSINPKQLDRFRDRYSPAGAKDDRRDAFVLADSLRTDMHCFHAVRLDSPEMIRLRELSRLEDEISQELNRATNRLREQLHRFFPQLLQLCDSADEPWLWALFELAPLPARAAKLSEAKIARILQQHRIRRISAAQVRAILKTKPLTLAPGAREAAAEHALMLLPRLRLLHGQRTDLARRIQAVLDELAAPSDENPEEHRDAAILLSLPGLGRKVAATMLSEASQAIAERDYHALRCYSGTAPITHQSGKKKTVLMRRGCNERLRNALYHWARVSVACDLKSKKIYAAMRARGHSHGRALRGMADRWLQVLISMLRHRTLYDPQRTAA

SEQ ID NO: 360681 - protein, 355 aa, unidentified
MPTIAQPQPTRVTIGVDTHGDRHVAAARDQLGRPLGTTMVATTPAGYRQLLGWALELGEPVAFGIEGTGSYGAGLTRYLRASGQQVVEVNRPDRAARRRKGKSDPIDADAAARAVQAGDATAIPKAGVGVVEMLRVLHLARKTAVKARTQTVNALRALLVTAPPELREQLRGLSKTMLPRAAAALEAGNITSPATATMLALASLGRRHGALTAEIATLDGEIERLLDRFARPLLDRVGIGPDSASALLAAAGDNPGRLRGEAAFAALCGTSPVEASSGKTVRHRLNRGGDRQANAALYRIVIVRLRWHQPTREYMARRIAEGKTKTEAIRCLKRYVAREVFAVLNTLAFDLASAA

SEQ ID NO: 360682 - protein, 316 aa, unidentified
MNQAEVFVGIDVAKSRLDVALHPSGATWTVPNSEAGIAGLVAQLQQPPVTHIVLEATGGLEIPLLGALGAAGLPAVAVNPRQVRDFAKALGRLAKTDRLDAQVLALFAERVRPALRPLPDQATQALSALVARRRQLVEMLTAEKNRRGQASPAIQADIATHIAWLEARLEQLDKELGQHLQQSPLWRAQDDLLQSVPGVGPVLSRTLLADLPELGTLDRKQIAALVGVAPLNRDSGTLRGARTCWGGRAAVRAVLYMATVAATRCNLVIQTFYRRLCAAGKAKKVALTACMRKLLTILNAMLKHRTPWHAERLQRA

SEQ ID NO: 360683 - protein, 385 aa, unidentified
MAPIRMPEAVIGLDVGKSSHWACVATRDGEVLLSTPVANREDDLDSLFGRFPDALVVVDQSRNIGALALARARAAGMSAAYLPGLAAHGAARLFAGDAKTDERDAMVIAKTALGIPDALLPVGDPGPTIAAARALAAQRNFLTCENTRNKNRLRSILLESCPAFEALVDLSDGSQPRLMASLGGAWSVADAGPRRAAALTRGAARGKIEALVRSTTSSTRPDASVVAAEDRAVKLLARRISENSAEIEAITAEISALLEGDDTYRCLLTVPGIGPKTASELAISIDIEDFPSHDRLASYCGLAPRNRQSGTSISSVTASRQGNKRLKNLLIFSCNCLTRTEGRWGDYYTRCRERGMSHGKALKALARKRLKVIYAVMRDRVPYAA

SEQ ID NO: 360684 - protein, 338 aa, unidentified
MRPVVAIDAHKESCTYVVRHWNEHIAGPTRIPTTQEALRALAAEYPDHDFVVEVCNVHEWMIDLFRGVGVHAMAVIPPKQGPVGKKSDDDDATRIARKHQAGELVEVYIASPEIRAMRDLVRQHEFLKKKRTAFNNNLKHALIRSNFQPRKLEGAGRAPGVYSPEGRAQVVERFPQLESVYAVIAVIDERMDGLKRQIQAKGKGIREVRLLRSVPGFGPIISLALYTEIAEIDRFEKAERLVRYFGLDPVHGSSGDKHWDGHRISKKGVSFVRGVLAQGAWSHVTYCRESDITANYERLVTRGKTKQQALMMVMRRLVKAVYWMLKEEREFTMNGPAR

SEQ ID NO: 360685 - protein, 350 aa, unidentified
MDTIYIGVDFHARQQTLCYLKTGEGVVVTHNLKHEDKDEVRAFYQQFSGRVIVGLEASGYSPWFEQLLEELGHEVWLGDATEIRRRARWRQKNDRRDAELILDLLVHDEFPRLHRPLMKSREILRMLRYRQKLIKIRTIGKNSLQALALQSGLAKRSQLFTSSGKQELLAAVMSPAMQWQREQWLQLMEPLNQRLLETMFWLKQQSQDDERIVRLRTHPGIGLLTSLCLVHTLEPVSRFRNQRKVAAYAGLDPMERSSAERKHFLGISKAGSRVLRYLLVEAAHTAVKKDDDLKRFYQRLVERRGRPKAKVAAARKLLIRSYIMLRDEIDYAEFRRRAVAARLARQSTRP

SEQ ID NO: 360686 - protein, 344 aa, unidentified
MADLIKYVVGIDISKDSFDACIGSIDTEQNIVILPSKKFKNTKEGFVELLKWSKSNQSQGSQIWFVMEATGVYFENLAYHLSKKKQQLNIVLPTKMKHFKQSTEVKTKTDSIDAKILTRYGLERQLEVWKEPIEEMKEIRDLCREHSGLTAMSTEIKNQMHAKKSSYKASTKTLKRLNDHLNFLEKQSTSIINEIKLKLDKMPEVKSKIEMIENSLKGVGFITLIKLVSETDGFAFISNGNQLSSYAGLDVVESQSGNVSGKTKISTKGNSNIRKALYMSSLSVIRHTQRYKDFYQGLLIRNKEKMVGVVAVMRKLLLLIYTLWKKNEPFIDNYNFKLKETIIL

SEQ ID NO: 360687 - protein, 351 aa, unidentified
MEKIIRQSVGIDVSLKTLDVTFGKMSESMDIHLLFQCSFKNTEAGFMKLLQFMNDKLDSSIAIRFVMEATGVYHEKLAYFLHSKGHSLSIILPNKMSSFMRTLTIKSVNDKTCSEAIARFGLERKLDDWNPPKESYKKLRQLTRERDQLVSERSAIKNQLHAEEKEAYPLLRTIKRLKQRINFLNKQESEIKADIEQVVLKNPDINQEIEYMTSVPGIGRLTAVILLAETNGFELIRNKKQLASYAGLDVKEKQSGTSIRGLSKISKKGNKHIRKAMYLPAIAAVRSNEKYKEIYTRIVQKQGIKKKALIAIERRLLELCFILFRNKTFFDPTFKEKNSAQPELCAIQANL

SEQ ID NO: 360688 - protein, 405 aa, unidentified
MYNAVGIDVSKGKSTVAVLHPGGTVVRKPFDVTHSSCELKSLTDYILTLDGETKAVMECTGRYHEPILRALSDAGIFVSAVNPHLIKNFGNNTIRKVKSDPADSKKIARYTLDNWAELREYSSMDTTRAQLKTLNAQMAFFTKQKVAAKTNLISLLDMTYPGVNDLFDTPSRDDGSEKWVDYAASFWHVDCVRKIGLKAFTERYQAFCKRHGYNFQKSKPEELFNASKELVAVFPKEQEYKDMIQMSIRQLNVISANVEHTRQEMNRLASTLPEYSTVMAMRGVGATFGPQLIAEIGDISRFNHREALTAFAGVDPGVDESGKFKSKSNNASKCGPSRLRKTLFLIMSSLIQTKPIDDPVYRFLDKKRSEGKPYHVYMTAGANKFLRIYYGKVKECLRTQSETKN

SEQ ID NO: 360689 - protein, 387 aa, unidentified
MPQPNDLSRSLAALDENSTLIAVIEMSQSSWLVAAIIPGVERQPVKKLAPDEEGLLRLLHRWRGEAEKAGRTINRIAVAYEAGRDGFWLARWLRAHGIEAHVIHPNSIAVSREHRRAKTDRLDTALLKRAFLGWLRGERDHCGMVAIPSLEAEDAKRPSRERENLVGERTRIGNRIKSTLARLGIRGFKPTLRTAVQRLERLRTPEGEPLPPHTLAELQREMARLRLLAEQIREIETARLERLVRQPNHGAHPMIRLLARVGGLGIETADMLAHEAFSRSLRDPRAVARYGGLTGSPDESGARRREKGLARAGNARVRRGMIQLAWRFLMFQKDSALAHWYRARTADARGATRKALIIALARKLLVALWRLVTTGEVPHGVVLRPAA

SEQ ID NO: 360690 - protein, 426 aa, unidentified
MTYYAGIDVSLEMSSICIVDQAGSIVREFRVASDPQALAAALIGLGLMFGRVGLEAGPMSQWLHGGLAAAGLPVVLLETRQLRAATRAMSIKTDRTDARAIAQMVRTGWFRAVHVKSPLSQELRALLTARKLLVAKLRDIDNGIRGLLRGFGLKMGKVGERGFPARVRELVGGRRSLAMVIEPLLQVRGVLLAELEGLHRLVMTAARHDEACRRLMTVPGVGPVTALTFCSAIDDPMRFTRSRAVGPHFGLTPRRYQFGETDRTGHISKQGDGLARQALYEAANVLLTRTSRWSSLKAWGMGLARRAGMRRALSALPTSLRGIGLKPDGRGRPQARRRAAPDVARRHRVPLEQGGGRGLSAGRHGIQRPRSRRGTWQSKAATDTGPARPSPPARLARSACLTVACGGTTPTTNRSEQPRRDTQAGR

SEQ ID NO: 360691 - protein, 311 aa, unidentified
MNKTTIGVDISKAHLDACRWPGGETLRVRNDPAGHKALIRWIARGDARVVFEPTGAYHRGLEHALGRAGIAFSKVNPARARRFAQAVGTHAKTDLIDASLLARLGALLEPALAAPKPAVLDDLAELHLARAALVRDRTAAKNRAERLTLPLLRRQRARALRAIERALAEVDAAIAALIAGDEILARKAAILCSIPGISAITAAAILAGMPELGELEPGDAASLAGLAPVTRQSGQWKGSARIGGGRADLRRALYMPALAAVRFNPDLKAVYHRLRAAGKPAKLALTAVMRKLLILANALLRDGRKWEITRP

SEQ ID NO: 360692 - protein, 344 aa, unidentified
MGNTLRSCTSKLNLHYSHFVGLDVGKKTFDASLMSAAEKELSHKSFDNTPEGIQSLLDWIAGYHLSLSKLLFCAENMGSYVTELSVSSVSMGFSLALVCPLTIKKSMGLQRGKNDRIDAKRIANYAVLHYRKLELYKLPNKDLVRLRGWIIIRDNLVKQKVSSIKLLETFSQMAKLADVTESISFLEEQLKSIKEKILEVEEDMEQLIAASTSLYTNYLLLRSIKGIGIINAIVLLCVTDNFQRFDTPRKFACYCGVAPFEHTSGISIRGKTQTSSLANKEVKVYLTRAAITAISWDPQMKAYYKRKIAEGKHKASVINAVRAKIIARSFAVIRRQTPFVTLAV

SEQ ID NO: 360693 - protein, 326 aa, unidentified
MSTPIPSASPSSGSCIVGIDVAKDSFQAANDPQDFNASFAYDAAGIQALLDQLAPRRVELVVMEATGGYQRRLVAALAHAGYQVVVANPRQVRDFAKASGQYAKSDPLDAPLIAAFARAIKPQVRPLPSELQQQLAALVTRRHQLLAMSTQEQNRIQQAHDPFVKKTLTASLRNLEKLLAKVDQAIQDLIGNCPELQHKAQVLDDVKGVGPTSACCLLAVLPELGTVSRRQITALAGLAPYNCDSGNFRGQRHIFGGRAPARTILYMLALTMSRCVPDYRIFYQRLLRAGKKTKVALTAVMRKILVMLNAKLRDAMNSKNVTLALD

SEQ ID NO: 360694 - protein, 411 aa, unidentified
MRVHHTVCCGIDVHKKTVTACLMWGPADQEPQFQIRRFGTMTSELKALAEWLKQAHCEMAAMESTGAYWKPVWNILEGEIPLILANAKHVRALPGEKTDNKDGKRLASFVRHGLIRPSFVPPRDIRELRDLTRYRKKLLANGAAERNRIQKVLEDANIQLGSVLSDVFGVSGQRMLHALVEKPSLNVEELTALAHWRLQPKIEELKKALDGRVTAHHRFMIDLSLEHMQYIEKQVLRLDEQIDRHVEPYRKQFELLQTIPGIGETASASVLAEMGPDTSAFDDDSKLASWAGICPGNNESAGKKFGTNTRKGNRYLVSTVVECAWASTRQKGSHFKERYYRIRARRGSQRAIVAVGHTLIRTIFVVLQTGKPYEEPTRPVLTENQRLRKAQRLSKELHKLGYDVTLNSQPA

SEQ ID NO: 360695 - protein, 417 aa, unidentified
METYAALLAIDWADRQHAVCLYDQTTGKRAQYFIKHTPESLPAWLLGWRERFAGQRLAVCTEQSRGPLIYALLQYDFLVLYPVNPATLAKYRQAFSPSLGKDDPSDADYLLDLLQHHRERLKAWRPDDEQTRTLRLLVEQRRRLINDRTRISNRLTALLKCYFPQVLAWFPDLSTVLVCDFLTRWPTLEELQKSKSATLLKFLRAHHSVRAATNERRLAEVKTAVPLTTDTAVLTSSRLMVKVLVAQLRTVLASLAEYDRHIEALCQTHAEYELFASLPGAGPVYAARLTAAFGSDRTRWQSADDVLRFAGVAPAMERSGKQEWIRWRYFCPKFLRQSFHEYAAESVAHSFWAKAYYNMQRLKGKKHHAAVRALAFKWIRIIWKCWQTHTPYNEVIYLQSLRKSGSPLLNFVANNQG

SEQ ID NO: 360696 - protein, 347 aa, unidentified
MNISVVGIDLAKNVFQLCALGTNGSVVWNRKVTRSKFAAMLADLPKSALIAMEACSSSNYWGRYLTERGYRVALIPAQHVKPFAKRQKNDANDALAICEAATRPGIHFVSVKTIEQQDIKTLRTIRRRVVQQRTATGNQIRALAGEYGVVFPIGLRRLISAVPAALEDAENGLSIIARALLSQSLHRLHEMDRLVTDLTTQIGQLCKQLPSYSALQSIPGMGPLVSAALISEIGDGRQFKNGRQMAAWLGLVPRQYSSGGKLVLGSITKHGNNDLRVLLVHGARAVVRFVQRRSDPLGEWLRGLIARRGRHRAIVALANKLVRIAWSVLATQKRFDVALAFAPMRTA

SEQ ID NO: 360697 - protein, 395 aa, unidentified
MAVVGIDAHKHSHTLVAVDSGGAKLGEKTVEATSAGHAEALRWALGKFGPDLLWAVEDNRSVTGLLERELMAAFQRVVRVPPHLMARSRGPARAWGKSDPIDAIAVARAVLREPDLPVAFHDQASWELKLLVDRRDDLVGQRVEAMNRLFGRLHQLSPERPKPVKLQWATRRQALNDWLLEQPGLLAELSRQEVADIGYFSDSIEVLTKQIAIRVHELGSTLLSLPGCAELIAAKLISETANVDRFRNEAAFARYAGIAPVPMWSGSTECRLRLARSGNRQCNSAIHRIAVVQIRLDGPGRAYYQRRRADGDSGMGALRCLKRRLCRIVYNRLRADYARRTGPVVDAAEPLTGVKSSMPAWQASMDLAASLETEDRIEDELAEDDDDELPPTDDE

SEQ ID NO: 360698 - protein, 428 aa, unidentified
MNFNTQNAKIASITEKTLIVGIDVGSETHYARAFDWRNYEYTKKPLEFSNTEAGFMMFKAWVEDIAEKQGKTAVIPGMEPTGHYWFALGKFLQDSGMKPVHVNPHHVKKSKELDDNNPNKNDRKDPKTIAALVNEGRFSYPYIPTGIYAEIRSLSNLRFQTQEELTRIKNRLARWFAIYFPEYKDVYGDLKAVSGRLVLKEAPLPEDICKLGAEGVNKIWRDAKLRGAGMKRARTLVSAAEHSVGNKEASEAARFELRNLLKDMDVYALRLEELLQNMEEKLKEIPYVDKLMEIKGIGLVTVSGFIAEVGDIGRFDNPKQLQKLAGYAIVANDSGKHNGESRISYRGRKRLRYVLYEAAISLVGKNAEFREIHEYYRTRKENPLKKMQSVVAVACKVLRVFYAILTKGVDYDPLKLLGDIRRPQLPTA

SEQ ID NO: 360699 - protein, 419 aa, unidentified
MNYVGFDWASRAHDVTVLDEAGGVLDRWAFPHSETGWVTTLDRLARHGSAAEVPVIIERTSGLIVDRLLAAGHPVVPVHPTAFYAARPRWGASGAKSDPGDSYKLADYLRTDGHRLRRLTPTDPGLHELQALVRLRDDQVRARTAATNQLTAILDTYWPGPKQLFMSLASQIALAFLTDYPTPTSAAHLGEARMAAFCRRHAYRGGKSPAELLSRLRAAPVAPVGLPPATLAAMVTAQVTVLKTLQTVISDVERLIAVRVVAHPRSNLFENLPGVGMINLAQLLAEVGPILDRVDSAEQAATECGAAPVTRSSGQTRGVYFRWAANTRARKAITSFAHNARMQDDWAAALYADARARGKRNPHATRIVARAWLRVIWACWTSGQPYNLDRHHSSRFLHRCHPAGAQARSRWSPPPEERS

SEQ ID NO: 360700 - protein, 337 aa, unidentified
MDYFAGLDISMDETHVCVLDREGAVVYESKTVSTARAIADELAKAPSCGRIVFETGRMAPILFHGLSQLGLPVVCVESRQAYQALKSLATHKTDRNDARGLAHLARTGFFKPVHVKSLSAHAVRALIIARKKLVGQRVTLENQIRGLAVIFGVRLPRALTAAFIKQALKASEGVAGLSVAIRGLIAARTAVMTAVAAIDADMRRMTRASAACRRLMTIPGVGQLTALAFVAAIDDPSRIRRSRDVGAYLGLVPRRYQSGEVDYAGGISKCGDRRVRTLLYEAANVMLTRYKGQLKLKDWAFAIARRSSMRKARIALARRLAIIMHAMLRDGIEFVAV

SEQ ID NO: 360701 - protein, 340 aa, unidentified
MKKVSTIGLDLAKNVFQAHGADASGAVIFRKKLRRAHVLEFFATQPACTVAMEACGGSHFWGREIGNYGHRVRLIPPAYVKPFVKRQKNDAADAEAICEAAQRPTMRFVAVKSEAAQGAAVVFRTRDMLVRQRTQIINALRGHLAEFGLVVAQGPAHVAKLIMAVQDPKQPLSEAARPILCVLVDMLGLLDQRIKLLDIAIARRAKEDEVARRLMSIPGVGPVIATAMAALAPPAETFKRGRDFAAWLGLTPLQHSTGGKQRLGATSKMGERTLRRLLIIGASSVVRWAARKGAPAGSWLASMIARKPAMLVRVALANKMARVIWALMAKGGTYRAPVVA

SEQ ID NO: 360702 - protein, 416 aa, unidentified
MKKGQNTRGYQRYMALDIHREYILVGAQNAEQDWVLTPRRVSTGKFSEWAKKNIRAGDIVVLETTTNVWTVYDIVAPLASRVLVANAAEVGEIANARVKTDKEDIKRLLKLLIGGIVPEVWVPPMQVRELRAFTSYRGRLVKTSTMIRNRLQSLLHKHNLDLSEAGLLDQAWWEAQKNISALEQMQIRQELVLLQEVEKLKVAVDEELQRQSTGSTWGKQALQIMQLPGVGYIVAMTVLAAIGDISRFENAKQLVGYSGLGAGVHDSGKTHKEKRITKKGRRELRWAMVEAAWRAIRMSPFWKAEYEKHLKRMRKPNQAIVVIARKLLIAIWHVLSKEETDLHASEEDLAYKMLLLSWSLSADVRMGLTYKQFAKYALMKLGVETDITRFVRRNVPRRLAPREEVLTRMTELGLTA

SEQ ID NO: 360703 - protein, 343 aa, unidentified
MKNITVLGIDLAKDVFQLHGVNEHGKKILGKKVTRSALPTLIAQLPKCKIVMEACGSSNYWSRKFMSYGHEVSQISPQHVKPFVQGNKNDKNDARAIVIASQQDGMPTVPIKTVEQQEVQMLHRYRESLVHDRTALANRIRGYLREVGLFLVVGLSQVRKQVPLLLEDAENELTTEMREIIASCHKKLLDLDAEIERYTQKIEHFCKRNPMCGRLMQLPGVGPMIASIVYATMGSPTNFKNGRHFAAFLGLVPKEHSSGGKHCLMSISKRGDRYIRSLLVHGGRSVVKHASKKANYLSSWVQRVHKERGYNKAAVAVANKNARHMWAIMAYDDKYVDHLKLCA

SEQ ID NO: 360704 - protein, 338 aa, unidentified
MRYVGVDLHKHSISLCVVELENRARKVIERRRFHCDRVFQMEEYFASLGEYQLVVEATASYEWFVRLVEPTADRVVLAHPAHLRVIAQSKRKTDKLDAQTLAEFLALDQIPEAWRPTPRVREHRVLVRHRNYVVRRITSVKNKLRRVLSHYNADLKNLFTEAGREYLATIKLSEADRFVTDQLCEELDQHSARLKGVDKQLRAFAKTAPVAEQEARAVLASMPCVGPVTIDVVLAEAGDVRRFGSQRKATAYAGLAPGIRESAGKSKQLGITKEGSRLLRAILVETAWRLVNRTRRWASVYVKLRARCGAKKAIVAVARRIWCVMVSMLQSGRRYQPA

SEQ ID NO: 360705 - protein, 402 aa, unidentified
MNCVGIDVSKGKSMIAVMRPFGEVVISPFEVQHTASELSELAKLLKSLDGETRVVMESTGNYHTPVAWLLHDAGLYVSVVNAMLVHDYGNNSLRRAKTDKKDAVKLANYGLDHWLTLPRYVPEEDTRLLLKNCYRQYQQYSKVQTMLKNNLISLLDAVFPEANRLFNSSPRADGSEKWVDFVSTFWHCQCVSTLSLKSFSARYLKWCRKHGYYFSQEKASEIHSKAQSCISVMPRNETTKLLVQQAIAQLKATAAALAALKQEMQSLAAALPEYPVVMEMFGVGSTLGPQLMAEIGDVRRFHSKKALVAFAGIDAPPCQSGQMDIHSRSISKRGSAALRRTLFLVMGIYLQSAPLDEPVYQFMDKKRSEGKPYKVYMMASANKFLRIYYASVTAYLNTLARI

SEQ ID NO: 360706 - protein, 413 aa, unidentified
MDVIHPRCAGIDCSKKDAKVCVRIQGQGRRKKSATVSTWGATTGQILALREHLVAANVTCVVIESTSDYWKPFHYLLDDALDVMLVNAAAVRNLPGRKTDVSDAAWLADLGAHGLVKASFVPPAPVRELRDLTRTRTVITRERTREMQRLEKLLEDTGIKLSSVASDITGVSGRAMLEALIAGQRDPAVLADLAHGRMRQKIPALTEALTGRFNTHHAFMTRLFLDRIDAHSADIARLDARIEEAMAPFLPARDLLISIPGFSRITAEVFVAETGADMNVFPTAGHLASWAGLSPGSNESAGRVKSTKARPGNRYLKGALGIAALTAARSKNTYFSAKYRRIASRRGPMRAIVAVEHAMVIAAFNMLVNGDFYRDPGADYYTARQPARTRARAISQLETLGYRVTLEPLTNTA

SEQ ID NO: 360707 - protein, 458 aa, unidentified
MNDSRPTPKRLPLDSLACVYPNAAGLDIGAREIVAAVPPDRTTTPVRAFATFTPDLHQLVEWLIQSGIDTVAMESTGVYWVPIYELLEQNGIKPFLVNARHVKTGPGRKSDWNDAQWLQKLHALGLLQGSFRPDAEMCVLRTLLRHRAELIQHRAPHILHMQKALKLMNLQLPEVLTNIVGVTGQAILRAIVAGERDALQLARLRQPNCQSTTADIVKALTGDWREEQVFVLKQSLELFDYYTQKITECDHQIEQQFSTMKPRFDSTPPPATVPRVKRTQQKNQPNYDAQTYLLHLTGIDLTAVTGISGSSAQTILSEIGTDMSRWPTVKHFCSWLGLAPHNDISGGQVLHARTLKVGNRAAQALRQSVQSVARSDSAYGAYFRAMRARLGPQQAAVATAHKLARVIYHLLKYRDAFQAESAEEYERQRQDRELKYLKRRANKFGYQLMPVPEPAGVT

SEQ ID NO: 360708 - protein, 339 aa, unidentified
MQLYAGLDLHSRNTYIGIMDKEFKRVFGKRVSNTLPLILTTLDPFRDQLKGIVVESTFNWYWLIDGLMNAGYQCVHLANPSAMKQYEGIKHTDDQHDAFFLAQMLILGILPQGYIYPKEDRPVRDLARKRLFLVRHKTSHILSLQSLIARCCGQRVSANEIRKFTVEDLQQLLEQEYIVLSAQANLQTIVFLKQQIRQLEKAIQKKVKLSKAFQQLMTVPGIGLILAMTIMLEVGDIGRFPQVGNFASYSRCVSSQRLSDGKSKGHGNRKNGNRYLSWAFTEAAHLSRRYNERFRSYYNRKVAQANTSLATKALSNKLARICYYIMRDQVAFRDNLLSQ

SEQ ID NO: 360709 - protein, 356 aa, unidentified
MGEGSWVGLDVHARSVVAGVIDRGSGEVRSLRLPSDSDATVAWLLALPAPVQVVYEAGPTGYRLARACAEAGIDCVVAAPSRVRPAADRVKTDRRDAERLARLLRLGEITPVRIPTLEEEAARDLVRAREDARGDLMRARHRLSKLLLRHGLVYNATAWTRTHDAWLRRQRFDGGPLAIVFDECYGRMLDAKSRRDTLDKAIVELAAAPPYVDVVERLVCLRGVSTLTAFALTVELGDWHRFRPESLGPFLGLTPSEHSSGERRRQGAITKTGNSHVRRLLIEAAWHQRSPSRRSVTLERRRHGKPLAVQAQAERSARRLHARWHALEARGKPRSIVVVAVARELAAHCWALATMK

SEQ ID NO: 360710 - protein, 403 aa, unidentified
MLFVGDDWAEDHHDLYLMNEAGKKLAAQRFPEGLAGMRLLHDLIATHAQEPAQVIIGIETDRGLWVDALTGAGYQVYAVNPLAVARYRERHAVSGAKSDAADAKLLADLVRTDRHNHRLIAGDTPDAEAIKVLARAHQNLIWTRNRHTNALRSALREYYPAALAAFADLADRDALALLGRAADPRQAASLSLAKIRSALKAAGRQRNIDTRAIEIQAALRSEQLAAPAAVTAAFAATTRATVGIIVELNRQIDDLETELTAHFETHPDADIYRSLPGLGVILGARVLGEFGDDPNRYTTAKCRKNYAGTSPLTIASGRKRAVLARHIRNRRLYDAVDQWAFCALTRSPGARLFYDQRRAAGDLHHQALRALGNRLVGILHGCLNHRSHYDEHRAWAHRQPAAA

SEQ ID NO: 360711 - protein, 348 aa, unidentified
MKIIGCDFHPSYQQIAMVDTETGELWEGRLEHEQGEARRFYQALQGQQVRVGMEAVGNAQWFERMLASLGQELWIGDAAQIRQMVVRRQKTDRRDAQHILQLLLDGRFPRLWVPSAAMRDVRQLLRHRQKLVEMRTQVKNQLQHLALNQGVQRKRRLWSREGRAVLEGLPLEGWTARRRADLLAMLDRLEAQVKELDEAVCQEAWQRPAVRLLMSHPGVGPVTGLAYVLTIGPVARFPRGKQVASYLGLIPREHSSGGRQKLGAISKQGNTMMRTLLVEAAQNAARLDQELRRDYQRLKARKHSALAKVMVARKLAVRMYWMLRENKPYTPRPVARMQGGPSHSVVAG

SEQ ID NO: 360712 - protein, 392 aa, unidentified
MLKYCVGIDVSKTELQCCISVIDQLQKVTVKSSSKFANNKTGFTRLHQWISTRHKHQEVPLVVVMEATGIYYEQIAMYLFEQHYAISVVLPNKAKKYLQSTGLKSKNDKIDAQGLARMGAEQRLELWQPMDSYFYQLRELTRQHQSLQELKTSVNNQLQASEAGMYQNKLVVNQLNALLTTLDGQIRELATAIEKHIDDQEEVKHKVENICKIKGVGPLTVAVILAETNGFVLFNNSRQLVSYAGYDVVENQSGNHKGKTKISKKGNSHIRRALHMPAFGVVSYEQHPFIDLFNRTLQRHGQKMKSYVAVQKKLLAIIYALWKNNSAYELNHQHNKEKHTGEKEQVLSSLPGLEQADPIAAGQKNSASLQQQAALHKVNILSNDRSLLPLCQ

SEQ ID NO: 360713 - protein, 403 aa, unidentified
MSEVFAGLDWASRLHAVCVIDERGVVRLQCEATHDAAGLAELMRRLHAAGVERIAIERPSGLIVDALVEAGFTVVPIHPNIVKATRPRYRSHGGKSDASDAYLLADLLRTDGHRFKSLTEQCDDIRALRALVRGRDELVDARIQLANQLRTLLESFWPGAASIFADIDSPIALDFIQRYPTPESARRLGPKRMAAFCAQHAYSGRRSADDLLERLRAAAQIALGDMETRVKGELALALARTLAKLVEQIRLITSRIEHDVAAQDDGLILMSFPRAGRVCAAQILAELGSVRERFDSEDHLAAEAGVTPVTYASGKCKSVAFRWACNHRLRRAITCLADNSRHASAWAAAIYANARARGCRHPHAIRILARAWLRVIWRAWLDRKPYDPALHGGLQAMLKTAGG

SEQ ID NO: 360714 - protein, 392 aa, unidentified
MYIVGIDIGKNHHEASIVSPEGKQIGHSLRFATTHKGADSLMSFIFNNIGNSSCIFGMEATGHYWYPIYSFLKARGYTIYVINPIQSDSLRKMYIRQTKNDSIDSFLIAEVIRFGQFGTTSMADENILAMRQLCRYRDSVISSRTEIKLRIGTIMEQIFPEYEKQFSSLWVSTSMGILEKYLTPDNIENAPIDELFEIIKDKSHNRLTRAKAISIKEAAADTFGIKIAQDAFSFQLKQLIDRMNFLDKQIEALDCQILEYYEKFDCYLHTIPGIGMIAAATILAEIGDINRFKSSSALVAFAGIDPTVRQSGEFSSTHNHMSKRGSPYLRHAIFLAATTCSFHNSPLNAYYKKKRDQGKHHLTATGAVARKLTTIIYAVLRDSKPYEPKKFC

SEQ ID NO: 360715 - protein, 392 aa, unidentified
MAPTRTTHFMPTDDVVAVALELSNGSWKLALQDGKHQNPAIQTVSADNPARRLEQALDVIARIRDKWAIDPAVPTVVLYEAGQDGFWIHRALSKLNGFEVYICDPSSIPVARHARRAKTDRLDAIRLVECLLAWLHGERGRMRVIHVPTADEEAQRHLVRDRGQMQKEVLQHQDRIRKLLRTVGCWQSIDGDIGKRLAQGQLRCHDGSALPAQLQHRLSRECERLALAEQQFATLEKNLIEQLPPVLQERVAHLRKLKAIGRVGAVRMVLEFFWREFDNRRQVGACVGLVPQPYDSGDSRVDQGISKQGNRKVRSLSIELAWLWLRYQPNSAITKWYLRRVHGNEKNKRGKRIAIVAVARRLMIALWRFLAQGEVPQGAVLKKVKGTALSAA

SEQ ID NO: 360716 - protein, 346 aa, unidentified
MKIVGCDFHPGHQQVALLDTVTGEVKEMKLSHADGDAERFYRELEAPALVGMEAVGNTLWFERLMEQLGHELWIGDAGQIRASYVRRQKTDRRDAGHILQLLVDKRFPRIWTPSSGQRDQRQLLLHRHKLVRMRTQVKTELQHLAMNQGMQQKRHLWSVRGRADFKKLPLEGWTERRRRDLLELLLLLEAKLAELDRAVELAAAQDAQAQLLMTQPGVGPVTALAFLLTIGDVARFPRGKKVASYLGLIPREHSSGTKRRLGAISKQGNVFLRTMLVEAAQSAVRHDDGFRKEYAHRCHQKPTGVAKVAAARKLAIRLYWMLRTQTPYPQVVHNEGSPSHSLVGES

SEQ ID NO: 360717 - protein, 407 aa, unidentified
MEVVYRCCCGIDVHKKVIVACLVNGGEQELREFGTTTSEIKTLANWLTESGCEMIAMESTGVFWKPLYNLFELMDLDAMIVNAAHMKALPGRKTDVKDAEWIADLLRHGLLKASYIPNREQRELREITRYRKSLTEERCREVNRLQKILEGANIKLDSVVKDITGKSARKLLQRIIDDDIPDSDEVSKLVHGRMRPKLDQIVASIEGITTPLQRKLLAQIIDHIDDLNRRIGELDKLVQEYMAEYEAAIEAIDEIPGIARRSAEVILAEIGLDMGRFPSAAHLCSWAGVCPGNYQSAGRRKHGKTTKGNKALKTILTQCAKSAKTVKSSYFFAQYQRISARRGKNRATLAVAHSMLIAIYHILKNKTAFHDLGSDYYDSFNRERKINSYLKRLKALGWEPDAIPSSA

SEQ ID NO: 360718 - protein, 397 aa, unidentified
MLICGIDIGKNHHEASMISGDGHLIGKSLRFTNTTDGGEKLITYLSAHNPKGENIVIGMEATGHYWLSLYCFLFDKGFQVNVINPIQSDAVRHLFLRKTKTDRKDSFLIAETIRIGRFSNTELADEDLLSMRHLCRHRMNLVDYIADQKRKIIGVMDRIFPEYQTLFSDMFGKTSTELLSRAVTPEEVLALDTQELCDLLRTASRGRFGMIKAEEIQQAARRSFGITIGVSAFTLQLRQLLEMIALLEKQLTDLEAQIEQYLLSMQTFITTCPGIGNVLGATILGEIGDISRFSEPKKLVAFVGIDPSVRQSGEFIGTRNKMSKRGSPHLRRAIWLAATVAAFHDPVLSAFYQKKRAEGKHHSTVIGAVARKLTLIVYTVLRNNKPYVPADQLPNSS

SEQ ID NO: 360719 - protein, 428 aa, unidentified
MNEDELSRLKEFRQLKKQIQGSENHLVVGIDVAKDRHHAFLGTATGKTLVKKVIFENSASGFSELLARVEAVRAQSGLSGVVFGLEPTSNYHKPLGRYLISKGCHVVLVGGKAVKNNRELLDERWDKHDTKDAANIADLVSRGKCFYYDRPSGQIEELRELHSLRARLKKEEHSLNLRIRNNLLAKHFPELDSFYTASERETLAIVRWCLNPQQIAGMPFDEFFKRVAPNARGIGQKLRLQKIHRLAHESIGCPVDSAVQLQAGLLVEKIKQVREQIVQVEQVIQQLCVQFPSYEHLLSIPGFGPYVASKVLATIADPRRFDTAKQVIRTAGYDLCADRSGKSSDQSVPVISKKGNSQLRYALYQAALIASSRHRFFMAYFARMLQGRERERGIRTKMRVKLAAKMLVIAWTLMKRGELFNPEYLKVQ

SEQ ID NO: 360720 - protein, 341 aa, unidentified
MENVSIVGIDLAKRSFQLHGAAADGSVVFRKKLSRPQLTAFLSELPRCVVAMEACATSHYWGREIGKLGHEARLIPPVYVKPFVKRQKNDANDAEAIAEAASRPTMRYVSVKSAEQQSQGMVFRTRDLFVRQRSQLVNALRGHLAKYGVVVAQGMVQFRRMITSFDEVALDLPAQIVSLCQAYIDQISLFDERIVALDHEIKGRAKTDEATSRLMTIPGVGPMCATTIQAFAPPMEEFSNGREFAAWCGLVPRQKSTGGRQILGRTSKMGQRDIRRLLITGAMAVIRWAIRKGPPPGSWLAKMLARKPRMLVATALANKLARTVWALTTTKENYRIPPLAA

SEQ ID NO: 360721 - protein, 342 aa, unidentified
MQAITVGLDIAKSVFQVHGVDCNGQVVIRRQLKRRYVLTFFEKLAPCLIGIEACASSHHWSRQLLALGHDVRLMPPSYVKPYVKRQKNDATDAEAICEAVSRANMRFVPTKTPEQQSGLVLHRTRHLFIRQQTSVINAIRAHCAEFGIVAPVGRQGVEELLNVIADAEDEQIPEIARACLSALGDQLHRIKAQILEFDRMIGAWHRSCEASRRLDEIPGVGPALATALVASIADPRTFRSGRDFSAWIGLVPKQSSSGGKPRLGSISKQGDRYLRGLFTAGALAVIRYAKIHGIGHRPWLTALLARRPTKVAAIALANKIARMAWAMMARGERYREPVALAA

SEQ ID NO: 360722 - protein, 346 aa, unidentified
MTIVETRAITGGVDTHADVHVAAALDPIGGLLGVAEFPATAAGYARLLGWLGGFGTVCLVGIEGTGSYGAGLARHITAAGVRVVEVDRSDRQDRRRAGKSDPLDAVSAARAAQSGRARGAPKGRDGAVEAIRALMVAKRSARAERTQTINQARALIVTGPDDLRTRFAQHTAAGLVTELASLRPRPGDVVGYATRIALRELGRRATFLDGQLGRLDELIAPLVTARAPGLLALYGVGPDSAAMLLVAAGDHPERLRSEAAWAHLCATAPIPASSGKVTRHRLNPGGDRQANHALWQIVITRMSSHPPTRAYAARRGKEGLSKKEIIRCLKRYAAREVYPHLRPPAG

SEQ ID NO: 360723 - protein, 381 aa, unidentified
MYCGLDVSKNKSNVCLLDEDKKVINEFEIKHDIEGFKELEKYLTPETKIGMEITGNYSKIIHRYFSANYKVIYIDSRQMNTFARLYSPTLKNDKADAKLIAMALTIDLKSVIPSKMDELKNISLLYQKTVKQLTRYKSMFKDQINIIFPELENLMCNNGNMGLANMLLKYPRPIDIVNATDEELKQALRENLKRAGRFDIAYAKEVKAIAQKSVGISDYPIAYFLHVIKTMLFYKLQTIEIKKGIDNCIKKTPYYKLMNEFGYNLAGLSTILGEVGDINRFATSKKFASYCGFSIYEKKSGTSVNKSSHIAKSGNRKLRYAFYMMALIHLRYKTEYSKFFYKLKEKGKHPKKCMIALARKLAVKCYYDLKGCLVTPGTLPV

SEQ ID NO: 360724 - protein, 398 aa, unidentified
MNGSKQEMTAPERAAGRVLGLDMHPDSFTAAALLGPNAMDAQVEWVHDHLPQERLEKWLQKYVEPRDLIVIEASGNTFHTVERIRTCGYNAVVLEPLRASQVRKAYCTTDKISAVKLARVYLSGLAVEVWTPDEKTRERREVLHAHRRAVQDTTRGRNRIRSWMNQFGIRRRKGLRLSDQSGRQWVLEQREWSCTQRLLIDQMFNDLWQAEARRKKLRQVMAEEVATDTELLKLNRLFGIHVIAAYALAAVIGDIHRFRTPRKLAAYLGFSPNINRSGLGKRDGGSSPWGCGEMRRILIQAAKTIMRYDNTPLHRWALALACRKGRNLAAFAVARKLTVAVWYLLKGFFSPLTEPTPLLRRKLEKLGKEVGKTRLVELGYRNSGVFRDQKMTILIGNT

SEQ ID NO: 360725 - protein, 344 aa, unidentified
MVTFGVDAHKRTHTIVAVDDHGTPLGQTTIGTTSKDHLGLVRWAARFGAERRWAVEDCRHLSRRLERDLLGAGEQIVRVPPKLMAHLRDSARTYGKSDPIDALAVARAAQREPDLPAARLDGPERELRLLVDHREPLVAERTRLICRLRWHWPELDPCWEPKARSLDSQRTLDAILRRLAGQTGLVARLARELTNRCADLTVSINALKVEIAELAQRLAPALLAIPGCGALTAAKIVGETAGVERFKSRDAYARYNGTAPLPVWSANKARHRLSRTGNRQLNAALHRIALSQARWHPPAQALIERRRSGGNSGREATRILKRRLSDAVFQALQTDQSEHLILAA

SEQ ID NO: 360726 - protein, 339 aa, unidentified
MLSIGLDVHARSSVLHALDENGNTVAAERIRGAIGKVLPHLRQIKDTFRQPLAVCYEASCGYGAVYETLARAADRVVPAHPGKLRLIFASRRKNDHQDARHLALLLKLDAVPTVHVPDINVRDWRMLITHRESVLRRRVAVKNQIRALLRTYAITAPKGLFSTKGRVWLAAVAFETRLTALRRDMLLTDLENATTQLKRVEAELDAIGRSHPGVQLLQTIPGVGIRTAEAVMAWIDRPERFTRNRTIGSYFGVVPCQDQSADRNRLGHITRQGPAVVRRLLTEASWQSIRHSGRTRRYFERVMRGDGERRKIALVAVGHFLLRAMLSMLQSGEVWREDA

SEQ ID NO: 360727 - protein, 327 aa, unidentified
MMFIGIDISKEKIDLSWLRDQLTNKIKTKVFKNKHQDFEKIEKWLLNTTKSVASELVITLEPTGVYHEALMYFLHEQGFNIILANTGKAKKYADALNIIHKTDKSDATMLAHYGCAKHAVVDYWQPEALEVRELKALIRRLDALESNRQREANRLDANEFSNVSARVCQSIKVTIAFLDDEIKQLKSDIDNHIDNEPGLKRNRKLLESIPGIGHVLSRELTYLFAAKKFNKAKEAAAYCGLIPRHNESGKLKGRTTISKLGPARIRCKLYMAAIVAGQWNKRIKRHKLTLINNGKTPMQAVCANMRKLIHICFGVIKNQEEFKLQES

SEQ ID NO: 360728 - protein, 403 aa, unidentified
MKQIVIGVDPHKLSATIEVVDQHERVLGSGRFATDKAGYAAMLGYVAQWSSPTWAVEGSNGAGRSLAQRLVAGGEHVVDVPAKLAARVRLLDTGHGRKTDAHDAHAVAAAAVRAKKLRVLSENPELESLRMIVDRRDELTRQRVQTVNRLQRLLAELIPGTSKKDITVLQAKAKIASVRPRDLVGKTQRRIAAEELADLVAVEKKIKTLTKDLKTIVEASGSSLTTLPGVGTIVAARVLAEVGDVTRFADRNRFASWTGTAPLEASSGEQVRHRLSRAGNRRMNHMLHIAATTQIRLDTAGRAYYRRKIAAGKTRMEAMRCLKRRISDAVFRQLLADARADANRPVGAGPVGHCGASRESSAVDFHPLIDTSDQPLPGPAETTLQPDPRRRKTAGSSALSPAS

SEQ ID NO: 360729 - protein, 346 aa, unidentified
MLYAGLDLSRKRLDFCLLDSEGATVEVGAAPPDADGLLGLTQRLDRHREPIHAAIESMNGARFVHDRLELAGWEVEIADAQKVKGLAPLACKTDRIDAWVLAELARRDLVPAIWLPDPMVRAERERGRWRLHLVRHRSSLKQRVHAVLLTHGKPCPVSDLFGVRGRQLLAQLGLPEPWQATVEASLRLIDELEREIGDCERELRRLGADHRYVPLLLTVPGIGWVLAYTIAAEIGDIGRFPSPRKLAGYTGLCPRVYQSGERDLRGPLAKQGPKYLRWALVEAATHACTHPVYRDRYQHTKVRIGKQRGAKVAQIDLARRLAEAIWHMLSRDQPFAPKGATDPLAA

SEQ ID NO: 360730 - protein, 487 aa, unidentified
MNRNAHTSKKQTSKTAASEGRRGKEEQAEFIKKCEEIVKGLQAHSWKDLEVGHKFRHNEKLDLITAGSLIVGCDIGSVKHFIRAIDAQGRALTNKPFPFENDEEGFKAAHDWMVKVAAQNDKTQIVLALEPTGHYWFCFAAWCTSHGITVVQVNPYAVKATKEIQDNSQLKSDRKDPGVIAELAKNGNYSIPYIAEGTYASLRELELFRERVSEDRIRDINRLCQEMDKYFPEYRRIYKEVDKVFSLAVLAKAPLPEDIVRIGEDGVRALWHSEKLRGGGYSKAAELLQKAKHSVGLREGQAQARMSIQYLAGSIRDKDARLDEIDAEITKLAKSIQCVEKLTAIPGLGERIISGILSEIGDLIRFDGVKEIQKYSGLGLVSESSGKHNGETHISHRGRKRLRYWLYIGARSVVVHSSEFAKLHTYYTTREENPLKKMQSLMAIACKLLRVIYVILTKGVDYDPQKLLGDIVRPENAKNKTKGAAVA

SEQ ID NO: 360731 - protein, 415 aa, unidentified
MEGLSPLHRRVAGIDVHRMLHVVTVLIEQPDGSMAKHSREFAGFKRDCRALAAWLAELEVQLVVMESTGIYWKSVYAHLENAGIQAWVVNAHFIKHVPGRKTDMLDSEWLAVLARFGLVRGSFIPPKDLRELRLVSRYRRKLSAICASQINRLHKMLDDAGIKLGAVVSDIHGVSARAMVRGLIEGQSQAMLLSHARGALKRKTEALAASLDGDLSERHLFVLRHLSDSIDALQRQLADLDAYLLRAMQPYAWAHGLLQTIPGIDTTAAALILIEIGEDMARFGSPERLACWAALSPGNNESAGKRKSGRTRHGNNAIRYILCECANAARLTKSTLASKYRSLMVRKSHKKAIVAVAHKMIRLIYILLSRRQPYLDQAIDYAAMSAKKNAPRWIKQLKAIGKWPTASAPAAHAAT

SEQ ID NO: 360732 - protein, 367 aa, unidentified
MEKSSKVYVGMDVHKESIEVTLAEQGGEVRRLGQIGGDRGSLLKMARKLQSKGGERVFVYEAGPCGFWIHRELAALGERCMVVSPALVPKRAGDHVKTDRRDSERLASLARAGELEAIHVPDIRDEAIRDLVRGRDDAVIAQRRVRQQLKALLLRNDIRYVGRTSWTGAHRRWLSELKLPEPAQRIVFEEYVDAITVATGRIERLTRAIDTEVLTWRFAPVVAALQAMRGIQFVHAVTLIAELGDLTRFGSARQLMGYLGLVPREDSSGEHRRQGSITKAGNSYARRALIEAAWAYRHPARVTRIIATRQTGLPKTACDIAWRAQLRLSAKYRRLNARHLHHNKIVVALARELSGFVWAIGQCVKPQ

SEQ ID NO: 360733 - protein, 353 aa, unidentified
MSDDKYIAFDVHQVTTVISVLNASGREVKTAILPTQAQPLVAFLEGLRGTLHLTLEEGTYAAWLYDLLQGRVGKLIVCDPRHNALLKEGNKTDAGDARKLAELLRAGMLRAVYHGSRSLRALQELAHAYEALRDDTPRVMNRIKAFYRSRGIDCAGRGVYRQGQRASWLERLPAGASRLRAELLHDELDQVGSLRRKARRALLTESRKHTVAARLRQIPGMGPLRVALLMAHVQTPHRFRSRRNFWTYVGLGVVYRGSSEYRLAGGHAVRRPQALQPRGLNPNHRPELKEIFKSAALTAIRRPGPFKNYYDLRLQQGVDPAILRVTVARKLAALTLSLWKKGGHYRVPGPQQA

SEQ ID NO: 360734 - protein, 406 aa, unidentified
MYYLGIDVSKSTSRFVILDDNGERFTKAFTLQNNNQDFRKLLLRLKELNLKPANLLAGVEATGIWWENLYCLLTEKKFKVIVLNPHQTNKFREALRKKAKTDDIDAYVIAGLLRSKDYAASFIPEELIQVLREITKLRYQLIKDRKNFQRQAYSLLSLVFPEYPKTAIKNPFAVASTAILKAYPTAKHLSLAKPKHIEKIVRSIKGNNFNIKEIQQLIDTAKDSIYSGRARDDRGLNLNLLLSHVEHLNKSIAELNQRIQEILAPTNNDDFNSFPGVNLLTIPGVGPKTVAAVLSSVGINGQSFSSGKQFIGHIGFFPQIYESGETKRANKISKRGPKYLRWALYVAAVACIKHNPQFRVLYHKKISQGKNGKQALVYVAKKLAHLCLSMLKSGETYRPERVFMPA

SEQ ID NO: 360735 - protein, 310 aa, unidentified
MEPIFVGIDVSKDRLDVHVRPGGEAFVVSRDGKGLEELVGRLQALGPTLVAVEATGGFETIVAAAVAGAELPLAVVNPAQIRHFAQAVGQRAKTDPIDAGVIAHFADAVRPVPRTLPDEASRLLAELVGRRRQIIDMMVAERQREKRAANVRVRKSLARHIAMLEKELGAIDQDINTLVRGSPVWRAKEDLLASVPGIGKTLARTLLAELPELGSLDRRHVASLAGLAPYARQSGRWRGRSMIGGGRAAVRSACFMAALVASRCNPPLRDVYQRLVAAGKPKMVALIAVARKLLTILNAILRDNRSWQSA

SEQ ID NO: 360736 - protein, 351 aa, unidentified
MMIIGVDYHPSFQAIAFLIEETGECGEQELNHSDGQAEKFYRDLKQRGICVRVGMEATGYSRWFERLLAELGFELWIGDPAEIKAKRVKKQKFDREDARLLRRLMLENNFPQIWVPSPENRDLRQLLWHRHRLVQMRTRIMNQLQALAMNEGYRWKKKLFSEQGRAQLEKLVLAPWASRRRQELLELLDRLNPTIEELTAAAEREARKRPEVLRLMSHPGVGPLTALAYVLIIGTPERFDCGKQIGTYVGMIPSEDSSAGKQRLGHISKQGNSLLRFLLVEAAQAAARINPEWRRRYTHLAMRRHKSIAKVAMGRKLGVRLYWMWRNGCEYSQSLEFGSYVGQLGTGHGVK

SEQ ID NO: 360737 - protein, 445 aa, unidentified
MDVVFTRCAGLDVHKKSITACRMVPDPTGCEAEGIMELRTFGTLTRDLLSLADWLTEASITHVAMESTGEYWKPVYNLLEDTFTVFLVNAAHVKNVPGRKTDKADARWLAKLMRFGLLQASFIPPKGQRDLRDLTRYRTKLVQERVREVNRVQGVLERANIKLASVIADILGVSGRAMLEALIAGRADPAAMAELAKRRMRSKIPLIEQALTGIVQDHHRQLLAMQLAHIDFLDEQIEALNRAIEASLSALSVDAPASEEKALLSSPSPVSPPVASPTLTFTRAVELLDTIPGIDQRGAEVIVAEIGVDMSRFETAPRLAAWAGVAPGNDESAGQQRSGKTRKGHRPLRAILTQLAHAAVRTKGTYLSALYQRLAARRGKNRAIIAVAHAIMRSAFYMLSRQEPYRELGANYFDERRRHYTVDRLARRIEHLGYRVHLEPVASVA

SEQ ID NO: 360738 - protein, 465 aa, unidentified
MISKNTKKSKGIKQTKLDYININAAGIDIGSKSHFVAIPEGRDEQTVREFPTFTNSLIELVNWLKKNLITTVAMESTGVYWIPVYDMLEEHGFEVLLVNARHIKNVPGRKTDVIDCQWIQQLHSYGLLRGSFRPKDKILQMRTFMRHRSTLIEYQSSHILHIQKTLSLMNIQLKNVIRDITGVTGMAIIRAIVAGERDPAILAKNRDPSCKNSEAVIRESLIGNYQDDHLFCLKQALELHDFYVRKIADCDQKIEKIMKEMEDLSDKDGKISNTGEETSKKRGKLKRSSKKHGYAFDMHQQLIKLTGVDLTAIPGLNVQTVSKIISEIGIDMSKWETSKQFASWLGICPGNKVSGGKRLSGKTAPSANRAAAAFRIAANALRLTDTALGAFFRRLSSRLGAAKAVTAGAHKIAVILYNMLKNGLEYMESGAKYYEEAYKDRCLRNIERRAQEFGFALTPLAPGES

SEQ ID NO: 360739 - protein, 414 aa, unidentified
MEVIHPRCAGVDISKKDAKVCVRIQGRGGRSTTSTITTWGSMTGQILGLKEHLLDEHVDLVVMEATGDYWRPFYYLLEDDGLNIILVNAHDARNVPGRKTDVSDAAWLADLGAHGLVRASFVPPPPIRELRDLTRARTIITQERTREIQRLEKLLEDACIKLSSVASNITGVSGRLILQALIDGQTDPAALAEMAQRRLRSKIPELTQALNGRFTEHHRYMTGLYLHRIDAHTADINDLSARIEAAMEPFRFARELLVSIPGFSTTIAEIFIAETGADMSAFATAGHLASWAGTSPGSNESAGRTKSTKTRPGNRYLKGALGIAALSCAKSKNTYLGARYRRIASRRGPAKALVAAEHSILTAAWHMLTTGELYNDPGADYFTRQTPVKTMARAVRQLESLGYQVILEPLQQTG

SEQ ID NO: 360740 - protein, 315 aa, unidentified
MDREKLTVGIDVSKEQLEVAFDETHQTQCIENSTTPIAELTQKLLPLQPKLIVVEATGGLERLLVLHLAEAKLPVVVVNPRQVRHFAKALGILAKTDSIDARLLVRFGISVNPPVRIIKAEEQQQLADQVSRRRQIVTMITQEKNRSKRATGQVLRDIQEHLAYLEKRLSRLDDQIQKALEASPIYKATAALLISVPGVGQGTASVLISHLPELGHISGKQASALIGAAPFNRDSGGRRGPRLVWGGRKMVRCQLYMATVAATRCNPVIRCFYRRLIESGKKPKVAMTACMRKLVVILNAMLRDNRSWDAQLLKT

SEQ ID NO: 360741 - protein, 347 aa, unidentified
MNITRIGLDLAKNVLQVHGVDERGKALLRKRLKRGEVVAFFARLSPCLIGMEACGSAHHWARELAALGHTVRLMAPQFVKPYVKANKSDARDAEAICEAVGRPSMRFVPVKTLEQQSVLSLHRARQGFVAARTAQANQIRGLLSEFGIVIAKGIRQIESRVPEILEEAENGLCGMNRALFQRLFEHFRQLDRQVKQLEEQIHAWHREQVDSRRLAGIPGIGPLTASALTAAIGNAREFAHARQLAAWLGLVPRQASSGGKDRLLGISKRGDVYLRTLLIHGARSVLRRTRACPDAAQGWLAQLVDRRNPNVAAVALANKNARIVWALLAHGREYQPGYVGARLPTAA

SEQ ID NO: 360742 - protein, 352 aa, unidentified
MFWVGLDLHKRYITACALDDGGRIVAEHRRLPPDVAALVGWLQGLGGAVTVAMEATLYWAWLHDQLTAAGIGAVAAHPYQVKLIWQARCKTDPIDARKLAELLRTNLLPTVWVPSAEVRARRKLLRGRAYLVRVRTQLKNRIHGHLTAENCRTSVTDLYGRAGRAWLATVALSPAGRVQVDLLLELVDALDERIRRLDDRVKRLVRGDPVAQRLQTWPGIGAFGAALLLAEIGTIARFPSAHELAAYAGLTPSTQSSGDKTRHGSVGRAGSPWLKWLLVEIVQSLKLAPGPVGQHYQKLLRAKGKPKATVAAARKLCCYLYWCLKEGWSYEEWLRQHERSEVRPIQSLGSAA

SEQ ID NO: 360743 - protein, 404 aa, unidentified
MWYAGIDWANDHHDALVVDEQGRQVGSLRVDHSPQGMSKLNTFLQQIIGSESKEQMACIIETTHGLLIAHLLEAGWPVYPVNPRTVDRRRAASGAKTDTIDAYLLAKTGRADLADLHRLTPDSEKITELKLLTRDQDALIQMQTRLVNQLTACLKAYYPVALELFTKLQQKSTLLFLQTYPTPQAALAASAEQITEVLRRAKHPHPISVAAEIVERLHQPHLQADAVTTRAKARLMLVLVSQLLPLLEQIRQYDKEIGTLFLTHEDHTIFASLPRAGKRLAPRLLAEIGDDRTRDLDASSLQALGGTSPVLFQSGMYSKAHRRMGCIKPLRNALHQFAWQTTHSEPWANDYYQRKRAEGKSHSVAVRALANVWVRIIFAMWSQHCCYETAIFERAQHQHARRAA

SEQ ID NO: 360744 - protein, 270 aa, unidentified
MSPVVGIDVAKRSFDLAIDLANGKYRTKAKLPNDPKGFQVLQTWLQTHAQADSWIVMEATGTYHEALAEFVYGLGYRVCVLNPAQMALYARSQLTRVKTDRSDAKLIASYGQRHAAQLRPWQPDPPALKRLKALVRRRDDLLQMLQMERNRLDVAALVVRDSLLENIGQLQARIAQIERAIDDQIDQDPTLRGQRELLVSIDGIASTSAALMLAELGNVERFAHASAVTAFAGLNPRLQESGKRQGQVCISRTGSPRLRAGLFLPALVAI

SEQ ID NO: 360745 - protein, 418 aa, unidentified
MKEKYAVLVGLDWADQKHDLRWRETATGQVHTMVLPQSPEAIHEWIGTLMAKYPEGRIAVCLEQSRGAVVYALMGYGNVDLYPVNPVTLSEYRKALHPSGAKDDPVDAGLLFDLLERHPEILKVWHPDTAPTRLLRSLCEDRRKAVDLRTGLCHSLQARLKEYFPQALSLVGESLYSELCCAFLMKWPRFEAVAAARPGTIRKFYYAHHSRGESLIQQRLEQIATSRPLCTDAAVVEAAILWVRTLVPQIRALNRAIQDYEQRIDQLFKAHPDHCLFRSFPGAGPQLAPRLLTAFGTDRSRYALALEATNYFGISPVIERSGKQEWTHWRWNCPKFLRQSFVEFAGNSIRFCPWAKAYYQQQLQRGKKHQAAVRALAFKWIRIMFRCWQQHTPYDESKYLDSLRRHGSWIPKKLEQVT

SEQ ID NO: 360746 - protein, 342 aa, unidentified
MQITTIGLDIAKNVFQVHGIDAKEKVVARKQLRRSQVITFFKALPPCLIGMEACATAHYWARELTKLGHEVRLMPAKDVKAYVKRNKNDAADAEAICEAVRRPTMRFVRIKSAEQQGQLMQHRTRDVLIRQRTQIINALRAHLAELGVVAAQGNAGVNELRAIVTDEQDTRLPIDARASVIVLAAQLEALESVIGAIEKRIKMQHRSSEASQRVEAIPGIGVIGATAIVATVADPTIFRSGRDFAAWIGLVPRQDSTGGKQKLGPISKQGDRYLRRILVVGAIAVLRRAQENPGKYPWLTQLLARRPFKVVAVALANKMARTAWALLAHGGTYRAPELAETA

SEQ ID NO: 360747 - protein, 356 aa, unidentified
MERFIGIDVHKDSCTVAVMGPSGRRIRCDVVETNGAVLIELLKLIPGERRVCIEETGQSEWLCEILKPHVTEMVVEGTTERKDRSHQKDDERDAWGLAERLRTGTVKNRVCKPPRELSKLRDAVRAYGIVVGDLVRVKNRLNAVYRSRGIAVEGNEIYRSNSREEFLAKLPESRRALAKVLSQELDALEALKAEAEEQLEQEARSHPAVARLTTAPGFGTIRAAQVVAIGITPRRFRTLRQFWSYCGLAVVMRTSSDWTRENGQWVRSDNVAKTRGLTRKRQPVLKAVFKGAATVVVGRMTDHPLTRKYQQLCEAGTKPSLAMLTIARKIAAAVFAMWKNQEVYDPEHRGRCPQPA

SEQ ID NO: 360748 - protein, 322 aa, unidentified
MNKYKETFGVDISKDVFDVHGSNKGHSQYKNDETGFKKYLKELPQGSLVVMEATGYYHYRLAQFLYKNGVIVSVVNPLSIKRFIQMKLAKVKTDKSDAKAICDYALINEVPLYNALTDTQSECLQLFRLLDTYLKQRTATKNKIHGEAVLGIPSKFVHRSLIRNKKQLNKEVTAIESKILSLVKEDQQEQLTLLTSIPGIGQKTALFLIVVTDGFSKFETASQLCSYVGITPTIRESGSSVRGRARISKVGNRKLRNLLFLCSFNACKHNKACKEVYECIVNKGKSKKLALIAVANKLLKQSFAIAKSGRPYDETYVSILPR

SEQ ID NO: 360749 - protein, 344 aa, unidentified
MDHFAGLDVSVKETSICIVDDTGKIVREVKVASEPEALLAVLKSPAYHFKRIGLEAGPLSQWLFSALAEADLPVVCVETRHMQAVLKAQINKTDRNDARGIAQMMRVGLYRPVHVKTLRSQKLRMLLTHRKLLQSKAIAIENDLRGTLRNFGLKVGMVGTVKFEARIKELVENQPDLAGLVEPLLVVRRVLREQFVVLHRRLLAIVRDDEVCRRLITTPGVGPVVALTYRATVDVPARFRKSKSVGAVFGLTCSKYQSGEIDRSGRISRCGDEMMRVMLYEAAQSMMWSKRWSWLKAWAMQIARRRGMKKAIVALARRLAVIMHRIWIDGTEFRWTREQATAAA

SEQ ID NO: 360750 - protein, 350 aa, unidentified
MRIIGCDYHPGFQQIAFVDTDTGEMQEGRLQHREEAEKFYRDLAAQGVRVRVGMEASGHARWFERLLAELNFELWVGDAAVIRTKRVRKQKTDRQDAQLILQLMLEDRFPQVWVPSWENRDMRQLLWHRHRMVQARTRIMNQLQAVALNEGLRCKKRLWREAGREQLEAFPLAPWASRRRRDLLELLDRLSPTIAELTQTIEQEAEKCPEARRLRTHPGVGSLTALAFVLIIGRAERFQCGKQIASYLGLVPSEESSGDRRRLGHISKQGNTLLRFLLVEAAQVTVRSLPEWRSKYFHLAMRRGRKIAKVAMARKLAIQLFWMMRKEWDYEQVKRFGPHAGQPEHRRGVQ

SEQ ID NO: 360751 - protein, 317 aa, unidentified
MGGVNAAIEVGKHELKVCLGSEGELFSEPNQPRAINRIIKRLSSAGCARVLIEGGSYQSVLIAALRAAELPVVIVNPRRVREFAKSIGRLAKTDEIDARVLALYGERTEPPLRELADEQTQSLRTLSVRREQLIEMLVMEENRLEHVPAKAKAVRHNLRSHIDYLRKQVKQADDDLDREVRNSPLWDKYEMLSSVPGVGRVLSVALLSDLPELGRLNRGEIAALAGVAPFNCDSGTLRGQRKIAGGRTRLRRALYMAALSSVRCNPVLKPFYLRLRGAGKPAKVALVAVMRKLLLILNAILKTNTAWRALPCPTANS

SEQ ID NO: 360752 - protein, 366 aa, unidentified
MKKNITLVENTNEVFKSQQLTIGVDLGDRTSHYCVLDEAGNVILEQSVATTPKGIQQVFSKISCSRIALETGTHSPWLSRLLMQLGHEVIVAHARNVQLITESTRKDDRLDARTLARLARIDPQLLGPVRHRSAKAQIHLTEIRARATLVSARTALVNAARGLTKSFGERLAKCGTEQMNREIAKGLSPELRDVLEPLLKEIESLKERIAEYDRRIEQIAKEVYPEVALLKQVKGVGTLIGLTYILTLDDPHRFRRSRDAGCFLGLRPGRRNSGRSEPQMHISKEGDAYLRTLMVQGAHYILGPFGPDSDLRRWGLKLAERGGKNAKKRAVIAVARKLAVLLHKLWVSGEVYEPLRNNHEVVSAVA

SEQ ID NO: 360753 - protein, 310 aa, unidentified
MTKPYVGIDVAKATLDIAIGSDGELVQVENNEAGIAQLVKRLVEAAPALVVLEATGGYESLVAAAVAGREIPVAVVNPRQVRDFAKATGVLAKTDRIDARVLARFAEAVRPEPRPLPTAEAKELEEFLSRRRQIVDMLTMEKNRLSTASAERMKKSLKKHIAWLEEALRRANDDIDTAVRNSPAWREQEDLLRSFPGIGPVSARTVLGELPELGALNRKKIAALVGVAPLNRDSGTLHGTRTCWGGRANVRQVLYMATISAVRCNPVIRRVYLALRTRGKKHKVALVACMRKVLTILTAMVRDQRRWSPS

SEQ ID NO: 360754 - protein, 334 aa, unidentified
MSSLVCGLDVHKNSVYAIVMSYGGEIVEKRKLSNNEVTSYLDRYPIDKVAMESSTSIVPIYRALRAKGYTILVSHPKKTRLIAESRIKTDRVDSWALTELARLNALPLSYVPPDNIAALREKVRRRAYLVRMRSKLRVKIRAQLTINGIQPPTEHGLFTSKNLDWLHGLQLDSIESYLPIIQSLDVQIGKLSKELQALAPQDEDVKLLMTIPGVGYYSALLVKSEIGDISRFSDGEKLCSYAGLVPSVSSSGTHTRHGSITKEGSRWLRWIMVECVHTHLKYDTSITRSYNAIAQRKGKPIAKVAAARRLLMCCYSVLKNRQPYHDPAGSYESS

SEQ ID NO: 360755 - protein, 340 aa, unidentified
MELYTGFDLHANNSYAGIINADGKREARKRLPNDIGQILQFLEPYKAQMVGIVVESTYNWYWLVDGLMEAGYRVHLANTTAIQKYSGMKHSDDKDDAFWLAEMLRLKILPTGHIYPKDERPIRDLLRKRGHLVKLRTSLILSLQNIIDRNCGTRISVNDIKRLKENKVTPYLEENQELAYVGQVSKDAIDFLGAKIRALESFVEDKAKLNDSYANLLTIPGVGKILGLTIMLETGSLDRFEKVGNYASYSRKVSTKWTSNEKKKGRGNKKNGNKYLAWAFSEAAEFARRYDQQARGYYNRKLQKTNFMVAHNALAHKLARAAYHVMKEQTPFMPDKLFAS

SEQ ID NO: 360756 - protein, 431 aa, unidentified
MLHDHGFTKPIEHSNLTTKEGDLMNPLYVGIDVSSKSNVVYFMLPNGDKHSNFSVANSHDGSTQLVKRICSALTSESLDTVSIGLEATSVYCDNLVYFLREDASLASFNRKIHVLNPKQVNKFKGSYNDLPKNDWVDSFVIADCLRFGRINKEVYIGDYHYKALQNLTRARYFAVCNLTREKQRFMNVLFKKYSTMTQEKVFSDTFSTTALAVYDEFESAEALAYMALQELTAFIIEKGKNRFPDPDAVAKAIQKAARSSYRLPKTVNDSVNQVLSISITSMKALETQIKEFDKAIAAQMELLPNVLISIPGIGPVYSAGIMAEIGDINRFDNQAALSKYAGLAWTQHQSGDFEAQNTRLIRSGNRFLKYYLCEAAFSLVRCDKEYSNFYHLKYKEVNRYQHKRALALTARKFVRLVFTLLKDNRLYRPAE

SEQ ID NO: 360757 - protein, 395 aa, unidentified
MKTAASTFSPEELSIKYVCGIDIGSQSCAGCILRSDKSVIVKAIPFANARQGWQLWEEKLSQLDAAPSQILIGMEATSRYGENLYHELEQQGYVLRLLHPGQTHQFHQQQGLRAKTDRLDAMTIARVLLSGEARAGYVPSERIATYRELVRLHTQLSDETAAYQNEIQALVVVLFPEFTQVFADPCLPTALAVLKAFPSAQAVVEAGVEPIAVLLHQMPAHFGRPTAQKLVAFARKSGSSGRAVAGRSMSLRILCDQLEHTQANLARLEAEIEQLLTNDPGVKGIQQVPEFGPKTVAVLRAELGDVERFARTDEVIAYGGMDIEIKESGLWKGKAKLSKHGSGLLRRMLYLAALRSIHLEGSAFGAYYRRLVERGLKKGSALIVTKGIKWPPKKP

SEQ ID NO: 360758 - protein, 349 aa, unidentified
MSHKLNSGIAVIGIDIGKNSFHIVGHDKRGAIVLRQKWSRGQVETRLANLPPCLIGMEACVGAHHLSRKLQMLGHDARLMPAKYVRPYSKGQKNDFRDAEAIAEAVQRPTMKFVATKTAEQLDLQALHRVRERLVSQRTGIINQIRAFLLERGVAVRQGLRFLRAELPRILATPCDVLSPRMVRVIEDLAGDWRRLDERIGSLSSEIEVLARRDAGCERLMSVPGIGPIISSAMVAAIGTGDAFTKGRDFAAWLGLVPKQISTGDRTILGKISKRGNRYLRVLFVQAAWVVLIKPKSWDRHGLKPWLEAAKKRLHHNVLAIALANKLARIAWSILAHGRTFEASKIQAA

SEQ ID NO: 360759 - protein, 376 aa, unidentified
MGAPPEVGMSSAHANSSGKDPTETEVRGLMKVLIGVDPHKGSVAIAVVDEAKGELLERASFPQNRAGLRALERWAKRFPERRWAVENAGGLGRHLAGRLAAAGEFVVDVPPKLSARVRVLSSGNARKNDGLDALATALAASRNERLAAVDSESDSEVLRLLSERREDLVAERTRALNRLHGLLRDLVPGGIAGTLSADRAARILRGIRPKGGASARLRRRLASEILRDVRTLDRKIADLNWRIEAEVEASGTTLTEIFGIGPILAARIIGTVGDVGRFPTKAHFASYSGTAPVEASSGEAVRHRLSLAGNRKLNYALHMVAICQARSDARGGSYYRKKMAEGKSRKEALRCLKRRISDAVFRSLMADSRAPSRSAA

SEQ ID NO: 360760 - protein, 376 aa, unidentified
MSKLLFVGLDVHADTIAVAVAEQGGEVRSHGIIPNRLESVRKLIHKLGRVQHLRACYEAGPTGYVLYWQLTQLGVACAVIAPSLVPTKAGDRVKTDRRDAEKLARCHRAGELTAVWVPDADHEALRDLVRAREAAKKDQLKARHRLAKFLLRHGLRPEGIKAWTVRYLEWIKTHVHFSQAALEATLADYLEEVDHVAARIAKLEKAIDDAVQQAPAEIRAVIEALQALRGVAQTTAATIVSELGSLSRFDSPRQLMGYSGLVAREHSSGNRVQRGGITKTGNGHLRRVVMESAWAYQHRPNVTGFLLRRQKNLALSDEVKAIAWKAQQRLHKRYKTFTLRGKNKNQTVTAVGREMLGFIWAIARQAEKQHKLATAA

SEQ ID NO: 360761 - protein, 362 aa, unidentified
MQIIGCDLHARQQTLAMLDTGTGEVVNRTLRHEGNSVREFYSALPGPVRVGIEATGSMKWFLQLMEELGIDCQVGHPATIRAAEPRRQKHDQRDAELLLKLLVEKRFPSIWQPSKELLDLRGLLLHRHQWVRLRTRIQNALQAIALANGLRRGSSLWSESGQRDIASLPLATHTAHRRSELQAMYARFEAEIEKLNEQVLEQAGQRPTAELLMSHPGVGPITALATDVFLGDPKRFSDGKALASYIGIIPRENSSGGRQRLGGLSKQGNPLLRFLWCEAAAHAVRRDPELRRFYRRKLVQKGLGKARVAAARKLGIRLWIMLRDQIDYNEFCRRGQMQQKSGDACAGMPGARYGAKSHRLID

SEQ ID NO: 360762 - protein, 309 aa, unidentified
MGIDVAKATLDIAVRPTAETGRAPNDAPGIDALVMRLGAWAPTLIVLEATGGSQGPLVAALVATALPVVVVTPRHLRACAQAVGILAKTDRSAARVMAHCAEAVTPAPRPLPDAETQELRALRGRRRQRVAMGSAERARLDTAPPSVQDAIQAPIAWLTTPITGLDDPLTHARQTHPAWQAKDDVWQRIPGVGPVLARTMLGQVPAWGPLGAQPLAALSGVAPCNRDSGTRRGRRTGYGGRAEVRAVLSMGALVATRHHPVIKAFYERLLAAGKAKQVALTACMHKLLTIMNAMVRDLKRWQPREVPIA

SEQ ID NO: 360763 - protein, 339 aa, unidentified
MELYGGIDLHGNNSVISILEKNRRVVYEKRLPNELSVILDELEPYRDRISGMAVESTFNWYWLVDGLMEAGYDMHLVNTSAVIQYSGLKYSGDTHDARWLAHLLSLGILPEGYIYPRETRSLRDLLRKRGQLVRQRTMNILSLQSLLARSGGRQVSCNRVKKMTEKDLEDLLPDADTVLAAMSNLRVYHCLNTEIVNLEKEVLSRVELSPEYTLLTSVDGIGKILALTIMLEVGDIGRFRKAGNFVSYCRCVRSERKSNGKRKGSGNAKNGNRYLAWAFVEAANFGIRYSDTIKGYYQRKTSKTKRVIAIKAVAHKLARACYHILTDQVPFDVERAFGY

SEQ ID NO: 360764 - protein, 389 aa, unidentified
MNMLITTSFTAFIGIDWADTKHDVCIQSADGDEREFDVIAHQVERIDEWANAMRQRFGSPIAVAVELSKGPIVYALQKHDCFVIFPINPSTLAKYREAFQPSRAKDDPTDAELAVDLILRHPKRFKPLQPQSVEIRMLVSLVEQRRSLVADKIRITNRLRAALKQYYPQSLEWFDHIDTPLFCDFLTRWPTLLQVKRARKMTLRHFFQEHSMRFEYVLERRWNAIKTATPLTLDEAVVVPHRLQALVYVEQLRVMLNAIKQFDAEIERVAKQHEDYALFTALPGAGPNLAPRLLVAFGEQRDRYKSAADLQKYSGVAPVTERSGKKHWVHWRWQCPTFMRQTFVEWAAQTINKSYWAGEFYRQQRAKGKTYQAAVRALAFKWNRILYRC

SEQ ID NO: 360765 - protein, 400 aa, unidentified
MISVGIDISKDKSTVCMLRPYGEVVEAPHSIDHTEQALNALIERIQSFDEDVKVVLEATGGYHQVVVTKLLSAGIFTVVVNPYIMKKYCAAALRKAKTDKIDSIRIASYGIDHWFSMTAYCPPDEIYAELKLLGRQYDQYVRLKVNCKIQLAHLLDGVMPGIKTILQGTVPANSTKDKLCDFVEKYWHYDNIKKMSEKRFIEDYGKWAKKKGYRCSESQAIAIYQLSKNNIPTLKSSTPSTKMLVLQAVKAVRDAEITLSLIISQMQEIASTLPEYSVVRNMKGVGDVLSVRLIAEIGDVRRFHNGSALVAFAGIDAPPYESGKFIGTKRNISKRGSSTLRKIGYEIMHSLKVVKPTEDSAVYDFIIKKETEGKPKRVAKIAGLNKFLRIYYARVMETYC

SEQ ID NO: 360766 - protein, 339 aa, unidentified
MNFMPVGVDIAKNVMQIHYVDDETGEIVNKPIKRAKFLEFFANRKPCLIGMEACGGAHHWARQLTRLGHQVKLLPAEFVKAFNVRNKNDPADARAIWLAVQQPSKPVAVKTEMQQAMLALHRARQQLVEFRTMQINGLRGMLGEFGEVMGAKRAGIVRAIADVLARAAQRLPAALIDTLREQWNRVAELDEQIAKIERRMREWKKEDLAVRAISEIPGVGLLTATAAVAMIGDANTFTSGREFAAWLGLVPKQTGSGGKVNLHGISKRGDKYLRTLLIHGARSVMTNAREPGPWVEQLKKRRPWNVVIVALANKMARTIWAVLAHNRPYQKGYVSVKPA

SEQ ID NO: 360767 - protein, 424 aa, unidentified
MSSDLEIAAFIGLDWADQQHVIRLRVAGSAPVEAQLLDQKPETLRSWIGQLRQRFGGRPVAIALEQSRGSLLYALMNVDFLLLYPVNPQNLAQFRKAFYPSGAKDDPQDALLLLEMLEKHRDRLRVWVPDDADTRCLRLLAENRRKLVHRRTALTNQLTSLLKESFPQALDWAGPLDSLRACDFLQHWPSLQILQKTPTSRLRKFYRDHTRLDSDAIHQRLDQIRQAQPLTSDSAVLAAAELMIPALVRQLRCLIESIQQFDQQLKDRFQQHDDYTLFHSFPGAGPALGPRLLSAFGSNRNRFECAAEVQMLSGIAPVTERSGKSHWVHWRLACPKFLRQSFHEFAAQSILFSTWARAFYDQLRSRGTSHHAAVRTLAFKWIRILFRCWKNRTPYQEQIYLASLRRHGSPLCAALSSPTTGANL

SEQ ID NO: 360768 - protein, 369 aa, unidentified
MPVVRGERAARFTFGTPSPRGSIWRAFATVLWKPEQLIDFNSHLQGWETENMPELIHVGIDVSKDALEVACGPESPTQCFTNDDAGHEALVNVLHVHRVDLIVVEATGGYEAPCACALQAAGLAVAVVNARQARDFAKAMGYLAKTDRIDAQVLAALAAVLANRADCQKLIKALPSDEQQRLHALVLRRRQLVQMLVAERNRLPMSHQAARVSIEALIKAIRKQIVDIEADLSSHIAHHHADLAGLLRSAKGIGPHTSMALIADLPELGKLSNREISALVGLAPFNRDSGKMRGKRMIFGGRTQVRCALYMATIVAMRHNRVIQRFYQRLLAAGKPKKVAIVACMRKLLTILNAMVRTGKQWDETFHFA

SEQ ID NO: 360769 - protein, 350 aa, unidentified
MKYVGLDWAYRQAQWCALAPGGEIASEGRVAADRDGLARLVFGLGDEVKACVEMMSGALWVRDELVACGWQVEVADARKVKTVAPLAAKTDKVDARLLAELSRRDLVPALWLPSLDERALRERLRRRMHLVRLRTSAKARIAGLQTQWGVRVSLHRLRHADGIELLERAGMPAVWRRSVSECLAVIDFLDARIEPLDQELKPFAHADPRAVLLDTIPGVAELLALTIAVEVGEIGRFAGPEKLVSYGRLAPRVHQSGQARPRSGPLSKSGSRLLGWAAVEAAQQAWRESNPWHDLYTDVARRSHNKNSAKAAVARKILIAAWHMLSRNEPFNPAPRTTSVSASSRFALAA

SEQ ID NO: 360770 - protein, 318 aa, unidentified
MKETPTYYAGIDVAKDRLDVVLRPSGQYVEATNDERGIRSVVRRLRKEDVALAVLEATGGLEQPAAAALALAGVPVAIVNPRQIRDFAKATGKLAKTDRIDAAVLAHFFAEAVRPQPRPLAEEHVRELSAVVLRRRQILAMRTAEANRARTAPKAVRKRIEAHLRWLRKELARVNGELERVVNESLVWKERATLLMSVPGVGPTLSATLLAELPELEHLDRRRLATLVGVAPLNRDSGTLRGIRTVWGGRSGVRTTLYMATLCATRHNPAIREFYERLVFSGKPKKVALTACMRKLLTILAAVLRNRTPWQPRLLAAS

SEQ ID NO: 360771 - protein, 330 aa, unidentified
MKKWNVILGVDVSKLTLDICWAEQNQHIKIDNCSQGFNVFKMWCKTLDIDLKETLMIMEFTGGYEYRFIQFCESKSISYLRVPGLEIKQSMGMVRGKNDQDDSYRIGRYGEQRNNELEASKPLDNNILALKQLMAFRKRLVRERAGLESTLKEREHMYGTKNKDTITRIIRSRIKTNTQHIEQVEQEITEVIKSNESMMLNYRIITSIKGIGCVNGWMTIAYTENFTSFTDARTYGVYVGVIPFGHTSGTSIKRRSKVSYLAHKELKQELSQAARSAMTHDPEMRAYAERKLKNKDYKLVQNNVKFKLILRMFSLVKRGERYVENYNRAA

SEQ ID NO: 360772 - protein, 341 aa, unidentified
MSIVGAFDVHRRQLTFDYLDTVTGEVKRGRVVPADREHLRAWLTRLAGQDDVHFALEGCTGWRYVVEELLAAGIVPHLAEPADTAALRGRKRHAKTDKTDSRHLRAHLAAGDLPESWIPPGHVLEARATVRLYKDLLDERGAWHQRIAATLFHQGVPVTASMSTAQGRAAVAGMELSPAGRQAACTALRQIDRLTAELDPLRRQLDMISRRQPGCRALRATQFGVGPVTSVAIWAELGDTRRFGNSDDVIRHTGLDITVYSSDGKRSAGHLSRQGPQLLRWALYEAAKCAARPAAPDYGYYTATRDRRTGGLATLSVARKLARRCYHTLRELGEEAMAPAA

SEQ ID NO: 360773 - protein, 402 aa, unidentified
MANVAGIDWASEEHAVCVVDEAGTPLRERVVAHDEAGIAALCRKLIELQVERVAIERPDGIVVDRMLDAGLIVIAVHPNQAKAARERYSVAHGKSDRFDAFVLAELARTDAHRLRVIRPDSDQTRALRALSRTREDLVQARVALANQLRAQLEAFWPGALVFAHVDSPVSLAFLRRYPSPADAKGLRTKRLAGWLARHGYSGRRSPEELLERMRSAPEGRTGEVEVKARRAAVLGLVAALETIVAQLRELTSQMRGALRTHPDARIFAPLFRDPKTVVCPAALIAELGDSRERYPTDAALAADAGMSPVAVESGKRRVATFRRACDKRLRDSVATLADSTRHWHPWAGEVYWRARARGQDHPHAIRTLGRAWLRVLWRCWQDGVPYDPTLHGNLRCLQTAGG

SEQ ID NO: 360774 - protein, 384 aa, unidentified
MHQATTLPERTCSRGDCATLFVSLELSRSTWVATVLAPGSSKMSKYTLVGGDGHKLLALLARLKSRAEQRIAAPVKVVAIHEVGLDGFWIHRLLEANGVESHVVDPASIAVPRRHRRAKTDAIDGETLLRTLMAWQRNEPRVCAMTVPPSPSEEDHRRISRERATLLQERVRHTNRIRGLLFGQGITNYNPLHKNRRENLEQLRTGDGRSVPAHLKSAILREIDRLELVLRQIGEVETERDEMLLLAQPSSPAALLMRLKGIGAEFATVLYLEGLFRHFENRRQLAAYAGLAPSPWKSGSIDQEQGISKAGNPRLRTTMVELAWMWVRYQPASALSCWFRQRVGSERGRIRRISIVALARKLLIVLSRYVSHGEIPAGAVMKAG

SEQ ID NO: 360775 - protein, 439 aa, unidentified
MTTPSLPVLDPTAAAIDVGSEQLHVSVAGGPPKVFGTTTGQLHELRDYLLVQGVKTVAMEATGIYWLCPYEVLEKGGLQVVVVNGKYVKNLPGRKTDMKDCQWQATLHAHGLLKPGFVPPEHIRRLQDYLRLRTDHITMAGSHEQHMQKALDRMNLKIHDVISDLTGRSGLKMIQAILAGERQPVALLALCDPQIQTHKAGRLREALEGTWKTEHLFALRQAYELWQSYQQKIAECDQAIEAVLRELTGPEDPQAPAPPATKRGGVNAPQIAGLHGLLWQLCGRKDPTTLPGVADYVLLQLLAEVGTDLGSQWKTEKHFTAWLGLAPGSRQSGKRRGSQKRGRNRAGRLFCVIARSVGRSVDKALGGFYRRLKGRRGGLVANLALARKLAELFWRLMVHGKAYVEKGLQQYEIKVAQTEQRLLQKLARKYNMVLQPKAA

SEQ ID NO: 360776 - protein, 422 aa, unidentified
MNERTRLTVFRQMKNEIRGSEKYLIVGVDIAKERHHAFFGRSDGKTLLRRLVFDNTQEGFEKLCFHAETIRKQNTLDTIFFGMEPTADYHKPLGEYLTQKEYMTVLVSGNAVKKNRELLDGRWDKHDTKDAANVADLIAQGKCLFYEFPSEEIRQIRSLLSLKRRLKINEQGYKVRIRNHLIAQYFPEVDPYYGYGEGPTIIKEFLDPSRIEEISYEEFMPLVASRNGGEKQRIRIKQIWDKAHLSIGCKAHEAARFEAMLLMEGLQKIQTMIHATDKAIENICVKLPEYHCLLSIPGFGPDISAMSIGTIGNPERFENTRQVLKTAGLDLSSNKSGKSMNTPYVISKRGKANLRYALYQAAMIASTRNEHFMRYFTGKLAGRERERGIKTKMRVKLAAKMLIIAWTLMKKKEVFDPGYIRA

SEQ ID NO: 360777 - protein, 342 aa, unidentified
MTAIGIDTHKATLAACAIDELGKPVAEATFANDPGGHVAFIAWARSTAPEATVGIEGSSSFGAALARSAQHAGLSVREVPPHLSRAERQRTRRPGKSDPGDALAIARVTARETNLPPIRLPDRTSELRLLLEAREDLVGEATRVRNRLHAHLLILVPGYGATATNLVAARHRTTVGRLLKSNRAVQAELARALVARLARVDREIASLTLRIDQLVAGHPLLGLPGVGSITAARLIGEVGDVRRFRSADALAALAGVAPIPASSGQIQRMRLNRGGNRQLNRALHVIAVTQARFHPAAKAYVARRIEVDGKTWREAIRALKRQLVRPVFRLLLEGSVAELPIA

SEQ ID NO: 360778 - protein, 389 aa, unidentified
MRNRYESVAYGGMDVHYKSSDVTLRDAGGAVVARERLDHTDRESLRAQVSRWPPGTPVVLEASFGWGWISDLLEAEGLVPQLSNCYKVEQMRKARGWVKTNRKDADLVSLLPAETTPWWQVWRAPAEVRDRREWMRYRAGLVAIQTETKNRIHALFHRHGIFFTEGTDLFGGVGRRFLACLSQDGRHAGGALPEGALAALRGLVDLATYLRRPLLEAARRLRERLERDRLTKRLDGIPGFGPILAHTVRAEVGDIGRFRSHRALASYACLAPRSDDTGEADPRRAPLGRHLGDRGNRTLKWAFVEAAHGAVRHGGRWRAMFDRATDGGKKNRGRGYIQVARELVTMVYIVWSRNVGYAEQPPARPGHRSARRKPSRPGTGQPSHPMVQA

SEQ ID NO: 360779 - protein, 323 aa, unidentified
MDVLYHRCAGLDIHAETIVVCALLGEEEHVQKEVETFPTFTKDLFRLLKWLEDRGVTHIAMESTGVYWKPVFNILEDYFDITLANAQRIKNVPGRKTDVSDAEWIAKLLRYGLIEKSFVPPENIRELRDLTRLRKKWIGQLTAEKNRIQKVLECSNIKLSSVISDVFGVSGRKLLERLMKQGYIEETEVDACIHRSMKRKKQQIQDSLFGALTNHQLFMIRQSWKHIESLESLLRDIGERIDQLLQVYKQEMELLVTIPGVKKETAAVIIAEIGVDMGQFPTSQHLASWAGVALGNHESAGKRKSTRTTKGNPPIKSALCEAA

SEQ ID NO: 360780 - protein, 472 aa, unidentified
MSKGSGSGMTRGDRRRNARRERLRALLPRDGAVAGIDLAEDKQALAVIDHDVRVLARKTVRVKAFGLGEALDWAVGQARVKGFDRVTVACEPTGPRWMQVQRLCAERGLPLVCIQPLISHIAREQQDYTTHKTDESDCVMIARLAVELHCYIPEELDETWAHLRHLGRRRQQLITAQTASGQRIMDFLSVAWPAVTETCAGPVESRTWLAALEVVTARCGADPGTLAAMGREGFTALTRGAVAGWGITRAHGPICARVFAALTDTEGAVTWSRRGLLRRVADELGDLKRTRVQLRQVEADMVAVLDELGLSRLADIPGLTAVGAAAILAETGDPRRYDSSSSLVKHAGMSPSDNASGAFSGQAHISRRGRPGLRLVVWRAVWPMLQYNPVMAAKYQAMTRAADAAAAGAGPRQGTAAQAAARARRAKARVACAASLLRWIYCMVVHDTSWDPAVASGAASRHDTARTQAEAA

SEQ ID NO: 360781 - protein, 335 aa, unidentified
MHYLYYVGLDVSKETFDASLVAFEDANEMAHRKFANSRKGICSCLHWVEKRHGIRLDDVIFCAEDMGSYISEMAVCASDRTLTFNFSLISPLVIKYSMGIARGKTDRVDARRIAEYAITHYRKIALYLPAEKELCQLRTWLILRAHLAKQRVAKLVLLEKLDYKEKFADVSIQRSMLQEEIAYAETHMKTIEREMKELIAADSNICRNYKLLTSIKGVGPITASVMLCSTLNFTKITDHRKFACYCGLAPFEHSSGTSVRGGCHTSSMANRDIKVQLNRSALIAIRCDPQLKAYYERKVAEGKHKFSVLNAVRAKIAARCFAVVRRGTPYVALQI

SEQ ID NO: 360782 - protein, 320 aa, unidentified
MVSTHPVYVGIDVSKAKLDVAVRPWTAPLVVTNDAPGIRALVDKLRRLCCRLIVLEATGGLERSAALALHDAGLPVVLVNARQVRDFARATNRLAKTDTIDAQVLAEFGEKIGPEPRPLLDAESRELQLLVRRRRQLVQDLTAEKNRQATAADSQWAGLSVARHIAWYEEELVAVDAALDALVRQSPAWQALEALYRSTPGVGPVLSRSLLADLPELGRLNRRQISALVGVAPLNRDSGQFRGRRQVWGGRSALRSSLYMAALVATRFNGSIRSFYQRLLAKGKAKKLALTACMRKLLTILNAMARTKTAWREPVACLTS

SEQ ID NO: 360783 - protein, 345 aa, unidentified
MSEFYEGRQFVGMDLHRRRSMLVRMTEFGEHLETVRILNDRDSLAEVISRAGESPEVVLEATYGWYWAVDALAELGATVHLAHPLGVKAFSYRRVKNDQRDAFDLADLLRMGRLPHAWIAPPATRELRELVRHRAKLVAMRSQCKAHVHAVLAKGGIWVPMTDLFGVEGNLLLDKVTMPAPYRERIASLRRFIEGFDAEIDLFTALAQRRLTHDAGYTAIQQIPGIGPVLAAVFVAEIGDVHRFAGPAQLTCWAGLTPSHHESDTTVHRGRITKQGSRLVRWAAIESVKILPETSRIGAIREQVAHRRGNRNIGAVAAARRQLELVFYGLRDHHVRALHRSPHAA

SEQ ID NO: 360784 - protein, 350 aa, unidentified
MEYVGIDWSYRRAAWCALSDAGAIVGEGAVSTDEDGLARLVIKRGTEVRAVVEMMSGAIWVRDTLATAGWEVQIAHARKVRDVAPLACKTDKVDARVLAELCRRDLVPELWVPALADRELRERLRRRMHLVRMRASAMNRIFGLLTQWGLRLSLKRLREPDAMTLLEQRGVPLVWRRSIAEALDVIELLDARIGPIDAELGPLARADTRVALLDTIPGVGALLGLTIASEIGDVARFGSPRKLVGYAGMAPKVSQSGDRSRTGALSKAGSLTLRWAAVEAAQHAWRPTNPWHQLYTDVAKRAGKNPAKSAVARKILIATWHVLSRQQPFKPAAPRRPHPASASSRCFLAA

SEQ ID NO: 360785 - protein, 344 aa, unidentified
MFYAGLDLSRKRLDVHVLDETGETVAVRAIGPDADGLRSLATTLGFSPVRAAIESMNGARFVHDQLESHGWDVEVADAQKVKGLAPLACKTDKIDAWVLAELARRDLVPAIWLPTPGVRAERERARFRLHLVHHRTALKNRIHSTLMAFGHPCSVSDLFGASGRELLERLEIPEPWASSLGYSLQLIDDLDGQIHACEADLRRLGATHPYVSLLQSAPGIAWVLGYTIASEIGDISRFATPKKLTGYTGLCPRVYQSGDKDWRGPLSRNGPRYLRWALIEAAVHAASHPVYKEHYERTRTRLGRQRGPKIARVEVARKLTEAIWHMLAREEVFAPASPGVALVA

SEQ ID NO: 360786 - protein, 353 aa, unidentified
MKKMRRTILEGKKIFIGLEDSKKTWRINVRYAKMEIHQTGMPADYGNLKRYIESHFPGCDVTVMYEAGFKGFELHDMLAVDGMRCVVTPPSKVTQAKDSRVKTDKRDARRLAKNLENGDYVACYVPDRERREDREISRNYEQVKKDICRTKNRLRGMLKFHGLEGYNSRGAWSDLTYLSLRELDLPDSLAFSLKLKVDHLGYLFCQRNSLRSYLVQLARKERYAASVKSKKSFPGIGILTAIRLTLEWGDMHRFENGKSIASFTGLTASEYSTGETIHRGRITGQSAVHVRSWLIQCAWRAIRKDPVLFDKFHRVWQNSGSKKKAIVAVARKMAVRMRAVEIANDTYQIGLVA

SEQ ID NO: 360787 - protein, 426 aa, unidentified
MGERQAGRESGVVRMVFIGDDWAEDHHDVEIEDESGRRLARARLPEGLEGIGRLHALIAAHAPQGWSELGGQEMAARVIVGIETDRGPWVAALRAAGYQVYAINPMSAARYRERHSTSGAKSDVGDAHVLAEVVRLDREHHRPIAGDSDLADAIKLVARAHQTAIWDRTRQVLRLRSLLREYFPSALEAFDDLAAKDALLLLGRAPSPARAAKLTRGQVVSALRAAHRHQVQAKTDALLAALRAPGLRQPQGVETAYAAVVASQVRLITTLNEQIGQLQEVVAEHFGRHPAADIYLSQPGIGTILGARVLGEFGDDAKRFGDARARKNYSGQSPITRASGRKSVVLARYATNRRLSDALHQQALSALTASPGARLYYDSLRARNIGHHAALRQLANRLVGILHGCLKTGTKYDEHTAWHHQITAAA

SEQ ID NO: 360788 - protein, 336 aa, unidentified
MNDLRCFIGIDVAKLKLDLALLVNGKYKSKVVPNTREGHQQLQQWLLDRDATPTNSHLCMEATGPYSETVATALADRGWPVSIVNPARIKGFAQSELSRNKTDSVDAALLARFCSVMQPECWTPPPAEYRTLRAWVDRLQALKDIQQQEKNRQEAALAMQQAALVDSIQHHLDWLAQEIARIAQDIDDHLDHHPGLKRDAMLMTSIPGIGNTTAAKMLAYVGDVRRFESAKALAAWLGVSPRQRQSGSSVRGRTMLSRAGHRSARTALYMPALVALRHNPALQAFGERLRANGLAPKAVVGAAMRKLAHLIFGVVRSGMPFNAEMAMPRLDLQDGI

SEQ ID NO: 360789 - protein, 353 aa, unidentified
MTLTVYCGVDFHARVQTVAYCSSTDGEVHLCELDHRRDDVRAFYARFSGEVVVGLEASGYSPWFERMLDELGHTVWLGHAAEIRRVANRRQKNDRRDAELILDLLVKGEFPRIHRPTADSLEILRMLRYRHRMVKIRTMIKNNLQALAIGSGLALKARLLTRTGRVRLLAAQMSPAMSRQREEWLSLLDNLDARIAAVVRWLEQQAKDDVRVQLLRTHPGLGLLTALGLVHTLEPVSRFSNQRKVVAYVGMEPMERSSAEKKRYIGISKAGSRLVRFLLGEAAQTAARGDQELKRFYLRLVSRRGKPKALIAVGRKLLIRSYIMLRDNIDYAEFLRRGVEARSARKTHKHLNA

SEQ ID NO: 360790 - protein, 399 aa, unidentified
MKTTDRTAEAIGLDVHRRFSTVTARNAEGKIAWRERLEHEDRDDLRKRLATWPRGIPVILESSFGWEWVCEELEQAGLEPQLASSRKVAAWRNARGMAKSNRTDADLLSELGRQTDRWWQVWLPPPEVRDRREWMRYRMSLVRLQTGLKNRVHAILHRHGILHDLADLFGTQGRRMLMQLANDAESPRLRESGRATLKGYLQLLDHLRRQIAAVTRTIHRQLRATPEAKRLQGLPGVGAILAHTILAEVGDFGRFRSAKHLASYSLLAPRAFDSGEETDEAPKGRHVGHMGRRTLKWAWIEAAHSAVRPGGRFREVFDRYTDGGKRNRNRGYILVGHELCRTAYAISKKETEYRDDPPARPGSSKKGAASRQRDRCRGAKSQNSRPGTGQPDHGLVAVG

SEQ ID NO: 360791 - protein, 341 aa, unidentified
MKDTMIGVDLAKRVFQLHGAAMTGEVKFRKKLTRDQFRDFMAAQPAALVVFEACGSASHWAREMEALGHEVRLIAPQYVRPFVKRQKNDAADAEAIVVAARQPEMRFVAPKTVEQQAKAVLFRGRERLVRQRTELVNALRAVLYEYGHVFPVGICNLKRMEAVLEDPHCDLPALVIAECRDLLAQIAEKTERIEEKAKSLKALAAETDTARRLQTLPGVGPLTALAVEAFAPDMAQFKSGRDFAAWLGLVPRQHSSGGKARLGRISKAGQSDIRRLLINGAMTRIMGRARHKVPAESWLGRKLAAKPKMLVGIALANKMARQIWAMLTKNEDYRDPALATA

SEQ ID NO: 360792 - protein, 395 aa, unidentified
MILVGIDIGKNKHTFSIIDKGTGEILLNPSVFDNNQTGFLYLIKTLSNYDKSELLIGMEDTGHYNFALLKYLLDNRYTVALINPTTTDLTRKIQGGITKNDTLDSLTICDVISSNQRKKPYRITKVNRFDLYEQKQLTRHHHNLKEELNLHKNRLQKCIDIVFPEFNSLFNSKYGIVYMSVLKTFSSANAIANADIRSIRKCFEFKCRRGRRISLSAEQLKAAAKTSVGIPSVAEEIQIRHLVCQIELLEEQLSEIDKRIEEFSVKNNSAILSIPGISHFSGTSIIAELGDICNYQKASQIIKFAGVAPYHYESSQFTAQHTAITKKGSRYLRKTLYQIILPVINNNEVFRTYYNKKLAEGKGHRCAQGHCIRKLLRVIYHLLTTGQQFCSELLV

SEQ ID NO: 360793 - protein, 447 aa, unidentified
MRRSTEESVPAVPNAAESEFDWYVGIDGGGATHQVCVLDAAGRAAGERAVAHAGADLATLAAWLHELAGPSLARVAVGVESRHAGPVALCLEHGAAVFAINPKQLERFRERASAAGAKDDRRDAYTAASALRTDRGAFHRVRLEDASLVAIRELSRMGDELREEAARLSNQLRAQLERYFPQLLPLVPGADEPWLWALLTEAPTPAAAARLSERRLARFLREHRIRRISGAELRAVLQAPALPVVPGTVEAVSEHVTLLVPRLELVTRQARACAGRLAAVLTAVAGPDDTEPPAAATPNVAAPPGAAAAGTLGTVVCLLRSLPGVGVGVTGVLLAEAAGALLAGDYHALRTHGGAAPVTKQSGKQRLVVMRYACNHRLRTALFHWARVSLQHDPAAHQYYATLRSRGHSHARALRSVADRWLRILTAMLTTDTRYDASRFLSPVPTL

SEQ ID NO: 360794 - protein, 422 aa, unidentified
MMHEDRKWFVGIDWASQEHVVTLCDREGNRIGEREFAHGGTGLSDMIAWLLKRSGGEPGEIHVAIETPHGPIVEALLERGFNVYSINPKQLDRFRDRFTVAGAKDDSLDSYVLADSLRTDMPLFRKLSVAEPLIVELREWSRVDEELKVERVRLANRLRDQLWRYYPQMLELGDLDEDWMLDLWEAAPTPQKAARASKAAIGRVLKKHRIRRFDAAQVLSELRKPALSVSQGTIEAATAHIRMAAERLRLVNRQLADAEVQLERLCKKLAEPVARDDGENVPGQRQEHRDVTILDSLPGVGRTVLATMLAEAPDALQRRDYHALRTMCASAPVTRRSGKSCIVTRRRACNRRLSNAAFNWGRVAVRHDPVSKAKYEALRARGHSHARALRSVIDRLLYVACTMLERRTLFDPSFAETKNAAA

SEQ ID NO: 360795 - protein, 412 aa, unidentified
MLFVGNDWAEDHHDVEIVDEQGRRLARRRVPEGLDGVTRLHALIAQFVPDEWGALEADDAAWRVKVGIETDRGQWVQALIAAGYEVFAINPMSVARYRERHSTSGAKSDAGDAHVLAEIVRLDRSHHRPVAGDCELSEAIKLVARSHQSLVWDRTRHVLRLRGVLREFFPAAMEAFADLDAPDALELLAAAPDPDRAARLSRAKITATLRRANRRGVEDKAAQIQSVLRAPALRQPAQVQAAFAAIVTSQVRLIGTLNGEIAKLGEVVAGHFGRHREAEIYTSQPGLGVILAARILAEFGDDSTRFADAKARKNYAGTSPITRASGTRKIVLARYARNTRLGDAVQQWAFGSLKGSPGARAYYDSLRARNIGHQAALRQLANRLVGILHGCLKTDTRYDETAAWAHRNSAAA

SEQ ID NO: 360796 - protein, 420 aa, unidentified
MISIGIDWADDKHDICVRDREDRRILAILTIQHDAAGVAQLDELVVTLGYQAGECLVAIERPDGLLVGYLLQQGYQVYAIHPQAVDRYRDRHHAAGSKTDPIDAATLADILCVDREYHRPIPADSPLAQEIQLVSRHRQRLVAERTSLKNQLTACLKAYYPIALKLFTDLDLAIAWAFLRAYPNAQVASQASLADLQGFFAEQGYTCKRKIPAIFKQLQAPSIPVSAWQVRAYQRLMLALVNLLAALQPQILAYERELSNLLDQHEDAFIFRSLPNAGVITAAWLLGEIGDCRDKFQNSTGLQALAGTCPVTRQSSKQRFVKFRTACCKPFRNGVQQFARLSTHPTQGAAWAKGYVRSQLDRGHNLNRARRALANRWLSIIFRLWKDRIAYDEKVHLRNRALKGCLPAAEPVSIPIFQEA

SEQ ID NO: 360797 - protein, 342 aa, unidentified
MKQYVGLDVSQRETAICVVGEMGKVIFEGKAKSDPVALTNLLRKHAPHAERIGFETGAMASWLWHELRRVDLPVVCIDARHAHAALSVRMNKSDQNDARGLAELVRVGWYREVKVKSEESQKIRAILVARFRLVTIRRDIENQIRSLIKEYGLLFPRAIGLQFRHQVHELLGDDHQLLSVISPLLSIHENVCQQQNKFDDQVRRLAKQDETTRRRMTVPGVGVVTALTVRHTIDDPSRFRSASTVGAYLGLTPRRNQSGETDTNGKISRWGDRLLRTYLFEAATILLYRTKKWSCLKAWGMKLAKRIGMRKAKVAIARKIAVILHCIWVDGTSFDWGQAKEA

SEQ ID NO: 360798 - protein, 344 aa, unidentified
MTTIQHKQIDHESRPVLFAGIDVGAEELILVIRKNGKPFDPQKFANTPADRTRLVKKLVKLPGIIVCLEATGVYHFDLSLALHDAGVLLMVVNPKAAHNFAKVLMKNSKTDAVDANTLAEYAARMDFVAWTRPSNETIALRSFARRIDALTSQKAAAKNHLHALTATSETPKAVLKDVKLAIAQLEKRIDRLTTGALILIGKHPDLERILTLLIGIKGIGNTSAIALMGELLLLPPDLSHREWVKFAGLDPRAFDSGKSVHKKTRISKAGNRHIRSALYMPALSAKQHDPHVKAYFQHLVANGKKPLQAVCAIMRKLLHAIHGMLKHNETFDNTRFYAIPASAE

SEQ ID NO: 360799 - protein, 342 aa, unidentified
MSIVGGLDMHRKQITFDYVDTMTGALCRGMIMPADRLTLREWLGRFADYRGSVRLVVEGCTGWRYVVEECRRAGIDIHVAEPADTASARGPKRHAKTDKLDAKHLRELLVQGRIPESWIPPEQVLEMRAKVRLYKDLRDERTDWIQRIRATLYHQGVPALPGGVLAAGNRAALEAGAGLSPAGAQAVTVAVRQIDRLDTEIDALLAEIRSFAAIQPGCKALQRQYGIGKLTAVIIWAELGDTRRFSASRHAVRHTGLDISVYSSDGKRTRGHLARQGPPLLRWALFEAAKSAAKRTSPDHAYYLQVAERAGANRATLSVARKLARRGHHTLRELGDQAFAPV

SEQ ID NO: 360800 - protein, 429 aa, unidentified
MASEPTKVIAGIDTHADTHHVAVINEHGKPIADKEFLAVGSGYRKIIDFITSYGTVVAIGVEGTGSYGAELARTLRGEGLTVLEVNRPNRAARRLKGKSDPLDAYQAAKSVLEGRTKAIPKAKDGPVECLRIVRSGRASAIKARTAAINQIKALLVSAPDKIRAKYRALATSALITALQRTRPSGHMADPEYVTLMTLKALAARCQALGAEIEAADAVLKEILDSYAPMLCDLPGVGTEVASQLLITFGDNPDRLGNEAQFASLVGVAPVPASSGKTTRHRLSRGGDRSANNALHQVVLVRMGSCQRTKDYVAKRTSEGKSKREIMRCLKRYAAREIYRQITNLRPAPDNSDLRRMRTELGITITTVAGELGQWVSILSRLERGHIRNDDLAATYRQWLTDQCQVQRFTRPLTSAAKTCALPEAVSQPV

SEQ ID NO: 360801 - protein, 347 aa, unidentified
MTNRSQVGVEVFAGLDVSARQISVARRRSQEEKPVVASFANNASGHKALLSFLLQGSERARVCLEASGNYSLDLALALQAHRQVEVSLVNPRRARHFAESLGERSKTDPVDAGVLCEYAARMPWVAWQPPTSLALRLRAITRAIEALGVMHTQEKNREHALASSQALPAMVIQEMQRHQRYLEHRMERLRREALRLITRDRELDRRFRLMLTVPGIGETSALHSLGELVALSPTLDTRQWVAFAGIDPSQFTSGTSVQKRPRISRGGSRHLRRALYMPALVALRREPHLRAFYQRLLRRGKARLQAVVAVMRKLLHALFAMFHSNHSYDGSKLCPIELTTKLAKLAA

SEQ ID NO: 360802 - protein, 403 aa, unidentified
MSLDCRFEEPTAIRTHIGAIFVSLELSRSNWLITSLSPGAGEKMSKHGVPAGDVAGLLGRFAELRRKAVARTGQSFPIIVIQEAGLDGFWIHRVLESEGIESHVVDAASIAVSRRRRRVKTDKIDGEALLRALLAYKRGEPRVCSMTRAPTPEEEDRRRPCRERKALIAERVQHVNRIKGLLFSQGVSDYQPLRVGRRQQLAALRTGDGRALPARLKAQIARELDRLELLLDQIKAVEEERDALLASAAVDDCKPSPGKDGDALTTQARLMALKGVGPDFAAVLWSEGLYRNFSNRRQVAAYAGLAPTPWRSGSIAREQGVSKAGNPRLRTTMIQLAWLWLRHQPGSALARWFKEHVALARTSVRKTTIVALARKLLVALWKYVSAGVVIEGAVMKATPLKRG

SEQ ID NO: 360803 - protein, 345 aa, unidentified
MNVTTVGIDLAKNVLQVHGVNEHGKPVLKRQLKRHQMATFFANLPCCLIGMEACGSAHFWARKLQGFGHTVRLMAPQFVKPYVKTNKNDVADAEAICEAVARPNMRFVPVKNVEQQAVLALHRARQGFVRARTAQANQIRGLLGEFGLVIPQGITNIAQCVPELIEDASNELPGSFRLLLLRLTEHLKELNRQVDELETMIKAWHRANDASRRLAEIPGIGPITASALVASVGDAKCFTNGRQLAAWLGLVPRQHSSGGKSTLLGISKRGDSYLRTLMVHGARAVVRYAANKKDASSGWLQSLQARRHMNVAVVALANKNARIVWALLTQGRTFRPDYSPAAAGA

SEQ ID NO: 360804 - protein, 411 aa, unidentified
MRRVIGMDIHRTFAEVVFWEDGKLRPTGRVSMTRAGLEGFGRSLGKEDEVVIEATGNAMAVVHVLSPYVARVIVANPLQVKAIAHAHVKTDKIDAGVLASLRAADFLPEIWLPDADTECLRRLVARRNQVVRHRTRIKNEVHAILHAYLVPPCPHADLFGRLGRIWLAKQVMPDDECAAIERHLRELDRLGEDLGVLDREIAQAAVDDPAVKRLLTVTGINLIVAAGLVAAIGDVRRFPDPQKLVSYVGLNPRVRQSGLGLAQHGRISKRGRSHARAMLVEAAWAASKAPGPLRAFFLRIRARRGHQIAAVAVARKLAVLCWHLLTKGADYQWARPALVANKLRAMELQAGQPARKGNKPGAAYAYNIKELRDREIELARHAEQAYERFVSQWQPRGRPKRRTGAANEERH

SEQ ID NO: 360805 - protein, 343 aa, unidentified
MDQYVALDVSLRKTSVCVLNSLGRVVTEADVPSESGALISFIRARAPHASRIGLESGPTSTWLWHALKAAGLPVICMDARHAHAALSVRPIKSDRNDARGLAEMVRVGWFKEVQVKSLGAHERMALLGVRRRLVDIRVEIDGQIRGILKTFGLVVGSGNKGAFAQRARTLAQDHPILSALVEKLLDVREVAAAKVAVLDKEIRRFVRDDPTLRRFLTVPGVGPVTALAFRATVDEPSRFRRARDVGPYLGLTPRRYQSGETDRQGHISKCGDRFTRTCLYEAANVLLTKVQRWSPLKAWGTRLAKRIGSKKARVAIARKIAVILHCIWTDGTEFWWTKEMAAA

SEQ ID NO: 360806 - protein, 416 aa, unidentified
MHVVYSSCCGLDVHKRSITACLLLSGSGGKGHHEIRRFGTMTRDLLELADWLQCHHVTHVAMESTGVYWKPVWNILEGQFEVVLVNAQHIKAVPGRKTDIKDCQWIAELLQHGLLRGSFVPPTPIRQLRDLTRMRTSLRQDHTAIANRMQKILEDANIKLAAVASDWLGVSGRAILSQLLAGEEDAEKLAELSRGRLRSKLPAMQLALEGRMTEHHRWMLRVLHEQLLFLEVQIAKLEAKIQDQLSDYQEAIALCTTIPGIEEVAAANLIAEIGVNMAQFPSAQHLASWAGICPGNHESAGKRLSGKPRKGSAWLRRSLCQAAWAASHTKDTYLAARFRRLAARKGKKRAIVAVAHTIVVSMYHMLKNKQPYRELGADFLDRRNAENVKRYLLKRLERLGLHVTVRSAEETAALSA

SEQ ID NO: 360807 - protein, 339 aa, unidentified
MLEHQVRINRKDGSTKMLNATPARLAAGIDVSKRKLDVAITGSLERFTVANDAAGHAIIAERLHSLGIQRVGLEASGHYEAAVAQHLRQCDFVVLVLDPGQVHGWRRFQKRRAKTDPIDATLIAEVTAAVDLPRQPPDPRLAPLAEHLTLIEQLAEDIARLKTRLERYSDAAPLRFLKAEIQRLTKCRAKQLARLISLLRAAPDLARRFDILISIPGVGEITAVTFVIRMPELGRLSRAEAAALVGVAPFNADSGEQAGQRHIAGGRSRLRRAVFLAAFAAAQHWNPLLQATYRRLRDAGKHHTVATVACARKLVAIANALIARDAPWQPEPPVRQGAA

SEQ ID NO: 360808 - protein, 336 aa, unidentified
MEKKEYCIGIDVSKNTLDIAIFDGGMDWNKHIQVPNNPKGYASIVAWLGKNGISKKGIRLCLEYTGLYAHSFRLWIEEQQITYYMVNPMKMHRYEIPTNIKGLGRIKTDQMDAFRIAIYCYQNYRLLEPSKLPSESYFKIKRLLAERKQYVRQSTLYQQQLHDISAYDTESSRHRKEEMRVQMHYHIKQTDEEIDNVLKEDTALLNNYSLLTSIIGIGRVNALTTIVLTENFTAITDPRKYACYIAVAPFRKESGTSVRGKAKVSKMGFKQAKADLSIAVVTTIQHDPNIRAYWLRKKAEGKQTGIVMNAIKFKLILRMFAVIKRQTPFVKMDAYK

SEQ ID NO: 360809 - protein, 394 aa, unidentified
MAATRKQYNKAQPALSVALDLGLAEWKLAFGSAAADAARQRAIAARDTQALLKEIAKAKARFGLPADAPVHSCYEAGRDGFWLHRWLTAQGVDNVVVDSASIETNRRQRRAKTDRLDAAKLLSMLLRWHGGEKKVWKVVRIPTPEEEDRRQLHRDLLELKGQRTQHINRIKGLLASCGLTVSKIEADFPERLAALRQWDDEPVSAELQQRLLREFQRHQFVDRQIRDVENERARRIRTAEDKPTQQVRKLLNLRGIGANSAWLFVLELFGWRRIRNRKELAALAGLAPTPYGSGERWREQGISKAGNRRVRTMAVELAWSWLHYQPQSALSQWYARRWGSGSSRQRRLGIVALARKLLVALWHYLEADQVPQGAEVSDWKVKMAGRKRVAALSA

SEQ ID NO: 360810 - protein, 344 aa, unidentified
MKIAVLGIDLGKNVCSIVGLDESGAVVMRRRAKRDLLVEYVGKLPPCIVGMEACCGAHHLGRLFAAQGHDVRLMSPEYVRPYVKAQKNDDRDAEGIAEAATRPTMRFVETKTEAQLDMQMLHRSRDRLVGERTALINQLRAVLLERGIVVPQGKRKLEQYLAGLMQEPEGRSLSARMRMLVADMRAQWQELDRRIAAFETEFVSYAKESDDARRLITIPGVGVITATALIAAIGKAETFKHGRDLAAWLGLVPRQSTTGGKPRLMGISKRGNKYLRKLLIHGARAALPHVAERDTPLGRWVKELLARVHPNVAVVALANKLARISWAVLRSGQQFNAKGTPLAV

SEQ ID NO: 360811 - protein, 451 aa, unidentified
MEILYTNCAGLDVHKKTVKVCLLTQTSNGQPHKEFRTYFTTTEELLTLGDWLKEQACTHVAFEATGVYWKPVFNLLESSFELLVVNAQHIKAVPGRKTDVKDAEWIADLLQHGLLKASFIPSGPQRELRDLTRYRVRLTEEKAREVNRVQKTLEDMNVKLGDVVSDIMGKASRLILQAIVDGETDPGRLAALAVGRVHASQEQLEAALNGNVRDHHRFLLSEHLTQIRHLEQAIERVTAEITRRFTPPSPPEDGSTSQKEQEAVPEMVPDSALQQESPSSPQAALSWSEAVVLLCSIPGIGERAAIGILAEIGINMHQFPTAAHLASWAGVCPGNHESAGKRLSGKTRKGNPWLRCLLVQAAHSASHQKRSYLAEQYRRIAKRRGAKRAAIAVAHSILVIIYHLLSHQSTYQEKGETFFEEQERQGVEKRLVRQLSRLGFHVELQPVALAG

SEQ ID NO: 360812 - protein, 349 aa, unidentified
MKHYIGMDVSLELTAVCVVNCDGEVIAEAKVLSEPDALVAHLHALKADIVRVGLEAGPLSQWLHAGLVSAGFDAVLLETRHVKAALSAMTVKTDRRDARGIAQLLRMGWYRPVHVKTLPAQEARAMLVARKQLIGKLVDIELSIRGLLRNFGLKVGKVTRKEFEGRIRDLAQGQPSLELITDAMLTARNVLLCQFTRLHNAILQIVRKDDVCARLMSIPGVGALTALTFRTAIDDPTRIAKSRDVGPLFGLTPRRYQSGETDVMGRISKAGDGMVRAALYEAANSMLTRSQRMSALKAWALDVARRRGHKRALVALARKLAVVMHRMWLDGTTFQWSRSRTPEMAPETV

SEQ ID NO: 360813 - protein, 407 aa, unidentified
MGRYYIGVDWADKVHEVCVIDEAGEKVVQRKVEETAEGMGEFGRWLDERRAEGMELWAAIEKPDGRIVDLLLDHGAVVYPINPKALDRVRDRFRQSHSKSDPFDAWVLAEFLRTDHGHLKTLRPNSDKAQELKILTQDHLRLVRSQSRLLNQLRITLKEYYPRPLEVFEDLTTQIALDFLQHYPTPEALSKLSQKQCRRFAREHHLGEQRQGELWQKLSKPQLRIPEHVVRAKSRLVEVLVEELKVVVRNVDRYQKEVERFFASLPAAKLLEKLPGGKSGTIVPMLWAHVGDAEGRWESFGQLQAQAGTVPVTKKSGRSQVVCFRYACNQQLRYAVYWLAFISLRQSEWARAYYDKQRARGHSHHRALRALGAKWLKILFVIWRDHVPYDETYHLANIARQYLRHAA

SEQ ID NO: 360814 - protein, 579 aa, unidentified
MSTATPLDRIGIDTARYGHRVSFLRPDRQPAAKALTVLENQAGYQALRERLEQLHRQHPQAHFHVRIDAAGQYAANLERFLRGLDLPITVSIGEPKRNKDYQKAHFPKRTTDDTESQAMARFAVVELPAATAVPLPQMVLLHEVAGRLQAQVKQSTQAINRLHNLLARVFPELATLTDDIGAGWVLHLLDKYPTAERIGQARLGSLEKIPYLAADQAQALHQAAQQSVGSLRGTVAETLVRDLVAQVRHAEQAEQKMRQLLTTAFADLPASGHRQLVTITGIGAATAAVLTAKIVDIDRFATPEHLVGYFGVFPEENSSGVDKQGNPLPPGTLRMSQKGNDLARSYLWNAARSAIIHNPAVRALYRRLKAKGKRGDVAIGHCMRKLLHLVFAVWKTDQPFDADHFPWEPATNTPVATETSSQHAATVSPTTNAEAVGHTRAVPAKQVVTTTTSSVAPPPAPVNPPPPTAPVAQPRIDFAFLRAQVTMEQVLTHLGLLGQLRGRSQQRRGPCPLHGQPTDRVHTFSVHLGKNVFQCFQADCGVHGNVLDFWAAVHRLPLYDAALHLAATFHLQRNREENP

SEQ ID NO: 360815 - protein, 356 aa, unidentified
MSRDSKYIGMDVHKEAIVIAVLNDSGKLVMESIVETQASSILQFIHGLRGELYVTWEEGTWAAWLYDLLKPHVHEVLVCNPRRNALLKEGSKSDKVDAHKLADLLRTGMLRPVYHGENGLRTLRELARSYQTISKDLNRVMNRLKALYRGWGIACSGTQVYAARYRQEWLHKIPHAGVHRRAELLYQQMDGLQALRRTLRPELLAESRKHKAAKLLRQIPCIGPIRAARLLALMQTPHRFRSKRQLWTYSGLGIETRDSAQYRYVHGQLQRSKKPQQIRGLNQNHNHEMKEIFKGAATRASCGVGPLRDFYVALLDKGMRPEMARLTLARKIAAIALTLWKKEERFDAEQLKPQAA

SEQ ID NO: 360816 - protein, 344 aa, unidentified
MKQYVGLDVSQKETAVCVLDQDGKVLFEGKAPSDPGALARVIGKWAPAAERIGFETGAMASWLWHELKRIDLPVVCIDARHAHAALSVRLNKSDPNDARGLAELIRVGWYREVRVKSDTGQIVRSLLVARARLVRIRRDLENQIRGLLKEVGMLFPRAIGANFRIQVLRLVNNEHSLRPIIDGLLAVHEQVEKQQAKLDTRVRKGAKDDATTRRLMTVPGVGVVTAMAFRYTIDDPTRFRSAQTVGAYLGLTPRRKQSGELDFNGRISKWGDRLLRTYLFEAATVLLHRTQRWSALKLWGTRLMKRIGAKKAKIAVARKIAIILHCIWTDGTEFEWGTKMATAA

SEQ ID NO: 360817 - protein, 374 aa, unidentified
MREFSKYVGLDTHKETIAVAVADAIGGKARYYGEIANTPEAIRKLVKKLCFDGEVISFCYEAGPCGYEIYRQISQLGHYCSVVAPSLIPTKPGERVKTDRRDSEKLSRLNRAGELSAVWVPDQEQEAMRDLTRAREDMKGLERITKQRLNAFLLRYGRIYESGKSRWTQAHFRWMEGLKFDVTVQQIVFQEYVDAVKQAEARVAGLEQEMEKALEYWVLAPVVEALMALRGIKLITAMTVMAELGDITRFDSPRQLMSFLGLVPSEASSGQTRRQGGITKTGNSHVRRVLVESGWCYRFPARKTAHLQRRAEKCSDEVQAIAWKAQKRLCGRYTHLLGRGKLKVQVCTAVARELVGFIWAIACEVMNKPVESTC

SEQ ID NO: 360818 - protein, 307 aa, unidentified
MFVGIDVAKDRLDVHVRPSGETFDVARDGEGIEELVRRLSVGVPTLVVVEATGGFETIVAAGLAAAGLPVAVVNPRQIRDFARATARLAKTDTLDAAVIAHFAEAVKPPPRPLADPQTQLLGELMARRRQLIEMIVAEGNRRRLLTARRTLKSVDRVLATLKAQLQQIDDDIDTAVRGTPAWREAEDLLISVPGIGTRIARTLIAEMPELGHLDRRRIASLTGVAPFNRDSGTLRGRRTIAGGRTVVRSALYMSILVSIRRNLPLAETYHRLRATGKPAKVAIVACMRKLVTILNAILRDRKPWADA

SEQ ID NO: 360819 - protein, 346 aa, unidentified
MKHFAGLDVSLDETAVCVVDEAGTMVREARVPSEPEALVGFFQGSGLVLERIGLEACSLSAWLHESLVAAGLPAVCIETRRAKAAMGAMPNKTDRNDARGLAQIIRTGWYRAVHVKSPACRSWRALLTARRLLLNKMRDLENGLRAVLREAGLKLGTPTRKEFAARVRELTAADPVLSVLAEPLLTIIAAMTRELAQLTKRVLEIVRDEPVCRRLMGVPGVGPLTALTFRATIDQPERFRHSRDVGAHLGLTPKRYQSGETDVQGAISRCGDELARTALYEAAHSLLVRSRRWSALRAWGMQVAKRRGMARARIAVARKLATILHRMWADGTEFRWGKEGPMPAAA

SEQ ID NO: 360820 - protein, 468 aa, unidentified
MSRSKLKAHTSAQGEIRSTEGLPVVNPHAAGADIGAQEIYVCIPGPDQTQIVRSFGTYTADLHAIADWLVENGIQTIAMESTGVYWIPLFEVLEGRGIHCCLISGNLARRLPARHKTDVLDCQWIQTLHSLGLLTESFRPDADLIALRSLLRHRAQLIEHRSPHILHMQKALIHMNIRLDQAVSDPTGDTGLRIIRAIVAGERDPHKLAALRHPHCKKSEAEIARALTGTWREEHLFVLKQSLELYDFYSRQIEACDAEIERTYSTIRPHWPDPDPNDQDPLPPNKRGSNSKNLPKDSPVQVRRHLRRITGIDLTSVDGLSLDLAQKIVAEIGTDMSRFPTVKHFTSWLKLCPNNQITGGKIIRSSTGKSHNRARQAFLQAAASVARSNCAFGAFYRRLKARVGPAQAQVATAHKIARVVYHLLKFKVEYCQMSAQEYEQQFRERETRHLQRKAARLGFTLTPTAAVS

SEQ ID NO: 360821 - protein, 464 aa, unidentified
METSRKKNTQPDNEVGGEGLAVVRPNVAGIDLGSKVHWVCAPKKDGTGRDVEQFGATTPELERMAVWLKEREVESVAMESTGVYWIPPHEVLERHGLEVVLVETRQLGRVPGRKKTDRVDGKWTQRLHSCGLLMGSFRPNEQVCRLRTLVRDKGTLVAEAGDWMRRMQKSLDQMNVRVHRAVADIDGVTGMAIVRAIAAGERDARRLAKLRDRRCQKSEEEIAEQLSGHWRADHLFTLQQALKMYDAIQERIGEYEREIIQKLAEMERKECRGQQPPPVNNRQKAKAIQKRGEEPMRQALYRISGVDLTAIDAIGVETVQVVISESGPDLSQFPTEKQFVSHVMLAPRKPMSGGKTLKKKKRLGGASTRVAAALRMAALSMRHSLTALGAYYRHIARRKDGDVAVFATARKLATLIYRLLRWGQPYVDEGAAAYEKRYKEVRVKSLTAAAKDLGYQLTPAATQL

SEQ ID NO: 360822 - protein, 375 aa, unidentified
MEGAPMLDTTTFIGLDVHARSIKAVSLDVMTGEVRAATFGYDAGAVAEWVRSVDPRARCVYESGVTGFDLQKRLSGLGVDCVVGAVSKMIKPSADRRRKNDRNDAEFLARMLSVGNVVEVWVPDDECEAARDLTRALEDARDDLSRSKQRLSKFLLRHGLVFDERTPTGRRKGNWTRAHWSWIESIRFAERADNDVLAYYVDAVRRAAEEKARLEGLVEAEARKPRWRKRVDSLRCLKGVDTASAADLVFEAGEFSRFRNARSFAAWVGLTPSEHSSGESDRRGAITKAGNKHLRKTLVEAAWHYLTCSGRPKDLARGQAPDRGARRHAAKGVRRLVERREALLARGVHGNKANVATARELACWVWAVGLMAEEA

SEQ ID NO: 360823 - protein, 400 aa, unidentified
MRAVFGIDVSKASSEVAILVNGEKVHAYTMTNDAIGFSRLLGDLKTVHKPEIIFEATGVYSRRLQSFLDEHGYAYTRLNPLEAKKQLDSLRVRKTDQIDAEKLAQSQFVLNRKTTYVQEEIYQNLRDLSRFYQNLTEDIVRAKNRLHKALQVTFPELENILSTPTGEQYWNLVIAFPCKDFVLELSKDKLSESIRQSTSKRISDKRVAYLAEKLIALANQSYCAVKKTSPILEEVRYYGKELLRLSEQRQTVLDQMVELAQPLPEYDILLSIPGIAETTATSIIGELGDIRRFQSANQINAFIGIDLRHYESGNFLAKEHITKRGNPYPRKILFKCIHNIASASHTNPCHIADFYEKRKRQSQTTSTKPHTIASIHRLIRTMYYLITHNKLYDYTSTQNR

SEQ ID NO: 360824 - protein, 349 aa, unidentified
MKIIGCDFHPIYQQIVMWDKATGEMLERALSHERKEEVRAFYAGLQGPVRVGIEASGQSQWFEQLLAELGPEVWIGDAAKIRASCERKQKTDRRDAELLVKLLEEERFPRIWVPTPAERDARQLLLHRHKLVRMRTQLKNQLQALALNQGVQRKWKLWSEAGRKPLEALPLLPWASRRRAELLVLLDQLEASIGELDGAAAEQANTRPAVRRLMTHPGVGPITALAFVLTMGPAQRFRRGKQVASYLGLIPTEHSSGGRGQRLGHISKQGNPFLRGLLVEAAQSAVRHEPEMRRAYQRLAQRKCRALAKVAMARKLAVRLYWMLRREVDYAQLIQGSHAGQLESFRGRV

SEQ ID NO: 360825 - protein, 349 aa, unidentified
MKTTSYECKQVYIGLDVHREFFVASCISEGVVVKRCRMPGTAEAVVTLVRKEFPGASVLAAYEAGYSGFWLHRKLEAAGIRCLVVHVASIEVSSRDMVKTDKRDSLKIAEQLAAGRLKGIRVPSVEEEQKRLLTRTREQLMCKKQRVMVQIRMRLHYFGLFPESINRRLKLSDVDDMLVSLEGELQRTIGMLRDEWHHLAKQIKEIDRILVEEGKKDPLNAVYRSVPGIGPLIAMVLSSELGDMSQFPNERALFSFTGLTPTEYSSGGHICRGHISRQGNTRLRHMLVEASWKAVKKDSVLKEYYTKLSERIGKRRAIVAVARKLIGRVRAALRKHEQYQLGYQAPLAA

SEQ ID NO: 360826 - protein, 425 aa, unidentified
MLAFDMAADKQVCALTDPDSQVIARRTVRVNAWELADAVEWGLAQAAEAGFSSVVVACEPTGHRWRVLDQIAAQLGVRLVCVQSLLVCRAREAEDFTRNKNDDTDAMIIARLVTELRCYLPERADPNWARLRHLGARRVALTVDVGAARQQVRDLLECAWPAALSAAGQPLDSRNWLAAVTVALDRIGATGDLSVIGQWGWDDFAAAVRRELGTTRWYSTIVRAVFDTATDPALAMIGVAGQRAGALERVRFALADLTHARAQIAVVEHRMLGVLDDLGLTDLVSSIPGVSAIGAATILAEAGDPTRFSSARALVKHAGLCPRDNSSGTYQGTTKISGRGRPELRLAAWRAVFSALQHNPVLAAKHTHLISRAENPLTDTQARVAVAAALLRQLHAVVVTRTAWDPTIAAGLDRAESTDQEAAAA

SEQ ID NO: 360827 - protein, 341 aa, unidentified
MQITTIGLDIAKNVFQVHGIDAAEKVVVRKQLRRGQMVKFFAALPPCLIGLEACATAHYWARELTKLGHEVRLMPAKDVKAYVKRNKNDAADAEAICEAVRRPTMRFVRAKSAEQQGRLMQHRTRDLLLRQQTQVINAFRAHLAELGIVAAQGREGLKQLLAIIADEKDAGLPIDARASLIVLAAQLQALHTMISSIERRLTVQHRASEESKRVATVPGIGILGASAIAATVTDASTFRSGRDFAAWIGLVPRQDSTGGKQKLGPISKQGDRYLRRILVVGAHSVLRRARQNPEKYPWLTQLLARRPFKVVAIALANKMARVAWALLARGGSYRVPALATA

SEQ ID NO: 360828 - protein, 492 aa, unidentified
MNFENNLRPGNNGSGRKARGRTRFACPNPTRIKPRTPADPGAFIKKSERTTPQEGHRIRTTNDKGRGPCANKPMNDTISWESIIYYAGFDWAKDHHDVVVVNPQGKIIKDLTFEHSAEGWAKWKELVAAYPHLAVAIETSQGAAIEQLLTSGVVVYPVNPKSAERYRDRKAPSGNKTDFLDAWSLADALRVDGHGWRALKPLDPLIQELRLLCRDEVDLIAKRTELVNQLQAALHEYYPAALQAFEDWTATPSWSFVQQFPTPELLRQAGRRRWEKFLHVHRLYRPEVNEKRLEIFAKAHEFCGPVAVTRAKSRLALALIKLLHALETQLDDYRKEIRRLFNEHPDHELFGSLPGAGEKLAPRLLSELGSDRSLFISAQSLQCYVGTAPVSFESGQVRQVYVRFMCNKSFRHAVHLWADLSRKSCSWAQVYYQQLRAKGKSHASSLRCLGQRWLKILWKMWQTKTCYDPDFHMANQLKHGSWVLAVKPAKSV

SEQ ID NO: 360829 - protein, 343 aa, unidentified
MEQVSTVGLDIAKSVFQVHGVDEAGGVVIAKRLRRSQVIPFFRKLAPCLIGMEACASSHHWARELGALGHEVRIMPAGYVKPYVKRSKNDAADAAAICEAVTRPTMRFVAVKSREQQSLLMLHRSRSLLIRQRTMLVNAIRAHLAELGIVAPVGLRGLRALLAVISKPEDERLPSLARSCLESLAAALMSVEQEIASAERQILVWHRSNEASRRLASIPGIGPIIATALIASVADPSIFRSGREMAAWIGLVPKQNSTGGKERLGRISKQGDKYLRWLLVAGAMAVIRHGRKTGFAAQPWLANLAQRKPAKVAAVALANRIARTAWVLLARGGTYRQPALTTG

SEQ ID NO: 360830 - protein, 310 aa, unidentified
MDRVIVGIDVSKDRLDVHVLPAGEAFAVERNGEGIAALAERLMALHPYGVGIEATGGFETVAAAGLGGAGLPVIVVNPAQVRAFATALGRRAKTDPIDAAVIARFIEATKPEPRALPDEAVRLLADLVSRRRQIVQMIASERQREKRLAPKRVKRSIARLIAALEKELAEIDREIDDQVQSTPAWRANEDLMRSVPGVGPVVARTLLGQLPELGRLDRREIAALAGLAPWTRQSGTWKGKSFIGGGRTAVRTVLFIAALVASRHNPTLKVFRDRLVAAGKPKMVALIAVARKLLTILNAIIRDQKPWAHA

SEQ ID NO: 360831 - protein, 340 aa, unidentified
MAILAGFDVHRAQITFDALNTETGEVLRGRFRADREAVGDWVKQFAGEHIEVALEACTGWLFVYEVLADAGVVAHLAEPAETSALRGKKRHAKTDRADARWLRTLLAEGRLPEAWIPPAHVREWRTKTRLRKTLIDDRTSWLQRIQATLFHHGIVDVPDQLLRANGRAFLRALALPSASAQRIEVALAIIDEIDRRLVPLERELAALARRQAGCQALMRQYGVGPVTATTVLCELGDVTRLSASRKAVRCSGLDIGVYRSDRRSRTGRITRQGSPALRWALYEAAQAACKPASPDHADYVALKARGLSHTRASLTIARKLARRSFHILRELGPDALAPIS

SEQ ID NO: 360832 - protein, 399 aa, unidentified
MFCGWDWGSTLHGVCLLDEDGATIKTWMVKHTEEDLSALFTELARLGEPGLMPVAIERGEGLVVGLIARAGHPVLMVEPTAFKAARPRWGAAGAKSDAADAFMLADYARTDGHRLRRVEPLAQATRELAALVRARTSLVEARTAASNQLWAVLAEHWPGAALVFQKLTSQIALAFLADYPTPQAAALLGEGRMRQFCRRHSYRGGKSPAELMSRLRAAPASANPIAEKVLEAIARSQVAQIGLLNVEIRGLERKTADALAAHPKTALLKMLPRVATVSLAALIAEIGPLLERCENPEQVAAMCGAAPVTRASGKSRTVGFRYTANKPARVAITSFADNSRHSSAWAGDCYRRARARGARHPHAVRILARGWVRVIWACWTTDTPYDPARHRGEQRLAAA

SEQ ID NO: 360833 - protein, 407 aa, unidentified
MDVLFPRCAGLDVHAGSVTACVRIAAGAEVTYQHHTVPTTTHGLLALDEWLTSHGCTHVAMEATGVYWKPVWHVLEGDFTLILANAMHIRNVPGRKSDMNDATWIANLLAHGLIQSSFVPPAPIQQLRDLTRTRKQLMRELTRHTQRIQKTLEDANLKVTHVMSNIVGVSGRAILDALVSGETDPERLADLTRGRLKATRTELVDALHGRVTDHHRFMIKLHLTQIDALDAAVQDIDARVGDALGPFRAAVSLLTTMPGLSDTAARVLVAEIGTDMTRFPSAGHLVSWAGLCPRLDESAGKRRSTRTRQATPWLKTTLVTAAWAATRKKDGYLRAQFLRIQSRRGAKKAVLAVASSMLTAAYYMLRDGVEYHDLGGQYFVHRDKEQMAKRLIERLRNLGVVVEIKAA

SEQ ID NO: 360834 - protein, 449 aa, unidentified
MHGVHIGGQRAGAFLELVRGVDPKRVLLVGIDVAKATWFVVASNLLGEVVVDGVRLVADRAGLAELERMLGAASARVNAAMVVVGIEAAGHHHQTLTAHLLDRDELVVRVLNPAQVAAVRKQQGNRRRKTDWLDAAAVCELLARGEGALVHLDGSAASALRPLWSGRKDLVDTRSRLRQQAGALVDCLWPGCSAKDTAAGVTPVLCDLFATKAGRVLLELLAQGWTPARVAATSVAALRGLFAVRGCRLTRPLATRLIGRARAALPAHPAATVGKAATLAALLGTIDTLDHQIACLEAAMAPLLAGTQGAKLTQLRGVGVVAAAGFVAFVGSTDRWADWSKVWRAAGLDPARSQSGPTDARLGVSREGSAWGRRAILDLAAAVCQQPGPWRDRLRIRTTQPHKPAKVALAATANAVGRTLFALMASGADFDPHFEAKRAAARKAGGRAA

SEQ ID NO: 360835 - protein, 390 aa, unidentified
MILVGIDVAKDKHDCCIINSDGEFPEEVFSILNNREGYETLYKRICSLAVDLAKVKVGLESTGHYSSNLLAFLLDKHLTAYVINPLRVNLFRKGQSLRRTKTDKIDSRNIAHLLMADSSLKPYSLSSYHMEELKSLTRYRGTKVRERTKLKTSIARLVTILFPELEQLVSSIHIHSIYAMLEKFPGSAYIAATHLTRLTALLLKASRGRFGRETAIRIRDTARQSIGAVSPAKSMELQHTIAHLRVYDQEIGEVESEIEKIMDDVNSPITSVPGIGMQMGAVILAEIGSFRRFDSPDKILAYAGMSPSTYQSGKLTGSYSRMEKRGSRYLRYALFNVTRYVCHYDPGFTAYLSKKRKEGKHYYVAISHAVKRLVRVLYAMEISGNRYQTA

SEQ ID NO: 360836 - protein, 312 aa, unidentified
MPCCVGIDGAKAPWDIALRPAGERWAVPNDAGGVVMRVERWQALPPTLMVLAATGGLERAATAALATAALPVVVVHPRQARDCARATGPLAKTDAVEARALAHCAAVIRPTPRPLPDAQTQELRALLGRRQHLIGMRTAEQHRLAGTTARLTTDSAAHMTWRNAAIATLDGDLETLRRASPRWRDKDDLWQSATGIGPVWARTLRRALPALGTRTRQQSAAVVGVAPLHCDRGTLRGRRMIWGGRAPVRPVFYMGTLVATRFNPQSKVFAERLLAAGQVNKVALTACMQKLLPILNAMLKHRTPWQPQEVQS

SEQ ID NO: 360837 - protein, 360 aa, unidentified
MNATTVAVDLAKSVFQLAVADEHWKIIETQRLTRTQFERWFLNREVNLVIMEGCGSAHHWARWLNGLGIEVRLLPAQYVRAYVKRNKTDAADAAALLEAARASDMRPVRVKSVEQQALQGMHRIRSLWMGTRTSRINALRSFCREFGIAIPVGARTGVEAISRVLADPNTAVPDLIRGTAKLLIEEIRLLEARIAQLERELAAIAKLSPACTTLLSIPGIGLLTATALVAATSGDVSHFKDARHFSSWFGLTPKEYSSGSSRHLGRISKKGDRYLRMLLTHGARSVLRASKVAQDAGREVCGVRRWALDVQSRSNHNKAACALANKLARICYATLRDKEPFGESAGLNKKINRESFVMPA

SEQ ID NO: 360838 - protein, 459 aa, unidentified
MARHQRKGNGLPAQLAAVNLHAAGIDIGAQEHWVAVSPDSDSQPVRRFGACTADLEALASWLQQCGVQTVAMESTGVYWIPLFELLEAQGFAVVLADAREVQRAPGRPKTDVQDCQWLQRLHTYGLLAAAFRPPEQICVLRSYLRQRAMLVTYASQHIQHMQKTLTQMNLKLQHVVSDVTSVTGMAIIKAILSGEHNPTTLAQLRARNCHHSEAEIARALQGNWRAEHLFALPQAVELYEFYHHQIAECDRQIEAQLQTLADHSAGRTLPPAPRPPKRRRNEHHFDARLPLFRATGVDLTAIEGINEHTALVLLSEIGTDMTRWPTEKHFAAWLGLSPLHKISGGKVLSRKVRPSANRAAVALRLAASCLHHSHSALGAFFRRLKARLGTPKAVVATAHKLARLVYRLLKHGEAYVVQGMAEYEHAYRERMVKNLIRKAKELGYQLLPTSEQTAQEAPA

SEQ ID NO: 360839 - protein, 339 aa, unidentified
MANVAVLGIDIAKNVFQLHGVDADGQAVLKRRVMRDQLLQVTEAMPPCLIGTEACTGAFHWQRHFEAQGHTVKIIAPQYVKPFLKGQKNDGNDAQAICIAVQQPHMRFVPKKSIIQQDIQGLHRARQRLVNHRAALTSQMRGLLLERGVAIAKSASTAQRTIPVIINNPTIDITELTRDIIGTLHAFLLQINEKIRYFDTQIDAVFRESDVCQRIAKIRGVGPKTATAVVAAVGEGADFKNGRHLAAWMGLVPRQHSSGDRRVLLGISKRGSQHLRTLPVHGGRSVVRTAQRKSDPASEWVNELRERRGYNRAAVAVANKHARVIWALLQHGGEYRANP

SEQ ID NO: 360840 - protein, 345 aa, unidentified
MDEAYDGRQVVGMDLHRRRSVLVRMSMDGRKLETVRIGNSPGALRAVLARCGERPLVVLEATYGWYWAADVLAAAGAEVRLAHPLGVRAFSYRRVKNDERDAADLADLLRAGLLPQAWIAPPEIRALREVVRYRHKLVGQRTSCKDQVHAVLAKLGVPVTHSDVFGTGGGLWLDQLVLPEPYAAKVASLRALIGVLDGEIARLGQRAAGVLGADPGYAALRELPGIGPVLAAVIIAEIGDVTRFRRAGQLCSWAGLTPRHYESDTKVIRGHVSKQGSKMLRWALVEAIQHQPAGTRPRQARDAIIARRGKEARNIAKTAAARVLLTQVFYALRDGHVRSAGRPAA

SEQ ID NO: 360841 - protein, 380 aa, unidentified
MSTVTTRSEQPARTLHLAFDLGNRVWKLAFATSVAHAPRLRTMAARDLAQLDTEIAAAKARFGLAPDAPVVSCDEAGRDGFWLHRALAARGLTSHVVDSASSTENRRARRAKSDRLDATALARLLVRHHGGERGVWSVLHVPSVEEEDRRHLHRELFTLTRQRTRQVNRIKGLLALHGIVLAKPRGLPARQPELCDWCGAPLPPALAARVTREWTRLRAIQRDVVALRAARRAMLARPEAATDPLLRQVEQLRALRGIGEVSAWLYATEFFSWRAFRNRRQVAGLAGLTPTMRSSGDLEREQGISKAGNARVRGLAVELAWSWVRRQPASALTRWYRARFAAGGGRLRRIGIVAVARKLLIALWRYLETGVVPEGAVLKA

SEQ ID NO: 360842 - protein, 331 aa, unidentified
MKKIIIGIDVSKLKLDVGHYTSEGRVKSNCVVIENNTTGYNDMLTWFKKKKFKIKDILICMEHTGIYTDQLTKFLEKIKIPYTLQSPLHLSKSLGIVREKNDAIDAFRLSEYADEKKGKIKVSKRAPENQIRLKQLASERKQAVYALAKVRQVKTEITVHQKVSSQKRKEKQIKLFNKIILEIEKEIQSIINSDNELYKNYSLLCSIPGIGLVNAINIIVFTRNFTLFPDARSYACYVAIAPFEHQSGSSIHKKTSVSKIGNHYLKAILGQAARSAINCDPQIRKYFNRKFNGKKGPESNYGQVLNAIKFKLICRMFAVIKRQTPYIRLDF

SEQ ID NO: 360843 - protein, 351 aa, unidentified
MPRTSTVHAVTTIGMDMGKNTLHMIGLDKRGAIVLREKVSRGRIASRLANLPSCLIGIEAGLATHYVARELAALGHDVKQVPPAYAKPFRQGHKNDFRDAYSVAEAVQRPTTRFVPAKTDEQLDLQALHRVRSRLVSERTAVINQIRGFLLERGIIVRQGLRFLRQGLPDILAKRTDVLSPRMVRIVADLASDWRQLDERIEPVTDEIETLAKSDDGCRRVMTVPGIGPIISSAMVAAIGNGAAFARGRDFSAWIGLVPKQMSTGDRTILGRITKRGNGYLRMLFVQAARVILLRPASWPKHSFGVWLARAAQRLHRNVLAAALANKLARIAWTVLAQERSYEARVTKAAT

SEQ ID NO: 360844 - protein, 395 aa, unidentified
MSKIVHYIGMDVHKETIAVSIAPQHSTEVRRYGIIGGTLDAVDKLIKKLAQGSVELHLVYEAGPCGFVLCRHLRNKGIHCEVIAPSLIPKKASDRVKTDRRDADQLARLYRAGELTAIHVPDQEDEAIRDLVRARTSAMTDQRQARNRLKGFLLRLGFRYTGKSSWNDAHKRYLSGLLMPQGPQQIAFQEYIHAINDATDRLERLAKAVEDALPGWKWEPVARALMSLRGVQVLTAMTLVAEVGDFSRFDDPRSLMHFFGLTPSEHTSSDKRVQGGITRCGNAHCRRVLTEAAWHYRLQPKVSEVIQKRQEGQSKQVQLIAWKAQERLHKRFQQLCAKKKSVVAATAVARELVGFVWAIACKVKPAERPAAPEIIRTCRGKVYRLDPEQKFQKNK

SEQ ID NO: 360845 - protein, 317 aa, unidentified
MNAEGCFVGIDVSKAELEMGLVPEGKTWKTPHDHGGIGVLVERLIAMSPELVILEATGGLEAPVAAAIAGAGLPVVVMNPRQVRDFAKAKGKLAKTDKIDALVLADFGRSMRPQVRPLKDEQTQELKALHIRRLQMVEMLTAEKNRLGRAPSGRVRTDIQRHIAWLVKRIKEADKGLEDLIKNTPIWREKDAIIRSVKGAGPGLSSTLLCELPELGTLTHKRIAAMVGLAPFNCDSGKYRGQRRIWGGRARVRSALYMPTLAAIRFNPIIRAFHQRLIQAGKIKKVAITACMHKLLTILNAMLRDQTLWMPYNPKNP

SEQ ID NO: 360846 - protein, 309 aa, unidentified
MKEQLVYLGVDIAKSYLDAAVGNEKRRFSNDAIGHRELIKWVKQLKAPVQVICESSGGYERALVQGLARARVKISLVQANRVRQFARAAGILAKTDRIDAEVLCEFGQVMRPQTVTAARLEQEHLRELESQRRHLTRLLVMEQNRGARVSDASVQRLNRSLINQIKKQIEQLDLLIKGHIDQSHELSAKAAKLTSISGVGARTAALLLAQLPELGQLNRREVAALVGVAPFNRDSGRMRGKRAIYGGRKPVRHGLYMAALVAAHHNPILRNFYLRLRAAGKPGKLALTATMRKLLIVLNSALKTDLSYA

SEQ ID NO: 360847 - protein, 340 aa, unidentified
MDKVTTIAVDSAKRVFSAYWLELQTGEIGAKTMTRVKFEEFMRTREPSRVVLEAGGSAHYWGRWLALQGHEVRLIAAQHVRAFVRTNKTDGADARAIWEAAQRPEVKWVAVKSEASQAVLALHRVRRQLMDMRRMQSNQLKALLYEFGVVAPAKITQAQLKGWVAAGRVPELLASSFEEQIERIARLKREERGFTRRIERHNAGDALAMQLLAVPGIGVLSASALSAELAASARSYTNGRQFAACKGMAPRLSGTGGKVRAGAISKRGDPYVRTLLIHGARSVITHQRRAKRLSPWLSGLLERRPLNVAVVALANKMARTAWALAAHGRSYQQNYGAQAA

SEQ ID NO: 360848 - protein, 346 aa, unidentified
MNTTTVGVDIAKSYFQVHGVDAHGRATLQKQLRRAEVLRFFANMPVCLIGMEACGSAHHWARKLTELGHQVKLMPAQFVKAYVKTNKNDARDAEAICEAVARPNMRFVAVKTVAQQELLMLHRVRQRLVMDRTAKANQLRGLLAEFGIVLPQGLHRLRHLMPEILADAENGLSCRSRERFSYLFSHLRELDAAVIEWERQIVAWHRENPLSRRLDKIPGIGPLGASALVASMGDARTFKNGRQLAAWLGLVPRQDSSGGKTRLLGISKRGDRYLRTLLILGAQSVLRQMQRHPARSQSWLGRLTARAHPHIAAVALANKNARIAWALLAHEREYQADYRSRALAAA

SEQ ID NO: 360849 - protein, 331 aa, unidentified
MKILDTVGIDMSKLNFDVRIHTTQSYAQFENSNKGFKKLLSWTYKNSPFSSENIFFVFEHTGLYSHEISVYLEKKKIPFALVPGLEIKRSLGLARGKDDKVDATNIAKYAYRLRDEIKPYKMPTEQIQTLKCLLSLRERLVKQRAGYKASLKEQKRVLIKKENHILFKSQEKMIDFLTKQIKTIEEEMMEIIKSDEKLFRQFKLIISIKGVGKQTALFIIVYTHSFTKFENWRKFASYCGIAPFPNKSGTSLKGKTKVSNLANKKLKSLLDLCAKSAIQCNLEMKTYYHKRVDEGKNKMSTINIIRNKLLSRIFAVVNRDAPYVDIMKYAA

SEQ ID NO: 360850 - protein, 460 aa, unidentified
MDRVIIGVDPHKLPVTIEARDSREILRASGQFGTDARSCRQMLRFAGQWPERGWAVEGANGVGRPLAQRLLASGERVLDVPAKLAARARVFDTGRGRKTDPADAHAIVMVALRDKQLRELAADPGRAVLRLLCDRRDELSPARAQALNRLHRLFAELLPGGAPVKKPVSQYKTLLASVRPRDPAGKVRRRMAAEELAGLDRLDARLKAMKAELKTAVLATGSQLMDIHGIGPAGAARILADVGDIARFPHRAHFASWTGTAPIDASSGQHTHHRLSRAGNRRLNHVLHMAGIVQLRHDTPGRASCRRRITDGKTPMEAMRCPRRRLSDAVYRQLAADAQARQAPGRALRGGSVIQRGRPSPGHRHFGPATSRTRTRDPTPAASSAGNPSAPAQLPPHAGAPEASTCSARSAPARGRTTLTPTSAGVTQQRGSVLLTSGVIEGSHVRKAHHLRSRLVCAAE

SEQ ID NO: 360851 - protein, 342 aa, unidentified
MSQNNVIAIDLAKNVFDVCVVNKDSKIVSTKRLARRQLSKFLAHQAPSLIAMEACTGAHYWSRIAQAHGHQAVQVSARFVAAFRQGHKTDANDALAIAIAARQPKLKTTAVKTVDQQDLQSCHRVYEHLVEQRTAVSNMIRGLLAEFGIVFPKGFSALKRHVPLVLEDAENGLPFSFRETLDQAWQHWRYLAEEVERCKSRLLKRVQQDTQCSRLMALEGVGPMNALGLYVMLGDGHTFNNGRNAAACIGLTPKQHSSGGIVHLKGIGKKSGCKRLRSSLIQGAQAVITTLEKRPPRSEKERWLISLVERRGRGRAAVALANKTARTAWAMLRYDQDYRLAA

SEQ ID NO: 360852 - protein, 310 aa, unidentified
MEITVGIDVSKTRLDVHVQPAGEGFAVGNDEAGVAELLDRLGRLDGLAGIGLEASGRHERLAAAALAAARLPVVVLNPAQVRHYAQALGLRAKTDPIDARVIALFMAAVRPPIRAIADAATTELEALMARRRQLVAMLVAERARRAQAQPGPVRLSLARVVTTLEADLKELDAHIDKTVRGTPVWRDKEDLLASVPGIGKTIARTLLAELPELGHLSPKQIAALAGLAPYTRQSGRWRGRSFISGGRSAVRAALFMGAMVAARHNPMLKAFRDRLVAAGKPKLVAVIATARKLLVILNAIIRDQKPWTHA

SEQ ID NO: 360853 - protein, 421 aa, unidentified
MKKIKPKKTKAVNQKVLIATVDGGKDKHYGYYRGPDGTECKAFDFWNNGRGFEEFWERISSAARTQGLEEIIVGFESTGPYMEPLVQFLRSSKSVRLVQVNPMHTKRLKELTGNSPLKTDRKDPKVIADIIELGHALTVVIPEGPAADLRRLTQARERTIESRTRLFNQLQSLLVISFPEFLQVMTDVKTASAQHLLRHYPTAEEIVALGEASLSTLLRKVSRGKLREDRARALFEAASESVGVREGRSSMLLEIRLMLETIASYDRFIDRLEAEMVRHLEQIPYSRVILSLKGIGSVTAAGLIGEVGDFTKFGTISEVMKLAGLDLYEVSSGKHRGKLRISKRGRPLLRKLLYFAALSAVRKGGTMHEWYRRALGRGMIKTKALVAVSRKLLGIIFALVRNHSVYVENYMKQKPMLQEAA

SEQ ID NO: 360854 - protein, 531 aa, unidentified
MADKKRNTQRKHIRSEGAYSLDEIRSLTMDDGTRVITSADGDIKRPVCAGIDVHKEILMAAICKTDSKTLNAAFYVRQFKSTNSDIRTMAAWFQSQGVQDVCMESTGKYWIPVFNILEQCGLRPVLTHPKYVKQAKGQKTDFRDAVHIASMFRMDLVVASFIPPADIRDLRELCRYRLKLTYMRTSEKNRFQNSMTVSKVRLDCVFSDPFGKSASSIMEYLIMTEPEDVSDEQILSMVDRRVKASGEDILESIHGYEFIGIQRDKLKVINLHLGQINECIRLIDGKLDYFRQKYSRIIRHLTTMIGVTEESALYILGEIGTDMSVWRDDASLASWAGLCPANNASAGKKKSTRTGDGGHYLKPLLVQCALAAAKSTKKDPYFHYKYETLKKRRGHKKAIIAIARKMLVAIYHMIRDDADFLPVDHEEVLHSTKKQKGLNLDNVIAFLKEQGADDDTLRLVERQCGAQEMDAAEEMESVSSAEKKQSVSGSAATSQPIQESVNGSPVLISGSKQGRALNHHPKEPAVATTTA

SEQ ID NO: 360855 - protein, 346 aa, unidentified
MMNDTIIGVDLAKHVMQICVVKSNKVVSNKEINVAEFSAWLMKTKRATIIFESCATSNYWLQIAHDAGHNARIISAKLVANIRQQQKTDKNDALAIVQASQLIGIKFINGKTFSQQELQSILRMRELTVKHKVGLRNQIEALLLEFNIRVSSRKGGLNGTVQAVLEDAENDFCMPFRDALNATWQLYLQTVKNIKQTEVLLSEVIKLHPDCEKLLALEGVSIINAIHLYIAIGCGEAGLFQSGRDAAACIGLTPIQHSSGGKVKLGSIGRFVKNVSLRSYLVNGAMSVVYHVDKREPRTKKEKWLKELLSRKSKKCAAVALANKTVRTAYAMLTKGTEYKAVLLNA

SEQ ID NO: 360856 - protein, 450 aa, unidentified
MTRADLGITFCCQQQESTRSSLNFRYSAYTVPPPQKEDAMRIIRKRCLGLDLHKKQITAHLRVHRGSDLEPETVDVQFGTMPEELERMRKWIRAREVTDVVMESTGVYWMHVYELLEGITTPAVVNASHVKKVPGRKTDVNDAQWLAELHAHGLLRLSFIPPKPIRELRALTRYRTKLVANRTAIKNRTIKLLEMAGIKLSSVVSSVFGKTGRAILDGLSQARTIDLTKAAKGTLREKLPQLEAALRCSLTDAQRELLQMHLRAYDSVDAQVAEVELQLLTRAKPYATMVEQLDPIPGINPLAAITLLAETGMDMSVYRNERHLTALAGLAPGNAISSDKRRRIAVRKGNRYLKRICVQIAWAASRKKDSFQRMRFLRLQSRIGRNKAIVAVARQILVLVFQVLSTGQPYQDLGACFYDARDKQRAVERYTKRLTALGFLVQLQTKNLDA

SEQ ID NO: 360857 - protein, 385 aa, unidentified
MFQFSGSTQTAVDYDSTIIGALELSEKKWVLALQLPGVSRHSRHALEACGDGLASFVERLKAKCAATGPKIGRVILTHEAGRDGFWLARFLNRRGIEVHVIQPSSLPVDRRARRAKTDIIDVDDVAAHFDGLATRRARVCSMVPIPSEADEEARRAYREREDLTGQRRSIANKIDGILATLGIKGYKALRRDRREQLTSMRQPDGDPIPQKARARIERLLDRLELVLKLIEQVEAARDAVLKKDRPADEAERVIRSLTELRSIGPDFPTLLVREAFVRQFRNRRALGGYVRLGGTPFSSGGSEREQGIRKDGNRRLRAAMVELAWMWLRWQPDSALSIWFRTRVGAMGGRVKKIMIVALARKLLVALWRYVKDGVIPEGAQMKPA

SEQ ID NO: 360858 - protein, 415 aa, unidentified
MSNHFEFFAGIDWGSEKHRVHLMDRHGATIAERWVEHSGSGLAELAQWLRQKSHHAPHTLAAAIEVPRGAIVETLLEHGFPVFSINPKQLDRFRDRHFPSGAKDDSRDAFVLADSLRTDLHCFHPLQIDDPAVIRLRELSRLEDQLAEEFNRAANRLREQFHRFFPQLLQLSEAASEPWLWTLFEAAPTPARAAKLTEAKIARILTAHRIRRFSAAQVRAILRATPFTLAPGAAEAAQEHALLLLPRLRLIHRQRADLARRIQSLLEELAAPADGPAQEHRDAAILLSLPGLGRKVAATMLSEASQAIAQRDYHALRSFSGAAPITRQSGKKKVVSMRYGCNQRLRNALYYWAQKSILWDPRSRTHYADLRARGKSHGCALRIMADRWLNVLIAMLRSRTLFDPKLRPHTKLCAA

SEQ ID NO: 360859 - protein, 331 aa, unidentified
MIWLKIFFQLCGLNQAGKPVYTKRTGRKELLQTLANIPACLIGIEASTGAFYWQREFEKLGHKVKVISPQYVKPFVRGQKNDGNDAQAIAVALMQPTMQFVPPKSPEQQDIQALHRARQRIVNHRTATVCQIRGLLLDRGIPIGSAVSRARRAIPLILEDAENGLSSRMRRTIAELYDLFNDPGRRIHFFDKEIETVFRQSEACQRIAKVKGIGPKTATAVVAAIGKGTEFKNGRHFAAWLGLVPRQHSSGDRQVLMNMTKKGDKHLRTLFIHGARAVVRVATNNNDGHMNQWVNQLKERRGFNKTTVAVANKNARIIWSMLRNETGYQVV

SEQ ID NO: 360860 - protein, 364 aa, unidentified
MKRKVYVGMDVHKETIRIACLTNNTKEIVKEQQIKHNEVQIKKFVNKLKSEWNEIHSCYEAGVTGYPLYRCLKSLGVNCILVAPGKIPRQSSDKIKTDKRDAIKLAKLLRSGELESIHVPSEEDEAVRDYLRSRDSLRLDLGRNRQRLMKFLLRKGITYSATKYWTVSHNKWLNNLQFNNEILQETFNDYYSRVRVQEENLKAMDKRIQEIAESEPYREKVGVLRCFRGVDYLTAMFLLCEVCDFKRFKTAGSFMSFLGLVPGEYSSGSKRKQTGITKTGSPRLRRILTEAAWQHRFPGTGSKIVTARRSGQPALVVALAEKASLRLHKKFRNLQQRGKTPQVMITAVSRELSGFLWAAMNLVA

SEQ ID NO: 360861 - protein, 304 aa, unidentified
MRFYSEQHKYYCGVDLHARSLYVCIIDQKGKIVKHKNIDATPDAFLEIIEKYRKDIVIAVECMFTWYWVADLCREEKIPFVLGHALYMKAIHGGKAKNDKIDSHKIAVLLRGGMIPMAYVYPSEMRATRDLLRRRNHLMRKRADLLAHIQNTNHQYNLPRFLKNICYKGNREGIAEQFSDACVRKSVEVNLALIDQYDKLLRHLEYYIDKKAKVHDPEALFRLRSVPGIGHTLALIILYEVHDIKRFPRVQDFVSYSRLVKPSKESAGKHYGHSGGKIGNAHLKWAFSEAAVLMPREDTVYQIT

SEQ ID NO: 360862 - protein, 373 aa, unidentified
MPRYSTAFGMDVHLRSTTVCALDAETGETVTRRFRGNPWGEVAEWMSGFPGPSLAAYESGYLGFAPQRELSGLGVDCVVAAVSKVPRSAADLSSKNDRNDAARMAKAILSHDISPVWVPSPEIEGLRDLAGAHDAATARLAAAKQRLLAFLARRGYAYGGTTPAGNPRRYWTYDFLRWLDKVRPADDGGIRALAALRSEVEAADETREAVLAEYRAAIAAGPLSAEVEALQSIKGCGFALAAAFAAEVGDFSRFRSGRQVTAYFGLAPKQRSSADSVRLGGISGAGNALVRRLAVEGSWCYAQAGHQPKLMPKGSGVPLEIRMHGRKGSERLLRRREEMLERGMPQAKANAATAAELVRWLWALGAMCREAGE

SEQ ID NO: 360863 - protein, 319 aa, unidentified
MIVGIDVAKAELVSAAGSTGETATWSNDERGVRALVEQLGAQAPEFVVLEATGGYELLCVAALAVAALPVVIVNPRQVRDFAKATGQLAKTDHLDARLLALFGERVRPPVRALPDAQTQALAAVLTRRRQLLEMRQAERNRLAQLFGPRQRAVKQSLQKHIRYLERELALTDTELGRMIRETPAWRERDNLLQSVPGVGPVVARTLLAELPELGQLTRRAIAKLVGVAPLNRDSGTWRGQRAIYGGRARVRGVMYMAALVAARRNPVLKTFYGRLLAAGKPKKVALVACMRKLLTILNQLLRTKQRWSAQPPRPSPIQP

SEQ ID NO: 360864 - protein, 375 aa, unidentified
MKEKLRFLGMDVHAETIAAAIAEPDGEVRSLGTIPNRMESVRKLIKKLGPVEKLRVCYEAGPTGYVLYWQLAELGVQCEVIAPSLVPMKAGDRVKTDRRDAERLARSYRSGDLTAVWVPDEGSEALRDLVRAREAAKQDELRARHRLGKFLLRSGQRPPTGVRSWTHLHLIWVSQIRFAQMAQEATRLDYLHEVEHMRERVLRLEQAIAEAVKLASPALQEVITDLQALRGIAHISAVTIAAELGQVSRFAGARELMGYCGVVPSENSSGERTRRGSITKTGNAHLRRIVVEAAWSYHRPPAIWAGLRKRQQSASEEAKEIAWKAQHRLHKRYARLAAAGKDKRKIVTAVGRELLGFIWAIGTKAEATVSQRIAA

SEQ ID NO: 360865 - protein, 355 aa, unidentified
MSRDIKYIGMDVHKEATVIAVLNANGNLVMESIVETKAGSLLQFIHGLRGELHVTWEEGTWAAWLYDLLKPQVQVLVCDPRRNALLKEGNKSDKVDARKLADLLRTGMLRPVYHGEHGLRTLRELGRSYQTISQDLNRVMNRLKALYRGWGIACAGTQVYAPRYREEWLQKIEHAGVRRRAELLYQQLDGLQALRRTLRPELLAESRKHKATKLLRQIPCIGPIRAARLLALMQTPHRFRSKRQLWTYCGLGIETRDSAQYRFVRGQLQRAKKPQQIRGLNRNHNHEMKEIFKGAATRASCGVGPLRDFYVALLDKGMKAEMARLTLARKIAAIALTLWKKEERFDAEQLKTQAA

SEQ ID NO: 360866 - protein, 391 aa, unidentified
MIYIGIDVAKDKHDCFITNSEGEVLFNAFTIPNNADGFHDLFQKISSLTNDFSNVKVGLEATGHYNYNLLGFLIDKGLPTFVINPLHTNLFRKSLSLRQTKTDKVDAHTIALMMMSGINLQSYSNTSYHNEELKSLTRYRFDKVQERAKLKTSISRLVNILFPELEKLVPSLHMVSIYALLAEFPSSAQIASCHLTRLTNLLANASKGHYNKEKAIEIRNAAKHSIGSNMPAKSLELKHTIRLIQELTSEIDEIECFIKSIMDEIRSPILSIPGINYRMGAMIIAEIGDFNRFSSPDKILAYAGLSPSTYQSGQLDGCYSHMEKRGSRYLRYALFNATKFVCIWDNQFSAYLAKKRSEGKHYNVAISHAAKKLVRVIYQLEKSGQLYHRAA

SEQ ID NO: 360867 - protein, 418 aa, unidentified
MEAMHDRVAGLDVHKKSVVACVRLRIGQQVERECRTFDTTTTGLEALLDWLEQAGCTHVAMEATGVYWQPVWRILSAGEFELVLANAAHIKNVPGRKTDMNDATWIADLLAHELIKASFVPAPEMQDLRTLLRTRKQLVREQTRHVQRMQKALEQANIKLDGKISDILGVSGRRMIEAMIAGETNPEVLAALADRRVKATRAELREALRGHLSDTHRFLLKTHLTQWDALQASVEAIDRQVDTLIASFEQAARFRLLIALLCKVPGVSKLAAVSILAEIGIDMTRFATAGHLVAWAGMCPGHHESAGKRKSSRLRKGAPWLKTMLVQCAWAAKRCKNSYYRAQFYRLSGRRGPQKAICAVAASILTAIYHIILRGTPYQDLGADHFDRRSADAKANRLVAQLTRLGYEVQIQPAAEAA

SEQ ID NO: 360868 - protein, 429 aa, unidentified
MNDREIIRLEQFRQLKKEIRGSGEHLIIGIDVAKQKHNAFLGTATGKTLLKRLVFENNREGFEKLLMHVKSISASNGHKKVAFGIEPTANYHKPLAEFLINREHDLVLVSGVAVKRNRELLDGRWDKNDMKDSANVADLISQGKCLFYEYPIHVLRDLRGLLSLKKKFKKIEHGFRVRIRNHLLAQYFPELDRYYGHSESENLAIVRWCLSPSKIAEMKYEDFFQLVTTRDRGFTQHQRLKAIWASAHCSIGCSTGIAAEFEAEVLVDALKRARETISSINEKVREICVLFPEYKYLLSIPGFGPVISAIVLAAIGDPFRFESGNQVLKTAGWDLNANRSGKRSDSVIPVISKRGKADLRYGLYQAALVASTKNKHFTSWFIEKLKGREKEKGIKTKMRVKLAAKLLVIAWTLMKKKEPFNPELLKIKK

SEQ ID NO: 360869 - protein, 316 aa, unidentified
MSVSPSVCIGIDVSKKHLDVHVDAPKTTFRTLSSQEGRQQLLEKLPTPQDCHIIIEATGKLERPIVNDLLAAGYRVSLVNPRSVRKYAQALGILAKTDRVDAQVLARFGRDAKPRLLAETQEKQQELEELVTRRRQLIEHRVAEQNRKSSTLPKTVRQSVQGSINTLAKDIERMEKAILKLVSSNDDWEDRMRQLQTVPGVGEVTAFTLVADLPELGQLNRKAIAALVGVAPFNNDSGQQRGKRSIFGGRSSVRNVLYMATHSAMRANATIRDFAARLSGKPPKVVIVACMRKLLGILNTMVKTKTDWQPRPATAA

SEQ ID NO: 360870 - protein, 356 aa, unidentified
MGNSNKLDFTGQPIFIGLDVHKKSWSVSIHSAVCEHKTFTQPPEVDILVNYLRRNFPGASYRSVYEAGYSGFWVHDQLTEKGVACTVANPADVPTKDKERRKKRDRVDCRKLARSLRAGEIEGIYVPCRTKLEDRSLVRTRQSMVRKQTRCKNQIKSLLLFYGIGLPEEWAERRWSGPFVRWLESLPMERASGEVALRIHLEELKHLRQILARLDREIRLLAQSEEYGVQVRLLRTIPGISTLTAMILLTELQEISRFRSLDELASYVGLIPDTHSSGETEHTGDITQRRHAQLRASLVEAAWVAVRKDPALLMAFQESCKRMRKTRAIVKIARKLLNRVRYVLKNQTPYRMGVVQ

SEQ ID NO: 360871 - protein, 387 aa, unidentified
MTKNKGREVGLDVHPDSFAGAVVEGRDPASAKVLSTSTRVELEQLEQWALRHTCTEDTLVLEASGNAFAVAARLRAIGRKVEILDSHRAGKVGKVYCANDRVDAVKIARIYLSALSPIVWQPDVKTLERREVFSAYQAVVKESTRAKQQLRSMLNEHCVRLEKGFRLCHPNAITRLLRLREWTPARRMLLQQLHGSLVAARARRTLLRRHMAQEIVAEEALLRLTRLCGINLITLYGVVAAVGDVRRFTHSKKLVAYLGLNPSVSQSGNFQGSGALKRHGRGALRALLIQSGKKLLEVNNPLQKWGLAVAARRGRNKAAVAVARKLCVALWHVMMGHLIGTLERLDTLQTKLSKFATEIGPGALAAFGYTNKTDFVQKKLYVLRSYP

SEQ ID NO: 360872 - protein, 371 aa, unidentified
MQDTIKYVGLDVSKEKIAIAVAEEGREAPRYWGLIPHTADAIRKLIKKLGSKENLRFCYEAGPTGYPLYRLFLTQGVQCDVIAPSLIPKKPGEKIKTDRRDSIRLAQLYRAGELTAIYVPTSEDEALRDLIRCREDAKEDELRAKHRLSKFLLRHDIKPPVGVNKWTTKYYRWLDTLNFENVSLKLVIQEYYHQLKELIQRIKRLDEEINLQATEGTHAPKIQALQSLRGIATLTATSIVAEIGSFKRFSTPRHFMAYVGLIPCEYSSGESRYQGEITKTGNRHVRRLLVESAWSYRYQPAVKGNLKRRQDGLSPTIQAISWKAQNRLHNKYYRLISKGKEKGKTVTAVARELAGFIWAVMQEVEDMPEAH

SEQ ID NO: 360873 - protein, 316 aa, unidentified
MPVEHFGCDADKAFLTVACHERPSHLQRIGNDVGPIDEWLSGLAPDSVLAVEATGTCHQVLLERAVRHSLTIYLLNPRDVRHYAESMRRRAKTDRVDAQVIARYVAREKDNLRPYVPPSAASARLQVLLRRRASVVQNFTGLKLSLSDLEMPEKDHLYTGYAALLKALDEQVDAVIAQEERGVRQREQLRTIPGVGPLSSAALVSLFWRLPGITADGLIAFVGLDPRPRESGSFRGQRKLSKRGDPELRRLTYMAAKTFGRHELGRALYERYRQRGLSAIATYVILARKILRLAHALITKDTFFDPERFAAACVRT

SEQ ID NO: 360874 - protein, 399 aa, unidentified
MNDEYGVYLGLDVGKGDHHAVGLAPDGKRLHDAALPNTEARLRQLFDKLARHGRVLVVVDQPASIGALPVAVARAAGHQVAYLPGLAMRRIADLHPGSAKTDARDAYVIADAARTLPHTLRRVDTGDETLAELEILVGFDDDLAGEATRVSNRIRGLLTQIHPALERVLGPKVHHKAVLELLSRCGGPVGLRKAGRRKLLSIAAVHAPRMGDRLVEQIMAALDEQTVTVPGTQAAETILPRLADSLRDILRQRDQAAAQVERMLDAHPLAPVLTSMPGIGVRTAARILLEVGDGSSFATPGHLAAYAGLAPVTRRSGSSIRGEHPPRGGNKNLKRALFLAAFAALADPVSRAYYDRKRAEGKRHNAALICLARRRCDVLYAMLRDKIPYQPRPTTPIAA

SEQ ID NO: 360875 - protein, 301 aa, unidentified
MAIVGGFDLHRRQITFDYVDTVSGEVSRGRVAPADREHLRAWLRRLEGQDATFAVEACTGWRFVVEELEGAGAQAHLAEPADTAALRGPKRRAKTDRADARHLRELLMAARLPESWIPPAHVSDARAEIRLYKALVDERTAWLQRVHAILFQLGAPAVPGLARASGRGRLDLAALPLVARSAVEVGLRSVDRVNEELDTLRPQLARLSRAQRGCRALQAHYGIGPLTSVAIWAELGDCGRFSSSSDAVRHSGLDVTVHSSDSRRARGHLARQGPGVLRWACSRPPFAPPDPPPPTTPTTFK

SEQ ID NO: 360876 - protein, 453 aa, unidentified
MKKLKNNQKMTIVNANAAGIDVGSKSHFVAIGQRAEDVREFHCYTSNLKELCLWLKEKGITTVALESTGNYWQALFVLLQDFGLNPIMVNGKFTKNVKGRKTDVQDCQWIQKLHTLGLLEGSFIPDLFTEKLRQYCRHRQTLLENAADYIKKMQKALRLSNIRLDVAIRDIVGQSGRAIIEAIIAGETDPRKLASLAHWRVSKSEDEIAEALIGDWRHEYVFELKQSYDLYKYLHAKISECDKEIENILNQRVEEMEKIDGEQRAEYTGKVRRLKKNDPDFNLQELTFQMSGAVDLGAIEGVGRSTIMTILSETGIDMGVFPTAKHFASWLHLSPNNKISGGKIISSRTFKAKNRLADALRHAANAIGNMVKPSALHQFFKRIEYRKSRIDAITATARKLAVIIWNMLTNKQPYQPLVQHEYLIKVRNNQVKNLQRKIRQLNVKPEELSFVTS

SEQ ID NO: 360877 - protein, 312 aa, unidentified
MDNEVIIDKGCGLDVHKETVVACVMGSGIKKEIRTFSTKTNDLLRLKTWLSGLGITHIAMESTGPYWKPVFNVLEDGFTLILANARHIKNVPGRKTDVKDSEWICRLLRSGLLSASFVPPQGIRELRDLTRYRRKLTQALSAEKNRIQKVLEDANVKISSVLSDTFGVSGSQMIEAIMKGRLSEAEMADLAKGKLKSKKEEIREALVGYFQEHHRFMIRASLEHIKHLEKLISDLDQETKKKLAQYPKEYELLQTIPGVKEQGAAAIIAEIGADMDIFPTEGHLSTWAGMSPGNNESAGKKKVERRPTAIRI

SEQ ID NO: 360878 - protein, 342 aa, unidentified
MKKSYYIGIDISKKTLDASIFVENMNEKRYPHVKEDNDKAGFKRILKWVSSEKVDLKDCLFCMEHTGDYGLELCLFLEQKHIEYCAVSPLVMKRAMGISRDKNDKIDSARIATFAFEKAYKMKPSKMASEDILALKKLQAERNLHVRERAKYKGYLSDKCTKNDGLRKRMTIMVKTLDCQIEEVEKEMQAIIQRNHELSSNYELLLSIPGVGKVIAISTLVYTNNFKAFDNARQYACYASVAPFVHTSGTSIHGAPTVSKMGNSQIKSELSMGALNAMSNDPQMSEYASRKRKEGKQNGVILNAIKFKLIERMFAVVHRGTPYVATHEYKTLRHPNRVSEAS

SEQ ID NO: 360879 - protein, 452 aa, unidentified
MSRKKTRLQSVTEPPQVRPDVAGIDISPEVIYVAVDPRHHMPVRRFGTFTGELRRIADWLRECGVRSVAMESTGVYWIPLYQVLEECGIEIYLVNARHYKNVPGRKTDVCDSAWLQYLHAVGLLQGSFRPEQQICAFRMVLRHRQALVQFASQHIQHMQKSLDQMNVQVHRVLSDITGLSGLAIMDAIVAGERDGRRLAALRHGRVQASEETIVAALEGDYRAEHVFTLQLSLESYRHYQNQIATCDRRLRTMLDELEGRSGCQQAPPPARKKMRTPKDEQLRAKFFRIFGTDLTAIPSVNVGTVEVLLGEVGPDLRRFRSAGAFANWLGLCPNETITGGRVLASKTRKIESRLALSLRMAAESLCRDKSYLGAFYRHMKVRLRGAPQAITAAAHKLARIIYTLVVKHVQYDDSVFAEIEQRNREKQRLRLIKQARTMGYNLVPLPNASIVS

SEQ ID NO: 360880 - protein, 413 aa, unidentified
MAESRPTRFVGLDVHKFYLVAVGVNAERQQVYGPQRVLLNRLDHWMMAQLTAYDAVVLEMSTNTWQLYDELLPHVQSVTVVHPPHLALITRAQVMNDQIAALTLARLHAAGLIPPLWVPPPAVREARALIAQRAKLVRLSTQSKNRLHAVLQRHHLQPPDGALFAAEQQPWWLSLELLASERACIQIDLNTLSFAQAQLKVLEQALAKTASDDPRVPLLVQLPGFSLITALSVLAAIGEIERFPSAEKLVGYAGLGARVHESGLTHHRGRITKAGRRDLRVALVEAAQTAANTHPHWQAVLARLEPRLGRNKAIVAIARKLLVAVWHVLTKQSADRFADSERVARKFVQFSARLGKANRPEGQTTAQYVRAQLDRLGLGSELNSIQLGRQTTLRLPPPQAASTAPERLSGETK

SEQ ID NO: 360881 - protein, 419 aa, unidentified
MRRMLERCAALDVHKAMVTACARVVSEGGELEELTVEFKTMAADLLALREWLKALGVTHVAMEATGVFWKPVYYALEDDFELLLVNAAHVKNVPGRKTDLQDAQWLCQLLECGLLRASFVPPKPIRELRDLTRYRRALIKERQQEANRLHKVLEDAGVKLSCVASDVLGVSGRQMLEALISGTRDPETLAELARGRLRAKLPALKQALVANFKPHHALIVSHILAHLDYLEETIIALNEEVERRLVPFAGKAERLTTITGVAARTSQVILAELGPDMSHFASDRHAASWAKLCPGNNESAGKRRSGRNSKGNPYLRAALTEAANAAARTKNTYLRAQYEQIKRRRGHKKAIVAVAHSILIAAYHILKDDVPYHDLGGDYLARRADPERIKKRLVAQLERLGHTVTLQTSTTPDAAPTPA

SEQ ID NO: 360882 - protein, 342 aa, unidentified
MKFYCGIDLSARDCHVCVIDQQLKIGVQQKLRNELPKICQLLAPYKANLKIVVESTFNWYWLIDGLQAEGFEVVLAHTLGLYLITGAKVKTDRRDAYSLAKLLLVGAVPAAYIYPPETRPVRVLLRRRLHLVQMRAGEYGSLRRLLLRQGILSSKQQEIKTATEAELEQWLEHPLVRLHASQELQRIELYSQQIGELEKSILQIAVTNQSYELLRQLPGVGQTIALTILYEVGELSRFANVKVFSSYCRVIPGIAQSGQVTRRGRGSKQGNHYLKAAFSQAAVHAVRCYPQVRRYYERQLKRHQGPGRKLVCYNIIAHKLAQAAFHILKEQTEYRAELLFGP

SEQ ID NO: 360883 - protein, 335 aa, unidentified
MIGIDTAKNVFEVHGRNAAGEVVLRRRLKRAQMEKFFADHPKAVIGMEACGAAHYWGRLLERLGHEVRLMPPAYVKPYVKRNKNDAHDAAACCEAMSRPGMRFVRIKTAEQQASLSLHRSRQLLVRQRTQLGNAFRSLLAEFGVVAAKGREGLALLAAKLRAGELDLPAAACAAALALADQRANLVPAIKDLEQRIGEQAKAEPRARMLQTAPGVGPMSAHATLATMPDPAMFKSGRDFAAWIGLTPRESSSGGKQRLGSITKQGDQTLRRLLVLGATAWLRQVETHPEKASPWLRGMMARRPKKVVAVAQAARTARILWAMLTHNQPYRAPASA

SEQ ID NO: 360884 - protein, 343 aa, unidentified
MVTIGIDAHKRSHTVVIIDEQGRQLATRTVATTSADHLELVAWSARFPERRWAVEDCRHLSRRLERDLLAAGERIVRVPPKLMANTRTSARSFGKSDPIDALAVARAALREHDLPVARLDGAEREVRLLVDHREDLVGERTRMISRLRWHLHELDPGNEPALRTLNHLRNLDRLAERLADLDGTVARIARELVARCRALTAEINQLEREINELVATLAPALLAICGCGALTAAKILAETAGIERFKSPDAYARHNGSAPIPVWSSNRSRHRLSRSGNRQLNAALHRIALTQARLHPGARVLLARRRANGDGGLEALRVLKRRLSDVVYRALLTDAHAATTTVT

SEQ ID NO: 360885 - protein, 416 aa, unidentified
MEVIVSRCAGLDVHKNTVMACVRGPGPNGGRTSTVRQFRTFTAGLRQLRDWLVAEQVSQVVMEATGVYWKPVWHVLDATPGLELMLVNAHAVKNMPGRKTDVADAVWLAELGECGLLRPSFVPPPVIAQLRDLTRYRKKLIEERARETQRIQKLLEDAGIKLDSVVSDILGVSARQMLEALIAGVRDVAALAELARTRMRPKIPQLRQALEGRFGAHHALMLRMHLEHLDQLSVSIDRLDSEVDRVIRPFRSVLQRLITIPGVGRRTAEVIIAETGADMRRFRTAGHLASWAGMCPGNHESGGKRRSGRARKGNAALRAALCEAAWAASHARSGYLPAQYRHLLRTFGKKGQTRAVFAVGHSILVIAWHLMAHDRDYADLGGDHFTRATDAEARERYLVRQLEALGHKVTLEPAAA

SEQ ID NO: 360886 - protein, 414 aa, unidentified
MRIIHDKVAGLDVHKKMVVAAIIVKQEDGGWLEEKRNFETMTGDLLGLSDWLLLQGVTHVAMESTGEYWKPVFNILENNFDVMVVNAQHISKVPGRKTDQSDAQWIAELLQYGLLKSSFIPPLGQRELRELTRYRSSFVRERATLVNRVQKVLESANIKLASVATDVMGVSGRAMLDALIAGSATPDQMAELAKGRMREKRDQLTKALEGRVKAHHRFVLTEMLCQIDSIEETIARFDQEIEAYCRPFEEAVELLDTIPGVGREAAEIIVSEIGKDMSRFPTADHLASWAGVAPGNNESAGKRRSGRTRKGNQALRTVLNQAAHAAAKTKNTYLSAQYHRLAGKRGTKKAIVAVAHSILVIAYHLIERKEPYQELGGDYFDKRNVEATAKRLTKRLERLGYQVSLQQQPVGVAA

SEQ ID NO: 360887 - protein, 415 aa, unidentified
MKVVFPTCCGVDVHKTFVVATIITTPADSLQPHYQKKRFSTFNSDLNRFADWLLEHNCLDVCMESTGKYWVPVFNILEKRGIRVVIANPKWVKAVKGNKDDTKDSKWIGDLFRIGLVKSSFIPELNIRILREFLRYRYKLVSMKSSEKNRFQNAFTVCNVALDSVVSDMFGKSATAITDYLTSDESFDPDHCVSLLQRSLKKKAEKVLESIEGYSISDEQKARIKIIREHYDFIEKLIAKVDTCVNEMVEKYEGEINLLCTIPGIDRNSAITIISEIGTDMSQFGSSKRLCCWAGLTPSNNESAGKKKSVRISRAGVYLKPALVQVAHAAVKDKANPYYALKYERIAKRRGKKRAIIAIARMILTAIYTMLCTGEVWNPVDLFKIDIPEHLKEQQLAKAIKQATRFLEKQGLTVA

SEQ ID NO: 360888 - protein, 388 aa, unidentified
MATSIFRENFPAVKALQQAADAAAYIIGLDLHAKTVAICVVNPRKPDEPVFQRKRLINKELLTILDRFPGKKVIACEAAFGWHVLQDALVDLADVTFIPLDARKTSAWIASSGIKNDTIDAQILCHACLHGGIRSLAVYQQSQPTREGSKLSRYREHLVRSRSGIKHQMKSFERDYGVNPFTGVLPEKSAVISFIEQEFQQALNESNERIKRAEKLMQTTSENDPIITLLQTIPGIGPITAFALRHKIDVIDRFKDASHLSSYLGFGVRERQSGDTMAKGKIAKTGDPLLRKLLIQGAQVIRFNRSDLVSIYFPSLGRTELLKNRKHFNKVVTALARKNLTFVFCVWKNRIAFDIEKYRERKILTTQVVSVIMPQSPLCPPSPAADLV

SEQ ID NO: 360889 - protein, 338 aa, unidentified
MELYCGIDLHSTNSYVVVLDPDDGVVFQRRLANDLDVIIPALAPLAADIAGVVVESTYNWYWLVDGLAAAGYRMHLANSWAMKQYDGLKYGDDRTDATWLARCLRLGVLPEGYIYPKAERPVRDLSRRRGRLVQQRTANLLSVQNMFARQTGRTPAANRVKKLEAAELDELVGDATVALACAANLAVMGVLDQQIAILEKAVLARVRLRPEFGGLLTVPGIGRILALVIMLETGEVGRFAGVGNFASYCRCVEAKRVSNGKRKGGGNRKCGNAHLAWAFVEAANFSVRYDDRAKRFYQRKAAKSGRAVAIKAVAHKLARACFYVMRDQVPFDSERCFG

SEQ ID NO: 360890 - protein, 361 aa, unidentified
MAEGPNDWEWQVGLASQPLKKLAADETALLQLLSRWRDEATKAGRTISRIAVAYEAGRDGFWLARWLRGRGIEAHVIHPTSVAVSREHRRAKTDRLDTELLKRAFLGWLRGEQRHCSMAMIPTLEEEDAKRPNRERENLVSERTRLVNRMKSALARLGIRGFKPHLRKASERLDTLRTAEGMALPPNTLAELRRDMARLRFVMDQIREIEAARLARLEQHPEQANHAMVRLLARVVGVGIETADMLVHEILSRHLRDRKAVARYAGLTGSPDESGARRRDKGLSRAGNARVRRGMIQLAWRFLMFQKDSALAQWYRRQTTDGRGATRKTMIVALARKLLVALWQLVTTGEVPEGVVLRRAA

SEQ ID NO: 360891 - protein, 343 aa, unidentified
MKITRVGVDLAKNVFQLHGVDRHGETVLKRRLSRDKWIRVLVNSAESGCEIGMEACGGAHHWARLLMKKGFRVKLIPPQFVTPYVKSNKNDAKDAEAICEAMSRPTMHFVKAKTVEQQDIQATHRIRSELMCHRTAKANQIRGLVTEYGLVAPLQMASLRVAIPRWLEDAQNGLTDRFRTLLHGLWEDLLTLDQRIEILNKEIDCSAKNDPVAQRLQQLRGLGPLVATALIATVGNGDQFSKSRQMAASVGLTPRQHSSGGKDRLLGISKRGDAYLRSILIHGARAVVAQAKHKEDRLSRWVTGLAERRHPNVAAVALANKTVRMAWAMMNHDADYDPEFVVS

SEQ ID NO: 360892 - protein, 343 aa, unidentified
MYFIGLDVHKKTISYCVKDAAGCVHQEGKIGSTRRELDGWIRTLPQPRTIAMEATIFTGWIYDYLLPHAERVKVAHPLMLRAIAASKKKNDRIDAGKIADCVRCDFLPECHMASTEIRDRRRTLRYRNLVIKQMVQMKNRVSGLLMETGVSYNKQRLHKVGYFAELMTTNEEVHESIRPLLKLSRDLISRSQKLDYALVSSLQRDPVLKERLRRLRTVPGVGPITALTWALEIGDYTRFSSIKRAISYCGLCGDEKSSADKVMRMPISKQRNKHIQRVLIEAAKLAPSESPELALTHARELERGNRNRATLAVARKMVCYMLAVERRQQDFVPAEEFSRTIAV

SEQ ID NO: 360893 - protein, 342 aa, unidentified
MNYYAGIDVSLKCSSVAVVNANGEIVREAKVETDPTSVLEWLRSCGLPMERIGLEAGPFSQWLYAAMKEAGLAVELLETRHVRNAFKTMSVKTDRKDARGIAELVRVGWYRPVHCKSMDAQETRTMLAARKLVDQKLRDVEMSLRGLLRGSGLKVGKTTPTRFADRIKELVSGNAILQVIAESLLAVHQVLLREFKSFEKRVRIMARDSAEARLLMTTTGVGPIIALTFAAGIDDPGRFKKSKAVGAYFGLAQKKYQSGETDITGRISKAGDAGVRTALYQAAHIMLTRPVKSSALRTWALRLAKRVGMSKAKVALARKLAVVMHRMLVDGKPFNPAAGAPA

SEQ ID NO: 360894 - protein, 414 aa, unidentified
MEVLYQTCCGIDVHKQFLVACLLVVDEAGHQHKEIRRFSTMTGELLLCVDWLQKAHCKAVAMESTGVYWKPPWNVMEGLFDTVMVVNAEHLKRVPGHKTDKKDAEWIAELLQLGLLKPSFIPSRPQRELRDLTRTRTTLIQERTRLRLINRVHKVLEDANLKLSSVLTDIMGQTGQHILAAIIRGEEDPRVLADMALRRAANKRDALVLALCGRISKHHRLLLRELLEMIGHHDQAISRLDKEIEERLRPFEKQIQQLDAIPGLSRRCIEILFAEVGWDMSPFPDAAHLASLVGICPGNYESGGKRLSGRIRKGNHWVKAVLVQAAQAAARTKNTYLSAQYQRIAARRGGKRAAVAVGHSILVIYYHMLKTGQPYQEKGVDYFSELDRHHAERRFTKQLERLGYQVTLTPAQIV

SEQ ID NO: 360895 - protein, 429 aa, unidentified
MKIIYPRVCGIDVHKKFIVAVICISESVEPVYLKKRFSTFHNDLIRFRDWLIQNDCQNVCMESTGKYYIPVYNILESHISNIVVANPKWVRAVKGEKDDDKDAKWIADLFKLGIVKSSFIPQKDFRILRELTRYKYKLVNMRSSEKNRYQNALTSGNCKLDMVFTDIFGKSASNIIDLILSDNPYTDEDILSKVHKNCKASPDMILNSINGTDLTSIQKSRIELVNDHIKQLSSNIQRLDKLIDLMIEPYEDYISFLCQIPGVSRNSAITILSEIGVDMNQFTSTRRLTSWAGLTPSSNQSAGKKKSVRISRAGVYLKPCLVEVAHAAVKDTNHPYYANKFNKISKRRGKKRAYIAIARKILVAAYHMLLTGEIWNPADLAEVETPVEQRIKYVKNNLKSDIKQLLDIGLTVEELTLMIQQNANNIATQ

SEQ ID NO: 360896 - protein, 370 aa, unidentified
MRIIGCDLHARQQTLAMLDTETGEVVNLTLTHEGNNVREFYSKLPRPVLVGIEATGSMHWFLNLMEELGIECRVGHPAQIRAAEPRKQKHDRRDADLILKLLAENRFPAIWLPSKELLDLRALLLHRHQWVRMRVRMQNTLQAIAMANGLRRGPSLWSYDGQAKIAFLPLLPHAAYRRNRLQAMYKTMESEIENLNKQVAEQAGNRPGAQRLMTHPGVGPVTALATEVFLGDPQRFADGKALASYVGIIPREYSSGGHQRLGGVTKQGSPLLRFLWGEAGAHAARHDPELKRFYCRKLVHKGLGKARVAVARKLGIRLWIMLRDEIDYHEFCRRGQIQQKTVRPVVGMPETGNGAKSHRPSDEATRLPES

SEQ ID NO: 360897 - protein, 444 aa, unidentified
MTNSGMILISKGEDAPVIMGISKPAGLKSPCGEVKIVNPLFVGIDVSSKNNVAYLMKPDGSKHSSFSVQNNLGGAKLLSERIVSALGSMQLERVVIGLEATSIYGDSLVYALREDGRLGRFQRKIHVLNPKQVRKFKEAYSDLPKNDWVDAFVIADHLRFGRINREVYMDDYRYKALQTLTRARFDVIQNLTREKQRFANYLFLKCSGMAQDKDIQNTSATTIALMEHFETVDDLANADLEELTAFITETGRGKFADPDATAKAVRAAAKGSYRLPKTVNDTVNQAMAVSIASMRALKGQVKVLDKAIEQQFEIIPNTLTSIPGIGKVYSAGIIAEIGDIHRFDSQASVAKYAGLVWNRSQSGDFEAEHSRMIKSGNRYLRYYLLEAANSVRRCDSEFRRYYDLKFKEVNKYQHKRALALTARKLVRLVFRLLKDNRLYIPSEG

SEQ ID NO: 360898 - protein, 415 aa, unidentified
MEVLYGTCSGVDVHKKLLVVCLRRGKKSEIRSFGTTTQELFDAVEWLKNNGCEMVAMESTGSYWKPLYNVLEAMEVPAMVVNAQHMKAVPGRKTDMKDAEWIADLCQHGLLKASYIPDKEQRELRELVRYRKSLIEDRSRELNRLQKMLEGGNIKVSGTVGSIDGKSSMNLLKRIINGEKIDGKLYDEMYAKKEISHNLKCSKEQIIADMNGILSELQKRMMNELLRHVEELDAHISNLDREIEHFMTVDEATACKMIQEIPGIGESSAQAIISVIGTDMSRFPSDRHISKWAGLCPGNNESAQKRRSGKTTKGNKVLKTTLVTCAHSAVMVKDSFFKAQFSRISARRGTKRAYVAVAHSMLIAIYHMLLTGEVYKDLGSNYYNQFNKERKANGMIKKLKELGYEVTIATAPEVA

SEQ ID NO: 360899 - protein, 357 aa, unidentified
MTIVCGIDAHDKELVCRIWRSDRIEETKRARNTGSGREGLWGYLARLRQDLGASEVIVAYEACGLGYTIYDEATEAGFTCYVLATIKMAKSPMDGKRKTDEYDAQKISELLRAHVLAGLSLPKVWVPGTQLRDDRELVRRRFDVKADTTRIKNQIHGLLKRYGIKRPEDIGCLWMKPFMSWLKGLKLESGARAHLTSLIQEYESLLVNIKMLDKAVEELAKAERYRLQVAAVERIQGVGTLTAMLFLTELGDLSRFPNRGSIKSYVGLAPSSHESGEIKERKGHITRNGSSRLRAILNQATWSHLAHDGEERKWFEGYMATHSGGKRKAVVVCMSRLLNLMWHWALEAQIEYEQTAA

SEQ ID NO: 360900 - protein, 316 aa, unidentified
MGTQDGFAGIDVSKDNLEVCLRPQEETMCFAQNEDGWILMCEWIQSFSPRLVVLEATGGLERGAVAALAVRGLPVVVVNPRQVRHFAISKGILAKTDKIDARVIAQFAESIRPEIRPLKDLEAQELDSLVTRRHQIIQMVAAEKNRLHSAPAWTRKDIRMHIEWLEKRLGKIEKDLDRMIQNSPVWRVKEEILRSMKGVGPVLCRTLLSDLPELGTLNRQKIAVLVGVAPLNRDSGRFRGRRSIWGGRAEIRSVLYMATVAAIRSNPVIRVFHERLVKAGKAPKVAITACMRKMLTILNAMLKNQTPWQPEAQKNA

SEQ ID NO: 360901 - protein, 332 aa, unidentified
MKKKQFIIGIDVSKATLDVFVHEIKYYFQVENSPKGFVVLLESVFKLTKCKQDDILFCFENTGKYSKMLSVFLHAQSISFVMEPALKIKKSLGLTRGKNDKIDARRIALYAYEKIESLTCTVLPGEKIDQIKSLLSLREKLIKHRTAYKNGLTDLNDCYKEGENDMIKDVQKRLIRILSEEISQIEKKIKDIVKNDNSISKSFKLLISVRGIGEIVAYYLIAFTANFTTFSNARAFACYAGIAPFGNSSGTIKGTPKVHPFANKQLKTLLNLAAMSAIQQRGEYQIYYIRRVNELGKSKMSTMNIICNKIIYRAFAVIQRETPYVDLLKYAA

SEQ ID NO: 360902 - protein, 424 aa, unidentified
MKVTYQTCCGVDVHKSFLVATIVKTTGGIEPSYQKKRFSTFNNSILEFKQWLLDNHCHDVCMESTGKYWVPVFNLLEDKINVVIANPKWVKAVKGNKDDTKDSKWIGDLFRLGLVKGSYIPCKKVRILREYTRYRYKLVSCRSSEKNRYQNALTVCNVALDSIVSDIFGKSSTSIIDYLLEQSGTSINHEEIASKLLRSLKSKEDAVIESVEGYQMTDAQKYRMRLVRAHMDYITAEINDVDKMIQNMISSNPDFENAVQFLCTIPGVKRDSAITIISEIGTDMSQFSSSKRLCCWAGLTPGSNESAGKKKSVRITRAGIYLKPALVQCAHAAVKSDKSPYYKKKYDSLVKRRGKKRAIIAIARMILTAIYQMLSTGEQWNPSDLYKIDMPVALVEKQKAKAIKQAKKLLQQEGLLPPDEPLAS

SEQ ID NO: 360903 - protein, 438 aa, unidentified
MSNKVIFNLDELFISVGIDVGADFSWMSIALPNQQFVGKPYKILHNSIDSLTTAVSKIKEAEELYSLESRIFLESTGIYHYPLFCYLRDKGFNCSVINPIITKNSTNINIRKVHNDRFDSKKAALVGLKPDLKVSLMPTDLALNCRNLCREYYDLMDNRSAYVNKLQGELRMAFPQYLGIFSKVTINTSLTLLETYTSPSAFLKADKQEIIDIIKSTARFGLTYAQNKYNAIIQAATDANQFGYIIDSNIKRIRLYISFIRKYDEEINSILESLHELVDANEDSDFVKQIHLIETFKGAGFLSAVSIMGEIGDFSAFSKPKQLFAYFGLDPAVKQSGKFEGTKVQMSKRGSAIARRVIHTLTLQSISISRNREAKNPVLREYYLKKCDSKPKLVAMGAVSHKVCNMIFAILRDNKPFKIIAPQEHIKQYNSAKCDIAA

SEQ ID NO: 360904 - protein, 338 aa, unidentified
MTIARVGVDLAKLVFQVHGVNRAEKVQQRKQLRRSQMLGYFGKLEPCLIGMEACSSAHYWARELSKLGHDVRLMAPQFVKPYVKSGKNDANDAEAICEAVGRPSMRFVAIKTVEQQVIQAGHRIRSRLVKSRTALTNEIRGFLAEFGVIVAKSLGPLRRALPELLEDAENGLPGDFRVLLMGLSEELRALDERIAAFDARIAQVAREDDRIKRLLEIEGIGPITASALVAAVGDATQFNSGRDMAACFGLTPRQHSSGGKNRLGRISKRGDKYIRMLLVHGARAALNAAKHKEGGRSRWIMNLADRRNKNIATVALANKNARIAWSILSRGESYRKAA

SEQ ID NO: 360905 - protein, 402 aa, unidentified
MPMLSIGIDVSKGKSTVCGMKPGGEIVYTPFEVQHTREGMSELVSLLRGSGEEVRAVLESTGSYHCPVVAALLENGIFVSVINSLRMKRFCSQSIRKVKIDRIDAMQIALYGLAYWQELQPARLPEDTYRELQLLARQYYQMTSMLIKAKVDFNAICDQVLPGMQELMNDHAGRHKLSDFVLRYHHTTHILEMGETRFRKDYCKWAEKKGYRNCERMAVLIFATAQNGIPVLPNAPSTQIVITEAIRVLHTVEASRDAILTQMQALAKTLPEYSLVREMPCIGDTLAPRLIAEIGDVRRFHSKRALIAYAGIDAPPYQSGKFCANNRHISKRGNRYLRKTGYEVMQSYAMHKPANDPIFTFIEKKRGEGKSGKLAMVAGLNKFLRVYYGKVTELYRSLPAIE

SEQ ID NO: 360906 - protein, 400 aa, unidentified
MLSIGIDVSKGKSTVCGMKPGGEIVYTPFEVQHTREGMSELVSLLHNSGEEVRAVLESTGSYHCPVVAALLENGIFVSVVNSLRMKRFCSQSIRKVKTDRIDAMQIALYGLAYWQELQPTRLPEDTYRELQRLARQYYQMTSMLIKAKVDFNALCDQVLPGMQELMSDHAGRHKLSDFVLRYHHTTHILEMGETRFRKDYCKWAEKKGYRNCERMAALIFATAQNGIPVLPNAPSTQIVITEAIRVLHTVEASRDAILTQMQALAKTLPEYSLVREMPCIGDTLAPRLIAEIGDVRRFHSKRALIAYAGIDAPPYQSGKFRANNRHISKRGNRYLRKTGYEVMQSYVMHKPANDPIFTFIEKKRGEGKSGKLAMVAGLNKFLRVYYGKVTELYRSLPAIE

SEQ ID NO: 360907 - protein, 362 aa, unidentified
MTDSITWVGMDVHKENILTVSVSGESGTVLARWETPNTAKGKERLAARIAGLGKTRCVYEAGPCGFDLRRFLDEKGIPCDVIAPSLIPTRPGNRIKTDRRDAEKLARMHRMGELTAIRVPTPAQEALRDLVRAREDANEDLVRCRHRLQKFLLRRGQRFEGKSWTREHWRWIRALTFDDANAGTVMTEYVLAVDQQLERVARLDARIEEEAQKPGVAPAVARLKTLRGVRTLTAMTIHSELIDLNRFASPRELMAFIGLVPSEYSSGGKQRRGSLTRAGNAHLRRVLVEAAWHYRHSPHRTGETIRKRREGQPPDVIETARKAEVRLYRKFTRMVMRGKRTTVAAVAVARELAGFVWAIGRI

SEQ ID NO: 360908 - protein, 404 aa, unidentified
MTKNHILGLDIAQTTAVAQLDRADGTRCWRELLPTNQAGWQSLERLCAAAGATWATTRVLLEATGVYHLPWAERLTRAGAEVYVLNPLLAARLQSAANALREHKTDHVDVHRLCEAGRLYADQLGRFRYRPEPDRQGLKQLDHARATLRTTLTNLRKSLRSQLELVFPALLEAKIGPYTEQAAAILAAAPTAGLWRARPSAERRRLAGAKQAALDHACAQTLADEALAQACVPAVRALLGGQQAIRLQLEACDQQIAPRLPAARVALIRSIPGFGERTAAVLAVYLPAGFANWGKSKHITARLQALFGIDPRLRQSGQWTGRVKISKRGIGAARTALFQAAFCSLATDPENAAYYQALRQGDGPHRRPKAHKEAIVDVMRKQLRRLVSVLLANQPFVAKSPLAA

SEQ ID NO: 360909 - protein, 261 aa, unidentified
MWIIGVDYHPSVQQIAFVNTDTGECGERRLSHSDREAEKFYRELKAAGCSVRVGMEATGHARWFERLLAELGFELWIGDPAKIKAKRVRKQKTDRLDAALLLELLLEDRFPRVWVPSPENRDLRQLTLPGVGPITALAFVLIIDSAERFACGKQIASYVGLIPCEDSSSDQRRLGHITKQGNTLLRYLLVEAAQAVVRCDPDWRRRYIHLAMRRDKRIAKVAMARKLAVRLYWMMRKEWNYEQLKKFGSYAGESEHGHGVQ

SEQ ID NO: 360910 - protein, 323 aa, unidentified
MLIHYIDIAKRNFVIAVSSLSKTKTETNNPKGIAHTIEYLKKHKVALVVTESTGGLEIPAAKAIRRAGIAVIIANPRQTHQFAQSQPLTKTDAKDAKMPAFFAQMTAQKEDSQTMPYQPPTEAEEVLEALVNRRNQSADMRTAEKNRLHQVHETQVGSVKQLIAHFDRLIDELDKQIDNHTHTHFDGKAQVAEQIKGIGSITTATLMAMLPELGRLSHKRIASLAGIAPHPRESGETKFKSRCFGGRSAVRKALYMATVAATRFKPLIRDFYQRLPSEGKPYKVAVTACMRKLLTISNARMRDYFAENDPAENDTAENGIRTA

SEQ ID NO: 360911 - protein, 397 aa, unidentified
MYIVGIDIAKRKHEAAVIDGEGTVIIKPFSFTNNCSGYNRLLAMLTKAKLPLDEVSFAMEATGHYWLALFTRLQKEGFRVQVINPVQTNSIRSFYIRQAKTDPRDALLIAEVIRFGHFSESTLHPENIYELRELCRGRHAIVSMQADVKRKVVALLDQVFPEYETAFTNMFSDTSMAILQTCPTPKELSEMPLEELCHLIEVSSHKRFRMAKAQELQALARNSFGFAMAGDVFSTMIRLYAKHLDFLKQQVREMDRKIAEIMDTLDTPITTITGIGPTLGAYILSEIGDINRFSSSAKLAAYAGIDPTMRQSGEYNGVRNRMSKRGSPYLRHAIWLATSSAVLHDPALKLYFQKKRDEGKPYMASVGHACRKMVSIIYAVMRDNKAYTPCIPNEISA

SEQ ID NO: 360912 - protein, 384 aa, unidentified
MRADHTDAPAGGEYATVYVAFELSKAKWQLGVMTPGSEKMSRYRIGGGDLAALSAILTRARAKAEQAGKPVRVLSCYEAGLDGHWLHRWLIDKGVVNYTIDASSIEVNRRARRAKTDRIDLARLMRAFLAHLRGEPRACSVVRVPTAEDEDRKRRTRERETLVKERTRHVNRIKALLHGQGIRDAMPLKPSFLSDLDTVRTGDGRALPPHLKGEIRRQHERLLLVHKQIKALEAENLAAHRAPAAASVEAKAVQLAQLRGVGPLIAQVLANEVFYRDFNNRRQVGSCFGLTDTPYDSGGSRRQQGISKAGNHRARTTALELAWLWLTHQPDSELSRWFRQRVGDIKGRIRKIAIVALARKLMVALWRYLQTGLVPTGAVMRPSF

SEQ ID NO: 360913 - protein, 455 aa, unidentified
MKKQNIKKSFPKNLSQLNLNAAGIDIGSSEHYVAVPEDRDDSPVRSFKSFTPDLYELASWLKCCKIDTVVMESTSVYWIPLFQILESEGFEVLLVNAKSVKNVPGRKSDVNDCQWLQQLHTYGLLSGSFQPENEIRELRTYLRQKNTLIRYSSSHVQHIQKALTLMNIKLHNVISDVTGKSGMAIIRAIVKGERDPEELVKYCDERLKNPKEVIKKSLIGNYTEDNIFLIKQAIDLYDYYEKKILECDTQIQILLKNFGGKEPDGKKIEGDNILSNEPKQRKKKIESPEIQNEIIRLTGVDLTQIAGLNTSSALSLLSETGFDMNKWKSEKHFTNWLGLAPNNKISGGKVLSCSTKKVKSRANNIFRLAAYSLAHSNSYLGGVYKKLRFRLGPSKANVAVARKIAVIYYNMLKYGEEYFDYGCEYYEQKHKEKNIKHLQQKAKEFGFELIVAQPS

SEQ ID NO: 360914 - protein, 338 aa, unidentified
MAIVMGLDQHRAQITAEWIDTDTGEVSRSRISPAHRAGVRKFAERFRGQELEVALEATTGWRFVAEELRRVGAVVHLAEPAETAARRGNKKRAKSDRADARHVRELLMIGRLPESWIAPDHLLDLRSRVRLRHTLSHQRGEWQQRIQAVLYHHGCPHRRNLMTAEGLGWLKAQPLPAGAREQVTVALGMIDALDAQLAPLDKELRAYARRQLGCKALMEHFGVGELTAVTILAELGDVDRFSSSREAVRYAGLDITVHQSDQRRSPGHLSRQGPPALRWALFEAAQSAARQGSPDRDYFAQAAQRLGANRACLSVARKLLKRSYHTLRELGEEALQPA

SEQ ID NO: 360915 - protein, 346 aa, unidentified
MEHYAGLDVSLKEISICVVDGDGKTIARGACPADPEGVAGWFRNRELKPRRIVHESGMLSIWLQRGMTRLGLPATCIDARKAHKSLSARLNKSDAADAEGLAQLARTGWFTPVHIRSEDADRLRSLVGARERLIRLRKDLEGHMRGVLKTFGIRMTGIGQGRQRQAFRDQLATAGETDPVLRTIADGFIAAHATLCQAADDLDKSVRRKAKAHPVARRLMTIPGVGPVNALSFIALVDDPSRFSRASDVGAFLGLTPKRHQSGEVDWSGRVSKCGDGAMRGLLFEAASCLIRQVKRFSPLKSWSVRLAGRRGFRKAAVATARKIAVLMLTLWKNETEYQWTKEATA

SEQ ID NO: 360916 - protein, 345 aa, unidentified
MDHFAGLDVSVKETSVCIVNDTGRIVREVKVASEPEALLAVLKNPAYHFERIGLEAGPLSQWLFSALAEAELPVVCVETRHMQAVLKAQINKTDRNDARGIAQMIRVGLYRPVHVKTLRSQKLRLLLTHRKLLQSKAIAIENDLRGTLRNFGLKVGMVGKVRFEARIQELVENLPDLAELVEPLLIVRRALREQIVILHRRLLAIVRDDEVCRRLMTTPGVGPVVALTYRATVDVPARFRKSKSVGAVFGLTCSKYQSGEIDRSGSISRCGDEMMRVMLYEAAQSMLRSKKWSWLKAWAMQIARRRGMKKAIVALARRLAVIMHRIWVDGTEFRWTREQAAVAAA

SEQ ID NO: 360917 - protein, 331 aa, unidentified
MNNTIVEKFVGIDVSKSTLDVCIEPLGQTLHIAYNEAGISQTVECLKEIPPTLIVIEATGGLEVRIATELAGKGLPVAVINPRQARDFAKATGQLAKTDQVDAAVLAAFAKAIRPQARPLKDADTRALDDMVSRRRQLIGIRVQETLRLGTATSKPLQKSLKQHIAWLDKRITEVDNGLTKQLRESDVWRAKDDLLRGIPGVGAVTTLTMLAKCPELGTLNRREIAALTGVAPLANDSGKHCGKRFVWGGRADVRAVLYMATVSAIRCNDPIKAFAERLKKAGKPPKVVIVACMRKLLTIMNSMLKKIPRGTPKPLDLEHGCYPLRVQPFP

SEQ ID NO: 360918 - protein, 344 aa, unidentified
MDIVIIGIDLGKNSCSLTGMDASGRVVLRRRMRRNSLERFTKGLGRCIIAMEACCGAHHLGRIFATQGHEVRLMSPEYVRPYVKSQKNDDLDAEAIAEAAMRPTMRFVEVKSQAQSDIQALHRARERLVSERTALINHLRALLLERGIVAPQGRRKLEEELSVFADEDGIEALSPRIRLLIEDLRAEWRALDERIAAFDGEFVRMARDDEAVRRLTKIPGIGTINATALAAAVGNARAFRRGRDMAAWLGLTPRQMTTGGKPRLLGISKRGNRYLRKNLIHGARAVLPYLVERETPLGRWARGLLARAHKNVAVVALANKLARIAWAVLAHGCAYDSGCETAAA

SEQ ID NO: 360919 - protein, 385 aa, unidentified
MSQAKFEPRRSLVAFDQHATLVVVVELSLETWLVGGMVPGIAREPLKKLATPDPEAVLRLLYRWRDEAVKAGQTITRIVVAYEAGRDGFWLARWLRARGIEVYVIHPTSVAVSREHRRAKSDRIDLALLKRSVLGWLRGEEKHCSMVAIPTVEEEDAKRPHREREQLVGKRTGIINRAKAISIRHGIRGFNPNLRNAVDRLSSLRTPGGEPLPPNTRAELQRELEHLRFIKEQIKQVEKARLEQLAQTSEERLSATTRGLSRVRGLGIETADMLSSEMFSREYRDQRAIARYAGLTGSPDESGSRRREKGLAKAGNARVRRGMIQLAWRFRMHQKDSRLVQWFEARVAAGTKRKTMIVALARKLLIALWRLVTLGEVPEGVILAN

SEQ ID NO: 360920 - protein, 409 aa, unidentified
MGMLEVALDPATVVVAVDPGKVMNRVWVSNGAGLLEEPVSLPVARSGIAALEKMLAGHVGEQVIAIEATGSLHRAWAVELERLHPGALRLFAPSETKAARTQLGSGRFKTDDRDCAALTYLARQGAGRRQAEEAVIEELCAAVRHRRGLVADRKKAQQRLHDQLNSLCPGLSAPAGHGKSLPIETPTGQAVLACAVAFAGKPPSARSLIARSPGKLTKATAGYWAQRWRDCLPPPPDAAARAERLGRDLDRYRRLLVDVAAVEDEITLLLARTDGQVLTSLPGVATNRAAAFAAHSLPIARFPDAEHLYSATGLAPAMYESATIRRRGRISRQGLAEHRDALMGIAWGLSLYSPTFAERNAELRARGMAPIQARVALARNACRLIYRMLVTQQPFNEEAYRRGRLSRGR

SEQ ID NO: 360921 - protein, 451 aa, unidentified
MTPDDIDVWVGLDVGKSAHHAHALDHDGNTLYDKPLKQDEKAIRTMLGKLSKHGRVLLVVAQPNTIGSLPLTVARNMGIAVAYLPGTAMRRTAQLLPGDAKTDRRDAHVIAWAALKLPETLRDAGPDDETLAALKLLAGHEDLAHESTRHVNRLRSLLLQTHPAFERALKGERITRDATLALLERYGGPTGVKRAGIEDVKDWAKSNGLRAGRIIDDMFKAIGEQTVTVPGTLMAETIIPSIAHDIKTIRDRRREVGRQVEKLLEDHPLLTVLTSMPGIGVRTASNILLGIGGDIANFKSSAHLAAYAGISPVTGQSGTSIKGERPSRRGNKRLKNALWQTAFVASTKHPPSVAYYKRKREQGKHHNAAIICLARRRCDVIYSMLKNGTLYQEPALVAGPGPHGKGRRTPPAGRSAPTTANRNPDTSTPQGVDKNIGTPPYCKKLSLTQRQ

SEQ ID NO: 360922 - protein, 392 aa, unidentified
MVISVGIDVSKDKHDCFIVSSEGEVLADVFTIPNNMDGFHRLLQRIQDCTNSQDKIKVGLEATGHYSYNLLGFLLDNGLTTYVLNPLRTNLYRKSLSLRKTKTDRVDARTIASMLLSDAGLKPYTSTAYHNEELKSLTRYRFDKVKERAKLKSSISRLVCILFPELEKLVPTLHMTSVYSLLEELPGAKQVAAAHLTRLKTLLETASKGHYKRDMALEIRDAARNSIGSRMPAKSLELQHTIRLTRELDREIDEIEEQIQSIMGELHSPITTIPGLGFRMAAMILAEVGDFTRFDSPDKLLAYAGMSPSTYQSGQLKNCYPHMEKRGSRYLRYALYNATKYVCYWDPAFADYLAKKRAEGKHYNIAISHAAKKLVRLIFAMEKSMQPYCSAS

SEQ ID NO: 360923 - protein, 424 aa, unidentified
MNAVGIDVSKGKSTVAILRSHTDVVAPPFDVPHTVPGMKRLVEKIRSVGSDSVVFMEHTGRYYEPVAQTLCQYGIPVVAFNPLLLKGYGSNSLRNVKTDRADAKKIARYGLDYWQELRQYSPMDTTRYELKTLNRQFQLASKNKVAFTNNLTALLDASYPNIRSHFTSPARKDGSQKWVDFVITFWHVDCVRSVSLNAFTERYHKWCKRHGYNFSAEKAAEIHREARNMIALVPKSDTTKLMVQQAAEQLLSISRMVENLRMEMNRLASQLPEYHVVMGMFGVGESIGPQLMAEIGDIRRFTGKQSLVAFAGIDPMPNQSGTKNVRSNKSSKRGSPYLRKTLFTLMQMLLQLAPADDPVYQFLDRKRAEGKPYHVYMNAGGNKFLRRYYGKIRDYLASLDPTPPIDSWVSDEPAVTSSVPIDKN

SEQ ID NO: 360924 - protein, 343 aa, unidentified
MCAEKISTKSVKINNDKYEYYIAIDYSQRNMAIATLRNDGNKPRVIDVDSDIDHLKAYLISLKGRKIVTIEETTSTHYLYVELFEYAEKILVCDPYRNSLLSDGPKTDKLDASNLCKLLRSGLLKEVYHSLDKKYELRQLVSEYEQLVKFGVRVKNEKSAIYRSMGKSYQKKEDIGDDTLAWIITQKDLRIDLYEKQKKEYDKMFSKKISQDTELKHLKDVTGIGTIGAVKILATVIDAKRFKNEGNYLSYCGLVKYQKMSGGRNYGQKKTRYSRRLKSVYKTAAMSVINGNSPLREYYDSLLKRGLSEENARNQLSRRIAIITYGILKTGTKYNPYKWRESK

SEQ ID NO: 360925 - protein, 435 aa, unidentified
MEEVSDEPLYRDRVCGIDIGKAGMAATIRVPSDKDPARRAAETRSFGTTRREVLALADWLRSWQVPAVVMEATGDYWKGPFYRLEAEGFECVLADAKQVRHLPGRPKHDPGDSRWLAACFERGAVTSCFVATGEFRIIRLHTRYRRDLTDERTREKQRAEKLLESAAIKLSSVVTDLHGVTGRDIMDHLIAGERNPNMLAQLARARARRKITELEQALEGAEFFTPGHAALLAAMLARIDRVNAEIARLSEVIETLLEPYEEQLQQAESMPGWGRRAAQDAVAETGTDMTRFRTGAHLASWAGRTPLDNSSGKRKGKAKSKKGNRYLGGLLGETAVAAGKTQTREGARYRRLARRRGKAKALVALGNTQLNVYHKLLSSPGMRYQDLGPDYYQRRAEISRQVRHHVGKLGALGFDVTLCRIPEPEPAGPGTTQAA

SEQ ID NO: 360926 - protein, 433 aa, unidentified
MTATPYDLIIGLDRSDQTADLCLLDTRTGERRRVSIATAPEALWEWLAELRQQYPAARVGLCLEQPAGHLIPFLEAYAWLTLHPINPLTLQKYREAFVTSRAKDDTKDAAYLADLLLNHHAQLPVWAPEDSATRAVQQLVFHRRAVVDERTALTNRLQALLKQYYPQALTLCGEDLWRPLATAFLLKWPHLGAVQKARPATVTQFYYVHGSRSQKLLAQRLALIAKAVPVTDETAVIQSFGLRVQLVCRQLQALQRTLGEFDQQLAAAYAAHPDRAIFASFPGAGPVLGPRLLASLGANRERFADAATQLQRYTGVAPVTKRSGGSCRIHRRYLCPKFHRQSFHEYASQSVLWSRWAAAYYLQQRSKGCAHHTAVRALAFKWQRVIWRCWQSHTPYDERIYEAALRKHGSPLLALFERVQLGKSPWKNPAPKN

SEQ ID NO: 360927 - protein, 359 aa, unidentified
MRIIGCDLHARQQTLAMLDTATGEVVNKTLTHEGENVREFYSTLPGPVRVGIEATGSMKWFLHLMEELGIDCEVSHPATIRAAEPCRQKHDQRDAGLLLKLLVENRSPSIWQPSQELLDLRGLLLHRNQWVGLRARIQDALQAIALANGLRRRSSLWNESGQRAIASLSLATHTAHRRSELQAMYARFEAEIEQLNQRVLEQEGQRPTAELLMTHPGVGPITALATDVFLGDPKRFSDGKALASYIGIIPREHSSGGRQRLGGLSKQGNPLLRFLWCEAAVHAVRRDPELRRFYRRKLVQKGLGKPALPLRENSGFGCGSCCEIRLITKSSVVVDRGNREAVMPVRECLASVMVRRVAV

SEQ ID NO: 360928 - protein, 311 aa, unidentified
MAMLSFCGIDVSKDRLDVVVLPEGWFFSVSNDTAGWELVARLRPLAVCAIGLEPSGGYERGIIRALLAARLSVRRINPNKLRQFARARGVLAKNDRLDARLMAEYVAIMPTRAVQRDDAVDRLAEVVTMRRQLCDEHVTVENQTAHLEDAMLRRLSKRRLVRLEADIRLLDKRLAEMVATNAAFARLYELLTSMPGVGPVLAFTLIALLPELGKMGRKQIAALVGLAPYDFDSGKLRGHRSIYGGRMPIRNVLYMAALSASRYNPALKTFSNRLAHANKKSKVIIVAVMRKMITTLNAMLRDNAAWQPQSN

SEQ ID NO: 360929 - protein, 391 aa, unidentified
MVNNSLIGKAGVGEVSEASRADTSRRREFGRVQAQEAVTEREPRRRRGTSPNSRLNRRRPTHSASSHLQVREKTMPEKVYVGIDVSKDTFNVATCPNVLKTSLPNMPDGHRQLCQSLRNHSITLIVLEATGGYERPIVAELLETNLPVVVVNPRQVRDFARGLGQLAKTDSIDAQVLAKFAQLVQPAPRPQKTAQTTDLAELVRRRRQLNDLRTQESNRLSLVHHRQVRRSIQQMLKMLDRQITQTDQLIERHIRNNGQFQQKDRILRSTPGVGPQTSAMLLAQMPELGNLNRQEIAALAGLAPWNRASGKWIGKAHIWGGRKDVRCVLYMAALSARNCNPVIRQFAQRLEQQGKAFKVVITACMRKLLIILNTMVRNQTLWSPKISLKNA

SEQ ID NO: 360930 - protein, 370 aa, unidentified
MSQSRTLFIGMDVHKDSIAVAYVAQDHGAEVTYLGARGTRQCDIDQLVRKMQSKAKHLLFVYEAGPCGYWLYRYLPRKGSDCWVVAPSLIPHKPGDRVNTDRRDARQLARLARSGDLTVVYVPKVEEEAIRALSRAREDAISDLKDAKFRLKAFLLRQDIRYVGRAHWGPAHLRWLSEVVCPTPAQQIVFQEYVRAVQEHTERLQRLEQELQEQVNAWRLNPVVEALQALRGVQFTVAVTMVAEIGDLTRFDTPRELMQFLGLIPSAYSSGEQRRQGSITKAGNTHARKAVVEGAWAYRYPAKVSRHLQLRLEKQPKMIQDLSWKAQVRLCTRYRRLVSRGKHANVVTVAMARELVGFMWAIATQVPLTA

SEQ ID NO: 360931 - protein, 403 aa, unidentified
MNAVGIDVSKGKSTVSVLQPGGVVVRKPFDVSHTGGELKSLASYLLSLDGETRVVLECTGRYHEPVLHSLSDAGLFVSAVNPHLIKNFGNNSLRKVKSDPADSRKIARYALDNWADLRQYSSMDTTRTQLKALNSQMTFFMNQKVTARNNLISLLDMTYPGVNRLFESPARPDGHEKWVDFATSFWHVDCVRKIGIKTFTERYQAFCKREGYNFQPGKPQEIFEASRDLVAVFPKEKPYKDMILMSIDQLNLASSHVEQIRGEMNELAKTLPEYDTVLAMRGVGPTLGPQLMAEIGDVSRFSHREALTAFAGVDPGVNQSGQKNSRSNRASKCGAAKLRKTLFLVVSSLLQTAPADDPVYRFIDKKRSEGKPYLVYMTAGANKFLRIYYGKVRECLALKAQTE

SEQ ID NO: 360932 - protein, 342 aa, unidentified
MDHFAGLDVSVKDTSVCIVDGTGKIVREVKVASEPAALLPVLTSPTYHFKRIGLEAGPLSQWLYSALAEAGLPAICVETRHMRAMLKVQINKTDRNDARGMAQMMRAGLYRPVHVKTLRSQKLRMLLTHRKLLQSKAIAIENDLRGTLRNFGLKVGMVGKLKFETRIKELVENLPDLAVLVEPLLVVRRVLREQLVILHRRLLAIVRDDEVCRRLMTTPGVGPVVALTYRATVDVPARFRKSKSVGAVFGLTCAKYQSGESERSGRISRCGDEMMRVMLYEAAQAMLHSKRWSWLKAWGMKIARHRGMKKAIVALARRLAVIMHRIWVDGTEFQWTREAAVA

SEQ ID NO: 360933 - protein, 449 aa, unidentified
MGKQNRKSVVLEPDAAGIDIGAEEIYVAVPLDRDEESTRKFSTFTRDLNALAEWLEQCHVRTVAMESTGVYWIPLFQILEERGFTVYLVNAHYLKSVPGRKSDVSDCQWIQYLHSVGLLRTSFRPPDHICAVRALWRHRASLLQMAAEHTMHMQKALSQMNLQIHHVLSDITGTSGLAILDAIFAGQRDPIELAKLCHFRVRSPRETVAKALEGDYRPEHLYTLRQSVDGYRFHQKLIADLDREIARLMQTLPSATERPAPPATRTKHTAYRRQGNDPSFDLRGELYRIAGVDLTDIPGISTVTAQVILTEIGPDVSRFRHASAFASWLGLCPEKRVSGGKVLSCKTRKVAHRAATALRLGAHSLSRAKGYFGEFFRRMRSKLGTASAITATAHKIARVLFHVLLTKEPYSETVFHQCEEQSRQRAQLRLRKYAHQLGFQLTPIAASDH

SEQ ID NO: 360934 - protein, 307 aa, unidentified
MDFYAGLDVSLEATNIWVVDGEGKVVREAKLETDPDAIELFLGESGIQLKRVGLEAFSYSAWLFTALSEKGLPVICIETRHAKAALNAMLNKTERNDTKGIAQMMRTGWFRALHVKSEAAQTLRALLVGRKAMLGKVLDMENMIRGLLSPFGLKVGEISVGRFDTRVRDLLAGEGIGGDRHAAARRAQCDAAAASKTAPAGADGGAQRQRGGTDDDSARRRRLVALTFCATVDDPTRFGKSTNVGAHFGLTPRRYQSGQTDRIGSIAKCGDELTRAMLYEAAIAILTRIPKHLSCGWGACGWPGRRV

SEQ ID NO: 360935 - protein, 316 aa, unidentified
MVKSSEQYIGIDVSKRKLDVYMHPLGSHAGFPNTERGYEQLLLWLSPHRVALVVAEATGGLELPVLKRLHETGHKVARVNPRWVKDFIRSSGRAAKTDKLDALQIALYGCRMEPDVYIPLDANTEALKALTARHRQLVDEITMENNRLKQSRHHWVTQLHKETICFLEYQLKEVDTMLATLADTNETVRRAKEIITSVPGVGNTTAHMLIADLPELGKIPGKQIAALIGVAPLNRDSGTLRGYRSIFGGREAVRKAMYMAALGAATRNNPTLKAFYQKLLDVGKKKKVALVAVMRKLIVILNAMIKNNTTWQQKIV

SEQ ID NO: 360936 - protein, 337 aa, unidentified
MATSAAMRMVGIDVSARWIDVERAAADEPVAVRRVANTAAGHRAVGRWLTQGGRAARVVLEATGVYSWDLALALQRTARVEVMVLNPRVSKDFAGACGQRASTDATAARRLREYAARMPFVPWVPPSAAALELRALMRRVAAVVEMRTQEHNRWHALGATAALPAAVRTEVRTHIRSLGRQIARLERAARTVVQSAPALQARYERLRSIPGVGVRSALGLLAELAVLPAALTARQWVAQAGLDPRPVRSGSSVHPPVRISKRGNVHLRRVLFMPALVAVRRSPAVQRLATQLTAQGKAPLQVLVAVMRKLLHAIYGMLKANTDFDGERFRRSALAPP

SEQ ID NO: 360937 - protein, 340 aa, unidentified
MVKYFVGMDIASNTFMAAVGTQPWKLVVKPQEFENSEDGFAKLLSWLKEHHLEPHQTVACMESTGVYGESLAYFLCAKGYRVAVEPPLKVKRAFRPGGPKTDAVDSCQIAEYACRFEDQLNFWQPRTELLEQIKVLLATREQFSGQKTAHQNALQAIKRKVVRTPLAEQVHEQSITQLQKHIHDIDQELRRLINSDPTLKQMLLLLMSVPGVGLLLAAHMILLTQTSLDPKELAAYLGIAPNEFSSGTSVFKKTSSRHYGPSAVRKLLYLASCSVRTHREQFRSYFLRKTAEGKSKRLVLNNIANKLLKIICAVLRSNTPFIQNYCPIQPLALTRSSYSR

SEQ ID NO: 360938 - protein, 380 aa, unidentified
MRHTANKFLVPFRLQVPIRILSNWLIKGISKATLPVKKQLIMSKFTKKKAFIGVDISKDTLDFSILLDSDPQSFEDKQVSNSFSGFSKIEKWLSSKPFALNECLFCMEHTGTYGLLLFAWLSQLEVDYVVEPALRIKRSMGMARGKNDRVDARRIADYAYTNRTKLKPFVMPSSLLLQIKQLLTYRDQLTRMSTSLKNSLKNHREYEQVIGSTSITESITGQIDDIQTKKEDIDRQIKELIQSDKELNKNYNLVKSVKGIGLMIAAYMLVTTHNFTSFENGRKYACYSGIAPFEHTSGSSIRGQTRVSHLANKRIKTLLSNGANSACKWDPDLRAYYKRKTGEGKDHNLVINSISCKLVNRVFAVIKRQTPYVTMYAQNF

SEQ ID NO: 360939 - protein, 378 aa, unidentified
MKAALQTKDSVSGDVLYMALELSNKKWKLGFSNGEKIRTKTIDAGDWVNLRAEIEQARGKLGCSADCAIASCYEAGRDGFWIHRALLEKGIENYVLDSASIEVSRRRKKVKTDRVDVVALLRLLMRYVNGEREALHVIRVPTVEEEDQRRLNRERDRLLKERGAHSARIKSLLKLHGIGLGKINDLPELLPSAKALVVEYELPADLKCELEREYERYKLVDQQVTGLEKLQIQRAEDLDKPAMQQITQLMSLKGVGWQSSWILTMEFFLWRDFKNTKQLGSCAGLTPTPYDSGDSTREQGISKAGNKRIRRLMVELSWLWLRYQPDSALSQWFERRFGQGGKRMRRIGIVALARKLLIALWRYLEHGVLPEGAILKAA

SEQ ID NO: 360940 - protein, 376 aa, unidentified
MEHDSTVYVGLDVHKESITAAYAVGMGEVELLGKIGTTKTDIDHLCKRLQSKARHVNVVYEAGPSGYGLYRDLAQKGFECMVCAPSLIPKKPGERVKTDRRDAVKLVRALRAGDLSAVHVPDVEDEAFRDLARAWAAAKMDLRQARQRLKSFLLAHGVRYAGHADWGAAHRRWVSTFAFPNHWQQLTFDEFRRTIEDRLAQCDRLEATLHEAVVNWRFYPAILGLQAMRGIQFITAVGMLSELGDLSRFEHPRQLMAWLGVTPSEHSSGDRRRQGSITKTGNSYARKLLVEAAWSYRYPARVSADIQRRHEGIPKPIIDRAWDAQVRLCRRYRKLAARGKNVNIAVVAVARELAGFIWDIGRLAMSLSVPYEAQAA

SEQ ID NO: 360941 - protein, 337 aa, unidentified
MKYSGIDLHSNNSMVVVSDEADRVLVRRRLPNDAAAILALLAAHREELVGVVVESTYNWYWLVDALQAAGYRVHLANTAAIKRYEGLKHSDDEDDAAYLAQLLRLEILPSGYICPPAARAVRDLARKRMQLVRSRTAQVLSVENMLSRETGAGMRSYAVQRLTAHAVASFGFHQDVGRALCANVAVIQTLNREIDKLEQRLRQCVSLRPEFRLLTSVPGIGQTLATLIMLEVGTIERFAAVGNFASYARCVDSTRLSNGKKKGQGNVKNGNAYLAWAFVEAANFARRYCVEARRFYERKKARTNGVVATKALAHKLARACYHMLKENTPFDVKRCFA

SEQ ID NO: 360942 - protein, 340 aa, unidentified
MEITTVGLDLAKRVFQVHAVDASGKVVVRKALRRAQVLPFFTKVPPCLVGIEACGTSHHWARELIALGHEVRLMPPAYVKPYVKRGKNDAADAEAICEAVTRPTMRFVAVKSREQQAFLSMHRARELLVRQRTQLINMMRGLLAEFGIDIPEGIERALQMARQVVDGKAPDIPIAAVRIVDMLSQQILNVHAQLREIDRALAALARSDDVARRLATIPGIGPVGATALAASVADPSQFKSGRQFAAWLGLTPLQNSSGGKERLGRITKMGDRYLRKLLVIGATALVRYARSRPETASPYFIALLARKPVRVATVAMANKTARIVWAIMTRGEVYRPMLPA

SEQ ID NO: 360943 - protein, 307 aa, unidentified
MKNEEMKFVQVVKTGCGIDVHRDIIVATIRKNNDEYVTREFVAYTGSLTSLRDWCKTEDVTHVAMESTGVYWKPVFNVLEEYFEIILVNARHVKNVPGHKTDKKDSVWLSKLLLSGLLKGSFIPPCDIRELRDLVRYKKKVIAQAASEKNRIIKILEDANIKLSSVLSNVDGAVGTKIINSLIDGQTDINELVKFYHGKMKVSKTEFKMALEGRITKHHRFMLQLHKDSIGDKERLIDRIESEIEEATKAYQVEIDLLQTIPGVGKDSAVSIVSEIGVDMSRFPNENHLSSWAGMSPGNNETGGKKK

SEQ ID NO: 360944 - protein, 411 aa, unidentified
MNNTLFVGIDISKRSNVATFMNCEGKVVGRLTFSNNGSGADRLVAKILSYYEKGDFEAIRIGMENTSVYSKNLVWFLYEHEALNEHKLSIIPLNAIMVANYKKSFLDMDKDDITDSFAIADFIRIRPGLLPFKLDDRQEALKIMTRSRYNYVQALSRMKSQFLTRLFLSFSEMEAGKPFYSIFSKTSLSLLEEEFTLDELAEKPIPELVEFLQEKGGGKFQNPEEIAKVLKKAASSSYRVPAMVRESLNRTMASDMEIMRILENEIHNCDKNIEKLMKSVPAILVSIPGIGPVLAAGIMSEIGDISRFRKQESLGKMAGFKWKRNQSGKKESEDKAAVLSGNKKLRYYLVEAANRVRIHDPVFEAYYRKKYAESKTHAHKRALILTARKLVRVIFYLLKENKLYKPDVGIS

SEQ ID NO: 360945 - protein, 461 aa, unidentified
MRNNRKSGDRPGSTRPIEGLPIVRAKVAGVDLGSERHWVCAPGLEGSGREVADFGATTPELVRMAEWLKERKVESVAMESTGVYWIAPHEVLEKDFDVLLVDTRQLARVPGRNKKTDPRDCEWIQRLHSCGLLNGSFRPQEQVCMLRTLVRDKANLVCESADWLRRMQKSLDQMNVRVHRAVSDLNGVTGMAIVRAIAAGERDARKLAQLRDRRCRQSKEEIAEQLSGHWREDHLFSLRQSLQMYDAIEERITAYEQEILTKLATMEVEEHPGGAVPPVKNLEKGKAIKKRGQEPMRQALYRMSGVDVTQIDAIGVETVEVVLSEYGPDLSRFPTEKQFVSHATLAPRVPKSGGKPVKHKKRNSASTRVAAALRMAALSLRHSATALGAYYRRLARRIGGDVAVFATARKLATLIYRLLRWGQPYVDEGVEAFEKRYRQQHIKGLAARAKELGYQLMPTTT

SEQ ID NO: 360946 - protein, 463 aa, unidentified
MARNIKGKKHKKPVRSLKAIQPDAAGIDLGSREHWVAGPPLQDNTPNVQRFNTTTPELLRLADWLKEQKVKTVAMESTGVYWIPLFEILDSRGFEVILANARQVSHVPGRKTDMLDCQWLQLLHACGLLRGSFRPSDDICRLRALFRERNTMVDQRSDWVRRIQKSLDQMNVCVHHAVSDITGVTGMAIIRAIVDGERDPRTLAQMRDRRCQKSEDQIADELTGNWRPEHLFNLRQALKMYDQFCQIVTEYDAEIFAYIKTLQPGVDDNESAPPPASKSKARNIAKKGQEPMRQALYQLTGFDLTTIDGIGVDTAAVVISELGLDFSAFPDEGHFVSYLRLAPNLSISAGKKVPSKIKGTTTSRVATALRMAALALRNSKTALGAFSRRISSRKGASVAVFATARKLAQIIYRLVCHGQAYIDIGAKAYEAQFNNRRLKYYTKALKDMGYKVKPLAAAADLAA

SEQ ID NO: 360947 - protein, 448 aa, unidentified
MGQGKRPASRGVARRNAKLKALRGLVGKDRAIVAVDLASPRQAAVVCDHDSVVLARRMFTGSAWCISEILAWAGPVAAKAGFAGLVLACEPTGHRWKPLVVTARAGKIPAVCVQPLLVRRAREGEDFTRSRSDFGDAVIIARLTAELRCYLPYLPEGPWARLRHLGARRESLVERCVAARGQVRDLLECAWPAVLEAAADPLESLTWRAALAVSVDPVVIAAMSEQEFLAALREQLVALGGKKVWRRIAVAVQAAAANPSGIAAERDAITERAAFAYQDWMSTLVALADIEARMLGVLDGLGLTSLVTTIPGLSAVGAAVILAQTGDPARYDTPRAWVKHAGLAPQANESGKYRGKTRHSGRGRPGLRTAAWRAIWGALRCNQVYAARHGQLTTRDANRLTGGQAHAALAAALLRQLHVVVTRRVPWDAAIASGAAAPDQVTVVVPAA

SEQ ID NO: 360948 - protein, 358 aa, unidentified
MILNATKGKDFTGQNIYAGIDTHHKSWMVSIYCDEFELKTFSQEPDIDQLERYLKKHYPGATYHLAYEAGFCGFWIQRSFTQKGIHCDVIHPADVPTSDKENKRKTDKVDSRKIAKGLKNGELNTIYIPDEDQEADRLLIRTRTNIVRDLTSIKNRIKAFLKVRGIVIPITYKDGNWSNSFIKWLRSILIPEASSKTALLAYIEEAEFLIARVKQLQLAIKALAATEKYAVNMKLLTSVPSIGLIAAMTILTEIGNISRFRKLKHLCSYCGLTPNSHSSGETERIGGISRRGNPFIKTILIECSWMAIRKDPALLLYYKQLLPRMNANKAIVKVARKLLNRIRYVLVRQKEYVTGIIS

SEQ ID NO: 360949 - protein, 360 aa, unidentified
MAKAKLVHLSPVVGGVDTHKDLHVAAVVDQNNRVLGSDFFATTRQGYRQMLAWMASFGTVKRIGVECTGSYGAGLLRYLQSTGVEVLEVTAPDKMERRKRGKSDTIDAESAAHAAFSRIRTVTPKTRSGMIEALRVLKVCRKTAVAARRIALQMIQMNIISAPDELRDQIRHLTRMQLIRTLASWRPDVTAYRNVQDAYRIALKSLARRYLELHDEIADLDIMITSIVDELAPELIKCKAVGYECASQLLITAGDNPQRLNSESGFAALCGVSPVPVSSGKTNRHRLNRGGDRAANSALHIIAIGRLRTDTRTQEYVAKRVAEGHSKMEALRCLKRYISREVYTLLRNQNRLINSSQITT

SEQ ID NO: 360950 - protein, 429 aa, unidentified
MNLIPVAGIDVGKKFSEMAVLSPSNEVFARIRINHDSFKNFEKAFDLLKKAEKEFAAKPVVVMESTGHYHKILFHALNNVGYEVSIINPIQSDSIKNIGIRKVKNDKVDARKLALLYRFEQLKGTKIPNEDIDCLKSLCRHYYKLSDQLIAYKNKLLGIVDQLFLSFTDVFEDVTSATALAILDKYPTPEHILSADSDELITLIKKSSRKNLEWATAKYELLCSKARDFKPLSINSIANTAMLKANLSMVKTLSQLLENALDAIHELLEQDSQKDMPVLSLTIDILCSIPGIGILTAATIIAEIGDFSAFSKPDKLVAYFGIDPSVKQSGQFEGTKNRMSKRGSRLLRRVLFTTALANIRKKSNGKEYNPVLYEYYRKKCVSKPKKVALGAVMHKLVLIIYAVMRDRKPFVLRKPEEHAEMLKAKNSAA

SEQ ID NO: 360951 - protein, 313 aa, unidentified
MSEHYVGVDVSKEYLDVASSDGTSLRVGNDEAGHQELVTRFGAAPPALVLMEATGGLERALAVQLSAAGVALRIVNARHVRHFAKATGLLAKTDRLDARALVHFAQTLKPEPRAIQPEQTLALQALIVRRRQLVEMLTMERNRLRTAHRGVRKDLQSSIRWLEKRLAGVDDDIDGALRECGVWREKVELLESVPGIARVISVSLLASLPELGQLNRNQISALAGVAPFNRDSGRWQGRRSIYGGRPLVRSALYMAALVGARRNPVLRNFYQRLRGAGKPAKVALTACMRKLLVILNTMLKNGQRWGDHVQLQA

SEQ ID NO: 360952 - protein, 391 aa, unidentified
MVCVGIDVAKDKHDCCILDSDGMVRADCFTIPNNMDGFKQLLQMIRNCTKKSDKIKVGLEATGHYSYNILGFLLDNDLAVYVMNPLHTNLYRKSLSLRKTKTDRVDARTIATMLLSDVDLKSYTDTAYHNEELKSLTRYRFDKVRERAKLKQSVSRLVTILFPELEKLVPSLHIASVYALLSEYPGAKQVSEVHLTKLTNLLTTASKGRYEKDKAIQIRDAAKTSIGSVMPAKSLELKHTIKLIRELTSEIDEIEDSIQQIMDELHPPILSIPGVGIQSAAMILAEIGDFSNFESPDKILAYAGCSPSTYQSGKLTNSYAHMEKRGSRYLRYALYNATKYVCHWNPVFAKYLAKKRAEGKHYNVALSHATKKLVRLIYALQKSGKAYLTAA

SEQ ID NO: 360953 - protein, 451 aa, unidentified
MAKKSRRCDQLPVLHPDAAGIDVGASELFVAVAADRDPHPVRSFPTFTRDLNALADWLEQCGIRSVAMESTSVYWIPVYQILESRGFEVYLVNAQHVKNVPGRKTDVSDCQWIQYLHSVGLLRGSFRPPGVICAIRSLWRHRSSFIQMAAEHVLHMQKALDQMNLQIHRVLNDITGLSGLRILDAILAGERDPVTLARLCHSRVNSSEDTVAKSLEGDYRPEHLFALKQSLAAFRYYQSLISEADQEIQRQLNDLDTAVDAEDAPPKRTKASPYQRRRYEPKNFDLRGELYRIFGVDLTNVPGVSAITAQTILCEIGTDVSQFRNASAFASWLGLCPEKKISGGKVLYTKSRRVRSRVATALRMGAHSLHHAKDYLGEFFRRITRKLGKPQATTATAHKLARIIYHLLRTKEPYNESVFHRSEADSLKRAELRLRRQAAQLGFTVVPATND

SEQ ID NO: 360954 - protein, 324 aa, unidentified
MSDSILGIDVSKETLDAYCARGQRKQGRTFANSPDGWKLVRAWLKAMGSKQAHVCMEATGRHSLGVALALHEAGHVVSVVNPAQIRDFARTKLGRNKTDKVDAALICEYAELFKPEPWTPPSPAMRRLCELQTTRAGIIGSRAEWKNRIGSGLGDSTATKLAAATIDHFTSQLEAIDRAIGETIEQDAELRGRRDLLLSVIGVGETLAASLMAEMPEPGVLRRSGEMVAYAGLNPSHHRSGTSIDRPTRISKIGNATLRSSLYMPALSAMRFNPAVAILVARLKSAGRLKPKQIVVAAMRKLLVLCFGVLKTGKRFDLAIAMPA

SEQ ID NO: 360955 - protein, 347 aa, unidentified
MSYFAGIDLHKRYLTLCILDRIGNVVVQHRRLTTDGLFAVLAELDAPITVAVEATLHWAWLHDRLAAQGYAVQVADPGQVKLICKARCKTDPIDARKLADLVRTNLLPAIWVPDPTTRANRMLLRGYSFLVRSRTRLKNRVHAYLAEINLASPATDLFGKQGRIWMDSLTLPDEVRFQVDGLLDLLDQIELRIRKTAKRIEQRVDMTPEAQLLLTVPGIGAKTAMLIMAEIGTLDRFPTSHHLTSFAGLVPTTRSSGGKTTHGSLPRAGSPWLRWALVETTQTLKMKPGPVRAHFTRLTRAKGNSKATVAAARKLCCYLFWMLKEERTYPDWLQNRHSQPLLEVRPT

SEQ ID NO: 360956 - protein, 365 aa, unidentified
MNYIKVGVDASKEKLVCAYRANGVGEMKMVTLANRKEAVKPWIEKLQTQGIVQVCYEASSVGYEIYRWVTGLGAECEVVAPSLIPKKAGNHVKTDSRDARELLSLFEADLLTSVHVPTVSEEALRDLVRSRGDMRKTVTQHQHRLNQFMQRHGRIYPGKAHWTQKHMNWIRQETLEEQAAESTKAFYLRWVEQSQGELDRVDAMILEQAPKHQATYALAQRFMGFYGIDVKSGISLASELLDVRRFQKPGELMAFVGLTGREYSSGAVFRRGSITKTGNARVRHLLIQAAWKYTRKPLWSERLRDHWKTQPAALERIAQKAKDRLYKRYHHLVNRGKAKQKAVVAIARELAGFLWAAGQIEATAA

SEQ ID NO: 360957 - protein, 352 aa, unidentified
MEIIALDSHKRYSQVCVQDTSGKFLNEKRIEHEKGQIADFLSRYSPGSAVALETVGNWYWIVDEIEQAGMTPKLVHAHKAKLMLGSINKTDKLDARGLNRLQRTGTLPTVWIPPQQIRDYRELPRTRVVFCNLRTRLKNRIHSVIDKYGLHTDFTDISDIFGSRGRERMALTIKKLPAETNYTCRCLLRELDMAEEQIQRIENRMKKVFSKTEVVERLMSLPGIGFILAVTIANEIGDISRFSTPQRLASYAGTVPRVHSSGGYTRYGKLRTDVNHYLKWAYSEAGNSTAVNHKRLAFRHTSKLYKRIREKKGHAKAVGAVARHLAEASFWVLTRNENYKEPSVKQFSLTAV

SEQ ID NO: 360958 - protein, 510 aa, unidentified
MNTRKTSPKTQSKTPRKPPPKLTNTPTKRKTQPPTQRKAQPHSTPVCSRVYHQTEQCARLADTPVTNPHAAGIDVGDTTHWVCVEATPDGSEVTREFFAHTPGLRQLVGWLKACAVTTVALEASGAYGHVLYLTLLEAGFQVVMTPPHFTRQIKGRPKTDKRDCQWIQRLHKHAMLPSVFQPDDATHTLRDYVRQRANLVRLSAQHVQRMQKALQLMNLKLTGVLGDVTGVTGLKIIRAIVAGERDPQVLARMRDRRCKHTAQQIATALDGRYRPEHVTELRLCLKMWDAYQEAIADLDKVIAEQLKSMKQKTQLPPLPKQTRVRGRKPHDPRFDVREALYLATGVDLTAIEGIDAIHALTLVSELGSDFSKWPTVKHFTSWLGLCPNFKKTGGKVQSSRTRLGKNRAAHALRMAAWSLIRSTSYLGAYLRRQRSRLGCPKAVTAAAHKLARLVYHLMRYGEAYVKRTEAAYAEETRQRQEKQLRRRAKELGFEVRKIEASTPTDEAPTT

SEQ ID NO: 360959 - protein, 339 aa, unidentified
MTNVTVGLDIAKNVFHAVFVTSRGKITRKKQLKRATTLSFFAKLTPQVIAIEACGASNHLARELIKLGHKVKLVPPQHVTSYRRKNKNDYNDAEAIAEAAQRDNMTFVPIKTIDQQDAQMYLRIRQRLIKQRTQLMNQIRGLLLEYGLCMNRGISALRRSVPEFLEDSGNELTWVARELFNELYLEFLSLNDRIEQVESKLKAFAKENYVCQIAQSVVGIGPITALALYAAIGKGTQFKSGRHFSAWCGLVPRQFSTGGKSQLYGITKKGNVVLRALLIHGARSVLQYADRKEDKVSVWATKLKHEKSFNKACVALANKLARIVWAVITHNKPYQLKEA

SEQ ID NO: 360960 - protein, 338 aa, unidentified
MPPRKQPSIVRAGLDVGATELVVALQRDDILESPCTLPNTAAGHRQLLKLLTRRGAPARVCLEATGVYSLNLALALQRAARVEVMVVNPRAIKDFQRARLTRAKTDKVDALGILEFLLRMDFVPWTPPAAAVLSLQQVSRRLLQLREELTREQARLHAVEFTPDRDGLIAADLKANIRHLQKRIKALQQAAAGLAAREPDLAAQVTRLRSVPGIGELSALKLLGELLVLPTDLKAKQWVAHAGLDPRPRQSGASDAPRHISRTGNRHLRLALFMPALVAIQRSPEIRATYEALLARGKKKKVAIVAIMRRLLHAIWGMLHHHQDFNPQLFHDSPLPNT

SEQ ID NO: 360961 - protein, 342 aa, unidentified
MQISTIGLDIAKNVFQVHGIDAAEKVVVRKRLRRRQVLEFFKALPPCLIGMEACATAHYWARELTKLGHRVRLMPAKDVKAYVKRNKNDAADAEAICEAVRRPTMRFVRIKSAEQQGQLMQHRTRDVLIRQRTQIINALRAHLAELGLVAAQGNAGVNELRAIVTDEQDTRLPIAARASVIVLAAQLEALESVIGAIEKRIKMQHRSSEASQRVEAIPGIGVIGATAIVATVTDPTIFRSGRDFAAWIGLVPRQDSTGGKQKLGPISKQGDRYLRRILVVGAIAVLRRAQENPGKYPWLTQLLARRPFKVVAVALANKMARMAWALLAHGGTYRAPELAETA

SEQ ID NO: 360962 - protein, 354 aa, unidentified
METGQKGRIDTRKENIIYVGIDLHKETHTAVMLDCWNQKLGEITFENKPSEFHKLTRKVSRFVTEEKTAVYGLENAYGYGRALAVWLLEKGYTVKDVNTALSYAQRKSVPMYQKNDSYDAEAVALVLINMLDKLPNAVPDDAYWTLSQLVNRRDNICSHQQRLKNQLHEQLCVAYPSYKQFFGDISRATALYFWLNYPSPEHLFGKTAEELAAELRPISHNNCSIKRAEKILELVRTDGQTIREHQESRDAITRSIAGDLEHYREQLEIVETAIVNMLPSFNCTLMTMPGVDVTTAANMLSEIGDINRFPNANKLAKFAGICPINFSSAGKGKDMCRSRETGGYRQFFTFWQFR

SEQ ID NO: 360963 - protein, 444 aa, unidentified
MAGVMIGVGPHKASHTAVAISGAEEQLGQLRVRACAAQAGRLLAWAAAWPERTWAVEGAGGLGHLLAQQLLSAGERVLDVQPKLGARVRLLATGNVNKNDPNDARSVAVAALRSPAVREARADDHAAVLKVWSKRHRDLGSARTQVVCRLHAVLCELVPGGVPKKIIAPHAARLLDSVKPPDAVAAARWELAAALIEDLRRIDAQLRDTRKKLDTAVRASGTTLTGLFGIGPVTAAVIIGEVRDASRFKNRDHFAACNGTAPIEVASGGRKACRLSRRGNRRVNHAIHMAAVTQVRQPHSEGRAYYDKKLAEGKTRKEALRALKRQVSDAVFACLQADARRARARDPGGQQGNGSAASAAGSHPKNRLFGQATPGPSPHPTTPAASQVPGTTGHSPVAANLPPTAPQVQVERLQRSEDERPGGAAPPAAAPGREEGRGTPRPVS

SEQ ID NO: 360964 - protein, 412 aa, unidentified
MSYKVAGIDVHKKVLMVVVAEVEANQTEWSLQRRRFGTTTSELRQLAGWLREQEVAEAVMESTAQYWKPVWYELEPYLRLQLAQAFSNRAPRGRKHDFRDAERLVRRLVANELILSFVPAAEQRAWRTMTRMKCQLAHDRVRLHNQVECLLEEMRIKLSSVLSDLLGASGQRILRALAAGESDATRLAALGDERLHCSQQQLIEALTGKPEAMHQQLLGLYLQRLRLIEEQSQQLNGMIAQAMQAHHDAVVRLAEVPGFGADSAQQVIAEVGAQASTFASAAQLTSWVGTCPGQQESAEQNHSSRSAKGNKFVRRVLTEAAQAAVRTKGSHFQLVFRRLLPRLGYKQALWAIAHRLCRVMWKILHEGVRYIEQGAERDPKARKQRAQTLARYLRKLGYKVEITPLTPATAEL

SEQ ID NO: 360965 - protein, 363 aa, unidentified
MNATAALPIVGVDLAKSVFQLAVADGCWRVVALHRLTRTQFERWFVNRTVGLVVMEACGSAHHWARWLNGLGIEVRLLPAAYLRAYVKRNKTDAADACALLEAARCAEIVPVRVKSIEQQALQGLHRTRSLWMGTRTSRINALRGFCREFGIVIAQGSRLGVEQIGRALADPQAAVPTLIRGTMALLVEEIRLLEVRIAQLERELTALARTSPACTTLLSIPGVGLLTATAMVAATSGEVSHFRDARHFASWFGLTPKEHSSANTRHLGRISKRGDRYLRMLLTHGARSVLRAASVAVRAGKTVDGLRQWALGVEHRSHHNKATCALANKLARICYATLRDHQPYGAARLNTKIARTAFALPA

SEQ ID NO: 360966 - protein, 424 aa, unidentified
MVDNPIRLYVGVDWATEEHAVCSLRPDGSKVGERSFKHSGDGLSDLVKWLSHFCDGQLGDVAVAIEIPHGAVVETLLERGCQVFAVNPKQLDRFRDRFSLAGAKDDRRDAFVLADSLRTDRVCFRKLQVDEPLVIEIREWSRMYEELGQEKVRHTNRLREQLRRYFPQYLELAPDAIGDDWLLKLWKRIPTPAEAKRVRVPTVAKILRENRIRRVAAEQVLQCLRQRPVTVAPGTEQAAVAHIRMVAARLAVTNRQIRDSQATLDALLEKFSEKTADEEASEGDEQPSDAEILRSLPGVGRIVLAVLLAEAGDPLKQRDYQVLRSLSGVAPVTVRSGKSLRVIMRQACHQRLRTACYHWARVATQHDPVSRALYSRLRQRGRSHGRALRGVADRLLLVACAMLRHRTLYDPTRNKPPVAKALPA

SEQ ID NO: 360967 - protein, 364 aa, unidentified
MLYLAIDQHRKQLTVNLRDEAGVVLLRRQVSTRWEPVREFFHVLLEQSAAEGGFVAVVEVCGFNDWLLKLLPECGCREVIVVQPEKQSRHKTDRRDANTLGELLWVNRQRLLAGQKVQGLRRVQIPGAVDQDDRRLTSLRQSSGRELTRTINRIKAILRRHNLEQECPTKGLQTKGARQWLEALKLSAVEQLELNQLVARWDLLQTQQQELETRIKARQTQNPQAVILATLPGSGAYTSLALASRVGNVCRFPHPRSLANYWGLTPGCRNSGEVTQRLGSITKEGSRVARFLLGQMVLHVLRKDGAMRNWYRQIRRRRGSKIARVAVMRRLATIIWHMLRKQEGYQCGGPPRRKLRQVVVSAGG

SEQ ID NO: 360968 - protein, 416 aa, unidentified
MNAAGIDVSSRKSTVAVLRPFGEVVRLPFDVAHNTEGLASLAEQLKALDGETRVVLEHTGRYYEPVAKALHEAGLYVSAVNPLLIKEYGANSLRRVKTDKADAVKIARYALDNWADLRDYTPMDTIRYDLKTLNRQFQLASKQRTASANNLIALLEQSFPGIRKCFDSPVRSDGTQKWVDFIHTFWHVECVRKQSLNAFSERYRKWCKRHGYIFKQGNAVEVYSLSKNAVVLVPKSEVTKVLVQEAANQLTSISRSVETYRAEMERLASTLPEYPVVMAMYGVGKSFGPQLMAEIGDVRRFERKQSLVAFAGIDPMPNQSGDKNVRSNKSSKRGSPYLRKTLFNIMGIYLKCSPQDEPVYQFLDHKRSEGKPFYVYMTAASNKFLRRYYAQVRDYLSTLDDLPPVDMDSTGLKPSD

SEQ ID NO: 360969 - protein, 359 aa, unidentified
MDEITTVGVDLAKEVFAVCMLDARGAVVERKVLRRAAFERWAATLPTCTVAMEACGSAHHWGRYFAARGHTARLIAAEFVGAFRQGGKNDGNDALAIAIAARQPTMRFVAVKTVEQQTILCWHRARAGFNDERTALINRLRGLLAEFGIVIPRSSERLLKALAPLMEDARVPVPLRPLLLEARAQFEALAARIARCDLEVAAHVRANDAAMRVREVLGVGVLTASAFVATVPDPTVFRHGRQLSAWLGLTPRQKSSGGKTRLGDSSRRGDGYLRTLLVQGARSALQVALKTPPDKATRLQRWITALYLRKGYHKTLIAIANKHARILWAMLVRDQHFDPHAWQRHPRAAPSTSASVATA

SEQ ID NO: 360970 - protein, 410 aa, unidentified
MRLFVGDDWAEAHHDVELMDTAGRRLARARLPEGVAGMARLHAMIGEHLGEDDEAEVLVGIETDRGPWVQALLAAGYTVLAVNPLQAARYRDRLRVSGAKSDAADAHMLADMVRTDSHQLRPAARDSAGAEAVKVVARAHKTLIWERTRHAQRLRHALRDYFPAALEAFEDLDAADTLELLARAPDPASAARLTIGQISAALKRARRRDVAGKAARIQQALRAGHLGQPAVVTAAYAATVRSQAAVLTVLNQEIKAMQGQVEAHFGQHPAARIILSQPGLGPILGARVLAEFGDSEGRYASAKARKNYAGTSPITRASGKKKAVLARFVHNDRLIDTLGGQAFAALTASPGARAYYDQLRARDISHRAALRQLANRLVGILHGCLKNGTLYDEATAWGHSENLPQSPVAA

SEQ ID NO: 360971 - protein, 417 aa, unidentified
MEENASARPCRYIALDIHKYYSVVAGVDREGEEILSACRVEHVDLESWSIKHLQPTDRVVIESTTNAWQVYDLLEPLVGEVLVANPIKVKQIACARVKTDIKDSFILARLLASNLVPTVWVPPRHVRELRQLISHRRKLAGVHTQVVNRMHSVAHRHHLNHPKGKDFQPKNTGWQRDESLSRLEKMQLELDMETREHLEKQMERMTQELARMSHEEPWASDMLYLMQVPGCGVVTGMMILAAIGDIARFETPKALASYSGLVPGVEQSGVKLRGKGITKEGRRELRWVMVEVAWRAVKADPHWKKYFEELQRRMHKNQAIVAIARHLLTMVWYVLTRHEPYSHYSPERIAYKYLTWAWALDEEQRQGMTRPQFARYYLMRLGIGSDLKRVALNPKFPYRLASTEEVLALHPELRPPE

SEQ ID NO: 360972 - protein, 350 aa, unidentified
MSDATRWVGIDLHRRRSHIAIVDEHGELTVSRRIVNDRDTFLALLGDPGDGQTHVALEATYGWEWLAELLQEAGHDLHLAHPLRTRAIAATRVKTDAIDARTLAQLLRGGLLPEAYVAPREIRDLRELLRHRATLTRMRSAVKNRVHAILAKHAITSEHPDLFGKGGREFLADLELRQAPRRRLDSLIALIDDFDREINHTTKEIEQRAKGDDRVDVLTQIRGVGRYTAMLIIAEVGDITRFPTARHLCSWAGLTPTVRSSDGKARLGHISRQGSPALRWALVEAAQKITTGSGPLREMFERIAKRRGRKIAKVAIARQILTLSYYGLRDGEIRCLARRSRASAKAKLAA

SEQ ID NO: 360973 - protein, 365 aa, unidentified
MKKVSRIATRMEKPQITVGLDLGDRFSHYCMLNEDGDAIETGRIQTTEEALRRHFEGEPRMRIALECGAHSPWISRLLEQLGHQVIVANTRKIRAITASESKNDKNDAEKLARFALCDPRLLSPIRHRRPERQQDLNLIQARSTLVRARTMIVNTLRGLVKSAGGRLPACSPQGFQARVAASIPPALATAARPLLDQIAALNASIHEMDRGIEQLGNRYPEIRLLRTTPGVGPLIAAAYVLTLDRPDAIRHSRQAGAFLGLRPRQSQSGDSDPQHRISKTGNTYLRSLLVQAAHYVLGRFGPDSELRRWGLQLAGSGGKRGKKRAIVAVARKLAVILHRIWQTGNGWQAFPLASRKPARGEACAA

SEQ ID NO: 360974 - protein, 344 aa, unidentified
MSIVILGVDLGKNACSVVGVDAAGAVVLRRSMRRQTLIDYVAKLPSCVIAMEACCGAHHLGRLFAARGHEIRLMSPEYVRPYVKAQKNDDRDAEAIAEAASRPTMRFVDLKSEEQLDLQTLHRVRSRLVAERTSLINQARAILLERGMIFPAGRRKLEAGLDVLLADGADACLSPRMRQLVGELRAEWQVLDARIETLNGEFVETARHDETMRRLTSIPGIGVLNATALVAAVGNGSGFNKARDLGAWLGLVPRQYSTGGKARLFGITKRGNKYLRTLLIHGARAALPSLSQSDTPIGRWLKAMIERGVHRNVVVVALANKLARIAWAALRKDVRFEHSYPVAA

SEQ ID NO: 360975 - protein, 343 aa, unidentified
MEHYVGLDVSLKRTSICVVDRAGNVLSEATVNSEPEEIARFLTLKAPGAVRIGIEAGPTSLWLCTELRALGFPTICIDARHAKAALSMQINKSDRNDAVGIARIMQCGWYKEVRLKSLDSHAVRALLASRALLVKMKRDLENQIRGLLKIAGLLVGTARGHAFVARVKDLAKHSPELAPPVMPLLIARDTIEKQLAVLDRKVLALARADKQARSFMTIPGVGPITALCFRATIDNPTRFRRSRSVGAYLGLTTRRYASGETDWTGRISKRGDAMLRSYLFEAAGVLLTRVQKWSKLKAWGLKLAKRIGMRKAKVAVARKLAVILHRMWIDGTDFQWSTKEAAA

SEQ ID NO: 360976 - protein, 418 aa, unidentified
MTREEDSRIIRIVHPICCGLDVHKESVSACVVFPDTETGEERYELQVFGTFTDELMRLREWLLMHECPVVAMESTGIYWRPVHNVLEDLFQVVLVNARDVRNVPGRKTDMGDSRWLAGLLRHGLLRGSFIPPMEVRQWRDLTRLRKQYVHTVGDYKKRVHKLFESANIKIDSVVSDLFGATGQNLMNLLIDERNLTLEDVHACVRGKLKGKEEELFRSIRGFFTDHHRFVLKTILLTISHLETQIETLDQQIRSSMKEHEALLNRMKEAAGISNVSARDILAEIGPTLESFPTAPALASWAGLCPGNNESAGKRKSGRSHVRKHHLKTIMIEAAWAAIKKKGSYFKDKYYRLKARRGAKKAIVAIAHRILLGIYHVIKEGVPFRDLGEEYLSRRNASLKLLHLRKQARSLGFDLVAIA

SEQ ID NO: 360977 - protein, 392 aa, unidentified
MFFVGIDIGKNNHVASMMDDTGKVVFKAFSFPNTSDGANALFSKLASYSLNPSDFEIGMEATGHYWLSVYSFLFEKSFLLHVINPIQTDGWRRGTEIRKRKNDIIDSVLIADLIRYGQFVETRLADEDLFSLRTLTRFRTYLVESISDLKRKVVCVLDQVFPEYQSVFSDIFGKTSKEILLQFSSPIDFESVSSETLAELLAQLSRQKVGTAKAEQLKAAASSSFGVTFAKNSFTFQLKTLIEQISFIEKQVKETEAEISGIMGKLESPITTITGIGSVTGAAILSEIGDISKFDSPRKLVAFAGLDATVTQSGEFEAAHNVMSKRGSPYLRKAIFQSALIASFKDPVLSVYYKKKRAEGKHHLTCVGAVARKMCNIIYAVLKNNQPYVPKA

SEQ ID NO: 360978 - protein, 371 aa, unidentified
MMWWTVPAPPAASSDTVIVVNESHQGAAPMQIATIGLDIAKNVFQVHGVDASERVVIRRQLRRRQVLEFFKALPPCLVGMEACATAHYWARELMKLGHLVRLMPAKDVKAYVKRNKNDAADAEAICEAVRRPTMRFVQIKSAEQQGRLMLHRARDLLMRQRTQVINALRAHMAEFGIVAPQGRQGVKELLLIIAGAEDERLPVDAHASLVVLAAEFTAMQTMIGSIEKQIMAHHRSNEASRRLETIPGIGVAGATAIAATVPDPTVFRSGRDFAAWIGLVPREDSTGGKQRLGPISKRGDRYLRRILVVGAVAVLRYARQNPEKYPWLTRLLARKPFKVAAVALANKTARIAWALLAKGGTYRAPALVASA

SEQ ID NO: 360979 - protein, 424 aa, unidentified
MNFIGVDLHKKSITVCVMDQSRKVLARKTIYCKETTEIVAFFRKFRPFKVVVEATASYPWFVELVEPLADEVVLANPKKLRIIAESTKKTDKLDAQILAEFLVLDMIPRAYQPTPRQREHRTLLRHRQYLQGRITSVRSKIHHILSNYNADRKDVFSVNGGPAYFKEVPLSDADRFVIKQLWALWQDVVAQRTALTKKIKAFVAKAPQREEEDRAILMTAPGVGFVTAEVILSELGDIGRFRNAKTVASYAGLVPAVRQSGDKRSKDMRITKEGSGLLRWALVESAWRLVGSSPKWSAMYGRLKERKGSKRAIVAVARKLLCVLYAMLRTRTPYKIVTTKIKASPAPRKRLVIVRTSTAQQTPTTETATMEQTPTTETAKPGTTRQRSAKAPAAKQSATAEKATPRTTRRRSSRASTAEQTITV

SEQ ID NO: 360980 - protein, 427 aa, unidentified
MPYRIAGVDVHKRMLAVVVSDVEIDGEYHFERRQLGSNPAQLRLLAAWLLEQQVEEVVMESTAQYWKPVWAALERYWKPICQKREGASPMSGTLHLAQAQSNRARRGRKNDFADAERLVKRLVAQELTLSFVPDSEQRLWRTVTRTKYQQRRNRVQLQNRLEALLEEAHLKLSSLVSDLLGASARRMLKALADGETDPAALAMLADYRLRAPQELLRDALGACQELNPVYRRLLKAVLEELELIEKQIGQLDQEIADLLRPHQNQVQRLAEIPGLGVDSAQQILAEVGATAAAFPSERNLSSWVGACPGDDETAGVSRSHRSPRGNRQMRRILNQAANAAVKYKGSIFQILYRRYVPRLGHNQTIGVIAHRLCRLIWKILHQGVHYEERGPEVNKKSQQYRAARMIRDLRSLGYRIELPNSQAPVPA

SEQ ID NO: 360981 - protein, 309 aa, unidentified
MLTAEADKRKTKVVVNTAAGVQALLAWCAKHGAQPAQLHAILEPTGLYHEQAATALPQVRVSLVNPAQARDFAKALALRSKNDALDSYVLARYGQTLSPALWHPAPLHARQLRALLTRREALSKDLLRELNRKEKSQFSPSAPVVDGSIDKAIAFLREQIKQIERAIDQHIDNHPDLKQDCELLNSIPAIGPQAGNAILAVMHNRHIDSAQSLAAYLGVVPVQRQSGSSLNSCARLSKAGPSQVRATLYMAALVGTRHNPHIRALYQRLLKAGKSKKAALGAAMRKLVHLCFGVLKNRIPYQPNYAMNG

SEQ ID NO: 360982 - protein, 360 aa, unidentified
MKKVSKQMRKMEAAGKPEMTLGLDMGDRFSHYCLLNANGDVVEEGRMQSTEAALRRHFEGEPPMRIALECGTHSPWVSRLLKALGHQVIVANARKIPAITGSESKNDKNDAEKLARFAAYDPRLLSPLEHRSSERQLDLNLIHARSTLVRARTMIVNALRGLVKSAGGRLPASSTEALPTRAPAAIPSALATVATPLVEQIALLNAQIAGMDKQVEKLAVKYPEISLLRTAPGVGPIVAAAYVLTLDRPDVASNRSAGAFLGLRPAQSQSGDSDPQRRISKTGDRCLRSLLVQSAQYILGRFGPDSELRRWGLKLAATGGKRGKKRAVVAVARKLAVVLHSMWRNGESFQAFPQPVAKAA

SEQ ID NO: 360983 - protein, 324 aa, unidentified
MVAPALGIDVSKDRLDIEIAVCGKPRSKCFGNSPEGWGELMAWLKEQNIKQVHACLEATGRYSLGVALALCDAGHIVSIVNPAQIRDFARTKLGRNKTDGLDAGYIREYAAIFEPRPWTPPSPAMRRLGELQTIRAGIISGLTEWKNRCGSGLANDTVLALARATIAHFADQLATVDKTIAQTIDQDRDLSSKRDLLLTISGVGEVLAGLVLAELPGTDILRSSAQAVAYVGLNPRSHRSGSSIDRPTRISKIGNATLRSALYMPALSAMRHNPVVAALANRLKAQGRLKGKQIAVAAMRKLLVLCFGVLKSGKPFDPALAMPN

SEQ ID NO: 360984 - protein, 429 aa, unidentified
MNYTQNEKIEQVTDATLVIGIDIGSQTHYARAFDNRGRELTKRFFSFGNDIEGFNSFHQWAERIKTENDKTAILIGCEPTGHYWFSLSKYVTDHKMTLVMVNPFSVKKIKELDDNSPKKTDAKDPKTIAKLVIDGRFSIPYMPEGIYAEIRDLEYSRDRIIKQHNISANRIQRWLAIHFPEYLGIYTRFDATSGLAVLEKAPLPKDIISLGVSGIRKIWHDNRMRGRGVTEDRAKTLVEAAHSSIGLDGGPGTRSELYMLLEEHKLWTSQLETVNKALEEAVLKVKNVEKLLAIKGVGIITIAGFIAEVGDIRRFKSPKQIQKYAGLELVENSSGKHKGRSRISKRGRRKLRKILYQVMIPLLASNKEFRQIYDYFVSRVKNPLKRRQAMMAVSCKLIRVFYAVLTKGVDYDRFKMMSDIHHEGNLIAA

SEQ ID NO: 360985 - protein, 351 aa, unidentified
MTVYVGMDVHRKRSQIAVLDAAGEEQRNRNVPNDPVKLVPILGVLPPGTPVAFEAAYGWGWLVELLEELELEPHLVHPSRCKAIAAARLKNDKVDARTLAQLLRADLLPEAWIAPPEIRDLRALLRHRASLVRLATGLKNRVHAVLADRGITPPSSLWATPGRAWLQALELPPTPRAIIEDCCGVLDALATPIARLEGEIGALAKPDPRVQALMALPGVGKLTAMTLVAEIGDIGRFPTARKLCAWAGLTPQVRNSDRTVRHGHITKQGSPWVRWILQEAAQTAKRSPLFADTYGQLARRRGTNIATVAIARRLLARSFHILTQLEAAPAPEKARPGALASLHEPATRPLS

SEQ ID NO: 360986 - protein, 389 aa, unidentified
MPTEADRTETPTAIQTHFAAIFISLELSRSVWLITSLTPGGGERMSKHSVRAGDVAALLARFSELKQKALARTGKTFPIVTIQEAGLDGFWLHRLLEREGIESHVVDPASIATSRRRRRAKTDRIDGEALLRALLAYKRGEPRVCAMVKAPTPEEEDRRRLCRERKVLIAERVEHVNRIKGLLFAQGISDYEPLRRDRRQRLDEVTTGDGRPLPMHLKVQISRELDRLELLLNQIKLTEAERDALLAAQQTASPAPAGRMLLDFKGIGAEFAAVLWLEGLFRSFDNRRQLAAYAGLAPTPWQSGSIDHEQGVSKAGNARLRTTLIQLAWLWLRHQPQSALSRWFRERVKRDGGRMKKTTIVALARKLLVALWKYVSAGVVVEGAVMKAA

SEQ ID NO: 360987 - protein, 408 aa, unidentified
MQRYYLGVDWADKSHQLYAADESGKKIKELEVQQTAEGLAEFGRWLDERRSAGTELWAAIEKPQGRIVDFLLDHGVVVYPVNPKALDRARDRFRMSQSKSDGFDAYVLAEFLRTDHTHLRALEPDSAQGQELKMLTRDHQRLLRQKTRLLNQMTITLKEYYPRALEVFDDLETQIARDFLHAYPTPQGLSRMTRPQWKRFAKGEHHLSEARWQELWEKINKPQITIPDHVVRAKAKLLLALVAQLEVGVKAVHDYSQEVERFFAALAAAKIARTLPGAKSGTTMPTLWAELGDAKNRWNSFRHLQAEAGTVPVTKASGKSRMVQFRFACKKRLRTAMYWFAFNSLMRCEWANKYYRDQRAKGHSKHQALRALGAKWLKIIFVMWRDHKPYDENYHLANIARHAMRQAA

SEQ ID NO: 360988 - protein, 401 aa, unidentified
MQDTQQHGAVDVFVGVDVGKGHHHAVALDRNGKRLYNKALPNDEVKLRSLIAELKTHGRLLFVVDQPSTIGALPVAIARAEGVLVAYLPGLAMRRIADLHAGEAKTDARDAAIIAEAARSMPHTLRSLRLADEQLAELTMLCGFDDDLAAQVTQTSNRIRGLLTQIHPALERVLGPRLDHPAVLDLLERYPSPAALATTSEKTLANRLVKLAPRMGKSLATEIVQALSEQAVIVPGTQAATIVMPRLAQQLAALRKQRDEVAAEVERLVLAHPLWPVLTSMPGVGVRTAARLLTEVAHKAFASAAHLAAYAGLAPVTRRSGSSIRGEHPSRRGNKVLKRALFLSAFAALRDPVSRAYYSRKIQQGKRHNQALIALARRRCDVLFAMLRDGTIYQPKSAPNA

SEQ ID NO: 360989 - protein, 342 aa, unidentified
MQTINDNTDVQTKAVQQSEYKPEQKPEHIFIGIDVSKLTLDVDAYPNPTPRSVANDDVGRAELVRWLHQLQPTLIVVEATGGLQTPMVATLVADGLQVAVVNPRQTRDFARALGILAKTDRVDARMLARFAQAIRPEARPQPAPETVALAGVLARRQQLVEMLTAENNRLLMAHPLVAKTIKQHITWLQKRLAASDADLDNMIRKSPVWQHKAALLESVPGVGRVTATAMLAQLPELGMLSNKQIAGLVGVCPYSRDSGAMRGRRTIWGGRASLRAVLYMAALVGSRYNPVLKAFYQKLVKAGKPKKVALVACMRKLLTILNAIVKHDRSWKFDEVVATKPA

SEQ ID NO: 360990 - protein, 341 aa, unidentified
MQIRSIGIDLGKTTFHLVGLGERGKSVIRKKLSRKQLLAFTANLPPSLVGLEACSGSHFLGRALSQQGHDVRLIPAQFVKPFVKSNKNDYLDAEAIAEAVERENMRFVPIQTDDQLDLQALPRVRERLVSRRTAVINQVRAFLLERGITFRKGPATLRRQMPEILENADAQLSPRMRNLLATLWQEWKQLEEQIDCLSADIETICIADPACQRLRQIPGVGPLVATAVVAAIGNGAAFHKGRDFAAWLGLIPKQYSTGGKAKLLGISKRGNPYLRKMFIHGARAAVLRLKRDGSLLGAWMNGLEARAPRNVLVVAMANKLARITWAVLSSGEPYRAAALAA

SEQ ID NO: 360991 - protein, 372 aa, unidentified
MTSIIYVGMDVHTTNYTLCCYSMEDDRFFVEVQVEPDAKNILKYLARIEKQQSRDCRIVCGYEAGCLGYSLYHQLHAHGIGCVILAPTTMMTKPGKRIKTDRRDARLISKCLAFHTYSPVYIPTEVDDAVKEYIRMRDDANSALTRVKQQIIAFCIRHGKIHDGKSYWTNKHLEWISSLDLGNKILSEVLQEYLIRYYQLREQVDVYDMRINELAQAEPYRQKVEKLGCFRGIAAHTALSFCVEVGDFRRFATAQQFASYLGLVPGECSSGDKQQYTGITKAGNSHLRKLLVETAQVFGRSATKSRKSVALKERQAKCDSLTVAYADKANARLKKKYFKIAMRSKVNIAKTAVAREMACFIWGMMTDNISCA

SEQ ID NO: 360992 - protein, 349 aa, unidentified
MLADQVDYVVGVDTHRDEHVLAVVVAPSGAVVAQRSVRASARGYAQALRFVEQYSSGRRVWAVEGVGHYGAGLARYLSGRGETVLEIGRGPRDEQRLQGKDDQLDAIRAARTALASRTLTLPRAGERREALRLLLLARRSAVNVRREALVQLRSVIVTCPDRLREQLRRLPAGRLVVRCSRFRRSSACTPDELASRLVLRSLARRVEAATAEAAELEGEIHAHVRALAPQLLDEPGIGPIVAAQLIVTWSHHGRVRSEAAFARLAGVAPIPASSGQTTRHRLSRGGDRQLNCALHTVILYRRQHDPTTKDYIARRVAEGKTTRDAVRSLKRYLARHLYRLLQTQEPLMA

SEQ ID NO: 360993 - protein, 314 aa, unidentified
MEKITVGIDVSKDRLDVAVRPSGEDFAVPRTGAGLDDLVARLKVLKPNLIVLEATGGLETVVAATLAGAGLPVAVANPGQIRAFAKAIGQRAKTDPIDAAVIAHFGEATGIVARPLPDQATQQLADLVARRRQIIDMIGAERQRESRANPRIKKSIGRLLKSLERELSSVDRDIDDAVRGSPAWREKEDLLSSVPSVGPAISRTLIAELPELGSLNRKQIAALVGLAPFTRQSGQWRGKSFIGGGRTSVRKALFMGAMVARRHNPVLKAFFERLIAAGKPKKVALIAVARKLLTILNAIVRDGTPWKGTIEAVS

SEQ ID NO: 360994 - protein, 343 aa, unidentified
MKITTIGLDLAKSVFQVHGVDAEGRAVSCKRLRRGQLLDFFKALEPCLVGMEACGGAHHWAREIMALGHEVKLMPPQYVRPYVKRNKTDAADAEAICEAVRRPNMHFVPVKTLEQQSILMLHRGRELLLRQRTMLINALRGHLAELGLVARQGRGGVDDLVQTMAEADEMPSLARRVLDHLAEELREIETRLKEMEKELLAWHKASEASQRLATIPGIGPITATALAATAGDGRAFKSGRQFAAWLGLVPGQHSSGGKPRLGGISKKGDGYLRRLLVHGARTQTRWRDRASPWFQELLGRRPVNVAVTALANKNARIAWALLNRDETFRRTPPNRETAQPIAA

SEQ ID NO: 360995 - protein, 472 aa, unidentified
MIKSVGIDLAGTGEHKVRCMDEGAQLCDGFGFETTPEGLAKLEERIFRDGSNPTVVFEPTGLAWVAVAVYLRARHPDCPLVRTQSRNVAALRKYLRHSSKSDKIDAITLAKMPFVDAERLNEVFLPPAKIYAIQRLARQRRRLESDMTARKTRIISILDGYLPGVRLAFSNLWPLQAKAFLSSQLNPLAVVRDGEKALHRFLTLARSPRKGDSMESHMVYLACKGVATIYDLSHSAGTINDDFFTALQEEIGRELRLMEAEEAESESITQRVKDLYLELHPSDNLSTIPGVGEQTAPVFLAVVGDPARFRSQSAFANFNGVVPDSRQSSQMEAKGLRMTKAGPAIMKWALFQSGQIGRRYDPQLAWLYYREMVHNGKNHKQAMGAVMSHIGARILAVLREDKPYELRDVQGKPITWEDARKLILLKYQVPEEIKRDRRRRKTLGDSAKKPPRKRREMVAHRTHEATKFLNPQ

SEQ ID NO: 360996 - protein, 430 aa, unidentified
MIAAEIERCAGIDVGKERLAVCIMVGPLAEEPRVEYREFGAINAELERLRQWLEAEGVTHVVMESTGSYWKPVFNMLEDKVRVYLARSQDVKNRKGHKTDKKDSWWLAHLLRHAMIRPSFVPPRGLRELRDLTRRRRKMIGVASSERNRVDKVLQDANIKLSNALSDIFGVSGQLMLEALLEGKAMPEQIAQFAQRSAKRKIPEIIGALEGHRMNDHHRQMIRYSLEHLRFLEEHIIELDEQIVAKIQKLGYVPQWELLQTVPGMKENSSASVLAEIGPDMGQFPSEKNLSSWAGVCPGNNRSAGKDKGGKTTKGNRWLRGALTECAWGVSGKKNCFLKDKFWRLATKKKRRPPATMAIAHTLLVLSYQVLKTGQPYQERGLPVMDEKQRNRLVCHHVRRLGKLGIRVHSLPIDKDRTTPKSKKTAAKVN

SEQ ID NO: 360997 - protein, 366 aa, unidentified
MGWMAPLRHRGAKLVFSNNHQEKEPSMSEITTIGLDLAKHVFQVHGVDAEGTTVVRKRLRRGQVLAFFSRIPRCVVGLEACATAHYWARELGALGHEVRLMPAQYVKAYIKRNKHDAADAEAICEAVSRPTMRFVPVKTAEQQATQLLHRGREQLVRQRTMLANALRAHLAEFGLVAAQGLRNVGELIAIVRDDSDKRLPAVARQVLQVLANQIEQTEAAIAALERQLLAWHKANAVSQRLASIPGIGPIIATAIATTVADPNVFRSGREFAAWLGLVPRQNSTGGKTRLGGITKRGNRYLRRLLINGASANLLRSKATKADPWVIGLRRRRPPLVVAVALANKTARIAWAVMLREREYQPRAVAT

SEQ ID NO: 360998 - protein, 313 aa, unidentified
MEQNSFVGIDVSKGALDVAVVPSEDVQHFENDDGGCRSLVTWLTALQPKLIVMESTGGLEMLITSMLSSAGLPAVIVNPRQVRNFAKAMGKLAKTDTIDSLVIARFAQAIKPEIRPLKDEQTLELKALITRRKQLIEMLVAEQNRLSSSHHTVKVRITVNINWLKKQIEDIDKEIANTITKSDIWREKEELLTSVKGVGPVLASSLICLLPELGTLCRKKISALVGVCPYNRDSGHYRGKRRISGGRVDVRNVLYMATLAATRFNPIIKAYYEHLKEAGKMPKVAIVACMRKLLTILNAMLKANQKWDPLRGQ

SEQ ID NO: 360999 - protein, 406 aa, unidentified
MKQIVSVGIDVSKGKSTVCAMIHPNTIIKESFEVLHTVEEMSMLADYIGSLDGEIRIVMESTGHYHLPVAQFLYQKGFFICVENAYIIRQFSRIMLHGAKTDPLDAKKLAKYGLAYWSELKPYKFHPSCYTELSLLSKQYQTYIKLLIAAKQNVIHLMDEMLPGFKEALDTASSVQFSKVKYVDFAKEFYHVDMIKSMGKEIFRENYKQWCKEKGYRFQSEKADELFHLAEDGIPTLPTEFPSTRLCMEVATEQVSQLGYALEQILSQMQNLAKTLPEYQTIRQMGGMGEKLCVRFIADIGDVRRFHNGKALVAYAGIDAPPYQSGQYTGTKRRISKRGNSALRKTGYEVMKSLKSHPPKTDTRVYDFIIKKENEGKSKKQAKIAGLNKFLQIYYARVMEIYKNIA

SEQ ID NO: 361000 - protein, 357 aa, unidentified
MTQSNRISFKGQNIYIGIDVHLKSWSVTILSETSVLKRMSQGVDPDALHRFLISHYPEAEYYSVYEAGFCGFWIHDRLMELGIHNIVVKPADVPTMSSEKLRKTDAVDSRKLAVSLLAKQLKGIYVPDSETLEIRSLIRLKNSITKDMTRQKNRIKSQLRYLGIDIPAEYLEPHSNWSKRFLNWLKQVAMRTLSGRQALDILIMQFETLRKQKAEMTRRLRALSHTERFEETLELLMTVPGIGQTTGLALMAEIVDITRFANAEQLAAYIGMIPMCHSSGEHKGVGDITLRKHAILRSNIIEAAWVAIRKDEAMQLCYLNNCKRMVASKAIVKVARKLVNRIYFVLKRHQPYVNAVA

SEQ ID NO: 361001 - protein, 363 aa, unidentified
MIVIGTDTHKKSHTCAAVFAGTGQLAGELTASARKVGFAELLDWGRGLDPGRIWAIEDCRHVSGSFERFLVASGERVVRVAPKIMGESRRGERTRGKSDPIDALAVARAALREGPETLPAAHLDEAALELKLLLDHREDLVKARSEDQQRLRWHLHDLWPEMELPAGCLDRIVWLERVARKLLRIEQGARVRVSRELVRAIRERTKRAAELEREIAAIVRARAPQLLALPGCGVLTAAKLIAETAGVARFASDAKLARLAGVAPIPASSGNRTRHRLDRGGNRQLNCAVHRIAVTQSRVHAPAKDYLARKRAEGKTTREALRCLKRHLIRRVWRLLNDSEVDRSMTTVDSQRATPSPQFAAAA

SEQ ID NO: 361002 - protein, 419 aa, unidentified
MTQRDDNRIIEIVHPICCGLDIHKNKISACIIFRETCDPVRCEIKEFGTFTDDLQRLRSWLLAHECPIVAMESTGIYWRPVHNVLEGTVDVILVNARDIKNVPGRKTDIGDSKWLAGLLQHGLLRGSFIPVKAVRQWRDLTRLRRKYVQTLADYKKRTQKLFESSNIKIDSVVSDLFGVTGRNLMNLLLSDARQLSIVDIEGCIRGKLKGKEHELYRSIQGFFSDHHRFILQRLLNTVAMLEEEIAGFNHQIQQLMEDQNPLLGRMKKAAGISDVSARDILAEIGPDMSSFPTGASIVSWSGLCPGNNESAGKRKSGRNPTRKHALKTIMVEVAWAAIKKKDSYFKDKYYRLKARRGAKRAIVAVAHRILLGIYHVIKDGVEFRDLGADYLTERKKTQKISYLRKQAQLIGYDLVAQTA

SEQ ID NO: 361003 - protein, 339 aa, unidentified
MNILKQTVGIDVSYKSFNARFGTINTQQEINLSASRSFQNSHAGFKLFLRWLKKYILSDDIPLAFVMEATGVYYEQLAHFLFQQWYQVAVILPNKIGNYAKSLESKSKTDPLDAAVITRFGLERQFHLWTPPSETMKVLRDLYREYQSLKTNSMQIKNQLHALKSSFKPHRESFKRKTLHLKFLQRQIGHIQKELRALVKTEPDLAQRLKNIKTAKGLGDIAILTVLAETRCFELVTKLKQLASYAGFDFVFNDSGLNKGRTPISKKGNTFIRKVLFMPALSACRANPHLKQLYQRLVAKGKNKKLAIIAVARTLLLLIYTLWKSHSPYNPDFNSVQHV

SEQ ID NO: 361004 - protein, 335 aa, unidentified
MTESSDYESVQVFIGVDVGKDTHHAVAINRSGKRLFDKALPNDENKLRSLISDLKQHGQILLVVDQPATIGALPVAVARSEGVLVGYLPGLAMRRIADLHAGEAKTDARDAAIIAEAARTLPHALRTLKLADEQIAELSMLCGFDDDLAAQTTQASNRIRGLLTQIHPALERVLGSRLDHPAVLDLLQRYPSPEKLASLGEKKLAARLCKLAPRLGKRLAADIAQALAEQTVVVPGTNAAAVVLPRLALQLITLRKQRDEVALAVEQRVLAHPLYPVLTSMPGVGVRTAARLLTEVACRAFASAAHLAAYAGFAPVTRRSGSSIRGEHPSRRGTG

SEQ ID NO: 361005 - protein, 318 aa, unidentified
MNNPTFQSINVGVDTGKTQLDIFIRPVGLFFSVSNDAKGIEEAITTIKKHKPERIVIEATGRLEVPFVLACSKAKLPYVVANPIHVRRFAGAIGQIAKTDKLDAQLIALYSERIEPPLSTLKPENIRLMSDLVIRRNQLLSMQTMEKNRLQILPKELAMTIKPILTAFKNQIQKIEEKIIKLIESCDEYKHKNEILQSVPGIGKVAAASLISNLPELGSISNKKASALVGVAPINRDSGCYKGHRKIKGGRKQVRTVLYMAMMSAMQCNPVFKSTYSRLVAEGKPKKLAIIACVRKMVVILNSMVRDGVMWDKNHANN

SEQ ID NO: 361006 - protein, 381 aa, unidentified
MKKDSIAKLQGTESQKRRMAAKQRLTVGLDLGDRSSRYCILNEAGGKAMEDQLPTTKAGLNSIFAKMAPCRIALEVGTHSPWVSRQLAAMGHEVIVANPRKVRLITQSVKKNDRMDAEQLARLARVDPKLLAPIRHRGPEAQGDLAVIRARAELVDCRTALINTARGLAKPMGERLKSCDADYVKESLADGLSEATQNAIRPLLKSVEEITKQIGVYDKKIQEIEKRYPETKVLKQVNGVGTLIALTFILTLEDAERFAHSREVGPYLGLTRKLRDSGESQPELGISKAGDMLLRRLLVQAAHCILRDGAPDSDLKVWGLTKVQAGAGKKGSKRRKKKAAVAVARKLAVLLHRLWVTGEVYDPQYNRKAVEAAKGKGKAAA

SEQ ID NO: 361007 - protein, 364 aa, unidentified
MKKKSAQTKQSKKAQTAPKRWTVGIDLGDEWSRYCVVDEEGEMIEEGRLKTTSGAFRKHFAESEPMRIAIEAGTHSLWVSEHLRQFGHEALVANAREIRAITHSDSKCDQFDAEKLARYARVDPKILHPIAHRSVEMQCSLNIIRARDVLVRMRTIAVNAVRGLVKPCGHRLPLCSTESFARRCRTDLPANLLDIVEPLLKQIEVAGEQITLYDRRIEELADGTYRETKALRQIPGVGPLTALTYVLTLADKRRFSQSRDVGCYLGFRPRRSQSGDSDPQLGITKAGNGYLRKLLVQSAHYVLGHYGPDSALRQWGQRICERGGKNAKKRAIVAVARKLSVLLHRLWVTQAEYIPFYEVEKQAA

SEQ ID NO: 361008 - protein, 379 aa, unidentified
MNGPIYEQSVIVGVDAHKYSHTAAAMDAWGQEKGRLNFTNDSLPDCLSWLKTLGRREDVIVAVEDANSYGCHLVSALAEQQFAVRSVPAVLTERDRQHSTQRDKSDFRDAKRVAKVILAKYEETLPVIASLATSAELAAATELNLLLNERRDVVKQGTAIKNQLHSLLHQYYGDHYADGFSKAFNKQAIIFYQANLAQAISANSSSADQAGKALIAESILRRIRRLKLLQEQSAAILKQITKIGKTSEQVAALHENIHGCGLLTAGAIMAELVTIRRFGGRDKLAKYAGIAPTLKSSGSHHRLYTNPFGNRLLNKALHTIALSQIAVKGDDRGKIYYRKKLKEGKTKLWALRCLKRRLINLVFRVLKQAEMGSAETAIS

SEQ ID NO: 361009 - protein, 361 aa, unidentified
MRSRESQDAGPAPPVHPEQLLGLDTPVFARLGDAGGSRGRKGAIVEPEKVFVGIDVGKYHVEIALSDRGEVSRFTNDDSGIGEILGLLEGRSVGLVVLEASGGYERQLLASLLGAGIPAVAVNPRQARDFAKALGRLEKTDAVDARMLSQFARSVRPPVRPRVSEELTEMQDWLTRRRQLVEMLVAEKNRSQHAKQGVLKDIREHIDWLKKRIRDSEKELGEMLKKAPEWNAEVEVLDSIKGVGRVMAIMLLVAVPELGTLNRKQIAKLVGVAPLCCDSGTLRGKRTCWGGRADVRACLYMAALVAARFNATIQAFYRRLIAVGKPKKLALVACMRKLLTILNARIRDHRAALSGPRAALS

SEQ ID NO: 361010 - protein, 344 aa, unidentified
MNEVITIGVDLAKNVFQVHGVDAEGAVIVRRQLRRSRMLPFFKKLPPCLVGMEACATAHHWARQLMALGHEVKLMPPHYVKPYVKRGKNDAADAEAICEAVTRPSMRFVSVKSTEQQSVLMLHRSHELLVRQRTMLINAMRSHMAEFGIVAPVGVPQVKKLLRIIADTDDARLPPPARTCMESLARQFLSLNQEIYAAKKKIHSWHRSNEVSCRLETIPGLGPISSSAMAASVTDPDVFKNGRELAAWIGLVPWQNATGGKQRLGKISKQGDQYLRWLLVAGAMSVIRQAKRRGTSNMPWLDDIIVRKPAKVAAVALANKNARIVWALMKHGGTYQKPVIVPAA

SEQ ID NO: 361011 - protein, 343 aa, unidentified
MESIYYIGLDVHKKSIAYCIKTVTGKIVCQGMVKAERRALHQWLVDLPGPWVGAMEATMFTGWVYDFLKPYAVELKVAHPAMLKAITAAKKKNDRADAEKLADLLRVNLLPECTMMSEELRELRRILRYRNMIVRTASKMKNKISGLLMEVGAVYDKRKLHGKKYFGQLLERVEDVPESVKDLLKMSRSNMELFEAVQKKLLKTLREDSRISKRVELLRSISGVGEVMALTWVLEIGDPERFSNSRQAISYCGLCSAQHESAGKEHRGPISKKRNKYLQSMLIEAANLAPRWNPQLAMLHEKELTRGNRNRATLAIARKLVIYMLAVDRRGKPFITEKESLVA

SEQ ID NO: 361012 - protein, 364 aa, unidentified
MKRKVYVGMDVHKETIQIAYLTSNTKEMVKEQQIKHNEVHIKKFINKLKTEWNEIHCCYEAVVTGYPLYRYLKSLGVNCILVAPGKIPRQSSDKIKTDKRDAIKLARLLRSGDLESIHVPSEEDEAVRDYLRSRDSLRLDLGRNRQRLMKFLLRKGNVYSTTKYWTVSHYKWLNNLHFENEILHETFNDYYSRVRVQEENLKAMDQKIQEIAKSEAFRERVGILRCFRGVDYLTAMFLLSEVNDFRRFKTAGSFMSFLGLVPGEYSSGSKRKQTGITKTGSPRLRRILTEAAWQHRFPGTGSKIVAARRTGQPALVVALAEKASLRLHKKFRNLQLRGKTPQVMITAVSRELSGFLWAAMNLVA

SEQ ID NO: 361013 - protein, 343 aa, unidentified
MDHFAGLDVSVKETSVCIVDGTGRIVKELRVASEPDALLRVLGNPAYRFKRIGLEAGPLSQWLFSALAEAGLPVICVETRHMRAVLKAQINKTDRNDARGMAQMMRAGLYRPVHVKTLRSQKLRMLLTHRKLLQSKAIAIDNDLRGTLRNFGLKVGVVGTVKFEARIKELVESFPDLAELVEPLLIVRRTLREQIGILHRRLLAIVRNDDVCRRLMTIPGVGPVVALTYRATVDVPARFRNSKAVGAVFGLTPSRYQSGEIDRPGAISRCGDEMMRAMLYEAAHIMLVRLAKWSWLKAWAMKIARHRGMKKAIVALARRLAVIMHRIWVDGTEFRWSREVTAA

SEQ ID NO: 361014 - protein, 348 aa, unidentified
MAMLADSIDLVIGVDTHKETHTAALVSPTGAVLDTLEASTDRAGLGRLLAFGHSRPADRRLWVLEGTGSYGAGLMTLLTAAGELVAEIDRPRRPARRHGAKSDPLDAIRAAREALGREHLGVPRRRGAREALRVLLRTREAAVGERRRALNQLHALVVSAPDELRAGLRALRGASLVSRCAGLRDVAGRTPELAATVRAIRLTARRILRATAEADELEADLRTLIGSMAPDLLTERGIGPLSAAWLVVAWSHPGRVRSEAAFAMLAGAAPIPASSGQTVRHRLNRSGDRILNRAIHTIVVSRLRYDPTTQAYAARRRAEGRTDREIIRCLKRFVARSLYRRLERRVTS

SEQ ID NO: 361015 - protein, 447 aa, unidentified
MADERDGFPVLRRDVAGIDVGSEEHWVCAPARTGDGREVERFPATTPGLERLIAWLQDRGVTAVALESTGVYWIVPHEMLEHVGFEVRLVDTRELRRVPGRPKSDWRDCEWLQRLFSVGLLRGAFRPPDTVCLLRTLVRDRATLIAERADWLRRMQKALDQMNVRVHRAVADLDGATGIAIVRAIVGGERDPQRLAALRDYRCRKTEAEIAEQLTGHWRTDHLFSLQQGLKMYDAITDRVADYEREILQQLAAMAQTDDTSPPPTNVNKARMIKNRGEEPLRQALYRISGVDLTTIDALGVETVNVILSEYGPDLSRFPTEKQFIAHLRLAPHQAISGGKPVRNQKKPHRRSARVTMALRMAATSLRRSRSALGAYYRRIAQRLGADVAVFATARKLAQWVYRLLRWGQPYVDEGAAVYEKRYRQARIKGLAANAKNLGYALVLVEA

SEQ ID NO: 361016 - protein, 313 aa, unidentified
MNENPCYVGIDVSKESLEVALRPSGKQQTFQNDDEGVARLVHLLGAAAPALIVMEATGKYELRVARALAEEGLLFNIINPRQSRAFAKATGILAKTDRIDALMLARFAEVLQPEARSLKTEETEALGELVTRRRQVVEMITAEKNRQGTASKRVRRDIQAHIRWLEKRLKDLNDEIDDLIRKSPLWREKDKLLQSVTGVGPVLVSTLLGTLPELGMLNRKQIAALVGVAPFNRESGRHRGKRTILGGRGPVRSVLYMGTLAAIRANAVIRAFYQRLVQAGKPRKVAITACMRKLLVILNTMLKNGTCWKYQPA

SEQ ID NO: 361017 - protein, 427 aa, unidentified
MSGIETGGQEPAFAAFVGIDWADQKHVWCLQGQHSTKRESGELEHTPEAVEAWVAQLCQRFGNRPIAVALEQSRGSLVFMLTKYEPLHLFPVPSTMSASMRKALYPSGSKDDPRDADVLLDLLLQHRNKLRRLSPDTEATRRIQNLVEERRKLVDEKTEHTNRLASHLKIYFPQMLKWFEHLDTELVCALLERWPTLEDLQKVPPSKLRKFFGKHHCRNQELTEWRILAIRQSIPAIRDRAVIEAKSAAVKVIVQLIRILLEGIADLDERIEEAAAAHPDFFIFKSLPGAGPALAPRLLAAFGSQRERYRNAGEVQTYSGIAPVMEKSGKKQWIHFRWACPKFLRQSFHEWAGHSIGYSVWARAYYRQQRGKGVDHHGAVRALAFKWIRIVFRCWKERVAYDESKYLAALTRRGSPLVAVVAIAKAL

SEQ ID NO: 361018 - protein, 355 aa, unidentified
MQSNKISFKGQNIYVGIDVHLKTWHVTTLTESGYKYSFAQHADAKELFDRLNKKFPEAYYKSAYETGFCGFSVHYALTELGFENIVVNPADIPTTGKEKAMKTDAVDSEKIAWSLKRGELTGIYIKDKRYMDDTNLIRLRQRFIRDLSRQKNRTKHLLYTQGVVYPERFSKKGTHWSQNFMKWLREDVELLSEEKRTLMLLCNQVDHIRKDILAITREIRRLSATDRYKENFSLLSSVPGFGLITSMSMLTELDNNPFRFPNERKFVAILGLIPTSHDSGEKKSNGVKTFRGNKQIGPLIVEASWVAIHRDYQLGCYYTNCCQSMNPQRAIVKVARKLACKAYAVMKTKKKYVLS

SEQ ID NO: 361019 - protein, 472 aa, unidentified
METSDFKFSVDITQHVYFCGLDVHKQECAAVVYSCDDSLHEFTKECLFNTDTTGFTQFWNFVKKYRPHSFVMEATGIFHHIVVRFLEAKQLEVDWSFEIVVVNPSDAANLPGHPKNDKIDATNLARYLAKGLLISGKIPIGVLEDLKAIFRMGVKIERQRTALKNRIIKVLDRTGIRPNGFDLNLEWTRAVLVQLIQNKKTWGENLGGIENSSHPLHEYRTFILKAMPRLSPYAPLSLSPAQNMLIRQNLVELDFQTARKILLAVEVDKILIARPGLRESAALLNSIPGISAYGAVWILAEIGDIKHFYSPRAFQSYCGCSPNPKATAHKVFSTHINRHSNAFLRMIFTQGAQVVCNLLKKESELKSYAKKILAKKGTYSAKLAYSIIAAKLCKISYAILKTRKPFKDSTYAKMSGLKKGGFTVTELKQIRRARNNLKRVAELNNIGLLSSEALDLAKGLDEVLGKKDMGEK

SEQ ID NO: 361020 - protein, 346 aa, unidentified
MAAFAALDVSKKSTSIHIVDEKGVCLWRGKTLTDPDALAEALSPFSDDLALVGLETGSWTTWLWHELTERGFPMVCMDARQAHAALSVTINKTDANDAQGLAHLLRTGLFREVRVKGWEDMQKRTLLRARSTMLRCVLDLANAIRGALRTFGISLPAGTGNGGAKTFERRVVACLTARADLAIIIVPLLEAWRAGRTQVARHERAIRAIVRSDPRCQLMMTVPGVGYLTAVGFVGAIGDPETFRSGRTAAAWIGLTPRRYQSGTINQQGRISRQGDKLLRAYLYEAAAHILTRSSKDSALRRWGLKLRDRIGFKRANVAVARKLAVVLHAMWRSGRPFEAEGCATG

SEQ ID NO: 361021 - protein, 412 aa, unidentified
MLKIVYPICCGIDVHKKFIVACIAATDNKGITSYKSSRFSTFTSGLRKLSEWLYSNSCTEICMESTGKYWIPVFNVLEVTCKITLAHPKYVKAIRGKKTDKKDAKWIADLFKHDLVAGSFMPPLAIRQLRDLMRYRFKLTNFKSSEKNRLQNCLTVSNIQLSNVVSDTFGKSSMKIIDHLLENPNDKDFDFVPFLHASMLNKVDDIRLAIDGNFTPEQLQKMNIILQHYDELEKCKLNLESLILSLSELYAQECSLVSTVPGIKNPFSAISIISEIGADMSVFPTAKHLCSWAGLTPQNDESAGKKKSVRISRAGVYIKPLLVQCANAVVISEKHPEIRGRYLSIKKRRGHKRAVIAIARMMLTAIYHILKKREPYNAELYKKTETIPTSKVITVQQAVFYAKSHGFSVVKD

SEQ ID NO: 361022 - protein, 377 aa, unidentified
MKAITLYLGLDVHKDSITIAIAEPGPKGEIRLFGTITNDVDRLEKALSRIRKAHPGALLEVAYEAGPCGFVIARRLKQLKVPCLVAAPSLIPRQPGSPFKTDKRDACAIARLLRAGELTAVYVPEATDEAIRDLCRARTDAVDDHRRCRHRLKAFLLRHGYRYQGKANWSQPHMRYLRELVLPHPTMKAILEEYLQGIDAAHQRVQRIEASMLSLLQSWRLQPAVEALMAFRGFQLVAAMITVSELGDIHRFEHPRQLMTYLGLVPTESSSGPRQRQGAISRCGNGHQRWLLTECAEHYALPPKISKELSRRQQAQPDSVRALSWKAQHRLHLRFIKLLGRRLQRNKAKVAIARELCGFIWALLRAQDCYKQPGNAT

SEQ ID NO: 361023 - protein, 467 aa, unidentified
MDCIAIGIDVSKGRADIAIINQSGTILKGSGGYDDTRADHDRLSAVLRELRREHPDTRLIAGVEATGGYERSWVGFFRREKHAGRAVFLHRLNPLAVKRFLEADLHRKIDDARAAQGIARYLFERRREEDPHTIPLDGRVVFYRNIRGLIDVRATLRQRYQALLSSSHPELVQYCDSGLPAWLLLVCRQYPTSSLLARSHLTTLAAIPHVGAAKAERLREAAKTSTASLDDSGTAAAMMLLVEELLHLDARIESLQQSLITMMQDDPRVARIDSIPGIGPWSAVSLALEIGDPERFADVRQLIAWAGLDPRVDESGDKSTTRGISHRGNAYLRALLFPLMMAAMQHHPIVGDFIRKKIGEGKPKKVAMIAGAAKLLRIIFALLVSKKNYDTHHEATRATAAAQQRQQARQTTLTTSTTSVVTATDTPTPAKDLTAPISGAERRRRKERSAQEKKRPPGCPTHARSSL

SEQ ID NO: 361024 - protein, 342 aa, unidentified
MYYIGLDVHKKTISYCLKDASGQVHRKGTIGATRNELDWWMKTLPQPWTVAMEATIFTGWIYDHLLPHAAQVKVAHPVMLRAIALAKKKNDRIDAGKIADCLRCDFLPECHMASTEIRDRRRSLRYRHLLVRQMVQMKNRISGLLLETGVSHNKKRLHKVGYFRELISKNEEMPESIRPLLRLSRETIVRCQKTEYALVSSLERDPLLAERLKRLRTVPGVGPITALTWALEIGDVSRFRSIKQAISYCGLCGDEKTSADKVLRTPLSKQRNKHIQSGLIEAAKLAPRQSHELALLHEREKQKGNANRATLAVARKMVAYLLAVDRRQRDFVPAESHSTAAA

SEQ ID NO: 361025 - protein, 395 aa, unidentified
MQVMHPICCGIDVHQKSIVCCILDGPLTSNEPKKYQTTFGTTTKELKAALDWILEHQVTHVFFESTGQYWIPLFNIFSDSDLELVLANPQHIKNVPGRKTDVKDAEWIAQLGRCGLINQSYIPSQEVLQLRYLTRYRLSVKQRLTQIKNHIHVILQRANIKITSYLSDIFSKTGQALLTLFIDGEVINEDNVESCIHGRIKASTKQLIEAMEGKLSTVDRFLIKECMEEYKLQKKISDELNKEINEYILEHFPEEYQLLLTIPGISDNCCATILAEIGPNVDDFKTDKKLASWAGMCPGSNESAGVKKSSHTTQGNKYLKQALVMSVLSVQRAKEETFSLFYQRISSRGSKMKAIIACGHKMLRIIYKILQSHQPYNSQKALGLRQQTNALSLTI

SEQ ID NO: 361026 - protein, 372 aa, unidentified
MGRTSHQLSIGVDLHKTQFTVCGLKADGEILHEGIYPCTHEGYDAFASWIHEAQEKHGLSAVLVVEATGNARYFKNFMENEGFRVKIINTLKFKVVVESVNKTDKRDARVIAAFLAKDFIPESHLCSQYEEDLRRLLKTRSQLVKTIVGLKNNIHGMMLSYGIVTKPSQFQSKKDRQQLRNELEAHTEFNVAAAGVLDCILKVLEDTSASLKEVEQELERYVEKDEAVAILRTIPGVGLVTSSTIRTWTADIDRFDRYKEYASYCGLVPYLKESNDVTYLGHITKRGPKELRAAMVQVVMGMLRVREKNPDWIFYQRYGYWKSKKSSGKAIIACARKMSRVIYCMLKNKEGFNPEKMKPERNYSRERLSKAS

SEQ ID NO: 361027 - protein, 426 aa, unidentified
MRKLDTMQIQLMVESFMYNAVGIDASKFKSTVTVIQPAGIVIRKPFDVLHTSNELNTLVTYLKSLEGETRAVIECTGRYHEPVVKSLEDAGIFISAVNPKLIKGQKQNSLRKVKSDPADARKIARYALDNWAELRQYSSMDTIREQLKTLNSQFDFFMKQKVVAKANLISLLDNTYPGVNKLFDSPARKDGSEKWGDYAYSFWHVDCVRKIGLKAFTERYEAFCKKHHYNFQKGKPAELFEAAKQLVAVFPKEKSYKLLIHQSIQQLNLASEHIEILRKEMNQLASTLPEYDTVMSIYGVGETYGPQLIAEIGDVSRFTHREAITAFAGVNPGVNESGQFRQRSNRASKNGSTKLRKTLFQIMTTYLQNKPVNEPVYQFLDRKRAEGKPYLVYMTAGANKFLRIYYGKVKECLHNLEQDSLPPEES

SEQ ID NO: 361028 - protein, 352 aa, unidentified
MKKTLFVGIDFAKANFVASALLGEDPDPVCLPKSFSNDDKGAKALVSWIVKLLPETCSLSDVLVCGEHTGSYSLLLPRRLFDAGIDCWLENAVCIKNGSGRIVREKSDSADATMIAEYARTFYQKRVRLFVPESPVLSELRECNDIRRRLVKERAGLMCKKHDAEVRLKAKPGSKAIVMNIKILDRQLAYIKEQIAKVDRQMYSLIRSEKKLSRIYDIIVSITGVGPVTAIALIVLTSGFTTFGSKRSLACFLGIAPFRSESGTSIQNGSHRSRQADSYYSGLLYMVAVSAMIWNPEIALYRERLLKKGKPRLVIINNIKNKLITIIWAMVKNDTLYDPDHHLKLAQQYQTA

SEQ ID NO: 361029 - protein, 331 aa, unidentified
MALELLAIDLGKRAFHIYGIDTDGVILSRKVSRAKLAEVVGDLEPTAIAMEACASAHHWARCWLAASRQVRLINPRFVKPFVKGSKNDAVDAEAIFEAAMRPTMRFVPVKSTDQRDLQSLHRARDRLICQRTALINHTRGLLAEYGVVLPQGPRRFMEQAPTAIAGADLSDLARGELMDQLDDLDRRIQKLDAMIVTLCRTNETCRRLTKLPGVGPIVATAIVAAVNDGRQFRSGREMAAWIGLVPRQYTTGGKPRLGGIGRRANHYLRRQLIHGARAIVSRSDKHDDRQSTWLKALVARRGFNRTIVALANKTARIAWVLLSRKQEYAAP

SEQ ID NO: 361030 - protein, 434 aa, unidentified
MGKKRAYRSTAVKKVVLQKVVESAPEGDVHVGLDVGKHEVFAVVRWADGTFERPWKASQPRQIVPLVRLLQVLAEGRAVTVAMESTGTYGDALRQALSDAGLCVHRVSAKAAHDYAEIFDGVPSKHDAKDAAVIAELAALGKSWPWPFEPKKEHDAELEYWVDWLDAQQSIQMEWLGRLEAMLARHWPEVTSLLKLNSVTLLEMLAHYGGPVKVRADQQASWRLARWGGRMLKKQKIDAVVDSAATTVGVRQNSQDIQRIRRYADMALVAYREMQQAKRRLRVLAQDNPVIQRQAKMVGLATACVLWATMGAPKNYHCGEAYRKAMGLNLKERSSGKHKGKLKISKRGPAIARRWLYFAAMRWCQQPEVRRWYEAKKAKDQDRGTGALIGIMRKLVLALYRVGVYDEPFEAWRLFPGRSLPRRSRVLQSAMAPG

SEQ ID NO: 361031 - protein, 349 aa, unidentified
MKILAIDLGKYKSVACNYVTATGTAKFATVVTHVLELDRLLSQESPDLVVIETCSIACWVHDLCCQRGVKCQVANPSSEAWKWKNVKRKTDRDDALKLAQLAALEQLPTVHVPAPETRQRRALLKYRQSLITRRVAIQNHLRAIAQRQGILLDRGSRAWTAAGFEVIQQLAKPLEQCSADELWRGEAALELQALKAVTKLLREVERKLEAFAASDESVKLLRSIPGVGRCTAEVVVAYLDNPQRFENGRQVSAYAGLVPKQFQSGETDRRGRISRRGPSLLRKMLVEAGWILLRYNSWAQRLMLRLSRGQRTRRKQAIVALARKLLVRCWAMLRDSTEWREPPPATATA

SEQ ID NO: 361032 - protein, 410 aa, unidentified
MEVLYPRCAGLDVHKKTVVACVRIQQGVAIEQEVRTFETTTSGLLDLSAWLSDKGCTLAAMEATGVYWKPVWHILADGEFELLLANAAHVKNVPGRKTDVNDATWLSELAAHGLIRGSFVPDRPTQELRSLLRTRKQLVRERSSHTQRLQKTLEDANIKLDSVISDILGVSGRTMIEAMIAGQTDPAVLASLANRRIRATQAELREALRGRPTAHHRFLLQLHLEQVDAIDRAIARIDQEVETDLGSFREATQIVRTIPGFDDLSAQSVLSEIGIDMSRYPSDAHLLSWACMCPRNDESAGKRRSTRMRKGSRWLKATLFSCAWAAARTKGSYFQAQFHRIKARRGAKKAIGAVAASLLRTIYHMLKDGTLYQDLGADHFDRRHKTASTRRLLQRLQNLGFAVQLTPAPA

SEQ ID NO: 361033 - protein, 405 aa, unidentified
MDEKKEYVLAIDVAKRKSMYYILSIQGEIILDAIEYEHTLSNFKLIDSKIREGQLEQNLAVFMESTSTYHYPVMRYFLELGYEVIVVNPNLVKKSSTSFRKTKTDRLDCIKIAETYFKEEIKSNAAKVNDTYFNLMALNRQLLSLEKALTATKNRYTRLLDICIPEHELYYKYSSDKYNIKYITLFQYIPHSEFIQQTRVDRIANLLNLSFSRKYKKRLTEEAIRLKTISKNSYPGVSKYSAEVENLQQTIRIMKNLMNEQKRVKNKLVILGKQTKEFKYIYSVQGIGEQSASQVIAELGDISRFRNYKQINAYCGLEPSIYQSGKAYYNGRITKSGNGYARKILYTTVMNIIQVSRSHYPEHPINVYYTKKKENKSTKESVIATSTKLIRILFSLCKHKSTFTL

SEQ ID NO: 361034 - protein, 462 aa, unidentified
MRPPCNVDAGAGRHDRPPTGTRRPERTDRRETNVQPGDIDVWLGLDVGKSSHHACALDHDGNTILDTPVDQDEKQLRRTIVKLQRRGTVLVIVDQPNTIGSLPLTVARDMGARTAYPPGDAMRKAAQLLPGGSKTDRRDARIIASTALRMPETLRDCEPDDETMAALRLLSGWDEDTAHELTRTVNRLRGLLLHLHPALERALAGDRIKSDTALGLLEHYKGPDGLRRAGAARIREYARRHGLKGTAITDAVADAIGEQTVTVPGTRAAESLIPQLVSDLRRLRDRRTDISRQVEELLADAPLLTVLTSMPGIAARTASQILLAIGGDIGRFKDAAHLAAYAGIAPVTRQSGTSIHGERPARGGNKRLKNALFQTAFAAIRLDPESRAYYDRKRAEGKRHNAAVMCLARRRCNVIYSMLRNGTLYQPGGTHTTTTTPPRTETTPAHAPRPRQDTTHPGTRRT

SEQ ID NO: 361035 - protein, 324 aa, unidentified
MEITTIGIDLAKQVFQLHGVDAHGKTVLRKRLSRAALGSFMANLPPCRVGVEACASAHYWSRQWRAFGHDVRLMSPHFVKPYVKSQKNDSNDAEAICEAVSRPTMRFVHPKTIGQQDLQALHRIRQRCIHNRTALINQIRGLLMEYGITLLPHAAQIRRRVPGLLDDAAQDLTSLGRELLEDLYRELVALDEHLLEVEGRIKRIFAATEICRRLAQVEGVGPLIATAMIAAVGDPHAFKNGRQLAAWLGLVPRQRSSGGKHVLLGITKRGDRYLRALLIHGARAVVVRAAAKTDTRSCWIAGLQRRRGTNRASVAVANKNVRIL

SEQ ID NO: 361036 - protein, 376 aa, unidentified
MIKTDVQYPTVHLAIELSRSVWLVAARLPGVEKPSLHRIGGGDTAALLALAETLRARAAAKLGAPVRVACCFEAGRDGFWLHRLLTAEGLAAHVLEPTSILVSRRARRAKTDRLDALGMLRVLAAYLGGDRQVCSMVRVPTPEEEDAKRPHREREDLVRERVRLENRIAALLATQGVRERPSLRNWERDLAALRTGDGRPLPPHLRAELDRLRRRLVLTLELTREVEAERDAALAAEPRDAVGRKIAALCRIRGVGPNFAAVLTREVFYRAFANRRQLAGYVGLTPVPHQSGEADRDRRISRAGNPRARTTPIQLAWLWLRYQPDSAPARWFRDRVGALRGRTRRIAIVAMARKLLIVLWRYAETGLVPEGVEVAA

SEQ ID NO: 361037 - protein, 341 aa, unidentified
MGEVSTIGLDLAKNVFQVHGADASGAVVFRKKLRRHQVLTFFAGQPSCTVAMEACASAHHWAREIGRLGHAVRLIPPAYVKPFVKRQKNDAADAEAICEAAQRPTMRFVAPKSEQAQASAVVFRARDLLVRQRTQIINALRGHLAEFGIIVAKGPAHVLHLVRAVEDEAHPIPELARPILKMLIETLHRLDEQIARLDREVAERAKTDATVRRLMTVPGIGPVTAVALTALAPPADTFKRGRDFAAWVGLTPLQHSTGGKQKLGATSKMGERTLRRLLIIGANSVLLWVARNGAPAGSWIARMVARKPPMLVRVALANKMARIIWALMARGEVYRAPAAVA

SEQ ID NO: 361038 - protein, 415 aa, unidentified
MEQVYERCAALDVHKAQVTVCVHVPDQAGERAELRAEFATMTGDLLGLRDWLKGLGVTHVAMEATGVYWKPVYYLLEDDFELLLVNAQHVKNVPGRKTDVQDAQWLCQLLEHGLLKSSFVPPQPQRELRDLTRYRKSLVWERGREANRLQKVLEDANIKLASVASRPLGASGKAMLRELCEGNNDPVALADLAKGKLRAKLPLLRQALEGRFRGHHALLVSHLLAHIEYLDQTIGELSEEIEERMRPFARERELLCTIPGVAERTAEVILAELGPDMSRFATHRHAASWAAVCPGHDESAGKRRSGKTRKGDSWLRVALIEAANSAAARTKDTYLRAQYLRIRRRRGHKKAIVAVAHSILVSAYHVLHEGVSYQELGGDYFLTREDRQRMTRRLVRQLERLGQNVTLEPMAAEAG

SEQ ID NO: 361039 - protein, 409 aa, unidentified
MERMHRCCCGLDVHKQTVVACLLRTDTAGRRSRELRTFGTMTDDLLTLADWLRAADCTQVAMESTGVYWKPVYNLLEGQCTVLVVNAQHIKAVPGRKTDLKDAEWIADLLQHGLLRGSFIPDRPQRALRDLTRTRTTLSDERIAVINRVQKVLEDANIKLAGVASNVVGVSGRAMLAALLTGTTDPATLAELAVGKLRKKRDVLTRALSGRFGDHHRLLLTTHLAHIDFLDEEIDQLSAAIAERLRPFEEELNRLDTIPGVDRRTAEVLLAEIGADMERFPTAGHLASWAGMCPGNHESAGKRKGGKTRKGSKWLRRALVQAAHGAARTKQEGRTRLAQRYRQLVVRRGKQRAAVAIGHQILVTAYYLLQRQEDYNEVTPAALDGVVWRKGKYCTLRASRLSVRGNVQR

SEQ ID NO: 361040 - protein, 428 aa, unidentified
MSGRGAVEQEPEFVAFVGIDWADQKHVWCLQAANSAQRENGELEHTPEVVEAWVSELGQRFGQGPIAVAVEQVKGALVYMLLKYECLHLYPVPSTMTAKMREALYPSGAKDDPRDADLLLDLLLQHRDKLRRLTPDNEATRRVQNLVEERRKLVEEKTAQLNRLIGYLKVYFPQMLGWFAKLDTKLVCDLLERWPSLEELQAVPPGEVKKFFRHRRGRHGELTEWRMQGIGQAMPAIRDRAVIEAKCTVVQVIAQLLRTLLEGIATLDRKIAEAAEGHPDYFIFQSLPGAGAALAPRLLAALGSQRDRYASAEEVQKYSGIAPVTERSGKKKWVHFRWACPKFLRQSFHEWAGHSIAQSVWARAYYQQQRQRGKDHHAAVRALAFKWIRIVFRCWQDGAAYDENRYLATLAKRGSPLIPVSAAAATSL

SEQ ID NO: 361041 - protein, 427 aa, unidentified
MSYRIAGIDVHKRMLAVTMADVTVEGEYQFERRMVGTSPDQLRALAEWFVTEEVEEVVMESTAQYWRPVWETLERYWQPCRRTREGAGPTSGTLHLAQAQSNRAPGGRKKDFPDADRLVKRLVAQELTLSFVPEVEQRLWRTVTRRKYQLTCNRVQLHNRLECLLEEAHIKVSSLVSDLLGASARRMLQAVADGETSPVAVATLASQRLRATPDQLCDALGACTDLNPVYRRLLHMTLDELRLIEAQIQQLDEELARLLRTHQEAVQRLAAVPGLGVDSAQQIIAEVGPSAATFLSAKRLASWVGACPGHDESAGINHSHRSPNGNRQMRRLLNQAANAAVKTKGSIFELVYRRLVVRLGHAQAIGAIAHRLCRLVWKILHEGIVYEERGPAVTKLRAQRRAAKMIRELRSLGYRVDLGPSPEGSPA

SEQ ID NO: 361042 - protein, 373 aa, unidentified
MNYSTVYVGMDVHKETFSLCCYTNEKEQAEYPQKVDGHYSKVLNYLEAMRFHYGDDAVFICGYEAGCLGFTLYHQLTSHNVKCVILAPTTMPKPAGKKKVKTDKRDAALIARCLAHRDYSPVHIPTEQDEQVKEYIRMRQDHKIALKKVKQQILALCLRHNYQYSATKNHWTQAHLQWLRSLKPDGLYQEILAEYLSSYDQLTDKLERLDRRIEELAAQPDYQEKVLHMSCFLGIKTQTALSTLVEVGDFKRFASAQHFASYLGLTPGEDSSGGDQNRLGITKAGNSHIRTLLIEAAQSYTRGQIGYKSKALKMRQNGNPTNIITYADKANERLRRKYYRMVLSQGKKANVAKTAVARELACFIWGMMTENTQ

SEQ ID NO: 361043 - protein, 445 aa, unidentified
MFIQSQDDSHCCYSFFIKVVILMMKLKYPICCGLDVHKNVIVATIVITNRDGVSEYRQKSFSTINSDIQKFHNWLIENNCYHVCMESTGKYWIPIFNYLEKDIEVCLTHPKYVKAIKGKKTDKKDSKWIADLYKFDLVRCSFIPPKDFRQLRELARYRFKLVCMKSSEKNRIQNCMTVSNVGIASVLSDPFGKTATEIMSYLLEHTADSIDEKAVRKLIKKGAKAKSDEIIEAIRGCNIETDQAKKLELALGHLEYLDGMITQTEVELYVRIKPYYEFVEFVSTMPGMTELSSTIVLAETGVDMNIFDDAKHLCSWCGLSPSNNESAGKKKSVRIAKAGAYLKPMMVQCALAAIKNKKQPYFAIKYGRIKKRRGHKKAIIAIARMMMVCIYHMVSEKKPFTPADYEELMKPQNHVERVVLNENNVFAYLESLGYDSSKLVKRNDN

SEQ ID NO: 361044 - protein, 323 aa, unidentified
MFDNIVALDWAKSNLAVARLKKDATVPKVFETEADIDFLKQYLEELPGTVQLVFEISSSARKLFFELRDYVDDIIACDPLKNDTVKKGAKTDKIDAVKLALLARQNRLNNVFMDQSENFKLRRLVSSYIDKVKALVRCKNHMADFKDNRINSEYDEFALEQTKNEIETLGSIKSQYEKKFKILEKNNKQVKLMAGVPGIGTINAVKLVATVASADRFRSYKDYWGYCGLARYLVESGKRSYGTRRIRHNPMMKSIYKTAALVAITTTEEFRMYFNFLTKEKMLPDYNARNTIARHIAKMTLMMLKHNTKYNPKLIRQKIKAQN

SEQ ID NO: 361045 - protein, 340 aa, unidentified
MKVRTLGIDLAKNLFHVHGVDGQGRTVVQRQLRRRQLLPFVAQLQPCLVAMEACGGAHYWAREIAKRGHEVRLMSPRFVRPYVKSNKNDARDAEAICEAVGRPSMRFVAVKSQAQQDMLALHRVRSLLVRERTALMNQMRGLLAEYGIVVAQGAVTLRRALALILEERDNGVSEILRELLVEMSERQRLLEDRLKRYDQRITEFARADERAGRLMAVEGVGPLTATALIAAVGNARQFRSGRELSTWLGLVPRQHSTGGRSVLLGISKRGDRYLRTLLIHGARAALRFAARKRDPRSRWIGAVRERRGANIAAVALANKNARVLWALLARNEDYRVATAA

SEQ ID NO: 361046 - protein, 430 aa, unidentified
MTEHDHAAPLPPFAALVGIDWADRKHDVCLLDLDTGRREHLVLAHTPEAIDDWACQLRSRFGGRPVAVCLEQSKGALVYALLKYDFLVLFPLNPARLKSYRQAVRSSGAKDDPTDAQFLLEYLECHRAHLVAWRPDDARTRQLGLIGEERRKAVDLRTRLGNRLRTCLKNYFPQALDLLGEGLHTRMACDFLLKWPTLAAAQKATPKALRRFYHSHNSRQAGLIDRRIEALRAARPLTTDTALVQSYRLTATLLARQLLELAGAIEAYDKELARLMAEHPDAALFERLPGAGAALAPRLLVAFGSDRQRFSGPGDVQTYSGIAPVTRRSGRSSSVHRRTACPRFLRQTFHEFAGHSVPRSAWAGAYYRQQRARGRGHHAAVRSLAFKWIRIIYRCWKERTPYDEETYLASLRRRGSPLLAYLPTPSPAEG

SEQ ID NO: 361047 - protein, 436 aa, unidentified
MSCHLSTDPLARRRAPLGSNIFGDQGGSYMIFVGDDWAEDHHDVHLMDETGARLASRRLPEGLAGIGEFHELLARHAEESDQVMIGIETDRGLWVTALVAAGYQCYAINPMAAARYRDRHHVSGAKSDAADAKLLADLVRTDRHNHRLIAGDTADAEAVKVLARAHQNLIWNRNQHTNALRSALREYYPGALEAFDDLHDRDALAVLSRAPSPAQAASLSLAKIRSALKAAGRQRNLDIRAQEIQTALRTEQLTAPAAVTAAFAASTRAMVSIVNELNHQIADLEAELATHFETHPDADIYRSLPGLGVILGARVLGEFGDDPNRFTTAKCRKNYAGTSPLTIASGKKRAVLARHVRNRRLYDAIDMWAFCALSSSPGARAYYDQHRSAGDLHHQALRAVGNRLVGILHGCLRHRTHYNEHKAWAHQHSNHNTQAA

SEQ ID NO: 361048 - protein, 345 aa, unidentified
MNILKQTVGIDVSYKTFDARFGTTNTQQLITLSPSKSFKNSPAGFKLFLRWLKKYILSDDIPLVFVMEATGVYYEHLAHFLHSHGYQVAVILPNKIRNYAKSLESKSKTDPLDTAVITRFGLERQLTLWTPPSETLKTLRDLCREYHCLKANCTQIKNQLHALKSSFKPHRESFKRKTQLLKFLERQVALIKKELLALVKTEPDLALRLKNIKTAKGLGDMTILTVLSETRCFELVTNQKQLASYAGFDIVFHDSGLKKGKTSISKKGNTFIRKALFMPALSACRANPQMKDLYKRLVAKGKNKKLAIIAVARKLLLLIYTLWKSNSVYIPDYKPLHSAPESLSS

SEQ ID NO: 361049 - protein, 406 aa, unidentified
MNYLGIDVSKANSRYVFLDNDGEKFVKPFTLDNGHNDFNKLLDRLKELTLLPDNLLIGIEATGIWWENLYSLLTEHKFKVIVLNPHQTNKFREALRIKAKTDDIDAYVIAGLLRSQEYASSYIPDESIQCLREITKLRFELVKDRQNYERQTNALLGLLFPELAQTAIKNPFAVSSMAILKAYPTAKHLAEAKPKNIEKIVRSIKGNNFNIKEIQSLIETAQKSIYSGRAKHDRGLNLVILLTQVESLQNAIAQLDERTNNILSPSDANDTNSFPGANLLSIPGVGPKTLAAILSAVGSDGQAFPDGKHLIGHIGFFPKIYESGETRHDNTMSNRGPKYLRAALYMSAVACLKHNPEFKALYDRKVSQGKTAKQSLVYVAKKLAHLCLSMLKSGESYNPSRVFMPA

SEQ ID NO: 361050 - protein, 370 aa, unidentified
MNRLFIGMDVHKEKIVVIGLPEEGSHSVVREEFGGGDLRRLTKRIQALSRSWEVDSCYEAGPSGYGLARIFLEAGIPCRVVAPSLIPRRPGNRVKTDSRDAKELALALRADTLTFVRIPALEEEEARGLIRCREDVARQVRLFKTTVSHWLLNRGQRVPSGTKRWTPAYWKWVRALPLSPMDRTTLDHYLDVVSLLENRRKQVEEQICALAKEDPYRERVKRLIVLRGFSPLAAMRLIAEVIEFKRFRSASSFMKFTGLTPSEHSSGDRTRRGRITKAGNSHLRHVLVEAVQKAHFSANPGRLLLRRWQDVSGPLRQIAVDCLKRLHHKFWALTQRGVPAGKTRVAMARELAGFVWALMTHPEIETPLAV

SEQ ID NO: 361051 - protein, 331 aa, unidentified
MTLALGIDIAKKSFDAVLLDPTGKSIGYWHQPRTIDGLQELRDQLEALNVDFEQLHIGMEATGSLWKLVAVTCQSWNATCSVINPWVIHSFGQVKMAHHKNDKLDAALIARYVKMYEPRAWVAADATLSDLVELTRRVDDIKRLRTQEKCRLASEPSARVAESINTIIDCLQQEHDTLIAAIQELVAKDEQVSKTIERLTTIPGVAFWSACAILAELGDVDRFDNAKSVTSYAGLVAREFQSGTSVHKKSSLTIYGNRTLRKLLYFPAMAAIRRNQDLREFYDRLRGKGKSFKTALVACMNKLLRLFYAIAKGDSVFEANHQNKRAAASTI

SEQ ID NO: 361052 - protein, 316 aa, unidentified
MEPTAEDVLVGIDVSKDRLDVAVLPGGEAFAVARNAAGIDDLVARLKPLAPRAIALEATGGYESVVVASLAAAGLPAVVVNPAQVRAFAQALGKRAKTDRIDALVIARFVQATNPKIRPLPDAATQRLADLVARRRQIIAMMVAERQRKARLTESRLHKSITRLLKALQVELSEIDAAIGEDVSNSPAWREKEDLLASVPGVGPVIARTLIAEMPELGTLDRRQIAALAGLAPWTRQSGQWKGRSFIGGGRASVRSVLFMGAITAIRRNARLKAFRNKLVNAGKPKMVALIAVARKLLTMLNAMLRDGKKWQEAEA

SEQ ID NO: 361053 - protein, 338 aa, unidentified
MALYCGIDLHSNNSVISIIDDHDKLISEKRLANNLAAIDQFLSPYQADISGIVVESTFNWYWLVDGLVDQGYPVHLANTLAIQQYNGIKYTNDATDARFLAHLLRLNILPTGYIYPKAMRQVRDVLRRRLLLVQQRTAQILSLQSLIGRHTGQQLTALKIKQLKTTDLLDYFPEAASEFSARHMLQLIDQLTTQIDEIEAFVLARCQQDPLYENLLSTPGIGKILGMTILLETGPIERFAAVGNYSSYARCVPTDKISNGKSKGKGNAKNGNRYLGMAFMEAAHYATIWNDTIKRYYQRKCKKVPVMVAKKTVANKLTRACYHMLKEGSLFDVKRAFR

SEQ ID NO: 361054 - protein, 313 aa, unidentified
MMIIGCDYHPAFQQIAFVDTDTGELQERRLGHREEAERFYRDLAATGVKVRVGMEASGHARWFERLLAELNFELWIGDAAEIRTKRVRKQKTDRQDAQLILKLMLKDDFPQIWVPSWENRDLRQLLWHRHRMVQARTRLMNQLQAVALNEGLRCKKRLWREAGRQQLEAFRLAPWASRRRQDLLELLDRLNPTIAELTQAIEREVEKCPEARRLQTHPGVGPLTALAFVLIIGKADRFRCGKQIASYLGLVPLEDSSGSRRRLGHITKQGNSLLRFLLVEAAQVTVRSDPGWRSKYHHLMMRRGRKSAVGYSL

SEQ ID NO: 361055 - protein, 417 aa, unidentified
MNENRKRYIGLDVHKHYLIALGVDERLEVVMPARRVELSYLESWMKKNLTRQDEVVLEMTTNTWQLYDELSAYVGSITVVHPPHVALITRSQVMNDKIAASILARLLAKGLLVGIWVPPQEIRELRGLVAQRQKMTRLSTQAKNRLHAVIQRHHLKPPAGNPFAKTNNGWWQALPLGRLEKMNLQSDLETLQFAEKQQSRLQAEMTSIVAENEEMGHLLHLAGFGVITAVTVYAAIGDIRRFVESKKLVGYAGLGSRVHDSGMTTRTGKITKAGRRDLRVALVEAAHVAANTHPHWKAELARLEPRLGYNKAIVAIARKLLISVWHILSEKTADRFAEPEKVAQKLLRFAYEVGKENRPGRQTAASFARERMDALHLGSELTSIPWGAKKPIPLPPSALLKKESERRPKQMKSVNSG

SEQ ID NO: 361056 - protein, 366 aa, unidentified
MKKNSTITTKRTKIFSEKQLTIGMDLGDRFTYYCILDQAGEVVVEQKVATTKQAIQQVFSRIPRSRVALEAGAHSPWVSRLLAELGHEVIVAHARNVRLIGESSRKDDRLDARKLAQLARLDPRLLSPVQHRNAEAQIHLTVIRARAALVGARTALVNAARGLAKSYGERLRKCGTQQVSEGLAAGLSAELRAALEPLLAEVASLNQRIAEYDRRIEHLATQVHPEVALLKQIKGVGTLIALTYVLTVADPHRFRRSRDVGCYLGLRPGRRNSGSSQPQMHISKEGDRYLRTLMVQGAHYILGPFGQDSDLRRWGLKLCERGGSNAKKRAVVAVARKLSVLLHKLWVSGEVYEPLHNHRAVESAVA

SEQ ID NO: 361057 - protein, 384 aa, unidentified
MKNDNILFIGLDTHKEQTQVSYTLDHRTAEVNDLGRIQTTKSGLVKLARQLQSKYPHATLHFVYEAGPCGYWIYRLLTSLGHCCFLVAPSLIPKKPGDRVKTDKRDAQNLARLLKNNDLDPIYVPEPEDEAVRDLSRAREVAMRDLNDAKHQLKSMFLRNNIRYKGSDNWSLKHIRWLTEIVLPHPCQQIVLQEMIQSISERMARLQRLDNELTHQVKQWRYYPVVKAIQAMRGIRLLIATGMIAELGDLSRFDTPRKLMKYVGLTPSEHSSGNTRKLGSMTKCGNGRARRLLVEGAHSYRHAAKISKEMQLRQEGLPKEIIDKAWEAQMRLCRRYQRLIMRGKPRNVVITAIAREMIAFVWSISREVVLPRIDPKTRLSRVPA

SEQ ID NO: 361058 - protein, 355 aa, unidentified
MQSNKISFKGQNIYVGIDVHLKTWHVTTLTESGYKYSFAQHADAKELFDRLNRKFPGAHFKSAYEAGFCGFSAHYALADLGFENIVVNASDIPTTGKEKAMKTDAVDSEKIAWSLKRDELTGIYVKDKRYMDDTNLMRLRQRFIKDLSRQKNRTKHLLYTQGVTYPERFSKNSTHWSRNFMKWLREEVVLLSEEKRTLMLLCDQVEHIRKDILAITREIRRLSTTDKYKENFSLLTSVPGFGLITSMSVLTELDNNPMRFPNERKFVAILGLIPTCHDSGEKKVNGEKTNRGNKQLGPLIVEASWVAIHRDYQLGCYYTNCCQSMPPQKAIVKVARKLACKAYAVMKTKKAYVLS

SEQ ID NO: 361059 - protein, 362 aa, unidentified
MIEKVLKQCVGIDCSKDELVVCFGFMNSEFTIVHKALDVFPNDSKGLKKLLKWTEKLKDPAIPIVFVVEATGVYHENLAYFLVDEKQTVSVVLPNKINHFAQTLELKTVTDRVASKTIATFGLEKKLDAWVKPSPLFAHMKQLTREREQLKEERTVCQNQLHAEQHAAFPISSSIKRMQKRIKMLNEQIAEIEEEIKIILDENLWLKEKIDNLCTIPGVGLITAVTVVAETDGFNLIRNGKQLTSYAGFDVVDKSSGTSVRKKPRISKKGNKHLRKAMYFPAITNVKYDKQYQNLYHRIEAKSGIKMKGYTAIQRKLLLLMHALWKKNECYDPNYLTKKSNQFKLLEQPILTALTELDQVCS

SEQ ID NO: 361060 - protein, 388 aa, unidentified
MIYVGIDIAKLNHFASAISSDGEILMEPFQFSNDSDGFHMLLSRLDSLESDNIIIGLESTAHYGDNLVRYLVASSFNVCVLNPIKTSSMRKNNIRKTKTDKVDTYIIAKTLMMQDSYRFVTFYDLDLMDLKQLGRFRQKAIKQRTRLKIQLTSYVDQVFPELQYFFKSGLHHKAVYALLKEAPSPQDIASMHMTHLSHLLATASHGHFKKEQANELRVLARKSVGANDSALSIQITQTIALIELLDSQLKKVETEMTEIMKFHDSVIMTIPGIGYINGGIILGETGDIHRFSTPSKLLAFAGLDPSVYQSGNFQARRTRMSKRGSRVLRYALINAAHNVVKNNATFKAYYDKKMAEGRTHYNALGHCAGKLVRVIWKMLTDEVEFNLD

SEQ ID NO: 361061 - protein, 346 aa, unidentified
MVYVGMDVHRKRTQVAVLGEDGTQLMNRNVPNDPAELAAILGPLGPGTPAVFEAAYGWGWLAELCEDLGMETHLAHPFRCKAIASARLKNDKVDARTLAHLLRTDLLPEAWIAPPEVRDLRALLRHRARLVRLSTSLKTRVHAVLADRGVRVEESLWTKAGRARLATLDLPPTQRAIVEDCLAQIDAIELPLRRLRSEIRRLAKPDPRVEALQRLPGIGPITAMTLVAEIGDIARFPSARKLCAWAGLTPTVRNSDLKVRHGHISKQGSSWVRWTLVEAAQVARARPPFTRTYAQIARRRGNHIATVAVARKLLARCFYILKEMNDQPRSPGELDEGTLPETRPLQ

SEQ ID NO: 361062 - protein, 415 aa, unidentified
MEDVIYERCAGIDVHKRMIVVCLRIGRETQIREFCTLTHELREMVAWLKENGCQMAAMESTGSYWKPLYNIFELEELPAMVVNAQHMKTVPGRKTDVKDAEWIAKLLSQGLLKPSFIPDREQREFRELTRFRKSQIEERARNLNRLQKMLEGANIKLAGFVSDIDGKSATELLELVIGKPDFTIEEVEACRRKSMKASANELFRSLEGIVTPVQRQLFTHVMQVIREQTVQIEQTETLIQGYMTEEYKNAADAIDAIPGIGQVSAQQIIAEIGVDMSRFPTAAHLCNWAGICPGNNESAGKRKSGRTNHANKTLKSTLVQCAQSAKKNKDSFFSAQYQRLVVRRGKNRATVAVAHSMLIAIYHVLNGAEFNDLGSDYYTQFNREKKISSHVKQLSKLGVNIPDDVLRSIISENAA

SEQ ID NO: 361063 - protein, 365 aa, unidentified
MNNAHNAAIGLDVSDRKTQVCVMAKDGKSPKIVMETTIPTTREGLAKFLSTQDRSTPVAFETGTHCRWMDEVARKLGFKAYVANPCRLRMITESKTKNDVNDARMLARLALLDPELLHPVKLRGPEHQKMINLHEARNLAVKQRTEAIVQLRAMAKSMGFRIAKCQAAGFHNLDRRAWPEAFRCIAWPMLKNLEQLAITIKTYEKQIRELAETPTFKAQVERLREIHYVGLYVATGFVAATGGDMDRFEKPRDVGPWLGITPKQDQSGDVDRQCHITKAGSPFMRRLLVESAQMILRDGAVDTDLKVKGLRICARGAKIAKRKAVTAVARALAVLMVAMLKKPDAPYVPLSERSEKELVAMRTST

SEQ ID NO: 361064 - protein, 342 aa, unidentified
MDYYAGIDVSLEASSICVVDASGKIIKEAKVLSEPEALIAWFKALPFTLARIGLEAGPLSQWLYAGLKDAGFAAELLETRHVRDAFKAMPVKTDRNDARGIAQLMRLGWFRPVHCKSAPAQETRALLTARKLVQAKLYDVQMSLRGILRGFGLKVGRTTPVGFAVRIRELTEHHPALAAIAKALLAVHEVLLRELNGFEKQVRKQARCDSRVRLVMTAPGVGAIVGLTYVAAIDDPERFSSSKTVGAHFGMTPKKYQSGETDLTGRISKSGDKGVRTVLYEAAHIILTMPVKGGALKSWAAKLAKRAGMQRAKVALARKLAVILHRMLADSAPFDAAKAAAA

SEQ ID NO: 361065 - protein, 343 aa, unidentified
MQTITTIGLDIAKSVFQVHGVDTVGQAVIRRQLKRRHVVAFFQKLSPCLVGIEACASAHHWSRELQALGHTVRLMPPAYVKPYVKRQKNDAADAEAICEAVTKANMRFVPTKTPEQQSGLVMHRTRHLFIRQQTSVINAIRAHLAEFGIVAPVGRRGVEELLNVVADPNDKRVPEIARACLSALGAQLRRMKEQILEFDRLIRAWHRSNEMCMRLEEAPGVGPVLATALVAAIADPKSFRSGRNFSAWIGMVPKQRSSGGKNRLGNISKQGDRYLRGLFVTGALSVIRYAKIHGTKHRPWLTALLARRPTKVAAIALANKIARMVWAMMARGERYKEPVALAR

SEQ ID NO: 361066 - protein, 421 aa, unidentified
MLEVKVEKCAGIDVGKKFLAVCVLIGLANQKPVGEVRRFGTSVKELERLRAWLLESGCTEAVMESTGSYWKPVFNILEGSLRIILANPEQVKALRGKKTDPNDSRWLASLLRHGLVQGSFIPPRDIRELRDLTRRRRTLVGEGASERNRVQKVLEDANVKLGNVLSDVFGTSGQAMLEALLENKRSAAEIAELGHWSLAPKIPQIVEALEGHRMSDHHRFMIRQSLRHMRCIEQMIEELDKEIALRLKPYQQQMKLACTVPGIKATAAASILAETGMDMSPEGPFPDCHHPASWATVCPGNNESAGKRKSGRTRQGNRWLRATLTQTAWAAAADKKSIFKTRFERLKLRRGGQRAVIAVAHAQLIAIYWAIRNGTPYPEQVQRLQEDRREAQIRHHLQRLAKLGYQTDTGVALMLDKSMKI

SEQ ID NO: 361067 - protein, 403 aa, unidentified
MALFAGCDWGGEAHAICVIDETGAVRWQAPVAHDAAGLEKLVQQLAKFGPASELPIAIERPTGLLVDTLVEAGHPVVPIHPNVVKACRPRYRAAGSKSDPGDSYLLADVLRTDGHRLAKLIPQSDAIKALRALVRTRDDLVAERVALANQLRSLLQSCWPGAAAIFADVDSPIALAFVRRYPTASSAERLGEKRLASFLAQHQYCGRRTEAELLVRMREAAKPCIGELEAEAKGQLVRALAQVLEQLVTQIRAITVRIEHDVAELPEGRIVMSLPRSGRINAAQIVAELGDQRGRFVSEDHLAAEAGVVPVTYASGKQRGVGFRWACNHRLRAAITLFAGNSRHQSEWAADVYKRARARGCDHPHATRILARSWIRVLYKLWLTDQAYDEAKHGAASRICATA

SEQ ID NO: 361068 - protein, 420 aa, unidentified
MKHLIGRELPAKTLVVAIDCGKATHRVMLASGEQGVIGEPVSLPTLREGVEELARLIAAAGSEDRPVIAVEATGSLHHAWVAELERRFAGSLRLFAPSETQAARTGLGSRRTKTDDRDCAALITLARQGLGRPPEGATVAAMLGAVRHRRALVGVRKVTQQRLHDQLNALCPGLSAPVGHGRALKLEDASGQAVLACAVAFAGRAPAPRSLIARAPGRLTKANASYWSARWKALLPPPSDAELRARRLGGDLERQRSLARDIADVEEQIAVLLAAGQGQILTSLPGVAQTRAAAFAAHALPIERFPSAGHLYSATGLAPAAYESATLRRRGRISRAGLAEFRDALMGIAWGLSQSSPAFAARDRALRDRGMAPIQARVALARHACRLCFALLKTQEPFDEERYVRMRHGASGDGVYGYAA

SEQ ID NO: 361069 - protein, 400 aa, unidentified
MSGLKGNFECIVGIDVSKDKFDACGITGEEAKIFQISVAMDRKGFEKLKKHLGSASGSSVLIGMESTASYHVNLFSYLVAEGYKVILINPLLISNYVKMQLRKTKTDKKDAVVIAQFLLANGNTLLQRATPSLISDLRDLSRQRESLVDEMTSLKIEIKQLLNITFPELEHMVGIFTKSILKLLQQYPSANALRDKDIGQLSQTLIADSYGHKREEFAKTLIKAARSSVGTNSPAKEMIIKQKIGLLLHLEEALQEITDMLIEMARKLMEEDINIMTSIKGIGDKTAANFLVEMGGDINQFECSGKIIAMAGLDPAVYQSGQHEGRGRITKRGNRHLRRIIWMMTTSVIQYTDIFHAYYLKRRKEGLPYKKAVLATAHKLIRVIYAMLTQRKTFCPEVNS

SEQ ID NO: 361070 - protein, 385 aa, unidentified
MKMNQTDQTKVEFAAFIGLDWADQSHLVCARAAGSKTVEPSEVKHDPKALAAWVSSLQQRFGGRPIAIALEQSRGALVHALMGYDFLVLFPVNPKTLAKYREALRPAGAKDDPGDAELLLELVVMHRDRLRAWVPDDEQTRMLALLVEYRRDLVKAQTRLSNRLKSLLKGYYPQALGWAGKLTTTQACDFLERWPTLADVQRAGVDELREFYAVHRCRRDELIAQRVAEISLAQPLTRDLAVITASLMMVKATVTQLRVVSEAVDRFQRQIEELFLQHPDHDLFQSFPGAGAALAPRLLTAIGTDRERFTAACEMQQFSGIAPVTKRSGQSCLVHWRWACPKFVRQSFHEFAAQSIHWSGWAKAFYTQQRQRGKGHHAAVRSLAF

SEQ ID NO: 361071 - protein, 409 aa, unidentified
MSQPSWWLGIDLGSQQHELCLLDATGTVVRRGQIRHDPAGVARLVAFVDEATGRRPTAVAAALETPRCLVGEVLQERGVQLYAINPKQLDRFRDRHTVAGAKDDRLDAYVLADSLRTDTHLFRRVAPLPPENYRLRELTRTLAELEQLHRQQANRLWSVLNRYFPILLRWCPGADEPWLWALLRQAATPAQAAALSTADLQQILRRHRIRRLTAVDLQAALAEPGESGDPLTVELGAQRVHVYLDQLELIQRQIRQCSRAIQAIMNAPSADPAPTDREIVRSVVGIGWKTGAILLGEAATALQQADYRTLRGECGVAPVTKGSGLHRVTLMRRACDHRLRLALHHAAGVAIQHVSPWYRIYHRIRLRGGSHARALRQVGDRLLKVLTTMLHNRTLFDLGRLNGVTSTLG

SEQ ID NO: 361072 - protein, 315 aa, unidentified
MNQVPPNVGIDVSQGTLDVAVCPGGEQWQLTNDDAGIGQLVERLRTLQPVRIVLEATGGYELAAVAALGIGGLPVVVVNPRQVRDFARSTGQLAKTDALDAQVLALFAARIQPQLRPLPDATTRELSAVLARRRQLIDMRTAETNRLKLALEAVRGDIREHLRYLDKRIQDFDRELHDRLRNSPLWREKDNLLRSIPGVGPILTTTLLADVPELGTTDHKQIVALVGLAPLNRDSGRWRGKRSIWGGRGHVRAVLYMATLSAVRRNPVLKALYQRLLQAGKPRMVAIVACMHKLLRICNAILMHGIPWRYQPLDN

SEQ ID NO: 361073 - protein, 343 aa, unidentified
MDVSILGIDLGKNSCSVVGLDPSGRVVLRRRLRREGIIGLAAKLPGCVVAMEACCGAHHLGRLLAEQGHEVRLMSPEYVRPYVKAQKNDDRDAEAIAEAATRPTMRFVALKTEAQLDVQVLHRVRDRLVGQRTALMNQVRSILLERGIVVPQGRRKLLDALAALSAEPEGTGVGPRVRLLLDDMLDQWRSLDRRIAALDDEFAGMARNDPAARRLATIPGVGVLNATALVAAIGDGRTFSRGRDLSAWLGLVPRQATTGGKPKLLGITKRGSKYLRKLIIQGARAALPSLSRTATPLGGWLRDLLGRAHSNTVVVALASKLARIAWALLRDQTAFAYGGPVAA

SEQ ID NO: 361074 - protein, 360 aa, unidentified
MAGFSLSKVRAFIRGFEDSRFFIGLDVHKRSFHVAIRRSDGETDTWVAPASSQCLVDQIHRLDIRVGCLAYEAGPTGFSLARTLESAGYNVVVAAPSRIPRPSTSSAKTDRLDCIKLAEYAAKGMLKTIAIPSEQDEADRSLARRRHQLVDEVRRVKNRIKAFLLYLGIEEPAELRLWTRGSIDALNELDLQQASRWTLESMLIELSCLEGNLATVNKQLGELSGNQRHKGIVDCLRTVPGVGPVVASTFRFELFKPERFDRAREVAGYLGLAPTVRQSGEGKSRGQLRPAGQERLRSLLVEAAWSWRAKDPWAGRTYRKLLSRCGIAQKAIVALARKLAIILWRLCLEERPYYVKPIEA

SEQ ID NO: 361075 - protein, 335 aa, unidentified
MDELSFTNDSAGIRNLLSKASRYGMARAVVESTGNMWIRIHDTLEENGIDTILAHPLKTKLIAEAKIKSDKLDSRILADLLRGDLVYESYVPSKEFREKRSLVRHRVALVKARTSIENKIHALLDKYEYRTELTDIFGKAGLQWLKGLELSPIDSVIMDTSLASIENLSIQISIVSRHTAKYAWNNRDVTLLLSMNGLDIFSAMVIATEIVDIGRFATPWKLVAYAGLAPGLRESAGKTRRGKITKQGSRWLRWIMVQSARRAVIHDDRFRTYYQRIRERRGDAKAITAAAKEMLVVIWHMLTKNETYRGVKEELYKRKLAKLERIALEPQVIDE

SEQ ID NO: 361076 - protein, 381 aa, unidentified
MSIVALDIASTSATFCVLGTQGVQSQGSLTFDHDGFSSFIASSQVSEASLFVMESTGGYHLPLYHFLLNHGRKARIINPLLIKHFHDGQTLRRTKTDALDAVTIARYAQAHMSALQEDRMQLDSESKMLARRRAANAEDLAKAKTILKSDLAVAFPELLAFNVYTKTLLAFLGVYGSARDVLDATDGQLQQALEVQRGRKSEEITVQSIKDLAQTSIGVSYRAAMVRDSAKAVLACKQRDEDLTKALVELENTLHKRQMEILTSIPGIGEVTASHFLSEIPDISQFATYQKLIAFAGTDPGIYESGNTSKQLRISKHGNPVLRKYLYLMADSCVKHNIVFNAYYHKKREAGFPHRKAMVATMNKLVRTLYALLTKDEMYSR

SEQ ID NO: 361077 - protein, 337 aa, unidentified
MNQITTAGIDLAKHVFSAHGVDSAGRMALRKTVRRGELEATAAQLVPCLIGMEACSGAHEWARRFARHGHRIKLMAPKFVAPYRTGGKNDGNDAAAICEAASRPQVRSIPVKSAEQQAVLCLHRARQGFVEERTATINRIRGLLSEFGIVLAQRSQTVRTQLEAAIEELPVLARRVLRDLRAHLRLLDERIAGYERQLEQLAAKDERCLRLMQLRGVGPITALAIVATVGNASDFKNGRQFAAWLGLVPRQHSSGGKTRLGRITRRGDAYLRTLLVMGARSVLNTAARHHDRMARFATAVQSRRGYFKALVAVAAKHARIVWAMLAKNQPLNPAAMR

SEQ ID NO: 361078 - protein, 394 aa, unidentified
MRFAGIDIASEIHVLAMVAADGSVALKATPFTEDDIGYQKALALLGTPGEVLIAMEATGHYWKNLFAVLAAAGHAVALLNPLRTHRFAGVDLERTKTDAIDAVGIARFAAEKRPATTPVPDALTEELRELVQLRQRLLQDFGDRVRQLHRLVDLGFPEFTRYVRTLDSELASAILRDYPTAAAFRGVSVRRLAALRYDGHHRVGLDLARQLIDAARRSVGQHHSATYRLQIRYACDDLDTLRHRLRDLDRDLDGKLRVHEVGRLLTTINGIGTQSAARVIAAVGDPAHFRSGSALAAYVGTIPALKQSGKRQSVRGALTPIGNAPLRADLWMPTLCAVRSNPWLRAHYQRLLARGKLPKVALLACMHKLVLAIYSVAKHRQPFVPHIASEQATT

SEQ ID NO: 361079 - protein, 450 aa, unidentified
MSNGSGVSRGDRNRNARLGRLRELVPVTNAIVGIDLADSKQMVVVTDHDSKVLARRTFRCRAWALGAALDWAAGRAAAKGFGQVTVACEPTGHRWRVLGQLAADRGMPFVCVQPMLTSWARRTEDLTFDKTDEKDAVLIARLTAQLRCYIPEPVDEVWGRLRHLGARREKLVAETVSQVQQMRDLLECVWPAALDAARQPFRSRTWCAAMSVILDRDGGDLARTHRLGLARLESAVRREITRRGGRKPCLRIVRRLFAALSDPAGVVVHRRGALERAQLLISDWRESHRRLADTEARMVAVLDELGLTGLVTSITGLSAVGAATILAETGDLRRFATARAVVKHSGLAPREKASGSYAGRTKMTGQGRPGLRLAAWRAVWGAQRANPVYAARYLHLTSREQNKLTPTQAQAAIAAALLRHLHAVVTTGQRWNPDIAAYGIRSTAKTSIAA

SEQ ID NO: 361080 - protein, 410 aa, unidentified
MEVLYRRCCGLDVHKETVVACLRVVSGDEVIREVRTFETTTASLMALSQWLAENGCTHVAMEATGVYWKPVWHILDDGDFQLILANAAHVKNVPGRKTDVNDATWLADLLAHGLIRASFVPDTQTQELRTLLRTRKQLVREKSSHILRVQKTLEDANIKLDSVITDVMGMSGRAMIEALIAGESDPAKLARLANYRLKTSQEKLREALRGRVTNHHRFLLRLHLNQIDALDASIVMIDKQVEAGIAPFRAAVGQVMTIPGIRDIGAQVIVSEIGTDMSRFPSEGHLISWAGLCPRNDESAGKRRSNRLRKGAPWLKTTLVQCAWAAVRKKGSYLQAQFLRLKTRRGPKKAIMAVAASILTAIYHMLKHGTLYRDLGSNHFQSRSKGQQTKRLVKRLADLGYNVALTPLAS

SEQ ID NO: 361081 - protein, 278 aa, unidentified
MSEATQLKRFSQSPDPDALYAHLVRNYPEAEYHSVYEAGFCGFWIHYRLVGLGIHNIVVNPSDVPTTTSEKLRKTDAVDSAKLARSLRSGELKGIYVPGSESLETRSLIRLRDSITKDQTRLKNRIKSHLRYLGIEIPEEFSGPGRCWNRRFVVWLKGAETGTAYGRQTLDFLVRQYEALRGQRLEMLRAVRALSRTERFEKPLENLMTVPGIGQLTGMSLLSEIDDIRRFKSADQLAAFIGMIPMCHSSGEREGVGDITVRRSGGSGPSLSKPHGWR

SEQ ID NO: 361082 - protein, 369 aa, unidentified
MGKYSEVFVAFDVAKKKHAVAIAEGGRAGEVRFLGDVENGPLPIERTIKRLADRYERLHVCFEAGPTGYGLYRQIQALGHDCMVVAPALIPKRSGERIKTNRRDAVTLARLHRAGELTGVWAPDAAHEAVRDLVRAREAAADDLRRKRQQLLSFLLRHSRIYSGGGHWTLAHRRWLANQKFEHAAQQIVFQEGIDAIEDALQRLRRLEKQLALIVPEWSMAPVVEAYQAMRGASFLVAVTFAAEIGDVRRFDTPRQLMSFLGLVPAESSTGDTIRRKGLTLAGNRRARRALVEAAWTYRYPARVSDTLRARLEGLPKPVRDIAWKAQVRLCARYRRLSATGKKLPIVVAAIAREMAAFLWAIGREVAPA

SEQ ID NO: 361083 - protein, 342 aa, unidentified
MSVYVGIDVHRKRSQVAVIDARGEVLANRNVPNGAEPILKVIGGLPPGTPAAFEAAYGTSWLVELLEDYGFAPHLVHPSRCKAIASARLKNDKVDAAILAQLLRADLLPEAWIAPPAIRQLRALLRHRVALVRLRTRLRNRIHAIVADYGYDRPAGEYWSGPGRAWLASLQLPAVSRELVEDDLGLIDALQERIDRLDWEIRQRGRSDPRVKVLTQLPGVGPFTALVILAEVGDISRFASARKLASWAGLTPTVRGSDRVAHYGHISKEGSVWLRWVLCEAAQTAKRHPEFAASFQRIAQRRGKKIATTAIARKLLTRAWHLLADAEHAAAPQRAAPQTAAQ

SEQ ID NO: 361084 - protein, 356 aa, unidentified
MSYEVKYIGMDVHKEAIVIAVLNESGKLVMESVIETKASSILQFIHGLRGELHVTWEEGTWAAWLYDLLQPQLQHIVVCNPRRNALLKEGSKSDKVDARKLADLLRTGMLRPVYHGENGLRTLRELGRSYQTISKDLTRVMNRLKALYRGWGIPCAGTQVYAARYREEWLSKIAQAGVRRRAELLYQQLDGLQALRREVRPELLAESRKHKAAKLLRQIPCIGPIRAARLIALMQTPHRFRSKRQLWTYSGLGIATHDSAQFRFVNGQLQRSKKPQQIRGLNRNHNHEMKEIFKSAATRASCGMGPFHDFYAGLLTNGMKPEMARLTLARKIATITLTLWKKEERFDAKQLKTQAA

SEQ ID NO: 361085 - protein, 405 aa, unidentified
MAVMIGIDPHKGSHTAVALDEDEQLLGELRVRSAASQLERLLGWAAPFADRTWAVEGAGGLGYLLAQQLVAAGERVVDVQPKLAARVRLLATGDTNKNDPNDARSVAVAALRSGSVPEVRAEDHAKVMKVWAKRHRDLSRHRTRVACRLHAVLCDLVPGGIAGEISAAQATRLLDELDPAGAVATARHAVAVELVADLGRLDDQLRDTKKRITAAVKASNTTVTELFGVGPIVAAIVIGDLGDVSRFPTRDRFAAYNGTAPIEVSSGRRKIYRLSRRGNRRLNHAIHMAAVTQIRHRNSPGRAYYDRKITEGHSGKEAIRALKRRISDAIYARLRHDALQAEPATTTGPGGHTGNDTVASAAGSHPEHRLFGQATPGPDTTLRPTGNRARPPRPKAPSPGVRKAS

SEQ ID NO: 361086 - protein, 389 aa, unidentified
MPTVADRPEAQTAIQTNLAAIFISLELSRSIWLITSLSPGGGEKMSKHSVPAGDIAALLARFSELKQKALARTGKSFPIVTIQEAGLDGFWLHRVLQSEGIESHVVDPASIATSRRRRRAKTDRIDGEALLRALLAFKRGEPRVCAMVRVPTPEEEDRRHLCRERKVLIAERVKHVNRVKGLLFSQGVSGYEPLRRDRRQRLDELTTGDSRPLPTHLKTQISRELDRLELLLDQIKAAEAERDALLAAQQAATPAPAGRMLLDLKGIGPEFAANLWLEGLFRHFDNRRQLASYAGLAPTPWQSGSVDREQGVSKAGNPRLRTTLIQLAWLWLRHQPQSALAQWFKERVSRNGGRLKKTTIVALARKLLVALWKYVTAGVVIEGAVMKAA

SEQ ID NO: 361087 - protein, 411 aa, unidentified
MLEVKVEKCAGIDVGKKFLAVCILIGLAKQKPVGEVRRFGTSVKELERLRTWLLESGCTEVVMESTGSYWKPVFNILEGSLKVILANPEQVKALRGKKSDPNDSRWLASLLRHGLVQGSFIAPRDIRELRDWTRRRRRLVGDGAAEKNRVQKILEDANVKIGNVLSDVFGSPGQAMLEALLENKQGPAEIAQLGHWSLAPKIPLIVEALEGHRMSDHHRFMIRQCLGHMRHIEEMIEELDKEIGVRLKPYPQQVKLACTVPGIKPTAAASILAETGMDMSPEGPFPDCHHLASWATVCPGNNESAGKRKNGRTRPGNRWLRATLTPTGWAGAADKKSLFQFRYQRLKLRRGGQRAVMAIAHAQLIAIYWALRNGTPYPEQLQKLEQDRREAQIRYHLQKLNKLGYAPDMHG

SEQ ID NO: 361088 - protein, 484 aa, unidentified
MVRELAILSLVKHLLSRSEESRTPTAPLSGLPIFVWEACVMKQKKPFKRKPMRLPKHLVHLNAYAAGIDIGSKSHFVAVPEGVDTETVREFSTFTDDLERLADWLISCGISTVAMESTGVYWIPVFEILESRGLEVRLVNARHVKNVPGRKTDVLDCQWLQQLHTYGLLRGAFRPAHQVCALRAYVRQRATLVRVSASHTQHMQKALAQMNLQLHNVVSDITGLTGMRIIKAILAGERNPKVLAAFRDKRCKNNMETIARSLRGNFRPEHLFSLQQAVDLHEFYQAKISECDRQILEQLKLFDAAESDKNTPDGKPPASLEEALLRMSGVDLASIDGIDTTTALKIIAEIGVDMSRWKSDKHFASWLGLCPGAKISGGKVISSATKRIANRAALALRMAAFSLIRSKSALGAYIRRQRSRLGASKAITATAHKLARLVYSMLKNGTTYADLGQDYYEERYRSRVVQNLKRKAQQLGFELITLQS

SEQ ID NO: 361089 - protein, 322 aa, unidentified
MYKSKEFIGIDVSKDTFDVWSLSFGHLCLDNTRKGFRKLKKQLKENSWCVMEATGSYHQLLARYLYDSKVIVSVVNPMVIKRFIQMKLQHNKTDKSDAKMIALYAQQQPLKVWEPDPHYIEQCKILNTNIALYFKQSTALKNKLHSLTSKGVKGFLLQSLKRQVKQLQKEIVMLESHVESLIKEHESEMLTNISSISGIGKKTAMMLISNTYAFKSFDNYKQVTAFFGLSPIERTSGSSIRGRSRISKKGNPLVRNHLFLCSFTACEYNPQCRALYERIVAKGKSKKLALIAVSNKLLKQAFAVAKSGIPYDPNYRSRLTIQ

SEQ ID NO: 361090 - protein, 422 aa, unidentified
MKQVLKEEQFAAFIGIDWADTKHDLCLQAVGCDKRESSILEHTPEAIEVWASALRRRFGGKRVAICLELNKGPLVYALSKYDFMVLFPVNPLTVARFREAFATSGAKDDPSDAQLQLELLLKHRDRLKPLKPSSPAIRALEQMVEYRRRLVADKVRVNNRMSNTLKNYFPQVLEWFKDRDTTLFCDFLTRWPTLKAVQRARPSTLEHFFHTHHVRSSVLINKRIKGIRAAIALTTDEAVIAPNELLTKALIAQLRVVLAAIQEFDGEIALRAQRHADFALFDTLPGAGPVLAPRLLVAFGDQRERYACAADLQKYAGIAPVTVRSGKQCSVHWRWRCPKFLRQTFVEWSAKSIHHSFWAQAYYQQKRAQGKSHQAAVRALAFKWIRILFRCWQDRCPYDESVYLRALQRRGSPLFKYLAHST

SEQ ID NO: 361091 - protein, 401 aa, unidentified
MTTMRDNASRVKRFRELKATLRTDRHRLLVGLDIAQAEHVGHVRHAHTRVVIPELTIPNTTRGFAQLWTRIQQAQRATGCREIVCGLEPTGTYHEAVATFLEGQGADVVLVSSAVAYWNRRTQDGTWDKHDRKDAANCAELLEQGKVLFYSRPDGPLAELRRLVRCLRRARAELAACKARWRTTLRPALGPMGEPLPNRLRAELPAVLQAWESAAPGRPAHPKGRLPLGLATACADLGAQVTAVQARIVAIEAACMPVAERLPAYTLLRTIPGVGPTVGAILLAEIGDIAWYTKFSQLRKLAGFDIVRVQSGQFAGQARISKCGRGLLRWALYQAALGQARTVAGRARLAALKAKRQGDRFAGLKATVELAAKVLRVVWGVWRSGTPYDPRRTGGLQRQAR

SEQ ID NO: 361092 - protein, 401 aa, unidentified
MQQDQQHDSVDVFVGVDVGKGQHHAVALDRNGKRLYNKAMPNDEAKLRAFISELRAHGRLLFVVDQPATIGALPVAIARDEGVMVAYLPGLAMRRIADLHAGEAKTDARDAAIIAEAARSMPHTLRSLRLADEPLAELTMLCGFDDDLAAQITQTSNRIRGLLTQIHPALERVLGPRLDHPAVLDLLERYPSPATLAAASEKTLANRLTKLAPRMGKNLAAEIVQALNEQAVIVPGTQAATIVMPRLAQQLAALRKQRDEVASEVERLVLAHPLWPVLTSMPGVGVRTAARLLTEVAHKAFASAAHLAAYAGLAPVTRRSGSSIRGEHPSRRGNKVLKRALFLSAFAALRDPISRAYYTRKVEQGKRHNQALIALARRRCDVLFAMLRDGTIYQPKAADNA

SEQ ID NO: 361093 - protein, 350 aa, unidentified
MELHTIGIDLGKTVFHLVGLNQRGEVVVRKKFSRKQLLHFTANLQVKLIGMEACGGSHFLGRALREQGHEVRLMPAQYVKPYVKTNKSDYIDAEAIAEAVERPKMRFVPIKSDDQLDLQSLHRVRERWVMRRTAVINQIRGLLLERGITLRQGRRHIDAALPGILEDASAKLSGAVRLLLAQLKLELDHLQMRIDEADAMINRAAGENEACRRLVAIPGIGPVTATAIIAAIGNGAAFKKGRGFSAWLGIVPGEYTTGGKQKLLGISKRGNSYLRRLFVQGARAVLQQSAKQSSGLSAWLAQLTTRTHSNVAAVALANKLARMAWAVLAKNEPYRPPMLVGAATAGLACR

SEQ ID NO: 361094 - protein, 394 aa, unidentified
MKLVGIDVGKNSHHFCVMDKENGEFNVTPTSFSNNKEGFDFLINSLKPYSKKSILLGMEDTGHYHVALLKFLLSNGYTVALINPKTTDLTRKMEGGITKNDKLDTITICDVLDTPERKKQYRITKVDRFDLYEQRQLTRHHHNLKEELNVYCNRLQKSIDLVFPEFNTLFSSKYGVVYMNLLKTFGNAEIIASTDIRTIRKCFEIKGRGNRISLTPEKLKECAKNSIGISSEVETIQIKHLVSQIMLIKEQIAEIDKKIEEFSITNNSPILSIPGISHFSGTSILAELGDIGNYSKPSQIIKFAGVAPYHYESSQYNAQHTGITKKGSKYLRKTLYQIILPVIKYNPVFKKYYLLKISQGKGHRCAQGHCIRKLLRIIYHLLETGQSFDPALLR

SEQ ID NO: 361095 - protein, 408 aa, unidentified
MARYYLGVDWADQSHQLYVSDESGRKIRELEVQQTADGLAELGRWLEESRGQGIELWAAIEKPEGRVVDFLLDHGVVVYPVNPKALDRARDRFRMSPSKSDGFDAYVLAEFLRTDHAHLRALEPNSAEGQELKMLTRDHQRLGRQKTRLLNQIGITLKEYYPVPLEVFESLDTKIALDFLKAYPTPQALSKLTRRGWKRFAKRDHHLSEARCSELWDKLNKPQLAVPTHVVRAKAKLLAALVMQLEASVKAVDSYSQEVQSFFAAMPAAEIAKTLPGGKSGTTVASIWAELGDAPKRWNSFRHLQAEGGAVPVSKASGKSRMVQFRFACNKHLRQAMYWFSFNSLQRSEWAKKYYRNQRAKGHSKHESLRALGAKWLKIIFVMWRDHKPYDENYHLANIARQMMRQAA

SEQ ID NO: 361096 - protein, 314 aa, unidentified
MADPCSVGIDVSKATLDVAWSTNPTTQWQTTNDDAGWTALVAHVRALEPTLVVLEATGGYEIGVASALSTAQVPVAIVNPRQVRDFAKALGLLEKTDRIDAAVLATFAARIRPTPRPLPDDLQADLQALVTRRRQLVDMLTAERNRVPLARSAVRKNVLQHIAWLEKQLANTDRDLRTQIEASPIWRARDHLLQSVPGIGPATSARLLASLPELGTLSHRQISKLVGLAPLPDDSGRRSGYRRVQGGRGSVRSALYMATVSAITHNPTIRAAYRRWRAAGKLPKVALVAAMHKLLIHLNAMIRHQTPWHPPATA

SEQ ID NO: 361097 - protein, 387 aa, unidentified
MSEMFNPHAPATAYDHNTTIVAVLELSGKNWLLGAVAPGLSRRMKRSFEARNVEAVVRALEQAKGASAKAHLEVTRIVVGFESGRDGFWIARALQQRGLEVYVMHAASIAVERRGKRAKTDRLDVDLLLTTLMGWLRGEPGRCTMAPVPSEEEEDLREPGRRRETLVHARLKVENQIASLLIRHGIDGFKPRLKNAETKLCELRTFDSRSLPANTMNSLRLLLAQHRLLSAQLKEIEEARQRVVNVAKPDRLQRMIQTLARVVGVGVETATVLVHEVFSRSFKDRRALGAFVGLTGTPYNSGSSKTEQGISKNGNSRVRRMLSQLAWRWLGHQPESALAQWFNARLGGAKGRMKKVLIVALMRKLVIALWRLAETGEVPAGARLTAR

SEQ ID NO: 361098 - protein, 322 aa, unidentified
MGVQRNTRVPPMASMTAQGDVIHVAIELSQSSWLVAARLPDAKKSHLFRVAGGEASALLKLLSSLRMRFTAKIRRPVKIICCFEAGRDGFWLHRLLIGHGIESYVLEPTSILVNRRARRAKTDRLDAEGMLRVLAAYLAGDHKACSMVRVPTPDEEDAKRPHRERQHLTRERLRIENRIEALLFTQGIRERPSLRSWERDVTGLRTGDGRAIPQRLRAELDRLRRQLVLVLALIREVDAERDLACRTAPQEPIHRKITALCRIRGIGDNFAAVLAREVFYRSFANRRQLASYVGITPMPYQSGKLDRDRRIGVPATRVPAQR

SEQ ID NO: 361099 - protein, 458 aa, unidentified
MKVRLGIDVACRAAHQASCADETGVFAWSGHRFRTDPADLDALWAKLPAGAEEVMVIIEPTRNAWVPLAAWFRRHGATVVVVPPEQSADLRDYYNKHAKSDRLDSKILARLPLLHPEGLHVETTIGPGDPLKRAVKIRSGLVHRRTTSMQRLDCLLELMGPAWTCALGSDMSLTAFRFLARYANPHTVRRLGHRRLTEFLHRSSRGAWAAERATEILDAATTSITLWGDEFAFDDLAADIAAEARLALGLCAEIHTIDKRIGELYTVADPDGIVRSAPGVGVVGAPQILGRLGDAKRFKNLAAVRSFSGLVPRQNDSGVAAKAGGPTKAGDACLREALFNAADHARKIDPTLAARYHRLMTLEGKHHTSALCTISTVLLTRIAACLRAGDAYQLRDVDGTIITEAEGRSIVADRYAIPAATRAARRSLINVPRHPRRNERAKKGVAERSEAPPVPASA

SEQ ID NO: 361100 - protein, 414 aa, unidentified
MKLFVGIDVSSEELEACLMNPEGDSLETFKVKNDLHGASHLRDRIVAIADKLSSSEIHIGLEATSVYSWHPAMFLHEDESLKQRNTKVFTINPKLINKFREAYADLDKTDRIDAWIIADRLRFGRLTKTIVMQEQYIALQRLTRMRFHLVHNLTREKQYFLQNLFYKCNAFRSEVDSSVFGHAIMEMLSEKYSLDEIASMEVADLADYLKEKGKNRFPDPERVARCIQKAARASYRLSKVVEDSIDIVLGTSIQSIRSIQAQLKELDKAIERILEGISGATCLRSIPGIDRIYAAGILAEIGDIDRFSDQAAVAKYAGLTWRRHQSGPFEAEDTKRIRSGNRFLRYYLVEAANSVKNRDPEFGEYYRKKYNEVPKHQHKRALVLTARKLVRLVDVLLRNDQLYTPRRKVNSAKD

SEQ ID NO: 361101 - protein, 422 aa, unidentified
MQILYPRCAAIDVAKKEIAVCVRTPGNEPGGRRSQVRKYKTFYGVLKHMCAWLTECGVTHVAMEATGIYSNPVFHALAEFGDFEVIKVNPAHVKNPVAGRKTDASDCAWLAELLECGLVRGSYIPARKIAELRDLTRYRAKLVGSRTSEIQRLQKTLEDAGIKIDSVASDVLGVSSREMIRALIDGERRGAVLAELARGVLRAKIPDLSMALAGRFNDHHALMCKLHLRHAGELTELTGTVDKQIAALMVPFREARELLTTIPGIGDLAASVIISEIGPDMSLFPDAGHLASRAGLAPASNESGGRRRPAGTRHGNQHLANMLVECAWAASRTKTRPSAQFHRLVRRFGGHRNPRAKKKAAVAVARTLILITYCVLDRRVPYDELGEDFYTRRQNPEHYKDKLIAQLAKLGYTITVQPAPAA

SEQ ID NO: 361102 - protein, 408 aa, unidentified
MTVVGIDVSKGKSMVAAMKPGGELVAAPYEVRHSDIELSRLALDVLCMEPDTRVVMEATGRYHEPVAALLHSEGIFVSILNPLLIKQSGAGSLRKVKSDPKDALKIAKYGLDNWSTLREYTPTEAIRQQLKLCERQCDLYSKNIVMLTNNLISLSDKTFPGVNELFSSPEKADGHLKWVDFYRTFWHCDCINRMSPDAFGERYKKWCKRKGYHFSTDATDALYAASCGLYTTLPRDNNAKLLVTVAADQLIALRENQSKLEAEMLNLCKQLPEYETVMAMYGVGKSTGPHLMAELGDIRRFPHRSSIVAFAGVDPGVVGSGKMQLSSVATSKRGSPQLRKALFQVVSTYVKRKPENEAVYQFYAKKRDEGKPFFVCTTAAANKFLRIYYARVKECLNAAESAVQTEEG

SEQ ID NO: 361103 - protein, 474 aa, unidentified
MKKHKKTKPKETKPLHEPVANAAGIDLGATEIWAAVPPERCQLSIRRFGAFTQDLKALVAWLVDCGIGSVAMEATGVYWIPLYQLLSDAKVEIYLVNARHVKNVPGRKSDVRDCQWLQYLHSVGLLQPSYRPDQTVCELRTIFRCRGNLLKQGAENLQHMQAALDQMNIKLHYVIDDLSGQTGQAIIQAILNGEREPLRLAKYRNKRIKASEETIAKSLEGDWRKEHLFVLRVAWQNAKHLQEQIKKCDQELMEYARQLEASPVIAQPTRSLRILGLNPEPGVAPLNPDSALRPVKPRRKTSKNEPDGPWREELHRFFGVDLTLIPSIGVLSGITLMTELGNDLSAFKKSHHFSSWLCLCPDNETSASKVLRRSTRRSQNRVRQALRMAASSLHHDKSYLGDKYRRLRARLGAPKAITAMAHQLARIIWHMLTYRVPFDIGIFAAQEKANQTRRLNRLHSNARQMGYQLTPIPA

SEQ ID NO: 361104 - protein, 343 aa, unidentified
MDVSTIGLDIAKSVFQVHGIDASGEVVVRRHLKRRQLLGFFEKLGPCLVGIEACATAHYWGRKIAALGHEVRLMPAHYVKAYVKRGKNDAADAEAICEAVQRPTMRFVSLKSAEQQSVLMLHRTRELLVRQRTMLVNALRAHMAEFGIVTRVGLPQIKELLAVIADKDDDRLPLGARACLQSLGRQFLSLHEEICAADKRLHAWHRSSPVSQRLATIPGVGPVTASALAASIADPEVFTSGRAMAAWIGLVPRQNSTGGKQRLGKISKQGDQYLRWLLVAGAMTVIRHAKRRGATPQPWLDDLIARRPTKVAAVALANKMARMAWALLRQGGTYRQPVVTASL

SEQ ID NO: 361105 - protein, 323 aa, unidentified
MSEQRAGGIDVSKAWLDVAARPGRPVARFANTTAGHAEVVAHLAALPVEERPAVLVVAATGGLERGIDRALTAVGWTVVVVNPRQVRDCARCLGRLAKTDRLDAEVLARYGETLDPEPRPRPEARLQELRDLEARRRQLVEMLTMEKNRLQQAPPRTQAGIRRHLEFLREELADVTRQLAEAIQADPTWRETVARLRTVAGIGPIPATLLVLDLPELGRLDRKALAALVGVAPCNRDSGAARGTRSCTGGRAAVRTGLYMAVRSAIRGNPAIRACYTRLTAAGKRDKVAVVACIRTLLASLNVMLRTKTDWDPQRVQPTTTPA

SEQ ID NO: 361106 - protein, 350 aa, unidentified
MKIIGCDLHTRYQQIAMVETDTGELVERRLEHESGEARAFYGSLTGPARVGIEATGHTHWFEAMLAELGHELWMGDAAKIRAAVVRKQKTDARDAAHLLDLLCSGRFPKIWRPSGEQRDLRQLVWHRQKLVWMRGAVKNQMHALAMGEGVCRKKKLFTAKGRKELEGLALGPWASYRRQELLRMFDELQASVARLDQAVEQAAQSQALAVRLMTHPGVGPVTSLAFVLIIGPVERFERSRQVVSYLGLNPQEHSSGGKQRLGSISKQGNPMMRSLLVEAGHTAARFDPELKRMYQRLKFRRGAAVAKVAVARKLAVRLYWMLRSTADYAQLVRMQGSPWATLVENSPSLG

SEQ ID NO: 361107 - protein, 406 aa, unidentified
MQQSNAKSVNIENSTALETVRRQQRKGNHYAAYIGMDVHKDTITYAVALPGRASAGYRGEIAHTPKAVNKLIERLSAEFNSELLLFCYEAGPTGYHLYRQLMASGHECQVVAPSQIPHKPGERIKTDRRDALKLAQYLRSGDLTAVWVPDQEQEAMRDLTRARGDMKGQELKARQQLNGFVLRHGHSWPSNKTRWTQAHYNWLESLVFPHPWQQVVLQEYIDAVKAASRRVADMMAQILQALPSWSLARVVDSLVALRGIDKLAAITLLAELGDISRFDSPKQLMAFLGLVPSEHSTGKRRRQGAITLTGNGHARRMLIESAWSYRFPARQTMHLKRKAVNASDEAKAIAWRAQKRLCGRYRRLTEAGKNQKLVCVATARELVGFIWDIVRIEMARLPVQQNAHIA

SEQ ID NO: 361108 - protein, 311 aa, unidentified
MSSSVGIDVSSATLAVHIRPEGVNFSVSNDLKGFQLLVEKLGGYAVSMVLLEATGGYECNVLKALQDADFPVCRINPSRARDFAKSMGKRAKTDPIDAAVLAHLAEVMPPRPCQVMTPERALLRELLMQRDRFVQQRDDDKRRLKQARAISVCLRLEQHIAYLKGEIRALEQEIAQQAAALPDDRVKQLTQVKGIGLITAGKLMALLPELGQVDKKEIAALVGVAPFNQDSGKQSGKRSIWGGRSQVRRALYMACWVVIRHNKDFSERYNALRAQGKCAKVAVVACMRVLIVRLNAMLKTGTPWQKQVVHS

SEQ ID NO: 361109 - protein, 489 aa, unidentified
MNFTALTATVQPNLDVNYIGMDVHSDNVVVCVRRNTINSSGQLVGKTIKTKKVVIKSSQEPLVELLSKYADGQQHIMTAESTFNWYWLADIAEDRGWNFRLADPCTVSQANIKAANDETDAEYLADRLRTGSLKSTSVLPRKLRGVRDLMRHRLRVMQEVSDKKVRLSNLYHNHCAHPMHGKLLTALQDAYDEISVDAVLESGICNNGSELIIGDLLTGLREAEARLAKIEAAVYERIDEVDEYKAERLLLKTSMKGCGDVLSAIIVTEIGDISRFRTMGDFVSYCRLAPTSKLSNGKSKGQGNAKNGNAYLSWALTELATLMARFNEPIRRYLERKQDKAGLRVVAVRALAAKLARCVYQVLRKNESFDLALAFGGKPTRAPTALAEKPAAEVVQSPQEPEVPPITTAPEPHLQAPLSEAPIVVKEPSPVKAKRGARKKAVSPASSAPAVTAEGRQTARKADRVKARCALTATPPSCAGTSCVKSRRE

SEQ ID NO: 361110 - protein, 309 aa, unidentified
MIAVGVDVGKSFLDVAIHGEPTVQRFKNASGAVERLVKQLKKRGPVRIVVEATGGYEETVLETCAKAGLWIARINPRQGRDFSRATGQLAKTDHLDARMLAEMAAVFSARLRQHTPALPWQTELEGWLRRRRQVTEAIICTRQQMTMALPAIRALMRKTLAALKREQAVVDAAIKQLLHMHATPAVRSAKGLGPVFQATALALLPELGQLSRQQVAKLVGVAPLNRDSGQSQGKRKIYGGRAQMRVALYMATLSAVRWDPAMRSHYEQLRARGKVAKVALVACMRKLLGIVNAKRREELRGHAEMPCAA

SEQ ID NO: 361111 - protein, 350 aa, unidentified
MSHKTAATVAHTIGIDTGKNILHLIGLDDQGAIVLREKIARGRIAARLANVPRCLIGIEAGMATRYVAQLSALGHDVKQVPPAYSKPFRQGHKNDFRDAHAIAEAVQRPSTRFVPVKTDDQLDLQALHRVRSRLVGQRTAVINQIRGFLLEHGIAVRQGLRFLRQQLPDILAKRSDVLSPRMIRIMEDLSGDWRRLDERIEHVTEEIEVLAHGSESCRQLMTVPGIGPLIASAMVAAIGNGAAFAKGRDFAAWLGLVPKQMSTGDRTILGRISKRGNRYLRTLLMQGARVILLRPANWAKHSFGLWLTAAAQRLHHNVLATALANKLARIAWTVLAQGRSYEARVEPKVA

SEQ ID NO: 361112 - protein, 417 aa, unidentified
MNEFKDWQLHRAFGAVDWASEKHSVIVVDQNGKVIEDFQIEHSALGWKKFRQKLQPYGGIPFAIETSQGAVVEQLLEAGMMVYPLNPKSAQAYRQRKAPSGVKDDQLDAWSFADALRLDGQGWKALNPEEALIKELRLLCRDEVSLIEQRTAFVQQLRQALAEYYPAALAAFEDWTSVSAWMFLQRFATPQTLEKAGKRQWQNFLHSRRLWGTDQGPRRMEIFAHASEFAGTIPTTNAKSLLALSLVQMLFALEKQLGLYRQKIQALFAQHPDHDLFGSLPGAGPKIAPRLLSEIGDDRQRFGGDAQALQCLGGTAPVTKRSGKYLKVHQRWACDKHLRHAIHLFAEQSLTRCVWADIYYQNHRKKGLSHANALRRLGHRWLKIIHKMWIDRTPYDPELHHRNQLKHGSWIFQLQPV

SEQ ID NO: 361113 - protein, 358 aa, unidentified
MTIVAQTHAFVVGADTHSRTHALAIMANSGELLDERTFPATKPAMARALDWAARRTGGDLGTLWVIEGAATYGAQLCHTVQEAGYPVIEAPAMSARTRRGVGKSDPLDARRIAAAALPLENSKLRHPRDDAGQRAALRVLTTARDQMTREHTAAVNALIALARTIDLGLDARQGLGAAQLAAIATWRTRSEPLHVKVARAEAIRLARRIAALDDDLVHNRDTLTAILDETPARSLLDLPGIGAVTAAVVLTAWSHPGRVRSEAAFANLAGVSPVPASSGNTVRHRLNYGGDRDLNRALHWAVVTRMRMDPLTRAYVERRRAEGLTTKEIRRCLKRYLARQIHRHLTRAYAQSQPLDRT

SEQ ID NO: 361114 - protein, 406 aa, unidentified
MYVGWDWATETHDVTVMDEAGRRIDRWEFAHTEDGFARTLARLRRHGDPAGMPVAIESTRGLAVDRLLAAGHPIVPVHPNAFHAMRPRWGASKAKTDAGDSMKLADYLRTDGHRLRVLTPTDPATLELQALTRQRADHVEAKVAAVNQLDAQLDALWPGGKAVFADRDSDIALDFLERYPTPQDAAKLTPARLEAWCKRRGYSGKRTGAQLIDRMRAAPSAAARLGRATVATLIHIQVTLVRALRATLRELDRQIAAAVQAHPYAALFATMPRIGTVNLGQIIGEISPILERAQSCEQFIAETGVVPVTRASGKSRTVAFRYATNRRARIAVTTFADNSRHSSAWAAKIYDDARARHKRHPHAIRILARAWLRVIWACWRDGSCYNPISHQASNKIGTAPEQALAA

SEQ ID NO: 361115 - protein, 341 aa, unidentified
MELSVLAIDLAKSVFQLHGADARGKQVLSKKLRRSQLSTFIARARPCTIAMEACSGAHFWARQFGEFGHTMKLIAPQFVKPYVKSNKNDRADAAAICEAAQRPDMRFVSIKTIEQQEIQNLHRVRQRVVTERTALINQTRGLLTEHGLVLPQGSGEVLKRLHDVVAKGVEQGLMTEMGRKTFEDLGSELVQAEERIDRLDKRILAIHKAHPVSQRLAEVPGVGPITATAVMAAVGDPHVFKNGRQCAAWLGLVPRQHSSGGKERLLGISKRGDSYLRQLLVHGARSEIRWLDRRSETRQTLWLRNLIVRRGMNRAVVALANKNARRLWVLMARQVDYDAAA

SEQ ID NO: 361116 - protein, 547 aa, unidentified
MPGYEGGRISGHLGVIPTPREDTRSRRMMMKHRVLGIDLGIRAPSVAVVADTDGTIIGNAVRFELGIDELEGVEVGALKGAKEGSKLHVIMEQTYPTSEYVTAFFLTRGHKVSFAKPDQVKAFRKCLSPKVKTDDVDAYVMARLPWLDPNQLARTYVPPPEIRELKIQVSQRASMVKQLVELKNQLIAYANAVWPGIARAFGDFDSAHARSFLREQRPKNIATLQVDELAKLLKDRGKIQHSYAKRLAGKLLAIAQRTIGLHQLLPEEQIESTRSHTIELVDMVEELELRIRSKEKRLDEAYVRCDPQRLLMSIPGIAEKTAPTIFCYFGEPERFASTRKAQGFVGMFPETDASGTSDRKGTHITKAGPALLRRDLFLAADHFRRNDPHGAKLYHNQMVHHGKHHNSALCIIANRSLIPRILAVLREQRPYELQDFEGHSITKTEARELAEKWKVPEEVRKRLRNKKTLTQERWEAPPSVTSEPKAPRNGRPSQPAHPNPETLSLTTDQLKMLVFKSLEKMLNSGGNVEEIRLQLREEAADLLQEKA

SEQ ID NO: 361117 - protein, 354 aa, unidentified
MMIIGCDYHPGFQQIVFVDTKTGELQERRLEHGEEAEKFYRDLAAPGVKVRVGMEASGPARWLERLLAELQFELWTGDAAAINAKRVRKQKTDRQDAQLILRLMLKDDFPQIWVPSWENRDLRQLLWHRHRMVQARTRIMNQLQAVALNEGLRSKKRLWRDAGREQLESFRLAPWASRRRRDLLELLDRLTPTIAELTAAIEQEVEKCPAAQRLRTHPGVGALTALAFVLIIGRAERFQCGKQIACYLGLVPLEDSSGQRRRLGHITKQGNSLLRFLLVEAAQVTVRSLPEWRSKYCHMALRRGRKIAKVAMARKLAVRLYWMMRKEWNYAELSKFGSYAGKPGNRHGVKSNTE

SEQ ID NO: 361118 - protein, 403 aa, unidentified
MGMRTDRVDHLIGVDTHRDAHAVAVVAPSGAVGAQATVVADARGDRRLLRFARAEAPGRGVWAIERRGSFGAGLTTFLLERGEWVVEVDRPTRPARRRGAESDQLDAARAACEPLAREHLAQPRRRGEREAIRVLLATGEGAILARTKAIGQLKALIVNAPEGIRRQLRRLSTEEQLARCARLRTSASQSAEHRATTIALRFAARRALALEAEAADLESQLEPLGGELAPTLLAQPGVGVISAAQILTAWSHPGRFRSEAAFASLAGGAPIPASSGQTIRHRLTRSGDRQLNRALHTITLSRERDTHLRRTQDRRRKETARDQALPETTPRETARPTTRGERREHLTSHRSIQASSRPRPRRCAARGPPRARRAPRARTRPRRRGPPRSDGRPAARGRPRAGA

SEQ ID NO: 361119 - protein, 410 aa, unidentified
MEVFLERCAGLDVHQASVVCCILIGVPGRKPQKLLRSFGTTTRELEALRAWLVEHGVTHVGMESTGVYWKPVYAVLEGHVELIVGNAHHIKNVPGRKTDVKDAEWIAQLVRHGLVAPSFVPPPAIRDLRELVRYRRTLIETRTAVRNRVLKLLEGANIKLSGVASDVFGVSGMAMLEALASGTTNATEMAGLARGRMRRKHAALEAALDGRMREHQCFLLGMQLRSLGTIDQDLEALDARIEKQLEPYQAQHRLLMQIPGVDWVTAAAIIAEIGTDMDVFATARRLAAWAGVAPGNYESAGKQKGAGTRRGNVFLKSALFAAASAAVRTKGSYYRDKYNRLRARRGPIRAIMAIAHKLLIAAFHMLSTGEAFRDLGESYLDQVARKRSTAKLVQRLSNLGYDVMLVPKAA

SEQ ID NO: 361120 - protein, 405 aa, unidentified
MFVGIDWASQTHAVCVLDDAGTKHANFQVGHTADGLDQLIARLGRLGDPATLPVAIERPDGRLVDRLLEAGHPVVAVQPNAIKAWRDAEILSGAKNDPGDAHLLAEYLRLRRHRLRVLAPFSAETRALRAVVRTRGDLVDQRVATANQLGACLEAFWPGAKGIFADLATPIALDFLARYPTPESAANLGERRMAAFLTKHGYCGRRPPAQLLTRLRAAPPGLCGTVEVEARRDAVLALVGVLRALLAGIKDLDRSVVAHLGEHPDAEIFTSLPRSGQINAAQVLAEWGDCRPAYADAEAVACLAGATPVTKQSGKHTAVSFRWACNKRFRQAICTFADNSRHASPWAAKVYADALARGHDHPHAVRVLARAWIRVIWRCWIDQTPYDPAKHGAAHKLTEMATTAA

SEQ ID NO: 361121 - protein, 414 aa, unidentified
MLKIVYRVCCGMDVHKSFVVACIASTTEYGVTTYKSKRFSTFTGDLRRCAAWLAENSCKDVCMESTGKYWIPIYNILEPTCNIVLAHPKYVKAIRGKKTDKRDAKWIADIFKHDLVAGSFIPPADIRQLRDLVRYRCKLTNFTTGEKNRAQNCLTVSNIKLDDVFSDVFGKTASAITTRILENPAEKITDVSGFRTKGMKATNEQVLAAVDGEMCEEQAEKLRIIRSHMDSLQLCKLDLESLILATAEKYLPQLGLVMTVPGIQSFTAIGIISEIGVDMSVFPTSKHLCSWAGLTPQNNESAGKKKTTRISRAGAYIKPLLVQCALNAVRAKKFPEVRNRYLALKKRRGHKKAIIAIARMLLTAIYNILKKNESYNPELYRQTDRPPAHREVSVAEAIFILQRQGYLVAAPPTP

SEQ ID NO: 361122 - protein, 352 aa, unidentified
MANGTTTMLTIGIDLGDRHSAVCVLGSEGEVSRRFNVATTREGLEGKLGGLERARVVIEVGTHSPWVSRWLEAKGHEVIVANARAVRSIAESDRKTDRNDAEQLARLGRVDPKLLHPIRHRGEAAQRHRMLLTVRDHLVRTRSSFVVQARGLAKGLGERLPRCKSETFAKRMRVEPWATLFPAMDVIVRTVEQLDAGIAALDEQLEALARSTYPETLLLRQISGIGLLTALAFVLTLEDPARFRHSRAVGSFLGLTVRRRQSGSRDPALRITKAGDFYLRRLLIQCAHFVLTHGPDCDLRRFGDRLIARHGRKKAAVAVARKLAVRMHRLWTTGEVYEPLYDAERKALLAAA

SEQ ID NO: 361123 - protein, 346 aa, unidentified
MKINRIGVDLAKNVFQLHGADRSGRAVWKRKLSRDKWLKVLLETIEPGTVIGMEACGGAHHWARVLIEKGYEVKIIPPQFVKPFVKSNKNDANDAQAICEAMVRPNMHPVKVKTVEQRDMQAVHRIRQEIKGHRTAKVNQIRGLVTEYGLVAPRQISSLRKAIPEWLEDAGNGLTIFFRQLLHGLWEDLRSLDKRMSELDKQVAVIAQENPIAKRLQQLRGVGPLIATALVATMGNAKQYRKGRDMAAAIGLTPRQHSSGGKDRLLGISKRGDAYLRCLLVHGARSAMRTSKDKDDRVSRWITNLQDRRHANVAACAMANKIARMAWVMMSKGVDYDPDFKPVMAR

SEQ ID NO: 361124 - protein, 411 aa, unidentified
MSYKIAGIDVHKKVLMVVVIDATTPEEKPERRRFATMPSDLHRLLIWLREQGVEEAVMESTAQYWRSVWLELEPHMRLHLAQAFSNRAPRGRKHDFKDAERLVRRLIANELILSFVPGGEQRTWRNLTRMKLQLTRDRVRLQNQMECLLEEMRIKLSIVVSNLLGASGIRILRALAQGETDPKQLAQLGDERLQCTEEQLVDALTGRAQPLHREMLALQLERLQLIDTQIAKLNGLIAQAMKPHQEAVMRLAEVPGLGVDSAQQIIAEVGQQASTFPSAAELTSWVGTCPGKDESAEQNHSSRSAKGNKYLRRVLNQAAHAAVKRKGSYFQVVFRRLLPRLGYQSAIWAVAHRLCRVVWKILHEGVRFIEHGIEPDPKAKMRHARRLAQALRKLGYQVTITPTNLASGMQM

SEQ ID NO: 361125 - protein, 310 aa, unidentified
MNTVTFPSFVSRGCGIDIHKKVVVATINGEGIRKETREFNTFTSSLTALKDWLLANEITHVAMESTGVYWKPVYNVLDPSGLTVWIVNARHIKYVPGHKTDKADSAWICKLLLAGLLKPSYIPAREQRELRDLTRYRTKLIQHIFSEKNRTMRILEDCNIKLSSVLCDTSGVTATKLIDMICAGKSITMADIEQVYHGKLSASKEDLYESCNGLVEEHHIYMLGIIRQDIEQTEQIVMKLNERIKKMLSVYENVLELLKKIPGLSTKTVEDLVSEIGLDMSTFPTEKHLASWVGMCPGNNESAGKKKADA

SEQ ID NO: 361126 - protein, 352 aa, unidentified
MNIIGCDLHTRYQVVAWIEEETGEIRKRRLAHEQEEPRAFYAGLPRGARIGIEATLPALWYERLLAECGHELWVGDAARIRAMEVREQKTDARDAKHLLELLRTNRFPRIWVPSAEDRDLRQLLVHRMKLVRVRTLVKNQLHALAMSQGVCRKRKLWSLNGRAELKSLVLLPWASRRRKELLAWLDQLDAAIEPLDQAVEEEAYARPEAVRLMTHPGVGPVVSLAYVLTLGPVERFRNSRRLVSYLGLNPREHSSGGRQQLGAISKQGNSMMRWLLVQAAQTAAWGDPELRRVYQRLKFRRPSGVAKVAIARRLAVRLYWMLRGRMDYAQLLVRMSGSPSSAMAPQEAGSTV

SEQ ID NO: 361127 - protein, 360 aa, unidentified
MSKIIKQAGRKRTTKDNPEMTMGIDVGDRYSHLCLLDEDGEVVERDRVRSTDAAFRRHFEGAPRLRIALECGTHSPWMSRLLKQLGHQVVIANARKIPTITESESKNDRNDAEQLARLAAFDPRLLSPLEHRSLSRQQDLNLIQARAILVKARTMIVNALRGLVKSAGGRLPACSAASFPARAASAVPPVLTAVAGPLIEQIARLNLQIGTMDQQIEKLAAKYPEIGTLRSVPGVGPLVATAYVLTLDGPNVVPSSRSAGAFLGLRPGQSQSGESDPERRITRTGNTYLRCLLVQSAQYVLGRFGPDSALRRWGLKLAASGGKRAKKRAIIAVARKLAVLLHSMWRSGQRFEPFPQPAQA

SEQ ID NO: 361128 - protein, 311 aa, unidentified
MTSAGIFVGIDVAKAQLDIAIRPSGEYFTAPHDDPGVSGVVQRLCALQPTLVVLEATGGFELDVASALGAAGVPTAVVNPRQVRDFARSTGLLAKTDRLDAQVLAHFGEVLRPAARSLPDAQAQELSAVLLRRRQLVEMLVAEKNRLPMATRRIRPPLQRHIEWLQQQVADLDRDLGALIRSSPLWRAKDDLLRSVPGVGPVLATTLLASLPELGTLNRQQIAALVGVAPLNRDSGTWRGRRTVWGGRAHVRAVLYMSTLVAVRHNPRLRSFSVRLRDAGKVPKVALIACMRKLLTILNAILKHQTPWALP

SEQ ID NO: 361129 - protein, 350 aa, unidentified
MSLELRSLVPYPNSCLGTSPHQQERDTKMATVSFCGIDVAKDRLDVVVLPEQRCWSVCNDAAGWAELAKQLGSFSIAAIGLEASGGYERGVMRVLLAADMPVHQINPFKLRQFAKASGVLAKSDRLDARVIASFIAIMPTRRAQRPSPAIERLTEILSVRRQLTDQKIAAQNASAMLQDAMLLRLSRRRIGRLAADIEMLDRSLVEIVRTDAALAHRYRLLTSMPGVGPALACTLIALLPELGSMSRKQVAALVGVAPYTFESGKLKGKRCIWGGRAPVRHVLYLAAMSASNWNPVLKAFHSRLKIAGKLHKVAIVAVMRKMITMLNAMVRDDVAWAGHLGGRQILPTAR

SEQ ID NO: 361130 - protein, 391 aa, unidentified
MFLLGIDIAKLNHVASCIDSSTNEIVFSNFKFKNDFKGFSALLNKIKSFDAKNLIIGLESTSHYGENLINFLFRHDFKVALINPLQTSHLRKANIRDAKNDNLDSLNIAKSLIFAKLNFISEKNINCFSLKKLTRFRSSLIKQRSKAKIQLTSLLDLLFPELQYLFKSKIHSKAIYSLLKKYPSAEEIAALKDDEISNLLYASSKGHFKKEKSIELKSLAKTTVGIKDTSISLHLIQLIELIELYTKQIKDIEIKITDTVNKLDTTLLSVPGISIIACAIILGETNNFENFSSSKKLLAFAGLDPKIRQSGNFNASSCRMSKKGSPYLRYALIFTAWNIVRHSEKFNKYYFLKRSQGKSHYNALVHVAHKLVRILFTLIKKNISYQEEKLE

SEQ ID NO: 361131 - protein, 387 aa, unidentified
MDVLYQSCAGIDVHQANIVVCILHGPLTSTRPKREMATFDTTTKGLRACHDFLSQFHVEAVGMESTGVYWRPVWHALCDDFELILAQPAHMKAIPGQKTDKKDAHWIAKLTRIGLLPRSFVPDETIQELRELTRQRKHYVESRNRETNRIHKFLQSGGIKLTTYIEDIMGLSGRNLLQLLVDGTPITPRIVHQSVYTSLKKKVPQLLEALDGYFSDHHRFMLKQSLEIYDFYQKQIELLEERITVYLSQYENHVETLDSIPGIDVITASVIISEVGVDMSQFPTFGHLASWAGLCPGNNESAGKKRSTKIRHGNSYLKKCLCQAAFAARNQKGSTLADRFYQIQSRRGSQKATIALAHQLLKIAYILLKEQMTYPEFLAQKRLLGTS

SEQ ID NO: 361132 - protein, 343 aa, unidentified
MKKLKSDPLALLALLRRWRDQSTKAGGQIRRMVLAFEAGRDGFWLARWLRVRGIEAYVIHPTSIPVSREHRRAKTDRLDTSLLMRALLGWLRGEPKHCSMAAIPTAAEEDACRPTRERETLVRERTRVVNRIKSTLIRFGIRSFKVKLRQARQALEALRTPEGEPLPPNTLAELRRDVARLELMREQIAEIERTRLERLKQAPHKGTHPMIRMLARVMGIGIETADMLVHEVLRRNLRDQRAVARYSGLTGSPDESGSKRREKGLARAGNARVRRGMIQLAWRWLMFQKNSALAQWYQARTADGRPGLRKTMIVALARKLLIALWRYVTSGETPAGAVLRPAT

SEQ ID NO: 361133 - protein, 361 aa, unidentified
MQQTMTVVGLDVHARSTQAAAIDLLSGELRRERFGPGTERVVEWLSGLEGPVRAVYEAGPTGFGLARVAAAAGVDVMVVAPSKTPRAPGDRVKSDRKDAELLARLLLAGQLRPVTVPPDWLEAIRHLARAREQVRRDLGRARQRVSKLLLVEGRVYPGVTTWNQEHRRWLARQQFAFDATALAFIDLLAAVDGLAARRQVLDERLSGLAADERLWPTVSRLRAFRGVDTLTALCLHLELGGDWQRFRSPRQLGSWLGLTPSLEQSGESVTHGGITKTGSGIARRLLVEAAWQYLREPRIGVTLQNRQAGLPDHVLQIAWRAQRRLHRTHQHMRGRGKPANVTTVAVARELAGFLWAAATAP

SEQ ID NO: 361134 - protein, 451 aa, unidentified
MKTNARRKLRICNPDAAGIDVGSREHWVAVPEDRDAESVRPFGTFTSDLNRLADWLQACGVTTVAMESTGVYWIPLYEILEQRGFEVLLVNAEHVRNVRGRKSDVKDCAWIQELHTYGLLRGSFRPAAEIVELREYVRLRQMLVESAARHIQHMQKALTQMNIQVHHVLTDITGTTGMRIVRDLVAGQYDPKVLAEHRDPRCSATKETIAAALTGNYRTEHIFALGQALSLYDTYQQRLADCDERIEQTLAKLAKRAPEPRAALPRNTKKEGKGTPNFDIRSPLHRMTCGVDLTQMPGIASTTALNLLAEIGPDMGRWPSAKHFTSWMNLAPGTTKTGGKLKSGRRPRAKNRAGNLLRQAAVSVGRTVSALGAFYRRLASRCGKGKAVVATARKLAVAVYYMLKEGRPYQDSGAGAYETAYRERRVRSLRNHARALGFELSPVQADAPAAT

SEQ ID NO: 361135 - protein, 458 aa, unidentified
MYRELIPLRQALRVELRANLPPDLPGLDAEHLLQAYLNQLTLYVGTDVADQTFSLFAVDAAGNELGHLLDVPNTPAGFEIAWAWLEELRCQHHLRIMLLAVETTGVYYWAWWDFLAGRPNLARVLYNPRTTDSMTDVLSKKVRNELVDAYALAEQARLGSTPEVILTEDPALLSARFCSRAARDLAQQINRKKNQLRALLRAYNPALGQVFPGDQLHHPAVYALLQHYLLPEEFVTAGVEAITTILAQHCRTAFGRTHAQQLVTLCAQTLTRPVGRSPIHQRVQQLAHDILSDQQHKQHFLQTGYALIQDCVETKLLRTAKGAGISNTLALVSELGSCSRFPDGEHMASFLGLTTSKHISGTTLFQSKHITKQGSPNGRYAAINLAHHLTRYVPKYQQMYERIKNRKPPHKGHFVALTAVARDFIANVLYAMWRDQRPFFEHVEDYRAYRQAHPRSAD

SEQ ID NO: 361136 - protein, 342 aa, unidentified
MNIPVRIGMDTSKSVFQLHGVDENEVVVVRRQFRRAEMIRYFERLPPVLVAIESCGSSHHWARLLQSFGHEVKLIPPQYVKAYVKRGKNDAADAEALCEAVTRPSMRFVPVKSKERQAACMLMTVRERLVSVKSQLSNAFRSYAAEFGIVGPAGRQNVTALIKRVLEDDSLPEMARDLFRLQAEEYAAVEARLAKIEAKLMKWHREDDVSRRIATIPGVGPIGSSMLSMKAPPPETFRSGRDFAAWLGLTPKDHSTGGRQRHGGITKAGDSVLRSTLIVGATALLRHIRKGRHKPTPWLASLLERKPPKLVAVALANKFARIAWRLMISGGVYNRPVAAMPV

SEQ ID NO: 361137 - protein, 355 aa, unidentified
MNYIGMDVHKKSITMAAFSQDGSRLAKKKVAATPEGITGFLNLLEGGQPLTATMEATGFWYWVAEVLEDIDGVTVKLANPRKVRIIAESNLKNDDVDAAALAHLTRLNWLPESRLVPKKVRLVRERLRCRISLVQTRSSLKNRLTSILLKRGLSHPFSDLFGKKGRAWLDSLDLPEEYRQNMDIYLRLIDATEAEIASVDKWLTKKVKTSRQGRLLTTIPGIGKFSAMLLLAEIGGIDYFKSPKKLSAYAGLAPSMWQSGEKHRLGRLRPDCNKYIRWICIEAVTKAVRVVPCWKRLYDSICCGNDSKKPVARAAVARKIICAAWRVLTSGEPFDHLAAGRRNPKDSPAMVTGLK

SEQ ID NO: 361138 - protein, 418 aa, unidentified
MSAEIKIVYPICCGMDVHKSFIVACIGVTDQHGQTKHHIHRFSTFTGDLRRLAEWLSSYNCKDVCMESTGKYWIPVFNILEKTCNVCLTHPKYVKAIKGKKTDKRDAKRICELFKCDLVRSSFIPPLDIRQLRDLCRYHAKLTYMNTSEKNRAQNCLTTSNFKLDDVFSDVFGKSATRILDKLFEQGNSDFDVAPLLDKRCKATVDEVTAAIDGEFNVSQSEKLKLIRKHQECISELQTNLETAILNLAEQFQPQIALLMSVPGISTQLTAIRILAEIGVDMSVFETSKHLISWAGLCPGNNESGGKKKTTRIARAGTYLKPLLVQIALNDGKSNKCPELKNKYLALKKRRGGKKAVIAIARKLLTAIWHILDKGEFYNADLYHKADKPPVNRVLTPEQAFALLRSKGYEIINPNPAA

SEQ ID NO: 361139 - protein, 424 aa, unidentified
MNLTQNDRLKQVTSDTLIVGVDVGSQTHFCRAFDWRGFELSRRVFKFSNTGMGFLTFLRWTEEIMNKTEMKKVIVGCEPTGCYWLTFQKFLQDHDVQLVIVNPFTVNRSMELDDNSPEKSDLKDPKTIALLVKDGRFSTSYLPSGVYAEIREASVCRDQIMKQHVRLSNQIQGWLQKFFPEYFECYADWDSTSGLMLLREAPLPQDILKIGAGGINQIWRDAKVRAAGIKRAQTLVEAAQNSVGLEAGEAARLEIWVLVNDYILKAEQLKRLDEYLEEKVKEVPNVEKLLAIKGVGMSTVIGFIAEVGDIGRFTDPKQIQKLAGLEIVKKSSGKKKGQPRAFGTVYVYTNLLGCESARALMTWNPAFQDVFLYYRNRTKKPLGGMQAKIAVACKAIRIFYVVLKTGCDFDEEKFRKDIIRPEAA

SEQ ID NO: 361140 - protein, 421 aa, unidentified
MTPTSHDTFAAFVGIDWAEANHDGCLQPAGSAQREYFPLEHTPEAIDAWVTTLRTRFHGQPVAICLELNKGPLVSALRKYDCLVLFPINPLTLARYREAFTPSRAKDDPTDAALQLALLRTHRDKLQPLNPQSPTMRALAQLVEHRRRLVGDKVRLTNRLTSTLKNYFPQVLHWFQAKDTAIFCDFLSRWPTLKAVQLARRATLETFFRAHHVRYADVVAQRIAALKAATPLTTDDGVIAPHALLVQALVAQLRGTLQVIADFDTAIAQWAQRHPDFPFFQALPGAGPVFAPRLLVAFGDQRARYTSAAELQKYAGMAPVTERSGKKAWVHWRLQCPKFLRQTFVAWAAESIQPSFWAQVYYQPQRDKGKAHQAAVRALAFKWIRILYRCWHEHTPDDESVYLQALHRRGSSLIQNLAKAA

SEQ ID NO: 361141 - protein, 362 aa, unidentified
MSTNLTNTATTATGLILAIDLGKFKSVACTYDRAAAQAHFDTLTTCRHELTKLFDRHRPAVVVIEACTLAGWVHDLCAERGVACKVANTASEAWKFKHTKRKTDKDDALRLAQLEALGQLPIVTIPPHQTRQWRSLIAYRQTLVGRRVAVQNRLRALLVGQGLPAPRGHRAWTELGLQGIAEHARPLADCGPDELWRGLLDLALTELRQARELLDQAEAKLDALAKEDAAVQLLETIPGVGPRTAEAVAAYLPDPQRFASGKQVSAYAGLVPRQYQSGETDRRGRITKRGPALLRKLLVECAWVMLRYNSWARAVYQRLSRGKARKKQAIVALARKLLVRCWAMLRDGTPWRAEAAPAEVGA

SEQ ID NO: 361142 - protein, 410 aa, unidentified
MDGLRARHKNCPKPAATAIQGTWATEPEQENAGSRGQPRPQVHIRMKAEKCVAGCDLHRDFVSVAFLSLRGELLAEKRYPVTLRGMAALALDLAALGCRRLAVESVGHFWPHFLYTLQKLYREACGRRLAALLVNPLSTRGFGKKTDALDARRIARLLLAGNLIASNIPPTLEAMLFKLLCRLRHRLAQDRAKAANRLRKLLAVLGYRPRRLSGKLLRALGRVVGGEPLRSAFEEEGLKPPRGLESLDAAARAMLSSLLSLYAQLSGELARLDAAIAEQAAELYGGHYWLLLTVPGVGPLLAAIILAETVDARRFPSARHYKSYCGLAPKLRESGGKARLGRCGFGNPVLRWAFYMAAVNAVRGDPELRAFYERLLARGKPRRVALVAVAGKLARRCWAVLRSGEPYRCR

SEQ ID NO: 361143 - protein, 328 aa, unidentified
MSDVIVGIDVSKETLDANSARGQRKQGRIFANNPDGWNLVLSWLKALSSKQAHICMEATGRHSLGVALALHDAGHVVSVVNPAQIRDFARTKLGRNKTDKVDAALIREYAELFKPGPWTPPSTAMRRLCELQTIRAGIVSNRAEWKNRIGSGLADATATRLAAATIEHFTTQLEAIDKAIAETIDQDAELRGRRDLLLSVVGVGETLAASLLAEMPEPGILRRSGEMVAYAGLNPSHHRSGTSIDRPTRISKIGNATLRSSLYMPALSAMRFNPAVKALVARLKTAGRLKPKQIVVAAMRKLLVICFGVLKTGRRFDPAIAMPASAPK

SEQ ID NO: 361144 - protein, 415 aa, unidentified
MNSCENTSYYAGFDWAKDHHDVIVIDGSGRIVGDFRIEHTAAGWRQWQEKIAAWPGLAVAVETSFGAAVEQLLHSGVKVYPVNPMSAKRYRERQCSSGNKTDRHDAWALADALRLDGHGWRALQAGDPMIAELRILCRDEVALIEERTALINQLQQALHEYYPTALKAFDDWTLPAAWAFVEAFPDAQALTKAGRRRWEKFLHAQRLARPQTYERRLETFGQAGQWSVAPALVAAKSMLAVARCRQLRTLQTQLDAYRARIESLFARHPDHDLFGSLPGAGPKLAPRLLGEIGSDRSLYDDPQGLQCLAGTAPVSYQSGQIHKVNMRRGCNKHLRHAMYLFADKSRAQSTWAAQYYAAHRQRGKSHAQCLRCLGQRWLKIIWKMWQTSTPYNPDFHLKNQTAHGSWVLQLNPQQA

SEQ ID NO: 361145 - protein, 334 aa, unidentified
MIGVDLAKSVFQVHGASMTGQPKFRKKLSRQGFAEFMAKQPPAIVVMEACGSAHYWAREMNSLGHEVKLIAPHYVKPFVKRQKNDAADAEAIVIAAQRPEMRFVEAKSTEQQSRAILFRARERLVHQRTELVNALRACLYEFGHVVPQGLHQLGRIKGILDEPNSDLPELMRDECGDLIKQIAEKTVRIDARTAKIKALAAEADTARRLQTIPGVGPLTALAVEAFAPPMESFGSGRDFAAWLGLVPRQFSSGGKERLGRVSKAGQSDIRRLLIVGAMSRLNWLGRRSIPEGSWLARIAARKPRMLVAIALANKMARTIWALLTKNVSGDGIRR

SEQ ID NO: 361146 - protein, 423 aa, unidentified
MRFIGLDVHRDFCEVAIAEGGEVRLAGRVQTEPAALALFAQSLGIDDEVALEATGNALAIARLVAPHVARVVLANPKAVKGSTQAGAKTDKVDARTLAKLLAGGFLPAVWLPDEQTRVLRRRISARAQLVRQRTRAKNQVHATLVRNLKGKPPVSDLFGARGRHWLAAQELPPDEQETVAGCLRQIEFLDRELALVERVLAEQVLASAEMRRLLTLPGVNFVTAAALLAAIGDIRRFPSARQLVSYLGLDPRVRQSGLEPARHGRISKQGPGETRHVLVEAAWHATRAPGPLRAFHERVAARRGSNIAAVAVARKLAVIAWHMLSRGEDYAFARPSLTREKLRRLELMTGAERHKGKRIGAFAAKEQHLLDKQLAAQAEIAYRRLVQDWQPARKGTGAAPGRASRRPSSGQAARQESAPPPAL

SEQ ID NO: 361147 - protein, 388 aa, unidentified
MQTVADRPEAPTAIRTDLGAIFVSLELSRSTWLITSLSPGGGEKMSKQVVRGGDVAGLLERFARLREKARARTGKVFPFVVIQEAGLDGFWIDRALQNEGIESHVVDPASIATSRRRRRAKTDGIDGEALVRALLAYKRGEPRVCAMVKAPSPEEEDRRRLCRERKVLIGERVQHVNRVKGLLFSQGISGYEPLRRDRRERLDTLQTGDGRLLPDHLKAQVCRELDRLELLLEQIKAVEAERDVLLAAQQVAAPAPAAMLLDIKGIGPEFAAILWSEGLFRHFDNRRQVASYAGLAPTPWQSGSVDREQGVSKTGNPRLRTTLIQLAWLWLRHQPQSALALWFEERVRRNGGRLKKTTIVALARKLLVALWKYVTAGVVIEGVVMKRT

SEQ ID NO: 361148 - protein, 343 aa, unidentified
MHKSSAELLTCCGIDVSALQLAVAVQTEDARCWQRGFPNRASGHRALIVWLQKIGGRVRVCLEAAGLYSLDLALALHAASGIEVAVLNPKTANRFAATLCRSKTDPADAQVLCEYARRMPFQLWQPPSSIALQLRALTRHIAALAQQHTRDSNRLRAVSASIAGSGCVRQDLQRSLRQLQHRAEKMRAAALALIQQDAELRPRFALLLSMPGIGEISALHLLGELALLAPGLSVRQWVAHSGLDPAHHESGSSVRKPARISRAGNRYLRRALYMPALVAVRHDPHLRAFYQTLLARHKAKLQALMAVARKMLRAIFGMFRWRSDYDGSRLLPKIELPALAAVA

SEQ ID NO: 361149 - protein, 354 aa, unidentified
MEHTTRDCEGQHVYVGLDVARKSWKVSIAGEALEHKTFMQPPSVAVLAGYLRKTFPGAQVHCAYEAGYCGFWIHEQLREQQIECVVVNPADVPTKDRERAFKSDRVDARKLARGLRSGELDPIYVPSRQAQEDRTLVRLRWSLVRKQTRAKNQIKSLLAFYGIQLPEEVAETHWSKRYLAALEQQHLRYASGNAVLQTLLSELATLRQLISDTTRRIRMLAEQEPYREMAGYLRTIPGISTLTAMTLLTELVDIHRFESLDRLASYVGLAPGSHASGENDFTTGITERRNAHLRHILIESAWIAARRDPVLFETFETLAKRMPKQKAIVRIARKLLNRARFVLLRRTAYVTSVR

SEQ ID NO: 361150 - protein, 319 aa, unidentified
MDAVLGIDIAKAKFTAALLRPDGKIRHKSCANTPTGFADLAAWLQRQQVTRVHATLEATGTYGEALAIWLHDAGHVVSVVNPSIIHAYARTQLARSKTDRIDAELIARFTASHQPAPWTPPAVEIRQLQALVRRLDALQGMRTQELNRRAAGVTVADVRASIETVLASLDAQIAHVQQLMRDHLDRHPGLRAQRELLTTIPGIGEATAAVLIAELCDKRYASARQAAAFAGLVPRLVESGTLRGRSRLSKIGPGRVRKALYMPAVAALRWNPTIRAVRARLHAAGKPPMVIIGAAMRKLIHLAYDVLKSGRAYEACAHP

SEQ ID NO: 361151 - protein, 326 aa, unidentified
MSDPSRSITGGVDTHKDFHVAAAIDGLGRILGTEQFPTTPRGYRRLLRWLRRFGDVAAVGVEGTGAWGAGLARHLTGEGVRVVEVDRPNRQKRRRRGKSHPADAEAAARAVLAGEATGTPKAATGAIEAIRLVRVARRSAMKARTQAANQIHSVIDTAPEQLRATLLGLREAERIAKASRLRAGDPATPLGAAKLTLSTLAKRWIALTEEIKILDAQLDTLVETAAPSLVAAKGIGTETASMLLTTAGDNADRLKNERSFAAVCGSSPVDASSGKQQRHRLNSGGDRQANCALYLIVLNRLSWDQRTKDYMKRRLAEGKTKKEVIR

SEQ ID NO: 361152 - protein, 391 aa, unidentified
MYYCGIDVGKNSHTVLVMNERGEVTRPAQRIENDREGLNQLLGLLSSYAGQIFIGLEATGHYWLALFEALTRHNYPLVVLNPMQVRAYRKIDIRKRKTDRQDAYWIADFVRFAQPSPSSLDIPVYLQLRELSRFRFRLTQQIGDCKRKIICILDRVFPEYKRLFSDVFLRSSRQLLQGAVTAEDFAGLDMTELEQVLNRVSRGRFGYEQAKAIQEAAQKSIGVSFLTDAVHIEMSCLLKQIGLLEQQQKTVEQKLEEMMAQIPQYITTIPGVGLATGAMLLAEIGDIHRFESLEKLVAYAGIDASVYQTGLFEGDQMHMSKRGSHYLRYALWQAASASLLHNPEMKSYYDKKRGEGKPHGVAMGAVCHKLLGRVYVILKECRPYVIYPQKN

SEQ ID NO: 361153 - protein, 387 aa, unidentified
MNQSNRRVVGLDVHPDSFAGAILEGSDPWQARVKSTSTRVALPLLEKWALRHTGESDCLVLEASGNAFALAERLRRLKRKVLILDSHQAGKVGQTYCATDRVDAIKIARIYLSALSPIVWQPDQKTRERREVFSAYQAVVKEGTRLKQQIKSMLNEHCVRLESGFRLSHPTAIGRLLQRRKWTEAQKMLLEQLHAGLVGARARRQQLRRYMAREILKEKELLRLTRLCGINLITLYGLIAAIGDINRFANSRKLVAYLGLNPSVCQSGEWEGATALKRHGRGAIRALLIQSAKKLLQINNPLQKWGLAIALRRGRNKAAVAVARKLCVAVWHVMQGHVIGAIERLDTLHTKLHKLATDLGVPAIKALAYETKEALVQKKLYLLRNCP

SEQ ID NO: 361154 - protein, 342 aa, unidentified
MKYVGVDLHKQTISACVVMKECGRKKVAARKRLECRDEAGIAAWFGELGKHEVVVEATASYEWFVKLVEPLAHRVLLAHPKKLRVIAESKRKTDKLDAQVLAEFLADDAIPLAYRPGPRVREHRTLVRYRHYLQRRITSVKNKLRQVLAKYNADVRHLFTSEGREHLASVKLSPCDRFVADELQAELRQHQKRQAKANRQLRQFAAKAPLAEQEARAVLDSIPNVGPVTSDVVLAELGDWRRFRSQADVASYAGLAPGFRESAGKTKQLGITKEGSRLLRWAMIELAWRMVRTSRKWGRHYTRLEARIGAKKAIVAIARRLLGVIFSLLRSGQKYALALEAA

SEQ ID NO: 361155 - protein, 430 aa, unidentified
MEEITEDAEIVARVAALDVGKAELVACVRVPHEDKPGRRLQEVRTFATTTPALLELRDWLVCEGVTLCVMEATSTYWKPPFYLLEDAVECWVASARDVKNVPGRPKTDKLDAIWLAKLAERGMLRPSFVPPPWQRQLRDLCRYRRTLIQERTREKQRTEKLLEDTQIKLSAVISDIFGKSGRDMLEALIGGQRNPAVLAELARGSMRGKKSVLQEALTGQFRDHHGWLLRMMLDRVDALTAQIETLTGRIDEVLAPFARQVAQLDEIPGVGKTGAAELIAEMGTDMTRFPTSGHLVSWAKFAPRARQSAGKDKPGTTGKGSPWIAGALGEAVLGAARTKTFLGARYHRLARKRGKQRAIVATGRSILVIAYQLLSAPMPASPTSARTGTTASPRYAANASSSPSLNACPARRSPFRRPQPDTCSPSPRLR

SEQ ID NO: 361156 - protein, 343 aa, unidentified
MDHFAGLDVSVKDTSVCIVDGTGKIVREVKVASEPDALLRVLRNPAYRFKRIGLEAGPLSQWLFSALGEANLPVICVETRHMRAVLKAQINKTDRNDARGIAQMMRVGLYRPVHVKTLRSQKLRMLLTHRKLLQSKAIAIENDLRGTLRNFGLKVGIARWTKFEVRIEELVEDVPDLAVLVEPLLVVRRALREQIAVLHRRVLAIVRDDEVCRRLMTIPGVGPVVALTYRATVDVPARFRKSKSVGAVFGLTCSRDQSGERDRPGAISRCGDEMMRTMLYEAAQSMLVRSTRWSWLKAWAMQIAKRRGMKRAIVALARRLAVIMHRIWVDGTEFRWTRQAAAA

SEQ ID NO: 361157 - protein, 399 aa, unidentified
MFVGIDWAADAHEVCAVDASGTICHRATIAHSQDGLDRLVGHLGRWAAKGELLVGIERPEGRLVDRILEAGHPIVLIPTFAMKDLRRRYAVGGAKSDRGDGYVLADVTRTDGHRLRRLEPLSEQTRALRAVVRSRDDLVDQHKALANQLRATLEAYWPGAAAIFADVDSAICLAFLERYPTPASAARLTETRLASFLTKAGYSGRRPATQLLARLCAAPAGVLGAEAEARANTVRAMVRVMRALLGSIKDLDRSVVAHLGEHPDAKIFTSLPRSGQINAAQMLAEWGDCRQAYPQADSVAMLGGLCPVTHASGRHRDVSFRWACNKRLRQAMTCFANNSRRASPWAAEVYRQAIARGCDHPHAVRILARAWARVIWRCWQDHRAYDPALHRAARRLKAA

SEQ ID NO: 361158 - protein, 372 aa, unidentified
MPQRTQFVGIALHQASVTLAVLPEGAPACRRVQTMLNEPARLRRFLQGVRREGPVRACYEAGGCGYVLQRTLTSWGVSCEVVAPSLIPRRSGDRVKTDRRDAEMLARLYRLGELTAVRVPTEEEERTRSLIRCRWALTREVLASRHYILKLLQSRGQRFREGKNWSQAFWTWLRSIRLAGDDALTLGLYVEMLEHKLALRQRVDERLKAIALEPRWKEVVARLRCLRGIETLTVLTLASEIADARRFASARHLMAYLGLNVSEYSSGGSERRGGITKAGNSHCRHVLVEAAWHYAHPPRLTSDLAARMEGQPEAVRLHAMRAQRRLHRRFRALEARMASTKAVVAVARELIGFVWALMRGEDALLAARAPHA

SEQ ID NO: 361159 - protein, 389 aa, unidentified
MYLIGIDISKYKHDCFIATETGEVIKDSFSFDNDAKGFGQLLDVLQALDPSQTKRIGLEATGHYGYNLKVFLDRHGFGYMEFNPFLVKKLSTGLSLRKTKTDKADARLLSMILLSVDYRVYPVKSYHIQELKSLTRYYKGLVKKRSRELVVLTNTLDLMFPEFKPFFKNRFSQTAFFILEHFRTPERIARMSYQNYEKLHKLSRARLSYARFIRIKDLAKNTIGSSSDLLVFQMDSCLRLIRSLNSEIMSLESLLKTWTEKIDSPLFSIKGVGFISALSLIAEYGNFESFDSPAKMLSFAGMEPSVNQSGTSNNRGHMVKRGSGYLRDTLMNLSICFMMNNPVIYEYYRKKRLEGKPHRVALSHVAKKLIRIVFFLVKTNQPFDNSKLA

SEQ ID NO: 361160 - protein, 416 aa, unidentified
MEYAAYVGWDWADKEHELAIEDASSGRRSRKKVAGSPGALHEWAAEMRLEYGGRPIAVGIETSRGAVVAALMNYDHIVLYPLNPQSVAKFREALHPSGKKDDPVDAETALEIVAHHRHKFRPLEPADEKTRTLGLLSEQRWKLSKDLTRATNRLRANLKGYFPQALALVGDLATPMALHFLEKWPNLEKVQRARPQTVESFYRLHNSRSRTRIEERLALIHSARSLTDDPAMLSVGMTTTLSQALVIRALTDAIKMVDRQICDVLASHPEHELFRSFPGAGDVYVPRLIAIFGTDRSRFEAAEELQRLTGIAPVTKRTGGKNGTISVHRRIKRSKFLHQTIVEWAGHFSLNSEWGRAYHESQKEKGKSHWAALRALGFKLLRILFRCWKDNTLYDERHHQEELIRRGSPMAKRLAA

SEQ ID NO: 361161 - protein, 405 aa, unidentified
MWYAGIDWADQHHDAVVIDEAGQRVATLRVAHTAEGLADLTTFLRGIGDVAEHPEHLACLVETSHGLLISALLEAGLPVYPLNPKTVDRHRKPAGAKTDAIDAYLLARTGRSDLADLRRLAPDSPLITALKVLTRDQDTLIQSQTRLLNQLTACLKAYYPVALDLFGKLHQPTTLAFLQTFPTLEQARAASVDQMAAVLTAAGHPHAAAKAQQIWQQVQHPQLQADPALTRAKARLMLALVAQLQPLIAQIAAYDQEITRLFRMHSDSRAFASLPRAATRLAPRLLAEWGDDRARYADAASVQALAGTAPVAFQSGKFATVHRRYACSKPLRNALHQFAWQSTQKEPWARAYYQRKRQEGKSHSMAVRALANQWVRIIYAFWVKHEAYDATIFLAAQQAHAPRAA

SEQ ID NO: 361162 - protein, 365 aa, unidentified
MARSIVTEDRAWKEASYIMLHVGLDLSRKRVDVCAISDQGELVDELAAPFDEEGLRRLTDRVAAKHADRVRAVVESMNGARFVHDTLEAQGWDVLVADAQRVKGLAPLACKTDKIDARVLAELSFRDLVPAIWLPDPQVRRERELARFRLHLVRHRSSLKNRIHSTLITFGKPCPVSDLFGVAGRKLLERLDVPDPWRDNLEASVVLIDQLDRQIDAIASELKHVGADHPYVPLLMTAPGVGWLVGFSIACEIGDIRRFSSPTKLCGYTGLCPRVIQSGETDRRGPISKHGPKYLRWALFEAALNACDHPLYKERYERTKKRLGRQRGPKVAQIELSRKLTEAIWHMLTRNQPFAPAGAPFRLAA

SEQ ID NO: 361163 - protein, 347 aa, unidentified
MRFYNNQHKYYCGIDLHTRKMYVCIIDEKGEIREHRNLKTDRDAFLKAIAPFREDIVVAVECIFTWYWVADLCHNEGIPFVLGHALYMKAIHGGKAKNDKIDSQKIAVLLRGGMMPMAYVYPSKMRATRDLMRRRNHLMRKRSELFAHIQNTNSQYNLPDSFGCMARPKNRDGIIEQFKQPSVQQNIAVDMEMINTYDSVLSQLEKSIVKLANHHDPVSYALLQTIHGVGKIIALIILYEIENIRRFETVQDFASYSRLVKCAKESNGKKSGSGGSKIGNAHLKWAFSEAAVFFINGNDPAKKYLDKLTNKHGKSKALSILAHKLGRAVYFMLKNKEAFDQKKFLAV

SEQ ID NO: 361164 - protein, 371 aa, unidentified
MSELPAETRPARLKVEASPRPPGARKPETELGAVSTTAVPHPDSRSGPSPHLQGRVMDEQRTVFVGIDVSKDRLDVHLRPSGEAFCVPREGKGMDDLVIRLQGLSVALVVLEATGGFEATVAAALAGVGLPLCVVNPRQIRDFARAMGRLAKTDTLDAEVIALFAERVRPQARPLREPERVHLAELVGRRRQIIEMIGMETNRGRQAIDKPLARRLARHVAYLQKELDAIDHDIGDAIKHSPAWREAEALLKSVPCIGDVTARTLLAELPELGTVSRHQVAALVGVAPINRDSGLMRGRRAIAGGRTSVRAVLYMAALTAIRRRSPFRAFYDQLTAHGRPKKVALVAVMRKLLTILNAILRDHTPWRPLNA

SEQ ID NO: 361165 - protein, 343 aa, unidentified
MDYFAGLDVSVKDTSVCIVDSTGKIVREVKVASEPEALLAVLTNPAYHFKRIGLEAGPLSQWLYSALAEAGLPVICVETRHMRAVLKAQINKTDRNDARGMAQMMRVGLYRPVHVKTLRSQKLRMLLTHRKLLQSKAIAIDNDLRGTLRNFGVKVGIVGSARFEARVKELIENLPDLAVLVEPLLVVRRVLREQLGILHRRLLAVVRDDDVCRRLMTVPGVGPVVALTYRATVDVPARFRKSKSVGAVFGLTCAKYQSGESERTGAISRCGDEMMRTMLYEAAQSMLFHSTKWSWLKAWAMKIARHRGMKKAIVALARRLAVIMHRIWVDGTEFRWTREVAAA

SEQ ID NO: 361166 - protein, 441 aa, unidentified
MTQATPLTRGDRRRNEKLARLRSIVRHDLAIVAVDLASAKQAVVVTDHDSVTLGRRMFEGSPWRVDDILDWAAPLARKAGFAGIVLACEPTGYRWKPLLDRTRTRGVGLVCVQPMLVHRGREGEDFTKDRSDFKDATIIARLVGELRCYVPHAPEGHWCRLRHLGARRAALLVTAGAARQSVRDLLECAWPAVLGTARKPLKSLTWRAAMTVSADPQAIVAMGFDAFASAVAAELPRWGTKRRHLRILRAIFAAAQVPGGVAWEREAATERASFALSDWHRALDELAEVERRMVEVLDALDLSELVTTIPGLTPVTGAAILAEVGDPARYDCARTWVKHAGLCPRANESGTFKGRTKTSGRGRPGLRTAAWRAIWGAVRVNEVYAARFAYLTTRPRNRLEPGQARAAIGAALLRQLFVVVTRRVAWNPAIAAGAEVMTEAA

SEQ ID NO: 361167 - protein, 421 aa, unidentified
MTVIRRCIGLDVHRDFAQVAIWQGGVVTQAGTFATTPEGVREFAAGLGPADEVALEATGNTWAIAALLASQAGRVVVSNPAKTRAIAEARVKTDKVDAEILAQLLAADYLPPVWMPDPATRALRRQVLRRAHIVRQRTRLKNQVHAILARNLVPRCPAADLFGIKGRAWLAAQDLPADERAAAAALMRQLDFHGQELALIDRDLGQAALSRPDVLRLMTIPGVDATVALSIVAAVGDFTRFRTPEKLVSYLGLNPRVRQSGGQPASHGRITKAGPAHARGMLVEAAWSASKAPGPLRAFYQRVRARRGMQVAAVATARKLAVLCWHLIIKKEDYAFALPSLIAHKRRKLELRAGAPPARGRKGRSASYSLKAVRAAERDLAAQGEAAYRTMVAAWQPARHAGTKVTGATASTGTRLIKPTG

SEQ ID NO: 361168 - protein, 350 aa, unidentified
MLIIGCDYHPSFQQIAFMDTGTGEYGERRLEHMEGAGQFYRDLRARGVEARIGMEASGYTQWFEQLLAELSFELWIGDAAAISRKRVRKQKTDKQDAELLLQLLIEDRFPRIWVPSREERDLRQLLWHRHRLVQMQTRLRNQLHAVALNEGVRLKKRRWRRKGRAQLESLALMPWANRRRHDLLELLDQVDATIAQLSASIEQEAEKRPQVVRLMTHPGVGALTALAFVLILGMPERFATSKQVSSYLGLVPTEESSGERRHLGHISKQGSTLLRFLLVAAAQITVRSDPDWRRYYLHLAMRRERAIAKVAMARKLAVRLYWMWRNGWEYAQLPKLGSHAGQPGNRLGRQ

SEQ ID NO: 361169 - protein, 343 aa, unidentified
MQAITVVGLDIAKSVFQVHGVDAQGSVVVRRQLKRRYVVAFFKTLPPCLVGIEACATSHHWSRELQAVGHTVRLIPPAYVKPYVKRQKNDAADAEAICEAVQRPSMRFVPTKTPEQQSCLMLHRTRHLFIRQQTAVINTIRAHLAEFGIVAPVGRNGVEDLLYVVADQRDERIPEVARACLEALGALLGKLKAQILEFDRQINAWHRSNETSRRLDELPGVGPALATALVASVADPKAFRSGRDFSAWVGLVPKQNSSGGKEKLGSITKQGDRYLRSLFCAGALAVIRYAKIHGTKHRPWLAKLLERRPTKVAAIALANKIARMAWAMMAKGECYKEPLALAR

SEQ ID NO: 361170 - protein, 451 aa, unidentified
MRTQKVSKGKMNKLPKHLQHINPCAAGIDIGSRSHFVAVPEGTSEQAVREFESFTDDLQRMADWLIACGVTTVAMESTGIYWIPVFEILESKGLDVKLVNARHVKNVPGRKSDVLDCQWLQRLHTYGLLEGAFRPPEQICTLRGYVRQRMNLVRYAASHIQHMQKALAQMNLRLANVVTDITGKTGMRIIKAILNGERDPLVLAGMRDQRCKNSQETIARSLHGNYRPEHLFSLKQAVDLYVFYQSQITECDQAILSQLATFDVASGSDNYSGTKPPNLDEALQRMSGIDLTKIDGIDTNSALKIIAEIGVDMSRWKSAKHFASWLGLCPGTKVSGGKVLSSKSKQVANRAAATLRMAAFTLFNSKSALGAYLRRQRSRLGAPKAITATAHKLARLVYAMLMHGTAYVDAGQDYYEERYRNRVIQNMKRKAQELGFEIVQIPGLQQKTTTA

SEQ ID NO: 361171 - protein, 424 aa, unidentified
MNCNQNFKISQVTEGTLVLGIDIGSNTHYARAFDWRGLELSKVFKFKNSFEGFQSFVLWVNDLCCKYNKSKVIAGLEPTGHYWFSLGELLKENNITIAIVNPYHVKQSKELDDNLQTKNDSKDPKVIAKLVIDGRYSFPYIPEGIYGELRVADKLKNDITQQIISIKNKIHRWLSIYFSEYEKIYSSIDSKSGFLLLKETPLPKDIVELGSEGIVERWKQTKLRAVGLDKAKKLEEAAKKSIGCKNITSSARFEIKLLIEDYEYKQNQLNSITEELNKLCEKIPMIKEIAEIKGIGIATAISFVAEVGDIRRFKSAKQVQKYAGLALKENSSGKHKGLTRISKRGRKKLRTILFRATIPLIGFNKEFSSIYNYYIERKDNPLKKKQALTAICCKMIRIFFTILSKGIKYDETKMLHDIKRPVAA

SEQ ID NO: 361172 - protein, 358 aa, unidentified
MDGSKGHPKMTAGLDLGDKYSYLCLIDTESGEVMEEGRLRTSPETFRRRFASEQSPMRIAIEAGTHSPWASRVLEECGHEVLVANARKLRLIYSNKRKTDEIDAENLARLARVDPKLLYPLKHRGEESQAHMALIRSREALVSTRTQLVNHVRGTVKSFGGRLPKCPARSFHNKAPEHIPVALWPALEPILEQIGSLTQRIRDYDRQLESISREHYPETELLRQVEGVGPLTALNFVLTIEDPYRFEKSRSVGAYLGLVPARDQSGDRDPQRRISKEGDEMLRKLLVSGAHYILGPFGSDSDLRRHGEKIAARGGKSAKKRAVVAVARKLAALLHSLWMSAEVYEPLRNTHRAGGQAA

SEQ ID NO: 361173 - protein, 424 aa, unidentified
MKNTAAMKRRQVPEGYLIIGVDPHKKRHAAVAITQDFATQAKLKFDNTREGLEAMLERARVEMVKSGCRGVMFAIETGGHYWRNIAYYLDERGIPFRFINQYTLKRRREGKDLNRRKNDYRDSEVAAQLLCTGEFVESVIPQGVYAELRTSHSAYQRLVKERTRITNLVKGLLDALFPEFTRVFKDPGGLTALSVLSTCPIPRAIAGMTEDEFVATIEARHKGRRLMRKKLKALHYSAKTSIGIDAGARSLSSEIAFLVDKFELIRRQICIMEGTLVRLVDETEEGKYLLSIRGLNYIAVAGLLAELGCFKLYRGAKQMIKMAGSNPTESESAGKKRSKTPMSKQGRPLLRYCAWTSVIPMLRFNSDFRAWAKQRRERPAHANPLSGREVVGAALNRLLRLAFALVKNQTYYHDIKPALTPVAV

SEQ ID NO: 361174 - protein, 322 aa, unidentified
MDAQPHASPSAIGIDVAKGHCDVKFPDQTRTVAFQFNDAGFKGLLEQLVRFPNAMIVLESTGGYERRLVAELVTAGHRVAVVNPRRVRDFAKALGQLAKTDSIDAHVLALFGERIQPRESEKSSAKQQELQQLVVRRRQLVALRTAESNRFEQTTSTFALKGIRQVLALLDKQRAQLDTEIARLIEADDDWKAKDEILQSVPGIGPGTSATLLAELPELGRINRQRVAALVGLAPFNSDSSTIKGRRTIKGGRRSVRCALYMAAITARRCNPVFQTFAKRLEQSGKRFKVVITACMRKLLVTLNTMIQKKTTWHQQIIPSSP

SEQ ID NO: 361175 - protein, 354 aa, unidentified
MIMIGADYHPAFQQIAFVDTETGELQERRLEQPEGAEKFYRELAAQGKRVRVGMEASGHARWFEQLLAELNIELWIGDAGEIRRKRERKQKTDRQDAQHILRLLLKDDFPRIWVPSWENRDLRQLLWHRHRMVQARTRMMNQLQAVALNEGLRCKKKLWREAGRKQLEAFRLAPWASRRRQDLLELLDRLNPTIAALSQAIEQEVEKCPQAQRLMTHPGVGPLTALAFVLIIERADRFQCGKQIASYLGLVPLEDSSGNRRRLGHITKQGNSLLRFLLVEAGQVTVRSLPEWRSKYVHLTMRRGRKIAKVAMARKLAVRLYWMMRQGWDYEQLKKFGSHSGQPGHRHGVKSNIE

SEQ ID NO: 361176 - protein, 325 aa, unidentified
MTSSPLPDSSYFVGIDIAKATLDLARSDTGEILTFNNDPDGIRRIVDSLRPTPPSMIVIESTGGLERPLLDSLLDANLPVALVNPRNVRHFAIGIGILAKTDPIDANVLVQFAKLATPRLAEKRSANQLELEALITCRRQHTQLRASQINRRASTTSKAALKTIDAVLKTLNREIQKLDKKIRALVESDDDFDSIDKLLRSVPGVGAVVSATLLAELKELGSTDHRRLSALVGVAPYNRDSGTRKGPRSIYGGRAAVRSVLYMATVTAIRFNPVIKAFAERLDKLGKPKKVQIVACMRKLLGFLNVMIRDRLTWDQLNVAQALEN

SEQ ID NO: 361177 - protein, 443 aa, unidentified
MAPRSQLKRMEIANPNAAGIDVGSASHFVAVPPDRDDEPVREFRSFTEDLERLADWLISCGIDTVAMESTGVYWITLFELLESRGLNVFLVNARHVKNVSGRKSDVLDCQWLQQLMSYGLLSGAFRPKDEICALRSVMRQRAMLLSYQSRHVQHMQKALALMNVQLANVISDVVGETGQKILRAIIAGERDPLKLADLKNGRIEASKEEIAKSLQGNWREEHLFALTQAVELFDAYSKALQRCDVQLESMLKALSRSEAEPGPSKRRVGKAKNAPKFDARTYLFRICGVDLTAIDGIDITTALKIVAEIGPDLSRFRNAKHFASWLGLSPGTKISGGKRLSGATKGNANRAAQALKLAAAALRPSQSALGAYYRRMCGRLDKGKAVTAVAHKLARLVYAMLTKGTAYVDQGQAYYEERYQQRVIYHLRAVSRVKRNRGLLNGS

SEQ ID NO: 361178 - protein, 333 aa, unidentified
MHYVGIDVSKRSLDVCLLAEGSKGSRKTKTLSNGQDSAQNLAKWLILQKCELSQTHVIMEATGIYHEYLACGLHQMGILTSVINPCRSREFAKAMGIFTKTDAVDAYVLAFYGCLKQPEAWTPPEEEVRKLRALLQHRDSLLNDKLRIDNRLNTLKSTEAVQEVMDSLSLVNQYLKSEVARIERLISSHIAQHPGLKRDLKLLMSVDGIGKQIGWNMLAVLRGNNFKSAEQLAAYLGVVPVERRSGTSVHGRARLSKIGSSNIRANLYMGALTAISKNSHIKALYERLLAKGKMKMSALGAAMRKLVHLCYGVLHTQQPYDEKYKAKIINFSS

SEQ ID NO: 361179 - protein, 346 aa, unidentified
MTIVETRAVTGGVDTHADVHVAAALDSIGGLLGVQEFPATPGGYAGLLGWLGGFGAVCLVGIEGTGSYGAGLARHIAGAGVRVVEVDRSDRQDRRRRGKSDPLDAISAARAAQSGRARGAPRGRDGTVEAIRVLMVAKRTARSGRTQTINQARSLVLTGPDDLRVRFAHHATAFLVAGLAGLRPRPGATVGYATRIALRELGRRAEFPGGQLERLDELILPLVTAHAPGLLALCGVGPDTAALLLIAAGDHLARLRSEAAWAHLCATAPIPASSGKTVRHRLNPGGDRRANHALWRIVITRMSSHPPTRAYVDRRSKEGLPETEIIRCLKRYVAREVYPHLRPPAS

SEQ ID NO: 361180 - protein, 394 aa, unidentified
MKLVGIDIGKNSHHFCVMDKETGELNVTPSSFSNNKEGFDFLINSLKPYSKKSTLLGMEDTGHYHVALLKFLLSNGYTVALINPKTTDLTRKMEGGITKNDKLDTITICDVLDTPERKKQYRITKVDRFDLYEQRQLTRHHHNLKEELNIYSNRLQKSIDLVFPEFNTLFGSKYGIVYMNLLKTFGSAEAIASTDIRTIRKCFEIKGRGCRISLTPEKLKECAKNSIGISSEVETIQIKHLVSQITLIKEQIAEIDKKIEEFSITNNSPILSIPGISHFSGTSILAELGDIGNYSKPSQIIKFAGVAPYHYESSQYNAQHTAITKKGSKYLRKTLYQIILPVINNNPVFKKYYLLKISQGKGHRCAQDHCIRKLLRIIYHLLETGQSFDPALLR

SEQ ID NO: 361181 - protein, 455 aa, unidentified
MSRKSSRTRKKTESLTVIRPHAGIDLGATQHFVCCPVTPTATEIRSFGTDTPSLVELTDWLAENGVDSVAMESTSVYWIPLYEMLADRGFAVSLANARSVASLPGRKSDVADCQWLQQLHSYGLVKGSFRPSEAIVRFRALARMKLVLVEDRADWIRRMQKEMDQMNVRVHRAVSDVTGRTGMAMMRAIVDGERDPERLAELRDARCRKSHEEMVDELTGTWREEHLLNLGISLRMFDDISARIEDIEQAITDLAESHTLPDAPSVPPHPDPRKAARMRKTGQEAKRELLFRMSGFDLTTIETICAETAETLISELGTDFDPFPDLKHFLAYLRLAPNLAVSGGKPLHKKKPGIGGQRARTALILAASTIRNSKTGLGAYYRSIAYRKGNGVAAFATARKVATYVFNLVKFGAEYVAEELRVYDERHRGKRIARLKTNASDLGFQIVPLPPTATA

SEQ ID NO: 361182 - protein, 337 aa, unidentified
MEYFAGLDVSMAETHVCVMNRDGAVVYEVKVPSTPADIAAGLAKAPACGRIVFETGRMAPMLYHGLRQLGLPIFCIESRQAHQALKSLATHKTDRNDARGLAHLARTGFFKPVYVKLLPAHALRSLIIARKKLVGQRVTLENQIRGLAVVFGVRLPRALRPAFVRQALQASEGIPGLSAAMRGLVAARAAVLAAVSAIDADIRQLVRASAACRRLMTIPGVGQLTALAFTAAIDDPSRFRRSRDIGAYLGLVPRRYQSGEVDYTGSISKCGDRRVRTLLYEAANVMLTRYKSALKLKDWALAIAKRSTMRKARIALARRLAIIMHAMLRDGTEFNPA

SEQ ID NO: 361183 - protein, 449 aa, unidentified
MKRKTRNKKRLQEHLEQVNLYAAGINIGSTSHFVAVPSSLDDRPVGEHPCFTGDLGYMADWLKDVGITTIAMESTGVYWIPAYELLEERGFEVCLVNPRHLKNVPGRKTDVLDCQWLQQLHSFGLLRGSFRPSGEICAFRAYMRQRSMLVESAATHIQHMQKALRQMNLLLDNVVSDITGKTGMTIIRSILSGQRDPVILARYRNHNCKNSKEIIAQSLKGHYKEEHLFSLRQAVELYDFYQRQIADCNQAIAMALDKIEGPDDLDELPPQKSKARRKNKSLPFDVRQNLHNITGVDITKIDGVKETTALKIISEIGTDMSAWPTVKNFASWLGLSPGNKITGGKVISSKTKTCANRAAEAFRIAAYSLTKSKSALGAYYRRKRSQLGPPKAITATAHKIARLVYSLLKYGTKYVDPGQDYYEKQYRDRIIKNLHKKAKSLGYEMVPQS

SEQ ID NO: 361184 - protein, 387 aa, unidentified
MQKPHDNSKASPAAFMQDNTLIAVIELSLSNWLVAGLIPGVSREPLKKLEPNPEDLLKLLHGWRDEAIKAARPITRIAVAYETGRDSFWLARWLRERGIDAHVIHATSVAVSREHRRAKTDRLDTAMLKRGFLGWLRGERGHCTVAIVPTMEEEDAKRPHREREGLVHEQTRVVNRMKSALIQFGVRNFNPKLRKARVKLETVRTPEGKSLPPNTIAALRRDMERLKIIKEQIKAIEQTRLQQFEQKPEALANRMVYLLVRIYGLGWETADLLVHELLSRTLRDRKAVARYAGLTGSPDESGSKRREKGLSRSGNARVRKIMIQLAWRMVKFQPDSALVQWFKQRTENAKGSRKPMIVALARKLIIALWRYANDGVIPEGFRLHSAA

SEQ ID NO: 361185 - protein, 441 aa, unidentified
MSRRCIGLDVHREFAQVAIWEDGVVRQAGRVPATPEGLRLFADSLAATDEVAVEATCNTHAIAKLLESRVARVVVSNPQITRVIAEAKVKTDKVDAQVLAQLLAADFLPGVWLADEETHALRRQVARRANIVRQRTRLKNQVQAILHRNLVPRCPAADLFGIKGRAWLTEQELPADERQAVQALLRQLDFHAQELQIIDAQLSQIGLASDDVKRLMTIPGVDATVALSIVAAVGDFSRFRDPGQLVSYLGLNPRVRQSGGLPASHGRITKQGRAHARGMLVEAAWSAARIPGPLRAFFERVRSRRGMQIAIVATARKLTCLCWHLATKREDYAFARPSLTAQKLRRLELRAGAPSHRGRKGTAGAYSLKEVRARELELAEQAEHAYRQLVADWQAKAPATGKMGAAAANGARLSGHQTGQAARQDQAPDPALRSRVDHAQR

SEQ ID NO: 361186 - protein, 449 aa, unidentified
MKKPSSERYSLPVIHNCAAGIDIGSRFHVVAVPADITKEPVQTFKAFTADLERMADWLVELGITTVAMESTGVYWIPVYEILETHGLHVVLANARDARAVPGRKTDVNDAQWIQRLHACGLLRASFHPDREIAALRSYLRLRERHLDYAAAHIQHMQKALIHMNLQLHHVVADITGATGMRIIRAIVAGERKAATLATMRDTRCKSSVETIQSALVGNYQPEHVFALAQALTMYDAYQAQLEICDQQIAKSLLQLSQQQPSPSEALPKPRHRTRQPNALNFDVRTLLYQLVGVDLTQIHGIGPYLALRLVAECGTDLSRWRTAHHFTSWLTLAPGCRISGGKVLSAHTRKTKNRVTAHLRLAAVTVGKTNTALGAFHRRLSARIGKAKAVTATARKIAILFYNAMRFGLAYQDPGVDRYEQKYRERVVKGLHRRAAEFGFTLQAVECVS

SEQ ID NO: 361187 - protein, 340 aa, unidentified
MKRYIGIDLHTNSFTCCFLQENGEERIRTWPLQGGGLEQFVKGLAGEDEIAIEATGNAAHFCKMVEPHVSRVVVIAPWQFEVIRRSVKKTDKHDARAIALFLSKDMLPEARVKSEEHVQLSSLITTRDQLVKLRVSLLGKVHGMFVRHGLKIKREVLTSKVGFAREVAKHDWSALERAELAVIENQIHSLHDNIRTLEKEIAAFAKTLPGYDNLISIKGIGPLSAAVMLTHIGDIEDFKNTGKMAAYFGIVPKVSNSNETNNSGRITKRGNKLARTTLVQCTLIAIRYSPYLRGFYENIKKRRGTGKAIIATARKLLNTIFHTLKNGWVFEDFSNFKLLT

SEQ ID NO: 361188 - protein, 385 aa, unidentified
MRSVGLDLGARHIAFCEVMAGKVVGRTSVRRLGELEALLGPETAAAQVAFEASREGWHVHDVLVGWGKQPVMLDTTRVRQIGVGQHSRKNDALDAEAMAVALDAGRVPVAHVLSPERRALRAQLSVRGELVEMRARQVTLLRGVARAAGVLVASSSTDNFLQKLQEAPVNQATRALMAPLVATLAVAQEQLAAVDREIAQVAKSDPIIRLCATAPGVALIVAATFVSVIDEAKRFRNAHAVSAYLGLVPGENTTGGKRRLGSITKQGNTHARSMLVQSAWQILRAGDADDPLRRWADALAKTRGKRIAAVALARRLAGVLWAMWRDGTVYDPGMQARESAQGLHTHAQTQELRAQAMARVAKKIQRRERTPSRASRAQTSRGRTM

SEQ ID NO: 361189 - protein, 388 aa, unidentified
MQVIADRTETPSAIRSDLGAIFVSMELSRSTWLITSLSPGGGEKMSKHGMPAGDIGALRARFSELKRKALARTGKSFPIIVIQEAGLDGFWVHRVLENEGIESHVVDPASIATSRRRRRAKTDRIDGEALLRALLAHKRGEPRVCAMVKAPTPEDEDRRRLCRERKVLTNERVLHVNRIKGLLFSQGASGYEPLRRDRRRRLDELKTGDGRPLPPHLKTQISRELDRLELLLEQIKAVETERDALLAPQQAVTPAPATMLLDIKGIGLEFAAVLWSEGLFRHFDNRRQVAAYAGLAPTPWQSGSVDREQGVSKAGNPRLRTTLIQLAWLWLRHQPQSTLALWFKERVRRNGGRFKKTTIVALARKLLVALWKYVTAGVVIEGVVMKAA

SEQ ID NO: 361190 - protein, 427 aa, unidentified
MKTETERLAAYRQLRTEIRGSDKYLIVGVDVAKDTHHAFIGTPTGKMLSKQLRFANNREGFELLTSRVETLRLQQHLEQVVYGLEPTANYHKPLAEYLVRHDLSVVQVAGTAVKQNRELLDGRWDKHDRKDAANVADLIAQGKCQFYDYPELKVRELRELLSIKYKLKKQEHGLKTRIRNNLLAKYFPEMDQFMNTCKQDTYTIIGSCCVPEQIASLDFEQFFEQIVRVRRGQRQTDHLYQIWQSAKDSIGCQTDETCGFEGHLLIEQLQQTCQHIHELEQRIEQLCLTFDEYPYLLSIPGIGPDISSRILAYIGDPYRFDNAHQVIKLAGLDLNASRSGRPALKATPVISKRGQADLRYGLVQAACVASTSNAYFSQWFAKKLNGRERENGIGMILRVKLAAKMLIIAWTMMKNKEMFAYERLINC

SEQ ID NO: 361191 - protein, 348 aa, unidentified
MAVYIGVDFHARQQTISYLTTEDGEIQHLVLGHEKAAQVRVFYEQFAGQRVVVGFESSGYAAWFEELLEELGCEIWIGHATYIRQYAKRRQKNDRRDADLILELLLSGDFPRIHRYSRSTRQMLQQLRYRQRLVKMRTMIVNMLLFMAGSRGHSLRTQLQSKRGQARLAELPLPEPLAQQRDELLSLLGQLDQKVKTIEGWLAEATAADVGVQRLRTHPGIDLLTSICVRYTLEEVTRFATTRKVSAFAGFDPMEDRSDERRRMGAISKQGSRWLRFYLVEAGQVAMRKDADLARVYQRVSRRGGHAKAKVAVGRRLLVRAFIMLRDEIDYAEFQRRGVAARSSRGSA

SEQ ID NO: 361192 - protein, 362 aa, unidentified
MVNHIFVGIDLGDKRSVARIAADREKSERFGFVNSRQGRRRLFGELKRRAEQAGGAEVVMAYEASACGFVLSDEAEAMRVQCWVLAPTKMEKSVEQRKQKNDDRDADDLVEKLRGHVLAGNRLPTVWVPDNQTRDDRELIRTRLELAEKQTQVKAQVQMLLKRHGLEKPSGSGAGWTVRYRGWLEGLTESEAFGWGVRQALASLLRQLSSIESEIKRLQAPLEQLASQPRHQRVIEELTQERGVGLLTALVYRTEIGQAHRFRRGRQVGKFVGLTPTSHESGQQSDRKGHISRQGPPRLRKILCQATWVRIVHDPHTREIYHQLVLRNPKKKKIAVVALMRRLAVRLWHRMRTVELELAASA

SEQ ID NO: 361193 - protein, 342 aa, unidentified
MTQYKRIAIDTSKAVFTLHGIDQTDRPILRVNLSRAQMIPFFRKLLPTEIAMEACGGTHYWARELAALGHKVLLIPPQYVKPYVKRGKNDRIDAEAICEASGRPGMHFVPVKSAEQQARGMVLKVRDTLVGQRIALVNTLRGHATEFGVIAGKGLSNIAPLLEKIEAETTIPSEARKMMALLGEEIGRLDARLKEMDANIKRTHNANPDSKRLATAPGIGSITALTVVTTVDPNAFGSGRHFAAWVGLTPREHSTGGKPRMGGISRAGNERLRQLFVLGAMSVIKAAVRQGDQCADAWLLDLLRRKPRKVAAVALANKMARRCWAMMTRGEAYQPARHARLS

SEQ ID NO: 361194 - protein, 463 aa, unidentified
MSKPIIVAADVSKGYGDFIVIDSDKKLLMELFQLDDNKAGHTKLGELLISLKKKHKVKRVLFIVESTGGLEDNWLRMAKQASLSDFVEGYRLNPKLIHHEYRVQKRNSISDGVSALTMAHHVAKNLEYFEPSEIVVDPAYAPARNLIRHITSLKQDCTGHKNSLQQLLYQYLPSLLPFLPANWSQYFLKILITHGGRRAIQLAAKQGFKSVPRVPKGKANQIYDALKDGIDMKETPPLVVAAIRSKARQILSLLEEIKELEELLCQVAPVAGKQVEQLCSIKGMGKVSATTLLCFFEDIDRFDQASSMAAFFGVQPRVKKSGDGTIKIGMSKQGNGLVRREVYLLAFRTLSNEPYLKSIYAKFRKQGMTHDGALGVLMHKLIRIMYGILKSGTPFNPGIDQLNQIDPRSKEEAQEAESIVRDDPKRRFQSVSQDAPLSNRQRQKRKKDQESQAAIVAESTGSS

SEQ ID NO: 361195 - protein, 402 aa, unidentified
MPMLSIGIDVSKGKSTVCGMKPGGEIVYAPFEVQHTREGMSELVSLLRSSGEEVRAVLESTGSYHCPVVAALLENGIFVSVVNSLRMKRFCSQSIRKVKTDRIDAMQIALYGLAYWQELQPARLPEDTYRELQLLARQYYQMTSLLIKAKVDFNAICDQVLPGMQELMNDHAGRHKLSDFVLRYRHTTHILEMGETRFRKDYCKWAEKKGYRNCERMAVLIFATAQNGIPVLPNAPSTQIVITEAIRVLHTVEASRDAILTQMQALAKTLPEYSLVREMPCIGDTLAPRLIAEIGDVRRFHSKRALIAYAGIDAPPYQSGKFCANNRHISKRGNRYLRKTGYEVMQSYVMHKPANDPIFTFIEKKRSEGKSGKLAMVAGLNKFLRVYYGKVTELYRSLPAIE

SEQ ID NO: 361196 - protein, 344 aa, unidentified
MEITTIGLDLAKSVFQVHAVDATGQPVVRKALRRAQVLPFFARLPPCLIGIEACGTSHHWARELIKLGHDVRLMPPAYVKPYVKRGKTDAADAEAICEAVTRPSMRFVPVKSPEQQAALSLHRTRDLLVKQRTQLINMMRGLLGEFGIDIPQGLERALLLARKIVDGEALDVPAPAARMVGTLSQQALDAHVRLREIDRDLLAWQRSNDVACRLMTIPGIGPVGATALAASVTDPHQFRSGRQFAAWLGLTPLQNSSGGKERLGRISKMGDKYLRKLLIVGMTSLVRRAKHKPETVDPRLADLLARKPVRVATVAMANKAARVVWAIMTRGDTYRAGHLPMLAG

SEQ ID NO: 361197 - protein, 350 aa, unidentified
MDKTSGSQGATVVAAGIDTAKSTFSVCGVDSARRTVLERTLNRARLVELFAKLAPCTVGLEASSGAHQLARELSALGHTVRIIAAKFVAPHRTSGKNDRNDARAIVDALLHPRTRFVPVKSEEQQALLSIQRARQGFIEERTALANRIRGVLAEFGVTLPVRIEVVRHRAVAAAQRLPVLAAQVIQELHAHLVVLDERIGRYDRQLRALVRHSEPATRLTEVLGIGPVTAMTSVAMVGNGREFKNGRQFSAWLGMVPRQYSTGGKTRLGPITRRGDVYLRSLFIQCAKALLAVAHRRNDRLSRWALAVRARRGFGKAVVAVAAKLARIAWAILAKGERFRPEPLVSAASA

SEQ ID NO: 361198 - protein, 352 aa, unidentified
MNQLKYIGMDVHKAMTVISVLNSEGKELAQAIIETKSTTIIDFIHGQRGTLHVTFEEGTQAAWLYDLIRPHVASVLVCDPRKIVTRGNKADKIDARRLAELLRTKGLTAVYHGEHSTRAVKELTRNYQEMMEDSTRVKNRLKALFRARGIDCTGSAVYSPDERKTWTDKLEQAAVRARAGRLWEELDALEKLCEQAEGDLKTEARKHAAIKILQGIPGIGPVRAAVILGIAGTPHRFRSKKQFWTYCGLAVTSKITSEYQMVDGRISRSKKQPLVRGLNRNYSRTLKDVFKGAAKTAAAGAWKFHFDAMVANGQGPPLALLTIARKIASITLALWKRGERYDQKKVEILHAA

SEQ ID NO: 361199 - protein, 400 aa, unidentified
MLSIGIDVSKGKSTVCGMKPGGEIVYAPFEVQHTREEMLELVSLLRSSGEEVRAVMESTGSYHCPVVAALLENGIFVSVVNSLRMKRFCSQSIRKVKTDRIDAMQIALYGLAYWQELQPTRLPEDTYRELQLLARQYYQMTSLLIKAKVDFNAICDQVLPGMQELMNDHAGRHKLSDFVLRYHHTTHILEMGETRFRKDYCKWAEKKGYRNCERMAALIFATAQNGIPVLPNAPSTQIVITEAIRVLHTVEASRDAILTQMQALAKTLPEYSLVREMPCIGDTLAPRLIAEIGDVRRFHSKRALIAYAGIDAPPYQSGKFCANNRHISKRGNRYLRKTGYEVMQSYVMHKPANDPIFTFIEKKRSEGKCGKLAMVAGLNKFLRVYYGKVTELYRSLSAIE

SEQ ID NO: 361200 - protein, 380 aa, unidentified
MKILALDVGKSKSVAYRLDSETGEVGFKTILTRAESFVRLVARWRPDRVVFEIGPLAGWIHDVMTGCGVHEVQVANPMGEAWRWRNLKRKTDRDDAVKLAELSAAGQLPTVHLPRPEVRQWRQLIAYRVTLADRQTAAKNRVRAILAMAGETLPAGKKGWTIEAREHLRALARPLAECGPEDLWRGMLAVELDLLETLETQETVVMAALGRRAAADERVRRLETIPGLGPRTAEMLVALLDDPHRFGSAKQVSAYLGLVPRQFQSGAMDRRGRITKRGSPLARRLLVQAAWASLRWNAAMRRVFERVSRNHRGRRKVAIVAVARRLAVIAWVMLRDGTTWQIGRAATGRRARPRPAGMLRAPGLSHPGSGSFDPEVSNTA

SEQ ID NO: 361201 - protein, 363 aa, unidentified
MSVKAMSLVGLDVHARQTHAAVLVPDTGELAVSKLRMEPVEIVSFLEGLGPGVRAVYEAGPTGFGLARAAWERGVDVRVVAPGSIPRGSGDRVKTDRRDAIRLARLLAAGELSFAFVPSVADEHFRDLVRAIEDVRGDLMRARHRLGKFLLRRGERYPGPGASWTVRHLVWLRARRFDDACSQATFHDYLSSVELLMGRRASLIAALEQQIPGCSHAPVIARLRCFRGIDTLSAAGVCAEIGDFARFARPTLLSGFLGIVPCERTSDEKRRLGSITKAGPPHARRLLVEAAHHYRHRPFIGQTVARRQTGADPRVIAIAWRAQRRLYARWTHLHHERRKPSGVVAIACARELAAFLWEAATLD

SEQ ID NO: 361202 - protein, 457 aa, unidentified
MTNKQRRQPPRPSLAAVHPKATGLDVGATFHVVAVPPDRAAESVRTFQSFTADLHRLAEWLMEVGVTTVAMESTGVYWIPVYEVLEARGFEVLLVNARDAKNVPGRKTDVNDAQWLQQLHEHGLLRGSFRPHDRVVPLRALLRHREGLVDQAAAYIQRMQKALMQMNVQLHHVVADITGVTGMKIVRAIVGGTHDPDVLAEYRDSRCKASTTTVRNALVGNYRPEHLFALRHTLELYDFLQSKVAECDIEIESVLRALNAERPTPAVPLPTVRHAGGRNEPGFDVRESLYTLLGADLSQIHGFGPYSVLRLVAECGDDMRKWPTAKHFTSWLSLAPGNKISGGRVLSSKTRRNSNRAAALLRLAAVAVGRTQTALGAFYRRLAARVGKAKAVTATARKLAVLFYNALRFGLAYDDPGASYYEERYRQRVVHALQRRARQMGYALVPAPEQRVAAGVS

SEQ ID NO: 361203 - protein, 412 aa, unidentified
MQTLVERGCGLDVHQATVVACLLTVQKDGRVQKQMRTFGTTTPELVGLRDWLGAEGCTHLAMESTGVYWKPVYAVLEGELEIVVANALHVKKVPGRKTDVKDAEWLADLLCHGLLRPSFVPPQAIRELRDLTRYRRKLVQSQAAERNRLLKLLESANIKLASVATDVFGVSGRLMLRALIEGKASPREIAELAKRKLRSKIPELERALEGRLEEHHRFLLKLQLDRLELVEKDLAVLEQRIQQKLEPYAAQLALLDEIPGVDWTLAAVLIAELGVDMSVFQNVSHMASWAGVCPGNNESAGKRKSTRIPKGNVYLKTALVEAAHSAAKAKGTYLRDKFYRLKARRGYKRAAVAIAHKILVAIYHMLSQQVSYNDLGDLYLDKLNKHHLTRNLVHRLERLGYTVTLSLPEKAA

SEQ ID NO: 361204 - protein, 343 aa, unidentified
MNHAAIDLGGKESQICIRQPDGTIIEQRKVPTRKLTELVATWAPSRVVMETSAEAFKIADAAIAAGHQVRVVPGTLVRLLGVGERGVKNDQRDAQQLSKASWQTDVPSVHIPSKSARELKSICGARDVLVGTRTKLINNVRGWMRTQLWKLRGGTTSTFADRVRAHAEAVGEPLPEHIERQLRTLAVVIEEVKAADKQLRTLAGEHEVCRRLMRIPGIGPVTALRFVATIDEPGRFATAHRVQSYLGLTPGEHSSSERERRTGITKAGPMELRRTLIQAAWATMCLVRTSHPMIDWARRLAERRGRPVAAVALARKLAGIMFAMWRDGTTYQAKRSAEAIEHS

SEQ ID NO: 361205 - protein, 342 aa, unidentified
MKDTMIGVDLAKSVFQLHGASLAGHLKFRKKVTRVQLRHFMAKHEPAVVVMEACGSASYWAREMVKLGHEVRLIAPQYVRPFVKRQKNDAADAEAIVVAAQRPEMRFVEPKSEDQQACAVLFRARERLLHQRTELVNALRSVLYEYGHVFPKGIAHLRRIEAVLTVPASDLPALVRDECQDLLEQISEQTARIEAKTAKTRGLAGTNDTARRLQTMPGVGPQTALAISGFAPPMDSFKRGRDFAAWLGLVPRQYSSGGKERLGRISKAGQTDIRYLLIIGAMSRLTVLARKSIQEGSWLARMLHRKPLMLVAIALANKMARAIWAMMTKKEDYRDPARAVST

SEQ ID NO: 361206 - protein, 331 aa, unidentified
MKNVTQTIGIDVSKLTLDVCIRTTAVHKQFSNDTKGFKQLISWVIKQKSDLESSLFCFEHTGWYCLMLSYFLYENKYDYCCINPIEIKRSMGLRRGKSDKADAWEIANYAWLRRDELIPSIPPAKNLLELQRMMALRDQLVKQLTACKNLNSGMQEITANRSKDISLGILSKSMRHLKKQIKAVEKAMDGLISQDESMTINYKLSKTVKGVGRVLAVQMLLHTHNYSRFASPRQFSAYCGLVPYPYQSGTSIHGRNKIHPISDRKMKSLLSMSAISAIQHDNELKLYYRKRVEEGKPKMVVLNIIRNKIVSRVFATVNRGTPYVEINKFLA

SEQ ID NO: 361207 - protein, 388 aa, unidentified
MTQTLTAASKSVALDYDKTLVVAIELSNVSWVLAAQVPGLPRRKAKRSVEPTAEALMAAINGYRNRAREAGRMVERVVAVYEASWSGFWLARWLERGGIEIHIIQPSSVPVDRRARRAKSDGIDAELLLRTLLAWLRGEPRVCSMVPIPDEADEDARRFIRERAELVAERVSLVNRIAAVLATLGVRDYNPLLRNRRGRLDELRTALGTALPPQARAKIVRMIDRLELVQAQVAELDQERDAVLEDTAPDKAAKMIRQLATLRGVGVQSATVLVREAFVREFPNGKALGSYAGLTATPYSSGGAEREQGISKAGNRRLRTVMVELAWLWHRYQPGSVQVSWFRERANAAGRRARKVMIVAMARKLLIALWRFATQGVIPEGAVLKPAA

SEQ ID NO: 361208 - protein, 349 aa, unidentified
MKIIGCDFHPSYQQIVMWDKATGEMLERALSHERKEEVRAFYAGLQGPVRVGIEVSGQSQWFERLLAELGHEVWIGDAAKIRASCERKQKTDRRDAELLVKLLDEERFPRIWVPTPAERDARQLLLHRHKLVRMRTQLKNQLQALALNQGVQRKWKLWSETGRKQLEALPLMPWASRRRTELLVLLDQLEASIGELDGAAIEQANTRAAVRRLMTHPGVGPITALAFVLTIGPAQRFRRGKQVASYLGLIPTEHSSGGRGQRLGHISKQGNPFLRGLLVEAAQSAVRHEPEMRREYQRLAQRKCRALAKVAMARKLAVRLYWMLRTEVDYAQLIQGSHAGQLESFRGRS

SEQ ID NO: 361209 - protein, 373 aa, unidentified
MKIYVGIDIAKLNHFAAAISSDGEIIIEPFKFTNDADGFQLLVSKLESFDKNSLIIGLESTAHYGDNLVRYLVTELYQVCVLNPIKTCQMRKNNVRKTKTDKVDTYVIAKTLMMQDNLRFVSFFDLDMMDLKALGRFRQKTIKQRTRLKIQLTTYVDQVFPEIQYFFKSGLHQHAVYALLKEAPSPKEIASMHMTHLANLLKVNSHGHFTKEQAKELRVLAQKSVGANDSAISIQITQTIQQIELLDSQLEKIEAEMTDIMKFNDSVIMTIPGIGYINGGMILGEIGDIHRFSNPNKLLAFAGLDPSVYQSGNFQAKTTRMSKRGSRVLRYALVNAAWNVVRNNATFKAYYDAKRAEGRSHYNALGHCSGKLG

SEQ ID NO: 361210 - protein, 356 aa, unidentified
MTSTKYIGLDVHKESISIAVMNSIGKVVMECVIETKASTILQFIDGLRGDVRVTLEEGTWAAWLYDLLKPRVTEIVVCNPRKAALLKDGSKGDRIDAHKLAELLYMNKIKSVYHGEHGLRTMKELARSYLTIIKDLTRVMNRLKALYRSWGIPCVGNKVYAPRYRAEWLGKIREAGVRRRAEHYYQQLDVMHLLRQEVRKDLLAESRKHKAWKLLRQIPGIGPIRAAVLIAMIQTPHRFRTKRQLWTYSGLGLETHDSAQYHAVDGALQRSERPATVRGLNKDHNHDLKDIFKGAAMRASTAAGPLHDFYENLLAKGRKPTMARLTLARKIAAITLIVWKKEVRFDANYLKPQQAA

SEQ ID NO: 361211 - protein, 316 aa, unidentified
MSESQVFVGIDVALASLEVAVRPTGQNWQVANDEVAFDDLIERIGALKPSLIVLEATGGIHLPVVAALAAAKLPVVALNPRQVRDFAKATGKLAKTDRIDAQVLAHFAEAVRPEVRPLPDAATQELATLVARRRQLMEMRVAEQNRSRGTHARIRSQIHEHVAWLNRQIDELDHDIGQRVRSSAAWRERDDLLRSTPGVGPVLSATLLSDLPELGTVSHKQIAALVGLAPLNQDSGKKHGKRVIWGGRASVRAALYMATLVATRRNPVIRAFYQRLLAMHKPKKLALTACMHKMLTILNAIVRRQARWSAPMPADA

SEQ ID NO: 361212 - protein, 331 aa, unidentified
MSNIIGIDVSKASLDCAYLRDLDQDKAKRKNCHNKVRCFASLVAWAEARSGLPVQTLAFIIEPTHVYHEQLVQFLHNTGATVYLVNPGRVRKFAEGIGILSKNDLIDADLLTRYGLLARNLIAYAPVAQEVNDLRSLLNRLDVLERNLRSELNRQEKVGKTMVFHRLEQQSIARAVKRLKTEIITFKRAIRECVKSTPSLQQNFDLLLTIPGVGAKTAWIMMVILGSRDFRSAPEVASFLGLNPIEKRSGKSQYRRPRLSKSGSGNYRQKLYFPAMVATRKNPDIQALYERLLAADKTKMCALGAAMRKLVHICYGVVKNQTPYQAQTIPS

SEQ ID NO: 361213 - protein, 342 aa, unidentified
MKFYCGIDLSARDCHVCVIDEQLQIVVEQKLRNELTGICQLLAPYKGSLKIVVESTFNWYWLIDGLQAEGFEVVLAHTLGLYLITGAKVKTDRRDAYALAKLLLVGAVPTAYIYPVETRPVRDLLRRRLHLVQVRAGEYGSLRRLLLRQGILSSKQQEIKTATETELEQWFEHPLVRLHASQELQRIELYSQQIAELEKTILELAQTEQSYDLLLKLPGVGQTIALTILYEVGELTRFANVKVFSSYCRVVPGIAQSGNVSRRGRASKQGNHYLKAAFSQAAVHAVRCYPKVRRYYERQLKRHQGRGRQMICYNIIAHKLAQAAFHVLKEQTEYREELLFGR

SEQ ID NO: 361214 - protein, 439 aa, unidentified
MKPIYYVGLDVHKETISIAYALGGSRDDATYHGQCAGSVAAAVKALQKLAEKLKIEFRDLKVCYEAGPTGFVLARQLIKKGVDCVLMSPSKTERKPGDKIKTDKRDACNIARLFRNGDITQVRIPPVLDEAVRDVCRARTDATDDLTRAKQRLNAFLLRNGFNYTGKSKWTAAHMRYLRELTMPSEPQRIVLEESIQAIESCENRIERLVTKMKQILETWEWKPIVQAVMAFKGFQEVAAMTLISELGDLRRFDHPRKLMAFIGLVPSEASSGGKKRQGAITKCGNSHCRWMLVECAQHFRKAPRISPALTTRQEGQSEQVKALSWRMQNRLYNRYVKLKARGKTETKIIVAIARELSAFLWELQNKLKLPMPGVAPTAAAAEEPGMPHGAAAPNPAELRQLDPICFPLNPQGDFSPPVPQGSGGKRLKKPLLAKGMTL

SEQ ID NO: 361215 - protein, 356 aa, unidentified
MTCVGLDVHARSIHAAAVELVSGELQRARFGGGSEEVVAWLAGLPRPLRVCYEAGPTGFALYRAARAAGIDVCVVAPSKTPRASGDRIKSDRKDAELLARLLLAGQLKPIAVPSPALEAARHLCRAREQVRADLMRCRHRVSKLLLLHGRVYPEPTTWNERHRRWLGGQRFDEAVAELAYLDTLAAVDGLVARKRALDERLSRIALEGEWAETVARLRCFRGIDTLSALVLALEIGDFVRFGRPAQLASWLGLVPSLDQSGESRHQGAITKTGSSHARRLLVEAAWQYLREPRIGVSLRNRQQDQPAQVLQIAWRAQHRLYRLQQRLRGRGKPGNVTTVAVARELACFLWAAAVAD

SEQ ID NO: 361216 - protein, 376 aa, unidentified
MNEKLRFLGLDVHAETIAVAVAEPNGEVRSLGMIANREDSIHKFIRKLGSPEHLRACYEAGPTGFVLYWQLTQLGVKCDVVAPSLVPKKPGDRVKTDRRDALKLARSHRSDDLTAVWVPDEGSEALRDLVRAREAAKQDQLRAKHRLTKFLLRTGQRPPLGVKAWTEKYVEWVQQVRYTHPAQEATLLDCLNEVQHMEERVKRLEQSIVEVIQLAPAPMQEVVRGLQALRGIAHISAVTIVVELGNITSRFESARDLMGYSGAFPSEDSTGKRIRRGGITKSGNAHLRRIVVESAWSYRHRPAIGARLRRRQEGLPAEITEIAWKAQNRLHKRYMTLMARGKEQRKTMTAIARELLGFIWAIGIKAEAACKQQMAA

SEQ ID NO: 361217 - protein, 428 aa, unidentified
MSEKNCTRLEEFRQLQKEIRGSEDYLIVGIDVAKDKHNAFFGTATGKALFRRLVFGNDRQGFERLLVQAEAMRVQHGLKKVVFGLEPTANYHKPLGEYLITGGHGVVLVSAKSVKRNRELLDGRWNKHDTKDSANVADLISQGKCLYYEYPELRLRELRGLLSLKRRLKRQEHGLRVRIRNHLIAQYFPEFDRYFGRPESEGLAIVRWCLGPSVIASLEYDQFARWVAPGTRSFRQQERLRAIWHKACGSIGCEGGEAVRFEAKLMVEGLKQIREALGATEAKIAQICGGFVEYEYLLTIPGFGPDVSSKVLGALGDPYRFTRGSQVLKMAGLDLVADRSGKRSNGVVPVISKNGKADLRYALYQAAVIGSSKNRHVIRWFTNKVRGREREKGIKTRMRVKLSAKLLVIAWTIMKKKEPFNPDYLRIE

SEQ ID NO: 361218 - protein, 347 aa, unidentified
MIFIGIDTHKATLVASAIDTPGREVSAGTFPNDVQGHTALVAWVDEQGPERRFGIEGSGSYGASLARRLVSTGESVVEVPANLTERERRHLRRAGKTDAGDALAIARVVLREPGLGPVPMPGLSEDLKLLVDAREQRIAERTRVLNRLHAQLVVIAPGYERTVPNLSAARHRVTVARLLEAQGGVRAELTRADLARAGELDTECLALERRVRRLVRLSGSSLPTIVGVAAITAAKIMGETGDPRRFRSSPAFAAMSGTAPIPASSGQTSRHRLNRGGNRQLNRALHTIALTQYRTDQRAQAYIEKRMSEGKSWLEAMRCLKRHLANVVLRTMLADASIRSSSVGLTT

SEQ ID NO: 361219 - protein, 461 aa, unidentified
MGKSRAKSSSKASKKKSLDSLKPINLNAAGIDIGADSHWVSVPPDRDEQNVREFRCYTTDIYALADWLKQCQVETVVMESTGVYWIPVFQILETRGFEVLLVNSHHVKTVPGRKSDVLDCQWLQQLHSYGLLAGSFRPRDEICVLRSYIRHRDNLIRSAGTHVQRMQKALTQMNLQLHRVISDITGKTGLKIIRAMLAGERNPETLASLKDGRIRRTSEEIAAALTGDYRAEHLFVLQQELQLYEMYQQQIAQCDQEIETYLTNLDSQVELEKIEGEKKLPPTKKYSSNTPAFDLGGHLHRISGVDFTRIDGLGVLTVQTILSEVGLDPSRFPTVKHFTSWLGLCPGSRVSGGKVKSSQTRQVVNRAANSFRMAAHALSRSQTALGAFFRRLRARLGTPKAITATAHKLARIFYCLWTKGGEYNDPGIDVYEQQYQQRVLKNLQRKADQLGFELVPLSNES

SEQ ID NO: 361220 - protein, 292 aa, unidentified
MNSVGKVVMECVIETKASTILQFIDGLRGDVRVTLEEGTWTAWLYELLKPRVTEIVVCNPRKAALLKDGSKGDRIDAHKLAELLYMNKIKSVYHGEHGLRTMKELARSYLTISKDLTRVMNRLKSLYRSWGIPCADKEVYAPRYRAEWLGKIREAGVRRRAEHYYQQLDVMRLLRQEARRDLLVEAKKHKAWKLLRDIPGIGPIRAAVLIAVMQTPHRFRTKRQLWAYSGLALETHDSAQYHAVKGELRRSKRSATVRGLNKDHNHDLKDIFKGAAMRASTAAGPVPRQNVL

SEQ ID NO: 361221 - protein, 337 aa, unidentified
MHKKTITAVYGPARVKPAAMKVSNDVKGWEKLAAKVKEWEAQAVYEASSCGFEVYDQMTARGWNVAVVAPSHMAKSAKEKKNKTDEKDALELRSRLMAAREAGASLPTVWIPPKQVREDRELVRRRLALGEKMSEVKNSIDSLLQIHQVRRPEGMKSKWTKTHLSWLKGLCTPGGGLGEPVKWSLESCLRELEFLVLEEARLQQKLDAMAQEPRHRAQAEEVMKVPGVGTLTALTFLTELGDVKRFQNRRQLASYLGLTPSSYESGEATDRKGHITHQGPARIRKVLNQAAWCWVRMRPEVRQHFGRLAARKGVKKALVAEMRRLGIELWHRAAAVA

SEQ ID NO: 361222 - protein, 360 aa, unidentified
MAMREDANARAIVGGVDTHKDLHVATVVDEHDRVLETRSFATTRQGYRQMLAWMRSFGDLQRIGIESTGSYGAGLLRFMQQAGVTVLEVTAPDRQDRRKRGKNDDIDAQNAAHAAFAGKRTVTPRSRDGMIEALRVLVACRKTAVMARRIALQMIQNTIVAAPDRLRDVLRAMTRMQLVRTLATWRPDMTSFREVEAAYRIALKSLARRYLELHDEIADLDTMIAAIVDELAPNLVTRNSIGPTGAAQLLLTAGGNPDRMRSEASFAALCGVSPVPASSGMTIRHRLNRGGDRAANSALHIIAIGRLRTDQKTKDYVARRIAEGHSKLDAIRALKRYLAREVFSIIMQRQKEINATRIAA

SEQ ID NO: 361223 - protein, 339 aa, unidentified
MTLMPVGIDIAKNVMQLHYIDQETGEIVNKPVKRAQLLEYFANRAPCLIGMEACGGAHHWARELSKIGHQVKLLPAEFVKAFNIRNKNDAADARAIWFAVQQPSKPVAIKTEIQQAMLALHRARQQLVEFRTMQINGLRGMLAEFGEVMGRKRAGMVSAISDVLERVAERLPAVLIDTLREQWNRIRELDEAIGGIERRMREWKKDDRAVKAISEIPGVGLLTATATVAMMGDAKAFKSGREFAAWIGLVPKQTGSGGKTKLHGISKRGDAYLRTLLIHGARSVVTNAKDPGTWVQQLRKGRSWNVVIVALANKMARTIWAVLARDRPYQKGYVSAKPA

SEQ ID NO: 361224 - protein, 346 aa, unidentified
MSHKTAATVAHTIGIDTGKNTLHLIGLDDKGAIVLREKIARGRITARLANVPRCLIGIEAGMATHYVARELSALGHDVKQVPPAYAKPFRQGHKNDFRDAHAIAEAVQRPSTRCVPVKTDDQLDLQALHRVRSRLVGQRTAVINQIRGFLLEHGIAVRQGLRFLRQQLPDIQAKRSDVLSPRMIRIMEDLSGDWRRLDERIEHVTKEIEVLAHGSKSCHQLMTVPGIGPLIASAMVAAIGNGAAFAKGRDFAAWLGLVPKQMSTGDRTILGRISKRGNRYLRTLLMQGARVILLRPANWAKHSFGPWLTATANRLHHNVLATALANKLARIAWTVLMQARSYEARV

SEQ ID NO: 361225 - protein, 321 aa, unidentified
MSKESSKIEFEQVIERGCGIDVHKKVLVVTINGKGLKEETREFASFTESIEELRDWLSENEVTHVAMESTGVYWKPVYNILEEEFVVLLVNAAHLKSIPGDKTDKKDSRRITKLLLAGLLKGSFIPKRGVRELRDVTRYKRKVVQQIASEKNRVHKFLEDANIKLSSVVSNLSGATATKIIDAIIGGQEDVKELVKLRHGKMKATIEELATALTGKLTGHHRFMLQMVKTSIRDKEALVEKLDKQIDKLLEENEMVLDAELLSTIPGVDKNSAATILAEIGNDMSQFPSEGNLASWAGMSPGNNESAGKKKVAGQPTETDG

SEQ ID NO: 361226 - protein, 340 aa, unidentified
MKKLYGAFDLHSSNNYLGISDEKDRRIYKRKLPNSPDVILAELEPYRKELVGMVVESTFNWYWLVDLLMEEGYRVHLANPSGIQKYKGLKHSDDQDDTFWLAHLLRLGILPVGYIYPKEERPVRDLLRKRGHLVKLRTSLINSLQGIIHRNCGVKLNARKIKAIRENNVAPLLSGQEDLALSGMVSKEAIDYLGQQIRKVENVVLEKVKLKKQYIYLLTIPGIGKILALTIMLEAGPIERFSNVGNLASYCRKVPTQWTSNNKKKGKGNKKNGNKYLAWAFSEAAEFARRYDDHARAFYNRKTAKKNFMVAHSALAHKLTRAAYYVMRDRVEFDPQKLFA

SEQ ID NO: 361227 - protein, 388 aa, unidentified
MNRIIKIGMDVHSTNYTLCAMEPTIGAEDRIFGEIQVAPNYKEVLCFIESLKMKLGFFDDYSIECGYEAGCLGYTLYNQLTGAGIKCVILAPTTMLTQQGQRIKTDKRDAHLIAQCLCYGGYHPVYIPTGEDDAVKEYLRMRDDHKLALKKLKQQINAFVLRHGNQYASTKWTMKHIRWLQKLELDPMYRETLDEYMTSYEEQEAKIERYDKRIEEISAEARYQEDAEKPGCFLGIRKHTALSLIVETGDFKRFAKGNTYAAFLGLVPGERSSSKNVNRLGISKAGNTHLRCLLIEAAKGICKGVIGHKSKKLRSRQSAQPADVIAYADKANTRLRSKYYKMIRHGKKKNVAVAAVARELSCFIWGMMTGNISITSGTGTSVPAVSQG

SEQ ID NO: 361228 - protein, 428 aa, unidentified
MDETELSRVKEFRQLKKQIQGSETHLIVGIDVAKDRHHAFLGTATGKTLVKKLIFENSASGFSELLARVEAVRAQSGLSEVVFGLEPTSNYHKPLGRYLISKGCHVVMVGGKAVKNNRELLDERWDKHDTKDAANIADLVSRGKCFYYDMPSREIEELRDLHSLRARLKKEEHSLSLRIRNNLLAKHFPELDTFYSACERETLAIVRWCLNPQQIAAMPFEEFFKRVAPNARGIGQKLRLQKIHRLAHESIGCPVDSAVQLQAGLLVEKIKQVREQIAQVEQGIQQRCAQFPSYEQLLSIPGFGPYVASKVLATIADPRRFDSAKQVIRSAGYDLCADRSGKSSDQAVPVISKKGNSELRYALYQAALIASSRHRFFMAYFAKMLQGRERERGIRTKMRVKLAAKLLVTAWTLMKRGESFNPEYLKVQ

SEQ ID NO: 361229 - protein, 341 aa, unidentified
MEQLFVGLDVSKDETAICIRTQSGIVKAAFKKPTDPDIIHRALIGDLQHIRCVVLETGRMANWLYNELSQRGLPMVCIDARQAHAVLSQMHNKTDENDAAMLAELARTGFYKRVEVKSRIAQQRRALLRAREVAIKSRMNVENTIRGLLASFGIRLPKHLKTYDQRVRTALEGQAELLGIILPLLHLRTEALRQAAALTKDMARQARVDDTCRRLMTIPGVGAVSAVTYVAMIDTPDRFAKSRSVGAYIGLTSRRYQSGDVDYGGRISRRGDRMLRTVLYEAANSLLCRVKSGPGQHLKNWAKAIKKRTSHKKAVVALARKLAVIMHAIWKDGTEFEPREV

SEQ ID NO: 361230 - protein, 309 aa, unidentified
MEKVYVGIDISKDSLDVAIHDSDRRWHFTNDRLGIAKLCKMVTKLEPALVVFEATGGYEMLLYLSLDEAGLPTAPVNPRQLRDFAKSTGKLAKTDSLDARAIAHFGYAIKPAPHPLPDTQELKIAQARRVQLLEMITAETNRLRGVPRALQKRIEAHIMWLKEELTETDGEIKEIIKRDAVWQEKDSLLQSTPGVGPTLSATLIGYLPELGNLNRRQIAALVGVAPLNRDSGVFHGRRTVWGGRANVRSVLYMATLVATRFNPVIRDFYLRLCSVGKRKKVALTACMRKLLTILNSILKHHIPWSYSPC

SEQ ID NO: 361231 - protein, 357 aa, unidentified
MIIGLHSKNRHPKEAAMTFYRGIDLHSKKSHVCVIDKDGKKVKEENLNNDLALILQFLKPFGKDVHIAIESTINWYWIVDGLQEAGYDVKLAHTLGLYMITGAKVKTDRRDAFKLAKLLRMGEIPEAYIYPKEKRPLRDLLRRRAGLVQQRAECYSSLRVQFMKYNLNTMSGTEVKQLLPSDFDIMPIPQELKDYCAMILQRIELLSDQISELNTYLQKVTLEDPKFKILLTLPGVLYVLGLTIYYEIGDIGRFDSVRQFASYCRLVPGISQSSDKVKRGKGSNQGNHYLKWAFTQAASLAVRYYPTLRKFRDKHANRRKGNAATMVANCILAHKIAIATFHMMKEGVPFDEVKLFG

SEQ ID NO: 361232 - protein, 360 aa, unidentified
MIVQGTSVGLDVHALSVVAHAVDEETGRVARARLCPDHGEVVGWLRQLRAPVRVAYEAGPTGFGLARAICEAGMECLVAAPSKLQRPAGERVKTDARDAAHLARLLRLGEITAVRVPEREIEAVRDLVRAREDARADLMRVRHRLSKLLLRQGIVYSGGTPWTCAHEEWLRRQRFDDIHLKAAFDHGFDVVLAATAARDRLDEQIMVVAASPRFADSVNRLGCLRGISALTGLALTIEIGDWSRFTGSSIGAYVGLVPSEHSSGSSRVQGSITKAGNTHVRRLLIESAWHHRKSYSTSGPTLRARWDKVDPALRARGHAGNRRLNKRWRTFTERGKNPLVANVAVARELAGWCWSLATME

SEQ ID NO: 361233 - protein, 309 aa, unidentified
MNIHPDAIGIDVAKHHLDVFDGRTAKLMRLANDPLAIETWLKTIGERRRVIFEATGAYDEALRRGLTAAGVAYARVNPTTARHFAKAAGFLAKTDQVDARMLAAMDALRPKPAEPRTAAAERLARLHKRRDQLVLARKQERTRRRETKDAELADGIQRHLDFLDEEIKALETQIARLIAQEPALKRDAKLLVSLPGVGSVTGVCLLALMPELGQRCPKTIAALVGLAPINQDSGLRRGQRTIRGGRKRVRDALYMAALSAIRSKNSRFYVDYQRLRNSGKPAKLALIAIARKLLVTANAIIRDQQPFAA

SEQ ID NO: 361234 - protein, 351 aa, unidentified
MKTNTLPNSETQVRIQQLKLGVDWHADQFRVVRLCDGQSPQPAQRFTPASFLPFVQKQLTLADQVLVVYEAGPGGFHLHRQLTALGVTAFVVHPQKLDPQHKGVVTDKTDARELTLNLDRYLRGNLRAMSVVRVPTPAEEQRRALSRQREQLRRERQRLAAQGRSLCLTQGIRLRGEWWLQTLALPEWLNPRLNVWRKLIAAVEEQLAALTQQVEALAPKARPKGLGLLTLGTLLAELCDWSRFKNRKQIGSYTGLCGGVSSSGQSHCDLSITKAGNARVRWTLIELAWRMVLYQPQSQAVQRWRHVLLNPKAAARQKKRALVALARQLAVDLWRWQTGKVTPAQLGWVMV

SEQ ID NO: 361235 - protein, 365 aa, unidentified
MTKATPTRSYTGEDVYIGIDVHKKSYVLEARVGQARVKRWTTPALPQKLPEQLSKYFDGGRIHTAYEAGFSGFVLHRSLSQAGIDSRVVHAAAIEVAAHNRVKTDKRDARKLATQLEAGRLKAIYVPTEAEEQARLLSRTRKQLANERGSLKRKIRMKAHQFGLIAPEDNREMTHKKVAEILEKSPGEEFTLAIEVSWAVWRTLDEQIARLEARQKQQAEADPNEAVYRSSPGFGPISSRVCSNELGNLQRFSNERKLFSYTGLTPGEESSGETVHRGPITKQGNRHIRAILIEVAWRAIRQDPSLARFYQKVSSRAGSKRAIVAVARKLIGRVRAAFCKGELYHIESEAPPQAVDNPPTQVASA

SEQ ID NO: 361236 - protein, 359 aa, unidentified
MAGGRPSIPRVSKPVSEPGAPPVVPSNPNSRLGRKASSIRQGRVVMDKVTIGIDVSRDQLDVAVRPSGEVFTVDRDTAGVEMLCDRLRAVTPQIIALEATGGFESIVTAALATAGFAVAVVNPVQVRAFAKALGERAKTDPIDARVIAHFAEATKLKPRPLPDESTRLLGDLVQRRRQIMDMIGAERNRESRATPRMKKSIARLIKALQKELDSVETEIDGTVRGSPVWAEKEDLLSSVPGIGPAISRTLMAELPELGTLDRKRIAALAGLAPFTRQSGKWKGKSFIGGGRPAVRSALFMGALVAKSRNPILKAFFDRLVAAGKPRMVALIAVARKLLTILNAMVRDGIPWKGRVPAAS

SEQ ID NO: 361237 - protein, 412 aa, unidentified
MLFVGDDWAEEHHDIEVQDETGKVLAKKRLPEGLVGMVAFHELIGRHVPASWADLDPTEAAANVVIGIETDRGPWVAAFVAAGYRVYAINPTSAARYRQRHSMSGAKADTTDAHLLAEIVRVDRTHHRPVAGDSAEGQAVKVVARMHQCLIWDRTRHVLRLRSALREYFPAAIRAFDDLDAPEALELLALAPDPDSAAKLTKTRIAAALKRAHRRNVDERATAMLQVLRAPELRLPGPVQQAYAAGIASQVAVIGVLNQQIEELSVVVGAHFGRHRDAEIYTSLPGLGVVLGARVLGEFGDDPHRYADSKARKAYAGTAPITRASGKKKVVLARYARNDRLTDAVQQWAFGSMRGSPGAKAYYQALRDRKIGHQAALRQLGNRWVGILHGCLKTGQLYDENTAWGHHSSAAA

SEQ ID NO: 361238 - protein, 334 aa, unidentified
MENIALIGIDLGKNSFHIHCQDHRGKAVYRKKFTRPKLIEFLATCPATTIAMEACGGSHFMARKLEELGHFPKLISPQFVRPFVKSNKNDFVDAEAICEAASRPSMRFVQPRTESQQAMRALHRVRESLVQDKVKTTNQMHAFLLEFGISVPRGAAVISRLSTILEDNSLPLYLSQLLLKLQQHYHYLVEQIKDLESQLKRKLDEDEVGQRLLSIPCVGTLTASTISTEIGDGKQYASSRDFAAATGLVPRQYSTGGRTTLLGISKRGNKKIRTLLVQCARVFIQKLEHQSGKLADWVRELLCRKSNFVVTCALANKLARIAWALTARQQTYVA

SEQ ID NO: 361239 - protein, 425 aa, unidentified
MTAANATPVSPVLVAIDISKHRHEVLIAVPGKKRRRRLTIRNALDDFERLSRLLTNHTLPVRIGFEATGNYHRALTHHLGRAGFELKLVSSVALARTREALHNSWDKNDPKDAQVILHMLEIGAVQFFHDPLAAGVNDIQELSKTHEIVSRSKTELWHRILTHYLPLYFPEAERFHRSSRTDWFLAFLEEFPSPHMISAMSRDAFIGAAWDVVGRKVSKTRLLSDIYETAKGSVGLPVAPDSEALRMFRLVLAEGRNLVRRRDEIEARSGELLSDHRDYQLMTTIPGIGPINALTILAEAGDLRRFRHHRQFLKFCGMDLATVQSGMFRGQSKISKYGNARLRRTLWMAGQTAVLKRTNSFRDKFERYISQDRHNAHLRRKAYTAVAAKMARTVHAVVKHGEPYRPFFEGVSPGGRTPLYRAVEA

SEQ ID NO: 361240 - protein, 347 aa, unidentified
MKFYTQQHPHYCGIDLHARTMYLCILNQAGAIVLHRNMKADSDSFLKAIAPFRDQIVVAVECIFSWYWLADLCAREGIAFVLGHALYMKAIHGGKAKNDKIDAQKIAVLLRGGMIPQAYVYPQDMRSTRDLLRRRMHLMHHRSQLLAHIQNTNSQYNLPEIGKKIAYKSNRAGVAERFADVSVQSSIRFDLRRIDFYDGLLNEVELEILRHAKLHDANTFRLLDTVPGVGKILALVLLYEIHDISRFPTVQDFVSYCRLVKPKKESAGKTYGFIGAKIGNAHLKWAFSEASVLFLRNNPEGQAYVARLEKKYSKGKALTILAHKLARAVYYMLRRNEAFDMKRFLNR

SEQ ID NO: 361241 - protein, 387 aa, unidentified
MSQTVAALTPAAVDYEKTLVLAIEVSNKSWVLAAQVPGLPHAKAKRTIDPEAEALLTAIAGYRARAAAMGRSIERVIAVYEAGWSGFWLARWLMRHGVEVHVVQPSSVPVDRRVRRAKSDGIDSELLLRTLLAWLRGEPRVCSMVPIPDEADEDARRCVRERTELISERVGLTNRIGAVLATLGVSDYNPLLGNRSRRLAELRTALGEPLPANAHAKIKRLLVRLELVLTQIAELERERDAVMETEASDRASRMIQQLTALRGIGVQSATVLVREAFVRCFANGKALGSYAGLASSPYSSGGIDREQGIGKAGNRRVRTVMVELAWLWTRYQPGAAQICWFRERVGTTGRRVRKIMVVALARKLLIALWRFVIDGVLPEGAVFKPAA

SEQ ID NO: 361242 - protein, 414 aa, unidentified
MQSSPRFFCGIDWADQLNDVAVVDRRGEVLARARISATPDGVRQLFRVLDGLRASHTHGRRQVPVAIETNQGLLVHALRARGQPVFQIPPSEVAGQRRRTSRAAKKSDSSDAELLAVMLRDRWGLLRELPAVSPDAAALTVLALAQYRAQRLREQLQARLRALLVQVHPVAARAWDGRDHGLRRAEARAVLAAGPTAAAAQRISVYRWEKILTGARLRLLEHEAYRLHELFAAPVLQLPAAIEAATAVEVRTLLAAFDDACRRADELTATLTGAFEAHPHAVTYLSFPGCGLLTGARLLAELGDDAHRFATAKGLRAYAGLAPLTWASGTVRQVTHRRICNRRLKMACHRWAFSALTHSLGARAFYDRRRAAGDSYAGALRRLAGRLLSGLHHCLAAGTVYDERIMFAPGRAAS

SEQ ID NO: 361243 - protein, 328 aa, unidentified
MKIQYIIGADLSKNWIDLACHQPKNYFQIENSIMGFQQLLQWLRNQHIKPSAVMIVMEHTGLYSYHLEEFLHKHHISFTKVSALAIKRSLGLVRGKNDKIDAERIARYGFEKLDMLTATVKPGEVLQRLKMLNTTRETLVKHRASFICALKEYKPILNEADSIIKSQLALIKAFSTQIKSIEAEIMDLVNIQPSIKQNFQLLTSIKGAGKVVAITTIIKTGNFTVFRNARKFACYCGIVPFEHKSGKTIRRKTRVSHLADKRMKTLLDLSAKSAIQYDKELSDFYKRRLEMGKSKKSTINIVRNKIVYRMFAVIKRQTPFVENYLQIA

SEQ ID NO: 361244 - protein, 432 aa, unidentified
MKVMFERVAGIDVHKDMIKVGIRTPGHRAWTRASEVLEYRTFFGVLLTMAADLRKRGVTHVVMEASGVYTEPVYYALIGQGFEQVAVINPAHAKALKGHKTDARDCLRLAELFECGLLRGSYIPPQDLKDLRDLTRYRAKTVQARTSEIQRLAKALESAGIKLDSVVSDLTGTSATAMIEGLIDGERRGQVLADLAIGRMRTAGKLADLSRALTGRFTEHHAGLCRLHLDRIALLSAAVGDLEARIADRAAPCQRELDLLRSIPGFGDAVAQAWLAEIGPAPHQYLASHEKLASRATLCPGNHVSAGKRKHGKTGDAGTCIKPMLVQAAWSAVRAKGRLQARYHRLVRRLGGPKNPAAVKKAILAIARTLLKIAYQVLRSGRPCQDPGPDFYTRRESPDQRRAYLLRQLEKLSPGCTITITPAEAGLTSQPA

SEQ ID NO: 361245 - protein, 346 aa, unidentified
MNITTVGLDLAKLVFQVHGIDARGKVALRKRLKRSQVVAFFARLTPCLIGMEACGGAHFWARKLMQCGHTVKLIAPQFVKPYVKTNKNDIADAEAICEAVGRPNMRFVPIKNAEQQALLGLHRARQGFVVERTAQVNQIRGLLAELGLVMPVGIRCIERKLPEFLEDAENGLSGVSRALFARLLAHFRALDRQVEELEREINAWHREDTASRRLQAIPGIGPLTASALVASVGDARAFHNGRQFAAWLGLVPRQNSSGGKTKLLGISKRGDTYLRTLLIHGARSVLFSLKRDPDRPDGWLARVANRRNPNIAAVALANKNARTVWALLAHGRDYRAGYRTANAIAA

SEQ ID NO: 361246 - protein, 370 aa, unidentified
MSVRRILAKTINTDLEYEAIGIDLAKNCVSVALLTTDGEVVCIDRLDYSELEKSAQVLCPTTFAMEPCTEMNYLVQKLEAWGHRCLVIGGKNVQNYVENHYSGQKTDLNDAQALAFLAQDTQLRTIKAKDMEQQKYASLTTLREQYIKQYRQTIVSLKGICQAWGLNISKGISGKARLKDLIENHAAFPEELKESLVDMVTHAQTAQKALNKITKTLELLAKNDKVCQLIQTIPGLGPICSCRLRATIGDIRRFKNPKDFPAYYGLVPRSIATGHNEKKGKITHRGDKTMRSLMVQGAGSVINMATKGKLKSKQLTKWILKKQKEKMPWGKLVCAVAAKLLRIVRAILISSKPYNPKIAGVAKCSLSKGS

SEQ ID NO: 361247 - protein, 452 aa, unidentified
MPRARKTKVQRVQPVINPHAAGADIGAREIYAAIPVELDERPVRRFDTFTEDLQKLVAWLKERGITTLAMEATSVYWIPLAELLEAAGIEVCLVNPRHVKNVPGRKTDVVDCQWLQYLHAVGLLRAAFRPPAHVRAVRALWRHRDALVRHSAWHIQHMHKALDQMNLQIHHVIADITGKSGTAIIESILDGRRDPATLAELGDKRLRASKATLRAALTGDYREEHLFCLRQAYAGYQFVVKQIAEVDTQLEAKLAAMAAAPQPATTASAPKPRPSASNRGQPAYDAGKLIARTLGVDLTTIPGINVITAQTLWAELGSDLSAFKSGKHFASWLSLCPDNRVSGGKVLSAHTKPSANRAARALRLAAQGLHHAKNELGDFYRRMRAKLGGAAALVATAHKLARIVYAVITSHQPYKPELHAQAEQRRLARSLQHLRSKAKILGFQLTSIQPNT

SEQ ID NO: 361248 - protein, 342 aa, unidentified
MQITTIGLDIAKNVFQVHGIDANETVVVRKRLRRSQVLAFFQALPPCLIGMEACATAHYWARELTKLGHRVRLMPAKDVKAYVKRNKNDAADAEAICEAVRRPTMRFVQVKSAEQQGQLMQHRTRDLLMRQRTQLINALRAHLAELGIVAAKGDKGVKELLSIVADEKDARLPIDARASVIVLAAQLQAVQTLIGSIEKRIKTQHRSNEASKRLETIPGIGVIGASAIAATVADPTVFRSGRDFAAWIGLVPRQDSTGGKQKLGPISKQGDRYLRRILVVGAHSVLRRAKQNPEKYLWLTQLLARRPFKVVAVALANKMARMAWALLAHGGTYRAPVLAAAA

SEQ ID NO: 361249 - protein, 413 aa, unidentified
MARKNQKRFEIVHPDCSGIDVGGSEHWVAVDPEKCDDPVRQFSTFTDDLIALADWLGSMDVKVVAMEATGVYWIPLFEVLDARGFEVYLVNSRATRQTSGRKSDVLDCQWIRQLMTYGLLSGAFRPADQICSLRSLVRQRTNKVRDQAKTINRMQKALTQMNIQLANVISDITGVTGLKILRAIVQGERDPEKLAAFRDGRIKADRATIARSLHGNWRAEHLHALDQELACHDFLEKQIGECDQAIAQALARLPVLEEKVEAPGKSLRSPHRTSDEQSVLHRALNKIMGVDLTAIPTIGIDTALVLASELGPDLSKFPSAQHFCSWLGLAPPTRISGGKPLPGKAPKIINRAAQALKQAATSARQDKSFIGASHRARLTRMDTSCAIKATAHQLARLIYAMLTKGQPYVEKGA

SEQ ID NO: 361250 - protein, 317 aa, unidentified
MTQTITTTAGIDTSKAKLDVAVHGRTERWQVENSRHGWRRLATELSEAGVTRVGIEATGGYERGIVGHLREKGFTVLILQPIQVKAYARAHLRRAKNDALDAVLIAAFAAAVDQPRIEPDARLAELADHLTFVEQIEEDIARLKTRLEHIGDPRLRRMVVTDIARLKTRRSAELLRIIMQLRAHDDLGRRLDLVLSIPGIGERTALALIIRMPELGRISREEAAALAGLAPFDNDSGTHKGQRHIAGGRGRLRRSLYAAALPAAFRWNKALIDLYARLIARGKAHNAALVACARKLLIYANTVVQRGKPWAQKPAAI

SEQ ID NO: 361251 - protein, 345 aa, unidentified
MVKISVLGVDLGKNVCSVVGLDASGAVVMRRRVRRETLIALAEKLPACVVGMEACCGAHHLGRVFAEYGHDVRLMSPEYVRPYVKAQKNDDRDAVGIAEATTRPTMRFVELKSQDQLDMQTLHRARERLVGERTALINQLRAILLERGLVAPQGKRKLEQFLSALMDEQGGAGLSPRMVLLVEDARAQWEELDRRIAAFDTEFVRWAKENEEARRLTTIPGFGAIVASAFVAAVGRAESFDHGRDLAAWLGLVPRQFTTGGKPKLLGISKRGNKYLRKQLIHGARAALPSMAERNTPLGRWAKQLMSRTHRNVVVVALANKLARIAWAVLQRGKPFDVKAVSVAA

SEQ ID NO: 361252 - protein, 346 aa, unidentified
MRPRSRFQVVVTQVAGSFMNCFDMNKYKETFGVDISKDVFDLHGSNSGHDQFKNNEKGFKSFLKILPQDSIVVMEATGYYHYRLAQFLYKSNIVVSVVNPLSVKRFIQMKLAKVKTDKSDAKAICDYAMANEVPLYSALTDVQAECLQLFRLLDSYLKKRTAAKNKLHGEETLGIPSKFVYRSLKRDRKHLDKEIAGIEERLLSLVRKEQQQQLTLLTTVPGIGIKTALFLIVVTDGFSKFETAAQLCSYVGITPTIRESGSSVRGRSRISKVGNKKLRNLLFLCAFNACKYNKACREIYERIVNKGKSKKLALIAVANKLLKQCFAIVKSGLPYDDAHVSVLKIN

SEQ ID NO: 361253 - protein, 361 aa, unidentified
MAQAKTWVAFDVHTSGVVAAVLQRESGELRVQRLPAGSEAVTAFALGLPGPVRATYEAGPTGFVLARRLEAAGIECLVCAPGLIPRGATDRVKTDRRDAERLVRLLVAGELHRVVVPSVEEEALRDLVRAREDLRGDLMRARHRLAKLLLRHEVRFDGPQANWTQAHLGWLAGVRLDQPASQRALEDYRGAVAALMIRREQLEAEIARALPLSPWAQTARRLMCLRGIDTLTAAGLCAEIGHFDRFRHPAQVMSYLGVTPSEHSSGERRRQGPITKSGSQHARRLLVEAAWHYRRPPRVAGSLARRQRDGEPEVIAISWKAQRRLHHVWSRMEQRNKRRTIIAVAAARELAGFCWAVATTD

SEQ ID NO: 361254 - protein, 346 aa, unidentified
MPCQVHHIGVDVSTAHLDTHGLPGRGVRRRLPNSPESHAELAAMLSALRQGGDDVLVVMEASGGCERALHHALVEAGVPTAIVNPKRVRDFARSNGWLAKTDRVDAKVLKAFGETNRPRPTPVPEPVRAELMELLDYRTQVMAEVLARSQQLEHYRSEAMREHAGAALAALKAQVDSLAVDIEMTVHGDAELSRRAELLRSFKGVGPLISADLVAFLPELGTLTEKQIASLAGLAPFARDSGTLRGVRRIHGGRAKVRRALFHAARVGLRWNPALKALYDRLIGRGKPGKVACMRKALVILNAILKTGEPWDPDFEAKKEEARKAVRAARRETSPANAEPACAPAV

SEQ ID NO: 361255 - protein, 396 aa, unidentified
MTKFNVEHASLHIAGASVVPAQPTVHTAYVGLDVHKETIAIAVAEPGRQEPGYEGEIANTPKRVERKIQQLSERYGGGLLQFVYEAGPCGYGLYRQLLASGHDVQVVAPSRIPKAPGEQIKTDRRDAIKLARLARSGDLTPVWVPDTEQEAMRDLTRARDDMKAQERKARQQLNAFVLRHGHHWPKGRTRWTQTHFNWLESLRFEHDWQQVVLQEYIDAVRAATRRVADITTQMERALPQWSLAPVVEALVALRGIDKLAAMVLMAELGDISRFDSPRQLMGFLGLVPSEHSSGSRRRQGAITLTGNSHARRMLVESAWSYRFPARQTGHLKRKAANAPEEARAIAWKAQKRLCGRYRDLTRAGKNTKLVCVAVARELTGFIWDIVCRVMPATHAV

SEQ ID NO: 361256 - protein, 340 aa, unidentified
MGEITTVGLDLAKNVFQVHGVDAEGMTVLRKQLRRAQVLVFFSRLPRCLVGLEACATSHYWARELRALGHEVRLMPAQYVKAYVKRNKNDAADAEAICEAVVRPSMRFVPVKTAEQQSAVLLHRGRERLVRQRTMLVNALRAHLAEFGVIGAQGLRNVGKLITVIRDEEDARLPDMARRVLQVLAVQIEQTEAAIAVLEKQLMDWHKSNPLSQRLATIPGIGPIIGTAIAAMVAEPSGFRSGREFAAWLGLVPRQNSTGGKNRLGGISKRGNQYLRRLLINGASANLLRSKATNADPWVIGLRRRRPSMVVAVAMANKTARIAWAVMHRNEDYRRMAVAA

SEQ ID NO: 361257 - protein, 405 aa, unidentified
MKLYIGIDWSQSKHDICFVNTKGVIQSQLVIPHSQTGFWEFEQRRKRLGVPSEDCLVGLETSHSILVDFLWDRWYANLFVLPPTLVKGSRTRMRSSAAKDDPGDAYLIADILRTDHGRLQAWQPDSGLTRQLRTKVRFISFLTRNIVRMTNRQRAVLLRYYPVATELFSSLSTLISQHFILAYSTPQAAAVLDLDSFRKFARQHGYTHKSKLANILAKLDQDDPQADMDIIDACRDEAQGLAHVLLDMIRLKRDNLKQLQQLLDLHPDQNIFASLPGTGVYLQAALISKFGDDRGRFPAPDRVQAIAGTSPVTIRSGKSKYVRFRKSCDYEFRHIVQQWAKQSLRSSVWANAYYARVRPNCESESHAFRCVANRWLAILWRLWQDHNPYDETHHLKQRALRSQPR

SEQ ID NO: 361258 - protein, 394 aa, unidentified
MYYIGIDVGKFNHYACVVSFDGEILIEPFFFTNNQDGFDSFTEIIKEFKSPRHIVGLEATGHYGDNLISFLIKHDYEVALINPLTTDAKRKTKIRKTKIRKTKNDKKDTFLICSVLFDRDYTKVTQHKLDMKQVRELTRYHSSITEDINQKKNRLQKCIDIVIPEFNSWFKTKYSKTYMAVLKEFGSSYNLAKANLTHLKNVLNPKNKGYHVEIDASSLRDNAKKSIGENNEVIALEIKMLIENIELLTSQLKTIDKKIEELDAKLDSLIFSIPGIGIYTGMSILSEIGDIHNFSSAVKVMGFAGVDPGTYQSGEYSAPQTALSKRGSRYLRKNLYQCILTVCKYNLTFNKYYKLKRSQGKSHRCAQGHSVRKLIRVIYKLLSENIPFDERQLI

SEQ ID NO: 361259 - protein, 387 aa, unidentified
MLSRVDNTETETSILTDLRAIFVSLELSRTTWLVTSLSPGTREKMSKHSVPAGDIGGLLVRLRSLQERVRARRKQLPPLVVIQEAGLEGFWIHRVLTENGIESHVVDPASVATSRRRRRAKTDKLDGDTLVRTLLAYKRGEPRVCAMVRPPTHEEEDRRRLSRERRVLLKERVQHSNRIKGLLFGQGVTGYEPLGRDRRQRLVGLQTGDGRPLPPHLKAQIDRELDRLEMVIEQIKAIEDELRHAIVAADTVTPVPRMLIELKGIGNEFATVLWTECLYRRFDNRRQVAAYAGLAPTPWQSGSIDREQGVSKAGNPRLRAMLLQLAWLWLRHQPDSVLSRWFLDRVKANGGRLKKPTIVALARKLLVALWKYVTSGVVIEGAIVRAV

SEQ ID NO: 361260 - protein, 392 aa, unidentified
MNRIVYIGMDVHTSNYTLCSLDPGYGVEKDNYFAEVQFTNNFVTNVVNYVSNLKKKLKDCEFVCGYEAGCLGYSTYKDLTKVGIKCVLMAPSTMAVQKGGKKVKNDRRDARVIAQCLAYQTYKEVYVLSEHDEAVRGYLRMRDSHNKALKRIKQQIIAFCTGHGLFSPTKSNWTVAHLKWLKDLKFNDPVEQEILNEYLSSLTFLSDKIKAMDVRIEELASEKQYCENVKKLRCIKGIETNVALTLLAEIGDFNRFSKPTDFAAYLGLIPGEQSSGDKVRGTGITKAGNSTLRRKLTESAKGYWRGRIGIKSATFKKLEKELPKEVTEYALKANTRLQRKFFNMTHVKGKNMNVAASACAREMACFVWGLITNHYEKAPTVPKTDEELLDLN

SEQ ID NO: 361261 - protein, 432 aa, unidentified
MAKVKPMDVTLPIACGVDVHKRFIVAVVCDASDPLHPAYFKKRFSTFTNDLIRFDHWLLEHGCRHVCMESTGKYWIPVFNVLESDMEEVRIVNPKWVKAVRDEKDDDKDAMWIVNKYRHGETKKSFIPDWTIRKLRELTRLRIKYVQQCTQEKNRLINSLTCRNYKLDMVFSSVFSKSAQKIIDLLIGEDPYTKEDILCCVDSRCRASQEDILEACNGFEFDAVEKKIIAHTRQHLQFLEEQIRTLDEEIDMLAAQYKKEIDLLMSVPGIGRMSAIKIIAEIGNNMDPFYTADKLTRWAGLVPGRNESAGKKNSRHITKGGKYLKPVLVECAWAAIKAQNPYYRYKFNGIAGRQGKKRAIIAIARKILVSIWSMLKDGAEWHPKDMDDNGRPRELSLRKAKRNFKTVIRDLLDLGKTKEEIAIDLVTIINQS

SEQ ID NO: 361262 - protein, 346 aa, unidentified
MRIVKQVVGIDVAQKELVVSLGKMHEDWTPQLYARKAFENSKKGFVALVSWTKKLTAQDCPVRYVMEATGVYHDALAYFLEAADHEVTIVLPNKISNYFKTLKVKTITDKTAADTIATFGLEKKLELWKKPKPIFKRIRQLTREREQLIQIRTIAKNQLHAEQSEAEPGKKTLERLKKQIEFLKKQEKEIKEELQALQQTEEHVHKSIKLISTVTGVGKLTAATVLAETNGFEQVRNKRQLSSYAGYDIREKQSGTSVKGKPRISKKGNKYLRKAMHMPALTAIRHDDRFKAVYERLVAKHGIKMKAAVAVQRKLLELIYTIYKTQVPYDKNYLMKNGIQANIEID

SEQ ID NO: 361263 - protein, 399 aa, unidentified
MLAVGIDISKSKSVAAILNQDGSMHTSPFEFHHTQPELDAFIKYILNSKQSATILMENTGHYHYPVLKAFQEAGLPVCMVNAYQIKKFGDMDLRKAKTDKKDAVRIARYALEKSYSLVPYTSMEQKYEDLRFLARQYNQRMLTLKTNKVFLLNLLDETMPGITNILPLTTRTPETSLSVLFINRFKSYDRIKKMGKSRFLDAFEKIARKSRNRQTKTYGLAIYEAALRNITTRGENEYTLAAQDQCLELVCESQKAADSIILKMKTLAETLPEYAVLRSMAGVVDRLGPLILAEIGDIRRFHSGKALNAYAGNDPPPYQSGTFESYNRHISKRGNAALRKYCFEVMQALKLTRPQDDPVYLFLLKKEQEGNPYNVAKMAGVDKFLRIYYARAMETLKQQ

SEQ ID NO: 361264 - protein, 346 aa, unidentified
MTQYKRIGIDTSKAVFTLHGIDQRDQPTLRINLRRAQMISFFKKLPPVEVAMEACGGAHHWARELAVLGHAVLLIPPQYVKPYVKRGKNDRNDAEAICEAAGRPGMHFVPAKSLSQQAQGMVLKVRDTLIGQRTLLVNTLRGHASEFGVVAGKGVGRVGSLLAAIEQDATIPAEARDMIALLGQQIEHLDIKIKALEARLNAAHKANAVSRRLATIPGLGPVTALTLATEIDPAAFASGRHMAAWIGLTPKEHSTGGKQRLVGISRAGNERLRSLLVVCATSVIKAATMPASKQMTDWLRGLLQRKPRKVAAVALANKIARVAWAVMTYGTVYRRCPTNVEVSYAA

SEQ ID NO: 361265 - protein, 322 aa, unidentified
MLSMNKSTLFFGIDISKDSFDVYSDKMGYNSYSNTKDGFKAFLKVLNRTSHCVMEATGCYHHKLAMFLHEKGIIVSVVNPLVIKRFIQMKLRRLKTDKSDAFMIYSYASEQSVEEWQPEKEYIERGKELLSLIQTYLRQATALKNKLHASESKGQTKGVIISSMKRQLRNLKRERQFLEQELESLIKTHEAKLFTRLTSIPGIGKKTAVLMMVSTSNFNGFNSYKQVSSYLGLAPNERSSGSSIRGKSRISKTGDGLLRNHLFMCSFTASVYNPQCKALFDRIVAKGKSKKLALIAVCNKLIKQAFAIARSGLPYDPNYAIK

SEQ ID NO: 361266 - protein, 388 aa, unidentified
MQGVAAQSEAPIAIRTDLCAIFVSLELSRSTWLITSLSPGAGEKMSKHSVSAGDTAGLFSRFADLQQKARTRTGRTFSIITIQEAGLDGFWIHRVLQGKGIESWVVDPASVLTSRRRRRAKTDKIDGETLVRTLLAFKRGEPRVCAMVKAPTPEEEDRRRICRERKTLTAERIRHVNRIKGLLFAQGVCDYEPLRRNRRGRLEELATGDGRPLPEHLKAQISRELDRLEIILAQLKAVGSERDAMLEPAKEGRPTPASLLAQLKGIGPEFAAVLWSEGLFRSFNNRRQVAAYAGLAPTPWQSGSVAHEQGVSKAGNPRLRTTMIQLAWLWLQHQPGSQLSIWFRERVQRNGGRGKKTAIVAMARKLLVALWKYAVHGILIDGTETKAA

SEQ ID NO: 361267 - protein, 427 aa, unidentified
MSVHRLQDTARGRRSACLTPRFSTLLASISPNAHTRSVPWRRELARSTCAHAPSPPPDDGYAELRSLLQNWGSPATILLGMEATGCLWEPLYESLTQADYTVLVLNPRQTASWATSLGLRAKTDGIDAHTLARGILAGYARASSLPSEAVQELRALTRARQDLVHSQTAAKQRLRDELVILFPELPHHTPANCDLFAPALLRLLGRYSSAQALADASLEEVSGCLREVSDKRWGESEAKALQELATGSTASTRAVRARGIVIQTMAQHLLDLQQRLADLEAAIAEALAGDDDGQRLQTLPGVGPIIAATMRAELGDVARFQHVDQVVAYAGPDPRTRQSGAFVGQKHLSKRGPGALRHVLYLATLDAVRNRSEWRDRYQRLLDRGRAKKGALAILSRSLLRVAYHLLRSGTDYDSSFLQPSLSEGTA

SEQ ID NO: 361268 - protein, 433 aa, unidentified
MLKLNYMSTLFVGIDVSSKTNAVYAMDFEENKYISSSFGNNQPGADQLVNMIAECMQKHKNLDTVLIVLESTSVYSVHISNFLSASEVLMPYKPYVFCVNPKATSNYRKSYIGMEKTDPTDAYLIADFGRVGRTKKLEPWRGGQFISLKRLTRHRMHLSECITREKTYMVSNLYLKFSELQLLEGDDKPFGSLYGATSSAVLTEFLSPQEIIDMPEEDLLTFLAGKSRNRISDLSKTSELLRKAARDSYRLDKCMYEPLSISLASSFNCIHAYQKEIKLIEQAIEKCINGMNPNALLILQSIPGIGPIWASGILSEIGDITVFHSSDALAKYAGLYWPKGDSGDFTSEDNKMSKAGNPYLRCYLGEAANSVRKHIPEYADFYARKYAEVTKHQHKRALALTSRKLVRLVFGLLVKNQLYTGEKLDTEYNIESN

SEQ ID NO: 361269 - protein, 343 aa, unidentified
MTIIRIGLDTAKHVFQLHGVDESEQPILRRQLRRGEVERFFAKLPPTRIGLEACGAAHHWARVLRALGHAVVLLPPQYIKPYVKRGKNDALDAAAICEAMSRPSMRFVPIKSAEQQAALMMLRARELLVKQRTMLINAMRGHAAEFGVVAAKGPVKVRELLPRAHAAEAGVPELALEMLRLLASQLDALDGKLKMIEATLMAWHKQDAVSRCLASQPGIGVPGLDPGIGAVSFALGVSDPKLFRSGRHFAAWLGLTPKENATGGRSRPGRISRQGDQSLRRLLVLGATTVIQFAKPGRASPWLLQLLARRPRKLAAVALANKMARILWAMMVSGELYRRPQPV

SEQ ID NO: 361270 - protein, 428 aa, unidentified
MNMIEPTEAKEYAAMIGLDWASEKHDIWLWDVATGKSRHRVIEHTAEALADWLSELQSQYPGLRVAVCLEQSRGALIYALMGHAFLDLYPINPVTLAKYREAFTPSRAKDDPSDAKLLAEILRLHRDKLAVWKPDDEQTRLLGFLNEERRKAVNLRTKLVLRLQAALKLYYPQAIQWAGVDLFTPIACDWLLKWPTLETIQRARPQTIRAFYYAHNGRRPDMVEDMIAAIATAKPLTRDGAVIEANRLTVQMLAKQLRALHGSIVEYEEQIAALFKQHPDAFLFENLPGAGPTLAPRLLSAFGVDRARHPTALEMQTYSGIAPVIERSGKSCWTHWRWNCPKFLRQTFHEFAKSSIIHSAWAHAYYDLQKSRGKGHNAAIRALAFKWIRIIHRCWQTRTPYDEGLYLQALERRGSPLVPLIAVPTRVA

SEQ ID NO: 361271 - protein, 373 aa, unidentified
MKDCTRQKDPNAKTIEKQFQYYCGIDIHKKKSYFYIINNKGKRVFSGNINTDIDDYRELLEQYESEEIQIAIEIGSLTFSYCDLFLEMGISFYIVNTAKHYAIAKSSSKTDKKDAKRLAINLWKDVLPQKVYMPTPEERQLRILISHRAYYVKQLNRLINTTMAFLATYHIVLNRKALRSHKTWMELDEEIKAGDNRILKHLFSHAYQDFLFSCQCTDETEELLIELIGERKEFTEKYDLLLSIPGVGTITAVTVICMAGNIGRFQNVRQFVKYLGLAPKVRDSGGKQYGSRKITKEGNGNLRGYLGQCTLGMIRTKKLEALPLQSWYGTVKKKRGWKKARVAATRKLVHIIFGVLKHETPYNPAMVTLKRLA

SEQ ID NO: 361272 - protein, 331 aa, unidentified
MLEERKIIKIKEGTVLEITPGFVGIDVSKARLDVAMRPSGESESFSNDEAGIKILVKRLGPMQPALIVLEATGAIERQVTRALASAELPVVVVNPRQVRDFAKATGQLAKTDSIDAVVLARFAEAVRPAVRPLPDEVTLELRALIARRRQITEMIVAETNRLSGVSKAVKKRIDAHIRWLASELERVNKDLDQSIRQSPIWQEKEDLLKSVPGIGPVISRSLIADLPELGQLNRKQIAALVGVAPFNRDSGTLRGRRGIWGGRASVRAVLYMATLVASRRNAVIKAFYTRLRNGGKAPKVALVACMRKLLTILNSMVKHKTRWSENSFQTT

SEQ ID NO: 361273 - protein, 439 aa, unidentified
MPPGARESYGQTVPPLVAGRHDRYWGVVPACAGGSTDPLGREPFSRGLLIRVAGRRSGGREVLYVRDDWAEDHHDVQVQDETGRKLAARRLPEGAAGIAAFHELIAGHLDQDGDPGQVAVAIETDRGLWVQALVAAGYQVYGLNPKQVARFKERYNLLRAKSDAADAHALADMVRTERHQLRAVAADTPEAEAVKVVARAHQTLIWERTRHTLRLRSALREFFPAAQAAYAGLGLTGADTLELLIKAPDPASAARLSAAQITAALERAAATASVLITINEQISELESQVEAHFHQHPDVAIYLSQPGIGTVNGARVLAEFGDADGRYASAKARKNYAGSSPITRASGRSKVVLARFVRNDRLADALQSQALSPLTASPGARTYYDKQRERGLGHNAALRQLSNRLVGILHGCLKTGTLYDEATAWPEHDTIRHATRRAA

SEQ ID NO: 361274 - protein, 420 aa, unidentified
MKAYNVDNFAVLIGIDWADKKHDICEHRVDSEKYHYSIIKSKPEALHDWAMDLKKRYPSQKIAVVCELKKGPLIYALTKYDHLTLFTVNPSTVAKYRKAFTPSGAKDDPSDAFVQVEILTLHMDKLSVIEPESASVRSLAQLVEYRRSLVQDNVDLSNKITAALKNYYPQVLEWFKEKDTFIFCDFIIKWPSLIHAKRAKKQTLLDFFNSHNSHYTQVNEARISSIKSAMPLTGDIGVIEPNQMLVEVLIKQFKVLLKGIETLEKAIKQAYKAQHDKVIFDSLPGAGPQLSPRLLVAFGSNRDRYNDAAELQKYAGVAPVIERSGKKMWTHWRYSCPTFLRQTFVEWAGFSIRYSFWAKAYYEQQKSKGKPHNSIIRSLAFKWIRIVFRCWKTNTPYDESKYLEALKRRGSPLLKFTLNG

SEQ ID NO: 361275 - protein, 381 aa, unidentified
MPYILALDVSMGHSYSVLYKDDTCLFEDEIEHTQRGFHALLEEIQHLPERPLIVFEATGIYSRPVEKFFQDHHFSYCLLNPLEAKKQMEENTLRSWKTDKSDAHRLAQTHLKNQRQPKEVQSNFYLEMRDLARFYQEIEKKITRLRMDLHNCLQLTFPELEQFFSNRLTPYALTLIRLFPHPDFVLASTRTKIKNKLINETRKKISANRAEQKADQIIHYAQCAYPAVEKDSIHCQKTIYYAELLQDLLEQKEALATQMIKKAEGSPCFLLYQTFPGIGALTAALLLGELGDITRFKTHKQLNAFVGIDIRRYHSGKYTGQDRINKRGNPKARKIIFFTIRNMIRQQRAAPNHIVDYYYKLKKQPIPKKDKVATVACMNKL

SEQ ID NO: 361276 - protein, 404 aa, unidentified
MNYLALDLASKSHRVRITNEKGENICPTFSIENNQDGFNKLTDCIAKLAVNPSDILAGLEATNNFWENIHEFLTAKGFKVVLLNPYFVNKFREALRMKGKTDDIDTLVIASLLRTGEYGACLIPDEITLTLRELVKLRYEFLKDQKNYKRQAFALIALVFPEYRKTPIKNPFNIASTQILLQFPTAKDLSTAKPKNIEKIVRSIQGNNFNITEIQGLIDCAKQSSYSGKASAVRGSNLKMILAHVLNLDNDINELDKQITAILSPKDHNDSFPGENLLSIDGVGRKTLAAMLSAIGLDGKSFQDAKAIIGHIGFYPKIYQSGETCRDNRISRRGPKYLRWALYMCAVASIKHNNEMRMLYQRKRSQGKTEKQSLICVAKKLAQMMLAMLKSGQSYNPARVFAAA

SEQ ID NO: 361277 - protein, 343 aa, unidentified
MHFNTIGVDLAKNVFQVHGVDSAGKVVITRQLRRKQVLDFFSKLPGCLVGMEACGTGHHWAREISKLGHTVRLMPPSYVKGYVKRSKSDAADAAAICEAVTRPSMRFVPIKSTDQQALLMLHRTRDLLIRQRTQLINALRAHLAEFGLVAEKGREGLAELSAIIADEMNREALPSAMKQALQTIVDQLAALELQIGTLDRAIHAHHRANDMSCRLETVPGIGVIGATALASTVTDPSGFKTGRDFAAWIGLVPRQHSTGGKERLGGISKQGDRYIRRLLVIGATAVVRQARQHPQKHPWIMKLLAKKPAKLVAVAVANKMARIAWAIMARGGYYRAPALAAAA

SEQ ID NO: 361278 - protein, 321 aa, unidentified
MDFLGLDIAKARFEACLIAAGGQHHASFPNTESGFEQLAAWLARHRPAAAIELLHACMEATGNWGLDLAAFLYAAGVQVSIINPRQIKAFGDSELSRNKTDKLDAALIARFCRSHTPPAWTPPAAEMRELREMVRRCAALKANRTQEINRQKAGLVSGVVAASIERLLTCLNEEIRSITAAIRALIARDAALQTDFDLLRSIPCIGEVAATVILAEVPNIAEFTPKALAAFAGLSPQEHSSGSRRHAGGISRIGNPLLRSVLYLCALSARRHNPRLTDFVQRLTAAGKPHKVVLVAVARKLLVLAHAVIRTQKPFEADATA

SEQ ID NO: 361279 - protein, 399 aa, unidentified
MLAVGIDISKSKSVAAILNQDGSMHTSPFEFHHTQPELDAFVKYILNSKQSATILMENTGHYHYPVLKAFQEAGLPVCMVNAYQIKKFGDMDLRKAKTDKKDAVRIARYALEKSYSLVPYTSMEQKYEDLRFLARQYNQRMLTLKTNKVFLLNLLDETMPGITNILPLTTRTPETSLSVLFINRFKSYDRIKKMGKSRFLDAFEKIARKSRNRQTKTYGLAIYEAALRNITTRGENEYTLAAQDQCLELVCESQKAADSIILKMKTLAETLPEYAVLRSMAGVGNRLGPLILAEIGDIRRFHSGKALNAYAGNDAPPYQSGTFESHNRHISKRGNAALRKYCFEVMQALKLTRPQDDPVYLFLLKKEQEGNPYNVAKMAGVDKFLRIYYARAMETLKQQ

SEQ ID NO: 361280 - protein, 357 aa, unidentified
MPAHSKTAKPSTQVAVIGIDIGKNVFHLIGLDKRGAIVLKAKLSRSQLENRLANLPPCLIGMEACAGSHHVSRKLIALGHDARLMPAKYVKPFLKGHKNDYRDAEATAEAVQRPTMRFVATKTEEQLDLQALHRVRARLVAERTATVNEIRAFLLERGIAVAQGIQRLRRALPDVLAKSTDALSPRMIRIIEALAADWRRLDERVEEVSTEIETLARKEAPCQRLMTVPGIGPIISSATVATIGTGDMFAKGRDFGAWLGMVPKQLSTGGRTILGKISKRGNKYLRTLFVQAARVVLLKRVSWERYGLKAWIEAAARRLHPNKLAIALANKLARIAWAVLHYGRNFEVSHDYAPQPA

SEQ ID NO: 361281 - protein, 355 aa, unidentified
MDSIKYIGLDVHKEAIAIAVLNGVGRLVMESIIETKASTILQFIQGLRGDLYLTFEEGTWAAWLYDVLKPHLTEVVVCNPRKNALLKEGSKSDKIDARKLAELLRGGYLRPVYHGENGLRTLKELARSYLTFSKDLSRVMNRIKALYRSWGIPCAGGSVYSPRQRTGWLAKITEAGVRRRAEFFYQQLDALRTLRQAVRRDLLAEGRKHGATKLLRQIPSIGPIRAALLIALIQTPHRFRTKRQLWNYSGLGIETHDSAEYRYVEGQLQRRKKPQQLRGLNRDHNHDMKDLFKSTATWASSHPGPFADFYAALLGKGMKPEMARLTLARKIAAITLRVWKRGERFDVKHLKPQTA

SEQ ID NO: 361282 - protein, 434 aa, unidentified
MLVLETVFRKLESPRMTPEWLYTSNLGDVSLETHDIIGIDVSMGRSSCAIYHANQCIFDFTFTHTISGFKTLISRISLTVNPVVYFESTGIYSRPVRTFCERNQLDYVEVNPLTLHFQMSTLRRLKTDRNDAHKIAQYGIQYPQVLSQPFTPEYGKLRELTRFYSQIENDIKDKQMSLHNALQQTFPELKHLFASRVSTLALNVIELFPHPELVNCLSQTKLKNILMKSTDKRISKVKALQRAQELLHFASVSYPAASADSVQVDEVRYYARILINLKLKKKHLIKQLVELAKPLPEFRIMTSFPGIGDQTAAELIGELGDIRRFSNNRKLNAYIGIDLNRYQSGTYTRQDHINKRGNAHARSILFFAIRNMVRQQAAAPNHIVDYYYRLKKGPHPKRDKVTVVACMNKTVKCLLTMVKANQSYDYSYHGLKVQ

SEQ ID NO: 361283 - protein, 466 aa, unidentified
MKDNRRRRAGTPRVSPSVLDRINPHAAGIDCGSTEHYVAVPADRSPTPVQSFKTFTTDLVRLADWLVACRVTSVAMEATGVYWIPIYEILEARGFEVRLVNARHIKHVPGRKSDVSDCEWLRDLHSVGLLRGSFRPTEGIVALRVYMRHRQTLVESAGTYVQRMQKALVQMNVQLPLVVSDITGVTGLKILRDIVAGHHDPAHLARHRDYRCRASRTEIIAALTGHYRPEHLFVLQQNLELFDTCQVQLAACDRALEAHVQILTAAQDAPATPLPAPRVHRRIIDNDPHFEIRTPLHRLTGGVDLTQIDGIGPYTALKLIAEIGTDMQRWATEKHFTSWLTLAPKNKVSGGRLLSSRTEPSANRAAGMLRMAAMTLGRGSTALGAFYRRLAGRIGKPQAITATARKLAVLVYRALKGELVYRDPGADAYDRQQRTRVRRRLRQTATTLGFDLVNRETGEILHAAPA

SEQ ID NO: 361284 - protein, 348 aa, unidentified
MTIVAEKFAYVIGVDTHARTHTYAITAARTGACLGCEVFPVTAAGIKRAIGWIRRNTTGAVLAAVEGTRSYGASLTRALTAENMPVVEAKPPRKKARGGAGKTDAIDAMAAATGILGTDTGRLLFPRIEGTRAAVSVLLAGRRRLEGQTTANRNALNALVREIDLGLDTREALTDKTVAEIGSWRPRPSDTVEQQTGREEASHLAREITAAAVRIKANEARLGRLCQELAPGLQDQPGLGPVTVGIILAAYSHHGRVRDEAAFASLAGVSPLQASSGNTTRHRLNRTGDRQLNMALDVVARTRMRCNQKTRDFVERRTKEGLSYREIKRVLKRYIARDIFRQLEKIFA

SEQ ID NO: 361285 - protein, 352 aa, unidentified
MTVTIVETRPQARAITGGVDTHADVHVAAALDPIGGLLGVQEFPATAAGYARLLGWLGGFGTVRLAGVEGTGSYGAGLARYLAAAGIRVVEVDRADRQDRRRQGKSDPLDAVSAARAAQSGRASGAPRGRDGQVEAIRALMVAKRTARAQRTQTINQARALIITGPDDIRGRFTGQGPAELVAELSGLRPRPGSMVRYHTLLSLRELGRRAHYLDAQLERLDELIIPLVTARAPSLLKLHGVGPDTAAVLLIAAGDHPGRLRSEAAWAHLCAAAPIPASSGKVTRHRLNPGGDRQANHALWRIVLTRMGSHPPTRAYVARRAKEGLSKKEIIRCLKRYVAREVYPHLRPPSG

SEQ ID NO: 361286 - protein, 355 aa, unidentified
MLRDPILPVDHIWTTNPYRSIVGNSVKTGDAVFAPTWSLTNARRCKGAARQDVHRERSGLRFGLDAGPLSQWLFSGLAEAGLPVVCIETRHTKAFLKAQVNKSDRNDARGIAQMMRVNLFRPVHVKTLTSQKRRALLTARKILQDKALAIENDIRGLLRNFGLKVGIVGVGKFDERIRELVERMPELVEIMEPLLTARQKLRETFTALHRKLLAIVRDDGVCRRLMTIPGVGPVVSLAFCATIDVPARFKNSKAVGPSLGLTPVLNQSGESLRVGRVSLSGDEMMRALLYEAAQVMITRVQKWSWLKAWAVNVAKRRGLKKAIVALARRLAVIMHRIWIDGTVFRWTKEAAPATA

SEQ ID NO: 361287 - protein, 342 aa, unidentified
MEQPVTVGLDIAKNVFHAYGVDAQGQKVLSRELRRAKVEAFFAKLEPCLVGIEACATAHHWARTIEKLGHRVRLMPPAYVKPYVKTQKNDAADAEAICEAVTRPNMRFAETKTVEQQSVLVLHRTRATLITHRTRMGNTIRAHLAEFGITESIGRIGLSRLIDMIVSGEDARITDVTRRALMCLVGQYRLLQNQILELDRQVIAWHRSNEASRRLATIPGIGPLAASALVASVGDASNFKNGRSFAAFIGLVPKQSSSGGKERLGRISKRGDHYLRWLLVVGGLAVIRYAQRHGTRRPWLLKLLQRRTTKIAAVALANKIARIAWVLMARGGAYHEPVPQAA

SEQ ID NO: 361288 - protein, 342 aa, unidentified
MGIEVLGIDLGKTVCSLAGLDATGAVVYRKRLQRHRLLDLLEGLDPCIVAMEACGGAHHIGRFCLQNGHEPRLMSPLYVRPYVKVHKNDDRDAEAIAEAATRPTMPFVTIKSEEQLDLQALHRARERLVTERTRLINQGRGFLMERGIRVGTGRHVFQKELVRLAATGAADLSHRILSMLSDMMAELATINDRVEAIDTEIKVLAKADADMQRLMEIPGVGPTIASALVAAVGTGSSFAKGRDLAAWLGLVPRQITTGGKAKRIGISKHGNRYLRKLFIHGARTVLHLVRDRTSPITQWADGLKEWAHVNVAAVAMANKMARIAWAVLTKGERYRPAALVGA

SEQ ID NO: 361289 - protein, 355 aa, unidentified
MNSEKYIGLDVHQATISVAVMDSRGKVVMESILETKAATLLEFLAGLRGTLSVTFEEGTWAAWLYDLLKPHVQKLVVCNPRKTALLKDGNKNDRIDARKLAELLRLNNLKPVYHGETGVRMLRELARSYLTLIKDLTRVMNRLKAMYRSWAIPCPGRDVYYTRHRAEWLAKIREAGVRRRAEHLYQQLDMLQHLRQQARRELLAESRKHSITAKLRQIPSLGPIRSALVVALIQTPHRFRTKRQLWAYSGLALETRTSGEHCYVQGQLRRSKKQVSIRGLNKDHNHDLKGLFKAAATRASVQPGPFQDFYQRSLAKGIKPTMVRLTLARKIAAITLTLWKKGENFDAEKLKSQAA

SEQ ID NO: 361290 - protein, 336 aa, unidentified
MPMYQLGIDVSKNTLDLCLLREGIKGRIKTRKLKNTADAAKVVAEWLKKQSCELGEVHIIMEATGVYHEPLAYGLHFAGARISLANPHRTREFARGMNILNKNDKVDAWMLACYGSLKEPEAWTPPPESVRYLRALLRRRDALVADSTREKNRLEKSVFTDSPDAVRASIENMLQELSNEIEHLDVLIQEHIKTHPELNQDFRLLTSIKSVGYLLGLNMLAILKSHSFESAEQAAAFLGVVPVERRSGTSVKGKPKLSKIGPPEIRTKLYLAALCGLRFNPVMKQMYTKLCQRGKSKMCAIGALMRKLVHWCYGVLKTQLPFDAEYNQQSYYKTIF

SEQ ID NO: 361291 - protein, 487 aa, unidentified
MDNDRRLVGIDLGIASAHTVRVLDGTGETVAKRKAWPTVESLSEVEEAGLAGCAAGTRLEVVVEPTGPAWLPIAVFFAARGHLVFRVSSAKAADLRRFLSRHTKTNGIDADTLARLSLFDPVGLQPLALPGAERAALDRRVRACDRLTQVAAEHKRRIKDLVRQLLPMTPLTGDLGVADMAVLERFADPNTLVKAGHRRLTALIVKASNNHQGAERAQQWLDAAQAALDLYGAHPAIAFADLAAEVATEVRLLSAAQTELAGHAAERENAYRWVDHGGLARSLPGFAEVGGPALVAGMGEPGRFRRGKQFRSFTGLAPKASETGDTDRKGQAMSKAGSSLLRTTLVRAADHARKQDPQLARIYYVQMVERGKDHLGALCVVAANLAERAWAVLDRGMPYVICDIDGRPVDPDEAKAIIAEHWTVPTEVRARRRSMKVGKAPQKALTGQSKPCARSAGARGDLPRPASSTDKTNSVNHANASSTRRIA

SEQ ID NO: 361292 - protein, 321 aa, unidentified
MSTKTETCYVGVDVSKASLDVYRPDTRAFIQFDNNSEGTEELSKKLNRKRKRTVVVMEATGGYEKMLLHQLENFGIEAAVVNPRRVRDFAKGIGIDAKTDPIDAQVISRYGQVVEPAVVACKSDHEKKHRALVDRRNQLQGLINQEKNRLKQTWDEDAKESIRTVLDCLKKQLKQVDSQLAKMLKADKENQRLIEILDSIKCVGPVLISTLITSLPELGEFNREQIAKLVGVAPINRDSGKKSGKRFIGGGRGHVRRVLYMAALVGIRHNPVLKAYYAHLKSKGKESKVAIVACMRKLLSIMNTMVRTNELWREPTKGSAA

SEQ ID NO: 361293 - protein, 353 aa, unidentified
MTPLVIGIDPHSRIHVAAAVDEHGRLVDTCEVGASPTQLGQLLTWIQALAVTKVAVEGSKGYGLPLARLLVAAGHTVVDVSSNLTADERKRSRRRGKDDEGDAVAIARIALRESDLPIMDPAHLDADLKLLVDARDQLVQEEARVRNRLHALLLNMAPGYHDTTGPLNSRPAFARARSLALRARKSDPIRAKLALAAIRRLNALRDEQADLEKDIHGELEQRSTTHLQSIPGVGPLVAAKILGEVRDVRHYPSAAAFAAHAGVAPVPASSGNTQRHRLARGGNRQLNRALFTIAMVQARWHPPAREYLARKRAEGKTPAEARRCLKRHLANVVYRALQADLATVQSAALSPAA

SEQ ID NO: 361294 - protein, 353 aa, unidentified
MMVFVAVDVGKRRCVTCVMGEDGSILDSGSYPNTMFDASHYARQTVEKYGECKAVVESTGNMCMKTYEAFESNGVEVKLANPVKTRAIAEARVKTDKLDARILAHLLRADLIAECYVPSKDVRLARALLTHRVNITREQTRMKNRIHSLLDKYDLECEYDDIFGAHGMRWLHTLQLNGHDHEILQSLLRQLEFLQDEEEKADSTIAKDALHSQYVPTIMSMTGFDYYSASVLAAYIADISRFPSPSHMVSWVGLCPSVYQTGESLYMGRMKGGSRKVKWIMIQAANTAIRSDHRMKAYYERKLRKHHHNVAVTHVANKMLRIIWHMLRENRLYNERKERLYESKLKRMTHTAQ

SEQ ID NO: 361295 - protein, 316 aa, unidentified
MKQGKYNTKIAGIDVGKRQLDIAVHGGEMSQVANDKAGIGALIAWLEARGVVRVGLEPSGGYERAVREALAAAGFEVVMHHASEVRLFARFKRIKIKNDRADAVLIAVATAQVDTVKASADPRFAELAERLTAYEQVTERLAQMKTGLEHVTLKDLAKALRAEIRATELLKAKLIGKVVAFIKTHADLAARLKLLRSLPGFGPVVAVGALVRMPELGAMARGQAASLLGVAPFDRDSGQYKGLRFIAGGRERPRRMLYIAALAARRCDPGFKTFAKHLAAKGKPPKVILVAIMRKLIEAANLVLARSAVWERRPAR

SEQ ID NO: 361296 - protein, 372 aa, unidentified
MQQNIIHIGLDVDDTQYHGAAFNKETGEVIDFKCRPTLKGLMSQLDRMARHFKGHKIKLCYEASYVGYCLQRDLISNDVHCDIVSPSSIPSPRGKAVKTDRIDAGYLAQFYANDLLTIVQPPDAEQEQDRDFLRSRQKLLQQQTQLRKHLQSVLRRNGLHYKAETGNKSHWTKHHYCWLARTIDGLSGSLKVNLELLLRQLKGLNEILAEYGQQIEALAAAPRYQQAVQSLTCYKGIKNIFALTMITEIGDVKRFPHPRKLVSWIGMDIREYSSGGKHNHFGITKHGNRYIRTAFIEANQRGYRTTKIGKDLKARRKDTAPELINIADRCLRRLSKKGNRLLLAGKHPNKVKVACAREMVGFVWESLNKVAA

SEQ ID NO: 361297 - protein, 322 aa, unidentified
MLVSVLGIDIAKQKFDVALLVDGKTKHKSCKNSVEGFETLKLWLEKQGTQKVHACLEATGNYGEDLASYLHEAGHMVSIVNPARIKGFGQSELIRTKTDKIDAALIARFCMAMNPEPWIPPAPEIRSLRALVRRVDSLIDMRSQEKNRISTAHESVIALIREHIAYLDKEIEKIRRQIADLIDQNPDLKQKKDLLDSIPGLGKATIPHLLAELNDLEKFRHVREVVAFIGLAPKETRSGSSIKGKPRLCKIGHARLRKALYMPALVSIQCNPVMIAFYNRLKDKGKNGKVIVCAIMRKLVHVIFGVLKSGKKYDPDYKPAFT

SEQ ID NO: 361298 - protein, 363 aa, unidentified
MSTVQSHTKFVPNDYDVFAGLDVDKKSISVTFLEHSGQMKQIKMPYDSHQLMSYVRNRYTGKKVAFVYESGPTGFGLYDDLTSAKYFCMVTSASKVPTEPSNRVKTNRIDSKKLSENLRGGQLKEIHVPTEHYRELRHLVQLRDTFVKQLKSTKLRIKSLLLVKGIPFPDDEHKWSYSTIRKLKDTNCSEAIKFHLDRLILSLEFFRSNVLDTTRNIRAFCKHNEEINRNIQFLISIPGIGFITASQLLARIGDWRKLYRFDQIGSFLGLVPSEHSTGDDVCRGSITRTGNTNLRCKLIQCAWKAIQIDPQLNKFYNTIYNRNRNDYGEIKAITAVARKLTTRIYAVLTQQRNYKLRNKPEDN

SEQ ID NO: 361299 - protein, 346 aa, unidentified
MEHYVGIDVSLELLSVCVVDGRGKIVKEAKVASEPEALVYFLKELGFPVNRIGFEAGPLSQWLHAGLTQAGFEAVVLETRHVKAALSAMPVKTDRKDAFGLAQLLRMGWFQQVHAKSIGSQEIRALLVARKQLLGRLLDVELSIRGILRGFGLKVGQVTRKTFEARIRELVTGHTTLERIAEAMLSARATLKAQYEKLHKAVLAIVREDAVCRRLITVPGVGPVVAVTFKSAVDDPSRIAKSKAVGALFGLTPRKYQSGEKDVTGGITRTGDEMVRTALYEAANVLLSRITRFSKLKRWGMDVAKRRGSKRAKVALARKIGVILHRMWIDGTTYRWAEAKPIAAQA

SEQ ID NO: 361300 - protein, 393 aa, unidentified
MYLVGIDIGKLKHSFCLLEKETGEILVEPVFFENNRDGFNVLLSSFKHLPQKDILIGMEDTGHYNLALLKFLLDRNYQVALINPVATNLTRKMQGGISKNDKLDTLTICDVLSSNQRVKSYRISKYSSFDLYEQKQLTREHHNLKEEENQLSNRLQKCIDVVFPEFNSLFKSKYGIVYMNILKEFGSADAIAHADIRTLRKCFDTGRGKHISLTAEELKEAARNSIGFPSSSEATQIKHLVARIELIKEQIAEIDKKIEEFSLQNNSPILSIPGISHFSGTSILAELGDIHNYSKPSQIIKFAGVAPLTYESSQFTAQHTAITKKGCKYLRKTLYQIITPVIQYNPVFKKFYLLKIAQGKGHRCAQGHCVRKLMRVIYHLLSTGTQFDPALLR

SEQ ID NO: 361301 - protein, 365 aa, unidentified
MKTKLKTKNEIVRERVDFSTETIYCGIDVHKKNWGVTIYLNDRFMKTFHQNNDPQALLSHLNENYPYGKYMACYEAGFCGSSVQRKLTALGIECLVANAADIPQTNKSALSKTDAVDSRRIGEALAKNMLRPIYIPSPEFEADRNLIRYRKKLVARLKGHKQSIKSTLFILDIPIPERFEKSCWTNTFIKWLIELQLENSSTKTTIDLMIDDVVFYRKKLYETNKLIRNLSQTERYKFQFEIVTSAPGIGLITGMTMLTEIGDISRFDSFSKFNSFVGLCPSQFSSGEKTRMGKMTVRSNKAIRSLIIEAAWIAIKYDPALAKKFSELEKIKTRKRAIVTIARKLLSRIYSIWTNQKKYEKGIKK

SEQ ID NO: 361302 - protein, 311 aa, unidentified
MMNDSIGVDISKDHLDVHRLSDGVSRRFANDSRGHRTLIGWLERPDLRIVYEPTGPYHRALEHRLAEAGFALVKVNPRQARRFAEATGRLAKTDRLDAAMLARMGALLELQARPARGPTLNDLKDVHMAREALVKNRTAARNRAKNLTLPILKRHNAEQLRQIERQIAALENEIMALIKVDPDLARRFDILVSIPGVSAITAFALLIDMPELGTLDQAQVASLAGLAPVARQSGQWIGRAFIRGGRANVRRALYMPALVAIRFNPDLKAKYDRLKAAGKASKLAIAAVMRKLIIIANALLRDGRIWEPTRT

SEQ ID NO: 361303 - protein, 370 aa, unidentified
MAQSTPLFVGLDVHKDSIAVAHAAGGSAEPPVFVGAIGPRQADLERLLHRLQGKTSALTFAYEAGPSGYGLYRYLTGKGLPCQVVAPSLIPKKPGDRVKTDCRDAVELARLLRSGDLTAVHVPSIEDEAVRDLCRARDAARVTGKDAKLRLKAFLLRLGRHYVGRATWNDAHRRYLAKVVCPTPAQQIVFQESVRAVDEQVDRRQRLEAELLERAPAWRLYPVVQALQALRGVQFLVAITVVAELGDLTRFDSPRQLAAFVGLIPSEYSSGGTRRQGGITKAGNGRARRALIEAAWAYRHPAKVSLHIQQRIDHLPKPLQDLGWKAQVRLCKRFRRLTARGKHPNVAVTAVARELIAFMWAIAKAVPLAA

SEQ ID NO: 361304 - protein, 343 aa, unidentified
MDHFAGLDVSVKETSVCIVDDTGKLVREVKVASEPEALLSVLKSPAYRFKRIGLEAGPLSQWLYNALAEAGLPVICVETRHMRAVLKAQINKTDRNDARGMAQMMRVGLYRPVHVKTLRSQKLRMLLTHRKLLQSKAIAIDNDLRGTLRNFGLKVGMVGTAKFEARINELVENLPDLAMLVEPLLVVRRVLREQIGVLHRSLLAIVRDDDVCRRLMTVPGVGPVVALTYRATVDVPARFKNSKAVGAVFGLTPSRHQSGESDRPGSVSRCGDEMMRMMLYEAAQTMLVVSTKWSWLKAWAMKIARHRGMKKAIVALARRLALIMHRIWVDGTEFQWTREVTAA

SEQ ID NO: 361305 - protein, 371 aa, unidentified
MKTEETTPHLFIGADLHKLQFTVAGFGEDEGTVEIEGVFKTDDEGYQDFCNKVHELENKKSYFIEIAVEATGNARYFKNRMEAEGFSVVVVNTNKFKVITMSTKKTDANDAFTLAYYLSKDMLPQSYLCDQTSEEIRRLLRMRSILVSSIVKLKNQIHGMMLGYGIETQAAQFQSKKRRQELLVGLENHDFSQFTASSLEMTFHILDDMEANVKRVEAQISQMTQKNEDVEILMTMPGVGMVGATTISAYTKDIKERFAGDFKRFSAYLGIVPSVHNSAETVRMGKITKHGPQDLRTAFVQVALGIIRQPKNTSAWKLMADYRTMKASKGSGRAIIALTRKVARIIFVMLNNKTPFNPEMIKKSEQTKQAG

SEQ ID NO: 361306 - protein, 395 aa, unidentified
MFIVGIDIAKRSHEAIIIAEDGQVVRKAFSFRNNCTGYNLLLEQVRRLTLVKSQIVFAMESTAHYWLALYARLLKDGYAVMVLNPIQSHSLRELYIRKTKTDARDSLIIADLVRFGRCKASNVPQDKILALRELCRSRAYLVDMAADLKRKLIALLDRIFPEYEFLFDSVFSKASIAVLSKYSTPQKVKNANLRKLTDILMESSNGHFGEWKAHQLKEAACSSFGIDDSDGVYSTLLGMFLEQILSLTAQADSLEKQISVFFQEFNNPLTSIPGVGTVLAATILSEIGDITRFSSADKLLAYAGLDPSVKQSGEFKSNQNRMSKRGSPYLRRAIWLASTVAVHRDPMFQTYYEKKISEGLHYMNVIGHVSRKMTAVIFAVLRDGQPYQPILQSAG

SEQ ID NO: 361307 - protein, 386 aa, unidentified
MQKLNDLSRSLTPLKPDGTLIAVIEMSLSSWLVAGIVPGVERQPSKKLEVDENALLKLLIRWREEAKKSGHSIERIAVAFEAGRDGFWLARWLRARDIEAHIIHASSVAVSREHRRAKTDRLDTELLKRAFLGWLRGERDHCKMVAIPTIKDEDAKRPNRERESLVGEQSRIVNRMKAALVRLGIRGFNPKLKKAVERLDGLRTPEGEPIPPNTLAELRRDMARRRLVSDQIRQIEDTRLERLEQAPSDGPHAMVRLLARVIGVGIETADMLVQEVLSRNMRDRRAIARYAGLTGSPDESGRKRREKGLARSGNARVRRGMIQLAWRFLMFQKDSTLAQWFRARTENARSTRKTMIVALARKLLIALWRFVTTGEVPAGAVLRPAT

SEQ ID NO: 361308 - protein, 402 aa, unidentified
MNAVGIDIAKGKSMVAVMRPFGEVVLTPFEISHTDKDLIDLAKMLKSLPGETRVVMEATGSYHMPVAWMLYNSGLYVSVVNAVLVHDYGNNSLRRAKTDKKDAVKLANYALDRWLSLPKFAPEEENRQLLKTCYRQYQQYSKVNTALSNNLISLLDNVFPNVNRLFKSPLRTDGSVKWVDFVDSFWHQECVSTVSLKVFAAKYQKWCEKHRYHFSQQKAEKIYTAAKSAFTAMPKTDAVKCMVRQAVSALRACSKVLAELGKQMLSLASSLPEYPVVMKMFGVGPTLGPQLMAEIGDVRRFHSKKALVAYAGIDSPPDDSGQVVGKHKKMSKVGSSALRRTLFLVMSIYLQTAPQDEPVFQFMDRKRAQGKPYKVYMMASANKFLRRYYALVKAHLNTIGFL

SEQ ID NO: 361309 - protein, 404 aa, unidentified
MGYAGIDWADTHHDALVIDEKGRQRGSLRVDHTPEGLAKLTTFLETITGSDQKEQMACIIETTHGLLIAPLLEAGWPVYPVNPRTVDRRRGASGAKTDIIDASLLAKTGRADLADLHRLTPDSEVVQELKMLTRDQDALIQMQTRLVNQLTATLKAYYPVALQWFAKLQQHSTLTFLQTYPTPQAAMDASVEQITEILKHAGHTTAEKVAPKIFERLHQPQLPADAITSRTKSRLMLALVAQLLPLVEQVAAYDKEVEHLFLTHKDHEVFSSLPRAGKRLAPRLLAEIGDERTRSADAASLQALAGTSPVLFQSGNYAKAHRRLGCIKPLRNALHQFAWPSTQQDGWARDSYQRKRAEGKSHTVAVRALSNVWARIIFAMVNKHQLYDSATFEAAQRLHAHRVA

SEQ ID NO: 361310 - protein, 415 aa, unidentified
MALKIVYKICCGIDVHKTFVVACIASTNDKGVTSYESHRFSTYTSGLKTLLQWLLDRDCKDVCMESTGKYWIPVYNILESDCSIILAHPKYVKAIRGKKTDKKDAKWIADLFKHDLVAGSFMPPADIRQLRDLMRYRFKLTCFKSSEKNRLQNCLTVSNIQLGNVVSDTFGKSAQAILDKILENPADTSFDLEPLVFKSLKKKLPELRDAIDGYITPEQAGKLKVIKAHYENLESRKAELEELILALAAPYQQELTILQTAPGISSPFTAIGIISEIGTNMEAFPSAKHLCSWAGLTPTNNESAGKKKSVRVSKAGCYIKPLLVQCANAVVKSTKHPEMRNRYLRLKKRRGHKKAIIAIARMLLTALYHMLKSGENYNAELYRKSDLPPVNREITVEPVSLIARNQGYKIKSATA

SEQ ID NO: 361311 - protein, 345 aa, unidentified
MDQISRIGMDTSKHIFQLHGVNAAEAPVLRKKLRRKEMVAFFAKLAPTVIAIEACGASHHWARLLQSIGHSVKLIPPQLVKPYVKRGKNDAADAEALCEAMSRPTMRFVPVKTAEQQAALMLVGVRDRLIRNRTQLANAIRGYAAEFGLTAAKGRAHLVPLLERIKADESLPVLARELFAIQAQEYVDQQAQIDEVDAKLTAWHRSNECSQRLAKIPGIGPIGAVLLRMKTPAPELFRSGRQFAAWIGLTPKDHSTAGKVRLGVITRAGDEGLRSVLVVGATAVIQQARRGGRASPWLTELLKRKSPKLAAVALANKMARIAWKLMVTGETYATNSTPAIVARAA

SEQ ID NO: 361312 - protein, 440 aa, unidentified
MKKEKENLKKKYSKNLSVINEHAAGIDIGDKEHYVAVESEESYDVRCFGSFTEDLRAIVAWLIVRGITTVAMESTGVYWLSLYIMLEEAGIEVYLVNAKHVKNVHGRKKDDTDSIWIQKLHRCGLLQKSYQPENEQRILRTYIRQRKNLIKIASDSVRRMQKALELMNIKIHLVISDILGKTGMQMLKSILGGERNPKELIKLKDRRIKAKEEDIIKSLEGIWKEEYLFMLQQGYDEYLFYQNQILDCELNIQKQLLEQVAIINDGDISDLEKALSKIKKKRKPKRNEFNFPVKPYLDALTGIDLTKIVGIKEASAIEFISEVGTDMSKWQSGKHFAAWLNIAPNTKITGGKIISSKMMKKKNYAGQILKMAVSSLHSNKSPLGDYYRRMRGKFGGKGAVLATAHKVARIIYSMLKDKKEFDIKMMKESQEKFKKQRINN

SEQ ID NO: 361313 - protein, 316 aa, unidentified
MNKKNHTEVNIGIDTSQTQLDIYVRPCGDYFSVENTPKGAKEAACRLRSYQPTRVLIEATGRLEMHFVCAAHKARLPVVVCNAGQVRQFAKASGRLAKTDKLDAQDIAHFGEALQPALTELKPEKLRQISDLIAVRSQCLDMSTMQKHRLHRMPQSVHKPIQRILKTIQTEIERIDKQLDKLVEAIPQWRDQRDLLMSAKGVGKVVAYTLMSELPELGKLNRKEIAALAGVAPINRDSGSYRGKRRIYGGRRKVRTVMYVSMLSAIQYDPKIKSMYERLVAAGKPKKVAIVACMRKQLTILNTMMKNGTHWDEKLA

SEQ ID NO: 361314 - protein, 325 aa, unidentified
MVPERTEAYAGVDVSKERLEVCVRRGREAREGEHTFGLSNDPAGTQTLLARLLEERPVLVILEATGGFERPVAAALAAAGLPIAVVNPRQARDFARATGQLAKTDRIDAQMLARFAQAVRPSPRPVPEEEAQALAEITARRRQVVGMLTAENNRLGVATTKAVRKRLEAHVRWLEKELSRIDRDLEEAIEESPTWRENEELLRGVPGVGPVVARTLLAELPELGNLPPKQLAALVGVAPLNRDSGAFRGKRTVWGGRATVRAALYMGALVATRHNPQIKEFYERLLGAGKPRKVALVACMRKLLIILNAMLKNRTPWRFPQILAP

SEQ ID NO: 361315 - protein, 346 aa, unidentified
MSNSNPKSEVVVLGIDLAKKSFQLHGVDASGQVVLKKKLSRAKLRQFMVQLPRCIIGIEACGGANHWTRVFEKMGHTVRMIAPEFVKPFVKSNKNDAADAEAICEAVQRPSMRFVPAKSIEQQDIQSLHRIRSQAVARRTAQTNQIRGLLMEYGIIIPQGISYVRQQIPLILEDAENDLTYLFRELLLGLYDEMVHLDQRIKTLEVKLETLCAQNEDCQRLLSIPGVGLLSATALVAAIGDIGVFKSGRELAAWLGLVPRQHSTGGKPTLLGISKRGDAYLRTLLIHGGRTVVRVATKHQDRRNRWICKLEERRGKNITAVAVANKNARTAWALLSKKTVYTVCAV

SEQ ID NO: 361316 - protein, 444 aa, unidentified
MAVRKREDEVFPNAAGIDVGASSHWVAVPRHLAEQAGCEPVREVGAMTDDLNCLASWLIRCGVDTVALESTGVYWIPVYEVLEQHGLKVWLVDARQMKYVPGRKSDVQDCQWLQKLMSLGLLRAAWRPASEVCVVRAIARQREILVTEQASWVQRMQKALVQMNIQLTEVITDVMGQTGQAIIRDIVAGQRDPRALARHRHRRVKASEDDIAKALTGNWREEHLFVLGQALAMYDDIARHLQTCNAKLDALLAERGAANVDIGKAPKAGSKSRLEFDARQALANWARVDLTRINGLGVTTVMKLITEVGPDVSRFATVKHFCSWLGLCPGTKISGGKVLSSGTKRSANRARQALKMAAMNLSHSDSALGAFYRRLCTRMDKPRANTATAHKLARMVYFMLTRGEAYVDQGQQHYDEQQRQRSIAALQRRAAALGFQVNPVMAAA

SEQ ID NO: 361317 - protein, 310 aa, unidentified
MDCCIGIDVSKATLDIASLPTGESWTVTNDDLGLAELTPRLVALTPVLVVLEATGGFETLAAVTLAKAGLPVAVVNPRQVRDFAKALGRLAKTDALDAGILAEFAQRVRPEPRPLPDEAAQLLDGLLTRRRQLVDMLTAEKNRLGFARGPVKRDINRHIRWLEKRLQHVDGDLEAAIAASPLYQAKADLLRSVPGVGPITTLTLIATLPELGQLSRHQIAALVGVAPLNRDSGTLRGKRMVWGGRAPVRAVLYMAALVGIKHNPVLRQFYERLRAAGKPFKVAVTACMRKLLTILNAMLRQNCRWDPQHA

SEQ ID NO: 361318 - protein, 341 aa, unidentified
MRIVGGLDVHRAQITFDYVDLDTGDVETGRVEPATRSEFRRWLTRFSDVDDAVFATEGCTGWRFVVEELERAGIEAHLAEPADTAMLRGRKKRAKTDRGDARHLRQLLIDGRIPESWIAPSHVLDVRTKARLYLALMDQRRAWQQRIQAMLFHEGVEKHSSLLTEEGRARLCEAELSGTGRQYVDTALRVIDLTSIEADLIRNELVAFARTHPGPRVLWENLYGVGELTGAIIWAEMGDTRRFSSSAKAVRHTGLDITVWSSDTKRPPGKLSRQGPPALRWALYEAALTSSRKTSPDHDYYLEVKERLGAKRAFLSVARKLARKVHHLLRDLDDAAYDLAA

SEQ ID NO: 361319 - protein, 417 aa, unidentified
MDDEVYYERCAGIDVHKKLLVVCLRIGRKTDMREFGTLTHEIREMVAWLKANGCQMAAMESTGSFWKPLYNIFEQEGVPAMVCNAHHIKNVPGRKTDVGDAQWIARCLSHGLLNPSFVPDREQRELRDMTRFRKSQIEERARNINRLQKFLEGANIKVGSWLTDVEGKSATALLELVIGRVDFTVDDVAERMHGNMKSTAEELFLSLEGSITPSQREFFAHVMAVIREQTVQIEKTDAMVQRSLSDNYRAAVEALDAIPGIGKVSAEQIIAETGADMSRFRNQHSLSKWAGVCPGNNESAGKSKSGRTPHGNKTLKTTLVQCAKSAKNNKKSFFSAQYSRLVSHRGKNRATMAVAHSMLIAIYFVLNGCVFEDLGADYYMQFNREKKINSHVKQLSKLGVIVPDNAIHFALEHPPDV

SEQ ID NO: 361320 - protein, 345 aa, unidentified
MKHYAGLDVSVKETSVCIVDEMGAVVREMKIASHREDLVQALKNPAWRFVRIGLEAGPLSQWLFSGLAEASLPAICIETRHAKAFLKAQVNKSDRNDARGIAQMMRVNLFRPVHVKTLTSQKRRALLTARKLLQEKAIAIENDIRGLLRNFGLKVGVVGTIGFDARIRELVEGVPDLVEIMSPLLAARRKLRDEFARLHRKVIEIAKGDIVCNRLMTIPGVGPVTSLAFVSTIDVPARFRNSRAVGSALGLTPVLNQSGESNRVGRISLCGDPMMRSLLYEAAQVMLTRVGKWSWLKVWAMNLAKRNGGRKAVVALARRLAIIMHRIWSDGTEFRWTKEAVPAIA

SEQ ID NO: 361321 - protein, 433 aa, unidentified
MLKLNYMSTLFVGIDVSSKTNAVYAMDFEENKYISSSFGNNQPGADQLVNMIAECMQKHKNLDTVLIVLESTSVYSVHISNFLSTSEVLMPYKPYVFCVNPKATSNYRKSYIGMEKTDPTDAYLIADFGRVGRTKKLEPWRGGQFIALKRLTRHRMHLSECITREKTYMVSNLYLKFSELQLLEGDDKPFGSLYGATSSAVLTEFLSPQEIIDMPEEELLTFLAGKSRNRISDLSKTSELLRKAARDSYRLDKCMYEPLSISLASSFNCIHAYQKEIKLIEQAIEKCINGMNPNALLILQSIPGIGPIWASGILSEIGDITVFHSSDALAKYAGLYWPKGDSGDFTSEDNKMSKAGNPYLRCYLGEAANSVRKHIPEYADFYARKYAEVTKHQHKRALALTSRKLVRLVFGLLVKNQLYTGEKLDAEYNIESN

SEQ ID NO: 361322 - protein, 452 aa, unidentified
MVKRSKKRCEELPILHPHAAGIDVGASELFVAVSADRDPQPIRSFPTFTRDLNALADWLQQCGVRSVAMESTSVYWIPVYQILESRGLEVCLVNAQHVKNVPGRKTDVSDCQWLQYLHSVGLLRASFRPPGFICAIRSLWRHRSSLIQMAAEHVLHMQKALDQMNLQIHRVLNDITGMSGLRILDAILAGERDPVTLARLCHGGVKNSEDTIAKSLEGDYRPEHLFALRQSLAAFHYYQQLVVEVDQEIQGQLGSLETATTAEPTVPKRTKASAYQRRRYEPKTFDLRGELYRIFGVDLTNVPGISAITAQTVLCEIGTDVSRFRNASAFASWLGLCPENKISGGKVLYTKSRRVRSRVATALRMAANSLHHAKDYLGEFFRRITRKLGKPQAITATAHKLARIVYHLLSTKEAYNETVFHRCDEEAIKRAQYRLRKQAAQLGFQVIPLQNG

SEQ ID NO: 361323 - protein, 359 aa, unidentified
MGNKVKKNKINFNGKMVSIGIDMHKHSWHITGIVEGDTVLAVTLSEPRYDSFEKILPQFEGNHVRIVYEAGPGGFDLYDRLTADGIECIVTPPSLIPTESGNRVKTDKKDSHKLAKLLESNMLKKVWVLSPEERAHRQLVRTRRQIVNHRSDVMRQIKSLLLFNSIETPFSSKQQWTGPFVKWLHELDLGYEWLNRSLKALVELFDYLSVEKKALTLETIQLVKNEKYAQRVKLLKTIPGIGGLSAMEILVEIQDISRFETADELAAYLGLTPSQYSSGEHIRMGHITHAGNDRVRTTLVESSWILIGKDPAMRRKYDNIKHRRGGKKAIVAVARTLSARIRRVLLDQVPYKIGLQKAI

SEQ ID NO: 361324 - protein, 527 aa, unidentified
MSKSTRGNGRGGTLVLKRGDDSLRRKAQKLGGERIGVVAVDVAKERVSAMVTDFFGNVLVPPENFPVTAAGLALLEQRIVAAGREHALKHIVIGLEQTGRLHEPVRRVLQQRWEVTLIHPLVTHHLRQGISPSVKTDGIDMDALFRAVAGCYGSPVRTLPVACERWRAVHRAREQIVDERTALKLRMHERLHAVLPGFATQFENLWSSPTAMAIVAGFDGPDGIRRLGEQGLKRWLREHGAVCRQAKAAALLAWAGNAVPPAAAATTEAAILQADLKHLAMLNQRIETYERQSLEFLVQTPFVLLLSVLGISHVLGSGLGAEAGPMSFYPTARNLSGRAGLYPRRYQSDQTDLQGPMAQGEPFLRDVLLKIGRCLTWPRGAFSAWGESRRAAGLCERQIAAAMANRFCGIAHVMLLRGQTFKHPAAREPVSILGKLLNVAADLGIDGVAATALAMEAATRIPLQSRPLEISELNSGAWKNASRPRELGASPGTTRQISQTTVPAILAWLQKAENNHDIAHTTDFRSP

SEQ ID NO: 361325 - protein, 350 aa, unidentified
MAIVGGFDVHRKQITFDYVDNDGLVQWGQIRPATRKTLRSWLAKHCPEGAGEFALEGCTGWRYVSEELTAAGVGVHLGDPAEIAALRGPKKRAKTDRADARLLRTLLVEGRLPESWIPPAHVAEIRALGRLYCALMEERRGWQQRIHAQLFHQGCPPVKALLSEPGREVLVAAELSAAGRQYVDTALRRIDELTAEIDPLRMQLVRFARRQSGCRVLQRHYGVGWLCAAIIWAEGGDPRRFSSSDQLVRFAGLDVTVYSSDGKRAPGHLSRQGSPELRWAAFEAAKCAARRGSPDYAYYHNLAAKHEGRNGKNPTLAVERKILRRCYHTLRELGDAVLAMPIAEAEEVAA

SEQ ID NO: 361326 - protein, 366 aa, unidentified
MKKTSTVRVNGNRIFKGHKLTIGLDLGDRWSNYCVLDEAGEILLEQKLATTPEAMKQTFEKIPRSLLALETGTHSPWLSRLLKELGHEVLVAHAQKVELISKSNRKDDRHDARTLARLARIDPELLRPVRHRSAKAQIHLTVIRARAELVSARTALVNAARGLTKSYGERLPKCGTEQVSRELAAKLSAELRDVLEPLLKEIESLNERIKEYDARMEKIARESYPQIALLKQVKGVGTQIALTYVLTLDDPHRFAKSREVGCFLGLKPGRRDSGQSQPQMHISKEGDRYLRTMLVQGAHYILGPFGEDSDLRRWGLRLAERGGKNAKKRAVVAVARRLAVLLHRLWVSGEVYEPLRNNRKAMRAVA

SEQ ID NO: 361327 - protein, 346 aa, unidentified
MLIKTIGIDLAKNVFQIHGIDANGKSVLKKQLRRNQMATYFVKIEPCLIGMEACASAHFWARKLTAMGHTVKLMPPQYVKPYVKTNKNDAADAEAICEAVTRANMRFVPIKNLEQQTVLSFHRVRQGFVKARTAMANQIRGLMAEFGIDIPVGIGYITSRVPDLIEDASNELTGSFRLLIQGLLDNFRALGQQVAKIEEQIVLWHKQNTDSKKLAEIPGIGPLTASALVASIGDVKTFKSGRQVASWLGLVPRQHSSGGKQTLLGISKRGDSYLRTLLIHGARVVIYHMQKKLKTDQTGRWVNELVQRRNKNVAAVALANKNARIVWALLAHNRQYESDRPAIAVA

SEQ ID NO: 361328 - protein, 339 aa, unidentified
MGPTCVLLNPNGCLGPEPEPARMGWKMMPQELAYVAVDVSKAMLEIGEPELDRTWSVANEPKGWRRLIGWIEKLGRPVVVGLEPSGGYERGLVEALLEAGIDVRWCDAARVRALAKALGAPAKTDRIDVGMIRRFLAQTGGRPVRRDPERDVLRATLSARRAAQEAAQALEAQAQALSEGPARQALAALAVQARLTMKAQERAAMALVRASPALCPTWRRLQTAPGVGPLVAAELLAHMPELGAVTSKAIAKLAGLAPFIRRSGQWQGRAVCSGGRPRPRQLLYLAVIACLRGASQTKATYQHLIAAGKPPKLAITACMRRLLVTLNAMIRDNTDWRHA

SEQ ID NO: 361329 - protein, 318 aa, unidentified
MKMAKPNIISAGIDTSKAKLDIAVHGGSSAFTVTNDEAGWKLAAVQLKRGGVSRVGIEATGGYERGVTRFLQKSGLTVIVMQPVQVKAFAKLHLKRAKTDRIDALLIAACTHVLDAGNKLPPDARFDALADHLTFIEQLEEDIVRIRTRLEHIYDKRLRRVVQADIKRLEKRSAEERQRLLAALRQHDDLAARFDLVESIPSIGERTALCIVIRMPELGRVSREEIAALAGLAPFVRQSGQHKGQAHIGGGRAKVRRALYIAALPGAFRWNPELKALYHRLIARGKCHKAALTACARKLLIFANTVAARRTPWLAIRS

SEQ ID NO: 361330 - protein, 330 aa, unidentified
MKSWNVILGVDVSKLTLDICCAERNLHTRIDNCSKGFADLKKWCKTNAIDLKEALMVMEFTGGYEYRFIQFCESLSIPYCRLPGLEIKNSMGMTRGKSDQADAYRIGKYGEEKIKSLTPSKPLDKNILTLKQLLSFRKRLVREKAGLESTVKEREHMYPQKKADTITRIARKRIKSNEQHIEQIEQEIKEVIKNNEAMWQNYRIITSIKGIGKVNGWMTIAYTENFTSFTDPRKYGVYVGVIPFGHKSGTSVKKRDKVSHLANKELKQELNQAAKAAIAHDPEMKSYAERKLKNKEYRLVLNNVKFKLILRIFSLVKRGEMYVENYRRLA

SEQ ID NO: 361331 - protein, 448 aa, unidentified
MEPQEIDDEEHEQVLERVAAVDVAKASGMVCTRVPHQSRPGKRRTRVWPVDATTNAVLELADHLVAEGVEKVTLESTSDYWRIWFYLLESAELDVQLVRAQDVKQAPGRPKSDKLDAVWLAKLTERGMLRPSFVPPAEIRRLRDYTRLRADLTCERTRHYSRLEKLLEDALIKVSAVASSLAAKSVRDMLEALIGGERDPKILASLARGRMRAKHDRLVQALAGRFDDHHGELARLLLDQIDTLSAQIGRLTTRIEELIAAIPPAQGIDADGTTGPAAGHGKNAPVLPAVDRLDEVTGIGRGGAQAIIAEIGLHMSVFPTAAHLVSWAKISPQTIQSGTRSRAGHTGKGNPYLRGLLGEAAAAAGKTDTFLGERYRRLVKRRGKLKALVAIARSILVIVWHLLDDPAARYHDLGAGYYASRVDKNRKMRHHVRQLEALGYTVTLTQAA

SEQ ID NO: 361332 - protein, 376 aa, unidentified
MRIIGVDLHTRQQSLAMLDTETGELVEKTLEHEGEEVQEFYSALPGPVLVGIEATGSMSWFLKLMEELKIECRVGHPAKIRAAEPRKQKHDRGDARLLMNLLAENRFPAIWMPSTEQRDLRTLLRDRHQWVRMRTRVQHTLQSLALAHGLRRGVTLWSQEGQQMLQALPMAPHASQRRDALLRLYPSLQKSIDDLDEQVSQQALRHPQAARLMTHPGVGPVTALATEVFLGDPTRFADGKAVSSYIGMIPSERSSGGRRQRLGKLTKQGNALVRYLWGEATIHAVRRDPGLKRFYRRKLMQKDSGKRRSPPLVNSGFDSGSCCVTRLTTKNSATADFGGRKAVMPVRGCLADKWSCAAVTGVLNGLPASLNRREFE

SEQ ID NO: 361333 - protein, 354 aa, unidentified
MNTTQVFEKRKIAVAIGIDLAKDHCDVVAYNADNKICFTKANWAYPHLMEWLANAQPAVVLMESCKGCHVRARDIADLGHDTRLVKGADVKALRNVCQKNDIRDADYIARLLYVPGTKFVFVKNQRQQSLQFLQNEYKSIQELRIQVGNQIHAGLEEFGCPGPKSKKIIQSRMMAHLEKNAEPIPDEVMSSFLRRREMWLNLFEQEEEAKKRMEEIAKTDDDAQRIMTVPGVGAQTAVGMLVHIGGDIGRFKNSGQFAASIGLVPKQNSTGGNTTLNGITKCGPKRLRANLVQCGQVILMHADKLKGNFGDWVRKLRDSGKKRGVIVCAIAAKIARIVYRLMKDKVDYTPVPSR

SEQ ID NO: 361334 - protein, 450 aa, unidentified
MSRPQVIDDEDHERVHDRVAAVDVAKDTGMVCTRTPHPSRPGARRSTVQSVTARMKAIRGLGRQLKKDGIEIVTLESTSDYWRIWFFVLEACGLAVQLVNAAQARNLPGRPKTDKLDAQWLARLTEMGLLRASFVPPKAIRDLRDYTRARTRLVHERTRCWQRLEKLLESALVKVSSVASKLTTLSAQDMIKAMIAGQRDPKVLAGLARGRMKARHDDLVEALDGMFDDHHGELAGLLLDQIAFLDTPIAALTARAAELTAAMPAAWGVDPDGTTGPGAGTTPGAPVLNAVARLAEIPGISEDLARTIIAETGLDMSRFPAAARLVSWAGLCPSARQSGPRTRAGKKGQGNGYLRGALGQAAIGAARTDTFLSERYHRIARRRGKAKAQVAVARSILIIIWHLLADPAARFTDLGPGYYQARTDKDKKIKNHIRQIEALLGHPITITNAA

SEQ ID NO: 361335 - protein, 349 aa, unidentified
MTIVGCDLHTRKQQVAVLYADTGEVVEQELLHAGDAVEQFYRTLPRPVIVGIESTGYALWFHELMQRLGHTLLVGEAAKIRAMVVRKTKTDRRDAQHLLDLLKHDRFPAVWIPDPATRDLRALVTHRVRLVRIRTMVKNGLQAIALNRRLALGSKLWSQRGRAQLVALALPPHTAQRREDSLDLLAWLEAHIAGLDARIAAAAAAHPGARLLLTHPGVGALTALTTVLVLGPTARFPGSKHVVSYVGLAPAVSASADTCHLGQITKQGSALLRWVLGQAAPLAARADADLHRVYRTLIHRRGRPKARVAVARKLLVRLFIMVRDQIDYAEFRRRGCLSPPRETLLPRRA

SEQ ID NO: 361336 - protein, 351 aa, unidentified
MAVKARTLVGLDVHAAQAHAAVVDPATGEVRVTKLRMAPDEVVGFLVAVGSGVLAVYEAGPTGFGLARAARARGVDVWVVAPGSIPKGSGDRVKTDRRDAIRLVRLLAAGELTFAFVPTDEDEHFRGLLRTIEDVRGDLMRARHRLGKFLLGRSERYPGPGRAWTAKHMNWLRALRFEDTCSQATFADYLASVELLIGRRATLVATLKDAVPESSHAPVIARLRCFRGIETLSAAGVCAEVGQFSRFPRPTLLSGFLGIVPSERTSDTRRRQGSITKAGPPHARRLLVEASHHYRHRPVVGEVLARRQAGQDPRVIEIAWRAQRRLHQRWQHLHHDRRKPSGIVAIAVVLD

SEQ ID NO: 361337 - protein, 359 aa, unidentified
MPVTMTYVGLDVHARSIHAAAIDVRSGELRRARFGGGGDEAIAWLEGLPQPLRGCYEAGPTGFGLYRACEAAGVAVEVIAPSKTPRASGDRIKSDRKDAELLARLLLAGQLTAVSVPPPAFEAARHLARAREQVRGDLMRCRHRVSKLLLLHGRVYEGSGWTKAHRGWLEKQRFDQAATELAYLDTLSAVDGLVARKTALDERLSRLALEGEWWPTVARLRCFRGIDTLTAFVLALEIGDFARFQRPAQLASWLGLVPSLDQSGESRRQGAITKTGSGYARRLLVEAAWHYLPQPGPGVALTERRTGQPDHVIQIALRAQRRLHRLHQRLRERRKPGNVTTVAVARELACFLWAAATAD

SEQ ID NO: 361338 - protein, 546 aa, unidentified
MEELGEDHDDGTVARVAAIDIAKASGMVCLRVPHDTIEGRRVQKVWTVASTTNTILELGDRLVCQGVERVVMEATGSYWRPFLYLLEARGLDCWLVNARDVKNVPGRPKTDKLDAVWLAKLAERGMVRASFVPPKPVRQLRDYTRTRTAFVQERTRHKHRVDKALQDAQIKLSGVVSDLFGMSGRAMLDAMVAGDRNPRTLADLAKGNLVKKKPALIEALTGQFEDHHARLLRVLLSTVDHLTAQIDELDRLIARTLEEITTPPGSTGTGEEAAAVSARTLAEKLDAVPGIGPATAQIILAEIGADMSRFPTPEHLVSWAKLCPRTIQSGAKNTSRPAGQGNPWLKGALGEAANAAARTDTFLGARYRRIVKRRGHAKALVAVARSILVIAWHLINDPDASYQELGADWHRRHLDPHPQNPRPRPPAPGPRPPSCPQPSISLTVPSHRHPVRKRPGCCRLPSRTSIFRSASCGNGGRAGRERRPGASKSVTRVVNCWRLTLVERVLVCRSERRGGCARPWDSSRGQGDGRSGFACVTFDRDSRWVR

SEQ ID NO: 361339 - protein, 344 aa, unidentified
MIWVGLDVHQRFSRMGCFDPASGEVRDLGSVSNNASALEEALEELASPRTVVLEAGRSSYHMAGLLESIAEEVWIVDPGEVRRLQYTISKTDRRDAAALAWWAAKGVLKPQWRPDGQTMDLRELTRGKTALTRMSTQVRTMIRMLLARHGHECPHRDLMSERGQLWLEEVELEGHAGQMLAGLREILVVVQSKADNFERLVEQTSKQHPVAQRLRTIPGIGPFLSLALAVEIGDINRFPGPAQLRGYSGLVPAVYQSGDKDARGPLTKAGNKWLRYAAVLAAQRIGQMREPDPRLKRIFLSVAFRHGRNPGKIAVARRLLDLIYHLLKEGQDYRAPKPRAATTA

SEQ ID NO: 361340 - protein, 407 aa, unidentified
MIFVGDDWAEDHHDVYVMDEAGARLASRRLPEGLGGIRGFHELVADVIDDPAEVVVGIETDRGLWVHALAAAGYQVYAINPMAVSRYRDRHNVAGAKSDAGDAKVLADLVRTDRHNHRPIAGDSPEAEAIKVLARAHQNLIWARNRHTNQLRNALREYYPAALEAFCDLADRDALAVLDRAPDPTVGARLSVTQIRAVLKRAGRQRNLDSRAEEIQQALGTDQLAASDAVATAFAATTRATVGVIKELNRQITELETALADRFEQHPDAVIYLSMPGLGDVLGARVLGEFGDDPNRYASPKSRKNYAGTSPITIASGKKRAVLARHVRNRRLYDAIDQWAFCSLQQSPGCRHFYDQRRATGDLHHQALRALGNRLVGILHGCLKHQTTYDEHTAWAHRHTTATEAAA

SEQ ID NO: 361341 - protein, 326 aa, unidentified
MKEKQAIGIDVSSQKLNLHFLKTGADFEIANSEKEISAFLKQEKLNVKNCLFGAESTGRYHLTCQNVLVKKDFEFRLINPILTGKKISSSIRKKKTDKNDAKIIARLVNQGEGRIVTARQLNVSKRTLLRTRTSVVNQRTGIKIILKELGMVGKNDRKIVEAMKSLEKLIANMDKCVENIEELALDKNNITNEEKLIQSLPGFATRLSAIVSVETGDFSRFPTATRFKAYVGIDPGVIQSGKSLKTGRITKRGNAHLRTAFYLAAQVARCHDPELKAFYQKKKSEGKPTRVAIIAVARKLCERVFAVVKRGKPYEIRQIQSQVALA

SEQ ID NO: 361342 - protein, 354 aa, unidentified
MRKMQDFIVRGKRIFVGLEDSKKTWRLGVRCEGMVVHTTSMPTRYEALRAYFLNKYPECSINVMYEAGFQGFWLHDLLQSDGIRCVVTPPNKVSCPKDERVKTDKRDAYRLALNLETGDYVSCRVPDKERREDRQISRTLSQIQKDIRVEKNRIRRFLDYHGLNGGLPEKKTWADKDYLCLEDMELPRSLRISLNKYLRVLETLFEVEKELEAELKALCKKERYAQSVRIKSSVPGVGWLSAIRFTLEWGNLDRFANGKRFAAFTGLTCREYSTGETIRRGRITGQSSEYVRSWLIECAWRATRIDPALLAVFMRVWRNSGSKKKAIVAVARKMAVRIRAIELAGQLWRKSVVQ

SEQ ID NO: 361343 - protein, 363 aa, unidentified
MNYVGVDIHKKYSVLCAVDERGRKLREARVEGNAPFGFAQFFSGLGGPSKAVVEACWNWGLVHDELEEIEQVEEVVLAHPYKTRLIADAQIKTDRLDAHALGTLLRGNLVARAHVPRRETRVRKNLLRQRLYWARLRTILRNRIHALLDRQRGLELPQCSDIFGVRGLSFLRRLELPETDAALLREQLALHDLIAQQMKAQEKRIGLEFGSEAMHRQLLSVPGIGPTLAAVIACEVDSIERFSSAEKLCAYAGVVPTTHSSGGKTRHGQLLPFCNKWLRWALIEASWVAIGCSPYFGALYKQHRARGKKANSAVLIVARRMCRIIWQLLHEKRDFEKRPLRPNFNFPGCSVVRLTAATAARPN

SEQ ID NO: 361344 - protein, 344 aa, unidentified
MSQVSTIGLDIAKNVFHAHGADERGVTVFSRKLTRGKLLDFFAGQPACVVALEACGGAHHWARQLQTMGHEVRLIPPAYVKPFVKRNKNDAIDAEAICEAAQRPGMRFVAVKSEEQQAAGLVFRTRDLAVRQRTQLINAIRGHLAEYGWVAPRGTAHMTMLADLLEEDEMASTLPEAARPMFKLMVDMLAELDRQISVLDREIARRAKEDETARRLMTIPGIGPIAATAIIALAPPIETFRKGRDFAAWLGLAPRQHSTGGKQRLGSISKMGERTIRRLLIIGGSSMVRQACRFGAPAGSWLERMLARKPRMLVSVALANKMARMVWALLTKNEDYRAPAAVAA

SEQ ID NO: 361345 - protein, 406 aa, unidentified
MQVVHERCCGLDVHKRVVVTCVLSGRGRTIRSFGTMTEDLEAMAAWLEECDVTHVAMESTGVFWKPIHNVLEGHAFELLVVNAQHMKAIPGKKTDVKDAEWIADLLRHGLLKPSFVPSRPQRELRELVRYRKSLVRERAAESNRVQKVLEGANVKLASVATRVLGLSGRAMVEALISGVTDPTELADLARGRLKTKHADLQRALRGVVGPHQRMLLAAQLRHIHYLDGEIESLSQEIASREQPDEAALAQLQTIPGVGRRTAEVILAEVGADLSRFPSAGHLASWAGLCPGQNESAGKRRSGRTRKGSAALREALTEAARAAARMRRCYLSAQYRRIAARRGANRAAVAVAHSILVIAYHLLTKGSVYEDLGSNYFDDRDKVATVNRAVARIKRLGYEVTVTPHAA

SEQ ID NO: 361346 - protein, 371 aa, unidentified
MNNIVYVGMDVHKESYTLSSYRIMEGEVKHQQKMKPEIKMVMKYLGEIKKRYPEEVEIICGYEAGSLGYSLYTQLTNYGVSCIILAPTTMVQINNKRVKTDKKDSGNIAKCLAYGTYSAVHVPTVEDNAVKEYIRMRDSQKQLLKTTKQQILALVLRHGHIFEGGKSYWTTKHVKWLKSLDLKGVLQESLEEYLVTYEYLTDKISRMDRRIEELAAAERYRENVSKLQCLIGVKTHTALSVIVEIGDFKRFSEAEKLASYLGLVPGEDSSGSKQNRLSITKAGNSQVRRLLVEAAQGYTRGQIGHKSIDLKRRQKGNAPQVIAYADKANERLRRKFYRMTLKNNTNRNIAATAIARELACFIWGLMTDNIA

SEQ ID NO: 361347 - protein, 414 aa, unidentified
MNRQQWYAGIDWATESHHVFLTDGSGRKIGQKIFKHSGAGLAEMAAWLMAASQAKEPGHIQIAIEVTHGPVVETLIERGFTVHAINPKQMDRFRDRFTLAGAKDDSRDAEVMASALRTDPRCFRLLAAPDPVIAELREWSRIAEDLSAERNRLTNRFRQQLWRYFPAMLELESDLGAEWFLDLWEAAPTPCKAARIRETAAAKILKRHRIRRFAAGHVVAVLRTAPVQVAAGTVKAACAHTETLIARIRLVNTQIKEAQRHLDALTARLIPTEDSEAGQQKQHDVEILASLPGVGRIVLATLLAEAWDALLRRDYAALRSLTGVAPVTKRSGKSCIVIRRQACHDRLANAMYHWARIAVQYDAKSKAKYTALRGRGHSHGRALRSVADRLLNVACAMLKAGTLFDPSLKTQNAS

SEQ ID NO: 361348 - protein, 417 aa, unidentified
MNSPPETIPIQRYIGIDIHKHYLMIGGQNRHQEWTLRPRQVQMARFRSWAEKNLKPEDEVVVEATSNVWDIYDIVVPLVRKTVVANAYKVRQIAEARVKTDKEDIKRLITLLIADIVPEVWVPPIHVRELRSLISFRWRLSKQITMSKNRLHSVVQRFNLDPPEGGLLTDKNKSWWDRQEFSELTGFQVEMDLEIVKNLESQKAAIDQKLAELSNTEPWASEMVYLMQIPGFGLIFSMVILSAIGEIKRFPHPKKLVGYAGLGAGVHASGEKYQEKSITKAGRKELRWALVEAAWVAVRFDPYWKAQFIRLKKRMHVNKAIVSIARRLLVSIWHILTKREFYRHFDEETIAYKMLIWAQAIGEEGRQGLTRQQFAKYGLLRLGIGQDLERIVKGGGPRKIAPTEEVLALKPELAPPR

SEQ ID NO: 361349 - protein, 415 aa, unidentified
MALKIVYKICCGIDVHKTFVVACIASTNDKGITSYESHRFSTYTSGLKTLLQWLLDRNCKDVCMESTGKYWIPVYNILESDCSIVLAHPKYVKAIRGKKTDKKDAKWIADLFKHDLVAGSFMPPADIRQLRDLMRYRFKLTCFKSSEKNRLQNCLTVSNIQLGNVVSDTFGKSAQAILDKLLENPADTSFDLEPLVYKSLKKKLPELRDAIDGYITPEQAGKLKVIKAHYENLESRKAELEELILALAAPYQQELTILQTAPGISSPFTAIGIISEIGTNMEAFPSAKHLCSWAGLTPTNNESAGKKKSVRVSKAGCYIKPLLVQCANAVVKSTKHPEMRNRYLRLKKRRGHKKAIIAIARMLLTALYHMLKNGENYNAELYQKSDLLPVDREITVEQALMIARNQGYKIKSATA

SEQ ID NO: 361350 - protein, 341 aa, unidentified
MNISMIGLDTAKSVFQVHAVDPSGKVAMKRKLQRGELIPFFEKHEACTVVLEACGAAHHWARVLTGLGHDVKLIAPEAVRPFVKKGRKNDAADAAAICEAASRPSVKFVSAKSLEQQSVLTLHSARCLLVKQQTMLANALRGLATEFGLTVPKGIGKLEELAALVNADEAFPETARRVLTGLFDHCRATAASIETVEAEIVVQARQDETARRLATIPGIGPITASLIAATVGDIGMFKSARHFAAWLGLVPRQYSTGGRNREIRRLLVLGATSMVYRAPQWKSRRRTLDQGGTRTSPCQAGHRGTSEQDGAHRMGADDAQRGLPRERTCCGRSSVTFSRWM

SEQ ID NO: 361351 - protein, 448 aa, unidentified
MQNRNVKMEVVNPNAAGIDVGSRSHFAAVGQGKEDIKEFGVYNEDHQQLIKWFLGNEIETVAMESTGTYWQNLYSALIAAGFQVILCNGKFTKNIKGKKTDVKDAQWIQKLHSIGLLTGSFLPDEATEQLRTYCRHRTNLVQQAADATRKMQKYLRLLNLRLDVVVKDVTGLTGLAIIAAICKGEKSPEKLAELRHGNCKKSEEEIAKALQSNGRKDYLFGLKQEYQLYVNFQQKMNECDVEIEKLLNEQINSDNEKKQHFIDKKVYKKINKNTPKNLDINLLSYQYFGGVDLLAIEGVSHATALAVMSEVGNGIRKFGTADQFASWLRLSPNNKISGGKILSSRIPKGSNRLKIALRNAANSIGNLKDTALSNFFNRIAYRKGRPAAISATARKLAVIIWNMIVKGVSYKPQSDYEFLDQKRKRKVQEMKKLIHKFDIKLNDLGLQA

SEQ ID NO: 361352 - protein, 431 aa, unidentified
MLKINPLSTFYVGIDVSSKSNYVCALDFYKNKYINSSFANNQPGAEELALKILECLKEHPDITTIVAALESTSVYSIHIANYLSSCEELMRFKPYVFVLNPKCTANYKKSYIGLGKSDPIDAFVIADYARAGNIESEPWRGSQFLALKRLTRHRLHLVECMTREKTYLVSNLYLKFSELQMLEGDDQPFCDIYGATSSSVLMEYLSPEEILVSSEEDLIAFLAEKSRNRIKDISKTADLLKKAARDSYRLDKALYEPLNVSIASSFNCIETFKREIKVIDNAIEKEIKGLNPNAFIILQSIDGIGPVFAGGIIAEIGDITAFHSSDALAKYAGLTWKSNQSGDFDGEDTPMIKAGNRYLRYYLGEAANSMRKHNVEYGAYYRKKYNEVPKHQHKRALALTSRKFVRLVYGLLARNQLYSGVSLDTSIKDSN

SEQ ID NO: 361353 - protein, 416 aa, unidentified
MYFVGIDIAKSFHITSVIDENEKKVINKPFKIKNDAKGFDKLLTILDSISLDKKEFTIGLEATGIYGENLLEFLISKDYSVKLLNPFQTARYREQITLKKVKNDEIDSLVIALLLRNGKFSSGYVTDDEYQSLRTLYRNRASIQADMKDVKKRILTQITVTFPEFEGFIKPFTVSGLALLDKYPTAQHYKHSSVDRIMKLFRHIQGNNFTQDKALKLLELSKESIYSGKAKDARAVAIRSTIRLLRMYLSELDIIEAEILSLLDSSSTTTTIVNEVGEEVKKADNLIANLKTIPGVADKTIAALISECGDLTRFPTIPKFIGYLGLFPTENSSGNSKSIGHLSKRGSSLAKHALYMSAVSCLIHNTQLKQLYDTKRSQGKSKKEALVAVSRKIAVIIYSIVKYNVPYNPDRVFAKS

SEQ ID NO: 361354 - protein, 351 aa, unidentified
MRTSQKITGIVATIGIDIGKNTFHLVGFDQRGAIILQQKVSRSQLERRVANIPRCLIGMEACSGSHHIGRRLAEIGHDVRLIPAQYVKPFLKGHKNDYRDAEAIAEAVQRPTMHFVTIKTPEQMDLLALHRVRSRLVGRRTGVINQIRGFLIERGITVRQGPMPLRKALSEILGSDTGALSPRMVGLIADLAQDWRRLDERIAAVSAEIEALAEQDDGCQRLMTVPGVGPIISSAVVAAIGNGTGFKQGRDFGAWLGLVPKQESTGDRTILGKISKRGNKYLRTLFVQAAHVVLERRPSAAMRGLWPWAEQASKRLHRNMLAIALANKLARIAWAVLARGGTYQPRITHAA

SEQ ID NO: 361355 - protein, 324 aa, unidentified
MDMLGIDISKKQFDVALLTGGRTRQAVFPNTEVGFQELLSWLGRHRLSTDTPLHACMEATGNWGLDLAEVLHGWGYRVSIVNPMRVKAYGQSELLRNKTDKLDAALIARFCRAHEPSAWVPPATHLRELRELVRRCEGLKVARVQEINRQKSGTASPAVAASISAHLEWLDREIEAVTAAVQEVVASDPVLSRNHALLLSIPGIGIVTAPVLLAEVPNIEGFTPKGLAAFAGLSPQEYSSGSTVRRPGRISRMGSERLRRALYMCALSSRRRNPALADFVQRMRAAGKPPKVILLAIARKLLVFAHAIVRSRKPFALRASVLIL

SEQ ID NO: 361356 - protein, 298 aa, unidentified
MNNNNTLYVGLDVHKESITVAYAINSEPVELMGKIGTSPTDIQNLCKRLRSKSSQVSIVYEAGPCGYGLYRRLVKSGFDCMVCAPSLIPKKPGERVKTDRRDAIRLVRSLRAGDLSAVYVPGIEDEAFRDLARAWASARDDLRHARQRLKSFLLVHGVHYVGRADWGPAHRRWLSKYSFESPWRQLAFDEHRRTIEDRQAQCERLESALKEAVTEWRLYPVVEALQAMRGIQFITAVGLISELGDLTRFEHPRQLMSWFGITPSEYSSGGSRHQGSITKAGNSYARKNPPAHVQQQQL

SEQ ID NO: 361357 - protein, 398 aa, unidentified
MGCFVGVDVGKSRHAYAVVDTIGAELASGEFAGTTAGFEKLKRVLLRFDVESIGMEATGHYWRNLWHALGHAGYERRLLNPTATVYYRRMSLTKHKTDALDALCIARYLAAVRPNSRGLGVEEQECLRSLARAQATIAEQITESVNRLHKQLDLSFPEFPKLVGRLDSPKALMLLEHYPTALLMGRARKLANKKYGQQNHRIGAPLAQRLQDSARNSFGCAQTSSDALLIRQSVSHIRLLHEQSKALIREMESLVAEHDQDAANLLSVPGIAVKSAAAVIGEVGDISRFETPKKLTGYIGAHPRFHESGNKAGHPRMSKAGNKRLRRILWQCTIVAMKYNPIIKAHYEKKLAEGKKKMVAIGHCMNKLIHIIWGVLTYHEPFDPNGGIRVQQVAQNAG

SEQ ID NO: 361358 - protein, 325 aa, unidentified
MSKEVALGIDIAKEKYDVRLEVNGKAKKQQFANNPDGYKKLVAWLKTLKVERVHACMEATGTYGDGLAEYLYVLGHPVSVVNPARIKGHAQSQMKRHKTDELDAEVIRHFCETQTPELWHPVKPEIKELRSLVRRRDDLVAMRTQESNRLQSGELTDGVRKSIDHMLGHLEQQITEMENQIQEHIDQNPDLKHQVDLIVSIPGLGQRTAIKLVAELMDIAGYADARSLAASVGVTPSQHRSGTSVNSTSHISKVGNGALRGALWWPAVSAMQHNPVIRNFVKTLRKAKKHNFAIIIAVIRKLLHLVYGVIKNDMPFDPNWSTSKA

SEQ ID NO: 361359 - protein, 415 aa, unidentified
MEVVHARCAGIDIGKKSAKVCVRIQGAGSRKTARQTTDWASMTREVLGLCDYLVAEQVTCVVMESTSDYWKPFYYVLETMAEEAGFELILANASHVKNLPGRKSDVSDAAWLAELGAHGLVRSSFVPAPAIRELRDLTRTRTVVARERVREITRLEKRLEAPGVKLSVVASDLNKNSARLMLDALVAGERDPEVLADLALGSLRGKRELLVDALTGRFSDHDAFMIKIHLDRIDAHQASIEVLDKRIEEAIEPFRVARDLLCTIPGVSTTVADVIIAETGADMSTFPSPGHLAAWAGVAPGQNESAGRKGRTTSRPGNSYLKGGLGIAAMSASRTKNTYLSARYRRIATRRGHLRAIVATERIMLTAIWHMLTDNAPYRELGADHYQLTHPNQQKRRAIKQLEALGYHVDLKKAA

SEQ ID NO: 361360 - protein, 481 aa, unidentified
MAKRKMSIFERLRSGKMNRKERKEWQQRLCAEDAGLEVVHPDAAGIDVGNASHFVAVPPDRDEPPVREFGSWTADLRRMAEWLKRCGIRTVAMQSTGVYWVALQEILEREGFVVYLVNARATKNLPGRESDVQECQWLMKLHTYGLLRNSFHPPEQIRAVRTIWRQRDRLVKEAGREVQQMQKALTTMNVQLANAISDVSGVTGQAIIRAILRGQRDPQQLAKLRDYRVAASEAEIAHSLEGNWREDVLFELQQVVDAYDFHQKQIAACDVQLERYMSALPIRSGPGPSEQSTADVLSEKPNKQRRHKLQKNQPTFDLAAELQRTMGVDVTAIDGVDVMTTQVILSELGPDLSASFPSEGHFASWLELAPRRDVSGGKVLRQKSRKSNNRVATALRMAAQSLWRSDSYLGARYRHLRARLGGQKAVKAMARYLACLIYRLLTKGKAYVDRGAAHFQSKRTERELLALRRKAAELGMELVAV

SEQ ID NO: 361361 - protein, 342 aa, unidentified
MDHFAGLDVSVKETSVCIVNDTGRIVREVKVASEPEALLAVLKNPAYHFERIGLEAGPLSQWLFSALAEAELPVICVETRHMQAVLKAQINKTDRNDARGIAQMIRVGLYRPVHVKTLRSQKLRMLLTHRKLLQSKAIAIENDLRGTLRNFGLKVGMVGKVRFEARIQELVENLPDLAELVEPLLIVRRALREQIVILHRRLLAIVRDDEVCRRLMTTPGVGPVVALTYRATVDVPARFRKSKSVGAVFGLTCSKYQSGEIDRSGSISRCGDEMMRVMLYEAAQSMLRSKKWSWLKAWAMQIARRRGMKKAIVALARRLAVIMHRIWVDGTEFRWTREAAAA

SEQ ID NO: 361362 - protein, 319 aa, unidentified
MREPEVVVGIDVAKVRLDLGVHPSGESWTVEHDEAGIATVVERLVAARPTLVILEATGGLEVAVVAALVAAEVPVQVVNPRQVRAFAKAIGQLAKTDRLDALLLARFGAAIRPTPRPIPDAALQEVRALVARRRQLQAMVIAEKNRRASAPKRLHTQIDEHLAWLRRAVAALDRDLGTTIRSTSAWQTAVSRWRSVPGSGPVVSATLLADLPELGTLTRQQIAALVGVAPLNHDSGAHRGTRSCWGGRAHVRTALYMGTLVATRCNPAIATYYQRLLAAGKPKKLALVACMHKLLTILNALTRNGTRWQAHLPSVNTAA

SEQ ID NO: 361363 - protein, 338 aa, unidentified
MKLYAGIDLHSNNSVVSIIDEEDRVVFEKRLSNQLESILLALASFKQWLVGIVVESTYNWYWLVDGLMQAGYRVHLANTAAIPSYAGIKHTDDEHDARWLAHLLRLDILPEGYIYPREARAVRDLMRRRMQLVRTRTSQLLAIGTQFERTRGAGARAQDLEQMSPRELVQLLGDANVASGIQANLAVVRVLDAQIERLEGEIVQQVHLAAQFGPLRTIPGVGQILALAIMLETGEIARFAKVGHYASYARCVDSARLSNGKKKGANNTKCGNAYLAWAFIEAAHFAVRYNARIKAFYQRKAARTNKIVAVKAVAHKLARAAYWVMRERAPFDIERAFA

SEQ ID NO: 361364 - protein, 373 aa, unidentified
MDHITKFVSLDVSKETIAVAVAERGTAPPRYLGSVANTPEAVRKLVRRLGKPEQLLACYEAGPTGYGLYRLLSRLGVRCIVVAPSLTPVRPGDQVKTDRRDALRLAQLLRAGELTPVWVPGEDDEALRDLVRARESAKRDLRRARQELTSFLLRHGVAAPKGTTRWSRMFLRWLDTLSFPHRATQVAYQEYVEAVRAQQARVDRLEAEIHALATESRQAPVIQALQALKGVGEVTAVTLAAEIGEFSRFRSPAQLMAYAGLVPREHSSGAQTRRGGITKTGNAHVRFVLGEAAWAYRHRPAVKAPLRSRQQGVDPEVLRISLKAQQRLHRKYWRLLGRGKPSTVAATAVARELLGFAWAVACHVEAQQTRVAA

SEQ ID NO: 361365 - protein, 482 aa, unidentified
MVVPNEEPKKPTKPNKPTKPNKLTKPNKSRERSLPVPVPVSAAALHVINPDAAGIDVHSDMHMVCVPADRDANPVRQFGANTADLQEIVAWLKKCRVRTVALESTGVYWIPLFELLESEGFEVNLVEPGQLSRCGARPKTDVLDAQWIQRLHSYGLLRASFRPPDSVLALRAYWRQRQMQVRYAASHVLHMQKAMEQMNVKLTEVVSDITGLTGMLIIGAILEGERDPIKLAQLRDRRCQHSEEQIALALEGTWRPEHLFELRQAHELYQFHHRQITECDQQVQAELANFPNRAGEKTRTVKRRKRGRKSNDVRFEATGPLFQALGVDLTSIEGIDVGTALVILAEIGVDVSRFPTEKHFASWLRLCPPQDESNKTKKRRGHRKGTNRVTIALRMCARSLGKTMTPLGLFYRRIRSRIGGLGAVKATAHKLACLVYRMLKYGQQYVTQSMEEYEAKVKANMLKALKRKAAAMGFQLSPLPTQ

SEQ ID NO: 361366 - protein, 457 aa, unidentified
MQSFYLGSDVSKGYADFVILDSRKQQVMKNFQLDDTFEGYCRLHDILSQFLAAHPDATLFAAVESTGGYENNWYNALVKFQSTLNIQTARLNPLGVMYNSKADLKRNNTDKISAQNIAEYLITHSEKVTYQQQDQMATLRKQWGFIKMLTKQSTQLLNQLESLLYTANTELLGYCKNGTPDWVLKVLLKYPTAAKLAKARVPALARIPYVTSERAQELAISAKRSVASASDRITEKLVAATVKQILNLKKTIDEQAELMVKECSMPEVDILKTFTGISDSSAIGLILEIQAIERFKTVKKLASFFGIHPVYKISGDGSGSFRMSKKGRKEPRKILFMVALTAIRSNPLIRNIYLERTEKGMEKMAAIGLCMHKILRILYGMLKHGKPFDPQIDLDNRQRSVKKKPAGRRDKSRRFQDYDSNAPISRRQNKKRLERKQSHSVNDTKFGINAPVPGFAS

SEQ ID NO: 361367 - protein, 437 aa, unidentified
MNYTQNQKIKQITPSTLVIGIDIAKDKHVARAQDDRGLEFGKRLIFENRIHGFEQLLEWANCHAKENDKNHIIFGAEPTGHFWKNLAYYLTAKEYDFVLVNPMHVKKSKELDDNSPTKNDTKDARVISQLIKDGRYSVPNLLNGIYAELREGVKLRDQLIQQLMVTEGRIQNMIDRYFPEFFDVFGDWEGKAALCTLRLFPFPSQIVKMTPEEVLRQWKPFVQRGVGIKRATRLVEAARKSIGLTIGTHFAQREMSNLLEQWELYTKQLEELDHELEGVVRTIPGANEMIDIKGLGVATVTTVLSEIGDLMKYKHPQQLVNLAGLSLRENSSGRYKGKTTITKRGRSKLRRALYLAIRPLVAHNPTFKALHHYYTKRPEKPLKKQQSLIALCCKLLRVLLVIGQKQCQFDGSKLLQGLPQEKIHCRLHNQTVTLQVL

SEQ ID NO: 361368 - protein, 341 aa, unidentified
MSTATLVGIDLGKHSFHLHGQDKAGREVFRKKTTRQQMMRLLGNLPSCTVVMEACAGSHLLARQLMAFGHEVKLISPQFVRPFVKGNKNDFIDAEAICEAASRPTMRFVTPKTEAQQTLSVLHRMRESLVRDRTKTANQAHGFLLEFGISLPKGLSLVRRLPCTLGEHELPPRLATLLKRLHEHFCYLDEQIRALDKEMDNQLAADDLGSRLLSIPCVGPITASLLCAEMGDGKQYGGSRDFAASVGLVPRQYSTGGRANLLGISKRGDKNLRRLLVQCARVYLQRLAFQQGALADWVRSLRERRHSNVVVCALANKFARIAWAIAANHSEFEAGPSAFAA

SEQ ID NO: 361369 - protein, 335 aa, unidentified
MQIYGIDLAKEKFDVSFFDLTSKKVSNHPSHKVVKNNFKSIGRFLETLPSDAVLVAEHTGVYGDTLLKCCMDSNVKIAFVGGYVIHRYRATPDRAKTDVLDCALLRDFGERYPDKLKYKTFPEEALYELRQLARHREMLVEQRKQLITADKSEDCRPIRSLAVKRSMDRIKEMLDTEIAETEKEMLKVINGHVSIRHNYELVKSVDGVGLITAVELLVKTENFTKITTARQYAAYAGTAPYEKSSGKMDKGAHISKIGNRRSKTLLYICAESARLHNKEIKLYYERRTLIDKKPRHYVLNAIANKLLRIIFTLVEKGEYYDANFIRQDPRVVKYN

SEQ ID NO: 361370 - protein, 324 aa, unidentified
MFYLGIDVAKAKIDCCLILENSASKKKTKTFSNTPKGFEQLQTWLKQHAATSTQTIILMEATSIYHELLAKYLFDADYQVCVTNPARARYFAQSMSKLNKTDKVDSEVLARFAMTADLHFWQPLPQHIQFLNALLDRRAVLCEDLQREKNRLEKAESTFTMEPVLQSIHKSIRQLNKHIQGIDQQIDAHIEQNPDLRNDKELLSSIPAIADRTSLLMLSFLRSHTFERASQAAAFVGLVPIQKQSGSSIHGRSRLSKAGSSKIRAGLYMAAIVATRHNPHIRGMNERLLANGKSKMMAIGAAMRKLVHLCYGVLKHQQPYQADY

SEQ ID NO: 361371 - protein, 474 aa, unidentified
MEKKLSNKREGVIKLLERQKIRNVKDLESYKLSECHPSSAGIDLGSRDMYVAINPAIAAELDIAIVHHFETFTNDLLACKDLLVSCGIKTVAMESTSVYWTTIYFILEEAGIEVCLVNPKKFRMVPGRKTDIADSQWLQTLHLYGLLRGSFHPPQEISMLRSYMRERDSIIKERSTFVQRMQKALVKMNLLLHNVIDDITGKTGMQIITSILSGETDPKHLASLRDPHCKKSEEEIAEALTGYYKEDQLYLLKINYQSFCFFDKQLCDLDKQITKLLKRLPCKKEKKEKRPDNGKSKSKGKNDIRTTENLEDTLYHVLGTDLSSLPGIRANAILQIISETGTDMSKFPTAHHFASYLGFVPHNKITGGHVISSKTDRIKNSAAQAFRKLIPSISQTKTALGAFYRRLAPRIGKAQAIIATCRKLAILFYNTLAFGKAYLEQGELMYQQKQEDWERRKLLKLAKKYNCSIIYDTM

SEQ ID NO: 361372 - protein, 353 aa, unidentified
MDVHTTNYTLCCYSMEDDRFFAEVQVEPDAKNILKYLARIEKQQSRDCRIVCGYEAGCLGYSLYHQLHAHGIDCVILAPTTMMTKPGKRIKTDRRDARLISKCLAFHTYSPVYIPTEVDDAVKEYIRMRDDANSALTRVKQQIIAFCIRHGKIHDGKSYWTNKHLEWLSSLDLGNKILSEVLQEYLIRYYQLREQVDMYDMRINELAQAEPYRQKVEKLSCFRGIAAHTALSFCVEVGDFRRFATAQQFASYLGLVPGECSSGDKQQYTGITKAGNSHLRKLLVETAQVFGRSATKSGKSVALKERQAKCDSLTVAYADKANARLKKKYFKIAMRSKVNIAKTAVAREMACFI

SEQ ID NO: 361373 - protein, 436 aa, unidentified
MKKIRQHVAGIDIGAKKLFVSIEDQDVKVFDTFTEDLELLGTYLVSHKIATVAMEATGVYWVILYDILVSHGLDVWLVDGRSTKQVPGRKTDVKDCQWIQQLHSYGLLNKCFIPDSLVQELRTYQRLREDHIRSSAMHINHIQKALILMNIRLKEVISQIHGASGMRIIRAILSGQRDAEKLTLMCDIRILKTKKELILKSLKGHYSQAGLFSLKQAVNCFDFYQQQIANCDKKLEEVLSKMNPTENQPKYPKNNKPRKAIRHHKPNIENMGQYLLEIFEGKDATVLPGITDYSWMQLLSEVGTDLEKWKTEKHFTSWLGLAPKQHNSGKRNRNYKAKGTPKAGLIFKQAAIGLLNSKHIALGAFGRKIRSKKGGLVAIKAVARKLAELYWKLFVKGLEYVENGIQKYQEKMLANKKRSVTRMAKELGLEVILINN

SEQ ID NO: 361374 - protein, 422 aa, unidentified
MRGLRTKGVKAVKEETLIVTVDVGMASNTGYCTTVDGRDIKPFKFDNTREGLDRFWSMIVASQNRFRCSDVMVGYESTGPYAEPLIHYLMNKPVRIVQVNPMHTKRIKELNDNSPLKTDDKDPRVIADVLRLGHTLSVVVPEGDAAYLRRLNHARERHVGERTALLNQLQQLVFLLFPEFKTVFNDIKVKTAQRILTRYTTPEKIGSLNQGELGEEIRKQSMGKFGVQQADLLISLARDTIGIKEGIAGIVLDIRHILMQLEAVHGFVAEIEAEMEKALERIPWSTKILSMKGLGVITVAGLVGEVGDFSKFKTQSEIMKLAGLDLYEISSGKRKGQRRISKRGRSLLRKILYNAAISSIRKNGIMYTEYTNLIGRRMKRTSALIVIAKKLLRIIHAMMRDGRDYIHNYASPKRVGVIEKAA

SEQ ID NO: 361375 - protein, 357 aa, unidentified
MILKIAEDTGSPETRMVKNTVSGRAAMIADLRRRARAAGGARVIFAYEASGQGFGLCDQLAAAGIECHVLAPTKIARSPRQRKEKTDEKDALDLLELLRGHVLAGNRLPTVWIPDAQTRDDRELVRTRLDVREKITAVKTQVQSLLKRCQLRRGAGLGKGWTKAFRGWLQRELADPTVAGQSPLGVGGQAALASLLRQLQSLEKEEERLDEQVAALAFSPRYEARVREVTKLCGVGVLTAIVFLTELGDLSRFANRRQIAAYLGLVPSSSESGQQNDRKGHITHQGSSRVRKALCQATWARVRYDEQEKAVYERIKTKNPKKKKIAVVASMRRLAVRMWHLGRREPESAVPRVAATG

SEQ ID NO: 361376 - protein, 405 aa, unidentified
MPYILALDVSMGHSYSVLYKDDTCLFEDEIEHTQRGFHALLEEIQHLPERPLIVFEATGIYSRPVEKFFQDHHFPYCLLNPLEAKKQMEENTLRSWKTDKSDAHRLAQTHLKNQRQPKEVQSNFYLEMRDLARFYQEIEKKITRLRMDLHNCLQLTFPELEQFFSNRLTPYALTLIRLFPHPDFVLASTRTKIKNKLINETRKKISANRAEQKADQIIHYAQCAYPAVEKDSIHCQKTIYYAELLQDLLEQKEALATQMIKKAEGSPCFLLYQTFPGIGALTAALLLGELGDITRFKTHKQLNAFVGIDIRRYHSGKYTGQDRINKRGNPKARKIIFFTIRNMIRQQRAAPNHIVDYYYKLKKQPIPKKDKVATVACMNKLLKCMHAMVRAHTEYDYAYAVSVDH

SEQ ID NO: 361377 - protein, 416 aa, unidentified
MKIVRPICCGMDVHKNIIVATIGITNKKTRITEYIQETFSTLNPDLLNLKQWLINHKCFDACMESTGKYWIPIFNILEDEINIYLTHPKYVKAIKGKKTDKKDSKWICDLFKHDLIKFSFIPPKEIRALREISRYRYKLVGMRSSERNRYQNCMTVSNIGIGSVFSDPFGKSAQSIMKEVLESDIIEDEKILKCIHGSCKNKDKILDSIKHCNIETDQRFKMNESMIHMEELQLHIDNCEIELMKRAAPMFDQFMHITQLPGISTLSAILIISEIGVDMKQFESDKQLACWAGLAPANNESANKKKSVRISKAGQYLKPLLVQCALGAIKDKEGYFGIKYSRIKKRRGHKKAIIAIARMMLVSIYHMILTGETFNPSDYESFRNPKPPIKQQDLTEESAIEFLKKSGFDVSKLTKP

SEQ ID NO: 361378 - protein, 412 aa, unidentified
MEVVYECCCGLDVHAKSVVACLIKRGHKQIRTFSTMTEDLLALADWLWQAGCTHVAIESTGVYWKPVFNILEGVLRVILVNARHIKAVPGRKTDVRDSEWLADLLRHGLLRASFIPPAEIRELRELTRYRQSLVTAHTASANRIQKLLESANIKLGQVASDVLGASGRLMLRALAAGEQDAQKLAELAQGRLKSKQGELRRALEGRLTAGQRWILAELLSGVEELEAARARVDTRIREEVATCQDPFVPEAVELLDSIPGVGEQTAQTIIAEIGVDMGRFPSAGHLASWAGMCPGNHQSAGKRIKGTTTKGSPYLRSALTEAAWAASHTKDTFLATKYRRWIKRMGKKKALIAVGHSILVIAYYLLSGRIRYTDLGSDYVDRQQLERQRRRLVQKLAALGVKVTIEEIEQVA

SEQ ID NO: 361379 - protein, 348 aa, unidentified
MTMVGGFDVHRQQITFDYVDSDGLVRWGQIRPATRKTLRRWLGEHCPEGDAEFALEGCTGWRYVSEELAAAGVGVHLGDPAEVAALRGPKKRAKTDHADAKLLRTLLLEGRFPESWIPPAHLLEIRALGRLYCTLMDERRAWQQRIHAQLFHQGCPPIRALLSEAGRDALARVDLSAAGRQYVDTALRRIDDLSTEIGPLRTQLVNFARRQVGCQALQAQYGIGWLCAAIIWAEIGDARRFTSSDQLVRFAGLDITVYSSDGKRAPGHLSRQGSPQLRWAAFEAAKCAARRGSPDYGYYHQLAVKRDGHNGKNPTLAVERKILRRCDHRLRELGDDALALLIPGGVAA

SEQ ID NO: 361380 - protein, 338 aa, unidentified
MNIVFLGIDLAKNVFQLCGLNQAGKPVYTKRTGRKELLQTLANIPACLIGIEASTGAFYWQREFEKLGHKVKVISPQYVKPFVRGQKNDGNDAQAIAVALMQPTMQFVPPKSPEQQDIQALHRARQRIVNHRTATVCQIRGLLLDRGIPIGSAVSRARRAIPLILEDAENGLSSRMRRTIAELYDLFNDLERRIHFFDKEIETVFRQSEACQRIARVKGIGPKTATAVVAAIGKGTEFKNGRHFAAWLGLVPRQHSSGDRQVLMNMTKKGDKHLRTLFIHGARAVVRVATNNNDGHMNQWVNQLKERRGFNKTTVAVANKNARIIWSMLRNETEYQVV

SEQ ID NO: 361381 - protein, 327 aa, unidentified
MNQSATVVGIDVSKASLAVCYQVEDKLQHTEVSNSKAGFQQLVRRCGVDCCYVMEATGVYYLSLAYYLVEHGAQVAVLNPLVVRRFIQMHLGKGKSDRKDAQWLLRYGQQQPLPVWQPEAPVLVECRQMEQVMEQFIRQRTMVSNSLQGLEHQPVVSAVARKRLQQTLKSLDQQIQALEAELLALLEQHYSREMPLLCSIPGIGRKTAAQLLLFAKGFSQVQNYRQLIAKAGLCPREYSSGSSVRGKTRITRMGGGLIRSKLFMCSFAAKQSNAACKALYDRLVAKGKNGKVALVAVCNKLLKQACAIVQSGIPYQAEFNSKLAPNP

SEQ ID NO: 361382 - protein, 313 aa, unidentified
MSTPCYVGLDVAKAHLDLAVYPPAASPQRFAHDEAGLTALVAHVRALAPTLIVLEATGGYETDVATALALAGLPVAVVNPRQVRDFAKAIGHLAKTDQLDAAVLALFAARLQPTPRPLPDAAHQELAALVARRRQLVEMLTAERNRLPLARGRVQHDVQVHIHFLEQRLKDTDTDLRTTIQASPVWRTREQLLRSVPGIGPTTAASLLADLPELGQLTRQQIAALVGVAPLNRDSGTRQGPRVTWGGRASVRGPLYMATLVATRYNVPIRVFYQRLRAAGKPRKVALIAAMRKLLSILNAIVKSQQPWAPAHP

SEQ ID NO: 361383 - protein, 313 aa, unidentified
MSKETLAVCFSIADKLQHLEVSNDEAGFLRLVKTCGSDSLYVMEATGAYYMHLAYYLHGQGATIAVINPVVIKRFIQMHLGKGKSDKKDAQWIRCYGQQNELKCWQPEEALLVECRQLEQVAEQLIKQKTMTMNALEALELQPVKSQLALKGLKQTLKMLEKQIQQVEDELQDNLGKLFQKEIQLLCSIPGIGKKTAGMLLLFAGGFKDMSSYRQLIAKAGLCPREYSSGSSIRGKVRITKMGGGLIRSKLFMCSFSAKKSNAACKALYERLVAKGKNGKLALIAVCNKLLKQAFAIVKSSIPYRPNFAEIPA

SEQ ID NO: 361384 - protein, 386 aa, unidentified
MSQPSDFNRSRTGLEQDCTLIAVVEMSLKSWLVAGIVPGIERHPLKKLAADEHALLKLLRRWQAEAIKAGRNVKRVAVAFEAGRDGFWLARWLRARDVEAYVLHASSVAVSREHRRAKTDRLDTELLKRAFIGWLRGEPHHCRMAAIPTIEEEDAKRANRERENLVCERSRIINRMKACLIRFGVRAFKPTLRKAPERLVKLRTPEGVPLPPNTIAEMCRDMARLRFVRDQIKEIEQARLQRLEQAPKERTHAMVRLLTRVVGVGIETADMLVHEVLSRSMRDRRAVARYAGITGSPDESGRKRREKGLARAGNARVRRGMIQLAWRFLRFQKDSALVQWYRMRTTNARAGTRNTMIVALARKLLISLWRLVTVGEVPAGVAMRAV

SEQ ID NO: 361385 - protein, 417 aa, unidentified
MKLFIGLDVSSTNLDACFLTSESTILLETSVSNDLTGACEIRELTLDYIKQFAFTRVVIGMEATGQYSSLPALFFHEDEALRSHGVETTVENPRNIHRFMKVFTEDKNDRLDAFHIADYLRLERFNTSPIKEEQYIALQSLTRTRFNLIQDMTRTKQHFLNILYMKCNVLQRELKSDNGSTSVFSATIIELFTTDYTLDEIGYMPLEQLIGILQEKGRGRFREPKNLAERLQKAVRSSYRLSKTVQDSIDSVLASQVRIIRTYQEEIKALDKAVVDILEVIPESKSLLSIPGIGPVYTAGILAEVGQIGRFASQAKLAKYAGLYWPKNQSGHFEKESTPLSKQGNRYLRYYLIEATNSVKRRLPEYSEYYEKKFQEVPKHQHKRALALTARKFVRLVDKLLRDHQLYTPPRRSIEHS

SEQ ID NO: 361386 - protein, 449 aa, unidentified
MNNGNGVSRGDRNRNARLARLRELVPVANAIVGIDLADKKQMVVVTDHDSKVLARRTFRCRAWDLGVALDWAAERAAAKGWAAVTVSCEPTGHRWRVLGQLAAQRSMPFVCVQPMMTSWARRSEDLTFDKTDEKDAVLIARLTAQLRCYVPEPVDETWGRLRHLGTRRSQLITEASSQIQQMRDLIECVWPAALDTAQRPFRSRTWVASMSVVLGRDGGDFARTRRLGLARFEHAVRREITRRGGQKPCLRILRNLFTALADPAGVMAHRAGALERVQLLLEDWEVNIQRLVETEARMVSVLDELELTELVTSITGLSAVGAAAILAETGDPRRFTTARALVKHAGLAPREKLSGNFTGRTKLTGQGRPELRLAAWRAVWGAQRANAVYQARYRHLTTREDNKLTATQAQTAIAAAILRHLYAVITTGKAWDPDIATHGTRRPEVPLAA

SEQ ID NO: 361387 - protein, 318 aa, unidentified
MSDSVFVGIDVSSQTLEVASSNQAKTWQLPNDTGGLESLVSRLLELKPALVVLEATGGYEFETACALQAAGLAVAVVNPRTARDFARAMGALAKTDALDARMLAAFARVLHQHPERERFVKPLADAELQRLQALVLRRRQLVQMITSERQRMRVSHVAARPSIERVIDFLKTELGDSDAEVAAHVQRHHAELAAALTSVPGIGAASVAVLLAELPELGKLDRRRVAALVGVAPLNRDSGQMRGQRSIWGGRADVRRTLYMATLTAVRHNPIVKTHYERLLAAGKRKKVALVACMRKLLTMLNAIAKQGSTWDPTLHHA

SEQ ID NO: 361388 - protein, 355 aa, unidentified
MNQEKYIGMDIHQATISVAVMEGRGKLIMECILETKAATILEFIQGLHGSLSVTFEEGTSAAWLHDLLKPHVAQLIVCDPRKNALLKDGSTSDRIDARKLADLLRLNRLHPVYHGEHGVRTLKELGRSYLTISQDLTRVMNRIKALYRSWAIPCSGTTVYAPRHRAEWLAKIVEPGVRRRAERLYQQLDLLQPVRQQARHDLLGESHRHPAVKLLRQIPAIGPIRAALLVALLQTPHRFRTKRQRWAYSGFALETRDSGEYRMVRGKVRRNRERLTVLGLNDNHNHDLKNLFKGAALSASTRPGPLYDFYLGLLEKGMRPTMARLTLARKIATITLTMWKKGADFDAQQLNRQAA

SEQ ID NO: 361389 - protein, 339 aa, unidentified
MNLTPVGIDIAKSVFQLHYVDAETGEIVNRPIKRARFLEHFANWAPCLIGMEACGGAQHWARELIKMGHQVKLMPAEFAKAFNIRNKSDAADARAVWLAVQQPSKAVAIKTEAQQAVLALHRMRQQLVKFRTMQINSLRGLLTEYGEVMGRGRAALDKAIPAVLARISDRLPMVLIDTLREQWDGLTKLDEQIAVIERRLRQWMLEDKAVKAITAIPGVGVLTATAAVATMGDAKSFRSGREFAAWIGLVPKQTGSGGKVTLLGISKRGDTYLRTLLIHGARSVLHHVREPAPWVEQIRKRRPPNVVIVALANKMARTIWAILAHDQPYQKGYVSAKPA

SEQ ID NO: 361390 - protein, 482 aa, unidentified
MKKPNIYQNQSQELLHLFEEAGSSEKVMCVPMDYAKNDHLVMFCNGHGDILRKPFSVKNTPEGIGYIDEQVARFCRRRGIKKKHVFFGGEDANSFAKNFVSTLRCKGFVVANVNAHDAKKQRSNIQASTDRIDLMGIATMLLNCRANCCPAQSGIYRNLRTLVRHRRRLVQMLTEVKNRVHGIVDELFPGFLNEKNSGIIPFTQSSLYLMQDRFSPKQIRRRKRQKLVEILKRLGTSKAEHTAAKLQQYAGKVLHAPVEYVDTMQLSLAQHVKHIRCLKESVAQMEKEIALNLAQTQGAFLTSVRGIGLVLAAGVTAEIGDLNEQKPLNNLASYSGIVPRVKQSGGLDGKTYTGPVAKRCNRILKDYVVKSAYHLGLHGPQDLMNDYKRRDASGQHADFGIGRRYLRMAINLMRTSQVYLPPNLRKDGYTLEQRAGYYLMSWPYLKEKWKKVGALEAAFENNRPLGLWRQIVQELYDIKLKL

SEQ ID NO: 361391 - protein, 434 aa, unidentified
MEEVTDEPLYRDRVCGIDIGKAQMAATIRVPSDSNPARRASETRSFGTTRREVLALADWLRCWQVPAVVMEATSDYRKGPFCRLEAGGFECVLADARQVKNLPGRPKRDPSDSRWLAACFERGAVRPCFVATPEFRIIRLHTRYRRDLTEERTREKQRTEKLLESAGIKLSSVISRLHLVTGRDIMDHLIAGERNPKVLAQLARTAARRKIAELEEALEGAEFFTAEHAALLAMMLARIDRLTAGIDELTTVIERLLAPYEEQLQQAESMPGWQRRAAQDALAETGVDMTRFPTGAHLASWAGRTPVDHQSGTRKGRAKAKKGNRYLAGITGETAVAAGRTQTRDGVRHRRLARRRGTAKACVATGNTQLKASQLLAGPGTRYQDLGPDYYERQASIRRQIAHHVGKLGALGFEVTLCRIPEPDPDPAGQTQAA

SEQ ID NO: 361392 - protein, 338 aa, unidentified
MGKITTIGLDLAKNVFHAVCCDQHGKIIKKKMLRRSGLLAWFVNLPPCLIGMESCASAHYWARALKAQGHRVKLIPAQHVKPYVRGNKNDYNDALAIAEAVIRPEMRFVSIKTPEQQDIQALHRLRERRLRDRTALCNQLRGLLGEYGIVFSRGVNVLRKRIPGILEDGENGLSDFFRRLLSQGYQQLTELDAHIDAYTQTLEAHSKRDDACQRLQTIPGYGPIVSSAYYSVVGNGKAYRRGRDVSASLGIVPRQHSSGGKNVLMGISKRGDRYLRSLLIHGARAVVIQAANKVDALSRWINKTRAARGFNKAVVALANKLARIGWAILANNTVYQAR

SEQ ID NO: 361393 - protein, 320 aa, unidentified
MSTSGRTTSYVGIDISKATLDVAVLPTGEHFVVSNDEAGIEELLGKLAEVSDALVILEASGGFERPVAAALAASGVALFVVDPRQARDFAKATGQLAKTDRLDAFVLAHFAQAIRPAPRAIPDAEAREFQEILARRRQIIQMMSAEKNRLGASTSKAVCGRIEAHIRWLEKELSRTDRDLDETIENSPTLQENEALLRSVPGVGRVLCRTLLAELPELGSLSPRELSALVGVAPLNRDSGTLRGRRTVWGGRARVREALYMGALIASRFNPAIEEFYERLVEAGKPKKVALVACMRKLLIILNALMRERTPWRCPHALNP

SEQ ID NO: 361394 - protein, 312 aa, unidentified
MYHIEEEVVYMGVDIAKAYLDAAIGNEKRRFANDALGHRELIKWVKQFSAPVQVICESSGGYERALVQALARAGVKISLVQANRVRQFARAAGILAKTDRIDAKLLSAFGEAMQPGTISASQLEQEHLRELESQRRHLTHLLVMEQNRAARMSDLCVCKMNRRLISQIKKQIEQLELLIQEQIKASPELCTKAEKLTAISGVGARTAALLLAQMPELGQLNRREVAALVGVAPFNRDSGRMRGKRAIYGGRRAVRHGLYMAALVAARHNPILRGFYLRLRAGGKPAKVALTATMRKLLIVLNSSVKPDLKYA

SEQ ID NO: 361395 - protein, 343 aa, unidentified
MQTITTIGLDLAKSVFQVHGVDAGGQVIVRRQLKRRYVLTYFQKLSPCLVGIEACASSHHWSRELQALGHTVRLMPPAYVKPYVKRQKNDATDAEAICEAVTRANMRFVPTKTPEQQSGLLLHRTRHLFIRQQTAVINAIRGHLAEFGIVAPVGRHGVEELLNVVADPSDRRVPEMARACLLAFGAQLRRIKEQILEFDRLIRAWHRSNETSMRLDEAPGVGPVLATAVVATVADPKAFRSGRNFSAWIGLVPKQHSSGGKNRLGGISKQGDRYLRGLFVAGALAVIRYAKIHGTKHRPWLTALLARRPTKVAAIALANKIARMVWAMMVKGERYKEPVALAT

SEQ ID NO: 361396 - protein, 308 aa, unidentified
MKTFPKTIPIQRNIAIDSHKHYVMVGGMNDQQQWTLRPRKVQMRRFRDWAAQNLKAGDAVVLETTSNVWDIYDIVSPLVGKTVVANAYKVRQIAEARVKTDKEDVRRLITLLIANIVPEVWVPPMHVRELRSLISFRWRLGKQITMSKNRLHSVIQRFNLHPPEGNLLADKNQPWWDQQEFSELTGFQVELDLEIITHLEAQRARIDQKLAELSDTDPWAEDMVFLMQIPGFGLLTSTILLAAIGEIERFSHPKKLVGYAGLGAGVHDSGKKHQDKSITKEGRRELRPGRLGCRAQRSLLESTVQTPD

SEQ ID NO: 361397 - protein, 359 aa, unidentified
MHPQRNRLDFTGQNVYVGFDVHKKNWRVSILMDNLFHKTFSQDPKPELLHQYLQKNFPGANYHTAYEAGFCGFWIHYALSSYGINSVVVNAADIPTTFKEIIQKEDSRDSLKIAKALRSGLLKPIYIPKNKTCDDRALIRARTTITKDLARNKNRVKGFLNFQGIEIPKVHKYRSQIWSKNFLKWLESIQLGSSSGNEALSVFIEECKNLRAAKLKITRKIRLLSKTESYKQNSELLQTVPGIGLITAMELLTELETIDRFKDIDHLSSYIGLIPSTNSSGDKDLVGNLTSRGQQTLRTAIVESSWAAIRTDTALGLKYTGLLSRMLPQKAIVRIAKKLLSRIYFVLKNKQPYQCLIVG

SEQ ID NO: 361398 - protein, 425 aa, unidentified
MEEQVMEPVTRFAALIGIDWSDAKHDICLVDTTTGTQELSVVKHTPEALNEWARSVRTRFGGEPVAVCLEQSRGSLIFALMKYDFLTLYPINPQMLSRFREAFTPSRAKDDPTDAGYLVELLIHHRERLKAWTPDDEQTRTLQLLVEHRRRVVGDQTRISNRLTALLKGYFPHVLQWFPDIRTPVVCDFLLRWSSLDALRGVRRATLEKFMRSHNSQRTETIEKRLTAIKTAVPLTTDVAVINSSVVMVRALAAQMKTTLAAVKEFDREIEELCQSHEDYDLFASLPGAGKVYASRLLTAMGSNRERWASADELLCFSGVAPVIERSGKSSWTRWRYFCPKFIRQAFVEYAGESIRHSEWAQAFYVAQKAKGKSHQAAVRALAYKWIRIIWKCWQTREKYDEARYIECLRKKGSKFVREFASAEA

SEQ ID NO: 361399 - protein, 316 aa, unidentified
MKPQVFIGLDVSKQQLDVAVRPQGRHFVTPNDDRGIKQLVKRLAALKPQLIVLEASGGYEFLATAALAEAQLPVALINPLTVRKFAGATGKLAKTDKIDAQVLAHFAEALRPEPRPLPDQDQQVLKAALQRRLQVVKMIGQEKNRLEKTFIPTLRQDIQAHLTWLSQRLEQLDRDLSNQIRQSPLWRDRDRLLRTIPGIGPVVSRAVIAQLPEAGTLPGKKAVALVGVAPYNRDSGRFRGKRMIRGGRSYLRRMLYMAAVVASRWNPVIRAFYQRLLAAGKPKKLALTACMRKLVLIINAMMKNNQPWNQFINQVP

SEQ ID NO: 361400 - protein, 370 aa, unidentified
MLNTTTFVGLDVHARSIKAVALDAMTGEVRSATFGYDAAEVAGWVSSVDPSAKCVYESGVTGFDLQKRLSSMGIDCVVGAVSKMIKPSADRRRKSDRNDAEFLARMLSVGNVVEVWVPDDGCEAARDLVRALDDAREDLKRCKQRLSKFLLRHGYVFSETTPTGRRKGNWTAAHWAWIRSISFAEKADNDVLAYYIDATRQAMEDKARLERLVEAEASNPRWKRRVDSIRCLKGVDVMSAADLVFEAGEFSRFKNARSFAAWIGLTPSEHSSGESVRQGGITKAGNKHLRRVLVESAWHYLGCSPHSKDLAKGQAPDPGARRHAAKGVRRLVGRRAAMLERGVHKNKANVATARELACWCWAIGCMVESA

SEQ ID NO: 361401 - protein, 410 aa, unidentified
MELLHRRCCGLDVHKETVVACLRLVADGKVTTEVRTFQTTTADLLRLSEWLAANDCTHVAMEATGVYWKPVWHILDDGAFEVVLANAAHVKNVPGRKTDVNDAMWLAELLAHGLIRASFVPDTQTQEMRNLLRTRKQLVREQSSHVLRVQKTLEDANIKLDSVLTDLMGKSGRAMIEALIAGETNPTKLASLADRRAKASHEEFREALRGRVTKHHRFLLRLHLNQIDALNAAMATLDAQVEANLGPFRTAVEQIISIPGIKNLGAHVIVSEIGIDMSRFPSDAHLISWAGICPRNDESAGKRRSNRLRKGAPWLKTTLVQCAWAAVKKKDSYLQAQFHRIKARRGPKKAIMAVAASILTAIYHMLKNGTMYKDLGRDHFDRRSTDQQKHRLVKRLADLGYAVDIKPLAA

SEQ ID NO: 361402 - protein, 370 aa, unidentified
MEQGIRAYVGLDVHKDSIAIAVAEAGRSAGRMVGQIAHDVPKLLKALARLGEPGELYVVYEAGPTGYGLQRALFAKGYRCEVIAPSLIPRRAGDRVKTDRRDCLRLAELSRAGELRTVWIPDRGDEAIRDLSRAREDAVNSRTQARHQLKAFLLRHEIRYSGKTAWTKSFYRWLGELNFGDPSSQTAFTEYHLAVQAADQRLERLTKALAASVTGWRFEPVVQALQALRGIDVVSAIGLVAEIGDIARFDHPRKLMAYLGLVPSEHSSGDRVRKGSITKTGNAHARRLLTEAAWNYRFTARIGRAAQARQEKLTEAVKSIAWKAQLRLTARYARLNGRGVHHNKVCVAVARELAGFVWAIARASVAATPH

SEQ ID NO: 361403 - protein, 355 aa, unidentified
MNSTKYIGMDVHTATISVAVRDAAGKLIMESILETKASTILQFIHGLRGELYVTFEEGTWAAWLYDLLKPYVTNVVVCDSRRNALLKEGSKSDRIDARKLSELLRANLLRSVYHGENGLRPLKELVRAYLTISKDLARVMNRVKAIYRGWGIPCAGQSVYHPRHRDEWLGKITQASVRRRAQLYYLQLDMLVLLRKQARQELHVEGKKHQAWKSLRSIPALGPIRAAVLMAIVQTPHRFRTKRPLWKYGGFGVVTHSSADHRYVEGQLQRSKKPVSVRGLDSSHNHHLKDLFKGAAIQASTREGPFREFYEALVAKGMRPEMARLTLARKIATIALTVWKKGVAFDAKYLKPQTA

SEQ ID NO: 361404 - protein, 335 aa, unidentified
MRQGGRPASRAARGHIPDRPYTVQPYLGPAPLQFRVHPNGRRALHGRIQSRNTESHHDYEPGATRIQPHRRLRRRQGEPRHPRAAGDERQAIANKPKAIRKLLIAQIRRNAKLGLGPLLVVCEATGGYERHLLEICAELGIAAHKAHGARVRNFAKYLGLIAKTDPIDARALALFGLKTENLRLHTPLTPALTALIDLRARRDQVQAMLLAETGRLEHVRHAGVTRSLKEHIASLRKSLAALEAQIAAHIQASEALARKAALMRTLKCVGPGTVAALLAYMPELGALSRTQAASLAGLAPFDDRSGKLSLPSHIEAGRAAVRRALYNGGADRHPA

SEQ ID NO: 361405 - protein, 423 aa, unidentified
MKYALVRVLPEVPPGGVCAGIDWASADHAVCVAVLAGRVRDRFTAVHDRAGIAGLIARLRGSGAAEVAIERGDGVLADALLAAGLTVVVIGSRQVKNLRSRYGSSGAKDDRFDAFVLADTLRTDRARLRPLIPDSPATLALRAAVRARRDLVAHRVSACNQLRAHLAVAFPGATGLFSELDSPLSLAFLAAFPGQQAAARLDEQALAAWLATVPRRGNTAPAGVLAARLAAAPRGAAGADAAQAAVTAQLAAATAGLAGRVRALEAEIAAQLAAHPDQHIFTSLPRAGTLRAARLLAETGDCRARYPDPWSLAGLAGVAPVTRRSGTYISHEFRWNLNRQLRDAICDFADGSRHASPWAATVYAAARDRGKDHPHAVRITARAWVLIIWRCWQDGTSYDPAKHRALQDVLTRQAAAGTPQPHR

SEQ ID NO: 361406 - protein, 354 aa, unidentified
MKGELQNEKVLVRGKEVFIGVDVHKESWHVTARVDEEEVFHGRIPSQYHALQKLLDCFRDCRVKVAYEAGPCGFWLYDRLTENGIETIVVPPSLIPVESGNKVKTDKRDSRKLAKLLESNMLKRVYVLSEEDRADRELLRTRRQVLEHRSDVARQIKSKVLFHGISSPLATERWTKGYIRWLRELTWGSKVLKVSFESLIELYEYLTEHLIKIHQEVIELSRSRKYLHKVKLLKSVPGIGTLVGMELLVELSEMERFRSADELASYIGLTPSEYSTGQYVRQGRITRCGNKRVRTCLVESSWILIQKDPLMRLKYNQLKQFKGAKRAIIAIARKLIIRIRRLLLNNEPYVIGVC

SEQ ID NO: 361407 - protein, 457 aa, unidentified
MQSFFLGADVSKGYADFVILDDRKKTVTENFQLDDTNKGHRRLFQVIDRVLKQHPQASLFAAVESTGGYENNWYRSLQGFQQTLKISVARLNPLGVMHNSKADLKRNNTDKISARSIAEYLIAHPEKVTYRQHDQWASLRKQWGFIRMLSKQTTQMLNQLESLLYSANPDLLRFCKDGLPAWVLRLLLKYPTATHLARARVSSVAKIPYVTLQRAQELVEAAKHSVASATDPVTGQLLQVTAKQILSLQKTIDAQQALMVAQCSSPEVELLKTFTGIGDSSAIGIMLEIQDIERFSSSKNLASFFGLHPVFKISGDGSSGFKMSKQGRKEPRRILYMVALTAIRSNPVIRDVYEHHLSKGKCKMAAIGVCMHKILRILYGMLKNQTPFDPKIDLKNRQRGVGKKTNRSTSKGRRFQDFDPHAPVSGRQGKKRLERKEPQCVENAVCGVIATAPDPVS

SEQ ID NO: 361408 - protein, 354 aa, unidentified
MPSTASAQIAVIGIDIGKNSFHVVGHDSHGAIVLRQKWSRGQIEARLANLPPCLIGMEACVGAHHLARKLTAFGHDARLMPAKYVRPYAKGQKNDFNDAEAIAEAVQRPTMKFVAVKTTDQLDLQALHRVRERLVSQRTGIINQIRAFMLERGIAVRQGIRFLRTELPIILASRTDMLSPRMLHVIEDLAGDWRRLDERIETLSREIETIARQDAGCDRLMSVPGIGPIISSAVVAAIGSGDVFSKGRDFAAWLGLVPKQISTGDRTILGKISKRGNRYLRVLFVQAAWVVLVKPVSWERHGLKSWIEAAKKRLHHNVLAIALANKLARIAWAVLAKGRDFEATRTLDGSTKPA

SEQ ID NO: 361409 - protein, 324 aa, unidentified
MKSQNLACGVDVSKDTLDLYYNDAQGKEHHLKTSNDAAGHQLVLKKLGVERTYIMESSGPYYLRLAFAIKKLDGDVRVENPIAVKRFIQMHLERNKSDRKDAKWLYFYAKSRETSAWVLPPEEQLYCTQIMGSIDLYSRQLVMITNQLHSLEQVPVQMKEVIKSLEGTRRTIEKELKKLEKSLELQLVSWQAEQLKNITSIPGLGKRAVALLIVYTEGFKKVSNYRQLIALAGLAPREHTSGTSVRGRKGICKMGNGHLRNVLYMCSLSLLSSIIKPAKSFMTGSKQKENVAKWHLSLCAISCSNKPSPLLQKEPPTNPITKVR

SEQ ID NO: 361410 - protein, 443 aa, unidentified
MARKKQQKRFEVIHPHCAGIDIGSREHWVGVNPDQSDKPVRCFPAFTEDLVKLAEWLESLKIKVVAMEATGVYWIPLFELLDSRGFEVYLVNSRATRQISGRKSDVLDCQWIWQLMTHGLLRGAFRPADDICSMRSLVRQRAMKVRDQAKTINRMQKALTQMNIQLANVISNIAGVTGMKIIKAIIDGERDPQVLANFRDGRIKADHQTIARSLHGNWRVEHLHALAQEVAAHDFLEKQIAECDQAITQALDRLPVLNHEPTQPTKPLRSPHRSADEQASLHQALVRIMGVDLTAIPTIGIESALVLASEVGPDLSRFPTEQHFSSWMGVAPSTRISGGKPLPGHVPKVFNRAAQALKQAASSARTDKSFIGASHRARLARMDTACAIKATAHQLARLIYAMLTKGQPYVAQDMDEYEAKSRDRQLRALQRKATKLGVRLVAA

SEQ ID NO: 361411 - protein, 311 aa, unidentified
MKKHVGIDISKKFFDLHILEEGKDMHFEYTPEQIKQCVKLLLNNDVELIVMEATGGYELELACALQAAGLAIAIVNPRRIRDFAKAAGKMAKTDKLDAAIIALYGATLEPPKKAIIDANTCKLKALVARRNQLVAMRSSENNRMEHSRDKEIARSIKTVVKTIEREIEKVEKEIENHIQQRPELKQKAELLKSVPGIGQTTASMLVTELPELGNANKKEIAALVGVAPMNRDSGLFRGKRMTGGGRRDIRARLFMPILVAIKYNTVIRKFYEHLLNEGKTKMTAIVAAMRKLLVILNTMIKNNQKWSPKIA

SEQ ID NO: 361412 - protein, 338 aa, unidentified
MEAYAGIDLHASNNYTAVIDGHDKRLYGKRQPNRLDVVLDALDPFKTDLKGVVVESTFNWYWLVDGLMENGYKVHLANPSAIKQYEGLKHTDDKWDSFWLAHMLRLNILPEGYIYPKEERPVRDLMRRRLLFVHHRTSHILSLQSMITRNLGVRMTARGITKLMEEDAESMFDSPYLVLAAQNNIATIRFLATRIKIIEGEIRPLINIREEFKYLLTIPGIGDILGFTIMLEVGQLGRFPEVGDYSSYCRCVKSEKLSNGKKKGKNNQKNGNKYLSWAYVEASNFIRRHCPKADRFYQSKKAKTNGIVATKALSNKVARASYYVMRDQVPFDEDKLFS

SEQ ID NO: 361413 - protein, 409 aa, unidentified
MELIHERCCGLDIHKKSVVACLITPKAKEIRSFGTMTRDLLALADWLAENQVTHVAMESTGVYWEPVYNLLEDDFTLLLVNARHLKMVPGRKTDVRDAQWIGELLQHGLLKASFIPPRPQRQLRELTRYRRSVTQERSRVVNRIHKVLEGANIKLGSVASDIVGASGRAMLSALVAGETDPEALADLAQGKLRDKIPALREALRGLVQHHQRFMLQSQLRHLDFLLDFLEEEIARLDEEVEARMRPFEETVERLDQIPGIGQRTAQDVLAEIGTDMTPFPTAAHLASWAKLCPGNNQSAGKRKSGRTGKGNPWLKSALTEAAKSASRTKDTYLSAQRRRIAARRGKNRASIAVAHSILNSIYYMLRDGTTYRELGGNYFDERNRHYVVQRSVRRIERLGYRVTLELEAA

SEQ ID NO: 361414 - protein, 371 aa, unidentified
MKSIIYIGMDVHKNTYSLCGINSSTGEVIAQTKCAAEVKNILKFIKSAKERMSEENEVDILTGYEAGCLGFSLYHELAYHDIPCVILAPSTMHGSVKNKKVKNDKMDAFNIATNLMHDSYKAVHVPTEHDNEIKEYIGLREDVIQSRKRIKQQISALVLRRGLRYEGKSNWTVAHIKWLETIELPVIVRETLNEYLKVYDYLNERIEKYDERIEEFSKEEEYKEPVSKISCVKGIDPLSAMKIHVTVSDFQRFPTAKAFMANLGMLPGENSSAEKYSNTPITKMGNSMVRKTLVECTQALVRGTVGKKSKALKKRQKGQEDEIVAYADKAVERLQKRFRRMVLRGKPYNVAIMAVARELAGFIWGMETGRI

SEQ ID NO: 361415 - protein, 409 aa, unidentified
MKHVIAFDVSMGKSYMVIYNVQKQCVFESEIKHTKPDFKKLQEKIHKVTDENKVTDENGESPEIVFESTGIYSRQLERFMQDNQYTYCLLNPLEAKLQCDSLRIHKTDRSDAHRLALTHFTVTRRVSNGTNNLFHQLKSLSRLYSELDSELSIIRGRMHKVIQLTFPESERIFTSKSDLFLNFVQLFPHPDYILGLSKTIIKNRIRANTNKKISNITAEKKAIQILEIAKTSYPAVSQNDVLCDQLKLYARRYQELLHQKECCINKMVYIAEQRAEYDIILSLPGIGPNTAVRLMAEIGDITRFNNNKQLNAFAGIDIRRFQSGKTFFKDKINKRGNKHLRKLLFLIIQNMIKQRRYGQNHIVEYYDKLKTQPYNKCHKVASIACVNKFLKLLFHLITHDIHYDYRLTA

SEQ ID NO: 361416 - protein, 356 aa, unidentified
MIVIGIDPHMRTHTAVALERVTGEIVAERTVKARARGHGELVLWARALDAERVFALEDCRHVSGSLERFLIARGERVVRVPPKLMAGARAGGRERGKSDAIDALAVARAFLREPELPVATLAGFEREVRLLADHREDLVGERTRIGNRLRWHLHDLEPSLEIPAGALDRYRWLDRLQEWLKGRDEGSAQVRIARELVVRCRELTRRIKELERELEALLESEAEELLELCGCGTLTAAKLVGEVAGVGRFAGESRLAKYTGTAPLPASSGERQRHRLNRSGNRQLNCALHRIAVTQARVYPPARAYLERRQAEGKTRREALRCLKRHLARTVYRALRAMDERKTTSTVEVAALADLT

SEQ ID NO: 361417 - protein, 376 aa, unidentified
MERGSLMLNTTTFVGLDVHARSIKAVALDAMTGEVRSATFGYDAAEVAGWVSSVDPSAKCVYESGVTGFDLQKRLSSMGIDCVVGAVSKMIKPPADRKRKNDRNDAEFLARMLSVGNVVEVWVPDDGCEAARDLVRALDDAREDLKRCKQRLSKFLLRHGYAFSETTPTGRRKGNWTAAHWAWIRSISFAEKADDDVLAYYVDAVRQAMEDKARLERLVEAEASKPRWKRRIDSVRCLKGIDVTSAADLVFEAGEFSRFKNARSFAAWLGLTPSEHSSGESVRQGGITKAGNKHLRRVLVESAWHYLGCSPHSKDLAKGQAPDPGARRHAAKGVRRLVGRRAAMLERGVHKNKANVATARELACWCWAVGRMVENG

SEQ ID NO: 361418 - protein, 318 aa, unidentified
MKMAKRSITTAGIDTSKAKLDIAVHGGMAFTVSNDAAGWKRAAVQLREAGVARIGIEATAGYERGVTWSLRGAGFSVVVMQPLQIKAFAQLVLKRAKNDRIDAALIAACTHLLDATNKLPPDARFEALADHLTSIEQWEEDIARLKTRLEYIRDKRLRRIFEGDVTRLSKRRDAELLRLQAELSQHEDLAQRFALVESVPSIGARTALSIVIRMPELGQVSREQIAALAGLAPFVRQSGKQKGETHIGGGRGRVRRAVYAAALAGAFHWNPQLKALYRRLTERGKSHKQALVACARKLLIFANTVVVRGTPWEAKSAA

SEQ ID NO: 361419 - protein, 478 aa, unidentified
MKAKSASPSRRVVKAIRPAKQLPVLHPHAAGIDVGATEHSVCVPEDAVPAGESSVRQYRAFTGELDQLVEWLQACGVQTVAMESTGVYWIPLYQKLEPAGLEVVLVNARHLKRVPGRKTDVLDCQWLQQMHSYGLLSGSFRPADDICVLRTYLRHRSNLVAGCSQQVQHMQRALDQMNIHLHHVVSDLDGETGLAILDAILGGERDPKQLVQWRDPRCRKSTVAEMEAALQGDWREEHLFVLKQAREGYRALQGQIVECDRAIEKVLERVAVNPSAVPEDQRPRNPVAAPPEAGAKQKRRKRSRGNAPQQDLTTQLQRICGVDLTRVVGLNVLSVLMIISEIGVDMSRWPNAKAFCAWLGLCPGNKISGGKVLSSRTARVVNRVAILLRTLAPTLGRTDTWLGVFHRRMKARLGPAAANTATAHKLATILYHLLKYKEEYMDVDRVVYEEKFRRYRVSRLRKQAAELGYEMVELKEAA

SEQ ID NO: 361420 - protein, 407 aa, unidentified
MDLLKTVFGIDVSSRKSNVCIMVNGQKVNDYAISNDMVGFNRLLGDLKQVTKPQIIFEATGVYSRRLQAFLDMHELRYVMMNPLEAKRKTKDDLHQNKTDKLDALYLAKLQSEHPQRLAYVQNKEYQELMANNRIYEQASHDLITNKNRLHKAVQLTFPEIEHLLANPRGKNYWSIALRFPHPDIVLETKEADIIDFLKGLSGIGKKRANDITQNLIRLAKVACPAVKKNSAHIRGLKMAINNILSAEEECQTALQEMAKLAPKRDLEILTSIPGIGENTALRIISELGDIRRFNNPSQLNAFVGVDPQVYESGNLTAHLSISKRGTAIGRKVLYLAINQIQSAKKAGKPCHIADYYEKRKRSSETASHKKAAIASIHKLLRTIFALIKNDQLYSYDIAKHNQRLLS

SEQ ID NO: 361421 - protein, 324 aa, unidentified
MSSHEIVGIDVAARKLVVIGERLTLAEYENTAAGRSKLVNALSRSPQPVRVVLEATGIYFLDLACELAAAGIAVMVANPKATHHFAEAILQRRKNDPVDAAMLREYGRRMDFVSWQPPRHELFGFRALTREVQALSKTVAAARNRLHAITATQLAPTAVIGALERQIAHNQTLIDELVAAAVAQTESDPELARLLARTDSVPGFAAKAAVLVIGELAVLPPMTARQWVAQAGLDVREECSGTSLARRPRLSKRGNKRLRVALFYPALTAARCCPAAQAFVERLVTHGKTRLQAIVALMRKLLHGLHAMWRNDEDFDAEKLFAPA

SEQ ID NO: 361422 - protein, 387 aa, unidentified
MAQQLDDLSRSPTPLDQDSTIITVIEMSQATWLVAGIVPGIERHPLKKIEQNEVELLCLLMRWRAEAMKKGRTITRIVVAFEAGRDGFWLARWLRVRDIESYVIHPTSVAVSREHRRAKTDRLDTGLLKRVFIGWLRGEPDHCHMAAIPTLAEEDAKRPNREREGLVRERTRLVNRMKSCLVRFGVRTFKPTLRNAPDRLATLHTPEGVPLPPNTLLELRRDMARLRFVMDQIKEVEAARAQGLKQAPQEKTHAMVNLLARILGIGIDTADMLVHEVLARNLRDRRAVARYAGLTGSPDESGSRRREKGLAKAGSARVRRGMIQLAWRFLLFQKESALAQWYRARTADARGGTRKTMIVALARKLLIALWRMLTTGEVPAGVVLRAA

SEQ ID NO: 361423 - protein, 420 aa, unidentified
MPNIEIGVDSMVKENFIYVGIDLHKETHTAVMIDCYNQKLGEITFPNRPADFPKLVTKVKKCNTDGKEVVYGLENAYGYGRALAVWLIDKGYLVKDVNTAISHRQAKHRGAMYRKSDSDDAEAIALATLNMLDKLPDACPNDAYWSLGQLVHRRDNIMKQRTRLVNQLHEQLCIAYPSYKSFFNDISRPTALYFWEHYPSKKYLKGKSVEDLRAELVPVSHNKCSTKTCEKILDAVASDKVKNNAYQDARDMVTLSIVSDLQHYDSQLTEVDKMLEQMYKMLGCTLTTIPGVNVITAVKILAEIGDIKRFANANKLAQFAGIAPLHLSSSGKGKDLATKQGNRRLQATIYFLAIQMVQVSSKGTPRNSVVRAYYEKRKAEGKTSQQALICISRRLISIIYGMLKHGTEYRMPVVESAGEK

SEQ ID NO: 361424 - protein, 328 aa, unidentified
MNSLYLSSEQFALPVLGLDVAKASVQAELRTQERKVRFGFANNAKGFAELARALVQQGAPKIWAGLEATGPYSQALALWLNAQGHRVSLLNPRRVKQYAQSTGRRNKTDLLDAAIIADFVCAMKPAPWQPPTVEVAQLQALIRRREELCVMLQAEKNRLEGVADNVRPSLQRIIVTLSAQKRRLERLIRQQIRSHQQLCRDHQLLCTIKGIGSLTAAILLAEMARPGQVERARQAAAHAGLAPRREESGSSVRRNRGLGKEGNRYLRKALYMPALVAIKYNAPLSHFACRLRSAGKPKMSIVCAVMRKLIHIAFGVLKHQKPFNPSLA

SEQ ID NO: 361425 - protein, 383 aa, unidentified
MNDAKYIGLDVHQATITVAVRDSAGKLVIEAILETKAETILQFLHGVRGSLHVTFEEGTWAAWLNDLLKPHVTRVVVCDPRKNALLKAGNKNDRIDARKLSELLYMNKLSAVYHGEQGIRTLKELARSYLTITRDLTRVMSRLKAIYRGWAIPCAGEQVYAPHYRAEWLAKISEAGVRRRAELYYVQFDTLAALRQGVRRELLAESRKHPATRLLRQIPSIGPIRAALLVALIQTPNRFRTKRQLWAYCGLALRTYISGEYRFVSGQLKRSKKVLAVRGLNLNHNHDLKNIFKGAAARAAATAGPLQDFYEARVAKGVKPHLARLTLARKIAAITLLVWKKGERLCAGINRHEVENARVSRERTSDSPGPEFCAAYREVHSEA

SEQ ID NO: 361426 - protein, 471 aa, unidentified
MFIHHDRWDAAVVLRMGIDIAVRAAHQASLANEKGELLWSAHRFRTTTGDLEKLWARLPTGHTPSDVTIVMEPTRNAWVPLAAWFRRRGAHVVLVSAERSSDLLAYYAKHTKSDRLDSVLLARLPLLHPEGLHRERGLGPGDPLRRATKMHSTLVKRRTTSLARLDALLEILGPDWHGAFSADLSNKTPLQFLAAGYADPHTVRRLGRARLTRFLYRHSRGAFGEAHADQILAAARASLELWGDDLAFPDLAEDIAIEARLALTLTAEIKELDERIAILVADRDPHGIITSAPGVGAITGAVILGRLGNADRFQSLAAVRSFSGLVPSLDSSGVSGRHGGPTKRGDHLLREALFISANQARRLDPTLAAKYHRLMIDSGKHHNSALCHIATTLLTRVVACWRAQTPYQIRDIDGRTLTTDEARAIIRERYTIPDTVRRSRITTGTGRRSKESLRAPSTGPSNQHAKQPGAA

SEQ ID NO: 361427 - protein, 412 aa, unidentified
MHSRASETTIGIDTAIVADHRVAVRGATSEDFAVPPTLAGMTRLAERLAAHAPALVVAEPTGMTWLAVGHAVRAAGCDLTLVGPRHSARLRGAIAGKHKTDVADADMLAGCANVFGLTAGVLPSATQIALRRAVRRRHRMVVDAHRGECRLWALAAWAFPDVWHACGHCQPLLRALLGRWPHREQLARARVTSIAALCRRRLRHPDDAERRAERIRDMAAGWAAFWRGRLDLDALAWEATERLSDIADADARIDRATAQARRLWSAAWGRDELLCSVPGIGPTIAPVVRAYVGDATGFATGKQAAAFVGLNPSNWESGLMAAPSRPITKEGPPELRLALYQAANVARRRDPQLAVFYRRLTVERGHAHIQATLMLNTTALCMSRSRMAAATTGSPKIWPQSGSPRLVVTIVG

SEQ ID NO: 361428 - protein, 342 aa, unidentified
MEQVTTIGLDIAKSVFQVHGIDATGKVVLRRRLTRARVAPFFAKLAPCLVGIEACATSHHWGRELRKLGHDVRLMPPSYVKPYVKRQKNDTADAEAICEAVTRPTMRFVEVKSPQQQSVMVLHRTRVMLMRQRVQLSNAIRGHMAEFGVVAPVGRKGLLTLTDILHDDADARVPAEARCCLQMLTGQLRLVNAQILENDRKIIASARATDVGRRLMGIPGVGPLLASAFVATVPDPHAFRCGRNLAAWVGLVPRQNSSGGKERLGGITKQGNRYLRGMLVVGAMAVIRYAERHGTRRPWLVQLMARRTAKVAAVALANKTARMIWAIMTSGQAYREPELRAA

SEQ ID NO: 361429 - protein, 414 aa, unidentified
MEPQISFNQVVSRGCGIDVHQKVVVATIGGEGLTKATREFGTFTRSLTELKDWLLENGVTHVAMESTGIYWKPVYHVLEPTTLKVWIVNARHIKYVPGHKTDKQDSAWICKLLLAGLLKPSYIPAKEQRELRDLTRFRTKMIQDVASEKNRIVRILEDCNIKLSSVLSNTQGVVATKLIDKLCEEGTITMSDIEEVYHKRLEASKEDLYEACQGLIDKHHIYLLGLIRQDIASTEAVIKNLNGRIKEVLSGYDNVLENLKAIPGLSTKTVEDLVAEIGLDMSVFPTEKHLASWAGMCPGNNESAGKKKSGRTTHGNKQVKAVITEAAWAATRTKNTFYSARYHRVAARRGKKRALIAVGHSILKSVYHVINGMEGYKELGADYVTQRVEKRRKLYLKKELEKLGYAVQLIQPVP

SEQ ID NO: 361430 - protein, 408 aa, unidentified
MAATIGNLYAGIDTHKDMHVVAVIDHLGKLVETRSWPTNSAGYKNMWEWMGSLGAIAVLGVEGTGSYGAGVTRYLQDHGAVIKEVNRPNRQMRRQRGKTDAVDAEAAARAVLAGYATGDPKTQDGIVESIRLHRLMLVTFRKERTALINTLRNVLLTGPAGLRQQLEPLSSETLFRRCSRLRVVGNMSEPVGAARLTLRTLARHIIELGTQLGEIRARLTDLATQANPELMSAKGVGVDTASTLLVAAGDNPERLRNEASFAAFCGVSPIEASSGKNSRHRLNRGGNRQANNALWRVAMVRLQTDQRTQQYAARKRAEGKTPRHTLRCLKRFIVRDIYRILTDPQPVISTNDLRPARLALRLRMQAAADHFGVALTTISRTERGINANHEFAQQYRAWLDQQTQQNAA

SEQ ID NO: 361431 - protein, 308 aa, unidentified
MVAGTLGSLHKAGSKKMADTITVTAGIDTSKDKLDVAVHGTTTCFTVESRCAGWQQQLAAELTKAGVQRAGIEATGGYECGVTRQLQAAGFTMVVLQPLQAKAFARLHLRRAKNDRIDAALIAACAQAVDVPRIKPDARLDALTDHLTFVEQIEEDMARLKTRLEHIQDKRLRRIATTDIARLERRRANELQHIAKALRSDDDLAKCFDLVLSVPGIGDRTAITLIVRMPELGRISREEAAALAGLAPFDDDSGQHKGERHIAGWSMPVVSSRAPKEWHTQRCASACPDWASQSFCGVDAVFPQCDDK

SEQ ID NO: 361432 - protein, 364 aa, unidentified
MNATAALPIVGIDLAKSVFQLAVADANWRLVERQRLTRTQFERWFVNRGVGLVVMEACGSAHHWARWLTGLGIEVRLLPAPYVRAYVKRNKTDAADAEALLEAARCAEIVPVRVKSVDEQALQALHRTRSLWMATRTSRINALRGFCREFGIAIAQGARTGLEQIARVLAEPNSAIPELVRPTMKLLVEEIRLLEARVGQLERELTQTARASAACTTLLSIPGVGLLTATAMVAATSGNVSHFRDARHFAAWFGLTPKEHSSGGTRRIGRISKRGDRYLRMLLTHGARSVLLAAGAAVRAGRSVDGLRLWALALKARTNHNKATCALANKLARICYACLRDSSPYGQVKRLEKKITRSAYPIPA

SEQ ID NO: 361433 - protein, 404 aa, unidentified
MEHPVRKPKQRQTKPRQSKQRKPNDLSRSLAALDLDCTLIAVIEMGASSWLVAGLVPGVERQPLKKLKTDEYALLALLERWRGEAVRSGYAITRIVVAYEAGRDGFWLARWLRAQGIEAHVIHAASVAVSREHRRAKTDRLDTELLKRAFLGWLRGERDHCKMVAIPTVAEEDARRPGRERESLVGDATRIINRIKSALARLGIRTFNPTLKKAPVLLNDLRTPEGDPIPPNTLDEIKRDMERRHLICEQIRRIEQERVKRLEQAPDTGPNAMVHLLARVTGIGIETADTLVREVLTRNLRDRRAVARYGGLTGAPNQSGSFNREKGLARSGNPRVRRCMIGLAWRFVRLQKDSPPVKWFELRTANARGSRKTMIVALARKLLIALWGLVHEGVVPEGVIMRPA

SEQ ID NO: 361434 - protein, 319 aa, unidentified
MAQGERIVGIDVSKRQAEACIRSLQERLSQPSTAEGRQRMITWLGERGVALAVLEASGGYERDWAEALRQAGIAVRIVDPKRVRYFAKSAGRLAKNDPIDAEMIAWFAETFATQAAQGHDRERAAVDQLMTARAMLVRLENQIRQLGEHRQPPLVERAQRAIAKTIVAQRGKLEAAIAVRIERHAPFAARRAMIQSVPGLGPRFAAGAIAWLPELGNIGNRAAAALVGVAPYDDDSGTRRGARHIKGGRREIRNLLYMATFAATRCNPVVKAHYQQLRAKGKTFKVALVACMRKLIVILNTMLARGRSWNPPAAGAALA

SEQ ID NO: 361435 - protein, 310 aa, unidentified
MENCVGVDVSKHHFDWVLGGEGNVARVPNTPAGVRRIVAKIRGLEVALIIVESTGGYERALTEALTEADLPVALVNPWRVRRFGEGLGVLAKTDPLDARILALYGERARPTRRPLPGPRQRQMADLIRRRRQLIAMIVAEKNRLDTASVGIRRDIQALAKLLERRVAKIDGRIDAAIAADPEKAETCERLQSAPCVGPGVARALIVDLPELGALGRKQISSLVGLAPFAKDSGRKSGQRRIRAGRSGPRTALYLAAMNGARFNPVLKEMYDRLIAAGKPPKVAFIALARKLLTILNAMVRDGTTWQQAAG

SEQ ID NO: 361436 - protein, 345 aa, unidentified
MESMYYIGLDVHKKTISYCVKNTSGQVLQEGKIGATRGELDGWMKTLPQPWSVAMEATIFTGWIYDHLLPHAAQVKVAHPLMLRAIAAAKKKNDRIDAGKIADGLRCDFLPECHMAPTEIRDRRRTLRFRHLLVRQMVQMKNRVSGLLMETGVSYNKQKLHKVGYFLELLSSNEEIHSNIRPLLKLSRDAIVRLQKTEYARVSSLQRDPLLADRIKRLRTVPGVGPITALTWALEMGEVSRFPSIKQAISYCGLCGDEKSSADKVIRTPLSKQRNKHIQRVLVEAAKLAPRENHELALVYETEKQKGNANRATLAVARKMVAYLLAVDRGKRDFVPAEDHRGVAA

SEQ ID NO: 361437 - protein, 340 aa, unidentified
MTHIAMDVHRKRSVLAYQTPAVEEPKIARCYTTRAGLGKVLGALPRPWVVCVEATRQSPAVVRWLRELEVDDIQLVDPKGLKAFVRGKPKTDARDAKEMLALLQMGRLPKAYLAPPAVQEVRALTRTRGYVRRASTSLRNQVRALLNQHGLEVPARDLCGVGGRRQLAECVAQLGPLGQIAADQLSPLLLGTEQALDVLDAQVREELAHQPVARALTALPGIGPVMALALAAELGEIERFEDVAHLWSYAGLAPRAHDSDDYQAERHLPQRCNKRLRHLAVQAAQAAARSRQPSPAQRTYQRLCRRGLHPNTAKVAAARDLLKDIFYTWHQEVAPSPAAA

SEQ ID NO: 361438 - protein, 478 aa, unidentified
MQDRRLVGIDLGITSAHTVRVLAGDGGLVCRRKAVPTVESLGEVEQAALAGAAAGTRLEVVVEPTGPAWLPIAVFFAARGHTVYRVSSAKAHDLRRFLRRHAKSNGIDADTLARLPLVDPAGLHPLQLPDAARAALDRRVRACDRLTRQAADHKRRIKGLVRQLLPASPLVGELGQADLAVLERWADPHGLVAVGRARLQQVLASASAGQQGAQRAEQWLAAARAALELYGDHPAIAWQDLAAEVHSEVRLLRATQAELAAHAREREACYRRVDPAALARSLPGLATIGGPALVATMGSASRFATAAKFRSFTGLAPRASETGQTDRKGQPISKAGNRLLRTTLVRAADHARRQDPQLARIYWTQMVERGKDHLGAVCVVAAHLAERAWTVMDRATPYVICDTDATPVTPAQAKQIIAERWTVPEEVRRRRRHKKGKAPQQVLQGHVHGAQGATRRPSPSSATLGQPPSRVKPTQPQP

SEQ ID NO: 361439 - protein, 345 aa, unidentified
MEHYAGIDVSLERSSVCVVDATGRIVREAKVASEPEALVVFFHQLGVAVTRIGLEAGPLSQWLHAGLTRAGFEAVLLETRHVKAALSAMVVKTDRKDARGIAQLLRMGWYRPVHCKSPPAQEVRALLVGRKLLQGKLVDVELSIRGILRGFGLKLGEVSKGRFAARVRELIAGQAMLERVIEPMLRAREALRTEYHGLHRAVLAIVREDATCRRLMSVPGVGPLVAITFTAAVDDPARFRRSRAVGAHFGLTPKKYQSGETDVTGGDQQGRGRDGPHRALRGRKRAAHQDGQVLELEALGAGGVAAAGHAAGQGGAGAQAGNRTAPPLDRRERISLRPAGGGVIV

SEQ ID NO: 361440 - protein, 355 aa, unidentified
MSQDKYIGMDVHQASISVAVIDGGGKLSMECVLQTQAGTILEFIQGMRGSVAVTFEEGTCAAWLHDLLQPHVSRLIVCDPRKNALLKDGSKSDRIDARKLAELLRGHQLSPVYHADHGLRTLKEFSRSYLTLTQDLTRVMTRIKALYRGWAIPCSGTRVYPAHHRSEWLAKIPQAGVRRRAERLYQQLDLLRPLHQQARCELVGESRRHPAVKWLRQIPCIGPIRAALLVALLQTPHRFRTKRQLWAYSGFAVETHDSGEYRSVGGKLLRNRERIRVRGLNDNYNRDLKNLFKSTAISASARPGPLRDFYLALLAKGMRPSMARLSLARKIAAITLTVWKKGADFDAKQLTRQVA

SEQ ID NO: 361441 - protein, 352 aa, unidentified
MRTSQKTAGIITTIGIDLGKNTFHLVGFDQRGVIILQQKVSRAQLERRLANIPRCLIGMEACSGSHHIGRQLAALGHDVRLIPAQYVKPFLKGHKNDYRDAEAIAEAVQRPTMHFVAIKTPEQMDLLALHRVRSRLVSQRTGVTNQIRGFLIERGITVRQGVAPLRKALPDILSSQTGPLSPRMVSLIVDLVQDWRRLDERIAAVSAEIEALAQQDDSCQRLMTVPGIGPIVSSAVVAAIGNGAGFQQGRDFGAWLGLVPKQESTGDRTILGKISKRGNKYLRTLFVQAAHVVLERRPRAAMRGLWPWIEQASKRLHRNMLAIALANKLARIAWAVLARGRAYQPRIAANAA

SEQ ID NO: 361442 - protein, 468 aa, unidentified
MKNYYLGIDVSKGYSDFVLLNEKKQTVLGSFQLDDTFEGHNKLFKILSEFFTQQPDTKIFAAVESTGGYENNWYHLLHKYQGQLNLSVARLNPYGVTYNSKADLKRIKTDAISAASIAEYLISHPEKVSYQAEDYYAPLRRQWTFIKMLTKQRVQLLNQLESLLYVANTEILYHCRNKVNLWTLKLLKQYPTAKHLAKARVSTISKIPYLTEALAKELIEKAKHSVASETDETIAEIITATVNQILSLRKTICLQVKKLQRSCPLPEIALLKSFSGIADYSAVGLLIEIGSVERFSSVKKLACFFGVHPVFSQSGDKISGYRMSKRGRKEPRQILFNVARFAIVHNPLLNEIYIDHLKKGMSKMAAIGAIMHKILRIVYGILKNNTPFNPEIDRANRLRNLNKKKEESLVINKMLEPIDCKAPVSRRQLKKRKEQEKSQNLKPLNAEQIVSVFAGSDSRSFPFASTQT

SEQ ID NO: 361443 - protein, 376 aa, unidentified
MNQDSTLYVGLDVHKDSITVAYAMGLDEVELLGKTGTTQVEVDRLCKRLQSKARHVHVVYEAGPCGYGLHRRLVGKGFDCMVCAPSLIPRKPGDRVKTDRRDAFKLVRSLRAGDLSAVHVPSVEDEAFRDLARAWSSARDDLKQARQRLKSFLLSHGVQYSGRANWGPAHRRWLSTLSFDSAWQQLAFNEHRRTIEDRLAQCDRLEAALHEAVVCWRFYPVVLALQAMRGIQFTSAVGLVSELGDLSRFEHPRQLMAWLGVTPSEHSSGSKRRQGSITKAGNSYARKLLVESAWSYQHPARVSKDIQSRQEGIPKPIADRAWDAQLRLCGRYRRLVARGKSRQVAIIAVTRELAAFIWDIGRMGMTLAVPQSEQPA

SEQ ID NO: 361444 - protein, 422 aa, unidentified
MLEQTQDEQEIISRVAALDIGKAELVCCVRVPDPKGGSRRVQEVKTYSTMTRSLQTMADRLMDLGVTRVVMEATSDYWRPPFYLLEAHGFQVWLVNARDVKNLPGRPKTDRLDAVWLCKVAERQMLRPSFVPPVPIRRLRDLTRYRIALVSDRNTEKNRVEKLLEDAQIKLSVVASDIFGVSGREMMAALIAGERNPQVLAQMARSRMRVKIPQLQEAFVGYFTDHHRFLLTKMLARIDQASADIADLDTQIEAQIAPFAGAVARLDEIPGVGATAAAVIIAEVGVDMTRFPTPAHLSSWARFAPGVKESAGRKKGTGSTGHGDRYLARILGEAAVSAAKTDTFLGERYRRIARRRGKKKAIVAVGRSILVIVWHLLSDPETRYHDLGSGYYDSRINPERKKRNHIRELEALGYKVTLAPAA

SEQ ID NO: 361445 - protein, 415 aa, unidentified
MYYVGIDVAKSFHVVSVIDENEVKIISKPFRMNNSSDGFIKLLTALNSISLEKCQFLIGLEATGIYGENLLEYLNSNGYSVKLLNPFQTSRYREQTTMKKVKNDNIDSLVIALFLKDGKFSSGYVTDDEYQSLRTLYRNRASIQADMKEVKKRILTQITVTFPEFEGFMNPFTISGLALLDKYPTAHHYRHSSVDRIMKLFRHIQGNNFNSEKALKLLSLAKDSIYSGKAKEARAIAIKSSIRLLQTYQIELEILETEIGSLLDSKGLSITVDDAGDEIEKKNTLINNLKTIPGVSEKTIAAVLSECGDLTRFPTIPKFIGYLGLFPTENSSGNTKRTGHLSKRGSSLAKYALYMSATSCLIHNKQLKQLYDTKRSQGKSKKEGLVAVSRKLATIIYSIFKYNTPYDTSRVFAKS

SEQ ID NO: 361446 - protein, 406 aa, unidentified
MDLAPLHKRVIGLDVHQAQITACAIIEEADGTTRLEQRQFGAFKRDRRALAEWAQTLRPDQVVMESTGIYWKSPYAALEAVGLRAWVVNARHVKNVPGRKTDVGDAHWLATLARAGLLRGSFVPPAALRELRLIARQRQKLVGHLASEKNRLHKVLTDGGIRLGVVVSDVHGQSARAMVKAIIDDRPVHEVLDHASRRLKASREELFDALQGELTASHRFVLHELMLHIEEIEARIARFDARLLDGLAAERNSLALLQTLPGVDLIGAAMLLVEIGADMSAFGSADRLASWVGICPGNNESAGKRKSGRVRKGNLYVRRLLCEFAHAASRTTSVFKSKFQALVIRRGHKRSIVAIAHKLLRTMFFMLKRREHYRDSATDYEALAVQRNAPRWIKALTRFGFIPAVA

SEQ ID NO: 361447 - protein, 345 aa, unidentified
MSMVGGLDIHRRQLTFDYLDTASGQVARGQVAPADREHLRGWLARFAGRGDVAFAMEGCTGWRYVAGELAAAGIAAHVAEPADTAFARGRKRHAKTDRTDARHLRQLLAGGRLPECQLPPARILECRALLETYHDLRREHTAWVQRIHAVFFHQGGPHLAEGALRTGEGLAAVRAAAAAHLSPAGQVQVATALEMTAVLEDRLHMLRHRLLDAARHLTGAKVLAARLYGAGPVTALALTCWLGGKDRFSSSRKAVRFAGLDITGCSSDGKRSPGRLSRQGPPVLRWAACEAGKARARSSAPDHACYAAVKDRKNSKRAALSEARKIIRQACHILAELGDDALTAA

SEQ ID NO: 361448 - protein, 343 aa, unidentified
MNVTTIGFDIAKGVIQIHGVDAVGSVTLRKRMSRAGALKFFSGLKPCLVGMEACGGAHFWARELTAFGHTVRLISPIYVKPYVKRSKTDAADAAAICEAMSRPHMRFVPIKSREDQALAQAYKTRGLLVAQRTALVNALRAHLTEFGIVAPLGPTGAARLIGLVRTDVEPLPELARRTLRELADMIEATQARIAAFDAQLKELAATDEASRRLMKVPGVGPVAAGTLRALAGDVTRFRTGRDFAAWLGLTPRQNSSGDKVRLGAISKAGNRELRTLLVMGQLAVLRYALANPAKASPWLAGMIKRRPPLVVAVAMAAKTARVIWAMLARGESYRPLRASTAAV

SEQ ID NO: 361449 - protein, 455 aa, unidentified
MPRKTTDDRPELKAVNVGAAAIDIGSKMHMAAVNPACTDVPVRTFGTFTEDLHDLADWFKACGVTSVAMESTGVYWIPVYEILEQRGFEVILVNARYAKNVPGRKSDVSDAAWLRQLHSYGLLRGSFRPDAEIATLRAYLRQRERLVEYAAAHIQHMQKALMEMNLQLHHVVSDITGATGMRIIRAIVAGERNPDVLATYRDVRCHSSIETIRAALVGNNRHEHVFALTQSLELYDVYQAKMLDCDRKLEALIAALNNKGVKSVGKLSKPRIKTKQVNTPTFDVRAALYGVLGVDLTEIHGLGPSLALKLIGECGTDLRAWPSAKHFTSWLCLAPGNKVSGGKVLSSRTRRSSSRAAALLRLAATTVGRSDTALGAFYRRLSSRAGKSKAVTATARKIAVLFYNTLRHGMSYRDPGADQYEQQYRSRVLANLRRRAKSLGFVLQAIPGDANPAVS

SEQ ID NO: 361450 - protein, 343 aa, unidentified
MAQYIGLDVSLKDTSISVRQDGKRVWRGKCASDPKLLAEVIRKRAPNAERVVFETGPLSVWFYHALTAEGLPAICIDARHAKAALDMAANKTDANDADGLAHLAEVGFYREVRVKGFDSMLMRTLITARRQLLKMRVQMSNQVRGLMKTFGLVLPKGAGSVFERNVVTLLDGEDDLARIILPLLQAWRDIRLRAAELTTQLVRMAGSDQRCRLLTSVPGVGTVTATAFAAAVEDSINFKNSRAVGAWVGLTPKRYQSGEVDFEGHISRRGDAKLRSLLYEAASVILNRLSDTSTLRTWALALKERVGFKRAAVALARKLAVIMHAMLKTGELFDPKAGVALPA

SEQ ID NO: 361451 - protein, 407 aa, unidentified
MELPAIFQCVVGLDVHQAKISACAMIEQADGTLTVEHREFGAFKRDRRALAEWVRTLDPDLVVMESTGIYWKSPYAALEQVGIAAWVVNARHVKNVPGRKTDVADAQWLATLARAGLLRASFIPPADIRYLRLIARQRQKLGGMLAAEKNRLHKLLADAGIRLNVLVSDIHGQAGRAMVKALIEGQPIPEILDLAGRLRASREELFEALQPEELSDAHRFVLSEIMAHIEELEARMGRFEQTMLAGLTAWEPQLVLLQTLPGVDRIGAAMLLVEIGTDMASFGRAEKLASWVGICPGNNESAGKRKSGKTRKGNAWVRRLLCEFAQAASRSRCGLKEKFKALSIRKGHKKAIVALAHKMLRIIFAMLKNHTHYQDQAVDYEALLVQRNAPRWIKMLVRHGFIIPASA

SEQ ID NO: 361452 - protein, 413 aa, unidentified
MEWTALVGLDWGGKSHAYVVVGADGSRTSGEMESSPEAVHGWMRRTRERYPAGTIVVALEQGRGSLIYALAQYDYVAIVPINPRASKSYRDSLRLSGASTDPSDAALIGEFAHKHLSSLRVWHPDDAVTRRVRTLAADRRSLVDQRTANTHALAETLKMFFPQALQWFGGETSCVLRAFLRKWPTLDDLGRATLEQITTELRANRCRGVKVRAKTLHDQIREAVPLTRDLTTSSTCSMHARAQIAIVDVLDEQIKSYELAIAAAWKEHPDREIFDSLPGAGPVLAPRLAAAFGTDRSRYHEAFELQCYSGIAPVVEQSGKTRLVHARWGYPTFLHQTFHEFAQASIPHSPWAKAVYDEQRSHGAGHHEAIRSLAFRWIRILFRLWQNEETYDEQTHLDRLRSKDSPIARRIAA

SEQ ID NO: 361453 - protein, 368 aa, unidentified
MKDFTKYVGLDVSKDKIAVAIAEDGREAPRYWGMIAHTPEAVRKLMKQLGDFHSLQVCYEAGATGYELYRLFIRLGIDCIVVAPSLIPQRPGDRVKTDRRDALRLAQLLRAGELVSIYVPTEEDEALRDLVRAREDAKEDQLRARHRLTKFLLRHDLRAPVGVRKWTVRYREWLDRLIFSQNSSRTVFREYLHHLDEIEQRLKRLHEEIHAQATESVHAPMIQALQSLRGVAEITATSLVAEIGSFARFAHPRQLMSYAGLVPSESSSGDLRRQGSITKTGNTHLRRILVEAAWSYRYQPALKGEIRKRQEGQTKEVQAIAWKAQNRLHKKYCRLMAKGKPGGKAVTAVARELLGFIWAITRQMEQAS

SEQ ID NO: 361454 - protein, 361 aa, unidentified
MLTQRTSVGLDVHARSVFGYGLDGVTGEVFKRRLCPDPAEVAGWIGSLPQPVAVAYEAGPTGYGLYRYLTAQQICCQVAAPSKLQRPPGNRVKNDEQDAFQLARLIRLGDIVEVSVPSVTQEAARDLVRAREAARADLVRARHRLSKLLLRHGLVYSGGTTWGGEHDRWLRAQRARFELSGARAAFDTSYEQVGFVTARRDRLDTEIAKLAAVSEYLPVMRRLECLRGISTLTSFGLAVEIGDWHRFTGYTIGAYLGLVPAESSSGESRSLGSITKAGNQHARRLLIEAAWHHNRPYRPSRPLQRRWAAASPDARVRGHQANQRLRHRWEVFNQNKKKSPIACVAVARELAGWCWSLATLE

SEQ ID NO: 361455 - protein, 400 aa, unidentified
MAVMIGVDPHKGSHTAVAIGPAGEPLGRRQVRACPDQARRLLAWAAVWPQRTWAVEGATGLGRLLAAAGERALDIQPKLGARVRLLEAGDVNKNDPNDARSVAVAALRSRVWRQVAADGHAAVLKILAKRHRDLARSRHQVACRLHAVLCELVPGGFAGEITAGLAARLLDQLTPDGAVAAARCDLAADLLADLRRLDGQRRQCAKKLAAAVRACGTSLTGLFGVGPVIAGQVIGDVADVTRFPGRSHFAACNGTAPVEVSSGGRKACRPSLRGNRRLNHAIPMAAITQIRHTHSDGRACYERKIAAGKTHKEALRCLKRRISDAIYARLRADARQAAAAAKDPGGQPGNDSDSSAAGSHPEHRLFGQATPGPETSLRAAAALTAAKPPSGPAKKIRRAT

SEQ ID NO: 361456 - protein, 367 aa, unidentified
MQNTIVHNEGAASLEVAGTKVKLSRSIIKIGLDVHARIFVAVAQYDHLLPKSARRLAPSQFVPWVEQLLAAGHAVHVVYEACGFGFGLFRQLQAAGARCYVIAPGKLDEQYTRVKTDPRDATTLCQRLSRYLDGNTGELAVIRVPSEAEEQARHVSRQREQLVQLRQKLEAQGRSLLVNHGLPSPAHWWKNQTWSRLSKLLPGWMVIRLEVHRPALLTLQEQIDALSSQLEAAAPANVPVGIGKLTTVAMTREICSWERFKNRRAISSYTGLCPGEYSSGSKRIPGSVTKHGNPRLRAALVECAWRMVRFQPDYPPVKKRLAVLCQGARATGAQRKKAIVAVARHLAVDLWRLHTGRNTAQQLGLTI

SEQ ID NO: 361457 - protein, 340 aa, unidentified
MENYIGVDLGKQSSYFVIKNHQGRLLVQMKVFDDRASIQKALMPHTQNTASKAVLEATCNYYWMYHELARLGVEVILAHPLKTRAIADAKVKNDRLDATMLCDLLRADLIPQSYIPTDRIRNLRELTRQHVRLVQIRTKIKNQFHALLTRLNLRPTEQMSDTFGKKGRDWLRQTVMPDAFDFQKQQLIDQLEYYNRLVYQIDQKIRQSLTNYPEAKALMQIPGIGPLGAAMLIAEIGEIERFQFAKQLVGYAGIAPGLYESGKTSHQRGITHEGNRFLRWILCEICQHHIRKPGQLRDFYLRLKDKKGHGKAIIATARKFLIQIFYVLKEQRQFCPIFAG

SEQ ID NO: 361458 - protein, 348 aa, unidentified
MDYYTGIDVSLECSSVCVVDANGKIVREDKVASEPEALIAWFGSLGYGLTRIGLEAGPLSQWLYGGMTKAGLAVELLETRHVRDAFKAMPVKSDRNDARGIAQLMRLGWFRPVHCKSAGAQETRAILTARKLVQSKLRDIENSLRGILRGFGLKVGKTTERRFAGRIRELVAGHPNLETIAQALLAVHAVLLREFNAFEKRVLSMARADAKASLLMSTPAVGPIVALTYASAVDDPGRFKSSKQAGAHFGLTPKKYQSGETDYTGRISKIGDAAVREALYLAAHVMLTKPLKGCSELKGWAMRIARRAGHNKAKVALARKLAVIMHRMLADGTRFNPTTKAKTMAAAA

SEQ ID NO: 361459 - protein, 353 aa, unidentified
MKYVGLDWAYRVAQWCAFSPGGEIAGEGRIAADRDGLARLVLELGDEVKACLEMMSGALWVRDELVACGWQVEVADARKVKTVAPLAAKTDKVDARLLAELSRRELVPALWLPSLDERALRERLRRRMHLVRLRTSAKGRIFGLQTQWGIRISLRRLRRADGITLLERAGMPAVWRRSISECLVLIDFLDKRIAPLDAELRPFAKADPRAVLLDTIPGVAELLALTIAVEVGEISRFAGPEKLVSYGRLAPRVHQSGDGRPHTGPLSKSGSRLLGWAAVEAAQQAWRESNPWHQLYLDVAGRSHNHNSAKAAVARKILIAAWHMLSRNEPFKPAPRSTADTSVPASSRFALAA

SEQ ID NO: 361460 - protein, 340 aa, unidentified
MGQYIGVDLHQKNTYITRVNDRGKVLEQVNLKSDPEILRSFFGKQPESSQVVVEASGHWYHFYELIEDRFPDLVLAHPLRTKAIASAKIKTDKIDSGVLAQLLRTDMVSRSYVPTREVRDLREVLRYRASLVRFRIQVKNRMTSVMTKAGLKAPTQDKFGVKSFRYLSDVDVRSCYRLELDGYIRTIRELGKEIEKSNVVIRDLAENSEEAKLLMTMPGMGAFSSLLVLSEIGDIKRFPDAEHLASYGGLVPCTWASGGKTRRGPITKQGSKWIRWILIEISLHAIRKTRRFGKLYMRVRKKHGHNAGRTAVARAMLKSVFHMLSKKEAFRDSLASSDGV

SEQ ID NO: 361461 - protein, 328 aa, unidentified
MLDTTTFVGLDVHARSIKAVSLDVMTGEVRCATFGYDAGAVAEWVRSVDPRARCVYESGVTGFDLQKRLSGLGVDCVVGAVSKMIKPSADRGRKNDRNDAEFLARMLSVGNVVEVWVPDDECEAARDLTRALEDARDDLSRSKQRLSKFLLRHGLVFDERTPTGRRKGNWTRAHWSWIESIRFAEGADNDALAYYVDAVRRAAEEKARLEGLVEAEARKPRWRKRVDSLRCLKGVDTASAADLVFEAGEFSRFRNARSFAAWVGLTPSEHSSGESDRRGAITKAGNKHLRKTLVEAAWHYLTCSGRPKDLAKGQAPDPAARRHAAKGC

SEQ ID NO: 361462 - protein, 362 aa, unidentified
MNYVGVDIHKKYSVLCAVDERGRKLREARVEGNAPFGFAQFFSGLGGPSKAVVEACWNWGLIHDELEELEGIEEVVLAHPYKTRLIADAQIKTDRLDAYALSTLLRGNLVARAHVPRRETRMRKNLLRQRLYWARLRTMLRNRIHALLDRQRDLELPQCSDIFGMRGLSFLRRLELPETDAALLREQLALHDLIAQQMKAQEKRIGLEFGSEAMHQQLLSVPGIGPTLAAVIACEVDSIERFSSAEKLCAYAGVVPTTHSSGGKTSHGQLLPFCNKWLRWALIEASWVAIGCSPYFGALYKQHRARGKKANSAVLIVARRMCRIIWQLLHEKRDFEKRPLRPNFNFPGCSVVRLTAATAARP

SEQ ID NO: 361463 - protein, 338 aa, unidentified
MDHYVGIDLHSTNSYIVIIDNDNKRVFKKKTKNDLRLVVEALKPYQEQIKGVVVESTYNWYWLVDGLIEEGYTIHLANPSAIKQYEGLKHSDDVTDAFHLADLLRLGILRTGYIYPKEERPVRDLLRKRLQLVQQRTLQILSFQNLVARNLGKSMNGNAVKKLSEDDVEHLFHDKRLVVSGKASISTILFLTEKIKQLEKTIHKVAKLKDEYTLLMTVPGIQKILALTIMYETGPIERFRKVGNYASYCRCVGSKRISNAKVKGKGNRRNGNKHLSRAYVEAAHHAMWHYEYVQRYYQKKMVKTNTLVARKTIAHKLARACYYIIRDQTVFDPKRVFV

SEQ ID NO: 361464 - protein, 392 aa, unidentified
MTVVVGIDVAKDKHDCFILNSEGVVLEDVFTIPNTLEGFTRLLSKIQSHTTPRDKIKVGLEATGHYSYNLLGFLLNNGLPTYVLNPLQTNLYRKSLTLRKTKTDRVDARMIASMLLSDVGLKPYTDTAYHNEELKSLTRYRFDKVKERAKLKSSVARLVNILFPELEKLVSSLHIAVVYALLSNYPGASYIANANTEELAETLCTASKGRYTKSKTAEIQVAAGVSIGSKMPAKSMELKHTIALIRELDKEISEVESAIDKITSQMDSPIFTIPGIGRHMGAMILAEVGDFSNFASADKLLAYAGLSPSTYQSGQLQNCYAHMEKRGSRYLRYALFNAAKYVCLWCPTFSAYLEKKRSEGKHYNVAISHAAKKLVRLIFAMQRSGKAFLADY

SEQ ID NO: 361465 - protein, 352 aa, unidentified
MKQFIGCDAHKRYSVLVAGGEDGHCGPERKVLHTGRTFEAFLEELPEGSEIALEACSSYSWMVAGMERTRHHPHWAHPLEAQRRMGKSHKTDKLDAGGLGILLRNGTLPEIWIPPAALRDQRERLRLRMQLAQQRTRWKNRIHGALIRYHLHVEASDIFGVRGRERMGEPWGALPPHTRQSVEQQLAVLDFVTRQIADCEQRLAGLLEPSEEVRLLRTLACVGPILSAVLWLEIGAVERFPDAPNLASYAGLVPRVRASGGHTRWGPVCRDVNHHLKWAFVEAANLVAVNQRRLGPCHGLRLYQRLKKRKNHQKAVVAVARHLAEAAYWILKKREVYREPEAPRWEVSSTHG

SEQ ID NO: 361466 - protein, 364 aa, unidentified
MDDVSTEQTKKMTVGLDLGDKYSYLCVLDTESGALVEEGRLRTTPDDLHRRFDSAEQMKIAIEVGTHSSWISRLLEECGHEVLIANPRKTRLIYGDKRKTDKLDAQKLARLARVDPELLYPIEHRGKDSQTHLALIHSRDALIRSRTQLINHIRGTVKSFGARLPKCSAESFHKKVAGQLPHELAEALEDVVATIASLTEKIRGYDRRIEQLCKERYPQETKLLRQVPGVGALTSLTFVLTLEDPRRFEKSRSVGAYLGLVPGKDQSGESDPGKRISGEGDEMLRRLLVGSAHYILGPFAPDSDLRGHGQKIASRGGKNAKKRAVVAVARKLAVVLHRLWVTGECYEPLHNARLSGALGEEEAA

SEQ ID NO: 361467 - protein, 485 aa, unidentified
MKDKSIFTRQNQTLINLFRDAQHPEKVLCVPIDYAKQTHMALFCDGSERQLKKPFPVKNNPEGIAFLLDAVEKICRKHHIRREHVFFGGEDCGTFADNFIYALRKEGFTVMGVNAADAAKQRENLQASTDKLDLLGIAKMLLGKRGSIAGGQIGKERALRSLTRHRDSQVRMRTATGNRIHKIVDQLFPGFLDEKHSGIPPFSEASLYTMQDRFSPVQIAKRQDKALLRQLKVHGLQHAETALGKLKAYARQVLGHPPELVGMLQTSLAGEVNLYRCLGINIEQINREIAQQLAQTPGAMLTTIRGTGITLAAGVAAETGPPETQPSIRRLCSYSGIVPRVKQTGGPEKGARTGSVSRRCNHILKNFIVQCGNHLGQHGPADLKEDHRRRGANGQHADFGMARRYLRMGMRLMRNGEAYVPPELREGATLEELQTYYLELWPKLLDKWVKAKAADTAFHKDNPLGQWRERIEAIYEIELPLPKKK

SEQ ID NO: 361468 - protein, 336 aa, unidentified
MSHNSIIYIGIDVHERESQVAVLEKSGKLLLEDRVPTGELEEFISSIEGKKHIAIESVGFIHPIYERLSSIDRCKVYVANSNKLNLISQSSTKNDRNDARILGDLLRMNYLPLAHIRDKETREKLYVVNDRVAYGLRRGELRTTIRWLLKRRGIDIEGRPFSDEWKDKVKELHIREIDLRLKELEFVESTIEELDRQIKSIVADDHRARLLDTIPGVAPYTALFLACILDDIDRFPDSKHACAYLGLVPWLDDSADTEHLGHITKKGNKWLRRNLVECARIAVRKDPHIREFYERVKHRRGEKKAIIAVARKLVSYAYWMLKRNITYEELHPWLLA

SEQ ID NO: 361469 - protein, 453 aa, unidentified
MKKDKKKEQKVVEMDAFEQINHNAAGIDVGAEEFYVAVPKGRDTQSVRTFPTFTADIHRLADWLAQCGVKTVAIESTGVYWIPLYEILEKRGFEVYLVNARHLKNVTGRKTDVLDCQWLQQLHTYGLLRASFRPSEQICALRSLVRHRDMLVAYRSAHIQHMQKALNLMNVRLTNVLSDITGVTGMKIMRAIVSGERNRKTLAGYRDAKCAKSEEEIEKSLEGNYKAEHLFVLKQALELFDFYDQQIQRCDQELETLYHEFEEPDQPGTPAPEKRKRKRRKNQPHFDLSESLYRMTGGIDLTKIEGLDALTVQEVLSETGTDMNKWPTVKHFASWLCLAPNNKITGVKVKSSHTPHTKNRASTAFRLAAQSLMKSKSALGAYCRRMAALHDAPTAITATAHKLAKIFYFMLKRREAYRPLAADYYEKEHRDKVVRSLQRRAASLGFRLETVTS

SEQ ID NO: 361470 - protein, 464 aa, unidentified
MTKRTKGSAKKPAATTTSSLPTVHAMVAGIDVGSSQHWVCGPARDADGKPAIRSFGTTTVDLEALADWLAAQGATSAAMESTSVYWIPLYELLEARGIEPVLVNARQLHNVPGRKTDVSDCQWLQLLHSHGLLRGSFRPSEAISRLRAFHRQMANLVAERSRCVQWMQKFLDQMNVQVHRAVTDLTGKTGMAIVRAIVAGERDPARLAAHRDGRCRKSPDEIAKYLTGHWREDHLFNLASTLQIYDVLEGQIAAYDARLVRELEALQPPERRDQEVPRHPNKGKETAIKARGDQASRLALWRFSGVDLTRIDGISAGTAQVVLTEVGASVASFPSEDHFVSWLRLCPRTPISGGKPLKKRRNGLGANRIAGALRMAATALQRSKTALGAAFRRIARHKGGAVAVFATARKLAQLIYRMLRYGQDYVDIGEKAYEARFEARRLASLKEAARGLGYTLTPEPLAAG

SEQ ID NO: 361471 - protein, 485 aa, unidentified
MAKRRMSTFERLESGRLNRKQRRELGRRVAVADPGLTIVHANAGGIDVGNESHYVAVPPDRDPNPVREFGCWTAALNQIAEWLQSCRIDTVAMQATGVYWIALYDVLEQHGIQVVLANAQHTKNVPGRKTDVQECQWLMKLHTYGLLRDSFRLAQEMESVRTIWRLRDRHVKEAGRAVQHMQKALTKMNIQLANVISDINGLSGQEIIAAILQGERDPWKLADLKHYRVRASREEVARSLEGNWREDVLFELQQAVDSYHFAHRQMQECDRKLEGYLASLPARMLDIPVQPEDTQATTPKKKTKKAKRPRGNQPHLDLKTELKRICGVDLTSIDGIDVMTALTIVSEIGTDVSRFQDETHFASWLGLTPAKDITGGKTIGRGKRKVKNRVAVALRTAATTLLKSDSYLGARYRSLRRKLPSFASAVKAMGRYLAILIHRLLTKGEAWVDRGATQFERRHTEQELASLSFKARAKGFKLIPITEAS

SEQ ID NO: 361472 - protein, 354 aa, unidentified
MYYAGIDLHRNDVVIAIEDQQGVGGKPRRFPSREPGAIVGYLAAHRPFQAVVEASCGYRWLYDLLTPLGTVVLAHPRRLRAIVDGRAKTDKLDAALLARLLRADLIPRAYVPPVAYAQLRDLTRARARLVRHEVEAKNELHALLARRNIHPPFKTPFGKRWTKWVAQTPLGVVEQAVRAELLRRLEHYAAERERLDQVLAELAPSFPEVEALLCLRGVGLYTALLLVAEIGEPQRFADGRQVAAYAGLTARVNQSGGHCYHGHITRQGSSWLRWALVQVAMKILPGDPALQAFYTRLRKRSSAKIARVAVARKLAAICWLRLMRWHYAAGIEEREFVSCAVMGGSGPVLGTGGR

SEQ ID NO: 361473 - protein, 339 aa, unidentified
MKVTTVGLDLAKNVFQVHGVTHEGHVVFNKPLRRAQLLAFFERLDPCLIGMEACSASHHWARELSKFGHEVRLIPPIYVKPYVKRGKSDAVDAEAICEAVTRPTMRFVQVKSVEQQAMLSLHRTRELVVRQRTQLVNMLRGLLAEFGITLPQGLEKATGFAREVLDGSAPDIPEIGQDVIRVLCRQLLSTDYLVRWHDLRLQAVARADHRMKLLQTIPGVGPVTASAIVATIGSGRQFRNGREFAAWLGLTPRNNSSGGKERLGRITKMGDQYLRKLLVVGMTSRAIQVKVRPDKGDPWLRQLLERKPFRLATIAMANKTARIIWAVLTREEAWTPRPA

SEQ ID NO: 361474 - protein, 401 aa, unidentified
MTGTEPQESIQVFVGVDVGKGTHHAVALDQTGKRLLDSALPNDEAKLRALITKLKEHGRVLLVVDQPATIGALPVAVARAEGVAVAYLPGLAMRRIADLHAGEAKTDARDAYIIAEAARSMPHTLRSLKLADNEVAELTMLCGFDDDLAGQITQTSNRMRGLLTQIHPALERVVGPHLDHPAILDLIERHPSPAQLASLSEKQLANRLLRLAPRMGKRWAAEIVQALSEQTVVVLGTQAATVVLPRLAQQLAALRRQRDEVAKEVERLVLAHPLHPVLTSMPGVGVRTAARLLIDVASRAFASAAHLAAYAGLAPVTRRSGSSIRGEHPSRRGNKQLKRAMFLSAFAALRDPISRAYYARKIGQGKRHNQALIALARRRCDVLFAMLRDGTLYSPPANEIY

SEQ ID NO: 361475 - protein, 343 aa, unidentified
MQTITTIGLDIAKSVFQVHGVDAAGQVVIRRQLKRRHVLMFFQKLAPCLIGIEACASSHYWSRELNALGHTVRLMPPAYVKPYVKRQKNDAADAEAICEAVTRANMRFVPTKTPEQQSCLMLHRTRHLFIRQQTAVINVIRAHLAEFGIVAPVGRKGVEELLDVVADPSDKRVPEIARACLFALGAQLRRLKEQILEFDRQIMAWHRSNETSLRLDAIPGVGPMLATALVACVADPKAFRSGRNFSAWIGLVPKQHSSGGKDRLGSISKQGDRYLRSLFMAGALAVIRYAKIHGTKHRPWLTALLARRPTKVAAIALANKIARMAWAMMARGERYKQPLALAA

SEQ ID NO: 361476 - protein, 406 aa, unidentified
MKQIVSVGIDVSKGKSTVCAMIHPNTIIKESFEVLHTVEEMSMLADYIGSLDGEIRIVMESTGHYHLPVAQFLYQKGFFVCVENAYIIRQFSRIMLHGAKTDPLDAKKLAKYGLAYWSELKPYKFHPSCYTELSLLSKQYQTYIKLLIAAKQNVIHLMDEMLPGFKEALDTASSVQFSKVKYVDFAKEFYHVDMIKSMGKEIFRENYKQWCKEKGYRFQSEKADELFHLAEDGIPTLPTEFPSTRLCMEVATEQVSQLGYALEQILSQMQNLAKTLPEYQTIRQMGGMGEKLCVRFIADIGDVRRFHNGKALVAYAGIDAPPYQSGQYTGTKRRISKRGNSALRKTGYEVMKSLKSHPPKTDTRVYDFIIKKENEEKSRKQAKIAGLNKFLQIYYARVMEIYKNIV

SEQ ID NO: 361477 - protein, 325 aa, unidentified
MKKHSTKSTVRGPLSAGVDVGKYKLHLGFSDGPQVREFSNDEAGFTAIEAELKRRGVTHVGMESTASYSASLAEALREAGFDVTVFQPKQVKAFAQFKLKRAKSDNIDPPIIAQCTAHSEAQPAPDVRLAAFCELLTFCDQLDEDARRTKTRLEQARNPEIRQLLSEEIKRLSLLRRGRIKALVEAVRQHPDLARRMDLIRSIDGIGEIGALTLVLRMPELGSVSREEAAALLGVAPFVRESGRFKGERHIAGGRARARRTLFAAAQAACQRWNKALIALYQRLTAKGMHHTSAVIACTRKLVIYANTVLARQKPWTKNLENQPV

SEQ ID NO: 361478 - protein, 340 aa, unidentified
MKLCGAMDLHSNNNVTVLSNEKDEVVYRKRLPNDLKLILGQLAPYQSEIEGIVVESTYNWYWLVDGLMEQGYRVHLANTAAIQQYNGLKYTDDDSDARWLAHLLRLGVLPEGYIYPREQRPVRDLLRKRGQLVRQRTANLLSIQNLFTRNTGSSLSGNEIKGLQVEDIDGMVPANDLALAIKANLAVMQSADEQVEVLEQTVRERIKLRAEFRLLKTVPGIGQILALTIMLETGDIRRFPNVGNFASYCRCVGSQKISNGKKKGKGNTKNGNKYLSWAFVEAANFAIRFSPKIKSFYQRKKSKTKGIVALKAVAHKLCRACYYIMRDRVAFDVTKAFGQN

SEQ ID NO: 361479 - protein, 408 aa, unidentified
MRIIGLDIHRAFAEAVAWEDGKLRRLRRVDMRRDRLDAGAATLSKGDVVVVEATGNAAAVAAVIAPHVTRVVIANPKQVRIIAHAKIKTDTIDAGVLAQLYASGFLPEVWIADEATQALRRQVTRRNQIVRQRSRLKNIIQSILHAHLIPSCPHQDLCGPRGRAWLSEQVVPEDERLAVERHLREFDRLGEDLKVIERDLARSALADESITRLMTIPGIDRVVALALKAAIGDIQRFERSQKLVSYLGLNPSVRQSGPGPAYHGRITKQGRGHARGMLVEAAWAAARAPGPLRAFFLRVRARRGQHVAAVATARKLAVLIWHVLRKGESYLWARPALHAKKVRDLELKAGHAPSRGQKGAAHAYNLRSHREHERRWVEQAETAYARFVAGWNPRGPKARTGAAKEGRR

SEQ ID NO: 361480 - protein, 384 aa, unidentified
MKVVCGLDVHKDSVFCCILCANGEKIQHKFGVLTEELVTLRDLMVSEGVEECAMESTSIYWIPIWRVLEGSVKLHLVNPYFIKQLPGKKSDVNDAEWIATCLSKELIASSFVPDDKIQRLRQYDRRIFDLNVSISRNLVKLDQCIQRCNIRISNYISTTDSKGYRSIVKLISQGVTDAEVLVKELHGRTINRHGRETLVKALTGVVSETDIDIIKQLVEEIELQQRHKDEAQEKMTALCMEWFPQEVENLQTIPGVKERSATSIIAEIGTDMTHFQTPKKLVSWVGLRPRNEESAGKIKARGITHGNRFVRKTMIECSWGAARMKDSFFAEFSYRQCIERRKNKMKVQVAIARKILVAVWYVLSQGTQYIKPTDHYTATDMTAV

SEQ ID NO: 361481 - protein, 359 aa, unidentified
MKKVSTVTAAQQKLTIGLDLGDRNCWYCVVDEAGQIQLEQRVRTNAKALREVFGALPRRRIALEIGTHSPWISRLLSELGHEVIVANARKVRLIGESRKKDDRRDAQTLARRARIDPELLYPVRHRSVQAQADLRLIRARAGLVRARTALVNTARGLAKSYGERLRSCHVRNLNPEKAESLSPELQAALEPLLNAIDSLSERIVEYNERIEILVQQSYPQVALLKQIKGVGTLIALTFLLTLEDPHRKNRDVGCYLGLQPGRRNSGQSEPQLHISKEGDPYLRTLLVQGAQHILGPFGVDCDLRRWGLKLAERGGRNGKKRAIVATARKLAVLLHHLWVSGEVYEPLHNSSPTTVATAA

SEQ ID NO: 361482 - protein, 340 aa, unidentified
MRNVTTIGLDIAKNVFQVHGVDAEGVAVVRQRLTRGRMLNFFAKLSPCLIGIEACATSHHWARELTALGHDVKLMPAQYVKPYVKRGKNDAADAEAICEAVTRPTMRFVAIKSPEQQSAMMSHRVRLILNRQRTQLSNAMRAHLAEFGIAAPIGRNGIEQLLDVIADPTDERVPPDARFCLEMLATQLRMVKEQILENDRRILASARETELGRRLMEIPGVGPLLASAIVATVPDPAIFRSGRNLAAWIGLVPRQNSSGGKERLGGITKAGHQYLRQMLIVGAMAVVRYAERNGAKRPWLVQLLARRKPKVAAVALANKNARMIWALMISGERYREPQVA

SEQ ID NO: 361483 - protein, 341 aa, unidentified
MNVKTIGIDLAKEVFQVHGIDEHGKRLFNKQLKRAKVLSFFANIPPCLIGMEACASAHFWAGKLMSMGHNVKLMAPQFVKPYVKTNKHDAADAEAICEAVTRPNMRFVPVKTPEQQAVLALHRSRQSFIKQRTAQANQIRGLLAEFGIVVPRGIQQLQRQLPELLEDADNSLPSLFRVQLSLLQHHMAYLFDVIATLDKQIEQCYRQNALCQRISKIPGIGPITATALIATIGNASNFENSRQLAAWLGLVPRQHSSGGKQVLLGISKRGDIYLRTLLIHGARAVLQSVKRKQDAVSGWASRLLARRNNNIASVALANKNARIVWALLAKDQEYYAPVMNV

SEQ ID NO: 361484 - protein, 281 aa, unidentified
MTVIIGTDPHKATHTAVAIGCDEAELATVTIRATRQQVDKLLGWAAPFEQRTWAIESAGGLGYLLAQQLVDAGEHVLDVPATLASRVRVLGTGKSDKNDPNDARSVAIAALRSPGLRSVQAADHAELLRLLAKRNQDIGSLRTKLVCRLHAQIADISAGGFAKELNASDADGLLGSFEPRSPVEVTRHQWALELLEDIRHLDHQLKESHKRIKLAVRASGTSLTEVYGIGPVLACALIGYTGDVTRFASRDQFAAYNGTAPIEVSSGGRVVHRLSRRGTVS

SEQ ID NO: 361485 - protein, 387 aa, unidentified
MYFVGIDISKFKHDCAIVDELGDVITPSWSFQNDREGFSLLKELLDALDGKKKIGLEATGHYGQNLKLFLENNDFSFIEFNPLLINQFVHSKSLRKTKTDSIDALMIAQYLMTVEYKPYPPSFYTLERLKSLTRFRDNLIRQRSKQLVELTNILDKVFPEFKPFFKGRFSATALYILSHYASPEKISNMNSKSYEPLRRLSRGRFSMVDFVELKTLVRNTVGSTCDYLLQEMEITIDIYNQLQSKAEEIELQIHDCVLDLAPPMLTIPGIGAASAAVILSEFGDLSKFNSPSKLLSFAGMEPGYFQSGTSESTGKMVKHGSSHLRYAMMNCAQTVINNEPTFAAYYAKKRAEGKEHRVALTHVAKKLLRVIYTLETKELSYNPDLVR

SEQ ID NO: 361486 - protein, 417 aa, unidentified
MTEYAALIGIDWADSKHDICLIDPQTLRREASLLHHSAKSIDEWAAALRARFGGRPIAICLEQSRGPLIYALLKYDFLTLYPVNPSTLSRYREAFSPSRHKDDSTDAAYLAELLAHHREHLRAWQPDDERARTLRYLVEHRRRLVSDRTRISNRLTSLLKCYFPQILDWFPDIRTRLVCDFLLRWPELSALKRVRPETLSKFFREHNSARRETIERRVGAIKEAVPLVTDRAVIASSTLMVKALASQMQATLAAIHQFDAEIAALCAANEDFALMRSLPGAGQNYAARLTVALGTDRERWQSADELAQLAGIAPVIERSGKSCRVRWRYFCPKFLRQSFHEYAGESVRHSFWARAYYDGQRAKGKSHQAATRALAFKWIRIIYRCWQTRTPYDEVKYLESLRKKGSSLLNYAAQNPA

SEQ ID NO: 361487 - protein, 450 aa, unidentified
MSNSNSQSAHPQSVNHRDIHSRCASPSLAKMDVAAVAGIDWADQKHDLCLLDLEASGGPRYQEQIISHTPEALTALVNSWRERFPGRKVAVVLEQSRGALIHHLMGYDFLLLYPINPSALDSYRKTFKSSGAKNDTTDAFLLCDLLYKHSDQYRPWHPQSEQTRMLERLTRDRRQAVNHQTRLTQQLQSTLKEYYPQALQWAGDSLNSPMALDFLERYPTLEAVKRPRTETLRRFYGQHHSRSQAKIEQRLEEIKNAQPLHRDSAIIASCRMKVAMLVAQLRALHDSIKAYDKAIAEIVKSHPDGDLFASFPGAGAQLAPRLIAAFGDDRERFANPGDMQQFSGIAPVIKKSGKSEHIHKRYACPGFIRQTFHEFAGHSISWSRWAKAYYNQQKAKGVATHVILRALAFKWQRIMWRCWKDGVTYEEELYIEALRRRNSPLADVLTAPPA

SEQ ID NO: 361488 - protein, 418 aa, unidentified
MKKHNNSRKKSEPTSKRAKTRGPMRRDTKEVLAELVGKLKEKLDPKKVAATSAGEEHQRGELRPNLDRLTVGVDLGDQWSHYCILGLEGETLAEGQLRTTQEDIAEFFQALNAARVVFEVGTHSPWVQEVICGCGHEVLVANPRLMEGSKRRKRKNDRIDANKLARLGRVDPQSLHPMQHRSREVRQDLVVLRARDALVAARTELINATRGLVKSMGSRLPKCSSPSFAQKVEETVPVELRDALLPLVRMAAALSDCIQGYDEKIEKLGREKYGHTALLRQVKGVGPITSLAYVLTLENPDRFVKSRDVGPYLGLVPKQEDSGESQPQLGISKAGDTMMRRLLVGSAHYILGPFGPDTDLRRYGLRLCERGGKNAKKRAAVAVARKLAVLLHCLWVSGEVYEPLRQGMSATMTPAAAA

SEQ ID NO: 361489 - protein, 350 aa, unidentified
MIIVGCDYHPGFQQIAFVDTETGELQERRLEHGEAAEKFYRDLAAQGMNVRVGMEASGHARWFERLLAELNFELWIGDATEIARKRERKQKTDRQDAQHILQLLMEHRFPKIWVPSWENRDLRQLLWHRHRMVQMRTRIMNQLQAVALNEGLRCKKRLWRQHGREQLESFRLAPWASRRREDLLELLDRLNPTIAELSQSIDQEAEKFPEVRWLMTHPGVGPLTALAFVLIIGRADRFQCGKQIAAYLGLVPLEDSSGNRRRLGHITKQGSSMLRFLLVEAAQVTVRSLPEWRSKYFHLMMRRGRKIAKVAMARRLAIRLYWMWRKGWDYEQVKKFGSHAGTLGTGRGVQ

SEQ ID NO: 361490 - protein, 348 aa, unidentified
MVADSLDVVIGVDTHRDAHALALVATASGALLLEAVVEASTDGYRDALELARAHAPGRRAWAIEGTGCYGAGLARFLLARGERVLEVDRPRRERRAQRGKSDALDALRAARSLLGGERLARPRQAGAREALRGLISTRESAVDARRAALNQLRALIVTCPEPLRAELRPLTRARLLRRLRGTRPRRHADRQLRGTLLAMRLLAVRIEALTLEQRELEGEIVALVRELAPQLLAQPGVGPITAAHVPLAWSHKGRLRNEAAFARLAGAPPIPASSGKVVRHRLDRGGDRKLNRALHTIILTRRRTDPDTIAYIQRRVSEGKSDRDAVRSLKRYLARSLFRQLEAHPQPA

SEQ ID NO: 361491 - protein, 421 aa, unidentified
MKGERMSQKLKEQRLKELAFVGVDTHKDEHTVCIANCFGESLGVFTSENRPKELKGLLEKVDETAKSYNLKPVFGLEDVMGLGQHLARSLICGGYHLKEVNPIETERKRLRKAHPDKSDPLDALAISRVLITDFDKLPTIQSLNEIYLAIHELSNRRDSLVKEKTRIKNKLHILLHREYSYYQTMFKDTFSKAALAFWKRFPIASLLKGIGVERPAQYLRTNSNNTVSTKKALSILKLVDKDSVPSCLNLVHSSIIRNLVKHLRFIEEQMAIVEKELEPLVDETGMKLSTLTGVDLVTAAKLIAEIGDVNRFSSSDKLAKCAGIAPQQKSSGKKLKFKKSNRGRRQLNTAIYHIALCQIGSDRCGRPRNSKAREYFLRKISEGKTKKEAPTCLQRRLCDIIYAMMKNKTEYRFQRTTNLVT

SEQ ID NO: 361492 - protein, 348 aa, unidentified
MFVGIDVHKNTHTAVGVSPFGEKLFEVTVGNYKNDFEMLIEKVTKNQGVFSPYFGLEDCHGYGERLSAYLYEGGHEICAVPSVMVDRAREKATHPEKSDSLDAFGVAKVMMQNIDSLPAYRISEDSKKAKQIKELSLDREYLIEEKTRLKNHLHNLLHRIWNTEYQEKYKDPFTLKALRYWSKAKQACDPFLLRSMKRKVKRLIDIHYEVLDLEKEMETLLDQNYTVHTASGCGVTIAGMIVGEIGDIARFHSPGALAKYAGCSPREYSSGKTHRHRKTRSGNRRLNCAFHRMALSQISRSGNEKAKTYFKKKISEGKSKSQALVSLRRHMVNIIWCMMKHKTAYRNA

SEQ ID NO: 361493 - protein, 394 aa, unidentified
MDETWVGIDAGKEFHRAHVMDASGVELLSRRVENDEADLLRLIEEVLSLAGRSRLTWAIDQPGGGAALLLALLWERDQRVLYIPGLTIDRARDAYRGESKTDAKDAYVIADQSRMRSDLSELAPSEGELAQMQLLLARRRDLVADQSRAITRLRETLLSLFPALERALDLNNKGDLTLVVSYQTPAAIRRMGRKRLAAYLKKRGVKGADRLAQKALAAAESQSVSLPAEEVAASIVAELAREILELKGRLRTLDEELRKRFFARPEAPILVSLPGMGPILGAEFLVATGDLRAFESADRLAAYAGLVPAAHDSGKRTGNNRRMRGGNKILKRVFWQSAFASLRSAPASRAFYDRKRAEGKRHTQALIALARRRVNVLWAMLREGTTFKSPPFRA

SEQ ID NO: 361494 - protein, 341 aa, unidentified
MQIHSVGIDLGKTTFHLVALGAAGKVLVKKKFTQLQLLTFTANMQTSLMGLEACSGAHFLGRALRAQGHDVKLIPAQFVKPFVKSDKNDFIDAEAIAEAVERKNMRFVPIKTDDQLDLQTIHRVRDRLISRRTAVINQLRAFLLERGMVFAKTPAKLRAAMADVLENADADLTPQMRNLIGMLWDEWKLVEQQITALTDDLEKIADADAGCARIRQIPGIGPVVATAIVAAIGSGAAFRKGREFAAWLGIVPRQYSTGGKAKLFGISKRGNVYLRKILIHGARAAVLRIKRDRAPIGAWLDALDSRAPKNVVVVAMANKLARIAWAVLSSGNDYRPATVPA

SEQ ID NO: 361495 - protein, 419 aa, unidentified
MNNINTIHPRMTRTYCGVDSHKDTHTIAFLNCFHEKLGEITIGSAPSEFGKFIKRAKKYLLPDTTFVFAFEDVSAYGRAFVKYLVEKDYLVKHADASKVATERGQVLHKTDSYDAECCARVLINQFDKLPDANPQDKFWVITNLVTRRNAIVKINVMVKNSLHAAIADSYPHYKRFFSAVTRDSALAFYEAFPSPHHLENVTVEQLTAFLHTASKGRLSATKAETILKHVQRDQVRKSEFQDVQDFNVRSLVRQVKNNLDELAFIDVEIEKILTHFDYPLTTIKGINSLTAAKLIAEIGDIKRFKNAKALAKYAGVSPVTYASGMSSLQIANARGNRKLNEIFFKIALSSITPIGKNNALLNPIFYTYFHKKISEGKTKNQAIKAVQRRLVNIIFSVMKYSRSYENPEMAYLPKDTAIA

SEQ ID NO: 361496 - protein, 338 aa, unidentified
MTIIATGIDLAKNVFAVHGVNDAGKVELRQPKVARAKLNALVAALPPSVIGMEACSGAHYWARLFQSHGHTVKLMAPKLVTPYRMSGKRGKNDAADAAAICEAMQRPNMRFVPVKSEDQQARLMVHRARQGFVTERTAVINRIRGMLSEFGIVMPLKAEVVRQQAREHLEDLPGFANLVIGDLLSEVAHLDERIKQYDLHIRTMARDCNAAQQLMQLMGIGETTATAIVAMVGNASEFTCGRQFAAWIGLVPGQYSSGGKARLGRITKAGDPYLRSLLVMGARAVLNAAKGKQDSLSRWAVSVAERRGYWKAVVAIAAKNARMAWAVLTRGEQFKLPA

SEQ ID NO: 361497 - protein, 423 aa, unidentified
MMHKERRWFVGIDWGSQEHVVSLCDDVGKRIGQRKFAHGGTGLTDMIAWLLKESGGTPGEIHVAIETPHGPIVEVLLERSCNVYSINPKQLDRFRDRFTVAGAKDDSRDADVLADSLRTDMRAFRKLSSVDPTIVELREWSRIDEELKAEHVRLTNRLKHQLWRYYPQIYELANDVGAGWFLDLLEALPTPEKAAKTREKTVARILKQYRIRRFDAAHVLGELRKPALTVAPGTVEAATAGIRILIARLRLINSQLVDAEQQLDRLCKKIVGPVAGEEGENTPGQKNELRDAAILDSTPGIGRTVLASLLTEASDALQRRDYHALRALCGTAPVTKRSGKSCLVSRRRACNRRLRNAVHYWAHNAVQHDATSRAKYEALRAKGHGHARALRSVADRLLNVVCAMLRSGTSFDSSLASKKQAGA

SEQ ID NO: 361498 - protein, 351 aa, unidentified
MRTSQNTLNTINTIGIDVGKNTFHLVGLDKRGVIVLQQKVTRHQLGRRLSNISRCLIGMEACSGTHFIARQLAALGHDVRLIPAQYVKPFLKGHKNDYRDAEAIAEAVQRPTMHFVSIKTPEQMDLLALHRVRSRLVRQRTGVANQIRGFLLERGITVRQGLMPLRKALPDILSSKSDALSPRMINLIGELIQDWRRLDERIASVSTEIEVLAKQDESCQRLMSIPGVGPIVSSAVVAAIGNGTGFKQGRDFAAWLGLIPKQESTGDRTILGKISKRGNKYVRTLFVQAAHVVLERRPRTARQGLWPWIEQASKRLHRNMLAIALANKLARIAWAVLARGHAYQPRITANA

SEQ ID NO: 361499 - protein, 316 aa, unidentified
MSKFYFVGIDVSKDKLDICFLGEKSDSKPKFETLPNKENIIKAYFESFKSDELVVCFEYTNNYHILLQKALTSLKIKYNVLNPAKTSFYLRHLSHIKNDIKDALGLAIYAKNFSIDLFPDKFSKEYNLLKSYSSTLLLLTKISTQIKNFKASQKFVCDEAINLNISILQKTIENIKKKLRDINYRILKSLVPNSDEILAESKGIGIDLALVLFPILHFNRDKTSKQLISFLGLSPRVYESGSSVRKSHKINKIGSSNIRRVLFLNALSCSRFNPILKTKYENLINNGKCKKVALVAVMCAIIRYLKIYFKNEKSIN

SEQ ID NO: 361500 - protein, 339 aa, unidentified
MGRFVGVDLHKNMFVVSFFDPQTGKHQITDYQIKDIISFGKRLNCDDVVGVESTNNTRYFVNQIRDFVHEVKVVNPSKFKVISKSVKKTDKNDAKVIAEFLSKDMIPEVRMKDKKTAQINSLANTRDKLVKLRTALKNKIHNILSSHGILLKKESLSSDKELNRILEQPVDPTAHVELEVIVGQIKSLNEGIKKLDKELEDKGKELPGYENITSIKGIGKKSGSILLSVIGDINDFENEKKLAAYFGIVPRVSNSNETEWQGHITKHGSKLGRTTLVQCTLIAIKYSPYLKNFYERIKTKKGSGKAIIAASKKLLGIIYMTLKENIVFEDFANGVIKIT

SEQ ID NO: 361501 - protein, 308 aa, unidentified
MTYVGIDVSKDRLDVHVSPAGEAWTVGRDAEGLEALVARLGVSAPLCIGLEATGGYETVVAAALGAAGLPVAVINPAQIRHFARALGKRAKTDPIDAAVIARFVEATRPPPRALADTETRALADLVARRRQIIAMMVSERQRLRRATLLPLRKSIERLLAALQKELSDLERTIDEAVRGSPLWRDQEALLTSIPGVGPTTARTLLAELPELGQLGRRQISALAGVAPWTRQSGQWRGKAMIGGGRPTVRSALFMAALVASRYNPVLQALYQRLIASGKPKKVALIALARRLLTFANAILRSKSPWLAA

SEQ ID NO: 361502 - protein, 406 aa, unidentified
MISVGIDVSKGKSTVCVMKPGGETLETPFEILHTMEGILSLVELIKTYDEEVRVILEDTGHYHWPVVTLLVENDIFVCCVNALRMKKYCSQSIRRAKTDRIDSIRIASYGITYWGELSCVLPVSDTYRELKLLARQYYQMTSMVIKAKVNLSNLLDQTMPGIQDILQDSACNNKLTDFVNRYIHFSHILSMGKSRFMADYCKWAKKQGYHMCERKAEEIFAVAQNGIPVLPNSQSTKIVVTEVVRVLHEIEKSRDTILTQMQVLAKTLPEYSVVRNMRCIGDVLAPRLIAEIGDVRRFTNKHALIAYAGIDAPPYQSGAFNATERHISKRGNSYLRKTGYEVMQCLIQHKPEGDAVFDFIQKKRSEGKCGKEAMIAGLNKFLRIYYGRVTETYKVIDEQFIFGTQI

SEQ ID NO: 361503 - protein, 371 aa, unidentified
MRFYQGQHRFYCGIDLHARSMHVCVVDDAGNIVFDRNLATRPEALLRALEPFRDGLVIGVECMFAWYWVADFCVTHDIAFVLGHALYLKAVHGGKAKNDRLDATKLARLLRGGNFPTAYAYPKGMRETRDLLRRRTYLVHKRAELLTHLQILNAQYNLTPFPKKLCYAGNREEMKIAERFSDVSVQKNAAANLAVIDRLDEVIGDLELYLTRAAKIDSVQTYQRLQSIPGVGKLLALILLYEMHDAQRFDSAGQFLSYARLVRCAHESAGKKLGTGGKKIGNAHLRWAFAESACLFLQRSERAKKWKQRQAAQRGSGKAMAILAARLARAVYHMLRKGEAFDEERFWAGDRRRATTGSSSLSRKEAEYAST

SEQ ID NO: 361504 - protein, 321 aa, unidentified
MDKFIGIDISKQTFDVSFSKKDQQVFKNTRKGFERFLKQVNDNTGLVMEASGPYYLSLANFMYDKGFKVYVVNPLKIKRFSQMNFNRAKTDKKDAEVIRGYALKMQEDLKGWKPESRQIKEMKQLHTALELLNKQLTQVRNQLGAFKDSGSICKELKTSYQTILKKLEKEKDKLESKMLKIGKEEYQQTLKSLTSIPGIGNKTAIMLIAMTSDFDKFEHYKELIAYVGFSPRIYQSGTSINGKGHICKMGKAQIRKLLYMCSWTAKKYNKGCVEMYERLKKKGKPERVIKIALANKLLKQAFAIAKNKTMFNENYQSKVCF

SEQ ID NO: 361505 - protein, 316 aa, unidentified
MNTLSKVFVGVDVSKRHLDVCMLPENKSFKIANNKSGHRAFLKKVAHFQVERVVCESSGGYEQKFIHSLDQAEYKTWIVDPKRVKAFISAEGVRAKTDKIDAKMIAMFASKITPRYSKKIVSSEKAKLKEFVKRKTELTEMLAKEKTRLKDPTIDNSINFIKKLIKFMEKQMDIIEKEIEKIIQKDGELQQKVEIMETMPGVGKITSAALVAHLPELGILNSKQIAALVGVAPFTKESGTYVGKASIGGGRAIPRKALYMAALTASRSNPVFKNFYNRLIAKGKKPKVALVGVMRKIIITLNAMLKNGTVWNPKIA

SEQ ID NO: 361506 - protein, 414 aa, unidentified
MSNPLLVGVDVHRKTNTVCLMDGQGRELTPRFTVDNNRPGTETFIRRVAQQVVAGDFDAIEIAAEATGWYWWHFFQTLDQDPFLNQWPLALYPFNPRLTANFKKTYVDLDHSDPIDAFVAADRLRLGRDLPAPFHYEERYFPVRLLTRYRFHLVHNLAREKAYCLAILYLKASEYTRKGKKPFSSVFGAASRAVLQEFDSIEEIAAIPFDELVEFIDCKGKRRFPDPAENARKLQQVARDSYHLPEALTRPINLILGMSLKHISFLERQEKRLASAIAEGMELIPHTLDTIPGFGPVFSGGIITEIAGIERFDYNQAKVAKYAGLKWRKHRSADFQAEETRLTRTGNRYLRYYLCEAANQVRMRDPEYAAYYDRKFHEVRKHQHKRAIVLTARKLVRLVVRLLTTNQPYRPRRR

SEQ ID NO: 361507 - protein, 340 aa, unidentified
MDTIGLDLHKSETQVCTLTEDGELIEQRIRTSRERFTAIFGGRSPARMLVEASTESEWVARHLEALGHTVIVADPGFAPMYATRSSRVKTDKRDARTLCDALRLGADRAIHRASDAQRQIRADLAVREALVRTRTRYVALIKAAVRREGLRLPSGAVEGTVEKLERTALPAHVVRELAPLVALVPALNAEIAAADRRLAALAGRSAIVTRLTTVPGIGPITALAFVAALDDVGRFRSAHQVQAYLGLVPSEYSSGDRRVRGRITKRGDVRTRWLLVEAAWRILRSPNPDVAELKAWGEAVGRRRGKGIAVVALARRLAGILYAMWRDETAYRPTTRREAA

SEQ ID NO: 361508 - protein, 337 aa, unidentified
MQVTFGIDVSKSTSTVCELIGESKNELTITNNRPGFIQLLHELTAFSKHPQIIFEATGVYSRTLQSFLEDYGYDYVILNPLKAKKEMDMGLRHNKTDKTDAYHLALIQRLYHHPINQLQSQTYKQLNALSRFYDQLTADLVMAKNRLHQALQSTFPEIENLFSSAKGKNYWQIVVRYPHCDLVRREDKKQLINWLMSLKGIAFKHALRTADKLIELAYQAYPVVSCSSIEVEQVQYYAHRSLNLSDQRENLIARSIPGFAQTTAVRVLAELGDLRRFSNPNKINAFIGIDPGRYQSGEMDSNLSITKHGNAVARKLLYRAIGQIDNAAKTNPCHTKR

SEQ ID NO: 361509 - protein, 383 aa, unidentified
MSSVAEVVSATRSIIYLGMDVHKESLTIAVLPNEARAPTRLDRLPNDLPKLRRYLERLAQGGDLRACYEASGAGYVIHRAMREWGYACDVIAPSLVPKRLGVQRKHDKRDAADLSRLYRAGELTAVRIPSEADERVRDVVRCRETFQREILKSRHYILKFLARRGFVFREGTNWCTPHLRWLQHLTTDASPLAAHDRLVFREYHALLLYKLQRRDDLDRTIEQLALLPTLAPMVERLQCFRGISLHSAMVLATEIVDWRRFEHPRQLTCYLGLVSREKSSGDRTRLGSITKAGNSHCRHVLVQAAWSYHHRPGISVDLERRQQGQPPAVIAHAWKAQQRLHKRYNHLAYRKRPQIAVVAVARELVGFLWAVMRDLEPAAQRAA

SEQ ID NO: 361510 - protein, 310 aa, unidentified
MERIFVGLDVSKDRLDVHVRPTDDSFAVAYDEEGLAMLVSRLGLLQPTLIVLEATGGYEVKVAAVLANAGLPVAVVNPRQIRDFARATGQLAKTDALDARVTARFAETVQPAARPLATEQAQVLGELVARRRQLVEMVGAEMNRRRQVRDRGLQTRITAHVTWLTRAIEELEGDIQRLIRSSPVWRETEDLLTSAPGIGDITAHALIAELPELGQLNRRRIAALVGIAPFNRDSGLWRGRRMIRGGRPAVRRALYMATMVAIRHNPPITDVYRRLTRAGRPKKVAIIAAMRKLVTILNAMLRDQRRWRPA

SEQ ID NO: 361511 - protein, 407 aa, unidentified
MEVVYRCCCGIDVHKKVIVACLVNGGEQELREFGTTTSEIKTLANWLTESGCEMIAMESTGVFWKPLYNLFELMDLDAMIVNAAHMKALPGRKTDVKDAEWIADLLRHGLLKASYIPNREQRELREITRYRKSLTEERCREVNRLQKILEGANIKLDSVVKDITGKSARKLLQRIIDDDIPDSDEVSKLVHGRMRPKLEQIVASIEGITTPLQRKLLAQIIDHIDDLNRRIGELDKLVQEYMAEYEAAIEAIDEIPGIARRSAEVILAEIGLDMGRFPSAAHLCSWAGVCPGNYQSAGRRKHGKTTKGNKALKTILTQCAKSAKIVKSSYFFAQYQRISARRGKNRATLAVAHSMLIAIYHILKNKTAFHDLGSDYYDSFNRDRKINSYLKRLKALGWEPDAIPSSA

SEQ ID NO: 361512 - protein, 341 aa, unidentified
MEATMALYGGLDLHGDNVFCTLMDGARKIVFERRCPNDLATIHAALEPYRHRIVALAVESTYNWYWLVDGMQRLQYPMKLANPARMQENLGLKAANDKTDARFVARQLTNGILPEGYIYPVETRGLRDLLRRRMRLVQARAGEWISLGSLVARHTGQDLGVTELADCAIDEVLAGQPHALIMARASLRHIAFLKQEIDALEKAVMRDLPDRGDYQRLMSVPGIGPVLARTILLETGPITRFRAAGNYASYCRAVKAEHTTNGKKKGDGNGKSGNKYLAWAYVEAANFAVRYSPELRAWFQRKHRRSGKRVVAVKALANKLAKACYFMLRDGKDFDVKRLVG

SEQ ID NO: 361513 - protein, 400 aa, unidentified
MLSIGIDVSKGKSTVCGMKPGGEIVYAPFEVQHTIEGMSELVSLLRSSGEEVRAVLESTGSYHCPVVAALLENGIFVSVVNSLRMKRFCSQSIRKVKTDRIDAMQIALYGLAYWQELQPARLPEDTYRELQLLARQYYQMTSLLIKAKVDFNAICDQVLPGMQELMSDHAGRHKLSDFVLRYCHTTHILEMGETRFRKDYCKWAEKKGYRNCERMAALIFATAQNGIPVLPNAPSTQIVITEAIRVLHTVEASRDAILTQMQALAKTLPEYSLVREMPCIGDTLAPRLIAEIGDVRRFHSKRALIAYAGIDAPPYQSGKFCANNRHISKRGNRYLRKTGYEVMQSYVMHKPANDPIFTFIEKKRGEGKSGKLAMVAGLNKFLRVYYGKVTELYRSLPTIE

SEQ ID NO: 361514 - protein, 361 aa, unidentified
MKRVQSNKLDFSGQNIYVGIDAHLKSWSVAILSEYSALKRFSQSPEPEALHKYLVSNYPGANYFSVYEAGFCGFWIHEKLTGLGITNIVVHPADVPTMSKEKLRKTDAVDCNKLARELRSGSLEGIYVPKADVLEIRSLIRTRNMIVKDSTRTKNRIKSLLRFHGVDIPEEFTRSSIGRWSKRFLAWLHSIELSTEYGKKTLELHLEQFVRLRNMLLQETRAIREISRKAPFEKPMRLLTSVPGIGVTTAATLMVELDDIVRFKNADHLASFIGLVPMCHSSGESNGTGDITVRRHFMLRCLLVEAAWIAIRRDPAMTVAYTEYRRRMNPQKSIIKIARRLVNRIYYVLKHEKEYIPCVVE

SEQ ID NO: 361515 - protein, 420 aa, unidentified
MAKKGTKVRIEDLQDIYEFCAGIDVHKAGVTVCAICGRGAELEAEVVEYGTTTAELRQLGEWLREQGVTHVVMESTGVYWRPVWQILESAGLHLLLANAKKVRNVPGRKTDQSDSIWLATLLRKGLIQGSFIPPQQIRALRDLCRSRASLVRDRTRVIQRIEKVLEEGNVKLDVVASDLVGVSGLRILERLAEGETDTTAMAELALGRLRSKIPQLIEALEGSFRPHQLFLLRELLEQYDYLCKKVERFEIQIEEYARPFEEQIQRLDAIPGVNRLSATAILSEIGVDMSRFPTPQQLCKWATICPGNRESAGRKKPGKTGRGNHWLRGTLTQCSWAASHDKNTYLAVQYRRLLHRGKQRALVGVAHSILNIIWHLLRHQIEYQDLGVDYFERQNLEGQKRAYVKKLEKLGFTVKIEPAA

SEQ ID NO: 361516 - protein, 337 aa, unidentified
MTPLYCGIDLHSNNNVVCVINEKDRSLLEIKLPNQAEQVIKTLSRYKKRLKGVAVESTYNWYWLVDALMASGFHVSLVNTAKVVQYNGLKRTDDRYDAFHLAHLMRLGILPTGYIYPREQRGLRDLLRKRMLLVQDRSREIVRLKSFIQLHTGTTLRADKLKTKKLVLPVIGDSYAQLSLNCAIEVVRALTQQIKTIERAILPQVAMAPGFSGLKTVPGIGDILAQTILLETGDVTRFQGPGNFASYCRCVDSRRESNGKKKGENNRKNGNRFLAWAFIEAANFAIRRSDKARAFYQRKAQATNGIVARKALAHKLARACYWIMRKGVVYDEKQLFT

SEQ ID NO: 361517 - protein, 348 aa, unidentified
MNALHYIGFDVHKKTISFCVKTAAGEIVEEGVVAAQRAGLRQWASARPQPWRGAMEATLFSGWIYDTLKPYGEQLEMAHPAKMKAISAGKKKSDTLDARTIADLVRCNLLPACYVAPPRIRELRRLLRYRSLVVSEAVRMKNKMAGLLMETGALYVKEKLHRKKYFATLLEELEEVPPSVIDLLRLSRGALEMFESTQKRLVRELLADPELTQRVERLMTIPAVGEITALTWALEVGDPQRFRCNSDAMSYCGLTAALKSSAGKQQRGPISKQRNRWLQTTLIEAAKLAPRWNPQLAALHARELERGHRNRATLAVARKLVAYLLAVDKSCQPFQVRAPSEVPTQKAA

SEQ ID NO: 361518 - protein, 449 aa, unidentified
MEITYTHAAGLDVHKKTIVACCLTPGPKGAPQKEIRTFGTMTQDLLALADWLLTKGITHVAVESTGEFWKSVYQILETSFTVLVVNAQHIKTVPGRKTDVKDAEWIADLLRHGLLKASFIPPLPQRDLRDLTRQRTNLVQDRARVVNQLQKVLEWANLKLTSVVTDIMGVSARAMLAAIVEGEVDQGVLADLAKGRLRSKQTELEQALVGYVRDHHRFLLARHLIHIDFLEEEIARFDQEIETFITTQTTAEPPPPPTREPSGTTHATTTDAPPASTTPTMLPWAEAVALLDTAPGIGRTAAELILAEIGTDMSRFPTEGHLASWAKVCPGNRQSGGKRYSSRTGKGSRWLRPVLVQAAWAAIRVKDSHLAAVYRRLVVRLGKQKAIMAVAHRLLVAIYHMLTDHVPYREVGTAPPSEPAKQKRVTRLQREIEQLGFMVTLQPAQSAVA

SEQ ID NO: 361519 - protein, 390 aa, unidentified
MRVVADQSVAPTTIRADLCAIFISLELSRSTWLVTSLTPGRGEKMSKHSVSAGDIAALLARISELRRKAYARTGKSFPIIVIQEAGLDGFWIHRVLLSEGIESHVVDAASIATSRRRRRAKTDRIDGEALLRALLAHKRGEPRVCSMVRAPTPEDEDCRRICRERKVLIMERVQHVNRIKGLLFSQGAFGYEPLRRDRRARLDALQTGDGRRLPEHLKAQVCRELDRLELLLEQIKAVETERDALLNAQQTKGLAPPPMLLGVHGIGPEFASVLWSEGLSRRFDNRRQVAAYAGLAPTPWQSGSVNREQGISQSGNSRLRTTMIQLAWLWLRYQPRSALTLWFQDRNERNGGRRRKTTIVALARKLLVALWKYVSAGVVIEGAMIRAAGR

SEQ ID NO: 361520 - protein, 362 aa, unidentified
MRIIGCDLHARQQTLAVLDTATGEVMEKTLTHSGGNVREFYAALPGPVRVGMEATGTMQWFLSLMEELGIDCQVGHPAKIRAAEPRKQKHDRRDAHLILQLLVENRFPLIWRPSKELVDLRALLLHRHQWVRMRTRIQNALQAIALANGLRRGPSLWSHEGQCTIASLPLASHTAHRRSELQAMYAKFEDDIEKLNQRVQEQAAERSGATLLMTHPGVGPITALATDVFLGDAKRFADGKALASYVGIIPSEYSSGGRQRLGGLSKQGNPLLRFLWCEAAAHAVRRDPELQRFYRRKLIQKGLGKARVAAARKLGIRLWIMLRDQIDYHEFCRRGQMQQRSGDAYAGMPGTRSGATSHRPVD

SEQ ID NO: 361521 - protein, 350 aa, unidentified
MKKVAYLAMDVHAGHCVLGHMDFDGTFIGNRRFPTSEQHIIEALKAIKAKEKYLALEESNLAYWAAQVARAYVTEVISSDPKENALIYRSPNKRDKVDTHKLCRLLRLGELKRVYHPENDERAIFKAAVQHYIDLRDQQVVLKNKIKAMYRHWGVIDVAGQAVYGTTRDDYLKRVKHLHIRNQLHRLYCLMDKTESMQKKALKAMKQLGRKYPEIKQFEKMPGIGEILSHTFDAFIQTPHRFADKRKLWRYCRLGITDRSSDGKPLGFKRLDRSGVSELKALSYRAWLCALGSDNEVRRFYSRSLRRTHSHVHARLNTQRKIIAVMYGMWKRGEAYRPQLFLDSPQMSVV

SEQ ID NO: 361522 - protein, 415 aa, unidentified
MAMSVLYTRCAGLDVHKETVVACLMLTASSGKITREVRTFATTTLGLQTMAQWLASQQVTHSAMESTGIDWRPVFNILEGRFEVILVNAQHMKAVPGHKTDVKDSEWLADLLRHGLLSASFIPPKPIRDLRDLVRHRKTLVRQRAPAINRVQKVLETANIKLSSVASDVLGKSGRDMLDAMLAGIGDAEALAGLARGRLRAKLPALREALSGRVEATHRLLLRQLLDVIDFLQGQIDAISTDIDALLLPHKQQLSRLMQIPGIGPLAAAAILAEMGTDMTCFPSAKHLASWAGVAPGNKQSGGKRLKAHTNKGNTHLRAVLAEVVWVISHTRDNYLSAQYHRLAHRLGKKRAIVAVSHSLVTIIYHMLQENEDYHELGFHYFQTLDTTRQRDTAVRRLQALGYKVSLEEITEVRA

SEQ ID NO: 361523 - protein, 343 aa, unidentified
MDYFAGLDVSVKETSICVVDDTGRIVREVKVASEPDALRLALTNPAYHFKRIGLEAGPLSQWLFSALAEAGLPVICVETRHMRAVLKARINKTDRNDARGIAQMIRVGLYRPVHVKTLRSQKLRMLLTHRKLLQAKVIAVENDLRATLRNFGLKVGVVGTVKFEARIKELVGNFPDLAALVEPLLVVRRVLREQIAILHRRVVAVVRDDEVCRRLMTVPGVGPVVALTYRATVDVPARFRKSKSVGAVFGLTPARDQSGERDRPGAISRCGDEMMRTTLYEAAQVMLLRSAKWSWLKAWAMKIAKHRGTKKAIVALARRLAVTMNRIWTDGTEFRWTSEAAAA

SEQ ID NO: 361524 - protein, 340 aa, unidentified
MSVMIGIDPHRGSHAAVAVDTGEEAVAEFEVQAARRQSGELLAWAARFPARRWAIESANGHGYLLAQQLIAAGEQVVDVPSAQAARVRVLDSTRSQKNDPNDARAVAIVALRHPGLGAVQTEDHVAVLRMLAKRHKQLASLKTQAAARLHALLATLIPGGLRKEMSPRKASALLRQIRPATMIQTERKRIAHQLLTEVHRLETERKASKARLTVTVEASGTTLTDIYGVGPVVAGLLIGYTGDVSRFPTRHHYATYNGTAPTEASSGTRKRHRLNPRGNRILNHALHTIAICQLRYPNTQGRAFFERKLEEGKTKKEAIRALKRRLSDVVYRHLISDQPR

SEQ ID NO: 361525 - protein, 393 aa, unidentified
MKKDNKKAISKSKRETKRVAELTLEQLQAGLAEREANTVVIGIDLGDRTSTYCVRTLGQQIVTEGRVATTALAMFELFRPLRRQRMVIETGTHSRWVAQLLELMGHEVIVANARKLKLISENNQKSDKEDPRLLSQLGCMNVDWLHPVYQRSQEAHSDLLLVRAREALVEARTALINQVRGTVKSFGSRISKCAAERLVEVAREEAPEALKPALSGVLVALEEINEQIYSYGCQIEHLCQRKYQEASQRLLQVKGVGAVTALSYVLTIEDKDRFEQSRDVGPYLGLVAKKRQSGQCDPHLGITKAGDEMVRKLLVNCAHHILGPFGEDSDLRRWGLALVRAAERKGKKGARKLAAAAVARKLAVLLHRLWVTGAKYEPLRNHRGQPVAAVVAS

SEQ ID NO: 361526 - protein, 345 aa, unidentified
MGVLIGIDPHKATNAVAAIDERGELLEYAVFSTNRAGVRSLARWGKRFPERRWAVEGAGGLGRFVALRLVAAGELVMDVPAKLSSRARLLATGNARKNDRVDAFHVALAALRGERLAEVGEEEQAEVLRMLSERREDLIKERTRTLNRLHGLLRDLLPGGAPKNLSAEKAARVLRGVRPRSGPARTRRRLAADLLRDIRRLERQLYELECRIREALKEASTGLTLMFGVGPILAAEIIGRVGNVARFPTKAHFASYTGTAPIEASSGEVVRHRLSRAGNRKLNHVVHMIAICQARHDTKGRTYYRRKLAEGKSEKEALRCLKRRISDAVYKQLRADLPAANLTAA

SEQ ID NO: 361527 - protein, 349 aa, unidentified
MKQYYTGLDVSLEETAICTVDEKGVIAFEETVPTKPKLIDMCLKAKGLPIDKISLESGSLSHWLVKELKSFGWTVVCIDARSISAVLALNTNKTDRNDARGIAEALRSQCKYSREVYHKSQGSIELGTLLGARRTLVYQRTATNNTIRGLLKAYGICLGIRGNEKIAQSVRDKIINQQEVTKQGIEPLLVIFETLNKEIEKMEENFLKIAKEDSVVKRLMTVPGVGPITALTYKVTIDNPSRFKQPNTVGAYLGMTPKQYSSGLTKRQGRISKHGSKELRTLLAGAGLSLLMRCKKESLLRTWGLKIKERHGHKKACIAIGRKMAIIMHRVWTNNMVFDPGISKETRNK

SEQ ID NO: 361528 - protein, 409 aa, unidentified
MRYYLGVDWADQTHAVWVVDERGTKLTARTVPHTAEGLSEWGRELDEWRAQGLELWAAIERPDGRVVDFLLDHGVVVYPVNPKALDRARDRFRQSGAKSDPFDARVLAEFLRTDHAHLRALQPSSEAAQELKLLTEDCQRQVRQQTRLVNQLTATLKAYYPRALEVAELTTALAREFLQAYPTPAAVAGLTERQWQRWARAHRLSEARTQELWAVLQRPQLPVPAHVVRAKARLMQTLLTQLGPVVAAVGEYRQAVEDFFAAMPAAQWIRTLPIGDHGVTAPTLWARLGDAPGRWESFQHLQAQAGTVPVTVRSGKQRVVHFRFACDKMLRYVVDQVAFLSLRSSEWARAYYDEQRARGHSHHEALRALGAKWVKIIFVLWERQVPYDEQYHLATMARQQLRQRPRKIA

SEQ ID NO: 361529 - protein, 407 aa, unidentified
MGQAARVWHHRCCEHQLMECPMERNDLSRSLVAFDQNSTLVAVVELSLKSWLVAGLVPGLTRQPLKKQGADAAVLLGLLYRWRDEAAKAGGVIKRIVVAFEAGRDGFWLARWLRARGIEAYVIHPSSIPVSREHRRAKTDRLDTGLLLRAVLGWLRGEPKHCSMVAIPTLEEEDAKRPSREHESLVGERTRLVNRMKATLMRLGIRGFNVKRRKAADGLAELRTPEGVALPPNTLAELRHDMARLRVIGEQLKEIERTRLERLRKAPREGTHPMMLMLAKVKSIGIETADMLVHEVLSRGLRDQRAVARYGGITGAPDESGSKRREKGLAKAGNARVRRGMLQLAWRWVMFQKQSVLAQWFRERTENAGGRHIRKTMIVALARKLLIALWRYVTTGEVPAGAILRAA

SEQ ID NO: 361530 - protein, 280 aa, unidentified
MTITTVGIDLAKNVFAVHCVDQNGKAVLVKPKVSRAALPELIAGLPPCVIGMEACSGAHYWARLFRQYGHDVRLMAPKFVSPYRMAGKTGKNDAADAIAICEAVQRPHMRFVPVKDESQQAMQCLHRTRQGFIQERTATYNRLRGLVSEFGIIAPQSTDALRHIVSDQRETLPVQVRLCIDDLLAHITNIEEKIAEYDRVLSRVAKTDHRSQQLMELKGIGPTTASALVASIGNAHDFKNGRQLAAWLGLTPSQYSSGGKSKLGRITKAGDSYLRALLQS

SEQ ID NO: 361531 - protein, 361 aa, unidentified
MSSIVYGGLDVHQESISAYLLCSDTGEVVTDEVANERQALHRAVQRWSRLGALRLCYEASSAGFVVRRWMEGWGVPCDVIAPSLIPRAPGERIKTDRRDAKNLALCYRGGLLQPVRVPSEAEETTRAVVRLRDAMTRDMTRAKNRVRKYLALLGWPYPGPGRWGPAHRAWIDHLPLNADQRLVVQSHLDALDDLTRRRAEVDARIAQLAQSPAYAPQVQRLMCLRGIDLYSAMVLACEIGDVRRFAAAPPMMSYFGLVPGEYSSGERQKRGHITKAGNARARWILIQAAWNQTSQPGSGAAVQQRRKGQPAAVVAIARRAERRLHRRFWHLARRKDRKTAAVAVARELAGFVWAILQAPAA

SEQ ID NO: 361532 - protein, 337 aa, unidentified
MAIVRVGLDIAKLVFQVHGVDEHGKAKLKKTLSRSEVLEFFAKLPPCLVGIEACGGAHYWARELKRLGHDARLMASQFVIPYRKSGKNDANDADAICEAVGRPNMRFVPIKSEEAQAILTMHRARDLLVAERIALSNQIGGLLGEFGIVVTRGMARLRRVMMEIETGTRALPLLAKETICELYERMQKLDDKALEYERKISSIARQSEAAKRLMAIEGVGPITATAMVASVGDAKLFRNGREFAAWLGLTPSQHSSGGKSRLGGISKRGDVRLRTLLIHGTRSVMRLAGGKTDRKSQWAMELQKRSCANVVAVALAAKHARIMWAMLARGTEYRTAA

SEQ ID NO: 361533 - protein, 461 aa, unidentified
MSKKAPKGKEKKSAGKSVDWKALEIMHPDAAGIDVGGTEHWVAVSPDRDAEPVRCFGCFTADVRKMAEWLVEKGVRSVAMQSTGVYWMPVFEVLEQHGFEVYLVNARHTKNLPGRKSDIQECQWLLKLHAFGLLNNSFQPTDEIRVARSLWRQRGNLTAAASSSIQRMQKVLIEMNIQLSTVLSDLSGVSGMKMLREILAGERDPWKLAALARPEVEASRAQIAKSLEGNWREELLFILRQEVETYEFYQHKIADCDRQLRQHLQSFGSKVDPTAQPMGPKPKGKKDSKNAPKFDLRSELYRITGIDWAQVNGLNVLTAQTVITEAGADLKAFPSEKQFTSWLGLCPTNETSGGKVLNRRTRKVVNRAANAFRNAASTLRSSQSYLGAQYRRLRTRLGAPKAVTAMARKLACLFYRLIKHGQQYVDKGLEYYETKYREQQIQALSKRAHKLGLQLVMPQTA

SEQ ID NO: 361534 - protein, 436 aa, unidentified
MKNPHAAAIDVHSNNHVVCVGPDQVQTFGAYTVDLEAIADHLKQHGVTTVVLESTGVYWVPLFELLESRGFEVFLIEPSQASHCGARPKTDVADCQWLQRLHTYGLLRPSFRPPDSVLALRGYWRQRQLLVRYAASHVQHVQKALEQMNVKLTEVAADIMGQTGTRIIEAILAGERDPQKLAGLRDPSCKKTEVEYAKALQGTWRPEHLFALKQAFALYRFHHQQITECDRHIEAELGRLPNRAADKQFQPRPRRCGRKSNDVRFKATEPLFKALGVDLTLIDGIEVNTALVILAEIGVDVSRFPTEKHFASWLRLSPQLEQSNHTRKKRSPRHGKNRLAQALRMAAQAVSRTKTPLAMFYHRIKGRLGGKGAITATAHKLAVLVYRLLKYGVEYVRQSLEEYAAKVKEQMERSLRRKAALLGYELVAKTPAGQPS

SEQ ID NO: 361535 - protein, 420 aa, unidentified
MTSQNSIPADAVLVAIDIAKVRNEVLIEAPGHKRRRRLSVLNTRAEHDHLIEILQSYDRPVVCAFEATGNYHRPIAWRLVEAGFETRLVSSLALARTREALHNSWDKNDPKDAQVILHMLRIHSTQVYHDPLRAGINDVQELSKTHEAIANAKTEIQHRILTHYLPLYFPEIERFRGNSRSDWFFAFLDAFPTPSSITILTKEKFVEAAWDVVGRKVSKSQILMDIYETARTSIGLPLPLDAPAIRMFRMVVAEARSLIRQRNEIEAQADELLRHSRDYQILRQIPGIGPINALTIIAEAGDLRRFHHHRQFLKFCGLDLSTQQSGQYRGQARLSKFGNARLRRTLWIAGQVAIRQRENGFRHKFERYIARDRDNPDLRRKAMTAITAKMARVVHAVVKSGSDYRPFVEGRVPGGRTSVS

SEQ ID NO: 361536 - protein, 460 aa, unidentified
MKLLYRCCAGLDVHKKSVSACIRRRSKGGHFEVEEAVFGTFTQDLERLRQWLRERKVRQVAMESTGVYWIPVWNVLERGKRKLELTLVNPATVRALQGRKTDRIDARRIAEYLQYGLLRGSFIPPKPVRQLRELTRMRVHIQQDRNRVINRIGRLLETANIKLGSVAKKIACKSGRAILHRIAAGSSRPEQLAGLALGRLKEKIPQLILALDGRPDEHFRWLLSRLLKKLDWLDAELAGIDARLCEQTAAHEDLLRRLDTIPGIDVTTARVLIAELGTDMTTFPRAAQAASWAGLCPGNSESAGKRFSGRTRKGDRYLRRILVQSAWAAAHSKNCFLAALFFRIAQRRGRKKAAVAVAHRILIIAWSIIRSGSEYQERGGDHFDRLHPERTARKLVRRLERIGFEVAVKRPVGRPPVSKPPMPPTSCSTCWQFGILDCIHLLKRRRKTTSISNNPSDSVG

SEQ ID NO: 361537 - protein, 370 aa, unidentified
MAEPTLLFVGLDVHKDSIAVAHAQAERTDPPHFVGSVGTRQSDIDKMIRGLHSKAPNLVFAYEAGPCGYVLHRYLTGKGLECRVIAPSLIPKKPGDKVKNDRRDAVEIARLLRSGDLTPVYVPRVEDEAIRDLSRARDAARLTLKNAKLRLKSFLLRLGLNYTGRADWNDAHRRYLAKVVCPTATQQIVFQESIHAVDEQVARLRRIEQELLDVAPKWRLFPVVEALQALRGVQWVVAITIVAELGDLTRFDNPRQLAAFVGLIPSEHSSGNSRRQGGITKTGNGRARRALVEAAWAYRHNPKVSEAIQKRLESLPKVIQDIGWKAQLRLCKRHRRLTTRGKHSNIAVTAVARELIAFMWAIAKEVPIQP

SEQ ID NO: 361538 - protein, 336 aa, unidentified
MTIIRVGLDTSKHVFQMHGVDENEQPVLRRQIRRGAVEKFFAKLPSTRIGIEACGASHHWARLLHGLGHEVLLMPPQYIKAYVKRGKNDKIDAEAICEAMSRPTMRFVPVKTAEQQAALTMLGVRDLLVKQRTMLINAIRGHAAEFGVTTAKGPKQIAELLARLASDEDVPVLAREMIGVLASQLNGLDIKLKAIEARLMTWHRQDQTSQCLATIPGIGPIGGVSFALKVPDAKAFRSGRRFAAWVGLTPREDSTAGRQKLGRISRAGDEDLRRLLVIGATAVIRAAKPGRTAPWLMGLLARKPKKVAAVALANKMARIVWAMMVSGETYRRPAQA

SEQ ID NO: 361539 - protein, 371 aa, unidentified
MEHTRFIGLDIHKERISVAVAESGRSGAVEYHGEIANDPGAISKLCNHLGRSGKALAFCYEAGPCGYGVHRQLTSLGHRCDVVAPSLIPMKSGDWVKTDRRDATMLARLHRAGELTPVWVPDADHEAIRDLIRLRSVVRHVVTRARQHLQGFLLRHGRKHGGGTAWRMAFRRWLSTLAFEHPAQQIAFQDYVDAVMDAERRLKRVEEQIVGLLPEWNLRPVVDALQAMRGIALINAVALVTEVGDFTRFSNPRQLMAYFGLVPGERSSGETVRRSGITKTGNAHARRALVESAWAYRMKARIGRHKVDRIEALPKVVRDIGWKAQVRLCTRYRRLSARGKTANVVNVAIAREMVGFIWSISCAIQSASKAA

SEQ ID NO: 361540 - protein, 388 aa, unidentified
MTTQATLGGETNACDAALYMALELSDRSWKVLFQAPSGRRRERSIAARDVGQLLGELAEAKRKLGLPPEAHVVSCYEAGRDGFWLHRALVDNGVESLVVDSSSIEVPQRARRKKTDRLDLVKLMALLLRYVGGDRGVWSVVRVPDEEVEDKRQLSRGIDRLKTERGRHIVRLKSLLVKEGIKELRVGGADWAERVDKMRLWDGSPLRPRLKRELILEGERLALIERQLAELKAEREVLVASSPCKIAGTTRALRELGGIAEESSFVFSTEVLGWRTFANRRELAGALGVTGTPFNSGNSEHEQGISKAGNRRMRAMLMEIAWCWLRYQSKSALARWWQDRFARGNKRTRRIGIVALARKLLVALWRYLEEGLVPEGATLKTAKTRAAA

SEQ ID NO: 361541 - protein, 366 aa, unidentified
MFSLTSPAGAIHLGMDTSKNTIVVAILMPGGEVPVIDRMWNEEGSVRHLVGRFADRAVLRACYEAGPCGFELHRLLTSMGVACDVVAPSLIPRRAGERVKTGRRDAGRLARLHRAGELTAIRVPTQAEEAVRDLVRARAALLADRKRARQRITAMLLRHGRVWRCGSYWTQAHEQWIAAQRFSEPALGAALAHYRAALDTRQAELDAIEAELAPRAGREPLAAAVTRLGCYRGIAELTGLVLAAEVAGWRRFPSARAFMCFTGLVPAEYSGGERTRRGSITTAGSEPARTALIEAAWAYRFRPAIGVTLRRRRHDADPQTLARSWRAQRRLHARYKAMTARSKPAGVAVTAMARELAGFIWAEMTS

SEQ ID NO: 361542 - protein, 319 aa, unidentified
MKSPQLFVGIDVSAKRLDVAMLPAGTHFTVAHTDEGIVSLVRRLRELGPHIVVLEATGGYEIPVAYAMSEASLPVVIMNPKCLRHFAKSTGQLAKTDKLDARVLAHYAQAIQPPVRPLKDPEQAELATLMSRRRQLRDMIIMEENRRRTSTPKVRGNIDQHLAYLRQLLKDLDQEIHDAIRCTPLWHEKSVILQSFNGIGPKVSASLIADLSELGTAKGAQISALAGLAPMNRDSGQWRGKRTIQGGRPAVRQALYMAALVASRRNPVIREFYQRLRQAGKPAKVALTACMRKILVILNAMLKNRTFWNPQLPLCSLTK

SEQ ID NO: 361543 - protein, 340 aa, unidentified
MPIVMGLDQHRAQIAAEWIDTVTGEVSRARIVPGDRAAVRAFFEPFRGSGLEVALEATTGWRFVVEELERVEAEVHLAEAAEASALKGKKRRAKTDFADARHLRELLLIGRIPESWIPPAHILDLRARVRTRHLLSHQRTEWQQRMHAVLYHHGVAQRRDLLNRASREWLAGVQLPDAAREQIEIALHVINAIEQRLVPFDRELNQIAKSQPGCRTLMHEIYGVGALTAVTILAELGDVRRFQNSRDVVRYGGLDITVYQSDEHRAPGHLSRQGPPALRWALYEAAQRARFPASPDRPYYEQLAARIGGNRAYLALARKLLKRSYHILKELGDHALAPIA

SEQ ID NO: 361544 - protein, 369 aa, unidentified
MKAVLYGAGWPPGPVRGARRPSHLRQQPRVSLGTACRCVTHDRTVARSSIAWTRQVTVTNLICGVDVSSATLDARLGRDGAVGRFGNDAAGIAELALFCNAHRVGFVVMEATGGYERHPFALLWAQGIPVAIVNPRAVRRFAEAMGFLEKTDRIDSGVIAWFAAVKRVVPQPPAGKAQQSLAALVTRLRQLTELRTAQKNQRRLVTEKMALASFDELLGVIARQMKAIETEIAQLIDRDPLWQQLDAAFREIKGVADRTVARIMAEMPEIGTLSNKAAGKLGGLAPIARDSGKLNGKRPVRGGRREVRSVLFVVAEVVRRYEPDFIACHRRLTQAGKPKKVIRVALARKLLVRLNAKARDVRRDLACAA

SEQ ID NO: 361545 - protein, 372 aa, unidentified
MTQHDATTQLPTCDTAVATENPAPTPRVVGGVDTHKDTHTAAVIDTAGRTLGVAQFPTTPTGYESLLAWLRSFGTVALVGIEGTGAYGAGLALRLHLAGVAMVEIDRPERKTRRLQGKSDPIDAEAAARAALTGRRTGTPKLHNGQVEALRVLRVARRGAVNNRADAQRQIKTLIVTAPDSLRSQLRELSNRRLIQACATRRPDRATAADPAVATVIALRSLARRHQQLTAEIDELDSLIAPLVEAINPTLCALLGVGPDVAGQLLVTAGQNPERLHSEAAFAMLCGAAPLPASSGRTHRHRLNRGGDRQANAALYRITLSRLRWDPRTQAYANRRTTEGLSKKEIIRCLKRYIAREIYTALTSTNEPELAA

SEQ ID NO: 361546 - protein, 349 aa, unidentified
MGEVSTIGLDIAKNLFQIHGVDADGTVVIRKRIGRARVLEFFADLPPCRVGMEACATAHQWARELRRLGHDARLMPPTYVKAYVKRGKNDAADAAAICEAVTRPSMRFVPIKDVEQQSVLMLHRARDLLIRQRTQLINALRAHLAELGLVAAKGREGLHQLVAVVTECGNEQLPSNARFACQAIVTQLHAVQIEISGLDKRITQTHRTNADSKRLDTIPGFGVILSTAVAATMADPKAFRTGRDFAAWIGLVPRQNSTGGKERLGSISKQGDRYLRRLLVVGATSVINCARAQPYKYPWVIELLGRRPTKVVAVALANKMARIAWAVLAKGKPYRAPTRSSNAVVPAAA

SEQ ID NO: 361547 - protein, 375 aa, unidentified
MEGAPMLDTTTFVGLDVHARSIKAVSLDVMTGEVRCATFGYDAGAVAEWVRSVDPKAKCVYESGVTGFDLQKRLSGLGVDCVVGAVSKMIKPSADRRRKNDRNDAEFLARMLSVGNVVEVWVPDDECEAARDLTRALEDARDDLSRSKQRLSKFLLRHGLVFDERTPTGRRKGNWTRAHWSWIESIRFAEGADNDVLAYYVDAVRRAAEEKARLEGLVEAEARKPRWRRRVDSLRCLKGVDTATAADLVFEAGEFSRFRNARSFAAWVGLTPSEHSSGESDRRGAITKAGNKHLRKALVEAAWHYLTCSGRPKDLAKGQAPDRVARRHAAKGVRRLVERREALLARGVHGNKANVATARELACWVWAVGLMAEEA

SEQ ID NO: 361548 - protein, 378 aa, unidentified
MSNCTRYLGLDVHAETITAAIAEGRGKIRSLGKFPNRPEAVRKLIEKLGGGKNLKVCYEAGPTGYALYWQLTKLGVDCEVIAPSLIPKKAGDKVKTDRRDAEKLAQCYQAGDLTPVWVPTPEHEALRDLVRQRAAAKCDESRAKHRLVKHLLRRGLREPDESGAWTHPWWRWVQSLKFEHEAQQVALADCIAEVLHMGERLARLDKAIDRMVESAPAHMRAVIEALQALRGVAKLTAVTIVTEVGTFKRFRRPTEMMGYTGFVPSEYSSGGRESKGRLTRTGNAHLRHVLGEAAWHARHRPWLNLRMKKVLPTLPAGVAEIAWKAQERLHRKFTKMTYCRKPAGKVAAAVARELVGFVWAIGTLVESGLDGNSKARAA

SEQ ID NO: 361549 - protein, 360 aa, unidentified
MTTVAEIPRGIEEVPPLWDAFVGGDTHRDTHQLEMLSGIGTVISVITIENDADGYEQAIAWITEHAPGPRVLIGLEGTRSYGVGLSRALQVAGLQVVEVEQPSKADRRGRGKSDPIDAHHAAMRVLRMPLDRKALPRSDGDREAMRILLIARNEISTTRTGQINRLRALLLLGDDDDRAWCRCTMSKANLDKIARRRGRKNETTEQAVRRAEARRLALAIRAADVELAANLKQLGELADGFAPGLLELKGVGPFCAAQAIVSFSHVGRCRNEAAFASLAGVSPLQASSGRTTRHRLNRGGDRQLNRAVHTIMLTRWRDCPRTREYIERRRKENKTDREIRRCLKRYIARELFRALTAVGG

SEQ ID NO: 361550 - protein, 344 aa, unidentified
MSKFNLISIDLAKNVFQVGKFFYQNLQSNKAVSRKELLSILTTSPRCKVVMESCGGAHYWARKARSVGHEVVILDPRFVKAFRVGQKTDANDVIAIAAASFSPNVRPCKSLTQAQQSLQSIERMRALAEKQKRQLANQIRGLLLEFGVVIKQSECAFRQAIPEILEDSDNGLTVGLRQCLAQCYELFKAQSTLKETLNELLTGLVKQDEQCERLLALEGVGPITAVGLLISLSDTAHFTSGRNAAANVGVTPRQHSSGGKVRIGHIAKYRGEITLRSHLFLGARAVISQLKHREPKTKKEQWLKALVERRGVKCAAIALANKTVRTAYAMLKKGTSYEPSLLAN

SEQ ID NO: 361551 - protein, 531 aa, unidentified
MAGKITGSRRRRPAKSRSKNRQHLQKPSGVIAPRVARVGGDRFGIVCVDPAKHRSEWMMADYFGKLLIEPQTLEHQAGHFRAAIAQVRQALQQHDIQDIIVVVERTGNYHLAPKRAFASAGFETRVVHPFATKQYRMPADPGNKTDETDLHAQHRAAVAGFGLYEQDLPSLYRELQLRSRHRRNLVRKASALACQVREHLHLSMPGYSALFDRLLEHRMAMLIGRCCDTPEKVVKLGREEICRRLRKESIRCQHRTIDKILSWASEAAEQPIQDGALHHAIWTDLEELYRHLQRQITAIERELAGELAQTPYVRLMSIPGINAVSAAELAGEMGPINGYANANAITGRSGLFPSRYQSDQTDNSGRIIYTANRRLRCVLMRIADNIASHCTYYRGLAEQDLARGVDIRASRVKTVKKFSRLAFACVAGDEPMRHPAFREPDSILEKLREFHRMHQTPMQQVLADLTKAVEQLPGHTRGHEAKAVATVLRHQATGQRGAVEIGKLLTAVLARLGINANEVNETSTLETGDRP

SEQ ID NO: 361552 - protein, 291 aa, unidentified
MLDQTAHNSVPTVYAAIELSKKSWVVAIVQPAKGQPSIYRIKGGAFSDLVMRLRTATPGGERLLVCYEAGYDGFWLARSLQTEKIDCRVLDPASLQVNRRARRVKTDRIDVLMLVRALIAVERGDRHVCSIVRVPTVEEEDARRSHRERQRLIRERTAHINRIKGLLFGQGIRGVEPRLRRSRIDFSDLRTGEGLPLPARLRAELKREYARLDLVETQLRVTEAERDTADAQDPSIEYKRNMLIQLRGVGPASAAILTREIFGRRFANRRQLGSYLGLTPSAYDSGSTTRC

SEQ ID NO: 361553 - protein, 339 aa, unidentified
MENNNNPYYKHYLSIDWSQQDVSIARMRAGSNQPETKMFPSDIKKIKEYLKGLQGKKILTIEETTGSHWLYVELLESVDKILICDPYRNSLLKEGAKNDKIDARKLCLLLRSGLLKEVYHTSNEDYKIRKLASAYIALVKSGVRIKNQNSALYRGEGLKYKKDKIKKGEEILSFVEGQQKRAIKLYEEEKKKYEEVFKELKKKNEVIKMLCQVSGIKETSGVKIYSVVIDARRFENKYKYWAMCGLVKHDRESGGKNYGKKNPRYSRILKNVYKSAALAAIGGNNDIREYYEVLLQKGYPIAEAKNQIARYIAKVTYAVMKNKKPYKAYQWRELNKQKS

SEQ ID NO: 361554 - protein, 337 aa, unidentified
MKHIGIDLHKRIIVICVMNDKREIMERKRFSNEETDEMKAYFGSQGKFRAVFEATGSYEWFYRLLEPLAEEVVLAHPKKLRVIAESTQKSDKVDAYVLALFLSLDMIPCAHRPGPYVQGYRRLFRLRHKIQGRITSVKNRIRFILASYNADRKNLFTQKGRRYRNQLKVSEADRFTLTRYEQELELFQAQLKETEKKLRTYTAQAPHRIAESRVLLKTIPGVGDIIADGVMSELGDVDRFSSQKKVSSYAGLVPGYRKSADREIPLGITKQGSKILRWILIEASWMIIRYSAKWKRIYERLLKQTRKVQKAIAAVARRVLCMMVSMLQNGSAYNPSL

SEQ ID NO: 361555 - protein, 344 aa, unidentified
MNSTTIAVDVAKSVFEVAVSEQPGQVRERQRLSRERFRRFLTERPAATVLMEACGSAHHWARHAQAQGHRAVLVPPHVVRPYVLRNKTDRTDAKGLLEAFRNEEVHPVPVKSETQQALAALHRLRSTWLATRTARINTVRGVLREFGLILPLGAHHVVPHVRTLLEEADSGVPGLLRPALAAAVEEIRAVEARMRAVEQQLEAGAAQTLSVRQLRTIPGIGLLTATALVAAVGDVQRFPSARHFASYLGLTHREDSTGPRRRLGAISKRGDTYLRMLLIHGARAVLWHAKTKTAPPPDRLRAWALQVERLRGHNKAAVALANKLARIVWAVWRHGTDYMGTPAL

SEQ ID NO: 361556 - protein, 480 aa, unidentified
MGNINIQKHENQTIRKIFDDAGELQRVLVVGLDYAEEEHQVVICNGLGDCRCNPFTVKNNKEGLAFLVTRISHLCTKYALQKSHVFAGGETPGSWAVNFAYRLHLQGYPIIDLHPFRVAKFTENETTTTDKLSAMTICKCLINKMGNTHSYDGIYTELKLAVRSRSQLTKNRTRISNQIHTCCDTYFPGFLSQKKSGIVPFSKPCFFILENHSIQSIRSVKPSKLIRTLKKHGLSNADKNAEKLKNLANVTLESSPTYEQQVRRKIKYFMDQYNLINGQIANAEEEVAFLLRQTPGALLTSVDGISVTLASQLTAEFGDPQLTKNIDNKVTYFGLSKRTHQTGGEDKPKKKKGKSPRINKHGKRAILMGVTLVLEHGHHEFRDYCQQRELSGRNGTHALGRKLLRFVFSVLKATHDYVPKELQGLNRKDPLWQEHYKNLEKKMKRKWGKFTREPSPNQDALHKWENMINSVFGVKINLGI

SEQ ID NO: 361557 - protein, 399 aa, unidentified
MNYCLAIDIAKSKSTFALFNSNVSSIVIEPVDIVHSLENLLSLHSNLIKFGISNISVILESTSTYHLPIVNFFKDRNYQVIVINPLISKEHKRTLRKTKTDKLDCFILADIYFKGDYNKQSSFDNKYEEMQYISRYLITLEHNLVRIKNRFRQLIGLTFPEYETIFNNNSLFDEINLNFIYHYPHAEIVSNKRIDALTNTLFSYYNRHYNYYANKAKFIKSMASNSLTSVSTDSIVCNQIKELALFIISEQKHLVDLKQQLIDLCKDDKLFNVCLSFDGISYLTAAYLCAELKDISRFSSYKKLIASCGLDPTIIESGKSINYHGPISKRGNRISRKRLFNIIVNIVTVYSKHHIDNEFVIYYRKKRSEGKHHYAAIIACSTKLLRKIFYRFNDTSFCC

SEQ ID NO: 361558 - protein, 322 aa, unidentified
MSLPGPLCVGIDVSKATLDIAVSYAIEQFSVANDADGFDSIIAELRQHDVALVLMEATGGLEAAVACALQAEGFEIAVVNPRQARDFARAMGYLAKTDRIDARVLAQMAEVINRHPERERFIRALPDAERQVLSAMVVRRRQLIAMLVAERNRLYPAHPQSRKSINIIIKALEDELARIDKDMNNHIQNNFKELSERLSSVKGVGTMTAAALLAEVPELGSLSRRQISALVGVAPVNRDSGTMRGRRTIFGGRAGVRTTLYMATLVATRFNPVIKAFYTRLVAAGKPKKVALVACMRKLLTILNAMLRKNEEWNELYHHVAP

SEQ ID NO: 361559 - protein, 346 aa, unidentified
MKIIGCDFHPSFQQIAVFDTETGEITEHKLVNGNGEAERFYRSLPVGSLIGIEACGNSHWFIDLLGQLGHQVWVGDAAKIRASYVRKQKTDRRDAAHILTLLLENRFPKLWTPSRQERDQRQLLIHRHKLVQIRTRIKNSLQHLALNQGVQKKQKLWSKEGQKLLIQLPLQGWTAVRRQDCRELLAQLDERIAKLDKAAEQAAEAHPQASLLMQQKGVGPITALAFALTIGDVSRFPHSNQVASYLGLIPSEHTSSNKRRLGAITKQGNSFLRMLLVESAQSVTRCDPQFRKHYLHLCRNKHKAVAKVAAARKLAVRLYWVLRTDQNSQNAVHIESSPRVPLVGAS

SEQ ID NO: 361560 - protein, 341 aa, unidentified
MGEVSTIGLDIAKSVFQVHGVDVAGAVVIRKRVSRAKVLEYFGELPQCLVGIEACPSTHHWGRKLQTLGHTVRLIPPSYVKAYLKRSKNDANDAAAICEAVTRPSMRFVPIKTKEQQTALMLHRARQLLVRQRTMLSNALRGHLAELGIVSAKGRNGTAELLRIIADGRVSPAACGILKVLARQYSAIGIEIVSIDKSIMALHRRCEASRRLAEIPGIGPIGATALVAEIGDWKTFSSGRSVAAWIGLVPKQHTTGGKDRLGSITKQGNRYLRWLLVVGAMAVIRYARKHGTQKRPWLGRLMERRPTKVAAVALANKMARMAWAIMVRGERYKEPKLLLAA

SEQ ID NO: 361561 - protein, 412 aa, unidentified
MEVLHPHCAGLDVHKASVVACVRHMMGGAVKREVRSFQTTTKGLIALSQWLSAEDCTHIVMEATGVYWKPVWHILSDGAFALVLANAAHVKNVPGRKTDVNDATWLAELLAHGLVRGSFVPDEPTQEMRNLLRTRKQLVRERSRHIQRLQKTLEDANIKLDSVISDILGLSGRRMIEALIAGETDPNALAALAHRRIKASPAELEAALRGRVTRHHRFLLGLHLQQIDAIDAAIDQIDPEVDALVEPFHAAVQLLTTIPGIDALSACVILAEIGRDMSRFPTAGHLISWAGLCPKNDESAGKRRSTRMRKGAPWLKTTLVQCASAAARKKASYLQAQFHRLRARRGAKKAIGAVAASILTAAYHMLKNGTLYEDLGPAHFDKRAQANQVHRLIDRLRNLGFAVQITPMEAAA

SEQ ID NO: 361562 - protein, 413 aa, unidentified
MDVIVERCAGLDVHQATVTACIRFPGPAGERGQVTHTFGTTTPDLLALRDWLGAHRVTHVAMESTGVYWKPVYYVLEDGCQQVLLVNATHLAKVPGRKTDVADGAWIAQLLECGLLRGSFVPPPAIRELRDLTRYRKTLIQDRTREVNRLHKVLEDAGLKLATVATDVLGASGRAMLTALVAGTTDAAVLADLARGRLRAKLPALRQALTGRFRGHHAFLLGQLLVHLDYLDEAILTLSQEIEAHLAPFAEAAARLQTIPGVKQRTLAAIIAEIGVDMSRFPTAGHLASWAGLCPGNNETAGKRRRGRVRKGDRWLKAALVEASLAAIRVKGSYLGAVYRRICRHAGHNVAIVAVAHAILEIAWHLLAQGTTYRELGADYLHRRNAEQTARRHVRLLEHLGYRVTLAPVPAAA

SEQ ID NO: 361563 - protein, 327 aa, unidentified
MEVYVGLDVSLKERSICVVDGSGKIVSEGTVLSEPLALAEFLRAKAGRAKRIGLETGPTTTWLWHELRALGLPVICIDARHAKAALSLQINKSDRNGAVGLARIMQCGWYKEVQVKSLPCHEVRAVLNSRAQLVKTKCDLENQIRGLLKNHGLVIAKAGGHIFRLRAEELIGGHRLLPEAVRPLLAVHEVVRREIAGLTRKLLAMARNNDASRRLMTVPGIGPINALAFCAAIDEPSRFRRSRSVGAYFGLTPRRYASGEVDLTGRISKCGDAMVRTCLFEAAGVLLTRVQRWSKLKAWGHRLWKRVGFKKAKIAVARKLAVILHRM

SEQ ID NO: 361564 - protein, 425 aa, unidentified
MNDDVLIAVDPRQAGNTAAVLDPVTKTVLEAARSANSADGHAQLTAFTSRWDRRRWAVEGCCGAGRSLAQRLVADGELVLDVPAKLAARVRVYSRGQGRKTGKHDAVSAGLAALHGTGILPVACDDATVSLRLRCDRRAELIAQRTQAVGRLHRLLAELTPGGMRRELTANQAQALLARIRPAGDVAVVRVHIARDHLAGIRALDARLKYLSGQIAALVTAPGTGLTGLFGIGPVIAGRILAEVGDVARFPTKDAFASDHGTAPIDASSGDQVRHRLSRAGHRRTGHARHMMAVTQIRCPATPGRLYYQRKRREGKTPKEALRCLKRRLSDLVHHQLLADRRGTIEACRSPTTPRPARPASTSPAPRSSRPHHPSGRHTAGHERVRRAGLERPPPRQHRDPRTPAPAATPTSPTRPKFSAETAPS

SEQ ID NO: 361565 - protein, 354 aa, unidentified
MNYVGVDIHKRYSVLVAVDERGRELARGRISGNSVHAFAQFFEALQGPGRVVLEACWNWGRIYDVLSEIEQVEEVVLAHPLKTRLIAEAQIKTDSLDALALATLLRGNLIARAHVPSKATRARKELLRQRLYWARLRTRVRNRVHAVLDRQRELEMPQCSDLFGRKGLNALSKLRLAEPDATLLGEELDLLKLIDSQIKAQEGRIVAFNANEQATQYLQSLPGMGKILAAVAAAEIDAIERFDGAAKLCAYAGLVPTTYGSGGKVHQGHLLKSRNKWLQWAFIEAAWVAVGCSSYFGGIYRYHRARGKKANIAITIVARRMCRIAFTLLKERRNFQEQHRTFPGRSAVRLTAAA

SEQ ID NO: 361566 - protein, 397 aa, unidentified
MYIVGIDIAKRKHEAAVIDGEGTIIIKPFSFTNNCSGYNRLLAMLAKAKLPLDEVSFAMEATGHYWLALFTRLQKEGFRVQVINPVQTNSIRSFYIRQAKTDPRDALLIAEVIRFGHFSESTLHPENIYELRELCRGRHAIVSMQADVKRKVVALLDQVFPEYETAFTNLFGDTSMAILQTCPTPKELSEMPLEELCHLIEVSSHKRFRMAKAQELQALARNSFGFAMAGDVFSTMIRLYAKHLDFLKQQVREMDRKIAEIMDTLDTPITTITGIGPTLGAYILSEIGDISRFSSAAKLAAYAGIDPTMRQSGEYNGVRNRMSKRGSPYLRHAIWLAASSAVLHDPALKLYFQKKRDEGKPYMASVGHACRKMVSIIYAVMRDNKAYTPYIPNEISA

SEQ ID NO: 361567 - protein, 314 aa, unidentified
MPKDNVYVGLDISKDHLDLHQLPQDRAARFESNPEGISKLITYLKRRKPTLIVIEATGGYETQLAAELVSAKLNVAVVNPFQVRSYAKALGILAKTDAIDAQVLARFAQDIKPEPRTLPDEQELELKALIMRRRQLVEMLVAEKNRYHRASSTQVKQSLQRMLNTIQQQIDQLDKQIKNCVQKSPIWREKDNLLRSVPGISDKTAHTLLALLPELGKLNRRQIASLVGVAPMNRDSGLYRGKRKIYGGRKSVRNALYMATVAAIRCNPLIKPFYDRLRQNGKEFKVALTACMRKLLVIINSMIKKNIAFKQSFA

SEQ ID NO: 361568 - protein, 416 aa, unidentified
MEDEVYYERCAGIDVHKNLLVVCLRIGRKTEVREFGTRTHEIREIVAWLKAGGCQMAAMESTGSYWKPLYNIFEQDGLPAMVCNAYHIKNVPGRKTDVNDAQWIAKCLSQGLLNPSFVPDREQRELRDMTRFRKSQIEKRARNINRLQKFLEGANVKLGSWVSDIEGKSATALLELVIGKPDFTVDDVASRMHGKMSASAEELFLSLEGSITPTQREFFSHVMAVIREQTVQIEKTDAMIQNSLNANYKAAVEALDAIPGIGRISAEQIIAETSTDMSRFKNQHSLSKWAGICPGNNESAGKRKSGKTPPGNKTLKSTLTQCAKSAKNNRNSFFNAQYSRLVVHRGKNRATVAVAHSMLIAIYFVLCGYQYKDLGADYYIQFNREKKINSHVKQLSKLGVVIPDDILKTAIQCPPD

SEQ ID NO: 361569 - protein, 423 aa, unidentified
MMKLKYSICCGLDVHKNVIVATIVTTNKDGISEYLQKSFSTINSDIQRFHNWLIENNCYHVCMESTGKYWIPIFNYLENDIDICLTHPKYVKAIKGKKTDKKDSKWIADLYKFDLVRCSFIPPKDFRQLRELARYRFKLVCMKSSEKNRIQNCMTISNVGIASVLSDPFGKTATEIMSYLLEHTADSMDEKAVRKLIKKGAKSKSDEIIEAIKGYNIETDQAKKLELAQGHLEYLDDMITQTEVELYVRIKPYYEFVEFVSTMPGMTELSSTIVLAETGVDMDIFDDAKHLCSWCGLSPANNESAGKKKAVRIAKAGDYLKPMMVQCALAAIKSKKQPYFAIKYGRIKKRRGHKKAIIAIARMMMVCIYHMVSEKKPFTPTDYEELMNPQNHVERVVLNENNVFAYLESLGYDSSKLVKRNDN

SEQ ID NO: 361570 - protein, 386 aa, unidentified
MQKLNDLSRSLTALEPNGKLIAVIEMSLSSWLVAGIVPGVERQPLKKLAVDESALLKLLHRWREEAEKAGRRIERIAVAFEAGRDGFWLARWLKARGIEAYVIHASSVAVSREHRRAKTDRLDTELLKRSFLGWLRGERDHCKMVEIPTMQDEDAKRPNREHDSLIGERSRIVNRMKAALVRLGIRGFNPKLKRATTRLDGLHTPEGEPIPPNALAELRRDMERRRLVNNQIRQIEEERLERIEQAPCDGAHVMVRLLARVMGVGIETADMLVHEVLSRNMRDRRAVARYAGLTGSPDESGRKRREKGLARSGNARVRRGMIQLAWRFLLHQKNSALTKWFRSRTENARGTRKPMIVALARKLLIALWRLVREGIVPDGVVLRPAQ

SEQ ID NO: 361571 - protein, 341 aa, unidentified
MEQANTIGLDIAKHVFQVHGADSAGHVLFRKRITRVKLLGFLAAQAPCVVAMEACAGAHYWAREIGKLGHHVRLIAPAYVKPFIKRQKNDAADAEAICEAAQRPSMRFVPIKTEEQQANGIVFRARDLLVRQRTQCVNALRGHLLEYGYIFPKGITHVETLVALVEDLQSLLPDSVRAILKLLVDTFTALEAQIAALDGEIKQRSKSDPTARRLMTIPGVGPIASTAITALVPAAEGFPGGRDFAAWLGLTPLQKSTGGKQKLGAVSKRGERTIRRLLIIGASAVVQQASRRGAPKGSWLAQMLARKPKMLVTVALANKMARVIWALLVKGGNYKTPAAAA

SEQ ID NO: 361572 - protein, 412 aa, unidentified
MEKDKVKKIVSMEIKPQLDSAAGIDLHQEKLSCCFFVKDKLFEVKDYGTFTEDLQLLKDDCLRHKIPEVIMESTGVYWIPLCAILTDAGIKVHVVNGKFVKNMPKEKTDKKDAKWLCKLLVNGQIRDSFIAPVEQQAFRDLCRNRKKYTNHITQTRNRMSKVLDRRNIKLANVMSNLHTKTAVSIIKALSQGETDIEKLVSLACGKLKFKKEELRKALQGVLTPHDRNMLKMYLNDIAHFEQNIAMIEEEIKKHVDRVNPQLVKNLDAIAGVGKDSVEIVLAEIGDNVDAWENADKLAAWTGTAPGNNETANKQKNAGRRSGNKFLLTSLVQIAWAAVRTKNSYWQALYWHLRKRLIEQKAIMVIARKLIKIIYKVIKGTMTYKDYGREYFLVHIQEKLVQKRNHNIIVKSL

SEQ ID NO: 361573 - protein, 358 aa, unidentified
MKYVGIDVHKKMCQAAVLDEDGSLIDEQRFPNSPEGIMNFAHNLHQLQDEVKVVVESTGNLWIQIHDRLEKNGFDVALSNPSKTRLIAEAKVKTDKVDARTLAALLRADMLLTCYVPGEELRSRRELLRHRLNLVKSRTAVKNRIHGLLDKHGLRMPGTTAFSSANVAWLKDLYLGFMDEAILGSDLALLEALNLQITFIEEKIAMLAVEDARVGLLMTMPGIGYFSAMLILCEIGDISRFKGDKQFSSWMGLVPSVHQSGERIRVGGVSRQGNKRLRWALVESAKTAVRHDARLGEMYERVSKRRGSGCATVAVAHEMARILYFMLVRNEPYRGENRGLTERKLKNMRKRAFDGLQR

SEQ ID NO: 361574 - protein, 344 aa, unidentified
MKVTTVGIDLAKNLFQVHGVNEYGKVVIKKQMRRDQLAEFFVNLPACLIGMEACGGAHHWARKLQGFGHTVKLMAPQFVKPYVKTNKNDAADAEAICEAVARPNMRFVPIKNIEQQAVLALHRVRQGFVRARTAQANQIRGLMSEFGLIIPQGIGYIAGRVPELIEDASNDLPGSLRVLVQRLLDHLKELDRQVNELEAQIVKWHRQSDASSKLAQVPGIGPITASALVASLGDAKNFDGGRQVAAWLGLVPKQHSSGGKQNLLSISKRGDTYLRTLLIHGARSVIYRAQQKPESCSWINGVVNRRNKNVAAVALANKNARIVWALLAHDREFRSDYTAAKAAP

SEQ ID NO: 361575 - protein, 334 aa, unidentified
MWHVGIDLHRRTIVLAAVNDAGEAMKPITIPCADTAAIVNAVRALGPFRAVIEATGTYRWLYDLLHPCGTILLAHPFRLRAMIQRRTKTDKLDAQLLANLLRINQIPLAYIPSEPYQRLRDLVRCRARLGRELAEAKIQLRGLLARHNREAPFRVPFGVRGLAWFGSQDFGLIDNLVRDELLARMRHFGRQITILDRCLVETGQSFPQTEVLLDIHGIGLFSALLIVAELGEVERFRTAKQVGAYSGLTSRVHQSGDHCHRGSISRQGSPWLRWILVEAAMKTIHEDAALKNFYTRVRKRSSAKIARVAAARKLAEICWKRLRRWQREHIGKVA

SEQ ID NO: 361576 - protein, 348 aa, unidentified
MNAHHYIGFDVHKKTISFCVKTAAGEIVEEGSTPAERGALREWAAARPQPWRGAMEATLFSGWIYDTLKPYGEQLEMAHPAKMKAISAGKKKSDTLDARTIADLVRCNLLPACYVAPPRIRELRRLLRYRSLVVSEAVRMKNKMAGLLMETGAVYVKEKLHRKKYFASLLEELEEVPESVIDLLRLSRGALEMFESTQKRLVRELLADPELAERVERLMSIPAVGEITALTWALEVGDPQRFPSCSDAMSYCGLTAALKSSAGKQQRGPISKQRNHWLQTTLIEAAKLAPRWNPQLAALHARELERGHRNRATLAVARKLVTYLLAVDKSRQPFRLRAPSEVSTQKAA

SEQ ID NO: 361577 - protein, 319 aa, unidentified
MSARGVFVGVDVAKDALDVAVRPSDERWSVANDEADVAALVARLRPLEPTLVVCEATGGFEHAVIAALAAAGLPVVVANPRQVRDFARATGQLAKTDQLDAGILALFAERVRPTPRPLPDAAAQLLDAVLTRRRQLLEMLTAEKNRLGFAPKPLHRGIRAHIRWLERQLDDVTKELAAQIEQSPVWRAKDDLLQSVPGVGPIVSYTLLGELPELGTLTHKQIAALVGVAPLARDSGTLRGKRLIWGGRASVRTALFMAALCGRRWNPTLKIFYERLKAAGKPTKVALIACARKLLVILNAMVRNNTPWMTPTARIQYSC

SEQ ID NO: 361578 - protein, 394 aa, unidentified
MKLVGIDVGKNSHHFCVMDKETGELNVTPSSFPNNKEGFDFLINSLKPYSKKSILLGMEDTGHYHVALLKFLLSNGYTVALINPKTTDLTRKMEGGITKNDKLDTITICDVLDTPERKKQYRITKVDRFDLYEQRQLTRHHHNLKEELNLYCNRLQKSIDLVFPEFNTLFSSKYGVVYMNLLKTFGSAEAIASTDIRTIRKCFEIKGRGNRISLTPEKLKECAKNSIGISSEVETIQIKHLVSQIMLIKEQIAEIDKKIEEFSITNNSPILSIPGISHFSGTSILAELGDIGNYSKPSQIIKFAGVAPYHYESSQYNAQHTAITKKGSKYLRKTLYQIILPVINNNPVFKKYYLLKISQGKGHRCAQGHCIRKLLRIIYHLLETGQSFDPALLR

SEQ ID NO: 361579 - protein, 300 aa, unidentified
MTQFVGLDVSQKMTAICVVDDAGRRLWRGQCPTVPEQITVLVRRHAGDEARIGIETGAMTPWLVHELRNLGLEVVCLDARHARGALKMQINKTDQNDAEGLAQIVRTGWYRSVHVKSFESHRARALLGARTQLTGMTTRLSNHIRGVLKTFGLLPGAMPGLPFDRKVEALLLDRSDVALIVRPMLVAWRQLREQIVAFDKAIRALVKSNSACRLLMSVPGIGVLSALAYVSTVEDPARFGRSRSVGAHLGLTPRQYQSGEVDRSGRISRCGDTLARTLLYEAAVPPQMTCALLTRNISSK

SEQ ID NO: 361580 - protein, 349 aa, unidentified
MKERVLKEALGIDVSKASLSMCLGSLNNDLSKDFEPREEVTNDKEGFKELCSWLKRSTKGKEKPIVVMEATGVYHEGVAQYFYDKGYKVSVMQSGRVKRYAQSLDQRSKTDALDSKMLSMLGCERELSAWEPPSELMRHLKSLSRERSTLIKERSIENNRQQAIESSNYQDKQAQKRFKQRMRLLASQIEEVELQMHELTQSDADLSRKLSYPMSAPGVSFITAITVIAETSGFALIKSGKQLTSYAGYDVVLRDSGTFKGKTRISKKGNKHIRAVLHMPSMAAIRFNPTLRTFYQRLKPQKVKPIVALVAVQRKMLILMYTLWTNEENYDAEFEQKKAARKQVSSCTG

SEQ ID NO: 361581 - protein, 348 aa, unidentified
MRGAIHMQITTIGLDIAKNVFQVHGIDAAEKVVVRKRLRRGQMLAFFKALPPCLVGMEACATAHYWARELTKLGHRVRLMPARDVKAYVKRNKNDAADAEAICEAVRRPTVRFVAAKSAEQQGQLMQHRTRDLLMRQRTQVNNALRAHLAELGIVAAQGDKGVKELLTIVTDKKDERLPIDARASVIVLAAQLEAVQTLIGSIERRIKTQHRANEASKRLETVPGIGVIGATAIAATVADPTIFRSGRDFAAWIGLVPRQDSTGGKQKLGPISKQGDRYLRRILVVGAHSVLRRAMQNPEKYLWLTRLLARRPFKVVAVALANKMARMAWALLAHGGTYRAPEPAAAA

SEQ ID NO: 361582 - protein, 339 aa, unidentified
MLYVGIDVAKNKHDVTALNVQGKTVLKPLTFSNNKAGFELLDLSLRQLNQDCLIALEDTGHYAFNLLNFLHEQGYKVYTYNPLLIKEFAKSLSLRKTKTDKKDAHGIALKLLSDPNREQFQHDNRLVDLKILARHIHRLKKKQSDWKVQYTRCLDIIFPELDKIVGKHSEYTYQLLTCYPNPQKRLEAGFDKLIEIKRLTASKIQDILSVAPRSIGTTSPAREFEIIKHYKRLIDKAETCVNDLMAEFNSVITTVTGIGNRLEAVMLAEIRNIHAFDNPAQLQAFAGLDSSIYQSGQIDLAGRMIKRGSPHLRWALIQAAKACARFSPAFKAYLKTKLE

SEQ ID NO: 361583 - protein, 392 aa, unidentified
MIYVGIDVAKDKHDCFITNSDGEVLSKSFTISNNLKGFDTLFQKIISVSNDLSKVKVGLEATGHYSYNLLGFLLDKGLPTYVINPLHTNLYRKSLSLRKTKTDQVDSRTIATMMMSDMNLKSYSDSSYHNEELKSLTRYRFDKVKERAKLKISVSRLVCILFPELEKLVPTLHMASIYDLLSEFPSADAVAAAHLTRLSNLLSESSKGRYGKDTAVMFRKAARSSIGSHMPAKSLELKHTIKLIHELTIEIDEIETAIKRIMEEEIQSPILTIPGISYRMGAMIIAEIGDFSRFDSADKILAYAGMSPSTYQSGQLDSCHSHMEKRGSRYLRYALYNATKYVCHWDESFGTYLEKKRSEGKHYNVALSHATKKLVRLIFAMEKSRRAYIPVP

SEQ ID NO: 361584 - protein, 330 aa, unidentified
MEVWNVILGVDVSKKTLDICCAARKLFIRIDNNNEGFSNFKKWCKDNDIDLKHTFVVLEYTGGYEYRFIQFCESGGIAYCRVPGLEIKQSLGMVRGKSDKADAYRIGRYGEEKIKRLEPSRHLDPSIIELKKLLSFRKRLVRESAGYASTIKERKHMYQVGEKDLIIHISKRKIAANKRDIEKLEARIMELIKSNAAMLLNYRIITSIKGIGPVNAWMTIAYTENFTSFPDGRHYAVFVGVVPFEHTSGTSIKGKRRTSHLAHKELKQELNMAGRTAMAHDPEISAYAERKLKNKEYKLVLNNVKFKLILRMFALVKRGEMYVENYKRSA

SEQ ID NO: 361585 - protein, 385 aa, unidentified
MALKIVYKICCGIDVHKTFVVACIASTNDKGVTSYESHRFSTYTSGLKTLLQWLLKRNCKDVCMESTGKYWIPVYNILENDCSIVLAHPKYVKAIRGKKTDKKDAKWIADLFKHDLVAGSFMPPADIRQLRDLMRYRFKLTCFQSSEKNRLQNCLTVSNIQLGNVVSDTFGKSAQAILDKLLENPADTSFDLEPLVYKSLKKKLPELRDAIDGYITPEQAGKLKVIKAHYESLESRKAELEELILALAAPYQQELAILQTAPGIRSDFTAIGIISEIGTNMEAFPSAKHLCSWAGLTPTNNESAGKKKSVRVSKAGCYIKPLLVQCANAVVTSKKHPEIRNRYLRLKKRRGHKKAIIAIARMLLTALYHMLKNGETYNAELYPGL

SEQ ID NO: 361586 - protein, 428 aa, unidentified
MNSSSNYDPTQNTYAAFIAIDWADQKHTFSLQVAGQAKKETGTLEQKPEIIGPWVAKLRERFGARPIAVAVEQSRGALIHALLAYDFLVLYPIHPTTVAKFREAFKFSGAKSDPLDTDQILEILTKHLELLKPLNPDTQETRLLGRLVQDRRKTVDLRTSHIQALLASLKEYFPQAIELVSGNLTSRLAGDLLKKWPTLESFQQAKPSTIKRFYYGHNIRSPEVIEAALKLAINAQPLTTDSAIIESSCRVSQMHSQMIQTLNPVIDAYDQRIEKVFHDHPEFPLFSQLPGAGPVMAPRLSAFFGTDRSRYSKAQNVQTFCGISPVTKSSGKTRVVYFRRACPQFQRQSFHEFARLSVASCQWARNYVDYYTGKGKKYNTVIRALAFKWIRILFRCWKDRTPYDDNKYMGILKKRGSIFATLHLEQKK

SEQ ID NO: 361587 - protein, 321 aa, unidentified
MQFIGIDAAKATFDIALPLSHGKYRTKAKLPNSPKGFDELLAWRAKHAPNAAVGMEATGIYHEALAQALVEAGVVVHVANPARVKAFGQAEGMRTKTDRSDAKLIARFFEAQRSEKLYPYVPPTPSEVKLRALVRRRDDLQEMLQMEHNRLDVADISVQQGIKDVIRTLEEQIKQVQKASEDHIDNDPDLRRRHQLLTSIPGVGNTSSAQLLAMLGDLSKYSDVRQVVAHAGLNPAQRQSGNYEGKCRISRVGDANFRTKLYMPALTGKTHNPTLKSFADRLSAKGKPFKVVMCAVMRKLIHLIWGVLRSGRPFEPDVALA

SEQ ID NO: 361588 - protein, 422 aa, unidentified
METIYERCCGLDIHKKTVGACLIVPGPLGRSAKEIRTFGTMTEDLLKLSDWLTANRVTHVAMESTGVYWKPIWNLLEGNFELLLANAQHIKAVPGRKTDVKDCEWIADLLPRGVGGPTYSAHHGLLKGSFVPDLPQRELRELTRYRTSLVRERTSEVNRLQKTLEGANIKLSSVATNTMGKSGRQILEEMLRGSSDAKTLAQLAKGRLREKIGELERALEGCFGAHQRFLVAQQLAHIDFLDDTIEQVSAQVQERMRPFDEALSRLDAVPGVGRRTAEVLAAEMGIQMARFPTPAHLASWAGMCPGNNESAGKRKTARTRKGSPWLCSALVEAAHAAARTKETYLSAQYHRLAARRGKKKAAVAVGHTILVIVYHLLKQGTTYADLGPIYFDQHDRQAVERRLLNRLHRLGYKVTLESLSAA

SEQ ID NO: 361589 - protein, 344 aa, unidentified
MRYFAGLDVGLKASALCVVDETGLVVREAIVDSSPEAVAEALQSLVVEKLVLETGGLSDWLASGLGRLGLRAVVICARRARAAGEAMAVKTDRGDARLLAELARTGFYREVHVKSSEAQEGRALLVARAGLVAAARDAENRIRGLLRRFGVRLACLTGDRFAARVREALRGLPETLALAVEPWLAVAATARAGAGELKGEIGRRARADATCQRLMSVPGVGPLVAYGYRMTIDEARRFATARPVGAYLGLTPGRFQSGAVDRALPLSKAGDSLLRTLLYEGATSLLARSGKECALRRWGLKLAKRLGVKKARVAIARKLAVILHAIWVDGTWFEAEPVNRRAAV

SEQ ID NO: 361590 - protein, 355 aa, unidentified
MSTIIKWSLGIDVGSKFIRCCLSSIDMAQAVKIKASRKLPNTPAGLQELLQWIKKHYKDQPVPLSITMEATGVYYERCALLLQKEGLRVSVVLPTKAKRYMQALGLKSKNDKIDAEGLARMGAEQQLKQWSAASSLYYELRLLTRQHEDLQKSITSFTNQLHAAEHGMYRFEDIENNYKEMITKLQTLCLQVKEAIDEVIERDEILQEKVKLFCSIKGVGTLTAATIIAETNGFALFENIKQLISYAGYDVVENQSGDHIGKTKISKKGNSHIRRILHMPALNVVAYEVKPFSDLYQRVHLRTNIKMKGYVAVQKKLLTMMYTLWKRNEMFEPDYQKTIREKEPEPSFGLAAQKP

SEQ ID NO: 361591 - protein, 366 aa, unidentified
MLIIGCDYHPSVQQIAWADTETGECGEKRLMHSNGEAERFYRELKQKGVQVRVGIEATGHSRWFERLLSELGFELWVGDAAEIRAARVRKQRNDRFDAKHILKLLMEDRFPKIWTASSENRDRRQLLLHRHRLVGMRTRVMNQLQAIAMNEGVRRKSGLWSKKGRARLESLSLPPWTSRRRQELLELLDRLNPMIDKLSKAIEQEAARRSEVQLLMTHPGVGPITALAFVLIIGNPERFHCGRQIASYLGLIPCEESSADHWRLGHITKQGNALMRFLLVEAAQTVARCEPEWRQHYFHLVLRRGRAIATVALARKLAVRLFWMWRKGQDYQQVKKFGSDTGQLEVPNGVKSITVKVIERPAPSMA

SEQ ID NO: 361592 - protein, 343 aa, unidentified
MKLIRVGVDLAKNVFQVHGVGRDEKVVWRRRLARDRWLETLLEKLEPGCEIGMEACTGAHHWARRLQERGFTVKLIAPQFVKPYVKSNKNDANDAEAVCEAMARPSMRFVAVKSLEQQDIQAVHRIRSRLIEQRTAKANQIRGLVAEYGLVAPRELGQLRIALPRWLENAENGLSSRFRRLLSGLWDDLKGLDDRVCELDREICAIARNDPAAKRLQRLRGVGPIIASALVAAVGDARQFANGRQMAASLGLTPKQHSSGGKERLLGISKRGDRYLRSVLIHGARAVIRTAKGKSDRLSMWITRLAARRHPNVAAVALANKTARIAWAMLRNGTDYQPELLRG

SEQ ID NO: 361593 - protein, 316 aa, unidentified
MENPQPFVGIDVSSQHPDVVTVPVSQPFSKPNTDDGIASLVARLQPLNPQIVLLEATGGYEIPVAYALYEAGLPVVIMNPKAVRHFAKALGRLAKTDKLDAQVLALFAQKVQPPVQPLRDKEQLELANLMTRRRQLQGMIVMEENRRRLCTPKVRRNIDLSLAHLRQLLKDLNRELHDFIRRTPLWHENAEILQSFTGIGPTVSASLIANLPELGLLPVKKATALAGLAPMNRDSGQYRGQRKIQGGRPAVRQALYMAALVASRHNPVIREFYQRLRLAGKPAKVALTACMRKLLVILNAMLKNRTYWNPKLPLAA

SEQ ID NO: 361594 - protein, 413 aa, unidentified
MLKTLLVGIDVHSEKNSCAFTDEQGNRLIKKAFSLSNNLPGAEELVKRIESAMQEGAFDKLMIATEASSFLDLHLVDYLSNSKSLNRYLPLIYQFNPKLTAGLKKVYADIDKSDDIDPFVIADRLRFGHLPEPYEDSKAYFPLKRLTRYRCHLVNTIAREKNYFLTHLFLKFSSFSSLKPFSNTFGKTSLAVITDFLSVDEIVAMPIEELVDFIVKQGKNRFNNPEQIAEAVNKVARESYRLRPSLANSVNLILGSTLQNIRALCASLKEVDEAIAQEFKGFPNTLESVKGLGPVYAAGIFVELGNIERFSSQAKVAKFAGLTWRKRQSGKHESEITRMTKTGNRYLRYYLVEAANSLRVHNEEYKAYYQKKYNEVTKHRHKRAVALTARKLVRLVFALLTKRHLWQPLNGSF

SEQ ID NO: 361595 - protein, 343 aa, unidentified
MNVTRIGLDLAKNVFQVHGVDRDERVVIKRQLKRGQVLGYFEKLPPCRIGMEACAGAHCWARAFSRMGHEVKLIPPQFVKPYVKGQKNDANDAEAICEAAGRPSMRFVPAKTVAQQDLQAVHRIRGELVRQRTAKANQIRGLLAEYGLVVATRIDVLRRALPDIQEDPDNGLSGLFRRLLDGLRQDLVELDRRVAELDGEIQTAAKADETAGRLQSIPGIGPITATALVASVGDGRQFKRGRELAAWLGLTPGQHSSGGKDRLLGISKRGDSYLRTLLIHGARSVIRTAANKTDPRSRWISAVAARRHKNVAAVALANKNARIAWAVLTQGGRYDSQYGMAAA

SEQ ID NO: 361596 - protein, 489 aa, unidentified
MKRTKKTSDTNTSSSSRKRSKAWRIVHPNAAGIEVGASSHYVAVRSDAVPDGKSAVRSFGTFTEDLDALVEWLKACGVETVAMEATGVYWIALFHKIEAAGIQVLLVNARHVKHVPGRKTDVKDCQWLQQLHSYGLLEGSFVPPDEICRLRTLVRHRANLVSDAAQAVLHMQQALTEMNIQLHHVLNDLCGETGLRILRAILKGEGDPEELVKLRDRQISRSTPEQMKQALKGTWRQESLFVLEQNLKAFDFHHQQMDECDRQIEEVLKALPAVPASPKPSPGQANDPLAAQNPKAKGYQSRKRNEPERDLGPELARICGTDLTQAHGLRVLSVLVIVSEIGTDMRRWRNAKAFSSWLGLCPNNKISGGRVLSSRTRQVVNRAATALRMAASGLAQTETWLGSFYRRMRARVGPAAANTATAHKIATVVYHLLKYQQPFVDRDLALYEKRVYRTKLARLRKQAATLGYKLVEIPEDQDVKSADERTLSE

SEQ ID NO: 361597 - protein, 427 aa, unidentified
MPYKIASIDVHKAMLAAVNSDVEVVGEFEFERRQFGTTDGGLHQLVDWLIEQQVDEVVMESTAQYWKPVWAALERYWKPVVQKREGARPTTGSLHLAQAQSNRARRGRKRDFTDAERLLKRLVANELVLSLVPDAEQRLWRTIARAKKQQIGNRVQLQNRLEALLEEAYIKLSCFVSDLLGLSARRMLKALADGETDPEAVAALADNRLRATPNQLSDALGACRELNPVYRRLIKAVLEELELIDKHISRLDQEMADLLRPYQEQVQRLAEVPGLGPDSAQQIMAQVGATAATFPSGKALSSWVGVCPGDNESAGVNSSSRCPKGNRTMRSLLNQAANAAIKYKGGIFQIIYRRYVSRLGHKQTIGVVAHRLCHLIWKILHQGVRYDERGPDVNRRSQHQRTRRMIYELRKLGYRVELANSQSPVQA

SEQ ID NO: 361598 - protein, 435 aa, unidentified
MSLKESGRNANKRKEYVHQPDLLLVGVDVSKAKHNACMGTQTTMSCRKLEFTHTREGFQRFEQTLKTHMVKNGTQHILIAMEPSGIYWQALYERLKSCGYEVCLVHCQAVRNNRKTMQDGTSKTDEKDAASVFDLLRQGKFFLPVARDLELKAAYRLMQRHMALKKRVSQLRNQLRAAIHLAFPELNPLVKDLTQPTALRFLQASPTPASVLRNGRTCFLAQWQSRQRCGQWRPETCHRIYDLAQASIGLQDSSRLDEFEITTLAGDLVDALTKAQLWLDKAIALLEPRADYQLLVQLPRIGKPTAAAILTAIGDIHEYHNGKQLVKLAGLDLRLFESGSSIRKLPKISHVGSAYLRYWLYHYAMRRIAHEPHFKAYYQRRKQQSPGKGSGQRALIAVCDKTIRMIYRILTDHAPYNPKKDKSIADYYAAQRQAA

SEQ ID NO: 361599 - protein, 357 aa, unidentified
MPSITPQQQAFEVTGGVDTHQDTHTAAVIDQVGRVLGTEQFPADAAGYTALLDWMRRFGRLGPVGVEGTGAYGAGLARLLRDQGVHVVEADRPDRKTRRFQGKSDPIDAIQAAKTALAGERTGTPKRRDGRVEALRNLRVARRSAVDQRADAQRQIKALIVTAPDELRERLRGLPVTQLITVCASLRPDRADAASPATAAKIALRPLARRHQQLSAEITDLDELLAPLVAAINPRLVAANGLGTDVAGQLLVTAGQNHDRLASEAAFAMLCGAAPIPASSGKTTRHRLNRGGDRQANAALYRVVLCRLRWDPRTRAYAERRTKQGLSKKEIIRCLKRYIARELYQIITTSNDLELAA

SEQ ID NO: 361600 - protein, 397 aa, unidentified
MNDDAVNVNVSRVVIGMDPHKRTVTIEVMTADETVVDGGRFDTTVEGYAAMLEHVSQWRERVWAIEGCEGIGRHIAHRLIADGQDVVDVPAKLSARARVFATGQGRKTDATDAHSVALVGTRMAGLRPVVSDAQLEVLQLLVDRRRSIGEEHTRKISQLHRILLEMLPGGAKKYLSAAQAKTILAGVRPRDAVGKTRKRVAAELVADLERIYARKKAADKELKELVAATGTSVLGLHGIGPSGAARLLVEVGDLSRFPDRNHFASWTGTAPIDASSGDHVRHRLSRGGNRQINRVLHIMATVQLRTPTEGRAYFDRKKAGGKSSMEAMRCLKRRLSDLVFRTMLGDYTACKVTGPGGHRGNVSDSSATGSQPHTGSSEKPLPGPVTTQRRTRLPAAS

SEQ ID NO: 361601 - protein, 426 aa, unidentified
MNASTNFAATIGLDWADQKHDLWLRPADGSKAEHLRLEQTPETLHQWVAKVRERFGNRKIAIAIETSRGPVISALMAYDFIVLFPVNPKGLKSYRDAFCVSGAKDDRTDAQLLEELVRLHPEKLRALEPDTELTRKLAGLVENRRHLVDERTRMVNQIHATLKTYYPMAETLLDGQMNTPMAADFLLRWPDLECLQKAKPELLRSFFYKHNSRSAKKTEERLAAVEKAKALTTDRAIIVPARHRILALAGMLRPLHQAVGRLDKEIEQAMDQHPDAPIFRSFPGAGPALAPRLLVAFGTNRDRFETSADVAQFYGVAPVVVQSGNSKTVHFRYRCPKFGRQTFHENAGCALNKEPWAKCYYDQQKERNKGKHHQACRALAYKLVRIYFACWKQRKTYEPNRYLKALEEHASPLHRALEHLTATHRE

SEQ ID NO: 361602 - protein, 390 aa, unidentified
MASIALDRGDVIVGVDTHKDQHVAVAIDGVGGLIDEPTFIDANNGGYAELLAWARSLGKVHVFAVEGCGSYGMGLARFLRRHGHLPVEVSRPPRAGARRMSGKSDAIDAEHAARTALAGVGVVTPKLADGQVEAIRLVKIARDTAVKAHTTAMITLKAVLVTADQDLRDQLEPLSDFKLVTACSALEASGDLADPAVAMRHTLGSLARRWFDLHAEIKTHSKHLKALTRAAAPELLDAFGVGVDIAAQMLITAGDNADRVRSETAFAKMCGVAPIPTGSGKTSGRHRLNRGGNRQANAALYRAVIVRMRWHESTIAYVERRTTDGLSKKEIIRCLIGRVSAGGPSWLVRRERRGTASMSCHWMACLSWSPSPLVGPRDRHERPAPQRAEQ

SEQ ID NO: 361603 - protein, 414 aa, unidentified
MAKKENTVEFEQVIERGCGIDVHKKTIIATIRGQGIKLETREYDGFTESLEKLKYWLKYKKVTHIVIESTGVYWKPVFNILEEDFEILLVNASHLKSIPGDKTDRKDSKRLSKLLLAGLLRGSFIPSKSIRDLRDLTRYKKKLIEQKASEKNRVYKFLEDANIKLSSVVSNLSGATATKIIDAIIEGQENVDELVKLRHGKMNASIEELASALTGKLTDHHRFMLKMIKQSIRDKEALINELDAEIEKLIKENEMELDSELLSTIPGVDKDSAASILAEIGNDMSQFPDEHHLASWAGLSPGNNESAGKKKGERITQGDKWLKAIIVECAWGATRTKNTYLRSKYDSLAGRRGKKKALIAVGHKILKAAYFILKNKETYKELGGDYLDKKTKEKQIKRHLQQLRKLGVDVETAA

SEQ ID NO: 361604 - protein, 388 aa, unidentified
MNRIIKIGMDVHSSNYTLCAMEPTIGSEDRIFGEIKTAPDYKAVIAFIESLKKKLGPDDTYSIECGYEAGCLGYTLYNQLTKAGIKCVILAPTTMLTERGKRVKTDKRDACLIAKCLCYGGYHPVYIPTAKDNAVKEYIRMRDDHKLALKELKQRILAFTLRHGHQYTGGKWTVKHIAWLRKLELDPVCRETLDEYLTSYDEQEEKIRRFDNRIEEIASEADYKEKVGKLRCFLGIRTHIALSIIVEIGDFERFAKGNTFGAFLGLAPGERSSSDNINRLSISKAGNAHLRCLLVEAARGICKGHIGHKSKELRARQNGQSAEIIAYADRANTRLRSRYYRMIRRGKKKNVAVTAVARELACFVWGMMTGNISKASLAGTSVPAASQG

SEQ ID NO: 361605 - protein, 338 aa, unidentified
MEFKRISIDTSKHVFTIHGVDGEDRVVLRRELRRGQVETFFTRAAPTEIALEACAGSHHWGRTFRAMGHQVKLIPPQYVKPFVKRSKNDRNDAEAINEAASRPSMRTVPVRTVDEQAATMIVKHREMLVGQRTQAINALRGHATEFGIVAAKGCGNVAALVCCMSNDPGVPAVAKSMFAQMGQHIAELDRKIMRVDQQLHEQHKASPLSQRLAAIPGVGPIIAITMALSINPRNFESGRHFAAWLGLTPRENSTGGKHRLGRISKAGNERLRQLLVVGAMAVIRYAKPGSKSASAWLLQLLGRRPRKVAAVALANKIARVIWAMMARGETYRQQPATV

SEQ ID NO: 361606 - protein, 338 aa, unidentified
MELYAGIDLHSNNSVVLVLDENDRAVYQKRLPNTLDKIVQALQSCGTPIKGVAVESTFNWYWLVDGLQAAGFVVHLVNTAAVKQYDGLKRSGDFEDARHLAHLLRLGILPTGYIYPRQERALRDLLRKRSQMVRTRTTQILSMQNLLARNLGARSSSNQLKKWDNEVIDALDFLPEQKLAIKANLAVMTCAHREVDALEREIVNRAKLRADYQQLLTVSGVGKVLALTIALEVGDIKRFDGAGNFASYARMVDSRRESNGKTKGVGNTKCGNKYLAWAFIEAAHFAVRYDEAIKRFYQKKSAKTLAVVAIKAVAHKLARACFHVMHDGVPFDVKRAFG

SEQ ID NO: 361607 - protein, 351 aa, unidentified
MKYYTTTTEFNCGIDLHARQMYACLMDRQGRKLVHTNIQGNDFGYFLQKVEPYRHDLTVVSECTFNWYWLADACEAAGIQFVLAHALYAAHIHGGKNKNDRIDSEKLAHLLRSNLIPPAYIYPSERRPIRALLRQRMSYVWHRAELMTHLSMNQTAQNCVPAQKGGHNRDVWQERILAQTPNPYHQLAVRCDMDAIRTYDDLINKLDGTITLHARQNQSRDYTLLQTVPGIGDVLAMTILYEIDTISRFPTVKDFTSYCRLVKGSVASAGKLKGLTGGKMGNAYLRWAFGEAAVICKRSHRLLSPYADRLVAKHGTFKGNAILANQIARAVYFMLQSGQAFDPERVIKTSI

SEQ ID NO: 361608 - protein, 350 aa, unidentified
MLIIGCDYHPGFQQIAYVDTETGEVAERRLTHREEAEQFYQDLKQRKAPVRLGMEASGHGRWFERLLRDLQFELWIGDAAEIRAKRVRKQKTDRQDAQLLLRLMMEDRFPRIWVPDAANRDLRQLLWHRHRLVQMRTRVMNQLHVVALNEGLRRKKALWRPAGRNELESLKLAPWATRRRQDLLDLLDQLTPKIQDLTRQLEQEVERRPVTRRLMTHPGVGPLTALAYELVIGTPQRFHCGKQIASYVGLVPTEESSGDRRRLGHISKQGNVLLRFLLVEAAQVTVRSHPEWRSTFFHLAMRRGRKIAKVAMARKLAVHLYWMWRQGLDYGQLQKLGSHAGEPGNRHGVQ

SEQ ID NO: 361609 - protein, 319 aa, unidentified
MNEIVLGIDVSKRTLDVALIFEGRTLCKQFKNSAYGFKSLAAWLASLKIKQVHACLEATGIYGEAVTLFLHDEGHQVSVVNPLRIKGYAQSNMRRNKTDRLDARLIADFCQTQKPDQWQPPSKAVKHLQSLVRRVEVLEEMRQAEENRLANASSQIKPSIERMMTLIKEEIRELERHIKEHINCHPDLKEQSDLLQTIPGIGARTANLLLSEIEFERYSSARSLAAQAGVTPRKRQSGTSLKQTSLSKLGNARLRKALYFPAITAKQHNEIVKEFAKRLKKNGKTPMQIVCAAMRKLLHIAFGVLKHKRAFDASLAFSA

SEQ ID NO: 361610 - protein, 460 aa, unidentified
MNRKRSKSRMDRTMPTVHPNAAAIDVGATMHMAAVRADSAPQPVRSFGTFTADLHRLVDWFTECGVETVVMESTSVYWIPIFELLDAQGFTVLLVNARDAKHVPGRKTDVSDAQWLQRLHSFGLLRASFRPKGQIAELRAYVRQRERLLEYAASHIQHMQKALTEMNLQLHHVIADITGATGLRIIRAILAGERDPEALAGLRHYSCHSSAETIAKALTGSYRPEHLFALEQALALYDVYHDKASACDARIESVLKELSIRHGRDYGSAPAASRRRNRTDQANALAFDVRAALFALLGKDITAIDGLGPYLSLKLIAECGDDLSPWPSAKHFTSWLGLAPNNKVSGGKMLSSRTRRSGGRAAALLRLAAVTVGRTDTALGAFYRRLSSRIGKAKAVTATARKVAVLFYNAVRHGMEYIDPGASSYETRYRTRVVNNLHRRAKAFGFVLQPLEPKAGATVS

SEQ ID NO: 361611 - protein, 320 aa, unidentified
MTYIGIDVSKDSFVAAYPKKSGYTTKTFLNTTSGVRQFISSLPEDCHCVMEATGNYSMLLLYLLQQANIIVSMENPQKIKHFARAMLSTTKTDEIDAKLIALYGEKMEPAPYKIPSESIILLKQKRTVLRQLKKQLIAMTNMQHAMSVLPKQDPTAKVAIEQTIKFLRKQISKLEDEITHLSNKEFKRQMELLTSIKGIGENIASALILATGGFTYFSSAKQISRFLGLCPTYQQSGTSVNVKGHINRNGDTHLRSLMYVVAFSSIRSNTACKETYERLRSRGKSGRVAIIAIANKLIRQAFAVVTNNRPYIDGYVSSLV

SEQ ID NO: 361612 - protein, 390 aa, unidentified
MIYVGIDVAKDKHDCCILGSDGEILFSPFTIQNSLQGFDELYEKIWSLTSDLSEIKVGLEATGHYHLNLLRSLLDNGLASFVINPLHTNLFRKGQSLRKTKTDKVDAASIAMMLLSDKTLKPYSDTSYHNEELKSLTRYRFDKVQERARLKISVSRLVSILFPELEKLVPTLHMPSVYALLSEFPGALFIASAHLTRLKHLLYDASKGHYGRDMALAIRDAAASSIGSVMSAKSMELKHTIHLIQVLSAEIDEIEHAIYAIMDTLDSPITTIPGIKNRMGAMILAELGDVSRFDNPDQILAYAGLSPTTYQSGQLTSSYAHMEKRGSRYLRYALFNAAIYVCHWDPTFKAYLAKKRAEGKHYYVAISHACKKLVRVIYRMQLTGEPYRVA

SEQ ID NO: 361613 - protein, 372 aa, unidentified
MNNTTIFVGMDVHKESFTLCEYQIETEKASHFRHMPADYKEVLRYLEFLRTIYGRDTIFVCGYEAGCLGYTLYHQLTNHNVNCVILAPTTMLEKRSGKRIKTDKRDAELIAKCLAQHNYSPVHIPTATDEETKEYLRMRDDHKLALKRIKQQILSFCLRHNYRYEGKSHWTVGHVKWLKSLNPEALYKEILDEYLLTYTTLSDKIERIDKRIEELAAKDEYRESVKKLCCFIGVRTHTALSVLVEVGDFKRFPSAEKFAGYLGLVPGENSSGDSTTRLGITKAGNRHVRVLLTEATQGYTRGAVGYKPKALKARQKGNNPQVIAYADKANERLKRKFFKMVLGKSKKHNVAKTAIARELACFMWGMMTDNIA

SEQ ID NO: 361614 - protein, 355 aa, unidentified
MSSEKYIGMDVHQATISVAVLDAQGKTIMESILETKASTLLEFLGGLRGTLNVTFEEGTWAAWLYDLLKPHVAKVLVCNPRKNALLKHGSKSDKIDAQKLANLLRLNDLKPVYHGETGVRMLRELARSYLAIVKDLTRVMSRVKAVYRSWGIPCGGRDVYYTRHRKQWLDKIQEPGVRRRAERLYQQLDMLQHLRQQARRELLAESRKHTITAKLRQIPSLGPIRSALAVALIQTPNRFRTKRQLWTYSGLGLETRDSGEYHYVKGQVRRRKKQKFIRGLNRDYNHDLKGLFKGAALRATMLPGPFQDFYQRSVAKGIKPTMVRLTLARKIAAITLTVWKKGENFDADKVKPQAA

SEQ ID NO: 361615 - protein, 370 aa, unidentified
MLIQELGRREIWSIVNIINLKYYMMRPNLFMEIDRVVSQCVGIDVSKEKLVATMCMFSQAEQAVYSKATEFDNDKTGFNQLVKWSRKEARKELPLQYVMEATGVYHEHLANHLVRIGCTAVVMMPTKAREFAYWEGMISKNDTIDSRVLALVGCVKRNMRPWKPTNPLYRELRTMTRFSQDVKKLRTELKNHLEALEHSHEAEKSVIKHYESLVASLDKRIEKNLENMKKKVASDEELNKKVENIITAPSVGFLSAVTVIAETNGFALIQNRKQLTSYAGLDVRDSQSGTVNGVSRISKRGNSRIRAILYMPAVQCRLHNKHLKKAYDRIVAKHPDKKMIAVTAMERRLLLLIYALWKSDRPYSEDYDKE

SEQ ID NO: 361616 - protein, 340 aa, unidentified
MTITTVGIDLAKDVFAVHCVDQNGRTVLVKPKVSRAALPELIAGLPPCVIGMEACSGAHYWARLFRQYGHEPRLMAAKFVSPYRMAGKSGKNDAADAQAICEAVRRPHMRFVPVKEESQQAMQCLHRTRQGFIEEKTATYNRLRGLISEFGIIAPQSTDALHHIVSEQKNSLPLQVQQCVDDLLEHINRIEDNIAEYDRILSRMAKSDHRSQRLMELKGIGPTTACALVASIGNAHDFKNGRQLAAWLGLTPSQYSSGGKSKLGRITKAGDSYLRTLLVQGARAVLIGAEKRTDSFSRWVCSLIERRGYWRAFVAIAAKNARLCWASLHYGDDFRLYSAS

SEQ ID NO: 361617 - protein, 351 aa, unidentified
MPRTSTVHAVTTIGMDMGKNTLHMIGLDSRGAIVLREKVSRGRIASRLANLPCCLIGIEAGLATHYVARELAALGHDVKQVPPTYAKPFRQGHKNDFRDAHSVAEAVQRPTTRFVPAKTDEQLDLQALHRVRSRLVSERTAVINQIRGFLLERGIIVRQGLRFLRQALPDILAKRTDVLSPRMVRIVADLASDWRQLDERIEPVTDEIETLAKSDDGCRRVMTVPGIGPIISSAMVAAIGNGAAFARGRDFSAWIGLVPKQMSTGDRTILGRITKRGNGYLRTLFVQAARVILLRPASWPKHSFGVWLARAAQRLHRNVLAAALANKLARIAWTVLAQGRGYEARITKPAV

SEQ ID NO: 361618 - protein, 336 aa, unidentified
MFQLGIDVSKNTLDLCLLREGVKGRVKTRRLKNDVNAASSVITWLGKQQCAPADVHIIMEATGVYHEPLAYGLYKAGAKVSLANPHRSREFARGMDILTKNDQIDAYMLACYGALKEPEPWVPPPESIRYLSALLRRRDALVTDRSREKNRLEKCRATDIPPVIAESIENVLRNLSAEIERLDELLLTHLNQHPELKKDFDLLTSIKSVGFQLGLNMLVILRGHRFDTAGQLAAFLGVVPVEKSSGTSIRGKPKLSKNGPPEIRAKLYLASMCSLRFNPVMKVMYERLCLSGKAKMCAIGALMRKLVHLCYGVLKTQKPFDAEHLSSDARSACKAA

SEQ ID NO: 361619 - protein, 316 aa, unidentified
MISCFVGIDVSKATLDVGFWPELSKPFQLRNDPEGIAQLIACLNELEVERIVLEATGGYEKAVFKALRIADLDVVRVNPKRSHDYAQAIGQLAKTDRIDALMLAKFAQHLASPSKIEPSQARDELSELVKLRDQIVEHRDDDRRRIKQATSPVAITFFTEHIASLNAQIKALDKHLAQASKALNSEKAKHLASVKGVGLITTAKLMAYLPELGTLSGRKITALVGLAPYNKDSGSKSGPRKIEGGRYKVRGVIYMAAWVMIRHVPEFKTRYDALVARGKRPKVAVVACMRVLLVRLNAMLRDGTPWKDYKTQAPAA

SEQ ID NO: 361620 - protein, 340 aa, unidentified
MNIKRIGLDLAKNVFQIHGVDHHEKVVLRKTLRRAHMMTFFSGLSPCLIGIEACGSSHYWARELTRMGHTVRIIPPKLVKPYLKGNKNDANDAAAICEAISRPGMRFVALKSEAQQTLQAEHRVRARIIRERTALCNEIRGLLSEFGLVLPVGINHVRKALPEILSQQEQWNDRFIRLLCELSEELQMLDERISRHDRRLQQAARDDIRIKRLMEIEGFGPIVASALVAAVGDAKQFKNGREMSAFIGLVPRQHSSGGKERLGHISKRGDSYLRTLIIHGARAVLRFSAGKTDRRSLWLQSVAERRNNNIAAVALANKNIRIAWAILSRSEEYRGVENAA

SEQ ID NO: 361621 - protein, 365 aa, unidentified
MTTMTQPPNETRRVIGGVDTHKDVHVAAALDHLGRLLGTQSFPTTAAGYRELSRWLRSHGDVVSVGVEGTGSWGAGLARSLTADGVDVHEVMRPNRQHRRRHGKSDEADAIGAARAVLAGDAVGTPKSQTGQVEAIRLLRVARRSAMKARTQAANQIHAVIDTAPEQLRRHFVGKPTTAIVAETAMFRRRHRPDTPLEAARLALRTLARRWEYLNDELDELDAQLDDLTATVAPTLRAINGVGAQVATALLAAAGDNPDRLRSSSSFAALCGVSPIDASSGRQQHHRLNRYGDRQANWALHIIITSRLRWHAPTQAYMARRLAEGRTPKMIYRCLKRHVIREVHRAITTDLAPAKPVERAPVRAA

SEQ ID NO: 361622 - protein, 399 aa, unidentified
MAAPSLWAGLDAGKLDHHCVAIDASGRRLLSRRVRNDEAALVALIEDVIALADGGSVQWAIDLNAGGAALAIALLLVRDQDLLYIPGRIVHHAAAAYRGDGKTDAKDAAIIADQARMRTDLPEFRHRDETTVELRTLCARRADVSADRNRALNRLRAQLLEYFPALERAFDYSHRKAALILLTGYQTPEALRRIGRTRLENWLRDRHAYNPGAIVSRAMEAANAQHIVVTGQHLAAVMVARIAQQILDIDAELADLDDMIEERFSRHHQASVIRSMPGFGPLLGAELVAATNGALDSFPSADRLAAVAGLAPVPKDSGRITGNLKRPRRYDRRLLRVFYLAATNSIKTCPESRAYYDRKRAEGKHHRQAVLSLARRRVNVLWAMHRDNTAYKSTTKTAA

SEQ ID NO: 361623 - protein, 424 aa, unidentified
MKSEQAEQIEFAAFVGLDWADQEHAVCLQESDSAKVETSVLKQTAQSLGEWANQLRARFGGRKVAVCLEQSKGALIYVLMSYDFLVLYPVNPQTLAKYRKAFRTSGAKDDPDDASLLRELVKLHRDRLRALVPDDVQTRMLQMLVEGRRRIVGERTRLTNRLTSLLKAYYPQALEWAGELKSLRACDFLKKWPTLEDVKRAKGSELKKFYRQHGSRNEEVIEERIKQIRASDPLTRDQAVIRSSAMVVAAIVSQLPCVIGAVDEFDQEIARVFEQHPDHEVFNSFPGAGSTLAPRLLAAMGSDRTRYESAEEVQQFSGIAPVTQRSGKSKWVHRRFACPKFVRQTFHEFAKQSIIWSKWAHAYYDQQRQRGKHHHAAIRALAYKWIRIIFRCWMDRTIYNEQAYVEALRRRGSTLIPSPASSDS

SEQ ID NO: 361624 - protein, 373 aa, unidentified
MFHFTTLFIGMDVHKESFSLCYYDMMTNQFKHSTKVGPNVSYIVNYVNELRRLYGQDAEVLCGYEAGCLGFTLYHQLQAHGLPCIVMAPTTVMKEGSKRVKTDKKDAAQLAKALAFRSYRPVHIPTVEDEQVKEYIRMRTDHKVALKKIKQQILAFCLRHDFRYTEGSSNWTQKHVRWLHSLNLDGLYAEILTEYLLTYEKLVDQIERYDARIEQLGQSDSYQEKVSQLSCFIGVKTLTALSIVTEIGDFNRFATAQHFASYLGLTPSENSSGDKERRGAITKAGNSHVRRLLIEAAQSLAKGTVGYKSKELKRRQSGNRVEVIAYADKANERLRRRYRTLVLGKNKKQNVAKAAIARELSGFIWGMVTGRIA

SEQ ID NO: 361625 - protein, 342 aa, unidentified
MKQYVGLDVSQKETSVCVVDEVGQVLFEGKAKSDPGALTALLRKRAPQAERIGFETGAMASWLWHELRRVDLPVVCIDARHAHAALSVRMNKSDQNDARGLAELVRVGWYREVKVKSEESQKIRAILVARSRLVAIRRDIENQVRSLIKEYGLLFPRAIGLQFRNQVCELLGEDHQLLSVIAPLLSIHEQICKQQSKFDDEVRQLAKSDETTRRLMTVPGVGVVTALTFRHTIDDPSRFRSASSVGAYLGLTPRRNQSGETDINGKISRWGDRLVRTYLYEAATVLLYRTKKWSNLKAWGMKLAKRIGMRKAKVAIARKIAIVLHCIWVDGTSFDWGQAKEA

SEQ ID NO: 361626 - protein, 428 aa, unidentified
MTQSPNPTPPTFAAFVGIDWADQEHAVCLSPADTLKPEQFTIHHTPEAIAEFVAMLRCRFGGQPVAIALEQARGALLYALMGHEFVRLYPIHPATSKRYRDAFAPSGAKDDPVDARLIWELLVKHRDQLRPWQPQDATSRQLALLCEHRRDLINQRTRLVQQLQAALKTYFPQALDWTGEDLASVMATDWLVRWPTLEQLQRVPPKTVRAFYYAHHCRRPDLVQQRLHQIKTAQPLTTDAAVIAAHSLRVQSLAHQLRPLLASLAAYDQQIQALFATHPDAAIFTSFPGAGECLAPRLAAAFGTDRDRFPDADSMLRWSGIAPVTRRSGKFQTVHRRYACAKFLRQTFHEFARCSIKFCEWARLYYETQRAKGKGHHAAVRALAFKWIRILWRCWRDRRPYDDSRYTAALRRSGSPLAKLLPLPSQQP

SEQ ID NO: 361627 - protein, 355 aa, unidentified
MDRTKYIGMDVHQASIFVAVRDAAGKLLMECIIETKAATILEFIQGLHGSLWVAFEEGTSAAWLYDLLKPHVAHLVVCDPRKNALLKAGNKNDRVDARKLSDLLRAGLLTPVYHGESGVRTLRELGRSYLTVTKDLTRVMNRLKALYRSWAIPCAGQKIYAPRHRSAWLEKLSEAGVRRRAEHLYQQLNILVRIRREARRELLTESHKHPANQLLRQIPRLGPIRVALLIALLQTPHRFRTKRQLWAYCGLALQTRSSGEYRFTGGQLQHSKKLPALRGLNANHNHDLKNLFKSAATHASASTDPLGDFYQNLLAKGMKPAMARLTLARKMAAIVLKIWKKGERFDPGQLKRQAA

SEQ ID NO: 361628 - protein, 398 aa, unidentified
MGGNLTGGKMKIYVGIDMAKDKFDYCTMDDDLNILFRGDNCHNDRSAFDSFGKTLEDLKPMTRQMTIGMESTGIYHLPLYMFLRNNGYHVRILNGLEVRGMKKARVRKTTNDGIDAQSIARYLMVSKDMDSYDYPEELKNLRELVTALDILNTKIVATKNNIIRIMDMEFRGLSNILDLDHDTVNLLSKYHTASDFISADESEMEKYVTKAKIKRIRSVAEKAPELGNEKKALDIELKSLLRILDLLLVEKENITEAMEKEFVTLGQIITTIPGIGPITGAVIMAKIGNIERFENAGKLVAFSGIDPVIKESGKIRSERSISKRGDPMLRTAIYQSTVSAIRCNPVISDFYHRLTERGVPKKKALIASSRKMCHIIFSVMHNNKPFEVPEKFRKESAS

SEQ ID NO: 361629 - protein, 391 aa, unidentified
MIFVGIDVAKDTHYAAVSDDSGAVLVKPFAFQNNAEGFCLLLKKLSEFDRSKLLIGLESTGIYSENLICFLYESGFRLAVINPIQTATLRKTAICKTKTDKVDTMLIIKSLMVNSYRLYSQRDADSLKLRTLCRFRQNLKKFKARLKIQLAGYVNLVFPEFGKFFKSGIHIAASYALLKKYSSPKEIAALRTSTLCTLLSKASHGRFGKDTAEALKSLALSSVGVKNPYISIQIAQTIAQIELLEQQIKDLNSAIEEAMESINSVLVTVPGIGAVNAACILGEIGDIKRFSKPCKLLAYAGLDPTVRQSGQFTAKSTRMSKRGSALLRFALINSAWQLTLNDTTFKAYYDLKRSQGLNHYGALGHVAHKLTRVIFKLLTSDTPFNPAKLVA

SEQ ID NO: 361630 - protein, 307 aa, unidentified
MFVGIDVAKDRLDVHVRPAGEAFTVGRDGEGIEDLVGRLSRMAPALVVLEATGGFETIVAAGLGAAGLPVAVVNPRQIRDFARATARLAKTDALDAAVIAHFAEAVNPPARPLADEQSRLLGELMARRRQLIEMIGAESNRRRMLTVRRTLKTVDRVLATLKTQLQQIDDDIDSAVRGTPAWREAEDLLVSVPGIGPRIARTLIAELPELGRLGRREIASLTGVAPFNRDSGTLRGRRTIAGGRPVVRAALYMSILVSIRRKLPLALTYHRLRAAGKPAKVAIVACMRKLVTILNPILRDKKPWASA

SEQ ID NO: 361631 - protein, 311 aa, unidentified
MRITIGIDISKDTLDAYQLPDNQHIQVANDQTGHKTLVRWIGKYDLPLVVFEATGAYHRNLEAVLTASDTAFAKVNPLQARRFAEATGRLAKTDRVDAIMLAKMGAVLELKGHKPRSEALLILKELITARRALMKDKVAAKTRLQTTTQTLLKNQINARLRQIDIQIRQVDVAIAQKIAQDEALSHKLGILISIPGIAEATAFSMLIEMPELGTLEGKQAASLAGLAPFSRQSGKWQGKERIQGGRAFLRQAIYMPALVATRYNPDLKAKYDQLIGAGKPGKVAVIAIMRKLLIMANALLRDGRKWSEIRP

SEQ ID NO: 361632 - protein, 348 aa, unidentified
MVTIGIDPHKDTHCAVAVNAVGRQIATRTVLARAAGFAALVVWARRLGDDGRVWVIEDCRGVSGPVERFLLDHGETVVRLGPHLMAGARTGVRDRGKSDPIDALAVCRAALAEGIETLPAARLAGPELDVRLLGDHRERLVRQRAGLICTLRWHCHDLWPELEIPRRALIGVGWQTRLAGRLAQAPATARAQIARDLLTRVRELTQTIRQLTDQLEGLVRRLAPQLLAERGVGVVLAAKLIGEIAGIHRFATDAKLARTAGCAPIPVSSGRTDRHRLDRGGNRQLNHAFHLLAVCKLAHDPQTAAYIAKQRQAGKTTPEALRCLKRHLVRRVFTLLRCPKLVPQTACT

SEQ ID NO: 361633 - protein, 346 aa, unidentified
MNFYTGQHKFYCGIDLHARKMYLCILDEKGEVKLHRNMNTDRDAFLNAIGPFKEDIVVAVECMFTWYWIADLCQKENIPFVLGHALYMKAIHGGKAKNDKIDSHKIAVLLKGGMIPMSYVYPEKMRATRDLMRRRNHLMRKRAELLAHIQNTNSQYNLDESFGCIAKPYQRGDIVGAFENPSVKKSMEVDLKVIETYDTTLLDLEKTILKLANSHDPVSYALLQSVYGIERICALTILYEIEDIRRFPAVQDFVSYARLVKCSHESNGKKYGTGGSKIGNAHLKWAFSEAAALFLRGNEPAKKWFERLTRKHGKGKALSILAHKLGRAVYFMLKNKEAFDEKKFLR

SEQ ID NO: 361634 - protein, 351 aa, unidentified
MIAVAEQGRCPAEVYGEILNDWETLRKTLRRLQKGHSLRCCYEAGPCGYGLYRNMKKAKIDVVVIAPSLVPSQSGNRVKTDRRDAKKLAHFLRSGDLTPIFVPDEEAEALRDLERAREDAKNAQRTARHQLGKFLLRHDRRWSQSNWTQEHLVWIGRQKFEHQAQQRVLTDYLKAVEDATAREKQLTEELAEVVKDSSLFPLIKALQAFRGIRLITAVTIAAELVDLKRFGSARQLMAFLGLVPSEHSSGQSQRRGRITRTGNRHVRRILVEAAWSYHYQPRMSKAIRQRNEGLAPGVQRLAWKAQKRLHNRLYYLVKKRKGPEKAITAVARELAGFVWALGQEPELLVKT

SEQ ID NO: 361635 - protein, 341 aa, unidentified
MKITHVGIDLAKHVFSVCGVDQRGRCRLRRDLRRSQMLKFFANLSPCVLGLEACASAHYWARELGRLGHEVRLINPRFVTPYRKGNKNDRTDAEAICEALTRPSMRFVAVKSPQQQAVLTLHRARALLSTQRTALMNQIRGLLAEFRVIVPQGPSTLRRRLPEILEDADNELPDLARETFAELYERWLDHERRLTDYDRRLRLLTREDPATQRLLQIPGIGATTATALVASAGDLGVFRNGRQFAAWLGLVPRHYASAGKRRTGRITKRGDAYVRTLLVHGARAALRTAHRREDALSHWALAVKDRRGPNKAAVALAAKHARILWAMLTREVDYQPRPVSA

SEQ ID NO: 361636 - protein, 313 aa, unidentified
MTEHNIGVDISKSHLDVFRLEDEAARRFENSAAGFRALVKWLGKSAVARIVFEPTGPYHRAFETALSGKFPLVKINPLQARRFAEACGTRTKTDAVDARMLARMGAALALEPDAPVNEKLNELRDLQVARTGLIKERTRLHNRGHVQNNPVLKRQTKARLTLVERQIAELDAEIARQIAEDQPTARKRQILCSIPGLGPIAAALILTFLPEIGTLDRKQAGSLAGLAPHSRESGQWKGKSFISGGRKPLRDALYMPALVAMRFNPDLKAKYTALRAAGKPAKVAIVAIMRKLLETANALVKADHLWAKKSSCS

SEQ ID NO: 361637 - protein, 323 aa, unidentified
MPSVVGIDIAKHTFDIATCQANGKYRTKAKLANREAGFETLHQWLLKHSEPQAWILMEATGVYHEALAEWLHDKGYRVCVLNPAQVAYYARSQLQRVKTDKVDAKLIAAYGERHQDELRAWQPESRALRRLRALVRRLEDLQEIQQMERNRLEVADTSVHDSIQSVLQHVDRQIAETIRAIKQHIDDDPDLRGQRDLLTSIDGIGDKTAALLLAELGDPLRFAGSRALTAFAGLNPQLQESGVYRGQARISRTGSSRLRAGLYMPAVCSLKRNPAISALRDRLKAKGKSGKQIVCAAMRKLLSIAYGVLKSGQPFDPRLAIAH

SEQ ID NO: 361638 - protein, 415 aa, unidentified
MRLFVGLDVSSFDIKACILNGEGKKLDSFSVNNDLPGATALKERVLQCIANQEIETFKIGLESTSVYSFHPSMFLHYDEDLQRFGAKVFLMNPKQIANFKKSYSDMDKTDEIDAFVIADYLRFGRNQMSIVKESQYVALQQLTRSRYQLVRMLTKEKQHFLQHLSYKCNTFSQEVDSSIFGNAMMELFLEKFSLEELADMPLEELAEFLQKKGKNRFGDPKCIASTIQKAVRSSYRLDKVVEDSIDVLLGTSIAVIRTYQQQIKELEKSIKRIMAGLTQTLESIPGIGPVFAAGIIAEIGQIERFDDETKVAKYAGLYWRTHQSGRFTAENTSLSRNGNHYLRYYLVEAANSVRRHVSDYQEYYVKKYNEVPKHQHKRALVLTARKLVRLVDALLRSHQLNSFVIKFNRKQITNK

SEQ ID NO: 361639 - protein, 356 aa, unidentified
MNSLYYLGLDVHKKTISYCLKLVDGSIVAEGTVSTQRKSLEAWLRQLPKPWCGAMEATLFTGWIYDFLLPHAKSLQVAHPAMLKAISASKKKNDKVDARMLADLLRCNLLPVCYMAPPELRELRRLLRYRSLMVRQAVRMKNKTAGLLMEVGAEYNKEKLHQAGYFRDLLETVEEVPDSVKDLLKISRGAAELFDEAQRRLVLGLLRNPLLKQRVERLRSIRGVGEILALTWAVEVGEPSRFPTVGHALSYCGLTSAQISSAGKEQRAPISKQRNKHLQTILIEAAKVAPLWNPQLKLVHEREKNRGNPNRATLAVARKLVAYLLAVDRSGQQFQPRAIAEKESRCLEEQVAMPAQ

SEQ ID NO: 361640 - protein, 406 aa, unidentified
MRLYIGVDWADAEHAVWVEDENATKIVSRTVPQTAEGLSEWGRWLDERRAEGIELWAAIEKPEGRIVDFLLDHGVLVFPVNPKALDRARDRFRMSGAKSDPFDAHVLATFLRTDHGHLAPLRPSSEAAQELKGLTRDHARQVRQQTRLLNQLTATLKGYYPRALEGCDDLKSQWARAFLREYPTPAALAALTAQRWQRWTRAHRLSAERTAELWAILQRPQLPVPAHVVRVNARLVGALLAQLEATITAVEAYREAITDFFASMPAAEWATSLPGGRSGTTVPQLYAELGDAPGRWQTFRHLQGHAGSVPVTDRSGKHLTVQFRFACNLHLRQAAHQFAFQSLGKSEWARAYYDRCRKRGHSHHHAVRALAAKWLKIIFVLWTRQVAYDETYHLATMARQHLRQTA

SEQ ID NO: 361641 - protein, 340 aa, unidentified
MHATTYGLDVAKRVSQMYWVDGDTGEIVNRRFGRDDLIGYLSRRPPGRVALEACGSAHWWARKIKALGHDVVLLHAKFIRPFVQTNKTDAADARAIWTAVQQPGMRTVAAKTEDQQAMLSLHRIRSLLIKFRTMQVNQLRGLLYEFGASFRAGRVAGLAEIRSRMMELEEALPGALMCCLQDQLKRIEGLQTEIDQLEHRIGACQKQDAACRAISDVPGIGRLTATALVATMGDAATFKSGREFAAFLGLVPRQSGTGGKIRLGAMSKRGDPYLRTLLIHGARSVLCHTKAPTPWQSAIQERRPANVAAVAVASKMARTAWAILAKGQAYQRDHVSLRPA

SEQ ID NO: 361642 - protein, 321 aa, unidentified
MSQVFVGVDISKQFLDVALRPSGETVRFDLAHATVEDAAAYLAELRAELIVLEATGGYERPLVSALCAREVAVSVVNPRQVRDFARAAGRLAKTDRIDAAVLAHFAEAMRPARFEMPDPARRLLSALVVRRRQLVQSRAAEKTILKTVGLEPVVASCATRHVAWLDGAVADVDARIAAVLRDHDPLRRKRELLESVPGVGTVVAATLITQLPELGRLDRRKLAALVGVAPLNSDSGMRTGRRTCWGGRADVRVALYMSTIVSLRRRGGNETLRAHYARLVGAGKAPLVAVVACMRKLLTILNAIVRTETAFTCSRPLGSAA

SEQ ID NO: 361643 - protein, 415 aa, unidentified
MAWLIRRREAALGQVFVGHDWAEDHHDIEIRDGQGRRLGRARLPEGVEAVARFHALVSEHVDDPAEVVVATETDRGLFVGSLVAAGYEVYAVNPMSTARYRERHVTSGAKSDPGDAETLAELARTDRHHHRRVAGDSDLAEAIKVLARAHQSLIWTRQRQVNQLRSTLREYYPAALDLGELHGPDTLGVLAAAPTPSLGRTLSRKRIASAISRAGRQRRIEERAGEIQALLRAEQLAAPAVVSEAMGATVAALVAVIGELNTQIVRLEEQLSEGFDQHPDAKIVRSLPGLGTVLGARVLGEFGDDPNRYADAKARRNYAGTSPITRASGKSRVVLARYARNRRLADACYQWAFVTITASPGARAFYKGRRAAGDTHHQALRALANRLVGILHGCLKHRTAYDEDTAWAHRQTQAA

SEQ ID NO: 361644 - protein, 356 aa, unidentified
MTSNIKYVGMDVHKQSISIAVRNAAGKIVMECVIETKANTVLQFFDGLRGEVRVTFEEGTWAAWLHDLLKPHVGKLVVCDPRRNALLLDGNQNDRVDARKLSDLLYMNKLKPVYHGDHGLRTLKELVRSYLTITRDLGRVMTGVKAIYRSWAIPCSGKQVYGSRHRVEWLGKIHEPGVRLRAEFYYQQLDTLRALRQTVRRELLAESKKHKAWKQLCRVPSIGPIRAAVLLGILQTPHRFRTKRQLWTYSGLGIEIHSSADHEVAQGQLRRKKKPVEIRGLNENCNHDLKNLFKGAAVVASTKPGPFEKFYAALVAKGMRPEMARLTLARKIATIVLIVWKKGVSFDANHLKPQTA

SEQ ID NO: 361645 - protein, 379 aa, unidentified
MDVFIERCAGLDVHSESIVACVICGNQEEDLIIQTETFPTLTKDLFKLLKWLESHDVTHIAMESTGVYWKPVYNILEDYFDITLANAQRIKNVPGRKTDVSDAEWIAKLLRHGLIEKSFVPPEDIRNLRDLTRLRRKWLGHLTSEKNRIQKVLECSNIKLSSVISDVFGVSGRKLLEKLISNGYVDASDVESSIHGKMAHKKQMITDSLFGTLNDHQIFLIRLSWQHIIYIESLISEIEGKIDDFLENYKEELNLLVTIPGIKKDTAAVIIAEIGVDMNQFPTAQHLASWAGVAPGNYESAGKRKSTRTTNGNPHIKSAMCEAAWAVSRCRNRCLAIKYWSLVSRRGKKKALVAISHRMLRIIYSMLINRESFKETQLT

SEQ ID NO: 361646 - protein, 422 aa, unidentified
MNEQEVIGYSVYVGIDWADKKHDVCICPRDSDTREFDVIRHCAEAIDAWVKDLHQRYGGRIAIAVELSKGPIVSALQKYDFIDLFPVNPTTLAKYREAFQPSKAKDDPTDAQLAVDMLLRHPEHFKVLKPQSTEMRALATMVEQRRRLVNDQGRITNRLRSALKQYYPQVLEWFEHIDTPLFCAFVKRWPTLTQARRARANTLKQFFHEHHMYREEVVERRRKAIKAASPLTLDEAVIVPYRMQVLVLVEQLELMFKAIDQFDDAIAKLASQHSDYALFEPLPGAGPSLTPRLMVAFGEQRERFSSAGDVQKLSGIAPVTERSGQKHWVHWRLQCPTFMRQTFVEWAAQTINKSYWAGAYYRQQRAKGSTYQAAVRSLAFKWIRILYRCWQTGVAYDESRYLKALERRGSPLVKRREMIESA

SEQ ID NO: 361647 - protein, 455 aa, unidentified
MRKYYNTIEEFRQLKKEIGFQKDWLLVGVDVAKHNHWAHFILSNGEEIKKKYRFSNDRCGFEQFYSIIETLLNQRSIGQVVFGVEPTAGYEKHLSYYLKEKFYPVVILPTLAVRRNREVLSGTWDKSDYKDASNIAYLLKQGAFQFYHFRDHKLEEVVRLIRLDETLRNLECQLKSRFSAHIMPRCFPELERVLRSTASRIYIEFLDHFPTPHAASKISLREMTTVLRDQFRGSNISAERFAAKVKTIHEIAQNSIALQRPQLQGDVLEVKLLAQNLRTFREQRKQTNLRIHASLETNKNYQLLLTIPCIGEKTAALLVVEIGDINRFKHVRQLIKFIGYDLSKNQSGKYEGPAKMSKRGNARIRRCLWMAMNNACACTRDTNPSIFRQKYLQMMKKRHNNTHEKRKVKCALCVKMVRVIWAVLKNQVPYEEKLCQTIGNGNKMQYSANMEADLS

SEQ ID NO: 361648 - protein, 460 aa, unidentified
MLSKGLVSQNSQEDVVIQSSGLSRGDRRRNARLARLRELVPVENAIVSFDLADEKQAVVVANHDSQVLARKRVKAKTWQLGPVLDWARTEARRLGFADVTVGCEPTGHRWRVLDQLAVQREMTLVCVQPLLTGRARESEDYTRDKTDDKDAVLIARLVAQLRCYAPERADETWARLRHLGARRERLITEGTACVQQLRDLLECAWPAVLGASVRQFDSAIWCAALAVVLQRCEGRPERLKRLGLARFEAAVRRELPRWGGNRSLRRIIVAVFVALTDPAGVSAQRRGALERCSWVLEDWRAIRSRRAQVETCMLEILDALELTELASSIPGVTATGVAAILAESGDPTRFDSPRALVKHAGLCPRENNSGTSTGRSRISGRGRPGLRLAAWRAVWGAQRHNPVMTARYRHLRTRDKNPLSDHQAKAALAAAILRWVHVIITERVAWNAERAGASTLPSAA

SEQ ID NO: 361649 - protein, 320 aa, unidentified
MMMTDSEACWVGVDVSKATLDVYLSRPEQVLSFANDPTGIQALITTLQEANPTLVVLEATGGLERALVAELLVAKLPVAVVNPRQVRRFAEALGYLAKTDRLDARVLAHFAAAIQPPARDLPDAETLALADQLARRRQLVEMLTMEKNRLQQAQNAAVRRDIQTHIDWLQQRLETTESRLRKAVEASPAWQAKADLLREVKGLGEVSILTLLASLPELGTLNRKQIAALVGLAPLNRDSGTLRGRRSVWGGRAEVRQALYMATLSGVRYNPILKAFYTRLREAGKTAKVALVACMRKLLTIINAMLRDQTHWDEHHGKIA

SEQ ID NO: 361650 - protein, 392 aa, unidentified
MIYVGIDVAKDKHDCFITNSNGEVLFKSFTIPNNRAGFETLFQRIEAVSDDLTKVKVGLEATGHYSYNLLGFLLDKGLTTFVFNPLHTNLYRKSLSLRKTKMDKVDSRTIATMMMSDMNLKSYSDTSYHNEELKSLTRYRFDKVKERAKLKSSVSRLVCILFPELEKLVPTLHMASVYALLFEFPGADAVANAHLTRLSNLLSESSKGRYGKETAVMFRDTARHSIGSHMPAKSLELKHTIKLIQELTIEIDEIEAAIKRIMDEEIQSPILTIPGISYRMGAMIIAEIGDFSRFDSADQILAYAGMSPSTYQSGQLDNCYSHMEKRGSRYLRYALYHATKYVCHWDKSFGAYLEKKRSEGKHYNVAISHATKKLVRLIFAIEKSGKAYLPAT

SEQ ID NO: 361651 - protein, 342 aa, unidentified
MRTATTTGPIFVGLDYHTGSVQVCALDRSGRVLLNQACGNDWRAIRDAVARFGPDVRAAVEACSGSADLAEELVTKAGWLVDLAHPGYVARMKGSPDKTDYSDARMLADLERVGYLPKVWHAPAEVRELRRLVRYRQQLVGERRNVKLRIGALLRDNRVAAPDGVNPWTVAWVTWLARDAALSEQTRWVMDRHLTRLRALAADVKAAEQRLAQVTAEDPLVAALLAMKGIGLVTAATIRAEVGRFDRFRTGKQAARFCGLTPRNASSGQRQADAGLIKAGNPQLRAVLIEAAHRLVRYDARWKKLATAMKARGKPGSVVAAAVANRWVRWLFHQMQPARAAA

SEQ ID NO: 361652 - protein, 337 aa, unidentified
MKLYTGIDLHSNNHYITIIDEQDNRLFEKRVSNDLEKTLTLLSPYKSEMISIAIESTYNWYWLADGLIEHGYDVKLVNTVAVQQYSGLKYTDDQSDAFWLAHLMRLGILPTGHIYPKAQRGVRDLLRKRLQLVQDRVSHMLRIQSQVTRSTALHISITDIKKLNFDPASVPIDKNVDRAIRADLACVAILNKQIESVEECVLAQCRLKQPFKLLTTVPGIGKMLAMTIMLETGDLSRFNKVGNYASYCRCVASNRYSNGKKKGVNNTKNGNKHLARAFVEAAYYAARFHEKPKAYFAKKERQVNRTLATKALAHKLARACYYIMRDQVIFDEKKLFS

SEQ ID NO: 361653 - protein, 412 aa, unidentified
MKDLLEISCGLDIHKEKIVACILTGPLGKPTHSEIREFTTLIPDMLALRDWIISENCHHVAMESTGIYWIPIYEILEDAFSGDITLLVVNARHMKNVPGKKTDMRDSEWISTLLRAGLLNASFIPEKRIREFRDLNRYRKSIIRDITSQKNRVEKFLQSSGFRLSSFISDIFGASGRNIILHLMEHGRIDKISLDSYLKTKTRKRIDEILMSVNGTLSEHQNSFLKILMCHYDSMKEHLIEIETHLQEDMIPFALQIEQLNTIYGISTTASCAIIAEIGTDMKPFKTAEHICSWAGLCPGNNESAGKRKSTSITKGNPYIKSMLCEIAWVIAGKRNTYLSAWYWRIKQKKGARKAIVALARKLLVIIYTMLKQGTNFDENCFEVRRKNCEQKQLSRYIRELEKHGYTVEAQV

SEQ ID NO: 361654 - protein, 357 aa, unidentified
MDVSREQPKTTAGLDLGDKYSYLCLIDTGSGEVIEEGRLRTTPEAIRRRFASERPLRIAIETGTHSPWGSRLLEECGHEVLVANARRLRLIYSNKRKTDEIDAENLARLARLDPKLLYPVRHRGEQSQAHMALIRSRQALVDCRTQLVNHVRGAVKSFGHRLPKCPARTFHKRVQEHIPEALLPALEPLLEQIASLTERIRDYDRRLVAISEEHYPETALLRQVEGIGPLTALTFVLTLEDPYRFEKSRSVGAYLGLVPATDRSGDSDPQKRIFKEGDEMLRKLLVGSAHYILGPFGSDSDLRRHGQKIASRGGKNAKKRAAVAVARKLSVVLHRLWVTAEVYDPLYNTRRRGGLAA

SEQ ID NO: 361655 - protein, 348 aa, unidentified
MTIIGGLDIHRAQITFDYLDTETGEVCTGQIYPATRESWRAWLQQHFGARPDVKLAVEGCTGWRFVVEEMLRAGIEPHLAEPADTSSLRGPKRRAKTDKADARLLRELLCQQRLPESWIGPPHLLEVRSLGRLYVSLMAEKCAWQMRIHAQLFHQGVPPIAGLLTRDGRAAMAAAELSEAGRQMVSTAVSTIDFLDQQIIPLRAQLQSLARRLPGVRALTAHYGIGGLSGVIIWAELGDCSRFSHSDQVVRLAGLDVTVWSSDGKRSPGHLAKQGPPLLRWALFEAAKTWARKDAPENEYYEAARARLGGKRPALSVARKLVKRCYHSLRELGEEAMAPAAALTAKVA

SEQ ID NO: 361656 - protein, 343 aa, unidentified
MNQYVGLDVSLEQTAICVVDDNGKPVWQGKCASTPEMLVAAIRTRAPQAARIGLESGPLSLWHWHALRQAGLPVVCLDARHAKAALSLQLNKSDRNDARGLAQIVRTGWYREVAVKSFDSQLIRSLLTTRAQLVGMRVDLANQIRGVLKPFGLIAGKGGGQAFADRVRALVAGGPLQVVAEALLAAWQAVSSQVAILTRRLIGMARQDQAVKRLMTTPGVGTIVALTYVSVIDQPERFAKSSSVGAYLGLTPRRFQSGEEDYTGHISRCGDRLLRTYLFEAAGIILHRVSRWSALKAWGTRLAKRVGSKKATVAVARKLAVILHRLLRDGTEFRWSAEQGQAA

SEQ ID NO: 361657 - protein, 321 aa, unidentified
MSESSVAVVGIDVAKDHVDVAMVGASLTPMRFDNEIDGHTAMIAALQPLSPQLVVMEATGGYEAALACALQAAGMAVAVVNPRQARDFAKALGRLAKTDRIDAEGLAEFGRMLLTRPDLARYLRPLETPAQQDLAALVTRRRQLVTMLGMERQRLAIARPAVRRSVQALIRAIEKQLDQVDAEMTRHLTTHFRELDQLLRTTGGIGPVVSATLIADLPELGRLTRRQIAALVGVAPMAWDSGQMRGRRRIQGGRFEIRRTLYMATIVAARYNPVIRAHYQRLVAAGKLKKVALVACMRKLLTILNAMARTATAFNPEHHHA

SEQ ID NO: 361658 - protein, 411 aa, unidentified
MLEVKVEKCAGIDVGKKFLAVCVLIGLGNQKPVGEVRRFGTSVKELERLQAWLLESGCTEAVMESTGSYWKPVFNILEGSLKIILANPVQVKALRGKKTDPNDSRWLASLLRHGLVQASFIPSRDIRELRDLTRRRRTLLSDGASERNRVQKILEDANVKIGDVLSDVFGASGQAMLEALLENKKSATEIAELAHWRLAPKIPQIVEALEGHRMRDHHRLLIRQSLDHMQYIEKMIGELDAEIAKRLRPYQKQIELACTVPGIGPTAAASILAETGMDMTSNGPFPDCHHLASWAAICPGNNESAGVRKGGRTRRGNRWLRATMQQTAWAGVAKKNSIFQLRYQKLKLRRGPQRAITAVAHAQLIAIYWTLRNGTPYQDQIRQSEDERRERQIRHHLRQLTKLGHQIEEGI

SEQ ID NO: 361659 - protein, 387 aa, unidentified
MSQTVPALIPAAVDYERTLILAIEVSNKSWVLAAQVPGLPHTKAKRTIDPETEALLAAVSGYRARAAATGRSIEHVIAVYEAGWSGFWLARWLIRHGVEVYVIQRSSVPVDRRMRRAKPDGIDSELLLRTLLAWLRGEPRVCSMVPVPDEADEDARRCVRERTELISERVGLINRIGAVLATLGVSDYNPLLRNRGRRLAELRTALGEALPANAHAKIKGLLARLELVLRQIAELERERDAVVETEASDKASEMIQQLTALRGIGVQSATVLVREAFVRRFANGKALGSYAGLASSPYSSGSIDREQGIGKAGNRRVRTVMVELAWLWTRYQPDAAQVCWFRERVGSTGRRVRKIMMVALARKLLIALWRFVTDGVVPEGAVIKPAV

SEQ ID NO: 361660 - protein, 378 aa, unidentified
MPSKTTIYIAIELSVSSWLVAARLPGIEKARHRSIKGGDTTALLALIEELRLRVSTKQGEVVEVACCFEAGRDGFWLYRLLTAHGIATYVLEPTSILVNRRARRAKTDRLDAEGMLRVLASWLGGDQQVCSMVRVPTPEEEDAKRQHREREVLVQDRLRIENRIEALLFTQGIRGRPSLRSWERDVAKLRTGDGRALPPFLRAELDRLRRRLLLSLEMIREVEAERAEELASAPQDATVQKITALKRIRGIGANFSSVLVREVLYRQFSNRRQLASYVGIAPMPYQSGGMDRDRSISRAGNPRARKTLIQLAWLWLRYQPDSELSIWFRERVGTLQGRTRRIAIVAMARKLLITLWRFVETGAVPVGVEIMAEVEAMA

SEQ ID NO: 361661 - protein, 407 aa, unidentified
MEVLVDRGAAVDVHKDSLAVCAMTTEGRAAVKTLMRFSTFHDDLEAMREWLLEMRVTHVAMESTGEYWKPVYEVLEGSFELIVANAQHVKNVPGRKTDPKDCEWHARLLRHGLLQPSFVPPAPIRDLRDLTRLRRKTIEMGARIRNRAQKVLEASGIKLGSVVTDVFGATGQAILQQLSENKTDPAALAELAQGSLKNKKPQIVRALEGSFTQHDAALLKHQLILHEQLQQRRTEIESQLAAFVTPYQELISRLDEIPGINRDAAIEILGEIGNDMSPWANARRFSAWAGLCPGNHESAGKRKNVSVRKGNAFLKSILVQAATAAVKTKGTYYQAKFVRLSKRRGYKRAIVAIAHKMLIAIYHMIRDDKPYQELGAAIFDQRSAESKTKSLVKQLESLGYAVELRTA

SEQ ID NO: 361662 - protein, 316 aa, unidentified
MKVGIDVSKLTFDVSWLAEEKSSHKCFDYTEEGMALLLSVLPGDAHVVMEATGVYHSRLAMRCYESGLSVSVVNPVVIKRFGQMLFKRAKSDKADSELIRQYAVAHEPDLWEPPSEAINGLKQALSWIDDLTREKTMATNREEAIRHNAIPSDFVLREIKDLRKYLKERTKKSENHLRAMVKKHFPELYDCLQTIPSVGEKTTIEMIVVTEGFTKFDSDKALAAYVGVSPTTYSSGTSVHGRGGISRASRGRTRQCLYLCSWTARRTNPACAAMYDRMKKAGKPPKLIGVALAHKLLRQIFAVGMSGQNYRAECAY

SEQ ID NO: 361663 - protein, 425 aa, unidentified
MKTIDYLSTLFVGIDIGSRTNVVSAIDFNQHFLIKKQSFANTQEGVTLLEQHIVSVLSEHHHFKFVLVALESTGLYGVHLANYLSSSDYLFPFSVQVYCINPKEIANYKKSFIGLQKNDAIDSFVIADFARVGRIQIKPWRGSQYLALQRLTRHRLHIANCIATEKTYMLNNIFLKFSEFALLSNEDHPFSNKYSATSKAILTDFLTNEDLINMDIEKLVDFINVKSKRHIADPEKTAKLLKTAIRNSYKLDKCLYEPLTISIASSFNCISSFERELKTIDKAILKTVNGLNPNAYKILLSIPGIGKVFAAGILAEIGSIDAFKNNNALAKYAGIFWSENQSGNFKAEDTKMMKTGNKYLRYYIIEATNSAIRHCPELKNYYDKKYLETPNHKHKRSLALTSRKFIRILFGLLDKECLYSSKKSG

SEQ ID NO: 361664 - protein, 355 aa, unidentified
MDSKKYIGMDVHKESISIAVRNGAGKIVMECVIETKASTILQFIDGLRGDLQVTFEEGTSAAWLYDLLKPHVTKLVVCDPRKNASLREGNQSDQIDARRLAELLRLNHLSPVYHGEHGLRSLKELVRSYLTITKDLGRVMSRVKAIYRSWAIPCTGKRVYAPRHRAEWLGKISELGVRRRAEFYYQQLDALRALRQQVRRDLLAESKKHPAWKRLCQIPSIGPIRAAVLLGILQTPHRFRTKRQLWTYSGFGIETHSSADHRSVHGQLQRVKKPSSIRGLNRNCNHDLKNLFKGAAIVASSKPGPFQEFYTALLTKGIRPEMARLTLARKIATIALIVWKRGASFDAQHLKPQTA

SEQ ID NO: 361665 - protein, 377 aa, unidentified
MKRIKFVGLDVHAETIAVAVAEQEGEIRSLGVIPNREESVRKLVKKLGPVEQLRFCYEAGPTGYVLYWQLTKMGAACTVVAPTLVPVKAGDRVKTDRRDALKLARNYRAGELTAVWVPDAEHEALRDLVRAREAAKKDQLRARHRLSKFLLRQGQRPPVGVQPWTVKYSEWVKRDVHFAVKAQEATLLDYLHEVEHMAARIVRLDSAIEEAVKVAPAKMRAVIEGLQALRGIAQISAVTIVAELGEVTRFTKARELMGYGGIVASENSSGERQRRGSITKTGNAHLRRVVVEAAWAYRHRPAIGFTLRKRQENLSEEVKEIAWKAQHRLHARYGKLLAKGKNKGVVVTAVGRELLGFIWAIGVQVEAQQKESLRQAA

SEQ ID NO: 361666 - protein, 363 aa, unidentified
MKIMVGIDLHSNNALCGLMDESGQRLAHKKLPCDLTAILQLLDPYKDRIATIAVESTFNWYWLVDGLQDHGYHVVLANPAGMQPYSGMKYTDDVSDAYFLAELLRLNLLPTGHIHDRQTRPVRDLLRRRLLLVRQRTMLILSFKSLNERTLGQRVSLARVKAMKVAEAQARFTAPADQLLSGTEIELMGHLTAAITKLEQHLLGVAGKWPTYQRLQELPGIGKILGLTIALETGDAQRFADAGNFASYCRCVKSLRTSNGKKKGENNRKCGNKYLAWAFVEAAHFACRYDDPCRRFYDRKKQQTNPIIATKSLACKLAKAAWHVMKEDVPYDATRVFGPAKKTDFGETGREPAKGSGHPSQQN

SEQ ID NO: 361667 - protein, 337 aa, unidentified
MSKIILVGIDTAKNVFHLVGIDKNSKYVYRKKLNRKRLLPALAQLEACEVVLEACAASHHWARSIQQLGHRVRLIAPQHVKPYRRGQKNDYRDAEAIISAALAPGIHFVGVKRVEQQAEQALHRVRSQLLRQRIAAANGLRGLLGEYGLAFAQGIAALRKGAVDFVDCGQAEALGLTELVWDVLHEIERLQQRIDNYGLQIEQRVCHDPISRRLRDELHGVGRLSASALRVKVADPHDYANGRNFAAYLGLAPGHRGTGGKVKIGKIRRHHDRYLRQLLIHGARSVLSHLGDKQDEQSRWLRGVRDRRGFNVATVALAHKNARQAWAILVQEQALQD

SEQ ID NO: 361668 - protein, 408 aa, unidentified
MDLTPMHKRVIALDVHQAKITACAVVEHDDGRVEVTKRDFGAFRRDRRALAQWSLEIRPEVVVMESTGVYWKSPFAALEAVGIIAWVVNARHVKAVPGRKTDMADAQWLATLARAGLLRASFIPPVDLRQLRLVARQRQKLVGMCSAEKNRLHKVLVDAGMRINVVVSDIHGASARAMVKALIAGQAMYEVLDQKGRLRASRDELFEALSTEQFSAAHRFVAQEIMQHIEHIETRIARMDQYLLDGLRAWQPQLKLLQTLPGIDIQGAAMLLVEIGADMGVFGSAERLASWVGICPGNNESAGKRKTGRIRKGNAWVRRLLCEFAQAAARTRCALKAKFDALAIRKGHKKSIVALAHKMLRTVYAMLANGTHYQDKEVDYEALNVQRNAPRWLKMLRKHGFIATPTAT

SEQ ID NO: 361669 - protein, 396 aa, unidentified
MTKFNAESTAIHTVSATVEPEQVPVHTAYVGLDVHKETIAISVAEPGRQEPGYEGEIANTSKRVDRKIQQLSERYGGGLLQFVYEAGPCGYGLYRQLLSSGHDVQVVAPSRIPKAPGERIKTDRRDALKLARLARSGDLTPVWVPDTEQEAMRDLTRARDDMKAQERKARQQLNAFVLRHGHHWPKGRTRWTQTHFNWLESLRFEHDWQQVVLQEYIDAVRAATRRVADISAQMERALPQWSLAPVVEALVALRGIDKLAAMVLMAELGDISRFDSPRQLMAFLGLVPSEHSSGSRRRQGAITLTGNSHARRMLVESAWSYRFPARQTGHLKRKAVNAPEEARAIAWKAQKRLCGRYRDLTRAGKNTKLVCVAVARELTGFIWDIVCRVMPRTHAV

SEQ ID NO: 361670 - protein, 494 aa, unidentified
MAVVPLVTPVLLGAVEAAIQAGAGVRSLWGRSLLPLSTRVSFFRSPSDPRAARGFGAAREMDGVEEVTDEPLYLERVCGIDIGKAALEACIRVPSEANPRRRAQETRSFGTTKKEVLALADWLRCWGVTEVVMECTGDYWKGPFYRLEAEGFDCVLADAKQVRHLPGRPKNDRCDARWLAVCFERGAITACFVATAEFRLIRLNTRYRRDLTEERTREKQRVEKLLESAALKVSSVLTDLHGVTGRDIMDHLIRGERDPKMLAQLARARARRKIRELGEALEGAEFFTPVHARLLAAMLARIDQATRDIEQVSQVIEQLLAPHEEQLQQAESMPGWGRRAAQDAIAETGVDMTRFRTPAHLVSWAGRCPLDQQSAGKNTHRAKVKKGNRYLAGLLGETSVAAGRTQTREGARYRRLARRRGKAKAQVALGNTQLKVYHTLLSAPGARYQDLGVDYYDRRNTRRQVRSHIQRLESLGFKVSLTPLPDVTGCPEVA

SEQ ID NO: 361671 - protein, 430 aa, unidentified
MKSNTQNAKIEAITEKTLVLGIDVGSKTHYARAFDYRGIEYSKKPFKFSNTEAGFATFKEWILDLKERHEKDKVVPGMEPTGHYWFNLGKFLQDNEMKPVLVNPHHVKKSKELDDNNPTKNDRKDPKVIAGLVREGRYMIPYLPDGVYADLRTASNIRFQLQAELTRIQNRISRWFNIYFPEYKTVYGKPDAKSGMLILKAAPFPEDILTLGINGVNQIWRDAKLRAVGKARAKTLIEAAEHSVGSKEGAVSARMEIRMLLEDYESRNIRLQEVMTLIEGLVKQIPMAEKLLEIKGVGIRTVSGFLAEVGDISRFNNPKELQKLAGLALVENSSGKHKGETTISRRGRKRLRYLLFEVAMSLVAKNPEFRELHNYYTTRRLNPLKKMQSLMAIAAKLIRVFYAMLTKGVDYDPKKMVSDIKRPAVYLQAA

SEQ ID NO: 361672 - protein, 472 aa, unidentified
MSSYFLGGDVSKGYCNFTLLDHNKRIVEEDFQLDDSYQGHQSLCDFFKQFFSSHKDGDIRAGFESTGGYENNWYQLLWKLQDDFKIKVARLNPYGVKYHKKASLDRIETDKISARKIADYLISYPDKVEYSKEDFFSELRRCWKYTRMLKKQKAQLQTHLKAQLYVSQPQLLVYCKEGMPDWIFLLLKKYPTAMDIAKAAVNKLALIPYITKERAKELISEAKRSVASMKSPIMGNIIKSAAREILNMQKTIKEQVKLMISTYGIDMPEIELLKSFPGIDDYSALGLLLEIGAIERYPSVKNLVSFFGIHPVYRQSGDGKWGNHMSKKGRKEPRWILFNVAKNAICHNEMIQELYNDYLKKGHCKMSALGIIMHKILRIVYGMLKHKQRYDPSVDRANRKKVIKTKQEQETKKVDKSRRYQPYDKNAPVSKRQAKKRQLTQVVEVVTQNGTSSQVTRYPKDNKRTGEENEMN

SEQ ID NO: 361673 - protein, 351 aa, unidentified
MPRTSSVHAVTTIGMDMGKNVLHMIGLDSRGAIVLREKVSRGRITSRLANLPCCLIGIEAGMATHYVARELAALGHDVKQVPPAYAKPFRQGHKNDFRDAHAVAEAVQRPTTRFVPAKTNEQLDLQALHRVRSRLVSERTAVINQIRGFLLERGIIVRQGLRFLRQALPDILAKRTDVLSPRMVRIVADLASDWRQLDERIEPVTDEIETLAKSDDSCRRVMTVPGIGPIISSAMVAAIGNGAAFARGRDFSAWIGLVPKQMSTGDRTILGRISKRGNGYLRMLFMQAARVILLRPASWPKHGFGIWLARAAQRLHPNVLAAALANKLARIAWTVLAQERSYEARITKAVP

SEQ ID NO: 361674 - protein, 409 aa, unidentified
MELLCGIDWAEKHHDVAVVDEAGKVVSRQRVSNDAAGFATLLTMLAEAGDTPEEPIPVAIETDRGLWVAALRATGRTIYPINPLSASRYRARHQVSGAKSDATDAVLLANILRTDASHRPLPDDTELAQAIRVLARAQQDAVWARQQLGNQVRALLKDFYPAALEAFSGLPEGGLTRRDARTILAAAPTPAQAARLSTTRLRGLLAKAGRRRNIDRDIDRLRGIFQAEYLRQPPQVESAMGIQLVALLRQFDAACAAADELAEAAIAHFERHPDAEIITSFPGLGMLAGTRVLAEIGDDRARFADARGLKAYAGSAPITRASGKKTVVLHRHIKNRRLTAVGPIWALSSLRASPGARRHFDARRAAGDWNHQAQRHLFNKFLGQLHHCLQTGQHYDEHRAFPPPPALAA

SEQ ID NO: 361675 - protein, 405 aa, unidentified
MTEPENNLVIAGVDTHKDTHTLCLLDRMGRRIGTFKFDADAKGYDALAGKIGDPATCAGIGVEGTGSYGAGLTRRLVELGYCVYEVMAPGRARRKPGRPKSDPADAEVAARQVIARTNLSMPKDQSGWTEDLRQLMIARDRLVQATSAMINATKSLIVTAPEDLRRSLAKLSRKDLRGALLALDPGADGVVLALGALGRAWDLQDREADAIEDKMKEILEANAPALLAIFGCGTVSAAALAVAGGGNPERLGSEAEFASLCGVAPLLASSGKTERHRLNRGGDRRANRALYQIAVTRMSYDQRTKDYVEKRKRDGKSKKETIRCLKRYIAREVFRALRHPFEIKGPSWKGLRPARQALGITLVEAGRALNVGFQKVSYAETGRLMNVRFLEEYDAWLKSQMNKTS

SEQ ID NO: 361676 - protein, 401 aa, unidentified
MRSIGMDVHRSFAQIAVVEDGLCRDDGRIGVRPEDLRAWAATLDPGDEIALEATTNSDAIATMLRPLVARVVVSNPRKTRAIAEAKVKTDKVDARNLAQLLAADFLPETWVADDRTRIMRRLVMRRTHLVKQRTRLKNQLHAILSRNLVPTCPHADLFSGVGRRWLRTQTLPADKWRSVEGLLRQLDFHGEELADTDRDLAIEAIDDRVVARLMTVPGIDAIVAMSIVAAVGDFSRFEDPNRLVSYLGLNPKVRQSGERPATHGRITKAGRAHARNMIVEAAFSALRAPGPLRAFYKRIKERRGFQVATVATARKMTVLCWHLIANDEDYAFARPSLNAHKRRKLELAAGSESRRGPVRGATHDYHIKQLRDQEAAIVEQQERAYEVMISHWQPQRPATKG

SEQ ID NO: 361677 - protein, 436 aa, unidentified
MKPSPEVVLAVDFSLDRLDVALSDSQQEWLWPHRAYPNNWPGFQALKQDLLTELGEQGAVHLTATGESTGPYWWHLFYHLSHDQELAFYEPELALLNPAQVKRFRRALSEQDKTDLDDPHLIELYYRAVGVKHLYQFNLRYLPLRFLSRAYARLIHTLTAEKAYFQAILYLLTSEYPRLKPFSNLFGVTSLQLLEDCPDFQTIAAIPPDTLADQLQAVAKGTLPDPDHNAHKLHQVAADTYPVPPVLAASLHLILQQTLAHIRFLTDNQKAYQLLIKQELGRLPEAQLALEHPGLGPILVAGFLSEIQDTHRFITGLKFDHKIKDYRPRNYDDGQAGVAKLAGLWWPKHDSGRFQAKSRHLARERNPYLRFWFVQAAYTLTRHDPDYTAYYQRKYSESSHHHHQRALVLTARKAVRMVFALLYKGQRACLEEAAST

SEQ ID NO: 361678 - protein, 349 aa, unidentified
MAMLADTADAVIGVDTHTDTHTACLLDRLGRQLAVITIPADDRGCRMLLAWAQQNAPGPRLAWSVEGTRSHGLGLTRYLHAHGQLVAEAGRPARASRRPGGKSDPADAARAARDALSAQRLAQPRSDGSREALRILLTARAQATTARTAAVNTLKALILGAPDDLRRQLRGLSTPRQASRCRSLRVHASQPIAERVLRAELRRLATHIGGWDKELRANKAQLRQLVAQAMPVLLEQPGVGPMSAAQLLVSWSHKGRCRSEAAFAALAGVSPLEASSGRITRHRLNRFGDRQLNRALHVIINWRMLHHTKTQDYTTQRRAGQKTDPEIRRCLKRYAARQLFRLMETAATT

SEQ ID NO: 361679 - protein, 397 aa, unidentified
MYIVGIDIAKRKHEAAVINGDGAVIIKPFSFTNNCSGYNRLLTMLTKAKLPLDEVSFAMEATGHYWLALFTRLQKEGFRVQVINPVQTNSIRSFYIRQAKTDPRDALLIAEVIRFGHFSESTLHPENIYELRELCRGRHAIVSMQADVKRKVVALLDQVFPEYETAFTNLFSDTSMAILQTCPTPKELSEMPLEELCHLIEVSSHKRFRMVKAQELQELARNSFGFAMAGDVFSTMIRLYAKHLDFLKQQVREMDRKIAEIMDTLDTPITTITGIGPTLGAYILSEIGDISRFSSAAKLAAYAGIDPTMRQSGEYNGVRNRMSKRGSPYLRHAIWLAASSAVLHDPALKLYFQKKRDEGKPYMASVGHACRKMVSIIYAVMRDNKAYTPYIPNEISA

SEQ ID NO: 361680 - protein, 342 aa, unidentified
MQVTTIGLDIAKNVFQVHGIDAKERVVVRKQLRRSQVIAFFSALPPCLIGMEACATAHYWARELRKLGHEVRLMPAKDVKAYLKRNKNDAADAEAICEAVRRPTMRFVQIKSAEQQGQLMQHRTRDVLIRQRTQIINALRAHLAELGIVAAQGDAGVNELCAIVADDRDERLPIDARASVIVLAAQLEALQRLIGSIEKRIKMQHRSNETSQRVETIPGIGVLGASAIVATVADPTIFRSGRDFAAWIGLVPRQDSTGGKQKLGPISKQGDRYLRRILIVGAIAVLRRAQENPGKYPWLTQLLARRPFKVVAVALANKMARTAWALMAHGGTYRAPELAEAA

SEQ ID NO: 361681 - protein, 369 aa, unidentified
MDHHSVAYVGFDTSKTKHAVALAEGGREGEVRYLGEIEAAPAAVERLLRKLAHKYKALHVCYEAGPTGYGLYRHIRALGYVCDVIAPSLVPKRPGDRVKTNRRDAVTLARLLRAGELTPIWVPDEVHEAVRDLVRAREAAAQDLRHKRQQVLSFLLRHGRIFTGHRHWSRAHLRWLAGQAFNHPAQQIVFQDQVDAVADAQARLERLDRQLAELVPTWSMAPVVAACQAMRGVSFLGAVTFVAEIGDVRRFESPRQLMAFLGLVPCERSTGDTVRRGGLTLAGNRRVRRALVEGAWSYRHPARVTERIRGRLEGLPKAVREIAWKAQVRLSARYRRLIAAGKRAPVAVAAIAREMAAFLWAIGRVVEPA

SEQ ID NO: 361682 - protein, 340 aa, unidentified
MTTPLYCGIDLHSNNSVISVQDNQGKQVYEKRLPNDLPIIMSSLSPYKQDLQGCVVESTYNWYWLVDGLMDAGYSVKLANPAAIQQYSGIKHTNDFTDARFLAHLLSLDILPTGYIYPKETRGIRDMLRRRLLLVDQRSSQRTSLQSLLARHTGRRLSEGQLKKLSSEELQQLLPIPCTGLMAEALLSMIKSMTGVIKQLERAVSTHCVKQQDYQLLNSIGGVGEILGATIALETGNIRRFPDAGHYLSYARCVDTRKVSNGKSKGRNNRKNGNRYLSLAFMQAAHLATIWEPKVKRFYQKKQAKSHSMVAKKAVAAKLARAIYHMLNKQEPFDVERAFG

SEQ ID NO: 361683 - protein, 328 aa, unidentified
MPRYVGLDIHKQFIEACFIDEDGKPLGRCRIAVSRESIQTFVPKCLQSCDRVVMEATTNTWEIAELIRPRVAKVAIANPLKVKAIAEAKTKTDKVDAEVLAQLLRCNFLPEVWIPDGATRLLREMGAHRAGLAADQTRIKNRIQSLLAQRLIPIPVRVLFNGCGRNWLSHLELDTQDRARIDGYLRVLDQIESEETNLRKALAQLSFDNGQIRLLMTLPGVGPAGAQALCAAWGDWRRFKDGAHAASYLGLTPSTRQSAGHCYHGSITKAGNSLARWLLTQAAGQVSEHPGPLGVFFRRIRKRKELQRGGGCYSSQTSYNRIPNAQEQ

SEQ ID NO: 361684 - protein, 412 aa, unidentified
MQDILTCAMGLDVHRDIIVACLVKGAVDAEPEAETRTFSTLIPEMQKLRDWVIESECRNIAMESTGIYWQPIYEMLESCFDGEISILVVNARHMKNVPGRKTDMKDAQWIATLLRAGLLKGSFIPDKAFRELRHLTRYRKSVVHDITAQKNRIDKFLQSSGFRFTAFLSDTFGASGRNIIRHLIEHGSIDREALDKCLKTKTRNRIDEILVALNGSLSEHQCRFLNMVFRHLEDLEAHKHTVEDEITEEVLKHTDALNLLCSIPGIDVTAAAAIIAEIGNDMSSFPDSQHICSWAGLSPGNNESAGKRKSVHINKGNPYLKSMLCEVAWIMASHRKLYLSGWYWKVKQRKGAKRATIALARKILSIIYTMLKTGTPYNEECFEQRRLRCERKRANRLVNELQKLGYVVVAPD

SEQ ID NO: 361685 - protein, 346 aa, unidentified
MEQYVGLDVSLKLTAICIVDRTGKIEREGVVASDPEAIAAFVKSHAPHVARIGLETGATSTWLWTELNKMGLPVICIDARHAKAALKMQINKSDRNDAVGIARIMQCGWYKEVRVKDLDSHAIKALLVSRALLVKIKRDIENQIRGLLKNLGLVIGQAKMNVFAVRAAELAEARPELAAAVEPLLKAREAVGRQIADLDRKVMRLARNDAQVRRFMTAPGVGPITALCFLATVDDPTRFKRSRSVGAYVGLTTRRYASGEIDWTGRISKCGDAMLRSYLYEAANVLLTRVVKWSTLKAWGVRLAKRSGLRKAKVAVARKLAVILHRMWIEGTEFKWSSKEVANQPA

SEQ ID NO: 361686 - protein, 394 aa, unidentified
MKLIGIDIGKNKHFFCIMDQQTGEIISQPISFSNDKEGFDFLVQKIKSYPKDSILIGMEDTGHYHFALLKYLLNLQYTVALINPKTTDFNRKMQGGITKNDKLDTINICDVLDTPERKKQYRITKVNSFDLYEQKQLTRHHHNLKEEENVYKNRLQKCIDIVFPEFNNLFNSKYGTVYMNILKMFGSAENIANTDIRTIRKCFEIEGRGNRISLTPERLKECARSSIGISSSAEVIQIKHLTAQIELIEEQLTEIDKKIEEFSIQNNSPILSIPGISHFSGTSILAELGDISNYSKPSQIIKFAGVAPLHYESSQFNAQHTSITKKGSKYLRKTLYQIILPVIRHNPVFTKYYQLKISQGKGHRCAQGHCVRKLIRIIYHLLKTNQQFDPQLLR

SEQ ID NO: 361687 - protein, 317 aa, unidentified
MNNKYVGIDIAKKQLDLAIRPSGERQQVDRDEQGLAALVKELVADKPALIVLEATGGLEVSVVSALLQAELPVVVVNPRQVRDFAKATGRLAKTDGLDADVLAHFGEAIKPTPRALPSEQQRQLDALIGRRRQLVEILVAERNRHGIALPKAQPSLERHITWLEAELSDLEGDLQTLIRETPAWRECDDLLQGVPGVGIVTSTSLLALLPELGQLSHKQIAALVGVAPFNADSGQHKGKRMIWGGRAEVRSVLYMATLSATRFNPTIRTFYQRLVAAGKPKKVALTAAMRKLLTILNAILRDKQPWQPPLSLVSSQS

SEQ ID NO: 361688 - protein, 379 aa, unidentified
MRPVVAIDAHKASCTYVVRHWSETLAGPKKIPSTREVLTKLAATYPDHAFVVEVCSVHEWMMDLFRDAGVTAMAVIPPTKGPVGKKSDEDDATRLAKKHQAGELVEVYVAPPEIRLMRDTVRQHEFLKTRWVACNNNIKASLNRWNFKPTKPPGAKRAPPIYSDEGRRQVLERFPHLAGTYAVIDEIYSEMEALKKEIERLGRAIPEVQLIQSVPGFGPIIGLTLYTEIGDITRFDKAERLVRYFGLDPVHGSSGEKKWDGHRISKKGVPFVRGLLAQGAWSHVTFCPDSDISQNYRRLICRGKTKQQALMMVMRRLVKAVYWLLTEEREFTMNGPARSAICRTPGLAGGAALTSVEREAPAAMRRMEPLAGTRSGCRE

SEQ ID NO: 361689 - protein, 343 aa, unidentified
MKLSRVGIDLAKNVYQLHGVDRSGKTVWKRRLKRQQWFKVLLDKTEPGCVIGMEACASAHHWGRELQSRGYTVRLIPPQFVKPYVKSNKNDARDAEAICEAMSRPNMRFVTVKTVEQQDIQATHRVREELKVRRTAKGNQIRGLVAEYGLVAPKGLSSLRAAIPCWLEDAENGLTHYFRSLLHGLWEDLLALDDRMSEMDKTIKRLAKSNEDCVRLQKLRGVGPMTATAMVATVGDARQYRKSRQMAAGIGITPRQHSSGDKHRLLGISKRGDVYLRTLMIHGARSVVTGAKHKDDPLSRWVTEIAQRRHPNVAAVALANKTARMAWAILRNKTDYDPDFAMS

SEQ ID NO: 361690 - protein, 352 aa, unidentified
MKYVGLDWAYRTAQWCALDPGGEIAGEGRFAADRDGLARLVLELGDEVTACLEMMSGALWARDELVACGWQVQVADARKVKTVAPLAAKTDKVDARLLAELSRRQLVPALWLPSLDERELRERLRRRMHLVRLRTSAKGRIFGLQTQWGIRISLRRLRRADGMTLLERAGMPAVWRHSISECLALIDFLDARIVALDAELRPFAQADKRAVLLDTIPGVAELLALTIAVEIGEISRFAGPQKLVSYGRLAPRVRQSGQGRPHTGPLNKSGSRLLGWAAVEAAQQAWRESNPWHQLYLDVSRRSRNHNSAKAAVARKILIAAWHMLSRNEPFKPAPRTGATSVPASSRLASAA

SEQ ID NO: 361691 - protein, 318 aa, unidentified
MSDKTTVGIDVAKNTLEVFIDTTGQSLHLENSAAGVIELHKALSGLAVAGIIMEATGRYHCTAELMPSASGLPVAVINPRQIKNFARAMGRVAKSDPIDARIICEYGRRMTPQFRPAKSEHQQHLAILLMRRRQLVQSRVMETNRLRERCGIYIEQGIMRHIEWLDAEIDILDAEIKQRLRQDDTLAAKRKLLDKVKGIGPVTQATLLIQLPELGSLTRRQVSALVGVCPYDRDSGQLRGKGAIWGGRSGLRATLYMAMLSAVRFNPQIRAFCDGLLARGKPKKVALTACIRKFVTILNAMFRDQKYWVYEGASSPGT

SEQ ID NO: 361692 - protein, 347 aa, unidentified
MKPNFEPGKWFMQCVGIDIAKGTFTACLCMYEFDQGCSTAPVVFNNDKTGFNQFIKWSRKEALRGYPLRYVMEPTGVYYEQLAAHLSKLGLDVCVVLPNKAREFAKYEGILTKTDDMDAYTLGMLGCLDKRLKPWTPPSPIYRELRQMTRFVADINKVKTELRNHLEAFAHSETAEKSIVKHYNKLIDEIDKQLVSNQKAIREKIKQEPGLFERIDRITTINGVGFMTVVTVVAETNGFALITNRKQLTRYAGLDVPAHQSGPVDPKRHISKQGNVHIRTALYFPAIVSTQCNPQMKDFYGRLCARNTQSKMIGVTATMRKLLLLIYSLWKSGEKYDPTRDKPACDK

SEQ ID NO: 361693 - protein, 449 aa, unidentified
MREPQEVQDEAHEQVVERVAAIDVAKASGKVCTRVPHQSKPGGRVTKVWDVDATTGAITELAAYLVGLGIEKVTVESTSDYWRPWFYLLQAAGLGVQLANAREVKNVPGRPKTDRLDAVWLAKLTERGMLRPSFVPPAEIRQLRDYTRLRIDLTHERARHWQRLEKLLEDALIKVSSVASTLDTLSVRAMVEALIAGQRDPKVLAGLAKGRMRSKHVALVEALTGQFDDHHAELARMLLDQIDALGGQIGTLTTRIGELIAAIPAAQGVDADGTTGPDAGAGPGAAVLPAVARLDAVTGIGQGAAQVIIAELGLDMGIFPTPAHLVSWAKLCPRTIQSGATTRAGKTGKGNPYLRGVLGEAAAAAAKTDTFLGERYRRLVKRRGKLKALVAVARSILVIVWHLLADPTARYHDLGAGYYTDRIDKGKKARNHIRQLEALGFTVTLAPAA

SEQ ID NO: 361694 - protein, 450 aa, unidentified
MGLQTINPHAAGIDVGSEQLYVAVVDGSVQVFEAFTESLHALRDHLLAAAVKTVAMEATGVYWIPVCDVLEAAGIEVCVVNGAHVKSLPGRKSDMEDCQWLAKLHSHGLLRGGFVPAPLIRRLRDYQRLRQDHVRMGSAHIQHMQKALDRMNVKIHDVLSNLTGMSGLAMVRALIEGVRDPLLRLDLGDVQVVKRKREPLLKALRGNWQREHVFALQQALAGWEFYQQQIEQCDAETALVLQELAAAAPPPAPPAAPGPAAAPQPPLAPAKRIHHNAPHIGDLKTLLVRITGGHDLSALPALTDYTVLQLLSEIGTDMSRWPTVKHFTAWLGLAPSSRRSGKRRRREKRFRGRAAQILCVGARSLARSKYLALGGFYRRLRAIRGPQVANIATARKLAVLVYNTLVHGLDYVEQGLERYEATYRAQCMKRLERNARDFGLTLVPLSHQNA

SEQ ID NO: 361695 - protein, 355 aa, unidentified
MRILSLDLSKYKTVACEYEAETGRHQFATVLTTQKALHDLIVDREPDRVVIEICSIAGWVCDLVRSLGIEMQVASTNDERWQWRKVKRKNDRRDGLKLAQLSARNELDLVHVPQSEMRQWRALIAYRHHLVQRRTKIKNHVRELLLREGQLLPRHRSAWTQEGLAALEAMVKPLGEVSMDELWRGELEVELAQFKAVQKQLTEVVAKLDALGAANHNVRLLQTASGVGPRLAEAVVTMFDDPKRFRRGAAVSAYIGMVPKQWDSGETERLGKITRHGNRLVRSLLVEVAWCALRHNPWARETYQRISGGKKSRKKIAIVAVGRKLLVRCWAMLRDQSAWHWEGQSAVVTPPAPTA

SEQ ID NO: 361696 - protein, 502 aa, unidentified
MTESQFEPGQSHDERGGLSSHRAQEDAAVLAAGKVACSPSSPRSQELPAARGGSARSLALRCARRPAEGAVDGAEGASGGVSEARVERTEEEGVEVADPSLTAKTTSTPTRSVAQRVGSEERSTMRRVALDLGARKIAYCEVANGDVVERATVMSLTSLMDRIGPNTPGACVLFEAGRSSWHVYDTLKQWGHEPLMLDTTRARQLGIGQHRRKTDRVDAETLARALDAGRVPLAHVLSPHRRELRFQLTMRRGLVESRATFVTTIREVVRARGHRVPACATNAFVAKLRETKLDEATRALVAPMSLVLENLDQQIALVDVKLEQLSAQEPVIMLLKTAPSVASVVAAAFVSVIDDAGRFRNAHQVEAYLGVVPSENSSGGKRKVGSITKQGNGYLRALLTQSAWSLLRSAKEDDPLRLWGEAIAKRRGKKIAVIALVRRLVGVLWAMWRHDTVYDPSRVGRSSAKGIEDASKALAHRAKALQKAARKSLRARNPKITAVAMS

SEQ ID NO: 361697 - protein, 432 aa, unidentified
MNNCAARHNVVGGRPALARSRSLPLNPKRVTERLPAEPAALAPTSNRKAPQEGHYIRAVDSRAKRRKSQKQQDKTMNDSEPWQQHRAFGALDWASEKHYVIVVDQAGKVIEDFEIEHSALGWKKFREKLQPYGSIPFAIETSQGAAVEQLLEAGMIVYPLNPKSAQAYRERKAPSGVKDDRLDAWSFADALRVDGQDWKALRPEEPLIKELRLLCRDEVGLIEQRTAFIQQLRHALAEYYPAALEAFEDWTSVSAWMFLQCFPTPQALAQAGKRRWQKFLHSRRLWGSDQGPRRMEIFARASEFAASPPTIQAKSLLALSLVQMLFTIEKQLAIYRQRIEELFARHPDHELFGSLPGAGPKIAPRLLSEIGDDRQRFGAEAQALQCLGGTAPVTKRSGKGRKYWHVHQRWACDKHLRHAIYLFAVIAVLKIR

SEQ ID NO: 361698 - protein, 337 aa, unidentified
MDYFAGLDISMDETHVCVLDREGVVVRESKTESTAQAIAGELAKAPSCRRIVFETGRMAPILFHGLNQLGLPVVCVESRQAYQALKSLATHKTDRNDARGLAHLARTGFFKPVHVKSLQAHALRSLIIARKKLVGQRVTLENQIRGLAVVFGIRLPRALTVAFIDNALKASEGIAGLSTAMRGLSAARTAVMTAVAAIDADMRRMTRASAACRRLMTIPGVGQLTALAFVAAIDDPSRIRRSRDIGAYFGWVPKRYQSGEVDYTGSISKCGDGRVRTLLYEAANVMLTRYKGQLKLKDWAFAIAQRSTMRKARVALARRLAIIMHAMLRDGTEFVST

SEQ ID NO: 361699 - protein, 338 aa, unidentified
MLHSGIDLHKRTVVLSTIDAEGQCVAEAELPTTRAAVQAYFAAQPGPHRAVVESTATWYWLRDLLVPLGVDLKLGHSKYIKAISYAKVKTDAVDAHTLAQLLRNDLIPEGHMISAAHREERDLLRARLRLVSQQVRCRLTVEGLLAQYNVSAVEALPELVRWRVEMLAQQRALLTEHIKQIEQALVPRLLPTPDAQRLLYIPGIGKIVAFTVLLEIDDIARFPTVKGFFSYCRLVPAAKNSGGKVRQQRSKDGNKYLKIAFHHAAVRAIQYFPEIQHFYRSTARRKPKAVARALVAKELARAVYFVLTRQEAFNGTFKGQPLSRTKQPRWPRLANPPA

SEQ ID NO: 361700 - protein, 409 aa, unidentified
MSTSSNILPSIVTEAATFIGIDYHKKYSVYHAVDAAGGDLGKGRIEHHSPHDFATLLKRWPNPRVVFEASMNWHWLYEVLEQSMPGERITLANAYKTRIIAEAQVKTDKIDARILALLLRAGLISSVHIPCKETRQRKEVLRQRCFFVRQRTMLRNRIHRLLGAQHDLKLPQCSDLFGKKGMGFLEKLELPAPAGLLLKQQLDMLKNVQARIKEDEAALEQMMSTTDAQKHVLSIPGMGPILASVVVSEIDGISRFNSAQKLCGYIGLCPSTSSSGGKTYNGKLMKHCNKWLRWAFVEAAWVAMGCDSYFGDLYKKKRSLGKKANTAILCVARRMARITWQLLTQERDYEKIPPPHPIQGRPARKARAATGSVKEGGGEASSASAEKGKRHSKTKQTFPSRSNYTLVGC

SEQ ID NO: 361701 - protein, 422 aa, unidentified
MLEETNDTEELIERVAALDIGKAELVCCVRVPDPQGSGRRLQEVRTYATMTRSLLVLADRLRELGVTRVVMEATSDYWKSPFYLLEAHGFEVWLVNARDVKHLPGRPKTDRLDAVWLAKVAERQMLRPSFVPPPTIRRLRDLTRYRADLVVVRTAEKQRVEKLLEDAQIKLSVVASDIFGVSGRAMLDALVAGERDPKALAQLARTRLRAKLGQLEEAFTGHFSDHHGFLLARMLGRIDQASADIAELEAHIDQEVAPFAQAVDRLDEITGVGRAAAWVTIAEIGLDMGRFPTPGHLASWAKFAPGVKQSAGKTKGKATTGHGNPYLARVLGEAAVAAGRTDTFLGERYRRIARRRGAKKAIVAVGRSILVIVWHLLADPTARFHDLGAGFYDTRINPERVKRNHVRQLEALGYKVTLEPAA

SEQ ID NO: 361702 - protein, 387 aa, unidentified
MTKNKGRVVGLDVHPDSFAGAVVEGRDPASAVVSSTSPRVELERLEEWALRHTSTEDTLVLEASGNAFAVAARLRAIGREVEILDSHHAGKVGKVYCANDRVDAVKIARIYLSALSPIVWQPDQKTLERREIFSAYQAVVKESTRARQQLRSMLNEHCVRLEKGFRLCHPHAITRLLELREWTPARRMLLQQLHGSLVAARARRTMLRRHMAQEIVAEEALLRLTRLCGINLITLYGVVAAVGDVRRFTQSKKLVAYLGLNPSVSQSGNFQGSGALKRHGRGALRALLIQSGKKLLEVNNPLQKWGLAVAARRGRNKAAVAVARKLCVALWHVMMGHAIGTLERLDTLQTKLSKFATEIGPAALTAFGYHNRKDFVQKKLYVLRTYP

SEQ ID NO: 361703 - protein, 402 aa, unidentified
MYTVGIDVSKGKSMISVMRPGGEEVLRPFEVHHTSHDLTLLCDKLKSLGDETRVVMEATGSYHLPIAWLLDHEGFYVSVVNPVLIHGYGNNSIRRGKTDRKDALKIAGYGLQYWNELPRYMPQDPARQLLKTCYRQYQEYSKTSSVFKNSLISLMDLYFPGVNDLFTSPVRPDGSQKWIDFVAAFGHCDCVHSLSERAFITRYQRWCAKHSYQFSPDKAKKIHAFALNCVAVSPNSKTVRILVDTAVSQLRTNLISLAAVRAQMQALASSLPEYPVVMSMFGAGPSLGPQLMAEIGDVRRFHSKKALVAFAGIDAPPCQSGQVNVLSRSISKRGSPALRRTLFLVMNVINMCSPAEDPVYQYMAKKRSEGKKYQVYMMASANKFLRRYYASVNAYLGTLGSN

SEQ ID NO: 361704 - protein, 350 aa, unidentified
MNYYAGIDVSLGSSSLCVVDASGTIFREAKVASEPSALISWFLGLGVGLERIGLEAGPLSQWLYAALREAGLAVELIETRHVRAAFVTMTVKNDRKDARGIAQLMRLGWFRPVHCKSLAAQEVRATLTSRKLMQKKLHDVEMHLRGILRNFGLKVGRTTQKGFAGRIRELVAGHATLESLAAALLSVHEVLLREFAKLEKQVRSMARADKLVRRFMTAPGVGPIVGLTYAAAIDDPLRFTSSKKVGPHFGMTPRKYQSGETEVDGRISKAGDASVRTALFEAAHIILTHPVKGSALKSWGMRLAKRSGAKKAKVALGRKLAVILHRMWVDGTDFDFTRGAASVASDKKAA

SEQ ID NO: 361705 - protein, 357 aa, unidentified
MNYKQNEKINQVKESTLVVGIDIGSTTQYARAFDWRGIELGKVFTFSNSREGFEAFKAWMQRLQDKYRKSDVIVGIEPTGHYWFDLGAYLEDEGILLVMVNPYAVKQTKELDDNSQSKNDRKDPKVIAKLVTEGRYSAPYTPDGVYADLRIMVTNRKRLIREMTQIKNRFARWFAIYFPEYTDVFGDYEAQSSMLLLKKVCTPEAIVELGAEKINQIWRDAKLRAVGMKRATTLCETAKRSIGLKKGSSAAQYEMKLLLEDYEYKKAQLDAVIEEIEKLCRKIPESEQMLAIKGIGVITVAGFLAEVGDVRRFESPRQIQKLAGLSLRENSSGKHKGQTTISKRGRSDSADSYESRV

SEQ ID NO: 361706 - protein, 391 aa, unidentified
MDKAWTGVDTGKEFHWAHVLDASGSELLSRKIENDEADISKLIDEVISLAEEVVWAVDQPRGGAALLLALLWERDQRVLYIPGLTVDRARDTYRGESKTDARDARVIADQARMRSDVGELRACEEEITELRLLLGRRRDLITDQSRTITRLREALLSLFPALERALDLNRRGPLTLLTHYQSPARLRRAGQKRVAAYLRNRRVKGFNRVAHKALTAARSQSVALPAESVAANIVAELAQEILALKDRIESVDEELGQRFFVRSEAAILCSLPGMGALLGAEFLVAVGDLCAFESADQLAAYAGLVPAANDSGKRVGNNRRMRGGNKVLKRVLYQSAFASLRASPESRAFYDRKRREGKRHTQALIALARRRVNVLWAMLRDGTTFETRSAA

SEQ ID NO: 361707 - protein, 357 aa, unidentified
MADLETTVIGGVDCHLDTHHAVALDTHGRRLGDQSFPTTSHGYHQLLAWLQHFGHVHAVGVESTASYGAGLTRYLVGAGLTVIEVNQPHRQVRRRRGKTDALDAEGAARSVLAGEATAVPKDTTGSVEAIRQLRLARASAVKARTAALTQLGEVLATAPAALRERLSGPASLHARATRCARLRADQARLQQPLEAAKFVLRSLSQRILALDAEIARFDAHLATLVASVAPRTTALLGVGTLTAAQLLITIGQNAARMGDEAAFAHLCGVAPIPASSGKTNRHRLNIGGDRQANAALYLIAVCRLRYCERTRAYAARRTHAGRSKRDTLRCLKRYIAREVFHTLRADLAALTAQPAPA

SEQ ID NO: 361708 - protein, 445 aa, unidentified
MIMGESNLNQTKQEAPGMNTLQKRIERITPQTLIVGIDVAKEIHYARITDHRGIDLSKPVRVHNSICGFESLLERIVKLQTKHNCDHVIIGTESSGHYWRALGWYLKLHESKPELVGVNPYHTKQAKELNDNSQTKSDPKDAQVIAHLIRNGNYFDTYLPEAEYAELRLLNTERQRLMKQINRANNTLIAMLDEFFPEYATVWGNVTCPTSLTLLKTYPFPSDVLSAPQKKLQDDIREASKGKEGIKLMGELLQAAKRSVGVLEGLQSARLRILSLIDELEYFEKKKTVIESTMASMMEELQLGEILQSVPGVGPIISAAFIGEVGDISRFDNWKQVRSLAGLNLIENSSGQHRGKTKVSKRGRPYLRHMLYLAGESGCINNREMNGFYRYFRDRKNNPLNGHQAFVATGLKVMRILFHLAKTGEMYDPGKALGEVRKQQIASNA

SEQ ID NO: 361709 - protein, 351 aa, unidentified
MENSSIVATQGVVGLDLGDRSSQVCRLDRESGAILEERRISTTTVSMQRSFGTLPPQLVALESGSQSAWVVRLLQQLGHVVIVANARKVRAIAASLSKSDERDARCLAQLARVDPQLLAPVEPRSEESQRALAVVRARAGLVKARTMLVNQVRGCVKSFGFRLPACSSASFARKAQEALPAELKAALEPLLRVLVELNQEIARFDRDIEAWAERWPVTQRLRQIRGVGALTALVYVLILGDPHRFARSRAVGPYLGLTPGRRDSGNSRPQLPISKQGDRLLRRLLVQAAHYILGPFGQDSDLRRFGLRLAGRGGKNGKKRAVVAVARKLAVLLHRLWISGADYVPLYQTAA

SEQ ID NO: 361710 - protein, 450 aa, unidentified
MSPLALDVVTKTDKTPVLGRMLSKYVGRKTSSIENDITKARNHSRQRGNIMRVVFGIDVSKASSEVAILVNGEKVHGYTIPNDAIGFNRLLGDLKTVHQPEIVFEATGVYSRRLQAFFEDNSYAYTRLNPLESKKQLDSLRVRKTDKIDAEKLAMSQFILNRKPSYVQEALYQELRDLSRFYQNLTEDIVCAKNRLHKVLQVTFPELENILSAPTGEQYWNLVMTFPCNSFVLELDDAALRAIIRQSTSKRISEKRVTYLVDKLTKLANQSYCAVKKTSPMMEEVKYYAGELLRLSEYRQSVLEEMVTLAQPLPEYEILLSIPGIAETTATSIIGELGDIRRFHSANQINAFIGIDLRHYESGDFLAKEHITKRGNPYARKILFKCIHNIASASHTNPCHIADFYDKRKRQSQVTSTKPHTIASIHRLIRTMYYLITHNKLYDYTSTQNR

SEQ ID NO: 361711 - protein, 379 aa, unidentified
MNAVGIDVSKGKSTVAILRPMGKVVQTPVDVPHDTVSLERLAYQILSLGENTRVVMEATGRYHEPVAMELHDRGIFVSVVNPLAIHGYCSGGTVRKVKNDQKDSLKIAKFALDHWVDLREYTPMDAVRQQLKIFSRQYNLYMKSRVALQSNLISLTDKVFPGVNEIFTSPERSDGHLKWVDFVTTFWHCECISLVSENAFTERYKKWCKRMGYKFSAAKVSDIYIDSLGHIVTLPKNNNTKLLIQTAAKELTAMNELLAVVKAEMIRLAKELPEYETVHAMFGVGELLAAQLMAEIGDIRNYPRRSSLVGFAGVDPEVNQSGKMNSESNPSTKRGSPHLRKTLFQLMTVYLRLSPADEAVYQFLDKKRSEGKPLSLIHI

SEQ ID NO: 361712 - protein, 370 aa, unidentified
MAQSIRFRYVGLDVHADSITIAVADEGRDAAQALGAVPNDFTSLTKILRRLGPSASVLCCYEAGPTGFGLARQLTAAGWACSVIAPALVPKKQGCRVKTNRRDAAKLAHFLRSGDLTVVAIPDEATEAVRDLCRAREAAKRAERVARQQLSKFLLRHGRRFTGATTWGKAHREWIARQHFERPAQQAVLEDHIAAVDLASDRVQRLTLKLLEVVEAWGRAPLARALQALRGIDLVSSATIVSEVGDFGRFAKAPDFMGFLGLIPAEDSTGDEHRRGPITRTGNAHVRRILVEAAWHYRRPPLLSKALRQRSSTVAPAVRSIAWKAQGRLHRRMVRLLGRGKEPQKVAVAVARELAGFVWAIAREEVLVAS

SEQ ID NO: 361713 - protein, 322 aa, unidentified
MSSNFHEGHRTNIIAFEVSKASLTVHSLPDDRQVTIPNTAPAIRRLLKAKTKGSNPFVICEASGGYERHVLNCAVEVGLSAHRAHGTRTRNFAKFLGLSAKTDAVDARMLALFAAKSVDLRLWQPPAPETVDLRGLRRRRDDLAQMIRIEQNRLEHPQIKHVERSLKRHVRAMSNEIKELDTQIAALVAATPEFRQKSGLLTSVIGVGLKTAAACLAYLPELGSLTKGEAASIVGLAPHAQDSGTLKGRRRISGGRREVRSSLYMAALTALRLDPAMQAFAHRLKERGKPAKVVITAIMRKLAVILNAVLKTGEPARRTHSA

SEQ ID NO: 361714 - protein, 387 aa, unidentified
MPASGPRPDQVAVQTSLAAIFVSLELSRSSWLITSLVPGGADKMSKHSVRSGDVAELMVHLAKLRDKAHARAGASFPIIVIQEAGLDGFWVHRVLEQAGIESHVVDAASILTSRRWRRAKTDRIDGEALLRTLLAYKRGEPRVCAMVRVPSPEEEDRRRLCRERRTLVAERVAHVNRIKGLLFAQGIADYEPLHGNRRQRLEALRTGDGRPLPLYLKAQIGRELDRLELLLEQLKTVEAERNALLEPTNDVAPVAVKALAGLRGIGPEFTAMLWSECLFRSFRNRRQIAAYAGLAPTPWQSGSVRHEQGVSKSGNPRLRSTMIQLAWLWLRHQPTSELSLWFRERVKRHGGRGKKTAIVALARKLLVALWKFSSSGVVIEGATMKAA

SEQ ID NO: 361715 - protein, 420 aa, unidentified
MKVVYQTCCGVDVHKSFLVATIIKTTSGVQPSYQKKRFSTFNNSILEFKKWLLDNSCRDVCMESTGKYWIPVFNLLEDELNVTIANPKWVKAVKGNKDDTKDSKWIGDLFRLGLVPGSYIPCKPIRILREFARYRYKLTSCRSSEKNRFQNALTVCNVALDSVVSDIFGKSATSVIDYLLEQSDNSINHEEISSRLLRSLKKKSESVIESIEGYQMTDAQKYRMRLVHAHMDYITSTISDIDSMIDSLVEPYENAVQLLCTIPGVDRSSAITIISEIGTDMTQFSNSKRLCCWAGLTPGNNESAGKKKSVRITRAGVYLKPALVQVAHAAVKSNKSPYYKAKYERIMKRRGKKRAIIAVARMILTAIYHMLSTGEAWNPTDLYQIDMPEPLKNKQKEKAVKQAMKLLIAEGLIKESQLVS

SEQ ID NO: 361716 - protein, 344 aa, unidentified
MEHVAIDLGGRESQVCIRSADGQVLLEKRVPTTHLAKLLETRPPSRVVMETCAEAFAVADRARELGHEARVVPASLVRTLGVGARGIKTDVRDGRVLSEVSTRIDLPSVHIPSHASRERKSLCGMRDALVSSRTQQINTVRGWMRGQMIRVRTGKAETFPTRAREALKQRETPSYVERQLRSIDELSVHILEADKELAALAKTDSTCPRLMTVPGVGPVTAIRFVAALDQIGRFSSVAQVQSYLGLTPGENSSSERTRRTGITKAGPAALRAALVQAAWAARRSHGEHPMLTWVVEVEKRRGKHVAIVALARKLAAILFAIWRDGTFYQATHSARALQESPMPA

SEQ ID NO: 361717 - protein, 427 aa, unidentified
MNFTQNEKLNQLSETSIVIGVDIASELHYARAFDWRGVELGKVFKFANSAEGFKDLSAWIGRLKKQTQKDSIVIGAEPTGHYWFGLASYLKEQSIKLVLVNPFHVKRSKELDDNHPSKTDAKDPKTIAKLVIEGRYNEPYIPEGIYAELRIATSCRLRIQKEMNSIKNRIQRWLKIYFPEHETVFGKFDAASSMLVLQEAPLPSDIKKLGAEGINRIWRDNKLRAVGMKRAKSLYEAAQETIGCPEGESCSRMEIKLLLQDYQNKTSQYDVIMDVIDGLCRRIPEVAKLLEIKGVGLITVAGFLSEVGDIRRFNSPKQIQKLAGLALRESSSGKHKGQTTISKRGRARLRAILFQAVMPLVAKNTEFAEIHKYYTTRIKNPLKKKQSLIALSCKLIRVFYSILTKGIEYDPQKLIRDIHRPAEYLAA

SEQ ID NO: 361718 - protein, 350 aa, unidentified
MFIIGCDYHPGFQQIACVDTDTGELSEHRLAHREEAEAFYRVLKQRNLSARVGMESSGHSRWFERLLQELGFELWIGDPAEIRTKRVRKQKTDRQDAQLLLRLMLENRFPRIWVPDAENRDLRQLLWHRHRLVQMRTRVMNQLHVVPLNEGLRRKKALWRPAGRKELESIALAPWASRRRQDLLDLLDQLTPKIQDLTHALEEEVEKRPVTRLLMTHPGVGPLTALAYELVIGTPERFHCGKQLASYIGLVPTEESSGDRRRLGHISKQGNVLLRFLLVEAAQVTVRSQPEWRSKFFHLAMRRGRKIAKVAMARKLAVHLYWMWRQGLDYGQTQKLGSHAGEPGHRDGEQ

SEQ ID NO: 361719 - protein, 363 aa, unidentified
MLIIGVDYHPSFQQIAFADKETGECGERRLSHSEGEAEKFYRGLKQRGVSVRVGMEATGYSRWFERLLAELGIELWIGDAAEIKTKRVRKQKTDRQDAELLLRLLLENRFPRIWVPSPENRDLRQLLWHRHRLVQMRTRIMNQLQAVAMNEGYRWKKKLWSERGRTQLESLPLAPWASRRRKELLELLDRLNPTIEELTAAVEQEAKKQPAVLRLMTHPGVGPLTALAYVLVIGTPERFPCGKQIGSYVGLIPCEDSSAGQQRLGHISKQGNTLLRYLLGEASQAAVRKDADWRRRYVHLAMRRQRNIAKVAMARRLAVRLYWMWRNGWEYSQLVEFGSYAGKLATGHGVNESAVHMIGHPAP

SEQ ID NO: 361720 - protein, 415 aa, unidentified
MALKIVYKICCGIDVHKTFVVACIASTNDKGVTSYESHRFSTYTSGLKTLLQWLLDRNCKDVCMESTGKYWIPVYNILESDCSIVLAHPKYVKAIRGKKTDKKDAKWIADLFKHDLVAGSFMPPADIRQLRDLMRYRFKLTCFKSSEKNRLQNCLTVSNIQLGNVVSDTFGKSAQAILDKLLENPADTSFDLEPLVYKSLKKKLPELRDAIDGYITPEQAGKLKVIKAHYENLESRKAELEELILALAAPYQQELTILQTAPGISSPFTAIGIISEIGTNMEAFPSAKHLCSWAGLTPTNNESAGKKKSVRVSKAGCYIKPLLVQCANAAVASKKHPEIRNRYLRLKKRRGHKKAIIAIARMLLTALYHMLKNGENYNAELYQKSDLLPVDREITVEQALMIARNQGYKIKSATT

SEQ ID NO: 361721 - protein, 437 aa, unidentified
MWILYRRCAGLDVHKMSVVACVLAVKEANRVEEEVQRFGTMTEDLKELAAWLKGQAVERVAMESTGVYWKPVWNILEATELDLLLANAQQVKALPGRKTDQKDSQWLADLLMHGLLKNSFVPSRIIRDLRDLTRSRTRLAQWHGTIANRIQKVLEDANIKLSSVASDVLGVSGRLMLQAITQGKTDTSELADLSKGRLREKIPQLRKALEGHVTGHHRLLLSRYGEQFQFLEKQIVKTDAEIARRMKYTPEELVQVKAALPPGTPLPPCPRQAALEYWMELPGISMVSGSSIVAEIGADMTQYPSAAHLASWATLCPGHDESAGKRRSGRTRKGNKWLRRTMSEAAWAASHTKDTYFAAQFRRIAARRGKKRANIAVAHSLLVTGYTMLTNRCHYKEVGASFFDSLNRDKVKKTAVKRLEALGFEVTLETKPVQSGN

SEQ ID NO: 361722 - protein, 340 aa, unidentified
MSSNTQFFIGIDVSKPYFDAALLPVSNHQKEAMVTERFDNTAEGIKTFSKWLKYNKVTLTKNTLLVIENTGIYHRLLWAFCSSKKLPIHIGNAAHIKWSFGITRGKNDKIDSIRLCNYAYKEADTLKATPALNPVLMQLKDLMTARTKLLSQINSIKTYIKELKNVSDTSIQKTLEQAYHQALQGMAASIKSLEAEIRKILTKNAALQINYDLLITVPGIGHLTAVYLICCTNNFVGKINGKQLACYAGVVPFDHSSGISVKGRNKIHPMANKDLKKMLHLCALTAIQYYPEFKQYYNRKKEEGKHSMSILNAIRNKIVLRAMAVVNKQQPYVDNHKKAA

SEQ ID NO: 361723 - protein, 350 aa, unidentified
MMRTVYCGVDFHARMQTIAYCDSADGEIHLAQLDHRKDDVRDFYSKLTGQVIVGLESGGYSSWFEAMLEELGHTVWTGHATEIRRRANWRQKNDRRDAELILEIMLNGDFPHVHRHSRESVEVLRMLRYRARLVKMRTMISNNLQAIAISSGLTERSRMLSRAGQQRLKNARMTPAIKHQSENLITLLEPLNERIGKVDRWLKEQASTDDRVKLLMTHPGVGVLTALGVVHTLEPFNRFTRQRSVVAYVGLEPMERSSAERKRFLGISKAGSRLLRFFLGEAAHVAVRFDPELKQFYERVGKRRGKSVATVAVARKLLIRCWIMLRENIDYAEFRNRGVEARLARTYPRP

SEQ ID NO: 361724 - protein, 408 aa, unidentified
MKVMHRRCAGLDVHQKEIVACRRRVVGRKVEAEVRRFATTTPGLLELADWLAEGKVTHVAMEATGVYWKPVWHILEGRFTLILANAAHIRNVPGRKSDVNDATWIADLLAHGLIRASFVPPQPIQELRDLTRTRTELTREVVRHTQRIQAVLEEANIKLASVISDIMGGSGRRILKAIVAGETDARTLAKLGSLRLKASRDELVAALTGCILDHHRFLIDQHLQMIERIETAIADFDARIEAVLAPFRDAVKRLIDIPGLSTTAAQIVLAEIGADMSAFPTADHLVSWAGLCPRLDESAGKRRSTRVRKGAPWLKPVLVQSALAAGRTKNSSFRTRYHALKSRVGPKKAAIAVAANLLRVIYHMLKDGTFYQDLGEAYRRPRNPARAAATLANRIRALGYQVEIKQAA

SEQ ID NO: 361725 - protein, 308 aa, unidentified
MILVGIDIGKNSGEILLSPSDFSNNLKGFLFLIQKLSSYTKSKLLIGMEDTGHYHFALLKYLLDRRYTVALINPTTTDLTRKLQGGITKNDPLDSLTICDVISSNHRNKPYRVTTLNRFDLYEQKQLTRHHHNLKEELNTYKNRLQKCIDIVFPEFNSLFHSKYGIVYMNILKAFSSAKAIANADIRSIRKCFEFKGQGKRISLSAEQLKLTAKSSIGIPSVAEEIQIRHLVSQIELLEKQLSEIDKRIEEFSLKNNSPILTIPGISHFSGTSIISELGDICNYTKASQIIKFAGVAPYHYESSQFTA

SEQ ID NO: 361726 - protein, 340 aa, unidentified
MDVKTLGIDLAKNLFRVHGVDELGRTVVQRPLRRRQLLLFMAQLKPCLVGMEACGGSHYWAREITKLSHQVKLMNPRFVRPYVKSNKNDSKDAEAICEAVARPSMRFVAIKTQAQQDMLALHRVRALLIRERTGLMNQMRGLLNECGIVIAPGVAHLRRALAEIRGADDDRISEVLRRVLVEMSDRLRSFEQRLAEYDRQITDLARRDDRAVQLMAVPGVGPLTATALIAAVGDARHFKSGRQLSAWLGLVPREHSSGERKVLLGISKRGDRYLRTLLIHGARSALHYAARKRDRRSVWVTALRERCGANIAAVALANKNARVLWALLSRNEQFRVPAAA

SEQ ID NO: 361727 - protein, 391 aa, unidentified
MISVGIDVAKDKHDCFIINSEGEVLADVFTIPNSLDGFQHLLQRIRDCSSHQGKIKVGLEATGHYSYNILGFLLNNGLATYVLNPLHTNLYRKSLSLRKTKTDRVDARTIAAMLLSDVGLKPYTDTAYYNEELKSLTRYRFDKVKERGRLKQSITRLVCILFPELEKLVPTLHIVSVYALLEEFPGAKQIAEANLTRLKTLLYNASKGRYGQDMAVKIREAARKSIGSVMPAKSLELRHTIHLIRELDAEIDEIETAIQRIMNELHSPITTIPGIGSRMGAMILAEVGDFSRFGSPDKLLAYAGLSPSTYQSGQLKNCYAHMEKRGSRYLRFAIFNAAKYVCHWDRGFAAYLAKKRAEGKHYNVAISHAAKKLVRLIYALEKSGEPYRLAA

SEQ ID NO: 361728 - protein, 360 aa, unidentified
MTTMTETRCRVTGGVDTHKDAHLATALDEVGRVLGTEAFPATLAGYRQLSRWLRSFGEVVAVGVEGTGSWGAGLARFLTAGGVAVIEVTRPNRQHRRRHGKSDPADAIGAARAVLSGEATGTPKAQTGTVEATRMLRVARRSAVKARTQAANQLHAVIDTAPADLRQRLGSVNTEQIVAVAARFHRRHPGTPAEAARLALRTLARRWEVLDDEITMLDAHLDELTAAVAPALRAINGVGPQNAAALLAAAGDNPDRLRSAASFAALCGTSPIDASSGRQQRHRLNRGGDRQANCALYYIEMSRLRWHQPTKNYMARRIAEGRTPQEVIRCLKRYVAIEVHRAITTDLGTRATSKPSRIAA

SEQ ID NO: 361729 - protein, 390 aa, unidentified
MLLDHPSDGPTAIRTHIGAIFVSLELSRSNWLITSLSPGKGEKMSKHSVTAGDVAGLMKLFAELRRKAAARTGESYPIVTIQEAGLDGFWLHRVLQQEGIKSHVVDPASIATPRRRRRAKTDRLDGEMLLRALLAYKRGEPRVCAMVVAPSPEEEDRRRICRERRNLIAERITHVNRIKGLLFAQGISGYEPLRRDRRVRLEALRTGDGRELPSHLKAQIGREFDRIELLLEQIKSVEAAQDALLAAARKPASEDEAAPGPVTMLLALKGMGANFATVLWSEAFYRQFANRRQVAAYAGLAATPWQSGRIRHEQGVSKAGNPRLRTTMIQIAWLWIRHQPLSALTRWFKERSPQGRKRAIVALARKLLVALWKYVTQGVVIEGAVMKPAA

SEQ ID NO: 361730 - protein, 353 aa, unidentified
MNSVKYVGMDVHKSITVIVVLNELGQFESRSQIKTKGENICDFFRGISGKVEVVLKKALTLPGSINCLNPWLHLRTVCDPRHNKLIEDGNKSDDEDAETLAQLLRLGAVKAVYKGDDQQQQLKEICRAYDNLIEDSTRVQNRLKAIYRGRGISCSGHDLYRADQRSDWLAKLGEEAARFRAESLLEQLESISQLRKQAKQRLLAQARTHADYRILIKLPGFGPVRVAQLIAEVGTPHRFRTKRQFWPYCGYAVVTRSSADYQFVEGKIVKQRKKVSTCGLNRNHNPQLKQVFKGAALTALRHEAIKAYYQRLIDHGRRPELARVSIARKLASIALTVWQRREEFDVKKAFAQD

SEQ ID NO: 361731 - protein, 391 aa, unidentified
MLPTRLREQNESDKVLIKGDSMSVRRILAKTINTDLEYEAIGIDLAKNCVSAALLTTDGEVVCIDRLDYSELEKSAQVLTPTTFAMEPCTEMNYLVQKLEAWGHRCLVIGGKNVQNYVENHYSGQKTDLNDAQALAFLAQDTQLRTIKAKDMEQRKYASLTTLREQYIKQYRQTIVSLKGICQAWGLNISKGISRKAQLRDLIESHAAFPEELKESLVDMVTHAQTAQKALNKITKTLEELAKNDKLCQLIRTIPGLGLICSCRLRATIGDIRRFKNPKDFPAYYGLVPRSIATGHNEKKGRITHRGDKTMRSLMVQGAGCVIRLATSGKLKSKQLTKWILKKQKEKMPWGKLVCAVAAKLLRIVRAILISSKPYNPKIAGVAKCSLPKGT

SEQ ID NO: 361732 - protein, 336 aa, unidentified
MNIKRIGLDLAKQVFQLHAVDHQERVVLRKTLRRARMLTFFTRLEPCLIGIEACGSSHYWARELTRLGHTVRIIPPQFVKPYLKGNKNDANDAEAICEAVSRPGMRYVAIKSEAQQSMQAEHRVRARLIHDRTALSNEIRGMLGEFGFVLPAGLSALRKALPEILSQQEKWDNRFIRLLSELTEELQALDERLNRYDRRLKQLAQEDERIRRLQEIGGIGPVTASALVAAVGDAKQFKSGREMAAWLGLVPRQHSSGGKTKMGHISKRGDSYLRTLLIHGARAVLNACDHKEDRRSRWLQSVAERRNRNIATVAMANKNARIAWSVLSRGEEYRVM

SEQ ID NO: 361733 - protein, 455 aa, unidentified
MSKSNRTDTPLRAARAQISNPEITVHAMYRSAIGIDVHLNLLVCCHQKQVAGHREQSESRDFNTDRASIDAFAAWCRECNPDIILMESTGSLWQSPYEALERAGFTSEQLALINARDAKAAAGRKTDRKDASRLASLARTGNFKKSFVPEKAFRLQRVISRDLQKNRNDISRTSNRFGKSLNLTGCRPTTVFSDIRGGKAASLILMAKLRDDPHLFDVIKQNSRRLRASPEQIMQALNFEIEPMMKEQILALRKKIDQLEEYDRSTFERLRQLQAPYEKDIQLLITITGIQERSARMIYAELCPDLKEHFPTSEQFASWLGICPGDNTSAGKQKSGKCPKGNKHLRRTLIEAARGLVVGGTAALKEKFQVLKMRRGYRRAMVAFAHLLARIIYSVLTHQKGFEPYQSTAFRDTLMERAKNGVKQLLKLKGTKYVIADGLVVETKTGAILGAVVSS

SEQ ID NO: 361734 - protein, 391 aa, unidentified
MLYLGIDIGKNTHVASLLDETEKPLFKAFSFSNTTVGANSLVEKLSNHAKSVSEIEIGMEATGHYWLSIYSFLAERDYAIHVINPIQTDGWRKGIEIRNRKTDAIDSVLIADLIRYGNFVETSLADENIMSLRNLSRFRNYLVSSISDLKRKVICVLDQVFPEYQSVFSNVFGKTSIELLLHFQTADDFESITAGQLEDALKNIYLKGFAKNKLSQISELAAKSFGLDFCRDSFSLQLKLLIEQIKFIEAQVDDVETQIKQILVKINSPITTIPGIGSVNAAVILGEIGDISRFSNPSKLAAYAGIDVNVNQSGEYKSQNGKMSKRGSPYLRKALFQAAMVAAFNDPTFSAFYQKKRSEGKHHLTAVGAVARKLCNVIHAVIKNNTDYHIQ

SEQ ID NO: 361735 - protein, 354 aa, unidentified
MIIIGVDFHPEFQQIALLNTTTGEVEEKRLAHPDEAERYYRALASAGETVRIGMEASGQGRWFERLVAELQFELWIGDATEIRVKRGRKQKTDRQDAQHILKLMLKDDFPKIWVPSWENRDLRQLLWHRHRMVQARTRVMNQLQAVALNEGLHCKKKLWRERGRQQLESFALAPWASRRRHDLLELLDRLNPTIAALTQAIEREVENYPAAQRLKTHPGVGVLTALAFVLILGDAERFHCGKQVASYLGLVPLEESSGNRRRLGHITKQGSSIVRFLLVEAAQVTVRSLPEWRSKYFHLVLRRGRKIAKVAMARRLAVRLFWMMRKQWDYEQLKKFGSHAGQPGHRDGVQSNTE

SEQ ID NO: 361736 - protein, 354 aa, unidentified
MLYAGIDYHKRYSQVHVIDHIGRTRATARLANDGLTVEKFFKALGEPCAAVLEAGWNWGVMFDWLAAIDTVEQVELAHPFRVRAIAAAQVKTDAIDAHTLAQLLRSNLIPRAYIPGVETRRLREIVRQRVFLVRVRTMVKNRIHALLDRYHVPAPAVSDMFGKRGRDYLAKVELPAGAQELLRQDLALLEALTREVRGTEQWLRDSVRGDHRVELLRTVPGLGDLLATVVALEIDCIERFASAAKLAAYAGLVPTTYSSGGHTFHGKLMPQTNRWLRWALVEAAWVAVRLDPYFRTHFANRRAHKPAQSAIIATARRLLEVVWHLLKEDRPYQSRPPTGSQRALKTSSAALATA

SEQ ID NO: 361737 - protein, 352 aa, unidentified
MTVTIVETRTPARAITGGVDTHADMHVAAALDPLGGLLGVAEFPATPAGYACLLEWLGGFGTVCLVGIEGTGSYGAGLARHTAAAGIRVVEVDRSDRQDRRRKGKSDPLDAVSAARAAQSGRASGAPKGRDGQVEAIRALMVAKRSTCSERIQTINQARALIVTGPDDIRIRFGKHAADALVAELAALRPRPGSMIRYHTLLSLRELGRRVVFLDGQLHRLDALIVPLVTARAPGLLALYGVGHDTAAKLLVAAGDHPERLRSEAAWAHLCATAPLSASSGKVTRHRLNPGGDRQANHALYRIVITRMSSHPPTRAYVDRRSKEGLSKKEIIRCLTRYVAREVYPHLRPGPG

SEQ ID NO: 361738 - protein, 348 aa, unidentified
MERFVGLDIGKWKCRAAIMNQEGQILDEFWFTNNHEGIENLTAKLTIQDRVVMESTGSVWTNLYDRLDDRHIHVSLANPLKTKAIASAKIKSDKVDARILAHLLRSNLIAESYVPEKPLREIRALIRHRVAIVKIRTMVKNQVHAIVDKHGLSCEYSDLFGKHGIGWLKALELPPLDKLILDNHLTHLESLNQQTDRVDDEVHSKACEDEDVRLLLSLTGIDVYSALLIRSEIGTINRFTDYKKLVSWAGLAPSLHQSGNVEYHGSITKQGSRMLRWIMVEAATVAVNHDPRMRGFYERVKHRRGNQKAIIAVANKMLKITWFMLTRREPYESRNEKRYQQKLNSVAA

SEQ ID NO: 361739 - protein, 341 aa, unidentified
MSLIKAAGIDLAKLVFSIHGVDANDKCKLRKTIKRNKLLEEVAKLPPCIIAMEACSGAHYWAREFTKLGHDVRIMASKFVIPYRQSEKNDANDAEAICEAATRPKTRFVSIKSEEQQAVLCLHRIRQGAIKDRTARINRLRGLLSEFGIIIPKGRYPLQNAMSGVLEDAENGLPFLARELLNDLWQSIKALNEEILKYDRKLYALANQMKDAKRLMSIPGIGEITATAVVATVNDAKHFETSRSFAAWIGLVPRQYSTGGVVRLGRISKRGEKHIRTSLIHGARAVIANCKNKTDRTSLWVKDLVERRGFKRATVALAAKNARLIWALLHSEKEYQVDYVK

SEQ ID NO: 361740 - protein, 506 aa, unidentified
MKVQASKPTFTIGYYPIGQYGSNICRQDIGRRRPYRSLLRQRYWAWSFTSKLITMAKVAKRKQTSKGLRLEVVNPNAAGIDISPKEMQVCVPSDRDGECNRTFGVYTEDLHYIAEWLKACCIDTVAMESTGIYWLPVFRILKESGFDVILVNASDVKNFSGRKTDASDAEWLMMLHSYGLLKPCFQPENIARTMRNLVRHRDNLIRSASREVLHLQKAMEQMNLKLDNVFSDILGKSGQSVIKAILNGERDPKVLADLADPRCRTSKEEIEKSLQATWDEEHLFEMRQSDSLYQFYQQLIAECDAKINEIAMQYSATVDAPKTELLRSGKYNAKKNRIGFDVEKVAFELWGVNVMRIPGMSRGALLRLVGELGADFTTKFVDIKHFVSWANLVPNNKISGGALLSSKVPKKKNPVGIIFRQAANTLKAAKNPLGNYFRHMRAKGGHLQAMVATGKKLASIFYCMVQRKVEYNEKVYCNHRKQELQNKVAYLHKRLQRIESELANCG

SEQ ID NO: 361741 - protein, 354 aa, unidentified
MLIIGCDFHTRYQQIAMARKETAEMLAERRLDHESGEAHAFYRSLQNLQEPVRVGIETTGPIHWFERLLTELGHELWIGDSARIRASEVRKQKTDERDARLILDLLLSKRFPKIWVPTPAERDLRQLLWHRHKLVSMRTMLGNQLHALAMSQGLCRKKKLFSQKGRVELQHLGLAPWASRRREELLKLLDQLEPPIAELDRAVLEEAKRREDAVLLMTHPGIGPVTSLAFVLAIGPVTRFPGSRKIASYLGLNPTEESSGGRRRLGGISKQGNSMVRWLLIEAVYPAVRKDPALRQDYQRLKFRRGHAVAKVAIARKLAVRMYWMLRTGADYAQLVRRQGSPGGTLMNASSSLA

SEQ ID NO: 361742 - protein, 322 aa, unidentified
MSVSNQRCAGIDVSKSTLDIAISSIARRFTVPNEDGGFNQILKELKQNETQLILIEATGGLESGVAGYLQSEGFDVVVINPRQARDFARAMGYLAKTDQIDARVLLQMAKVINQHPEREKYIRPLPDVHRQLLAAMVVRRRQLTIMLTAERNRLHPSHPQNHESIRFIISVLKSEMARIEAEMLAYISKNFSELSALLSAVKGVGAATVAVLLAEVPELGTLSRREISALIGVAPVNRDSGTMRGRRTVFGGRASVRTALYMSALVGTRHNPVIKEFYTRLVAAGKPKKVALTACIRKLLTILNAMLKNNEAWDPLYHQHAS

SEQ ID NO: 361743 - protein, 463 aa, unidentified
MRKGTQKKHFKSKKKAVNLPKHLEHINKMAAGIDIGSKSHFVAVPEGCDEVCVREFGSFTSDLYALADWLEKCGIETIAMESTGVYWIPLYELLESRGFEVRLVDARHVKNVSGRKTDVMDCQWLQQLHTYGLLSGAFRPKEQTCVLRAYVRQRSMLVQQVAAHIQHMQKALSQMNVQLHNVITDIMGATGMRIIRAIVGGERNPKLLATYRDGRCKNPLAIIEKSLTGNYRDEHVFALKQALELCDVYQSKIETCDDEIEKQLLTFETRKDVTKKGLEKCSKKPKAKNAPSFNLQEHLIRMTGVDLTAVPGIQAYSGLKIISEIGLDFSRWKTSKQFASWLGLCPGNKVSGGKRLGGKTKRVRNRAASTLRMAANTLYRNDSALGAYFRRLKFRLGAPKAITATAHKLAIIIFNMLKNGIEYVEIGQNYYEQQYHERMVKNLSMRAKTLGFELKEISVNSIG

SEQ ID NO: 361744 - protein, 395 aa, unidentified
MAFKILRKNCCGLDIHKTWIFACIGITDSNGRTEYKQARFSSFSNGLRDLADWLAKYSCSDVCMESTGKYWIPVFNILEKTCWVTLAHPKYTKPQKGNKTDRKDAKWICDLYMCGMVKPSFIPPPDIRQLRDLMRYRVKLTNMLTGEKNRAQNCLTVSNLKLDDVFSDVFGKSSRSIIQYILEHPGEQFDVTPFIHRRCKHPVEEIQAAVDGVVSREQAAKLKECLLHIDQLNAHRERIEAEILRLAEPYPYQLELIRTVPGFAAAPLTAVALISEIGVDMSVFPSAKHLASWAGCCPRNDQSNKKVKSTRISRAGCYLKPLLVQIANAVIKSDRHPECRERYRRIKARRGHKKAIIAVCRMLLTAIWNVLSKLEPYSAKGYLCLLYTSPSPRDS

SEQ ID NO: 361745 - protein, 311 aa, unidentified
MEREVFVGIDVSKDRLDGFVRPAGEAFSVARDAEGVRSLAEQVVQMNPGLVVLEATGGFEQVVAAGLASAGLPVVVVNPRQIRDFARATGRLAKTDRIDAEVIALFAERVRPPVRALPDHQARLLDELVTRRRQVIEMIVAEANRARLLENRRLKKRIERHRAALQEELSEIEQDLDETIRGTPIWCEADDLLKSVPGVGNALARTLIAELPELGTLDRRKIAALVGVAPFNRDSGRLRGKRAIWGGRASIRAPLYMAALTASRYNPAIAAFYKRLRDAGKPAKVALVACMRKLLTILNAILRDRKPWQAA

SEQ ID NO: 361746 - protein, 349 aa, unidentified
MRFYTGQHRHYCGIDLHTRTMYVCILDAAGQVLVHQNLPAKPEAFLEVIAPYREDLVVACECIFTWYWLADLCAREGIAFVLGHALFMKAIHGGKAKNDKIDAHKIAVLLRGGMLPQAYVYPAGMRATRDLLRRRLHLVRKRGQLLAHIQMTNHTYNLPAFAKRIAYPSNREGVADHFEDRVVRKSIAVDLGLLERYDALITDLELYLVHQAKQHEPQGFQLLRSIPGVGKVLAMTILYEIHDIHRFDRVQEFASYARLVKCAKESAGKKHGTSGAKMGNVHLKWAFSEAAVLFVRHCPEGKKLLARLEKKHGKGKALSILAHKLGRAAYYMLLRGKAFEIERFAATAN

SEQ ID NO: 361747 - protein, 311 aa, unidentified
MTNLICGVDVCLATLDARVGRSGAAGRFVNSPEGVAQLVAFCRDHEVTLVAMEATGGYERQAFGLLWAHGVPAAIVNPRAVRRFAEAMGFLEKTDRIDSGIIAWFAEARRIAPQPPASEVQRTLAALVTRLRQLTELRVAQKNQRRLVREPCVLAAIDELLGLIARQSKAIETEIAKLIEQDPLWHQLDAAFRGIKGVAGRTVARLLAEMPEIGTLSNKAAGKLAGLAPLARDSGILTGRRAVRGGRSGVRSILFVVADVVRRHEPDFTAFHRRLTDAGKAKKAIRVALAHKLIVRLNAKAREVRSAITAA

SEQ ID NO: 361748 - protein, 350 aa, unidentified
MEFFVGLDVSLDETHICVVDEGGRIIKETRALSEPEAIATAIRHKGRRIEHVGLEAGNLSQWLYEGLVKEGFSVSVMEARHVRAAFAAMRVKTDRHDARGIAQLVRLGWFKRVHVKSLDAQETRALLTARVFLVEKVTATENSLRAALRNFGLKMGSVTRKTWEGRARELAEGNPVLEGIMEAMLRVRALLLEELASIDGQLTALAKSDPVTRLLMTTPGVGVIVALTFRSAVDDPGRFPRSRDVGAWLGLTPRRWQSGKTDIAGRITKAGDPRVRVMLFEASASILGRARVMSPLKAWGLRIAKRTSMKKAIVAVSRKLATILLAMWKSGTAYWATGRPPASAQDFAAA

SEQ ID NO: 361749 - protein, 264 aa, unidentified
MPDYSYFCGIDLAKNHFSLHAVDQNGKVLLHKSVTRSKLLTTIANMPLMRIGVEACGGAHYWARTLNKLGHDARIMAVKYVVPYRTKGKNDLNDAVAICEAVQRPSTRFVPIKSPEQQAILSVHRIREHWVRERTALMNRIRALLSEFGLIIPVGRSSLLKHVPLMLEDTENELPHLARTVIADAYHHLGELNQRIADTEQVFDSFAKVSTNVQRVLKVRGIGPQTATAILASIGNGSQFDQSRDFSAWPGLIPKQYSTGGSLA

SEQ ID NO: 361750 - protein, 366 aa, unidentified
MKKISTVQALGNEIFKEQKLTIGVDLGDRWSFYCVLEEAGKIILEQKVPTTPEAMKQTFSRIPQSRIALETGTHSPWVSRLLTELGHEVIVAHAQKVQLITKSNRKDDRHDARTLARLARIDPELLGPVRHRSVQAQIHLTVIRARAELVSARTALVNAARGLVKSYGERLPKCGTQQVNRELAAALSTELRDVLEPLLREIESLNERIKEYDERMEKIAKEVYPEVSLLKQVKGVGTQIALTYVLTIENPQRFLKSREVGCFLGLKPGRRNSVESEPQKKISKAGDRYLRTMMVQGAHYILGPFGEDSDLRRWGRKLAERGGKNAKKRAVVAVARKLAILLHRLWVSGEVYEPLRNSQKAMRAVA

SEQ ID NO: 361751 - protein, 372 aa, unidentified
MNYNTVYVGMDVHKESFTLCSCKYEDEKASHYQRTPASYKNVLRYLAFLRTIYGEDTRFVCGYEAGCLGYSLYHQLENFNVECVILAPTTMLEQRSKRRIKTDKRDAEIITKSLAQHNYSPVHIPTKMDNQTKEFIRMRDDHKAELKKIKQQILSFCLRQGYQYDGSGNWTAKHVKWLRSLKTEGLYKEILDEYLLTYTILTDKLNRLDQRIEELASEEEYKEPVSKLTCFLGIKTHTALSVIVEVGDFQRFASARKFAGYLGLVPGQHSSGDDRNGLGITKAGNTHVRRLLVESAQSYTRGKIGYKSRVLRSRQAGNSPQIINYADRANERLRRRYYQMVLKDGKKYNIAKIAVARELACFIWGMMTDNIY

SEQ ID NO: 361752 - protein, 503 aa, unidentified
MTAPTTRRKSPPSSPASAQEAQAHRQAYNRRKTRAKVKSEVLRQKEAAQVEALPVQHPRAAGIDIGSRSHWVCVGFASAADSCLIREFPAHTDGLKAIAAFLREHQVNTIAMESTGIYWIPLYELLQAEGFEVLLVDPSYSHQLRGRPKTDRRDCQWIYRLHSVGLLAAAFRPDEQTCQLRAYLRQRANLIRSASRHVQHMQKALEQMNLKLTEILSDITGVTGRAILRAILRGTRAPEKLAKYRDKGCKASEAEIAQALTGSYREEHLFELKQAYEAWQFTLGQVEKVDGQIALQLGRMKCDRALPPLKPKARPKRRVNSPGFDVRTALYYVVGLDLTEIEGISELTALTLISEIGPGVSRFATVKKFCSWLGLCPNWKKTGGRVRSSRTRRGVNRAALALRLAAQSLHHSRGALGGFLRRMKGRLGTQAAVTATAHKLARIVYLALKHGMTYVRQNQEEYEAQRKEKQIKALRRKARQLGLEVIEKASGTAPTAVATPVQE

SEQ ID NO: 361753 - protein, 390 aa, unidentified
MIYVGIDVAKDKHDCIITNSDGEVLISGFTIPNNRKGLDDLYSKIIKCSKNKSEIKIGLEATGHYSNNLLEYLIDKDLPTFVINPLHTNLYRKSLSLRKTKTDTIDAYSIVTMLHSEYLKSYTPVSYHISELKSLARYRFSLVQDCARQKSSYARLLNLLFPELQSLITTIHLPSMYAMLEELPGATYIAECHLTHLLNILQTTSRSQYGKEKAKAIRDVARASIGTNSLAKSLELKQTIQLIRSMQEQIKNIEAKIKPIVDSIESPIMTIPGISYNMGSIILAEIGDFSRFETAEKILAYAGLEPSIYQSGNLVSNHATMVKRGSKYLRYALFTAAKLISIHDPTFAAYMSKKRSEGKHYYVAVSHAAKKLVRVIYYLVKTNQTYHKAG

SEQ ID NO: 361754 - protein, 340 aa, unidentified
MKLYTGLDLHSSNSYLGIINESGKRVYKQKLPNDREHILAALNPYKNDIAGIVVESTYNWYWLVDLLMGERYDVHLANPAAIKKYTGLKFADDQHDAFWLAEMLRLGILPEGYIYPKEDRPIRDLLRKRMHLVRLRTSLIVSLQNILSRNNGFKLKTIDVKALTADRVAPYLAESEDLALAGSVSKESIDFLTRQIKKIETVIENRVELKPPYEKLQSVFGIGRILALTIMLETGPISRFAKVGNYVSYCRKVSSKWLSNDKVKGKGNTKSGNKYLAWAYSEAAEHARRSYTQARAYYNRKMQKTNFMAAHNALAHKLARAAYYVMRDDVLFIPEKIFVG

SEQ ID NO: 361755 - protein, 419 aa, unidentified
MSFKILKFNCCGLDVHKTWIYACIGITDSNNRTEYKQARFSSFTKGLNELCDWLAKYNCNDVCMESTGKYWIPVFNILEQHQVWITLSHPKYTKPMKGNKTDRKDAKWICDLYMCGMVKPSFIPPADIRELRDLVRYRYKLTCMITGEKNRAQNCLTVSNLKLDDVFSDVFGKSSRSITEQILQHPGEKFDVTPFVHGHCKTPIEEIQDAVDGAISKEQAVKLRQCLDHIDELKKHISEVEQEILRLSDKYEAALNLIRTVPGFDKKPLTAIQVLSEIGGDMSVFPTAKHLVSWAGCCPRNDKSDRKIKSTRISRAGSYFKPVLVQVANALIKSRKHPEFTDRYRRIKARRGHKKAIIAICRMILTAIWHILTDLKPYTPDGFLESHPVSRGKVLTTSQALNLLKQRGYLIKDDPLPAS

SEQ ID NO: 361756 - protein, 392 aa, unidentified
MFYVGIDIAKKNHEASIIDANGKLLDKSISFSNSQAGSSKLISLLEKYSIDASNVIVGMEATGHYWLSLYSHLLDLGYIVYVINPIQSDAFRKMYIRQTKNDSKDSFIIAQIMRFGEFSTTSLANDDIMSLRQLSRYRLALVDECSDWKRKCIALLDQVFPEYSTLFSDTFGVTSRELLSNYPMPEDMLSVDTNTLTELLSKASKGRFGISKAMEIKDSAKSTFGISLAKEAFAFQIKQIIAQINFIEEQLKELEIEISTLLHQTNQVITTINGIGDVLGAIIVGEIGDISRFESAPQLVAFAGLDVSVKQSGDFIGTQTKISKRGSPYLRRAIWLAATVAAFKDPALSVYYQSLRARGKHHLTAVGAVARKMTNIIFAVLRDNKPYMPNIK

SEQ ID NO: 361757 - protein, 424 aa, unidentified
MVLPLAAGDVQATWTGVLVRLFAGDDWAQDHHDIEVMDETGKVLARRRLPEGMAGMAQLHGLVSGFLGEEADDSEVLVGIETDHGPWVTALIAAGYRVFPVNPQQSARFRARHGVSGAKSDAGDAHVLADMVRTDSHQLREAAGDSPDAAGIKVLARAHKTMIWNRTREVQRLRHQLLQYFPGALEAFADLDAPDALELLARAPDPARARKLTRAQISAAMKRARRRDIPARATAVLAALRAGQLAQPPALAAAYAATVRSLIAVITALNGQVKVLEEQVKEHFGRHPDAEIIISQPGMGMILGARVLAEFGDDPHRYRDGKARRNYAATSPITRASGKRKVVAARFVHNDRLVDALSAQAFSALSTSPGARACYDELRARGIGHNDALRRLANKLVGILHGCLKTRTLYDEHTAWNHRHRQAA

SEQ ID NO: 361758 - protein, 343 aa, unidentified
MKKELYIGVDVSKRWIDLAYYNGVVVDWKQGHIRVDNKEAGFLQIGKWLKKIGADKDSVLFCMEYTGLYCQNLRLWLEKEGIVYGMVNPRKMHRFEPDLGENERALDRIKTDEMDSFRIAMYCEKHCRKIRSLPSRLPAPAYFKLKRLIAERRQYVVQSALYKQQLHDVCDYDTDNSVSRKQEELKSLMARIRQTDAEILSVMEEDAAIKGNYDLLRTVTGIGIVVATETIILTENFTAITNPRRYACYIGIAPAKKESGDSVRGGSHVSRKGFTQAKADLSMACLKAIQSDANIKSYWQRRKADGKKGGVVLNAVKFKLVLRMFAVIKRQKPYVEIEGYRHG

SEQ ID NO: 361759 - protein, 400 aa, unidentified
MLSIGIDVSKGKSTVCGMKPGGEIVYAPFEVQHTREEMLELVSLLRSSGEEVRAVLESTGSYHCPVVAALLENGIFVSVVNSLRMKRFCSQSIRKVKTDRIDAMQIALYGLAYWQELQPTRLPEDTYRELQLLARQYYQMTSLLIKAKVDFNAICDQVLPGMQELMNDHAGRHKLSDFVLRYCHTTHILEMGETRFRKDYCKWAEKKGYRNCERMAALIFATAQNGIPVLPNAPSTQIVITEAIRVLHTVEASRDAILTQMQALAKTLPEYSLVREMPCIGDTLAPRLIAEIGDVRRFHSKRALIAYAGIDAPPYQSGKFCANNRHISKRGNRYLRKTGYEVMQSYVMHKPANDPIFTFIEKKRGEGKSGKLAMVAGLNKFLRVYYGKVTELYRSLPAIE

SEQ ID NO: 361760 - protein, 421 aa, unidentified
MNTTPIPWEQRQHFGALDWARDHHDIAVVDAKGTIVLQLRFEQTPEGWQNLRQALAPFGQGLAIAVETNQGLAVEQLLEAGYTVYPVNPKSASHYRERKAPAGAKDDRRDAWSLADALRVDGHGWRPLAADDPLVAELRLLTRDEVALIGQRTALINELRAALAAYYPAALTAFDTWTCEGCWSFVETFPTPASLTKAGPKKWEKFLRAHQLWKEATAEKRLAIFACAAQLSGAPATVAAKSFLALSLVRVLHVLQAQLDAYRTRIQERFAQHPDAGLFGSLPGLGVKLAPRLLAEIGDNRARFASAEGMQAYAGTAPVTFQSGQVEKHLVRRACQPFLRSAIHLWADRSRLTCAWADDYYQAHRAKGQSHACALRCLGQRWVKILWKMWQTSTPYDEAKHLANQRKHGSPFALISTLKTT

SEQ ID NO: 361761 - protein, 417 aa, unidentified
MQSARTTLPEEPPGGVTGGIDWARDDHAVSIVDARGGEIARRTVEHSAAGLRELVAVLAGAGAGEAAIERPDGPVIDALLGAGITVVVISPNQVKNLRGRYGLAGNKDDRFDAFVLADTLRTDRARLRPLTPDSPATVALRRACRARKDLVSHRVAVANQLRGHLRNVFPGAAGLFADLDSPVSLTFLARFDTQDRADWLTPARLGRWLASIGYSGHTDPAEMHARLTAAPRGATGDDGLASACITHALHAVLVTLTGQIKVLSAQIASQLAAHADRHVFTSLPRSGTVRAARLLAEIGDCRARFPTPEALACLAGAAPSTRQSGKMRAVSFRWSCDKQLRDAVTDFAGDSRRASPWADDLYQRARGRGHDHPHAVRILARAWLFVIWHCWQDGVPYDPARHRALQTLLHQDQQAPA

SEQ ID NO: 361762 - protein, 453 aa, unidentified
MAQGSGLTRGDRNRNRRVEALRAVVRRDRAVLAVDLGEDKQVAVVMDHEGRVLARKVVKAKAHQLGSLLEWAAGKAAGAGFAGLTVACEPTGHRWKALMGLADAGGHGFCCVQSLAVARAREGDDYTRDKTDHRDAYLIGKLVIRLDCYLPERADAGWARLRHLGARRFALVADVTSCMQQAGDLLGCAWPAPLGAAARPLESVTWLAGMAVITDRCCGQPGRLRKMGYDRFLAAIRRELPRWGGKFVRHSIVRGLWEALADTGGVAVQRRGALERLHLLLGDWRALRARLADTEARMTAMLDELGLTALVTSIDGVSALSGAVMLAETGDLNRFTSGRAVVKHAGLNPSEHTSATITGQTRISRRGRPGLRSAAWRAVWGALRHNKVLLAKHARWTSRDGNRLADGQARTACAATVLRWLWAVITTGTMWDARIAAGQVTPRRGAVAVPAAA

SEQ ID NO: 361763 - protein, 373 aa, unidentified
MSSSVIYVGVDVHKDTNSICMYDPEDSSFFAEAKLDSGTENICKYLKKQTKDFALEEKEFIIGYEAGPTGFGLQRGLAKKGYTCYIIAPTTIKRASGERTKTDRKDARMLALTLATDAYRSVHVPEEEDESAKELTRTRTALKKHLKRAKQNLLSFLLRQSKSYPFPGNYWTQKFSDWLDSLVFADKRLQYSLETYRQEIRDLNDKIEQMDDFIEEVASSERFKERVDKLVCFAGIDTQTALSVVCEIGDFSRFATPEQFSSFLGLVPGQESSGKTVRYTGITKTGNSRLRLLLTEATKAIKRSNPYSKSKRIKERQAGQSPEVIAYADKGTKRIKAKMRNMEGNGKNANVSTAAGARELSCFIWGMMTGNIA

SEQ ID NO: 361764 - protein, 413 aa, unidentified
MRAGHHRSDHLEYTGVVMESAVYVGLDIGKSGHYAVAVDASGEPIYQTAVPNDEAALRKLVTWAKEHQAKVVVDQPGGAAALVLKLCWVSEVPIGYLHGLAMARAREFYAGESKTDPKDAFVLADVARAHPSRVVWLEPSSEALAHLGLLCGYDADLRSDANRLTNRLRALLVSHWPALERALGKRLDTRGVLAVVQQYPSGPAVKNAGVAQLTAALKAQRVHRAEAYARELHQAALAQTVTITGSATAAGLIRELAVQLAAILARRDELDKEIEQSFFGLPEAAILHSLPGIGPRLGARIAVEIGCISRFRTPGHLAAYAGLGPTPWKSGTSINANRPSRFGNHRLKNAFFVAAFASLRHPPSRTYYDRKRAQGKRHTQAVLCLARRRVDVLHAMLSQGIPYRSPAPLAAAA

SEQ ID NO: 361765 - protein, 317 aa, unidentified
MGTSAALFVGIDVSKQQLDVAVRPSGEQWTVPHDEGGIRDLVTRLQALAPTLIVLEATGGLEVALASALATAPLPVAVVNPRQVRDFARATGLLAKTDRLDAQCLAQFADAVRPTPRPLPDAQAQELSALLQRRRQLVEMHTAEKNRLSTAAPRIRPQIQRHLTWLHKQIGECDGELRTLIRSSPLWREKDNLLRSAPGVGPVLATTLVAALPELGTLTRQQIAALVGVAPLNRDSGLMRGRRTVWGGRTQVRHVLYMSTLVGVRHNPVLVAFYQRLRAAGKVPKVALVACMHKLLTILNAMVKHRTRWVSVEAHHA

SEQ ID NO: 361766 - protein, 313 aa, unidentified
MSTPLPQTIGIDISKATLDVHACPAGLDARFDNSAKGYKALLKWLTQWPVERIAYEATGTYHRALEAALAGRPCVRLNPERARRFAQATGTIAKTDQIDAAMLARMAATLQPPVRPTRSEKEVLLAELINARDGLVRDRTALKNREKNLTIAILKRHCKQRLDQIDRHIEALDTEIATFITADAKLTRRHEILTSIRGFGTLTANQLIATMPELGSLENKQAASLAGLAPVARQSGQWKGKSFIRGGRANVRQALYMPALVAARFNPDLKAKYSQLIAQGKPPKVAITAIMRKLIVIANTLLKADRLWAKSLA

SEQ ID NO: 361767 - protein, 343 aa, unidentified
MKDTIYDQYIAIDWSIANMAIARMTKKSNKITAIDVPSDIVDLQAYLKNLKGTKILAIEETTTSQWLYAELKDYADKIFICDPNRNKLLNEGPKTDKIDAAKLVQLLKAGLMKEVYHSGDKFLYLRRVTSGYEDLVKAGVRLKNQRYALFRACGKAGNEKKDINLGSQGEQFVLECLDRQIEAYEREKQCYENEFERLARKNPEIKHQKSLPGIGTINAVKIVTRVVTPHRFPDKGHYLSYTGLIKLDKISGGRSYGKKNPRFSRQLKSVYKSGILAAIGGNNPMNDYYEHLIQEKGYPAHNARHKACRRLAILSLGVFKSGRKYQPYRRDHVKGGKEDTSGL

SEQ ID NO: 361768 - protein, 342 aa, unidentified
MEQPPSTPSFVGMDVSKDRLDVHVRPSGEAFTVARDPIGLEKLVADLRGRDVGLVVLEATGGFETTVAAALAGAGLPLAVVNPRQIRDFARALGRLAKTDALDAEAIALFAERIRPEPRAIAGPDAQALAELVARRRQLVEMIGMEKNRRRQAHAARVQKSLAATLRTLEAQLAALDRDIDGAVRASPLWRAAEDLLTSVPGVGDVTARTLIADLPELGRLDRRRIAALVGVAPLNRDSGQWRGHRAIAGGRTAVRNTLFMATLTAIRWNPAIRAHYTRLVAAGRPKKLAIVACIRHLLTILNAILRPRLHGKTLDRKDSRSEACANLTRARPGRRPLRAGS

SEQ ID NO: 361769 - protein, 424 aa, unidentified
MKVTFQTCCGVDVHKSFLIATIIKTSSGIEPSYQKRRFSTFNNSILEFKKWLLENECLYVCMESTGKYWIPVFNLLEDEINVTIANPKWVKAVKGNKDDTKDSKWIGDLFRLGLVRGSYIPCKKIRILREFTRYRYKLVSCRSSEKNRYQNALTVCNVALDSVVSDIFGKSSTSIIDYLLEQSGTSIDHEVIASKLLKCLKAKEDAVIESIEGYQMTDSQKYRMHLVRAHMDYITAAINDVDSEIESLIASDPDYENAVELLCTIPGVKYDSAITIISEIGIDMSQFCSSKRLCCWAGLTPGSNESAGKKKSVRITRAGVYLKPALVQCAHAAVKSDKSPYYKKKYESLVKRRGKKRAIIAIARMILTAIFQMLTTGETWNPCDLYKIDMPEALLEKQKQKAIKQAQKLLIREGLLPPTEPIAS

SEQ ID NO: 361770 - protein, 340 aa, unidentified
MINNFLGIDVSKERFDVSLSFISKKGKRETRKRKFKNDDTGFQGLLNFLQKHNVEEVKACMESTGCYSEALAEFLHNAGYFVSVVNPACIRFYAKSKLTRQKNDQTDAEIIADYCQRQEPSRWTPPSPELKKLKHLYRCSNALKDELTLANNHLEKKERLPKEVANAWEDLAMNIEQKIETIKNSIRELLKQHKELLEDFQLLLTIPGIGEETAIAILAEIPGIKAFINARQLAAYAGTIPQNITSGSSVHAKPRLSKTGSRTLRKAMYFPAIAAKKHNPIIMASCERLKEKGKHAMAIVGAAMRKLLHIVFGVLSSKKAFDPDHIKNYRAKRLTEGLVL

SEQ ID NO: 361771 - protein, 406 aa, unidentified
MYYVGIDVAKEKHYVCILDESCELACKPFWIYSDITGLNELVKRLDSLSTDYNQFLIAIESTGAYSENLYSYLMDMELNTILLNSYQTAKYRDFSTLKKVKNDSIDAYVIAQLIASDKYKESYISSEAYHTLKVLNRLKKSLNDKIKTIQREISTVMAIVNPEITSVFPNIFTKTAMAIIKEYPTAKDLQVTTPKKLCKIFRHIKGNNFNEDKAKILIENAHNSIYSGRAKDARSLMITTNITILELILQEKALLEYEIQKLIEQNQDDDFNNGIKAIETIPGVAQKTISAILGECGDLTRFNSAKSFIGYLGLYPTLYQSGNSSNIGRLAQRGIPIAKHALYMAAVSSVRHNMELKKIFKDKISSGKSKKEALVIISKKIAMMIYSMFKYKQTYNPSRVLISNRR

SEQ ID NO: 361772 - protein, 325 aa, unidentified
MDCKFLGIDVSAVKFDVALLGTGDRLRHRTFSNGRHGFAALLKWLGEQGPGDLHVCLEATGTYGLALATYLHQAGVKVSVVNPVCIKAFAQSELRRAKTDRVDAMVIARFCRAMRPAPWQPAVPEVAQLQALVRRLADLQAMHTSESNRLQVPGIPAQVRASVRKMLAHIERQMEAISRQIEEHIQRHPGLKAQRDLLCSIPGIGKATASVLLAENVRASGYASARQLAAYAGLVPHRRESGSSVRGKARLSKRGNAHLRKALYFPAVVAMHYNPILRAFAARLRAAGKATMVIIGAVMRKLLHQVYGVLKSGRPFDPNYEPIRA

SEQ ID NO: 361773 - protein, 347 aa, unidentified
MRNYSVDKTIKTIGIDLAKSSFQVHGVDEHGHVVMRKKMTRNKLVVFMANLPPCLVGMEACGGAHDWARKFRAMDHDVRLMSPQFVKPYVKSNKNDAVDAEAVCEAVQRPSMRFVPIKGIEQQDIQSLHRARSMAVSHRTAQVNQIRGLLMEYGVVVAKSVAVLRKALPEILEDADNSLSPMFRELLSGLQDEFHKLDERITTYDLQIKQISTQSDACRRLMTIPGVGPMVATAMTAAVADAKVFKSGREMSAWLGLVPRQYSTGGKPRLLGISKRGDTYLRKMLIHGARSALRVAGKKQDRRSKWVVDVENRRGSNIAAVALANKIIRAAWVILSKGEEYRMATAA

SEQ ID NO: 361774 - protein, 323 aa, unidentified
MENVGIDIAKRKFDLLWVSSSTNKRRSKVFDNSPAGFKEMFAWLAKCGLVPGNTHLAMEATSQYYEALAEALFDAGFTVSVVNPLQVKRFGEALMIRQKTDKADADLIARFCAQCEPRPWAPPPLQVRELQRLVARLDAVQDMLVQEKNRRYVSQGVTLESVERMIGSLQDEQDLVKSMIKDHIDRHPDLHDQQELLCSIPGVAERLSAYFMAWLPVDRFEDVREAVAFIGLSPRHCESGDSIHRKARLCKQGHARLRKMLYMPAMAAIRCNAAAQAMAKRLRENGKRGKIVIAAVMRKLVHWMIGVLKAGVKFDPNLALAKS

SEQ ID NO: 361775 - protein, 319 aa, unidentified
MQSKLTIGMDIGKAQVVVACHESAFAVLKMANAVPVLRRWLATLPAGSRLGLEATGGYHEPVAELAHSLGFTVYILNPKDVHHYARALGARGKTDRLDAQVIAAYVAEHNARLHAFVPLSADEKLLRELARRRATLVNAKSMLQQSLRVLPGFEREGRELLRAMGSFADRLEHKLAEIAARSSERAALVKRLQTIDGVGTLTSIRCATLFTRVPLHRSDAAVAFFGLDPRPHDSGQHRGRRRLSKRGPSEDRRLLYNAAMSAIRTPTWRPLYQHLRNRGLASTEAIIIIARRMVRIAFAMYQNHSDFNPRLVPRPSCPA

SEQ ID NO: 361776 - protein, 397 aa, unidentified
MYIVGIDIAKRKHEAAVIDGEGTVIIKPFSFTNNCSGYNRLLAMLAKAKLPLDEVSFAMEATGHYWLALFTRLQKEGFRVQVINPVQTNSIRSFYIRQAKTDPRDALLIAEVIRFGHFSESTLHPENIYELRELCRGRHAIVSMQADVKRKVVALLDQVFPEYETAFTNLFSDTSMAILQTCPTPKELSEMPLEELCHLIEVSSHKRFRMAKAQELQVLARNSFGFAMAGDVFSTMIRLYAKHLDFLKQQVREMDRKIAEIMDTLDTPITTITGIGPTLGAYILSEIGDISRFSSAAKLAAYAGIDPTMRQSGEYNGVRNRMSKRGSPYLRHAIWLAASSAVLHDPALKLYFQKKRDEGKPYMASVGHACRKMVSIIYAVMRDNKAYTPYIPNEISA

SEQ ID NO: 361777 - protein, 386 aa, unidentified
MSRQLAAPAAKLSTRMNTKTRLGNSLHQRLHQLRVEEKCNRVLKLGLDVHYRQVTVAMQEEAGAIKAVGRMGHEGFGNWVERKSKAGWDIYSCYEAGASGYWLHRELEQLGIKNLVVAPKAMGQDKGQKTDRRDSAELVDQLDRYLRGNHKALSAVAIPTPEQEEKRALLRYHRQIMADRSRYEARGKGLLCAQGIEVQGKWWQPQVWKELKTHPRLKGWMETQLKSWRRKLLSAEQEQQKLRKQIEALAPAVLPKGVGAYSAVALEYELKGLARFKTARALSSYTGLCPGIHSSNGQGKEGSINRCGNAAVRWNLVEMVWRLLKWQPDYEPVRQLGVGLVRSRRARKRLAVKAARQLAIDLWRLETGRATAQELGLILQPRAKRK

SEQ ID NO: 361778 - protein, 326 aa, unidentified
MPSIVYLGLDIAKETLELSPHPQIKTRVFSNDPPGHRRLIKALARLDHTIHIVCEATGGYEQPVLQVLHQAHVALSCMNPRQVRDFARAKGRLAKTDRIDALVLAQYGQQLQPAATAPTSAQQQRLAELVRRRTQLTQMVADEKRRQEHQADPFICRQSRQMVRALEKHLEQTEAQITALIQADLALQARFQRLCQIKSVGPCTAWTLLAELPELGSLKRGQAAALAGVAPFNYDSGPFRGQRHIAHGRPLARRGLYMAALVAARRNPILQQFYDRLVAKGKRPKQALVALMRKLVELANLVLKRPDWQLKQSAASPEPQLAPPTA

SEQ ID NO: 361779 - protein, 338 aa, unidentified
MSESALIGIDLGKHTFHLHGQDKSGREVFRKKCSRAQMMQFFASSQSCVVAMEACAGSHCVARQLAAIGHTAKLISPQFVKPFVKGNKNDFVDAEAICEAASRPSMRFVTPKTESQQTLSVLHRMRESLVRDRTRTVNQMHGFLLEFGVSLPRGSTIMKRLAVVLAEHELPVRLTVLLQRLHNHLIYLDEQIKAMDKELACQVADDDLGSRLLSIPCVGPITASLLAVEMGDGKQYRCSRDFAASVGLVPKQYSTGGKANLLGISKRGDKHLRQLLVQCSRVYMQRLDHQKGALADWVRSLLSRRHSNFVACALANKLARIAWAIAAHHTRYEAGPGT

SEQ ID NO: 361780 - protein, 338 aa, unidentified
MTITTIGIDLAKNVFELCGLDDSGEIRLRRRVRRETLLRAVAEVPACVIGIEACTGAFYWQRQFEALGHEVRIIAPQHVKPFGRRQKNDRNDAEAIAIAVVQPRMRFVPKKSVAQQDVQTLHRTRQRMVNHRTALVSQMRGILLDRGIAFGQSITRARAMIPRIIEDESNELTKLCRETLSSLLALMAEIDKRVREFDRRIDQVYRESEACRRVGKIRGVGPKTATAVVAAIGDGRDFDNGRHMAAWLGLVPRQHSSGNRTVLMGISKRGDQHLRTLLVHGARAVVRTAVGKTDRFSQWVNEFRERRGTSRAIVAVANKNARIIWALLAKNEEYRPAT

SEQ ID NO: 361781 - protein, 423 aa, unidentified
MRFIGLDVDRDFCEVAIAEGGKVRLAGRVQTEPERLALFAQSLSVDDRVALEATGNALGIARIIEPHVGRVVLANPKAVKGITRAGAKTDKIDARTLAQLLAGGFLPAVWLPDEQTRILRRRISARAQLVRQRTRAKNQVHATLIRNLKGKPPVSDLFGVRGRRWLAAQDLPADEQETVAACLRQIEFLDGEIALIERALAEQVLASPEMRRLLTLPGVNFVTAAALVAAAGEIRRFPTARQLVSYLGLDPRVSQSGTEPARHGRISKQGPGETRHVLVEAAWHAARAPGPLRAFHQRIAARRGGNIATVAVARKLAVIAWHMLSRGEDYAFTRPSLTREKIRRLELATGAEHQKGKRIGVFATKEQHQLDKELAAQAEIAYRRLAQDWQPAIKGTGAAPGHASRRPSSGQAARQETAPPPAL

SEQ ID NO: 361782 - protein, 457 aa, unidentified
MYRELHSLRQALHHELEGTLPPLPGVEPNKLLQTYLDQLTLYVGVDVADQTVTLLALNANKEELGDLLDCPNTPKGHAQIGAWLEHLRSQHHLRIIAVAGEATGVFYWGLWDYLATCPNVARVLFNPRTTEHMGEVLSKRVRNELVDALLLAEQLRLGSTPEVLLTEDADLLTARLCSRAARDLAQQINRKKNQLRSLVRGYNPVLLQVFRGSKFHHPAVYALLEHYLFPDEYVTAGVGLLTELLTEHSRSAFGREHAQALVDQCRECLSRPIGRAIVHQRVNDLTTEIRLARTHQKDMLRQGYALIRQRPEAQLLKASMGAGISNTLALVTEIGDIRRFPDGEHVASFLGLTTSKHISGATLYQAKHITKQGPPNGRYAAVNMALHLSHRVPKYRAMYQAIKARKPPRKGHFVALVAVARDFVTNVLYDMWHYQRPFFVKVEDYRQYLREHPRGAN

SEQ ID NO: 361783 - protein, 424 aa, unidentified
MQRDSEPRTQRSGVSGDSFERYRWYIVIIHSLPIESWVVEDDTIAERDRIPLGLSRSGSKLGPLRNRRSAVRIVTGATPRIHQLEQESRRCSLILARDSGVPAMNRLYIGIDVCKDFLDAHVRPTDLSKRFPNTPTGIEQLVAWIRPFAAERIIFESTGPYQKAAVGALLAANLPAVVVNARQVRDFAKGTGQLAKTDTIDAGILAHFGEVVATTVRALPSQEILEFRDLCDRRGQLVRMLAAEKNHRHAAQGSSPKILKNIDKTMAFLERQIEDLEDRMDRIVADSETFKAKDDILQSIVGIGPQVSRTLLVHLPELGEGSRQSIAALVGLAPYADDSGTVSHIRPIRGGRGKVRIALYQAAVAAIRYCATMKSFYASLKARGKPSKVALIAVARKILVLANALLRTMTPYENRANSVCPQNA

SEQ ID NO: 361784 - protein, 376 aa, unidentified
MITCFIGIDAHTTNYTLSTAIDAEDKPFNTCKYAPKLTYILKYANALCKKYNLKKEDILLGYEAGCLGFKLQRDLNENGFNCVVMAPSPIPGTAINRRKKTKNDIRDAEAIAKALRNDDYSSVATPDEEDEAIREFIRAREDVRMELKRCKQHIMAFCNRHGQHYEETGWTQKHMKWLNNLAFSQPVLKETLNSLLLEYEYLTEKLEEKDRRIEEFAQMDKYRESVHKLTCFKGIKTLTALAVIVEIGDFARFMKAKNFVAYLGLSVGEQSSGNDHNQTGITKQGNRFIRKLLTEAAQCFSRATSKKSKELKKRQEGNVEEVIAYADKANERLRKRYHHLVIHNMKSPNKAKCAITRELACFIWGMMTDNIHTVLV

SEQ ID NO: 361785 - protein, 351 aa, unidentified
MVVVGADVHKRKHTFVAVDEVGRKLGEKTVNATTEGHGSAIMWAREQFGVELIWGIEDCRNMSARLERDLLGAGQQVVRVPTKLMAQVRKSARTRGKSDPIDAEAVARAVLRQPGLPIASHDEVSRELKLLTDRRDVLVAQRTSAINRLRWYVHELDPERGPAPRSLKTAKHQQALQAWLETMPGLVAELARAELADIIGLTTEINALENRLSGRVRAIAPTLLDIPGCGDLSAAKLVGEAAGVARFKSEAAFACHAGVAPIPVWSGNTQGQMRLSRSGNRQLNAALHRIAVTQIRMPDSQGHTYYQRLIASGKTKTAARRCIKRRISRRVFQALLTDHQTRNQAQQPAAA

SEQ ID NO: 361786 - protein, 431 aa, unidentified
MSKFFYKPIVGIDISADFSVAAILAPDGEVYRKPFKIMHNRNGFDYLVDQIKKAEKELNMKTAIFMESTGVYHLTLFHFLKDTFEVCILNPLITNCNKNVDIRKVKNDKKDALTIAKIGKFQDVKYSSNFDIEIYTLKSLCRDYYKFTDSKSTFKKKLSTDLRVIFPTYNTVFSNITCKTSIAILKTYSSPEAILNADRDALIGLISTNSRKGLVHSEKIYNKLYAAAEEAVYIGLKSPSLFVKIINTITIIESLETQIKNLLREIHLLMHSNRISAEFKKNIQLIYSIPGVGELTAITIMSEIGNIKGFIKPKHLVAYFGIDPSVNQSGKFNSNKNVMSKRGTRIGRRALYAVALASIRKNRSGEPINKVLLNFYKENMKGKSKKVGLVAIMHKLINYIFSVLKNQKEYELRDPKIHAKMYLNKQSNFAA

SEQ ID NO: 361787 - protein, 369 aa, unidentified
MAQSTPLFVGLDVHKDSIAVAYAGGGDAPPVFVGEIGSRQVDIDQLLRRLQAKAVTLQVAYEAGPSGYGLYRHLTSKGVACHVVAPSLIPRKPGDKVKTDRRDAVTLARLLRSGDLTAVYVPSVDDEAIRDLCRARDAARLTMKNAKLRLKALLLRLGLHYVGRADWNAAHRRYLAKVVCPTPAQQIVFQESVRAVDEQVDRLQRLEAELRDRAPAWRLYPVVHALQALRGVQWLVAITVVAELGDLTRFTSPRQLAAFVGLIPSEYSSGASRRQGGITKAGNGRARRALIEGAWAYRHPAKISQHIQTRIDGLPKPIQDLGWKAQVRLCKRFRRLVGRGKHPNVVVTAIARELIAFMWAIAKEVGGTA

SEQ ID NO: 361788 - protein, 328 aa, unidentified
MQGKVSSERTAIATVYVGIDVCKEWLDIHLHPLGRSFRVANDTAGLRRLKRELDALGQMPRSALHIVMEATGKWHRAVQRSLHADGFYVSVVDPLRARLFAKACGFLAKTDRLDARLLAIMGEALKPAQTPPQDQALEALQELVNARSAANGERTALSNRMKTAVTAFLRKELTRRLAALDTHIARLDAEIQRSIGAEPEMRRRLDILISIPGIGAVTAASLIAGLCELGACSGKQAAMLTGLAPLACESGERAGHRAIRGGRPAPRNAIYMAALSASRHNPDLAHFAERLKKAGKPNKVVLVAVMRKLIVLANTLITKNRIWTPNPP

SEQ ID NO: 361789 - protein, 315 aa, unidentified
MFTGIDVSKDWFDAAWEVQGRLYCEHFAYTDEGMEQLMALAPSGAVFVMEATGVYHARLALKLFEAGRPVSVVNPLVIKRYAQMKLLRVKSDRADAQLILRYGQEHQPARWEPAGEQVQELQQAHGWFNDLISERTRLLNRQAVQQYRARPSAFVAKQMGEQLEQLQRRINACQEHLEELVKKSFAQLYERLLTIPSIGQKTALELIIVTDGFTRFEDVKELGAYIGVSPTTFSSGSSVKGRGRIAKLGQARMRQLLYLCSWTARKCNPACQQLHQRMKAQGKPSKVISIAIAHKLLRQAHAVATKNVSFSAEFA

SEQ ID NO: 361790 - protein, 419 aa, unidentified
MNKLYIGMDVSQNDVKVYILDQEGNEATRRFCVDNNPQGAETIVNNILKYCHNLSINKVFIGLESTSVYGWHLQFYLADHQELKPFDPMIISFNSKIVNAFKKSLGELPKNDWIDAFTIAERLRFGRLPNSCPVDFRYLALQRLTRHRFHIVDNIVREKNYYLSNLFLKFSGLCQNQVFSTNFSATATQLFDEFLTLDDIAARPLDELVDFVVEHGKELFSDPKATALALKDAVRKSYRMNASVENSLNFVIKSCLDNIQTLEKQKKATEKAIAQEILGFNNQYLCLTSVKGIGPTIAAGLISEIGGISRFEDDNALAKFSGLYWSEYQSADFTAEDTYLKRTGNEYLRYYFIQAADQLRKYLPEYSQYYTRKFNEAKTHKHKRALVLTARKAVRLIFALLREEKLYKPPALKGGIIEK

SEQ ID NO: 361791 - protein, 404 aa, unidentified
MDNPTTGYAGVDWATDAHAVCVVDGGGRVVVEFDAPNSAEGLADLCRRIQRGSARRVAIERPDGPVVDALLAAGLEVVVVASRWVKALRERYGSSGNKSDRSDAYVLADCLRTDGHRWRSLEPDSPATVTLRSHVRARKDLVETRVAVANQLRAHLRIVFPGAVGLFRDIDSPISLRFLERFPSATRAAWLSEKRLGSWLRANGYCGRKTPTELYARLAVAPAGLIGDDGDARGAVALAYVTVLKSLRAQIDELNTRLDELLDAHPDAEIFRSLPRCATIRAATLLAEIGDCRARFPEAESLACLAGVAPSTRTSGRHRAVTFRFSSDKKLRDALCDFAGDSWRANMWAEQRYRQLRAAGKSHPHAERILARSWAHIIWRCWQDRTPYDPARHGAYQRLRTEAA

SEQ ID NO: 361792 - protein, 317 aa, unidentified
MDISKLSFDVAILNDEHYYHHHFDNDLAGFKACQGWVKSFRTSALFCMEATGIYGLALAKYLVSHQQKVIVANPIQTHAFAKMEMMRNKTDKADAMSIARYCQHLDRQGRSDKSLYTPKEADFERLQFLVTRLDQLNKMRSQENNRFDVSLDKAAARSVKAMLTFIDKQLSNIKKAIAKIVKQNDSLNTQVHLLTSIIGLGDKTAWSILAYIGDISLFENAKQMSSYAGLNPRIERSGSSINRTRLSKMGNARLRKSLYMPALVAVRFNPIMMAFYTKLLAKGKPKKLALVAVMRKLLVLAYGVLKSGEKFDVNYQH

SEQ ID NO: 361793 - protein, 396 aa, unidentified
MYYCGIDIAKYKHESTVIDESGNALQNSISFENSKEGCEKLLALFEKYGIISTDVVIGMEATGHYWLSVYGFLTEQGYDVNVINPIQSEAFRKMYIRQTKNDRKDSFIIAQIMRFGQFSATRLSEEVIVAMRQLSRYRLALVDVCGDCKRRVIALLDQVFPEYDKLFSDIFGATSKELLLKYPTPDDLLSVPTGRLTKLLEKASHGRFGREKAEQLKSAASTTFGVSFAKDAFAFQIRQLIEQLEFLEGQISELEEQLSQMLKQTGSYITTIPGIGDTLGAAILSEIGDIERFDAPNKLVAFAGLDVRVAQSGEFIGTRQKISKRGSPYLRRAIWLAATRAAFCDPVLSEYYQSLRARGKHHLVAVGAVSRKLCNIIYAILKEDRPWQPTPPERTL

SEQ ID NO: 361794 - protein, 400 aa, unidentified
MKGFLHMKLIGIDIGKNKHFFCIMDQQTGEIISQPISFSNDKEGFDFLIQKIKSYSKDSVLIGMEDTGHYHFALLKYLLDLQYTVALINPKTTDFNRKMQGGITKNDKLDTINICDVLDTPERKKQYRISKVNSFDLYEQKQLTRHHHNLKEEENVYKNRLQKCIDIVFPEFNKLFNSKYGTVYMNILKTFGSAENVANTDIRTIRKCFEIEGRGNRISLTPERLKECARSSIGISSSAEVIQIKHLTAQIELIEEQLTEIDKKIEEFSIQNNSPILSIPGISHFSGTSILAELGDISNYSKPSQIIKFAGVAPLHYESSQFNAQHTSITKKGSKYLRKTLYQIILPVIRHNQVFYKYYQLKISQGKGHRCAQGHCVRKLLRIIYHLLKTNQQFDPQLLR

SEQ ID NO: 361795 - protein, 448 aa, unidentified
MSSHKGNAGLPVIHDRAAGIDVGSRFHVVAVSADLCAEPVQTFQAFTSDLQHMADWLVAMGIKTIAMESTGVYWVPVYEVLEDRGIEVILANAREARAVPGRKSDINDAQWLQRLHACGLLRASFHPGRDIAALRVYLRLRERHLDYAAAHIQHMQKSLTFMNLQLHHVVADVTGITGMKIIRAIVNGERDPQVLAQMRDVRCKASLETVRAALVGNYQPEHVFALTQALALYDFYQARVDECDAQIQAVLAALTAEKASPSAPLPKARHRTVQPNAVSFDVRPVLYQLAGVDLTQIHGIGPYLALRLIGECGTDLSRWRSAKHFTSWLTLSPGCKISGGKVLSAHTRKTTNRVAAHLRLAAVTVGRTNTALGAFYRRLAARIGKAKAVTATARKIAVLFYNAMRFGNDYQDPGATHYEQKYRERVIKQLHRRAAEFGFTLQEVVSVS

SEQ ID NO: 361796 - protein, 381 aa, unidentified
MNTMADEIVDVIGGVDTHGDVHVAAVVDSTGRILGTASFPTTPAGYRRLLSWMRKHGVVIRVGVEGTGSWGAGLARFLTGEGVEVVEVDRPNRQLRRLRGKSDPVDAEAAARAALNGEAKGTPKARTGPVEAIRALRVARRSAMKARTQALAQIRALITTGPEELRAQLRPLSTADVVTMAARYRPGDATTVVGATKLALRELSLRVRYLEEQVDRLDATLAPLVTATCPALVARFGVGPQTAAALLVAAGDNPDRLRDEAAFAALCGVSPVEASSGRVVRHRLNRGGDRQANHALWRIVFVRMRFDPKTRDYVDRRTKEGLSRKEIIRCLKRYVARELYQCIVNNQTAGAAPTNADTDATARPHGRHRRPPAIIGACGAR

SEQ ID NO: 361797 - protein, 420 aa, unidentified
MRNAGIHANSLLEVRRMYNAVGIDVSKGKSTVAVLQPGGTVIRKTFDVSHTSQNLNELADYLSSLDGTTKIVMECTGRYHEPMVKALSEAGLFISIVNPHLIKNFGNNSLRKVKSDPADARKIARYTLDNWTELRQYSGMDNTRTQLKTLNSQFSFFMKQKVAAKANLIALLDNTYPGVNKLFDSPTREDGSEKWVDYAYSFWHADCVRKIGLKAFTERYMSFCKKHHYIFQQDRPEKLFNASKELVAVFPKEKTYKLLIQQSIQQLNLASEHVERFRKEMNELASTLPEYSTVMGIYGVGKTYGPQLIAEIGDVSRFTHREALTAFAGVGPGVDESGQHKSKSNRASKVGSARLRKTLFQIMTTLLQNAPEADPVYRFLDKKRSQGKPYYVYMTAGANKFLRIYYGKVKECLQNLEQTE

SEQ ID NO: 361798 - protein, 402 aa, unidentified
MNCVGIDVSKGKSMIAVMRPFGEVVVSPFEVRHTANELSELAGLLKSLDGETRVVMESTGNYHAPVAWLLHDAGLYVSVVNAMLVHDYGNNSLRRGKTDKKDAVKLANYGLDHWLTLPRYVPEEDTRLMLKTCYRQYQQYSKVQTMLKNNLISLLDTAFPDANRLFTSPPRADGSEKWVDFVATFWHCECVCGRSEKAFTTQYQKWCRKHGYNFSEDKALDIYASACRHFGVIPKTDTAKLLVEQAISQLQTTSSALAALKQEMQSLAASLPEYPVVMGMFGVGPTLGPQLLAEIGDVRRFHSKKALVAFAGIDAPPYQSGQIDVRSRSISKRGSASLRRTLFLVMSVILQCAPIDEPVYQFMDKKRSEGKPYRVYMMASANKFLRIYYASVKAYLDSLEHD

SEQ ID NO: 361799 - protein, 338 aa, unidentified
MNIVFLGIDLAKNVFQLCGLNQAGKPVYTKRTGRKELLQTLANIPACLIGIEASTGAFYWQREFEKLGHKVKVISPQYVKPFVRGQKNDGNDAQAIAVALMQPTMQFVPPKSPEQQDIQALHRARQRIVNHRTATVCQIRGLLLDRGIPIGSAVSRARRAIPLILEDAENGLSSRMRRTIAELYDLFNDLGRRIHFFDKEIETVFRQSEACQRIAKVKGIGPKTATAVVAAIGKGTEFKNGRHFAAWLGLVPRQHSSGDRQVLMNMTKKGDKHLRTLFIHGARAVVRVATNNNDGHMNQWVNQLKERRGFNKTTVAVANKNARIIWSMLRNETEYQVV

SEQ ID NO: 361800 - protein, 358 aa, unidentified
MLYTGIDLHKQLIVMCTVNDNGEIIARSKIKTEPDAVITYFRQWSEPHRAAVECTSNWYWLSDLLISLGVDIVLAHAKYLKAIAYAKVKTDAVDAHTLAQLLRMGFVPEAHQLPSEYRGLRDLLRQRMVMEHQRTNLMVRMRSMLAKFNIIKLPCVASQPRFADFLANCAIPEDYRLTLLLYHQQCLQVAQHKKQLEHYFKGELRPTPTLQLLVSIPGIGDITGAIIAMETGGISRFANDKHYASYCRLAPGARDSGGKHKHRSGSKDGNQYLKYAFTEAALKAMRFYPQIKEFAQRLEQRSNPSIARTVIAKELSRITFYVLSRKEEFKTFKGIEIHKTRDWPRTCKPACLTGVHSL

SEQ ID NO: 361801 - protein, 325 aa, unidentified
MACIGTTPWKVTVKPVQFENNEDGFVSFLNWLKENNLKADSSVVCMEATGVYSEGLAYFLHASGYIVAVEPPLNIQRKFPPHASKTDELDCQHIAEYAYRYHDKLSFWKPRAEILEQVKVLLTTRQHFSGQLTGHKNALHAIHRKKVSSELAQHSHQNMIEQIAKAIKEIDKEIRRLINSDPTFKQTLLLLITVPGIGLQLAAHLLLLMQETLDPRTLAAFIGICPLKHESGSSVYSAPTSRHFGPPTLRKLLYLAACSVRTHKKQFQHYFFRKVAEGKHKKLVLNNIQNKILKIACAVVRSQQPYIANYVSVNPLVFQKSLTNS

SEQ ID NO: 361802 - protein, 391 aa, unidentified
MVCVGIDVAKDKHDCCILDSEGTTLVDCFTIPNNMDGFKSLLQTIQDCSQKSDKIKVGLEATGHYSYNILGFLLDNDLPVYVMNPLHTNLYRKSLSLRKTKTDRVDAKTIATMLLSDVDLKSYTDIAYHNEELKSLTRYRFDKVQERAKLKQSVSRLATILFPELEGLVSSIHGTSIYALLSEYPGAKQISEVHLTKLTNLLTTASKGRYGKEKAIQIREAARASIGSVMPAKSLELKHTIKLIQELASEINEIEDSIQKIIDELNPPILSIPGMGVNSAAVILAEIGDFSNFSSPDKILAYAGCSPSTYQSGKLTNCYAHMEKRGSRYLRHALYNATKYVCYWNPVFAEYLAKKRAEGKHYNVALSHAMKKLVRLIYALQKSGKTYLTAA

SEQ ID NO: 361803 - protein, 365 aa, unidentified
MQRIYIGVDFHARQQTSCYLKTETGELVISELKHQDKEQVRAFYQQFPGPVIVGLEASGYSPWFEALLEQLGCEVWLGHATEIRRRARWRQKNDRRDAELIWELMVHDEFPRLHRPAVESREVLRMLRYRQKLIKLRTMAKNSLQAIALQAGVAKGEQLFTRAGQEQFKSVAISPVLQWQREHWFQLLQPLNAQVLETMVWLKAQSKDDVCVSRLRTHPGLGLLTAVCLVHTLQPVSRFRNTRKVAAYAGFDPVERSSAERKCFLGISKAGSRLLRYLLVEAAQTAVRYDEDLQRFYKRLAQRRGRPKAKVAAARKLLIRAYIMLRDEIDYAEFRRRAVAARLARTGQRPEVPEVLIGQPASLAK

SEQ ID NO: 361804 - protein, 310 aa, unidentified
MEPIFIGIDVSKDRLDVHVRPGGEAFVVTRDGKGLEELVGRLQELGPTLVAVEATGGFETIVAAAVAGAALPLAVVNPAQIRHFAQAVGKRAKTDPIDAGVIAHFVEAVRPVPRALPDEASRLLAELVGRRRQIIEMMVAERQREKRAANVRVRKSLARHIAMLERELAAIDQDINTLVRGSPVWRVKEDLLASVPSIGKTLARTLLAELPELGSLDRRNIASLAGLAPYARQSGRWRGRSMIGGGRAAVRSATFMAALVASRCNPPLKDFYQRLISVGKPKMVALIAVARKLLTILNAILRDNRPWQSA

SEQ ID NO: 361805 - protein, 394 aa, unidentified
MDRFLVGIDVSKALFSVAGIDSEGNESFSRSYSMDSSGFDEFLKAITSHCEDLSKVIIGMESTGCYHINLYSFLTSRQIPTLVINPLLIANYAKLSLRKTKTDKKDARTIAKFLLDHHQEVSQLSVSQDLQDLRDLSRERESLCHLIAATKVEIKRVLRATFPELESMGDLYTRTMIRFLQEYPSARLVRAAKPKAIAKVLKRPSVGNKLTLTAEEIVKAAQSSVGTVSPAKEIILRGKIATLLHLQERLAEVTKLLTELCQSTKLEDLEILRSIKGVGPKTAAPFLAEMGEVKNYSSHKKIIAYAGIDPSVHESGQFIGMSRLSKRGNRHLRRAIYLMTACVVSHNAFFNAYFLKRKREGLAPQKALFATAHKLIRVIYAMLSQRTYFRIQEV

SEQ ID NO: 361806 - protein, 342 aa, unidentified
MLYVGIDIAKNKHDVTALNVPGKTVLKPLTFSNNKAGFELLDLSIRQINQDCLIALEDTGHYAFNLLNFLHEQGYKVYTYNPLLIKEFAKSLSLRKTKTDKKDAHGIALKLLSDPNREQFQHDNRQVDLKILARHIHRLKKKQSDWKVQYTRCLDIIFPELDKIVGKHSEYTYQLLTCYPNPQKRLEAGFDKLIEIKRLTASKIQDILSVAPRSIGTTSPAREFEIIEIIKHYKRLIDKAETCVNDLMAEFNSVITTVTGIGGRLGAVILAEIRNIHAFDNPAQLQAFAGLDSSIYQSGQIDLAGRMIKRGSPHLRWALIQAAKACARFSPAFKAYLKTKLE

SEQ ID NO: 361807 - protein, 330 aa, unidentified
MDVHYRTSTYCILDDTGREVACETIRGHWPKLLERLAMIRKPWTICFEATCGYGYLYRELSRMAHRVVVAHPGQLRLIFRAKRKNDRIDARKLAKLLYLDEVPAAYVPNQEVQNWRELIEYRRRRVDRQTTCKNALRSLLRSQGIIAPKGLWAKKGLAWLQALAMPTPAATLKRDLLLDELGQAQRRVKTVTKELDRIGERHPGVLLLRTIPGVGIRTAEAAVAYLDNARRFVHSSQVGAYFGLVPCQDASAGANRLGHITKQGPATARKYLVEAAWQGVYRSPTIRAYFERVRHGRKERRKIALVATAHYLVRCTHAMLVSGRPWHEAA

SEQ ID NO: 361808 - protein, 408 aa, unidentified
MPVGKEGAMEEVAVAAWAGVDTHRDTNTLALIDALGRVIGTWEFRTGREGYDELASKIGDASVPVGVEGTGSYGAGVAERLRELGYKVYEVIRPRRQQRRRGKSDPIDAVAAARNLAAGEGLAPKMREGAGGDIRWLMLAREHAVRHSTATVNAVKAMLVTAPDRVRRKYSGMPVPTLMAALAASRPSDACQKALRRLARRWIGAKKEADELELEIRDLVEKSFPALYGAFGVGAITAARLIVAAGTNPGRMGSEAAFSMLCGTSPIPASSGRTDRHRLNRGGNRQANRAIHEIALVRMGKDPRTKAYIAKKMAEGKTKREALRCVCRYIAREVYRLMTMPQTPPPNPLGLASGRKRLGMSQQTIANELGTSPEQISRIERGKVFCLQTMLEYETLLRKLAAKGENGY

SEQ ID NO: 361809 - protein, 326 aa, unidentified
MSQEKYIGMDVHQATISAAVRNAQGKLLMESVLETKADTILEFIQGLRGTLALTFEEGTSATWLHDLLKPHVSRLVVCDPRKNALLKDGNKNDRVDARKLAELLRTNQVRPVYHEKHGTRALKEVGRSYLTVTKDVTRVMNRIKSVYRSWAIPCAGTSVYTRRHRAEWLAKLVEPGVRTRAECLYQQLDSLEPLRQAARRELLLESRKHAAVKLLRQIPAIGPIRAALLVALLQTPHRFRTKRQLWAYSGFAVEVHDSGEYRWVRGKLQRNRERITVRGLNDNHNKDVKNLFKGAAISASTRSCPISQNLSHRSKYFATTSRWRIF

SEQ ID NO: 361810 - protein, 373 aa, unidentified
MEHNITIVGLDVHKNSIEIVTAETAGNQEVRHYGKIGGDMTSLDKAIRKLRSVRSNGTELRFVYEAGPCGYEIYRHLTKQGFQCVVVAPSLIPKKSGARIKNDRRDAENLARLERAGELTKVYVPREEDEAMRDLTRAREDAVKAQRTARQLSGAFLLRHGHRYPGRQSWTPVHMRWLSDITMPHPAQQITLQEYIHAITESTERVTRLTDQIQQLLPEWHMEPIAKALQALRGVAPIVATTTVAEIGDMNRFERPKQLMTYLGLIPSEHSSGESIKRGSITKTGNGHVRRALVEAAQAYSFPARVSRHLLKRQEGLPQSVREIAWKAQVRLCGRFRRMMARGKQRNKVVTAIARELAGFMWAIAREVQIQGA

SEQ ID NO: 361811 - protein, 311 aa, unidentified
MDTTVVGIDVSKSTLDVHVHPTGEAFAVARNAEGIDALIARIAPLGIHAVAIEATGGFETVVAASLGGAGLPVIVVNPAQVRAFALALGKRAKTDPIDAAVIARFVEATKPQIRPLPDDETRVLADFVTRRRQIIQMIVAEKQRERQSSNRTLKKSAVRLIKALEKELAVLDTTIDDSVRGSPVWCEKQDLMQSVPCVGPVIARSLLAEMPELGTLTRREIASLAGLAPWTRQSGKWRGKSFTGGGRQGPRTTLFMAAMVGARCNPLLKAFYQRLVAAGKPKLVALIAVARKLLTILNAILRDRKPWQQPA

SEQ ID NO: 361812 - protein, 388 aa, unidentified
MRYFIGIDISKFKHTAAVIDQDGVVHIEPFDFDNDIIGFNSFFTSVSSFIQDDFIIGMEDTGHYADNLQKFLLSKNLKVAMFNPLATNHIRLAFNLAKNDRLDSLTIASALAMPRLYRIIEDDHFTYHEIRELSRYHQSLSKTMNRYKNRLQKFIDIAFPEFNKLFDTKYSKTYLKILKDFQSAQNIANTDIRTLRKALLSKGRCVSITAEELKSAARDSIGHSHIALDLEIQQTVEMIEKIDSNLNIVDKKIEEFSLQLNSPILAIPGISHISAMSILSELGDFTQYESAKKIIKLSGTNPYIYESGTYSMPRTRLEKKGSKYLRCTLYNIIQTVINNNPVFKDYYDRKISQGKSHRCAQGHCVRKLLRVIYHILTTGCEFDPSLLR

SEQ ID NO: 361813 - protein, 384 aa, unidentified
MKLDRTDAPTKAEYGTVYVAFELSKAKWKLGIVMPGSEKMSRFTIDGGDLAALEARLAVARAKAERSCEVVRIVSCYEAGFDGHWLHRWLLDHGVVNYEIDSASIEVSRRARRAKTDRIDLDKIMRAFLAHLRGEPRALSVVHVPSVEDEDCRRTTRERERLLDERTMHTNRIKGLLHGQGIRDAMPRKPDFIGWLAELRTGDGRPLPPRLKQEIEREHQRLCLVDQQLRDLEAVNVRELRAAAPGSNADKVVNLAWLKGIGVAGGQKLVNEVFYKKFDNRRQVGSYLGVVGTPYDSGKSRREQGISKAGNHRARTTAIELAWLWVQHQPDSELSRWFHARVGDAKGKIRKITIVALARKLMVALWRYLETGVVPTGAVLHRSI

SEQ ID NO: 361814 - protein, 432 aa, unidentified
MSHRIFVAEKDNFMAKRIHANGKASVQARYNITGGCDTDKNIIVAAIYHAETGNLEAREFKQHKADALRTAEWFRSQEVELVIIESTANYHMLYYDTLREEGINIAVINPIVVKALLRVEGKSDKGDAMTLARLAANFDLKTSNMPDSQQRELRLLFKRIDSWKQQRTQVTNRANGILTGYGFTVFRLVTLNTPAGLNILQGIIDRRTPEEIAALHRNRNKRPEIVKCAAVPLPDYILPYLEEVLGDVIMLNDRIKQAENEILDKINLSHLEKQVDLMTTVPGVTSMLALRIIAELGSNYHQRYCTAEAFSKAIGVVPANEVSGGKLLKRRSSHGNARVKFHLLSASKAFAIHGKGPLKAWFDQYRSRVHYYKATSALARRIAEGLWWVMVKNEPYRYKLDHVENIESRPILVNNRLIDSATGEILKSFVED

SEQ ID NO: 361815 - protein, 342 aa, unidentified
MDSIGLDLHKRESQLCILTEDGEVIERRIVTSWERFTAVLGGRPRARILLEASTESEWVARHLEALGHEVIVADPNFAPMYATRRRGVKTDRRDARTLAEACRLGAYRPIHRASAAQRHVRAQLAVRDALIRTRTRYVSVVKALVRRDGLRLPPGDPVHTEAKLAALALPAPLAAELAPLRVVLEPLNGEIATADDQLAAVAAADPRVARLRTAPGIGPVTAVAFVATLDIVTRFASAHQLEAYLGLTPREYSSGERQQRGRISKTGSPRMRALLVEAAWRVLRSPQAGAAPLRAWAERIALRRGRSVAAVALARRLAGILYAMWRDGADYRAPRPAAVAVA

SEQ ID NO: 361816 - protein, 473 aa, unidentified
MRKAQRNVKSRAKAKSKGLRWNKQSSLLEQINFHAAGIDVGSREHWVAVPADRDSQPVRCFGTFTSDLHALADWLLQCGVKSVAMESTGVYWIAVFQILEGRGLEVLLVNARQVKNVAGRKSDVSDCQWLQQLHSYGLLAGSFRPAAQVCVLRSYLRHREHLVQQASTQIQLMQKALTQMNVQLHHVLSDVTGVTGMAILDAIVDGERDPLKLAQLKDPRVRSSVETIAKALTGDYRPEHLFVLKQARESYRFLQAQIAECDVEVDTVLSGWDAKVDLEQQPLPPTRKKNRSRSKHKPLSFNLREQLYRVTGVDLTEVDGLDVLSVQALISEIGLNMHRWPSEKHFASWLGLCPDHRISGGQVLHNRTRSVINRAADVLRMAAQSLKDSQSALGAFFRRLKARLGPAKAITATAHKLARIVYQLLKYGQHYVDPGAQYYEQRYRENVVKSLKKRAASLGYTLVENAALNIHVS

SEQ ID NO: 361817 - protein, 363 aa, unidentified
MQYVNNPELSSLEETRCQFNGSKADIKLGIDVHQDFYVVVEQVGGSNPKPAQRFGKEAFLHWAAKLKSQAGQVHAVYEACGFGFGLQRALSALGIQCQVVCPQKLDEQNRRVKTDGLDAKVLCLRLDRFVQGNHAALALVRVPSEEEEQLRAIHRQREQLVKARKQLEAQGRSLMVNHGIEPLKNWWKPRTFARLLVPEWMRELLSNTQPILFALQQKIGTLTVQLQSSATPKQPRGLGAMSSVIIDREIGDWHRFNNRRQVASYTGLCPGEYSSGNTRLQSCVTKHGNPRLRAALVELAWRLVRFQPNYKPIVKWRQILAQGALATGAARKKAIVAVARQLAVDLWRIRTGRVSAATLGLIN

SEQ ID NO: 361818 - protein, 343 aa, unidentified
MQTITTIGLDIAKSVFQVHGVDAEGKVIVRRQLKRRYVLTFFQKLPPCRVGIEACASSHYWSRELQALGHTVRLMPPAYVKPYVKRQKNDSADAEAICEAVTRANMRFVATKTTGQQSCLMLHRTRHLFIRQQTAVINAIRAHFAEFGIVAPVGRTGVEQLLKVASDGNDKRLPDVARACIAALGAQLQMLKTRILEFDRLIMAWHRSNQVSQRLDELPGVGPALATALVASVADPKAFRSGRDFSAWIGLVPKQHSSGGRERLGSISKQGDRYLRSLFVVGALAVIRYAKIHGTEHRPWLTALLARKPTKVAAIALANKLARMAWAMMAKGERYKQPVALAA

SEQ ID NO: 361819 - protein, 353 aa, unidentified
MRTSPTKTPADISTIGIDIGKTTFHLVGLDKRGAIVLQQKVSRSQLARRLANVRRCLVGMEACSGAHHIGRQLEALGHDVRLIPAQYVKPFLKGHKNDYRDAEAIAEAVQRPTMQFVRIKTPEQMDLLALHKVRSRLVRQRTGTINQIRGFLMERGITVRQRPVPLRKALIDILASDAVETSPRILRLLEDLSADWRRLDERIEAVSAEIEALAEEDESCQRLMTVPGIGPIISSAVVAAIGNGSGFKQGRDFGAWLGLVPRQESTGDRTILGKISKRGNKYVRTLFVQAAHVILVKRPHAATQGLMPWIDKALKRMHRNLVAIALANKLARIAWAVLARGRSYQPRSLAHAV

SEQ ID NO: 361820 - protein, 327 aa, unidentified
MNFIGCDVSKKKLDCALIRAERPEARLHKVVPNTPEGVTTLLNWVKDKAKCDDIGAFHAVLEATGPYHEIAAESLFSAGCKVSVVNPAYTKSFAQSLGVKTKTDHTDAETLARYAMLVQPPVWQPPPPQYRQLQTLQARKQALETDLQRERNRLEKQEATRSEPLVVESIRRMIQHLETERQVLELALETHVQAHPDLSRDRGLLQSIQGVGAVVSTLLLPILQPGRFKDAPQAAAYLGLVPIEHQSGTSVNGRPRLSKAGNATVRAKLYMAAIVAARYNPDVKALYQRLLLKGKSKMSALGACMGKLVHICFGVLKHQSVYSPKTA

SEQ ID NO: 361821 - protein, 424 aa, unidentified
MISAVQERCAGIDVHKKFLLVCALVGAAQAEPEMKIRRFGSCNAELLQLREWLKQLDCWQVVMESTGPYWKPVFNVLEEGGVKTTLANPQQVKNLRGHKTDMKDCQWLAHLLRHGLIRPSYIPPRPIRELRDLTRRRKQLIRNGAMERNRVQKLLEEANVKLGNVLSDVFGASGQEMLVALVRGKATAEQIAQLAKQRARKKIPAIQASIEGHRMNQTQRDLIRQCMAHMAFLEQQIEEVDQQIQEKIQRFGLREAYDLLQTVPSMKKEAAATVLAEVGANVDAFSTAAKLSSWAGVCPGNNESAGKRKSTRTTKGNPYLRDMLLECAWASSRRKNSQMQHRYHRLQPRKGHKRAIVAVAHALIQAVYYVLSTRKPFVDTAEPPRSPATLNRLIRHHTRRLRKLSCWLQNTTQIEPAKADSKTG

SEQ ID NO: 361822 - protein, 392 aa, unidentified
MNRIVYIGMDVHTSNYTLCSLDPGYGVEKDNYFAEVQFTNDFIKNVVNYVTNLKKKLKDCEFVCGYEAGCLGYSTYKDLTKVGIKCVLMAPSTMAVQKGGKKVKNDRRDARVIAQCLAYQTYKEVYVLSEHDEAVRGYLRMRDSHNKALKRIKQQIIAFCTGHGLFSPTKSNWTVAHLKWLKDLKFNDPVEQEILNEYLSSLTFLSDKIKAMDVRIEELASEKQYLENVKKLRCIKGIETNVALTLLAEIGDFNRFSKPTDFASYLGLIPGEQSSGDKVRGTGITKAGNSTLRRKLTESAKGYWRGRIGIKSATFKKLEKELPKEVTEYALKANTRLQRKFFNMTHVKGKNMNVAASACAREMACFVWGLITNHYDKAPAVPKTDEELLDLN

SEQ ID NO: 361823 - protein, 374 aa, unidentified
MEGGPDERYHIHRIGCAQATVCVAIAESGRGGEVREVGVFENRPDVLRKMVARLGKHRRRLNFCYEAGPCGYGLHRLLTGLGHDCVVVAPSLIPMKAGDRVKTDRRDALMLAKLHRAGELTPIWIPDAAHEAMRDLVRARATAVRALSKARQHLQGFLLRHDRIYHGARAWTLAYRRWLTTVRFDHPAQQIVLQDYIHAVEDAESRRNRLTRQIEELMPSWSMAPVAAALQAMRGVALVVAVTVVAEVGDFRRFTNARQLMAYLGLVPSEHSSGSTVRRAGITKAGNALARRVLIEGAWTYRMSARVSRKLHDRLEPLSAAIRDIAWKAQVRLCARYRRLAAIGKPKVVVTTAIAREMVGFIWAIARVAQPELI

SEQ ID NO: 361824 - protein, 428 aa, unidentified
MLKINPLSTLYVGIDVSSKSNYVCALDFYKNKYINSSFANNQPGAEELAKKILECLKEHPDLNTIVAALESTSVYSIHIANFLSSCEELMHFKPYVFVLNPKCTANYKKSYIGLGKSDPIDAFVIADYARAGNIETEPWRGSQFLALKRLTRHRLHLVECMTREKTYLVSNLYLKFSELQMLEGDDQPFCDIYGATSSSVLTEYLSPEEIIDSSEEDLISFLAQKSRNRIKDISKTAELLRKAARDSYRLDKALYEPLNVSIASSFNCIETFKKEIKLIDIAIEREIRGLNPNAFIILQSIDGIGPVFAGGIVAEIGDISAFHSSDALAKYAGLMWKSNQSGDFDGEDTPMSKAGNRYLRYYLGEAANSMRKHNAEYGAYYRKKYNEVPKHQHKRALALTSRKFVRLVYGLLARNQLYSGVSLDTSNE

SEQ ID NO: 361825 - protein, 383 aa, unidentified
MISVGVDVSKGKSTVCILKPYGEVVSSPFEIHHVEKDMEDLDNLLSKLDGEVRIVMEATGIYHLPVVTFLHDKGYFVSVVNPFAMKKYAKDNSIRGAKTDRLDSIMIANYGIEKWFKLQRYEGTEETYAELKLLGRRYRYYMELHVKALQELTHVLDYVLPGIKKMFNSWNEANGKDKLSDFVERFWHFDLITSMSLEKFTEEYIAWAREKKYHRSRSKAEAVYELASSGIPTLSSSTPSTKMLVQEAVSVLRAVDSSLSLILTRMQELAKSLPEYSVVREMGGVGNVLAVKLIAEIGDVRKLHNAKALIAWAGIDPPPYESGQFIGSKRRITKRGSSTLRKVGYEVMRVLKSHSAPKDDAVYNYILKKESEGKSKSMQKLPD

SEQ ID NO: 361826 - protein, 365 aa, unidentified
MNFIGVDLHKKSITVCAMDEKLKVLARKTLYCDQTDQILEFFRQFRPFKVVVEATASYLWFVELVGPLAEETVLANPKKLRVIAESVKKTDRLDAFVMAEFLARDQIPRAYMPTTRQRQHRALVRHRQYLRGRMTSVRCKIHHILSDYNADRRDLFSNQCGPAYFKEVALSDADRFVIKQLWSEWEDHQARLLSLTKKIKSFVAKAPPREAEARAIIKTAPGVGAVTAEVVLSELGDVSRFRNSKAISAYAGLVPAVRQTGGKRSKDLPITKQGSGLLRWALVESAWRLVNTSPKWAAYFSRLRKRCGSKRAIVAVARKLLCVLYAMLKTSTPYKIIDTETKPPRTTTRRLVRKSSPEPKQAVTT

SEQ ID NO: 361827 - protein, 388 aa, unidentified
MQAVVDRPEALSAIRTDLGAIFISLELSRSSWLVTSLSPGSGEKMSKYAVRGSDVAGLLERFAQLKEKARARTGRVFSFVVIQEAGLDGFWIDRVLQNEGVESHVVDPASIATSRRRRRAKTDRIDGETLVRVLLAYKRGEPRVCAMVKAPTPEEEDSRRLCRERKVLTAERVLHVNRIKGLLFCQGISGYEPLRRDRHERLEELQTGDGRPLPPHLKAQVNRELDRLEVLLKQIKAVEAERDALLVAAHTPAAVPASMLLNIKGIGPEFAAVLWSEGLFRHFDNRRQVAAYAGLAPTPWQSGAVDREQGVSKAGNSRLRTTLIQLAWLWLRNQPHSALTLWFHERVSRNGGRLRKTTIVALARKLLVALWKYVTAGVVIEGAAMTAA

SEQ ID NO: 361828 - protein, 260 aa, unidentified
MTYVGIDVSKVTFVVAYSSVKTNKTRTFKNTVNGVHEFVQTISASEHNCVLEATGNYSALLVYLLSEAGITISLENPLKIKNFARVMLTVTKTDEIDARLIALYGEKMQPAPYKLRSDAILVLKQKRTVLRQLKKQLVATRNLKGSMEVLPFFDPKCKKTIEKTITFLEKQIKEMEEELASLAQGEYKKQMDLLTSIKGIGVTLAAALIVATGGFSYFDNAKQLTRYLGLSPTYQQSGTSVNVKGTSTETGIQASEANFM

SEQ ID NO: 361829 - protein, 420 aa, unidentified
MKEPTINDFAALVGIDWADKKHDICEMPVATNDYQFSVISSKPQALHDWALSLKQRYPDKPVAVACELKKGPLIYALSRYEHITIFPINPSTVAKYRKAFTQSGAKNDPSDALIQTEILTLHMDKLHPIQPEAADVRILAQLVEYRRKIVQDRVNLSNCITAILKNYYPQALDWFKEKDTIIFCDFVLRWPSLADSQKVRKQTLMNFFNQHNSRYPAINEKRFTDIKAACALTNDPGVIEPNRILIEVLIPQLKLLIEAIERFDLEIKKYYKGQDDRFIFDSFPGAGVQLAPRIFVAFGSNRERYSTAADLQKYAGVAPVIEQSGKKKWTHWRYSCPTFLRQTFVEWAGLSIRYSFWAKAYYEQQISKGKPHNTVIRALAFKWIRIAFRCWKTNTPYDESTYLKALKKRGSPLLKFAAES

SEQ ID NO: 361830 - protein, 348 aa, unidentified
MQFYTNLHPFYCGIDLHARMLYVCILDERGEILVHKKIKDSPEQLLNLLAPYIGNIVVGAECMHCWYWLSDFCEHHNIDFILGHALYMKAIHGGKTKNDKIDAYKIAKLMRGGNFPLAYVYPKEKRAIRDLLRRRTHAMRHSAELKAFIKNALSQYNLPVPDKSDLSYTTGRDAMRGYFPNPQVQRSIDMNLRLIEVYDHEVSSIECHVEKLTKHDNGRDYYLLRSLPGVGRVLALTILYEIGSIQRFDSVQKFASYSRLVKCKAESAGKSYGTQGNKIGNAHLKWAFSEAAVLFLKGNPPAQAYLAMLQKRMSKAKALSALAHKLGRCMYFMLKNQTVFDSERFLAG

SEQ ID NO: 361831 - protein, 355 aa, unidentified
MNDTKYIGMDVHQATISVAVRDSRGNLVMEAIVETKAETILQFIRGLRGSLYVTFEEGTWAAWLHDLLQPHVTRVLASDPRKNALLKAGNKSDRIDARKLSELLYLNKLSPVYHGEQGIRTLKELARSYITITRDLTRVMSRLKAIYRSWGIPCAGQQVYAPLYRAEWLAKISEAGVCRRAELYYQQFDALAALRQGTRRELLAEARKHPAMRLLRQIPAIGPIRAALLIALIQMPNRFRTKRQLWAYCGLALRTYTSGDYRFVGGQLKRSKKVLAVRGLNINHNHDLKNIFKGAATRAASTSGPLQPFYEACVARGMKPHLARLTLARKIAAITLLVWKKGVRFDAEHLKQQAA

SEQ ID NO: 361832 - protein, 322 aa, unidentified
MDCKHILGIDVSKAKLDIALRLPNGKFRSKVIPNTPKGLETLSDWLKRHGAETVHACMEATGVYWEAVAEFLSETGHAVSVINPAQISAFGSAALSRVKTDRTDARLIAQFCAERNPPLWEAPPPELSELRALVTRRDALERMRTQEMNRLHTARDQVRAGIERHVAYLEQEISGIDSEIQHKIDDDPKLKKQRELLDSVPGLGVKTVPLLLSFFGGPPRFSNTRQAAAYAGLDPRQHQSGSSIRKKPRISKMGHSLLRKALYMPAMVAVNRTEWGKAFKARLAAAGKAPKVIICAMMRKLVHVAVGILNSEKMFNPSLHGA

SEQ ID NO: 361833 - protein, 334 aa, unidentified
MNKCQLNTELSSHEGTRCQFNGGRCAIKSAEGRIRPVCGLGIDVHQDFYVVVEQVGGSNPKPPQRFQKQAFVHWAARLKQKSDAQVYAVYEACGFGFSLQRNLAALGIECYVVCPQKLDEQNRRVKTDGLDAKALCLKLDRFVQGNHDALAIVRVPTEEEEQMRAIHRQREQLVKARKQLEAQGRSLMVNHGVEPVQNWWKPRTFAVLPMPQWMKELLANSQPILVALQQKIAALSVQLQSAASPDQPRGLGKMTSVIIDREIGDWNRFHNRRQIASYTGLCPGEYSSGNTRLQGCVTKHGNPRLRAALVELAWRLVRFPTPLQTDREMATDPR

SEQ ID NO: 361834 - protein, 437 aa, unidentified
MITSEVLRPPLVGIDIAKDQDVAQVKVAHGRVLVPQLAIPNTPAGFAAFWRRLHAQQAATGLREIICAVEPTGTYHQALARFLEQHGVDVVFVATSVAHYNRRTLEGTWDKNDPKDAANLCDLLERGRVCFYSLPEGPVADLRRLVRLLRQARVERGACQTRFRNTLLPTLAPAGAPVPPALVAQLPAPLRALLPAGERGGPRPARPASPPRPPGVAAEFADLTARLTAVQARIAQIETALVAVAEPLPAYALLQTLPGVGPTVAAILLAEIGDITWYSQFPQLRKLAGLDIIRVQSGRFAGTARISKCGRPLLRWALYQAAMGAARSPAWRARRDAMRAKRAGDRYAFFKANVEVAAKLLRIVWGVWRSGRPYDPARVDGGPARPAIAPAMARAGRRGPPPPGQGPGEIGPPRGSQAGRIPATRALSLRKRTSARP

SEQ ID NO: 361835 - protein, 310 aa, unidentified
MDAIYVGIDVSKDRLDVHVRPSAEAFAVSRDGKGLEQLVDRLRMLSPTLIAVEATGGFETIVAASLAGAGLPLVVVNPAQVRHFAQAVGKRAKTDPIDAAVIARFIEAVKPPVRPVPDPQARLLGELVARRRQIIEMIVAERQREKRAENIRVRKSIMRTIKTLEKELPEIDDDIDTLVRGSPAWREKEDLLVSFPGVSNTLARTFLAEVPELGTLSRREIASLAGLAPFTRQSGRWKGKSMIGGGRAPLRAALYMAALTAIRCNRPLKGFYQHLLSVGKPKMVALIAVARKILIILNAMLRDRRQWQPA

SEQ ID NO: 361836 - protein, 376 aa, unidentified
MTMEKRKTSKNARKDMNQAVAGVDLGDSESLATLLSADGDVVKAFSFSMGGDGMALFAENVPRDARIAFEATMMAYPFSRSLRSLGYSDITVAHPTELAWIVRSKKKNDKADSLKIARLHLARMLPESHLLDKDEQVRRDLLIQRVKLGREVGKTKTIITSYLKREGVYTTLPQTSRAFSLARREAMRSQRFNDDRDLVVDSMMEKLEFLEKQSTRFEERVKVLVRESDDVRLLMTIPGVDYYLASLLSSYIGDINRFPDSDHLASFFGIIPESKDSSRVTRRGKMSKDGPSIARWALSMMADTVMKTNPRIKEYYQHHKDRQRSGALAHVKTMKKLLRMVDHMLRTREHWKWEDESLTKRKVRELERQEEGGDAA

SEQ ID NO: 361837 - protein, 335 aa, unidentified
MKHYAGLDLSMESTQVCIVDENGRKLVSEKVESSPEAIAMMLERYGPLERAVIETGRMSPAICLGLRELGVPVVCIDARQAHQSLKAMKANKTDPHDAAGLAQLARTGFYKEVHVKSPAAHGVRSVITARSHLVEARVRLDNTIRGLCATFGYRPGAGQGRAFLERIMQAAHIPGLGDAIASLLSVRAELVEQIKEMDRRLRVIASQSQACEILMTIPGVGVQTSAAFAAAVDEAGRFRQSRNAGAYFGLVPRRHQSGEVDWTGRITKQGDGTVRKLLYEAANSILTRSRKTFALKTWAMKIAKRRGLKKARVALARRLAVIMHAMLRDGTLFQV

SEQ ID NO: 361838 - protein, 335 aa, unidentified
MSKITLIGIDTAKSVFHMVGIDQHDKYVWRKKVTRRRFVSTLAQLEPCKVVLEACGASHHWARQIKACGHDVRLIAPQHVKPFRRGQKNDYRDAEAVISAALSPGIHFVGIKSTGQQAEQALHRVRSRLLSHRNAAANELRGLLGEYGCAFALGHKALRAGAVAFIDSEQAQALGLVELITDVLEEMMCLDQRLKRYECQIEERVKADVVSTRMRKELHGVGPMSASALRVKVADPRDFGNGRNFAAYLGMAPGHRGTGGKVKIGKIRRNHDRYLRQLLIHGARSALRHLGDKQDDQSRWLRALLERRGFNIACVALAHKNARQAWAIMAQEQAA

SEQ ID NO: 361839 - protein, 369 aa, unidentified
MVWMPHPETGIKLCHSGDVESTKPEEASMNEVTMIGVDLAKSVFQAHGATATGEPVFRKKLSRGQFLKFLSEQPPCVVAMEACASSHYWGREIMKLGHDVRLIPPIYVKPFVKRQKNDANDAEAIAEAAVRPTMRFVPVKSAEQQSRSMVFKTRDLFVRQRNAIINALRGHLMEYGIIAPPGRNFVKKLAEQIENPGSDLPSIVMELSRVHLDQLSVITDKVVAIERRLKEESKSDPETIRLQTAPGIGPVSAMAIKAFSPPLEGFKRGRDYAAWLGLVPVQKSTGGRQILGKTSKMGQRDIRRLLIIGAMSRVRWAIKNGPPKGSWLEQMLERKPRMLVAIALANKTARTIWAMMTKHEDYRDPIAAV

SEQ ID NO: 361840 - protein, 370 aa, unidentified
MNQMENEQTIVLENRPWIGMDVHKENFSAALYVDPRPGAPDLKSMPTKGFKRDAHGVSSCMEWAENLLARRRPGSPAPRVCMEATGRYSIDLAREILRQRPEWEPAIANPRFVKKHGESMGQRCKSDKADARVCACFGAERQPLAYRPLQPAFQELQELARERKSIVEQRTSLGNRMADTGVSKIVCKSQKQLMKQYDKLVEKLDAAITEAMENIPALNADAQAVTQIPGVAKVVSAVTMSELGDLRNFRCSRSISAAAGVNPRVVESGKSKGKTRMSKQGNGRVRAVLYCAAMACLKTKDDHCLKRFYNRLVSGGKTHMQALGALMRKIIVLMRALVISGKPFDPDYDLKARLSTGLSDNSSQPVENLS

SEQ ID NO: 361841 - protein, 335 aa, unidentified
MKKQFQFFIGIDVSKLKLDACVCSHDPDWFEHQVFINNRKGIVQMVKRLNKFIGDQPALFCLEHTGVYAMPLCCYLSEQKLDYCLVSGAVIQKSRGLKRGKSDKVDAKEIARFIRLHHQELSLAQLPEKILFRLKTLLSHRERLLKAKKMFEVAAGEMQPFLDKSIAGDVIRDSNSVVKHLMNKVEKIDRLISKLIASDEKLKQTDELLQSIPGVGTQLSTSMIVYTRCFTSFKTWRQFACYAGVAPFEYTSGSSLRGRSKVSPLANKKMKSLLHMGALNAIRGDAELKNFYKRKIAQGKNAMLVLNAIRNKLLSRMFAVVERGTPFIQLSKYVA

SEQ ID NO: 361842 - protein, 367 aa, unidentified
MSKTETGRLCVGVDLHKTQFTVCALSEDGEYLLEKKYPTKEEGYREFTSEMHNREEQGYSIELAVETTGNARFFKNRMEKEGFVVKVVNTNRFKVITTSTKKTDANDAATLAYYLMKEMLPEAHLCSQTSEEIRRLLKTRSVLVQSMVKIKNQIHGMMLGYGIETTAAQFQSKRKRQELINDLADHNYSDFTASSLKVMLKILDDLSAEIKDIEKHLEEMVERNEDVELLMTIPGIGINTATTIAAYTEDLERFKGNYKKFAAYVGIIPSVHNSNESTHYGRITKHGPQELRTAFVQAAMGMIRLTKVTSEWRLIKEYQRRKDEKGSGRAIIALARKITRIVFVMLSKRERFNPDLMRCDEQIQQMA

SEQ ID NO: 361843 - protein, 342 aa, unidentified
MEQYVALDVSLKEISVCIVDSNGEVVFEGKTAAEPAILVELIRSKAPQVKRVGLETGATSPWLFHALASAGLPVVCMDARHAHAALSIRPTKSDRSDARGLADMLRMGWYREVHAKSVASHERRTILGARHQLVTMRSELDAQIRGILKTFGLILGTGNKDTLIQRAEKLAAGHPVMSGLVAKLAEVRRHVTSQIAAIDRDIRHLVHTEPTLKRLMSVPGVGPITALAFLSAVDDPRRFKHARDVGPYLGLTPTRYQSGETDRQGRISKCGDTFTRTCLYEAAHVLLTRVQRFSPLKAWGMRLAKWIGGRKARIAVARKIAVILHCIWTDGTEFWWTRDKAA

SEQ ID NO: 361844 - protein, 360 aa, unidentified
MNRNANHSMSAGQIIGTMNGLQVFGLDIAKQVFQIHTVDMGTGEIINEQLKRSKVVEHFANRVPCVIGIEACGGANYWARELRALGHNIKLIPAANVRPFVTGNKTDATDARGIWLAIQQPGVKFVAVKTLEQQATLTLHRQREQLVKMRLMQTNALRGLLYEFGATFAKGRVALFKEVEATLEGLQSQLPQMVADSLREQVQRIKVIGQDIAKIEKRLGLQLSGDKKYARVQAIPGVGTLTATAVIATMGEASAFKSGREFCAWLGLVPKQTGSGGKVRLGHISKRGDKYVRTLLIHGARAALCRAKEPSGWLLALKERRPTNVAIVAQAAKMARTIWAVTAKEQEYQRGHQSVRPAMA

SEQ ID NO: 361845 - protein, 423 aa, unidentified
MSKKKQTVAGLGAIYARVCGMDVHKEVVVACVRILDMKDGTVQSTLRRFGTMTADLLELRQWLAQEQVTHAAMESTGVYWQPVFNILEGHFEVWVVNAQHIKKVPGRKTDMKDAEWIAQLLQCGLLRPSFVPDRQQRELRDLTRQQTKLVQQRNAVANRIQKVLETANIKLGSVATDVLGVSGRKIIEALIAGEKDVSKLADLAEKRLRHKIPQLQRALEGEVGEHHRFLLRRLLDQYDFFEKEIARITERLAAIAPPSFRAAIKRLDEVAGVAERGAQALLAETGTDMSRFPSHKHFASWAGRCPGNRESAGKRKSGKTPAANRHLDAVLTEIAHAAVRKKDSYFKSQYHRLAGRRGKKRAIGAVKHSILVTIYFMLRDNKSYTDLGADYFDKLNPQQQIRYHVRKLNELGQNVELSLRPAA

SEQ ID NO: 361846 - protein, 376 aa, unidentified
MENDSTLYVGLDVHKDSITVAYALGTGEVELLGKIGTTKTDIDRLCKRLQSKARHIRIVYEAGPCGYGLYRQLVQKGFDCMVCAPSLIPKKPGDRVKTDRRDAIKLVRSLRAGDLSAVYVPSVEDEAFRDLARAWVSAKDDLKRARQRLKAFLLLHGVRYAGRADWGAAHRRWLSAYALDSAWQQLAFEEYRRTIEDRVAQCDRLEAALHEAVVNWRFYPAVLGLQTMRGVQFTTAVGMLAELGDLSRFAHPRQLMAWLGVTPSERSSGDKRRQGSITKNGNSYARKLLVEAAWSYQHPARVSPEIQRRHEGIPKPIVDRAWDAQVRLCRRYRKLVARGKQKNIAVVAVARELAGFIWDISQLAMSLAVRPEVRMA

SEQ ID NO: 361847 - protein, 367 aa, unidentified
MGKDSTAVVGLDMHKESVDIAIADGREARLFGRVGGEAAAVDRAVRRIRAAHRNPLFVYEAGPCGFWLYRRLRAQGLRCMVVSPSMTPRRSGDRVKTDRRDALMLARLARAGELAPIYVPDAHDEAVRDLVRTREDAVCMQRQARQRLQALLLRNEIRYVGRSAWTQAHRRWIAHLKLPDPAQQIAFEEYVQAVQEAGARLERLKGAIAAQLEHWRWRPVIEALQALRGVSAIHGVRIVAELGDLSRFESPRKLMGYLGLTPSEDSSGKRRRQGGITKAGNSSARRAFIEAAWAYAHPARVSWVIARRHTGLAKGVTDLAWKAQLRLCARFRRLAARRLPRNKVVVAIARELSGFVWAIARQVKPTA

SEQ ID NO: 361848 - protein, 394 aa, unidentified
MRYFAGIDVAKDLHWICLIDENASVLLDKSLPNTQEDIDAICIELQRFKGNLVIGLDVMGSVAAFLEAALILQGFSLVHVPGIAVNRARVGFTSGETKSDPKDARVIAEQTRTRRELRVVTFDDETTIAIRVLVGRRHDLTQDQTRRISRLRRLVGAVHPRLEKALDFNGLGPLHFLSRFVTPTEIRGAGSDGLIAHLQIRSRLRNREVLADIALKCALAQHTVVPGESAMAEMARELASEAIAVKERLSRLDEQLEGLLSRHPDAALIRSLPGMGVILTAEFIATAGTIARFRSADAMAAAAGLAPVLRQSGRSRTWRRTFGGDKDLKRVFYQSAFCACSIGDPISKAFYDRKRREGKHHTQALIALARRRVTVLWTMLKTRSEFDPKRALAA

SEQ ID NO: 361849 - protein, 315 aa, unidentified
MTQTSTTTAGIDTSKRKLDVALHGRAGHWQVSNSLAGWRELTVKLVEAGVGRVGIEATGGYERGVVEHLRAADLTVLVLQPMQVKAYGWAHLRRAKNDVLDAVLIAAFTASLDRIKAAPDPRLAELADHLTFLEQIEEDIRRYKTRLEHIGEPGLRRMVLGDIARLKARRLTQIRHLAKQLRAHRDLAVRFDLVLSIPGIGERTALALLIRMPELGQVSREEAAALAGLAPFDNDSGQQRGQRRIAGGRDRLRRSLFAAALPAAFRWNTALIALYTRLIARGKAHNAALIACARKLLIYANTVVQRGTPWTEKTA

SEQ ID NO: 361850 - protein, 370 aa, unidentified
MDQHIRAFVGIDTSKLRNAVAVAEEDRGGEVRYLGEIDTTEAATRKLVTKLAAKYRQLTFCYEAGPTGYGLHRLIGELGHDCIVAAPSLIPKKPGVRVKTNRRDAVGLAKLLRAGELTAVWVPDERHEAIRDLSRAREAARKDLRGKRQQVSSFMLRLGRHFPGKKTWGAAHMNWLMLQKLEHREQRIALEELLGAVRQESERVERLEQAIRDAVPEWSLAEVVTALQAMRGIDLVAAVTVLAEIGDLSRFQNPRELMGYLGLVPSESSTGDTVKRGSITKAGNGRVRRILIESAWSYRYPPRVSREKQMKVAAAPRAVREIAWKAQMRLCARFRSLTRKGKQPNVIAAAIARELSAFIWAINREVMAGR

SEQ ID NO: 361851 - protein, 316 aa, unidentified
MTTNSVVVGVDVAKDRLDVAVRPSGEAWSAANDDAGVRALVARLRPLAPALIVCEATGGFERAAIAALAAAGFPVVVANPRQVRDFARATGQLAKTDQLDAAILALFAERVRPTPRPLPDAAAQLLDAVLTRRRQLLEMLVAEKNRLGFAPQPLHRGIQAHIRWLERQLDDVTKELAALIEASPVWRAKDDLLQSVPGVGPIVSSTLLGELPELGTLSHKQIAALVGVAPLARDSGTLRGKRLIWGGRASVRTALFLAAMCGRRWNPALKVFYERLKAAGKPTKVALIACARKLLTILNAMMRDQSRWTPSVQYSC

SEQ ID NO: 361852 - protein, 387 aa, unidentified
MPQPNDLSKSLVALDHNSTIIAVVEMSQSSWLVGGVVPGIERQPRKKLEPSPERLLALLHRWRDEAIRTGGNITRIVLAFEAGRDGFWLARWLAARGIEAHVIHPSSVAVSREHRRAKTDRLDTELLKRAFLGWLRAERGHCSMARIPTIAEEDAKRPNRERECLVRERTRIVNRIKATLARLGIREFKPTLRKAAERLAALHTPEGPPLPPNVSAELQRDLARLGFVVSQIKEIEKARQRRLEQHSESGPHATVRLLARVVGIGIETADMLVHEVLSRPMRNRKAVARYAGLTGSPDESGAKRREQGLARAGNARVRRGMIQLAWRFLLFQKQSSLAQWYRARTADSRRGTRKTMVVALARKLLIALWRFTTTGEPLDGVILRPVG

SEQ ID NO: 361853 - protein, 361 aa, unidentified
MKSTTIIAFDQHAATTVAAVLLPGHRTPALHTLTSDTATILRFVDRMRRQRPIACCYEAGPCGFEVQRALSARDIPCDVIAPALIPRRPGDRIKTDRRDAGQLAILYRAGALTAIHIPTDQEEAARDLLRCREDIRADLLRARHRLSKFLLRHGRRFTGTKKAWSKRHDGWLRAQTWPLAALDQTHRAYLRAVEETVARLRAVEQDLRGLLDLEPLGPRVQRLRCFRGIDDLTALTIAAELGDPRRFPTAPSTMAFVGLVPSEHSSGTKRARGAITKTGNAHLRRVLVEAAWHYRHHPFVGDALRHRQHGAPETVIAHAWTAQHRLHRRYQRFAARGKPKQHIVTAIARELTGFVWAALTQ

SEQ ID NO: 361854 - protein, 384 aa, unidentified
MPRYIGLDLHKMYVHGCEWIPTAPDKDKAKHFRFPNTPAGWTWLLNQVDRTCWVALEVTGSAFEIYDRLSPHVDRVLLANPRELKRLGARRHSDRVDAARLARVLALDSLPTVWVPPLPMREIRRLLHYRDRVVRMRRRFVSQAKRVFLRHGILLSPHADVHHAAARHDLSAIPLGDRVILASSLRQVAALEAEILVLESEIATRVQAIPEVRQLLTITNVGMIAAGAIWAALGDPHRFTHAKQVARYAGLDPSFVQSGEELRRGRISKNGNTLLRTILVEVALGLARRDDGPLGHFYRRKKGQIGHKKAIVALARKLLIVAWRMLLTGEAYRAVKPTAVARKYRTLHRLAQETSPLAALAIATVPHAHLTYTRHRHLRTSVPA

SEQ ID NO: 361855 - protein, 314 aa, unidentified
MNPTLYIGCDAHKSACTFCAIDEDGKTVWQGERPTTREGFENIRDKFSGHEIKLVLEALGFVWQIVDMLSELGIETYVCNPNQNPLIGFSRKKTDPEDARKLAELLRIGYLKCIYIPTKQQREFRILARERNSMVRTRVRFINQGKSVAYDHQVERRNRLIELVSEEIELLNGEISEAAAPREDVRLLMTTPGLAEYGASLVAGEICAIDRFSRSRQYLAYCGLVPSIRQSGGKTRMGSTRKDSNSRLRWIYVQAAWHAVRRDPEMTDYFNRKAREKGKKKAIVIIAKKLAARNYWMLKRKMPYREVSAVKTVG

SEQ ID NO: 361856 - protein, 439 aa, unidentified
MSRRAYRATGVNEVNWEQIAHGKEGLDVTLGVDVGKFDVLVVCRWADERFERPWRVKNPREIPTLVALTKRVQTDRKLVVAMESSGTYGDALRQALSDNGIEIQRVGGKAAHDYAEVFDGVPSQHDGKDAAVVAELAALGKGRPWPYEAPDSWEEELTYWVEEMVIQRQLVTCWQGRLEGLVARHWPEAFQVLKLSSGTLLRMLKRYGSPQALAADPQAPRQLARWGGALLSAKKIDQLLAGARSSVGVRLGPWQQRQIQECAEKALAARRQSNQAQRRLRQLAVGHQVLQAQGKVVGIPTACVLWVCTGDPSKFDSAAAYRKAMGLNLVERSSGTYQGQLRISKRGHARTRQWLYFAAMRLVQKRGVRPWYEAKKARDAGDARRLLVAVMRKLAVALYHVGVRNEEFQPRRLFGRIGKHRGRGAQRAIAVAEPSKIQG

SEQ ID NO: 361857 - protein, 351 aa, unidentified
MSTTLNHHWCVGIDLHKDTLTACVYCGCCGEVSFRKLACKCRRQIADYFAGLPRPHTVAIETVGFYRWLWEMLEPVVQQLVLADATQARALAGRRLKTDREDALNIAELLAAGRLPTSYAPPLERQFLRDLTRHRSSFSRQHARVLCRVKSIMNANNRPGPVRLQSDGLIRYLKAQGPKLPARHVAMLWDCVDQLALTERQIDQAEREIHQAIRSRTFHDTYAILLSFPGVAMVTAATVIAEVGDFRRFTDRKAIGRFAGLNPRIFASGGKQRSGHIAKTGSPHLRWILQQAAWTAIRSDEDVRRIFLRIAKRSGRKAAAVAVARKLLTWMWSAVVKGETYRSPGDVPSAA

SEQ ID NO: 361858 - protein, 312 aa, unidentified
MEKLSYGGIDVSKDRLDVVVLPEGWFFSVSNDTAGWTELVARLRPLAVCAIGLEPSGGYERGIIRALLAARLSVRRINPNKLRQFARARGVLAKNDRLDARLMAEYVAIMPTRAVQRDDAVDRLAEVVTMRRQLCDEHVTVENQTAHLEDAMLRRLSKRRLVRLEADIRLLDKRLAEMVATNAAFARLYELLTSMPGVGPVLAFTLIALLPELGKMGRKQIAALVGLAPYDFDSGKLRGHRSIYGGRMPIRNVLYMAALSASRYNPALKTFSNRLAHANKKSKVIIVAVMRKMITTLNAMLRDNATWQPQSN

SEQ ID NO: 361859 - protein, 370 aa, unidentified
MSIKRILVNTIDTDLEYEVIGIDLAKNCVSAILLTTDGEIFGIDRLDYQELEKSAQELSPTIFAMEPCTEMNYMVQKLEDWGHHCIVISGKNVKDYVESHFSNQKTDLNDAQALAFLTKDTQLRTVKAKDPEQLKYASLTTLREQYVKQYRQTMVSLKGICQVWGLSISKGISGKARLKDMIENHAAFPAELRTALVDMVAHAQAVQKDLKSVTKILEELAKKDKACQLIQTVPGLGTICSCRLRATVGDIQRFKHPKDFPAYYGLVPRSMATGHNEKKGKITHRGDKTMRSLMVQGAGIVINQATKGNLHSKQLTKWILKKQKEKMPWGKLVCAVAAKLLRIVRAILISGKPYNPKIAGVAKCSLPKAS

SEQ ID NO: 361860 - protein, 344 aa, unidentified
MKKNLFFIGLDISKADFAASIYKTPGQSIVTKEEIPNDPKGFEMLLLWLNDYHIDKKNCRICMEATGVYSQAIAYYLLFQGFPVSVEPPLKVKRAFDPVGHKTDPVDSKQIAEYAYRFQDELTSWKPRDEILEKIRQLLSVREQFTKQKVALDNSIQAYSKQRVQVALIRKAQKETLDQLKKQIARIDKELANLIKQDPEIFQRANNLDSIPGCGMLLAAHLLVITENFTKIQNSKRLAAFIGIVPYQHQSGTSVSKRAKIRHFGPGPSRKLLRLAAQSVATHNVTFRHYYLRKLDQGKAKPLVLNNIANKLLKVACTIIRNNTRYIKEHRSIHPMYLKSLKSA

SEQ ID NO: 361861 - protein, 352 aa, unidentified
MIVGAFDVHRRQITFDWVDRETGEARRGQFAPATREVLRSWLGELPAGGGDVAVEGCTGWRFVVEELQAAGVTAHLAEPADTAALRGRKRRAKTDRADARHLRELLEQDRLPESWIAPAHILDLRELVRLRKTLIDQRTQWKQRIHAVLFHHGLPTPPGGLGTQASRAWLAGVGLPPPSRLLVEVGVAQIGGADAWLEPISGWLGAYAARQPGCRALMRELYGVGLLCAPTILAELGDARRFGDGDAVVRYAGLDITVWSSDTKRSPGHLARQGPEVLRWALFEAAKSSARRTAPDHGYYARVKDRLSANRATLSTARKLARHARHVLVELGEQALAPVCGDLLPPLLPEAA

SEQ ID NO: 361862 - protein, 312 aa, unidentified
MTHLPHPIEAVLGLDVAQDSVTLYDLASRQTLTVANSPEALTAALLPFEKHQLAVCEATGGHEAVLLTVLRDLRIPAHRADGGKINAFARSLHLAKTDRLDARVLALYGRERGHGLLRWSPPAEYQQKLTALVRRRADLVAARKLERTRLKAPGAAALAASLARMLAFLDGEIKDLETAIADLIAATPDLAWRKQVLADIPGIGATVAASLLALLPELGRLSRRQAASLAGVAPHPDQTGTTRSRGRTTGGRRTLRPLLFVAALTAVRGSNRFATFYKHLLAAGKTKRLALVAVMRKIVVIANARLQNPTHN

SEQ ID NO: 361863 - protein, 369 aa, unidentified
MADRITYVGLDVHKESIVVAVAAGGLRGEVREYGRIANTAAALDRLMRKLGADGMALRFCYEAGPCGYGIQRRLSAQGQECVVVAPSLIPKRAGDRVKTDRRDAASLAKLHRAGELTAVWVPDARHEAMRDLVRARLDAVHSLRRARQQLSGFLLRQGCHYGRPAWTKLHRRWLAGLKFDQAVHHIVLEDYIAAVEAAQVRRDRLTAQIEAMLPDWALAPVVAALQTMRGMALVNAATLIAELGDLSRFTNPRQLMAYLGLVPSEHSSGASVKRGGITKAGNGAARRLLIEAAWSYRFPARVSRELLLRQENQPRPIRDIAWKGQVRLCARYRRLTRAAKPANVVTTAIARELSGFVWTIARHVTMPVG

SEQ ID NO: 361864 - protein, 356 aa, unidentified
MQTKVTKKIDFSNHNFYIGLDVHKKSWYVTILTDGMELKTFTQPPSAQILADYMHGNYPGGNYYSAYEAGFCGFSAHRQLTSSGINNIVVNPADIPRSDKELTYQTDKSDSRSIARELRNKQLRGIYIFNPAHEEFRALFRYRMAIAKDVRRTCNRIKSFLFYRSIPIPPKYDNANWSNNFLSWLEQLPLELSPAKNVLLQLVDFYRLLHRKKLEVELQLRKIAKDKDPQLFKVLISVPGIGPLTAIAFMTEIGDINRFKQFKQLASYVGLVPRISQSGEKAYTGRMTYRNNCFLPPLIVESAWQSIRSDPTMLAYYKQACGKTISKKAIIKVARKLLSKIMFVMKQREPYQNNKN

SEQ ID NO: 361865 - protein, 343 aa, unidentified
MQTIATIGLDIAKSVFQVHGVDTAGQVVVRRQMKRRHVLAFFAKLPPCLIGIEACASSHYWARELQAVGHTVRLIPPAYVKPYVKRQKNDAADAEAICEAVTRPNMRFVPIKTVEQQGCLVLHRTRHLLIRQQTATINSIRAHLAEFGIVAPVGRRGVEHLLEVIADANDTRVPEIARACVATLGVQLQQLKTQILELDRRILAWHRSSEASRRLNHIPGVGPLLATALVASIADPKAFRSGRDFSAWIGLVPKQNSSGGKDKLGNISKRGDRYLRSLFTAGALAVIRYAKIHGTKHRPWLVALLARRPTKVAAIALANKLARIAWALMTKGSRYRQPAALGV

SEQ ID NO: 361866 - protein, 354 aa, unidentified
MSQTLNAAIAVVGIDIGKNSFHIVGHDERGAIVLRQKWSRGQVEARFANMPPCLIGMEACVGAHHLSRKLNSLGHDARLMPAKYVRPYSKGQKNDFRDAEAIAEAVQRPTMKWVATKTADQLDLQALHRVRERLVSQRTGITNQIRAFLLERGIAVRQGQRFLRAELPRILATPPDVLSPRMVRVIEGLAGDWRRLDERIEGLSGEIEAIARQEPGCERLMSVPGIGPIISSAMVAAIGTGDAFSKGRDFAAWLGLVPKQMSTGDRTILGKISKRGNRYLRVLFVQAAWVVLIKPMSWERHGLKPWIEAAKKRLHRNVLAIALANKLARIAWSVLARGRSFEARTITNVAAQAA

SEQ ID NO: 361867 - protein, 338 aa, unidentified
MKLYGGIDLHSNNSVVALLDEEDRVVYRKRLANDAALVLESLAPYREAITGLVVESTYNWYWLVDALMDAGYRVHLANTAAIVQYSGLKYSDDDSDAAWLAKLLRLGLLSEGYIYPKEQRGVRDLLRRRSRLVQQHTANVLAVQNLFSRNRGRSLSANAIRRLTPGRVGELLPDANLALAVQSTLLAMRGQEAAIDLLEREACAQVRSRPEYRHLLSTSGIGQVLGLTILLETGPIERFARVGNYASYSRLVGSERLSNGKRKGRGNTKSGNKYLAWAYLEAANFAVRYNPAIKRYYQRKRAKTNGVVAIKTVAHKLARACYYMLREGTDFDVNRAFA

SEQ ID NO: 361868 - protein, 311 aa, unidentified
MEAVYVGIDVSKDRLDVHLRPSGESFSVKRDGEALAALCERLTAHAPALVALEATGGFETTVAAALAAARLPLAVVNPRQIRDFARSTGRLAKTDALDAAAIAHFAEAVKPEPRPIPDEAAQALGELVARRRQIIEMIVAERNRLSLMRQKRLRKAIDRHVDMLQKELSALEQDIDDNIRGTPAWREKEELLTSVPGIGSTVARTLIAELPELGSLGHKQIAALVGVAPFNRDSGKYRGRRQIFGGRAVVRASLYMAAITATRWNPVIKVFYQRLIAAGKPPKLAITACMRKMLTIANAMLRDGRPWHANA

SEQ ID NO: 361869 - protein, 312 aa, unidentified
MIQQGYGGIDVSKDRLDVMVLPERQFFSVENSTAGCGELVQRLRGWSVATVGLEPSGGYERGVIRALLAAGLSVRRINPNKLRQFARARGVLAKNDHLDARLIAEYVAIMPTRVVQCDPVTERLAEVVTMRRQLCDEHVAVENQTAHLEDAMLRRLNKRRLARLEADILLLDRRMAEIVASNASLARRYELLTSMRGVGPTLAFSLIALLPELGQMGRKRIAALVGLAPYDFDSGRLKGHRCIYGGRLPVRNVLYMAALSACRYNPALTAFHLRLADANKKPKVRIVAVMRKMIVILNAMLRDNVAWQPNST

SEQ ID NO: 361870 - protein, 357 aa, unidentified
MEQRNKISFKGQNIYIGLDVHLKSWSVTILSETSVLKKYSQDASPEALHKTLTMSYPDAEYYSVYEAGFCGFWIHDRLTELGIHNIVVNPADVPTMSSEKLRKTDAVDSKKLAVCLRAKQLRGIYTPDAEALEIRSLIRLRNSITKDTTRQKNRLKSQLRYLGIDIPKEYLEPHSNWSKRFIAWLKDVQMKTTSGRQTLDLQIRQLEDLRRQKLEITRALRKLSHSEKFEDTLRLLMTVPGIGQTTGLALMAEIVDVTRFANAEQLAAYVGMIPMCHSSGEHEGVGDITLRKHAILRSNIIEAAWVAIRKDESMQLCYLNNCKKMVPSKAIVKVARKLVNRIYFVLKRRQPYVNAVA

SEQ ID NO: 361871 - protein, 371 aa, unidentified
MADYREAFIGIDVAKLKNAIAVAESGREGETRFWGEVDASDASMRRIIQRIAAKFDRVHFCYEAGPTGYGLHRLIRSLGHECVVVAPSLIPRKPGDRVKTNRRDALALARLLRAGELTAVWVPDEGHEAMRDLVRARAAAVETLRVHRQQISAFMLKHSRIYPRKKGWTMRYLRWLQEQQFDHPAHQIALQEMVEAVRVSKERVERLEKVIAEFVPTWSLAPVIRALQTLRGVDLIVAVTFATEVGDVSRFESPRQLMGYLGLVPGERSTGETVRRGAITKAGNGRVRHMLVESAWTYRHPPKVGTRKLYLMEQAPPRVREIAWKAQSRLTSRYRMLATRGKRTTVVCTAIARELTGFMWAVAREAQAIKS

SEQ ID NO: 361872 - protein, 406 aa, unidentified
MKLTCGVDWDEAHYDVALVDGDGVVVARARIDTGATGFNKLLALIAEHEGSAQDTPVSIETDKNLLVVALVEAGFTVYPINPRAVARYRERYGQAGGKSDPGDAAVLAHILRTDRHLHRQMPAVSEQGRAVKALARQHQEAIWALHQTVSRLRSVLLEFYPQALQAFPNLTHKAALTVLAAAPTPASSRQLTRRRVVTLLQRSGRGNHPTLVEQILTDLHTAALRQPPQVEQALGHTVVGLVGIVVAMQRAVDDLELELAREFDQHPQTAILRSAPGLGPILAARILAEIGDDPQRFANPNSLRAFAGTAPVTIASGRSHYVKARKVRNKRLADACHWWAFTALTKSAGAREHYDKRRAAGDHHNAALRNLANKLLGRLWWCLANNQTWDDTAAWPHRLKPDSVAA

SEQ ID NO: 361873 - protein, 346 aa, unidentified
MKIVALDLGKNKSVFVEHVTGAGERTFGKINTNAHEVRKLLDRCAPDRLVIEAGPSAGWVCDLAQSLNIPVQVANGNDERWRWKTVKEKSDRKDAIKLAQLSEMDSLPTVHVPKASVRQWRCLIEYRHNLVDRRTAIKNSIRAIYERQGVHLPHAGKAWSDAAVQTLRQEALARLPGQLWLFQVHCELDQLQSTQQQIEQVEAELEAISESKQSVKQLRTAPCVGPRLSEAVAAILDDPHRFKNGRQVSCYAGLTPRRWQSGNSDRQGHISKAGNRLLRELLVQVAWVGVRNKTWMLEVYEHVRRGSDKRKKIAIVAVARRLLVKLWAMMRDGTKWKEPTPLAMTT

SEQ ID NO: 361874 - protein, 336 aa, unidentified
MFLGIDISKATLDAAFLPSQDATKARHKTFSNTPAGHQQLLDWLQNQLPNDPQNHAPARAHACLEATGSYGGAVARALYDAGHAVSVVNPAAVHALGKSQLKRLKTDKADALLIARFCVVARPALWSPPAPHHEQLQGLVRRLEALDEMKQMEENRLENTHEGDAVQASLLDHIAYLQGQIEATRRHIQDHIAAHPALREQAQLLSSIPGIGQTTAAALLAELGDLSQFQNARQVAAFAGLAPCVRESGSSVRGKPRLSKIGSPRLRKCLYFPAMAALRWNPLIQALGQRLSDKGKCKMLILGAAMRKLLHLAYGVLKSGKPFDANFNPQTSISCP

SEQ ID NO: 361875 - protein, 343 aa, unidentified
MNYVGIDLHKTTIVLCVLDPDRRVVARRTFACGQPEVILEFVRGLGPFRAVVEATASSEWLVEALEPLADRVVLAHPAKIYEIAHSKKKTDYHDAFVLAEKLLEGKVPPAHRPTPRRRQHRAWVRHRQDLKQSATALKNQMRRIAADSNADRKDLFTAKGWAALAQVKLSDADRFVLDQLHAQWRSLEDQVLELAKRLKEFAAQAPAREAEARAKLRTIPGVGPVTIDVIVSELGDVGRFHSAKAACASAGLVPGVRQSGEKRKDLPITKAGSPIWRWAPVEAAWRSVRHSAAWRRVYEGIRQRAGGKKAIVAVARRRLCVLYAILRDGTNYDFLLVGGHTSK

SEQ ID NO: 361876 - protein, 355 aa, unidentified
MDNTKYIGMDVHKEAIAIAVLNAAGKLVMESIIETRANTILEFLKGLRGELQLTFEEGTWASWLYDLLKPHVKRIVVCNPRRNALLKEGSKSDRVDARKLAALLYTKMLRPVYHRENGMRALKELARSYVTISKDQARVMTRVKALYRSWGIVCSGKQVYTARHRASWLEKIKEPGVRRRAEFYYQQLDGLRSVRRQVRHELLVEGGKHKACKLLRQITSIGPIRAALLLALVQTPHRFRTKRQLWTYSGFGIETHDSAEYRYLSGQLQHSKKPQQVRGLNRNYNHDLKNLFKSAATNAVAKSGPLQEFYLTLVKRGIRPEMARLTVARKIAAITLAIWKKGVSFDAKHLKPQTA

SEQ ID NO: 361877 - protein, 340 aa, unidentified
MTVIIGIDPHKASHTAVAIGRDEQQLAEIKVRATCQQTERLLAWAEPLGARTWAVESAGGMGYLLSQQLVRAGELVLDVPATLASRVRVLGTGKSDKNDPNDALSVAIAALRSPGLRSVEPANHREVLRLLSKRNHDIGRLRTIVVSRLHAALINLSPGGISKELNASDAIRLLNDFDPITPVERTRYELAHELLDDVERLDAQLKASHKRIKDAVLASGTTLTDIYGVGPILAAALIGYTGDVRRFANRDQFASYAGVAPIEHSSGGRVVHRLSRRGNRQLNHAIHLVAICQIRQKDSEGRAYFDRKVAEGKTKREAIRSLKRQVSNVVYRQLLVDAHK

SEQ ID NO: 361878 - protein, 427 aa, unidentified
MQYALIQVLPDVPAGGVCAGIDWATADHVACVAGMAGRVKDRFSAAHDKAGLDAMITRLRRNKATEVAIERGDGALVDALLAAGLTVVVITSRQVKNLRSRYGSSGAKDDRFDSFVLADTLRTDRARLRPLVPDTAATIALRAAVRARRDLVAHRVAACNQLRAHLAAAFPAAVGLSCELDSPISLAFLARFGSCDAAAQIGEQQMAAWLQTVPARGNTAPASVLCARLRVSAPGATGAAGTAQAGVTAALTTTLSALSAQVKALETQIAAQLASHPDGHIFTSLPRAGTLRAARLLAEIGDCRSRFPDPQSLAGLAGVAPVTRQSGKHASIEFRWAVNRQLRDAVCDFAAGSRHASPWAASVYDAARDRGKDHPHAVRVLARAWIYVIWRCWHGAAAYDPAKHTALQHLLDRQHAEAADHIWQEDR

SEQ ID NO: 361879 - protein, 411 aa, unidentified
MKGSMPMQSVLAIDVAKGKSMVSLISSCGEVLIEPYEINHSINDFTNLLNKINKQKLDNVSVIMESTGIYHRPVERFFLGNNFKVFVIKALYSKMYKRNLRKTKTDKLDCISLSELFFTTDFREYIKPDDIYLNMNALSRQYHALDELCVNLKNRYKNLVYLCFPEYELIFKKKTIYSDLALSFIEKHPPANIISNTRIDALQNFFKKNGFRHWKKKPATIKEYAIISYPSVSKDDEITSSLPQLARLINTYQKEIETIKYKIIFLGKKTKYFESINSIFGIGEFTASLIIAEIGDINRFKNIKELTAYCGLDPSIKQSGKSINIKGPIFKSGNKYLRKILFVSILNILSVTIVCHIENDIETYYGKKRNEGKHHYVATITCTTKLLRQIFVLCKQLDKESTPLDYFNIIY

SEQ ID NO: 361880 - protein, 480 aa, unidentified
MAERKKHAALTITPLLTRESLYVGIDIGKKEHVAAFISPTLLRQHERFEACPILRFENNRDGFRALMDRIRSYVPPDQCFVLVEKTGHYHLPLLDYLLEMDLTVHVMAVMERPRDMLKTDKRDAQRLANHLYNQLELHVQVADKKQVVRPALPPSGAALELRGIIQHRRELVRECTRRRNKLTAICDQLFPEFTHIFKDPNGPTALAVRAALPTAHAVATASLADLCALRVWRQPSKENLARLQQLAVQTIGVKDLARQRTLAFEQGQLIRELRLAQEHITQLDANIEQTIAISREGCILTSVPGIGMESAAVLLAAIGNILNFPNAAALKAYLGWSPHLTQTGTTLNSASLAPAGTRAARATMYLVVMNAIQKDNAWASLYKRLVPTKCAYDERKGDYVGKNKVIGRVAGQMISQIYMLLKTDAELLATLSPGREPPQPLLYDPEVHRAHVAGGYTPAKGRPIPARIVALPRRSAEPSD

SEQ ID NO: 361881 - protein, 337 aa, unidentified
MSAELIGLDIAKNVIQVHGVNAVGAAVLTKRLKRSQVLEYFANLSPCLIAIEACAGSHYWARRLAGFGHRIKLIPAQYVKPFVRRSKTDARDAAAICEAARQPDMPTVAVNTEEQQAVQMLHRIRQRLMQERTALINQARGLLGEFGIVFPIHVSAFKEGARKLLADESDALPALARHLLLDLCTELTALEERIDAVDGRVRRLAKEDERCARLQEIPGIGPVTATALIAAVGDAKRYRSARHMAASFGLTPHEHSSGGKQKLLGISKRGDRYIRWLLVQGARSIMRFASKRTDALSRWVCQLASRRGVNVAAAALANKLARIAWALLAKSERFASA

SEQ ID NO: 361882 - protein, 406 aa, unidentified
MSVHDCASSMVVVAVDVGKNTVACSVTDDKRHRLLGPVDFAMTRAGLAATLTKIHAAVPPDVSVKVGIEAAGHYHQPLMVPASWPSGWQLLELNPGHVTEQRRVQGRRRVKTDAIDLEAITELVLAGQGRPVTDRAVVLGELASWVRHRSRRVEARSALKNQLLGQLDRAFPGLTIALPDVLATKVGRLVVEHFTDPARLAALGESRFIRFAATRDLAVRRPVAVRLVAAARDALPTPDAAVAREMVANDLQMLQILDRQVAAAEAQLDALLPTTPFAPLTTVPGWATVRASGYGAAIGDPGRWPGPSQIYRASGLSPMQYESAGKRRDGRISREGSVTLRRALIDLGVGLWLNEPAAKAHAAGLRERGKKGGVIACALAHRANRIAYALVRDQHPYQATRWTQED

SEQ ID NO: 361883 - protein, 365 aa, unidentified
MRGKLRLEDARDQGGKEETHRPPAGTEVKIAIDLSRTKWVYCVRWGGEERRKLTTPADLSHVEALVGRYEGCRVHITFEACGFGYEIAWWAQERKIEVTVIAPSRQERVPGLRVKTDRLDARKMAYKLEQGDLKGIYIPPRAQHEKRQVARTYGQALKERTRAQRRIRSLMQEQGRLGPLPGRGWSHYRQWLDTQLLAEEVKLCVDTLLAMRTFAELQTRTLKARLLRIAGTEEYRKIVDALCTHPGVGQLSAIRFVLEIGDIHRFVTADSIGHYMGVTPSEYSSGDMVQRGPTLKCGPGSLRGTMVQCAWASVRKGGDAKLKEMFDRLAPKVGRKRAIVAVTRRMVVRLRARWLEALEEATSAA

SEQ ID NO: 361884 - protein, 347 aa, unidentified
MRFYTKQHPFYCGIDLHARTMYVCILDQAGETLLHRNMPATPEALLKAIAPYREQIVLAAECMFTWYWLADCCAEHGISFVLGHALYMKAIHGGKAKNDRIDAHKIAVLLRGGMLPQAYVYPAEMRATRDLLRRRMHLARKRGELLAHVQNTNSQSNLPAIGKKIAYKANRDGIAERFADPAVQKSIEVDLALITYYDELLRDVELTIVKTAKHHDANTLYLLQTVPGIGKILSLVLLYEMHDIARFPRVQDFASYCRLVKCAKESAGKRSGTSGSKIGNAHLKWAFSEAAVLFLRDNPAGQKLLTRLEKKHSKGKALTILAHKLARAVYYMLKRQTAFDLDTFLRG

SEQ ID NO: 361885 - protein, 338 aa, unidentified
MYYTGIDLHKFTSFLTTVNSSGKIVKQQNIKNVDHNFVQYFNSIKGNHKSTVESTMTWYWLNDLLSSLNIPLILAHAKYVKAIAYAKVKTDKVDSHILAQLLRMDYIPQAYKISNDKRALRDALRARLKIVQRHTSVTNSMHLLLAKYNFYNPSELSGIAKYQYNQLAQLEALLKEQILDLEKQLYPDLIPNDDVQRLLWIPGIGKTNAFNIVLEVDDINRFPDIKNFYSYCRLTPSARNSAGKHKQRSSKDGNKYLKVVFSDAAVHAIQYYPVIRKYNDFLQRKKNKQIAKTIIAKEIAKIVYHVLKKKEIFNNKFKGKDLQHTKSLQWPRVVSPYA

SEQ ID NO: 361886 - protein, 353 aa, unidentified
MSEKYVGVDAHQAGLVIEVMGAKGNCLMHSVIPTRADAIKEFFGGLKGTVHVTFEEGTLAEWLFSLIQPLVAKVIVCNPRANKLLAVGIKDDDHDAHNLADLLRMGRLKPVYHERQGMQVLKELVHNYDALTTDRIRVMNRVKALYRGRGIPSAGPDVYYKRNRDLWLNKLVEAGRRQRAEFFYQQLDHLSGLCRESRRAMLAEARKHAAYMIIRQISVLGPVRTAQIMAAVVTPHRFRTKRQFWPYVGLGVITRTSSDYELVKGRMLRRQKVVGTRGLNQNYSHRLKYVFKSAAIDGMRREPFRQYYAQLMDKGMRPEMARLTLARKIAAVTLAIWKSGKGFDALKLEAAKG

SEQ ID NO: 361887 - protein, 354 aa, unidentified
MNTTQNSTKSKIVKVIGVDLAKDHCDVIGYDENGIICLRLDGCSYAKLREILANLPQAVVLMEACKGSMFHARSIADLGHEVRLVKGTDVKALRNVKHKNDLRDAAYIANLYFVPGIKYVYIKSQQQQSLQFLQNEYKSLQELRIQVGNQIHAGLEEFGCPVRKSSKFIKTRMVAHLEKHAELIPEDVMASFKRRREIWLNLLQQEEEAKRRLEQVAATDANAKRIMMVPCVGPQTAVELLVHVGVDFGRFKNSRQFAASLGLVPKQNSTGGNNTLNHITKCGPKSLRSNLVQCAQLVLMYAEKWKGNFGDWVRKMRDSGKKHGVIVCAIAAKLARIIYRLMKDKVDYTPILSC

SEQ ID NO: 361888 - protein, 383 aa, unidentified
MDSMQDTETIVTGGVDAHTDTHEAAALDDRGALLGTETFATTFAGYAALLDWLRAFGRVDVVAIESTGAYAAGLVRYLREHDIRVLEVNQPHAHTRRRRGKSDPIDAEMAARLALAGKATTIPKQTTGIVESIRLVRVTRASAVKARSAAMVQLSELIITAPQQLREQLAIRRSIRGKASLCRKLRPALSDLNQPSQAAKLALRSLARRIDTLDAEIAELDAQLQPLVAHAAPRTTQLLGISTGHAGQLLVTAGQNIERLHSDGAFAALCGASPIPASSGRTTRHRLNYGGDRDANRTLHMIAVCRLRYCARTQAYAARRTKEGKTKREIIRCLKRYIARETYHALQADLADLGELQPPRPRHATTITCGAGFIGHSRRHLHP

SEQ ID NO: 361889 - protein, 348 aa, unidentified
MLIIGCDYHPGFQQIALVDTQTGECGERRLTHREEAEQFYRTLPGQDVRVGMEASGHARWFERLLHELQFELWIGDAAEIRSKRVRKQKTDRQDAQLLLRLLIEGRFPRIWVPDAENRDLRQLLWHRHRLVQMRTRVMNQLHVVALNEGLRRKKALWRAAGRQELESIALAPWASRRRQDLLDLLDRLTPKIQQLTGALEEEVEKRPVTRRLTTHPGVGPLTALAFELVIGTPERFHCGKQVASYVGLVPTEESSGDRRRLGHISKQGNVLLRFLLVEAAQVTVRSQPEWRNKFFHLAMRRGRKIAKVAMARKLAVHLYWMWRQGHDYGQLQKLGSHAGEPGNPYGGQ

SEQ ID NO: 361890 - protein, 357 aa, unidentified
MEASPRPPGARKPETELGAVSTTAVPHPDSRSGPSPHLQGRVMDEQRTVFVGIDVSKDRLDVHLRPSGEAFCVPREGKGMDDLVIRLQGLSVALVVLEATGGFEATVAAALAGVGLPLCVVNPRQIRDFARAMGRLAKTDTLDAEVIALFAERVRPQARPLREPERVHLAELVGRRRQIIEMIGMETNRGRQAIDKPLARRLARHVAYLQKELDAIDHDIGDAIKHSPAWREAEALLKSVPCIGDVTARTLLAELPELGTVSRHQVAALVGVAPINRDSGLMRGRRAIAGGRTSVRAVLYMAALTAIRRRSPFRAFYDQLTARGRPKKVALVAVMRKLLTILNAILRDHTPWRPLNA

SEQ ID NO: 361891 - protein, 429 aa, unidentified
MTRISAGVDVSKNRSTVCIMDQDGKFIMRPFLVWHSTEELDFLADTLKRLNGEVRVIMESTSIYQYPIALHLKEKGIFISIVNAYKVKKFANTDFRGGKTDKKDSRTIASYGISYWYKLVEWQIPKDTYFNLDLLNRTYMNAKKHRQIILQELQHYIDCAMPGMDKELHSLNLNTKKDFMLDFVEKFWHRDEIVNMTEAEFTEVFTAWAKKKGYRPVEGKAAKIYAIAKSCIPYYPANPTVKTILQYIVDKLSGVNRTLVTIVTQMIEEAKKLPEYQIVREMPGVGDPLAARFFGSVGDIRRFKNSKALVAYAGIDSPPDESGDFSSTHRHITKKGSKVFRDTGYEIMMALRAQKRTWEKVRKNPDVYDYMLRKEAEGKPPKVAKIAALNKFLRIIYARIKELYDNMALAERAKAKTKSKTKAKTKATA

SEQ ID NO: 361892 - protein, 457 aa, unidentified
MARKSKSKGKSSGRMLPVMHPDAAGVDIGAEEIFVAVPAERDADPVRSFGTFTRDLCEVADWLQRCRVQTVAMESTGVYWIPLYQILERRGFQVFLVNAQHVKNVPGRKSDVSDCQWIQYLHSVGLLKASFRPPDEICVIRSLWRHRESLVQMAAEHTQHMQKALSQMNLQLHHVLSDITGVSGMAILDAILAGERDPIKLAGLCNRRVRSSRETVAKSLEGDYRVEHLFALRQSLAAYRFYQKLMAEADQEVELRMRELPRAKEAPEKRPPGSKKRIYQRAGNEPTFDLKAELFRIAGVDLTDVPGISTLTAHTILVEVGADVSRFRNGSAFASWLGLCPEKQVSGGKVLYTRTRKVKNRAAIALRLGAHCLYHAQNYLGEFYRKMKWRLGAPEAVTATAHKLARIVYHLLSTREPYSESVFVRCDQQTNARAEMRLRKQAANLGFQLSPIPESSL

SEQ ID NO: 361893 - protein, 367 aa, unidentified
MISVGIDVSKGKSTVCILKPYGEIVSKPFNITHTQKDLSELSSMLFRLNDEVKIVMEATGIYHLPVLTYLQEKGFFVSVINPYLMKSYRNESLRKAKTDKIDSRIIANYGIDHWFKMKEFQISGVIYEELKLLGQQYRHYMKLHLLSLAELTHLLDLTMPGIKNLLASWNETNRKDKRSDFVERFWHYDVITSMSEQEFTEEYILWAKEKKYVPSQEKAKVIYTLAQESIPTLPSETSSVKMLVTEAVRVLKEVDATLGLILSRMQEIAKTLPEYSVVREMGGVGNTLAPKLIAEIGDVRKFRNGKALVAFAGIDPPPYESGQFVGCNRKISKRGSASLRKVGYETMRSLKMRSRPEDPVYRYVVKK

SEQ ID NO: 361894 - protein, 408 aa, unidentified
MQVVYPICCGIDVHAKMLVACLRNKGQRETRTFSTMTDDLLRLRDWLVKSNCTHIAIESTGVYWKPVFNILEGSLEVVLVNPLHVKAISGHKTDIRDSERLADLLAHGLVRPSFIPPPEIRQLRELTRYRESLVREQASVYNRVIKVLESGNIKLAQVASDALGKSGRAMIAALVRGETDTGKLAGMARGKLKRKETALRRALDGRLTDTQRFVLKGRLRRIEELEAAMATVNEQIEQMFESRPKFAHCRALLQTIPGIGQRVAEIIIAEIGVEVEANFPSDKHLASWCGLCPGNNSSGGKRKSGRTRDGNTYLRSALVQAAWAAKNAKNTYLSAQYRRLARRINKKKAAIAVAHSLIVISYNVLVRDRSYQELGGDYFDRQHTEQRRAYLLRQLEALGCRVTVEHNT

SEQ ID NO: 361895 - protein, 342 aa, unidentified
MSITMIGLDTAKSVFQIHAVNETGKVDIRRKLSRKDLVAFFEKQEQCTVVLEACGAAHHWARILTGLGHHVKLIAPEAVKPFVKKGKKNDAADAAALCAAASRPDMKFVPVKSLEQQGILALHSARSLLVKQQTMLANAMRGLATEFGLTVPKGISKLEELAVLVDADEALPVKVRQAFTGLFDQCNSLTESIMTFEAEIVAHARHDETARRLATVPGIGPITASLIAATVGDIGLFKSARHFAAWLGLVPRQHSTGGKTRLGRITKTGNREIRKLLVLGATSMVSRAPQWNSAAGLWIRGVLQRRPVRLATVALANKMARIVWALMTRKGVYQAKGRGAAA

SEQ ID NO: 361896 - protein, 346 aa, unidentified
MENRTVLAVDLAKTIFEIAVSEIPGEVSRRERLPRSKFLAFFESMRPAIVLMEACGSATYWGRRIQALGHHVALLPPHQVRPYVTRNKTDRTDAKGILEAYRNKDIHPVPIKTVEQQVIGSLHRFRSGWISARTAQVNTLRGLLREFGVTIPVGIKKVLPAVRLLIEDADSGLPLALRPVLLLACEEIEALNKKIKHTERELETLAQAIPEVIRILTIPGVGMIVATAFFAFVGDVTRFPSGRHLASYLGLTPRERSSGGRRRLGAISKRGDGYMRTLLVHGARSLLFHAARAKSHDPLREWAMKLRGRTKHNKAAVAVANKLARLLWAVTAHGIAYQSSPIVAAA

SEQ ID NO: 361897 - protein, 412 aa, unidentified
MKRIRERVAGLDVHRDTVVACCQVKQPDRSIEVTKQSFAATANGLGQLAAWLSDAGVDTVAMEATGVYWKPVYYCLEGLFDELWLCNAQHVKNVPGRKTDLSDAEWLADVAAHGMVRPSFVPPPEIRELRDVTRYRKTQVEARAKEIQRLEKTLQDAGIKLSSVASKVWSQSSRAMIEAMIDGERDPAVLAQMAKSRLRAKIPQLEEAFSGRFDSHHALVCRQVIEHIDFLDRSIATLTADVTERLCPFESAVTILCSIPGVSRTTAEVMIAEMGVDMTRFPTSGHLCAWAGVAPASHESAGKRHPVGTRNGSTWLQRALVEAARGASRTKGTYLSAQYSRLARRRGSNKATIAVAHSILDVSWHLLTNGALYDDPGARFFELRHDPAVEAKRLQRRIEDLGFEVSIAPAAA

SEQ ID NO: 361898 - protein, 349 aa, unidentified
MAEVSTIGVDIAKSVFHVHGVDTDGTVVICKRLGRTKILKFFADLPPCLVGMEACATSHQWARELKRLGHEVRLMPPTYVKAYVKRSKNDAADAAAICEAVTRPSMRFVPIKSAEQQSALMLHRARDLLIRQRTQLINALRAHLAELGLVAAKGREGLHQLVTIVMESCDEKLLSGARFACQAIVMQLHAAQTQINGLDKCIVQAHRVNADSKRLDAIPGFGVILSTAVVATMTDPKAFKTGREFAAWIGLVPRQNSTGGKERLGSISKRGDRYLRRLFVVGAIAIVRTARMRPEKYPWVIKLLARRPAKVVAMALANKMARVAWAVLAKGESYRAPTRSSNAALAAAA

SEQ ID NO: 361899 - protein, 427 aa, unidentified
MTDQQKFKSYCSWIAIDIAKDFNVVMLETVDGQTRRFRMANSGKDHDRLIEVLHGLPQPCHIGFEATGNYHRPLAFRLLTEGFDVSLISSLASSRYREAIFNSWDKNDPKDAGILLELLKRGIVQIYTDPIKSGFHDIQELSKTYYHITLSRTRLQHSILTHYLPLYFPEMGKFWNSTRSEWWINFLLHFPTPTSVTQYTEEEFCSLASPIIGRKVNKQAKLQELYATAQRSIGLPIAPESLACQTFKLQLQRYQELTSQRKRLEQQAESILSEHKDYLILKTIPGIGPIIALTILAEGGDLRRFGHHRQFLKYCGLDLAKNQSGNFRGQEKLSKRGNARLRLALFLATISAVRQTENCFRDKFHRYTKAAPNDADCKRKARTAVMAKMARVIHALVKSSTPYQGYFEVSPRGSIPLSRAVGANRTP

SEQ ID NO: 361900 - protein, 376 aa, unidentified
MQDLEILNSLAKENVPLINNHLPVGVDLAKYTIEAFSYSLKTKKYSTRSYTRDKFIEFIKNSPIPLTLAFEAGSSSHYWARLCQNFGHEVKLISTRFVASVNSLNKDDQKDAQLIYNSILIHGCKTCGIKSESTQLLYMMLKLRDQLIKDRVKMSNLWQACLYEIGEPLKGGIKQFIDHASFIAKDEANVRPSSKEYLENINSYALSVIKSNDCKVTEIDQYIKNIALNTHECKLLMTIPAVKEFSAFCLWLSLRDIDNYKDSTHYAAHMGYAPRHRGTGGSNYNIKAGPIGNKTIKKCYFFAAMSIYRRVKKLIENEQPENCWLHRIVKDKKGKVAICAIANKLCNVAFSMLKFNKEFDMDEFKGIYQKESHTHS

SEQ ID NO: 361901 - protein, 412 aa, unidentified
MEVLYACCCGLDVHKKSITACVLWAEGKGKTRKEKRRFGTFTRELLQLADWLRACGVTHVAMESTGVYWKPVWNILEGQFEVLLVNAQHIKAVPGRKSDQKDCEWIADLLQHGLLHGSFVPPKEMRELRDLTRYRVSLAQEENRIANRVQKVLEDANLKLASVASDPLGVSGRAILKAILAGEEDTERLAEMSKGILRKKIPDLRLALEGRVTEHHRFLLQELLDHQEFLEKKMAEVEAEIGKRMRPFEAEVERLDTIPGVDRVTAWSLVAEVGVRMEQFPSAGHLASWAGLCPGSFESAGKRLSGRTRKGSASLRRCLCQVGSVVSHLRDNYLSAQYRRLAARRGGKRAVLAVAHTVLVMAYHILKRKQNYQELGADYFDRLNADAIRRSLVRRLERLGHRVTLEPLPQFA

SEQ ID NO: 361902 - protein, 397 aa, unidentified
MYLNVGIDVSKNKHDACILNENGEQIGKFMKLTNTKTSLDKFLEQIKLISEKNGAEVRIGLEATGIYWYSLFSKISDDHKISIYNPTQIHAFAKVNVRGSKTDKIDAKTIANMLRFGNAPQTDYSDKQRLELREYVRFHWKLTNNKTNLKKRFKRNLHLVFPGYDQVFKDVFTKTSREILSQSPTPDDILEMGEEKLLELMKKASRNHIDKEKARELIVKAEDTIPSEILKESSLFELQIMMDMIENLENHIDTLENRIFAIWDKVKDKHYIQTIPGISEFRAAMIWAEIGDIENFTHPDQIVAFAGLDPKVRKSANREVIGGPNKRGSSTLRWALGWAVQESKNVNPVLAPYFEKKIAEGKHYNTARCAASKKLIRIIWSVEKNKKPFQIPSNLKS

SEQ ID NO: 361903 - protein, 416 aa, unidentified
MESYAALIAIDWADRQHAVCLYDEASGRREQFTVKQTPESLQAWVVNLQQRYPGQQLAVCTEQSRGPLIYALLQYDFLRLYPINPATLAKYRQAFSPALGKDDPSDAEYLLDLLQHHREHLRPWRPDDEQTRTLQLLVQQRRRLINDRTRISNRLTALLKGYFPQVLAWFPDLCTVLVCDFLTRWPTLNAVQKARPGTLLKFFQAHHSLRAATNERRLAELKTAVPLTTDGAVLNSSRLMVKVLVAQLRPVLAAIAEYDRHIEALCQTHADYELFVSLPGAGPVYAARLTAALGTDRSRWQTADELLRFSGVAPVLERSDKQQWIRWRYFCPKFLRQSFHEYAAESVHHSFWAKAYYNMQRLKGKKHHAAVRALAFKWIRIIWKCWQTRTPYNELIYLESLRKTSSPLLKFIASQS

SEQ ID NO: 361904 - protein, 316 aa, unidentified
MASFLGIDVSSLSLDVAVRPEGIKMHLSNDPTGFEALLESLRKLSIQRVLLEATGGYERDVMRFLQDAGYKVIRVNPRRARSFADSLGIKAKTDAIDAEVLAHYAEVIPDQPSLHISPERALLRELLQQRDRLVQQRDDDLRRLKQVQSTAVANYLNANLKHFKAQIKLVEHEIEQQTAMLNDERVTQLIKVKGIGMVTAGKLIALLPELGRVESREIASLVGVAPFNHDSGKSMGKRSISGGRFEVRRSLYMACLVAMKYNPALKARYQSLRERGKLPKVAIVACMRTFIVRLNAMLRTGTSWLDLVLPQPESTT

SEQ ID NO: 361905 - protein, 341 aa, unidentified
MDIVILGIDLGKNSCSLAGLDASGRVILRRRMRRSSVEGFVKGLERCIVAMEACCGAHHLGRVFAAQGHETRLMSPEYVRPYVKAQKNDELDAEAIAEAATRPTMRFVAVKSQSQSDIQSLHRARERLVSERTALINHLRALLLERGIVAPQGRRKLQEELLVFADEDGIEALSPRIRLLIEDLRSEWRALDERIAAFDAEFVRMAREDEAARRLTTIPGIGTINATALAAAVGNAQAFGRGRDMAAWLGLTPRQMTTGGKSRLLGISKRGNRYLRKNLIHGARAVLPYLVQRETPLGRWARGLLARAHKNIVVVALANKLARIAWAVLARGRTYEAASAA

SEQ ID NO: 361906 - protein, 343 aa, unidentified
MEYYAGIDVSLERSSVCVVDATGRIVREAKVASEPEALAGFFAGLGLAVTRIGLEAGPLSQWLHAGLSEAGFEAVLLETRHVKAALSAMIVKTDRKDARGIAQLLRMGWYRPVHCKSPLAQEIRALLVGRKLLQGKLVDVELSIRGILRGFGLKLGEVSKGRFAARVRELIAGQLMLERVIEPMLRARDARRAEYQVLHRAVLAIVREDAVCRRLMSVPGVGALVAVTFASAVDDPSRFRRSRDVGAHFGLTPKKYQSGETDVTGGISKVGDAMVRAALYEAANVMLTQAGRFSTLKRWALGVAQRRGMRRAKVALARKLATILHRLWADGSEFRFGKEAAAA

SEQ ID NO: 361907 - protein, 392 aa, unidentified
MYIVGIDIGKNHHEASIVSPEGKQIGRSLRFATTHKGADSLMRFIFKNIGNSPCVFGMEATGHYWYPIYSFLKAKGYTIYVINPIQSDSLRKMYIRQTKNDSIDSFLIAEVIRFGQFGTTSMADENILAMRQLCRYRDSVISSRTEIKLRIGTIMEQIFPEYEKQFSSLWVSTSMGILEKYLTPENIENAPIDELFEIIKDKSHNRLTRAKAISIKEAAADTFGIKIAQDAFSFQLKQLIDRMNFLDKQIEALDCQILEYYEKFDCYLHTIPGIGMIAAATILAEIGDINRFKSSSALVAFAGIDPTVRQSGEFSSTHNHMSKRGSPYLRHAIFLAATTCSFHNSPLNAYYKKKREQGKHHLTATGAVARKLTTVIYAVLRDGKPYEPKKFC

SEQ ID NO: 361908 - protein, 347 aa, unidentified
MLHAGLDLSRKKIDVCLLDEEGNHLDQLICPPDGDGLKTFARQVNELHDQPINAVVESMTGARFVHDTLESEGWSVEIADAQKVKGLAPLACKTDRIDSMVLATLSHRDLVPSIWLPDPRVREQRELARFRLHLVKHKSALKNRIHSSLISFGKPCPVTDLFGAEGRRLLEQMEIPEPWRGDITASTELIDHLERQIDQTNKRLKAGHANHPYIPLLMSAPGIGWVLAFTIAGEIGEIERFSSPTKLTGYTGLCPRVNQSGDKDRRGPLTKHGPTYLRWALIEATMHALKHPAYAERYQRNKRRLGKQRGAKVAQIDIARRLSHAIWHMLSRNEEFAPRGAAFRLAA

SEQ ID NO: 361909 - protein, 401 aa, unidentified
MEAHLRVGVDVGCHAHRVGIANTDGSILEEFDISHSEAGFAEFFRRVEERRRELEIPVAVAMEGYNGYARPLDRLVQEKGYRLYNVNNLKLARFKEVFPGTAKTDPIDARKILELFHLRDQLPMAKDVLQEVVSSPEVNVKLKRLSRRRRQLVTEKIRVLNRMQTDLQAVCPELLAATQDADNLWFLRFLSFRDDLRQLARLRRQTIRQIPSVGAKYAQAIQAWQAKATFSDEADYVGPMIVADARRILELRQQINSLDQTMSELSDQSEIARHLSTIPGFGKTTIAELAGEIGSFSRFSSEGSLALYVGVCPLTRQSGEMSRARIPRQVNTRCKAAILTATARHIGCVPQSRAYYDRKRAQGKSHSQAIRSLSRHLIRVIWAMLRDGRDYEIREDLHPTT

SEQ ID NO: 361910 - protein, 341 aa, unidentified
MQTTKYFIGFDISADDFSASCITSPDNLVFSTQKFSNNFDGFEEFVSLLSKNNIKSSEAIICMEATGVYSEHLSYFLVSKEFTVCIEAPHKIKNKTKDSPRKNDFVDAQAIAEYAYRFTDKLSAWEPKDEILEQIQVLLSTREHLTVQMTANINALKTLKYKYYQTPLANQIYERTINKLKEHIKQIDNEIKNLIDKDNTFKNKVSLAKSVPGVGLLLAANLLVLTKGFTEHVNYKNTAAYSGICPYEQTSGTSLRKLPRSKRCGPAKLRKLLYLAALSVRTHNINFKKYFLRKVAEGKNKRLVLNNIENKLLKIVFAVVNSGVAYTENFKSINPALLKTA

SEQ ID NO: 361911 - protein, 343 aa, unidentified
MKASIIGLDIAKSVFQAHGADANGKCVFKRKLGRSEISAFFAKLDPCEVVLEACGSAHYWARVISRIGHDVRLVPPDRVKSFVKKGKKNDAVDAAAICMAATHPDTMCVPIKSEEQQGVLSLHSTRALLVKQQTMLSNALRALASEFGLIAPLGTRHLPELMAKIETSADLPATMKQSAMLLFEHYEKVAQSIEALEVQIRARAKSDEDARRLMTIPGVGPITASLIVASVADIGSFASARHFAAWLGLVPRQHSTGGKTRLGRITKTGNRQIRTLLVLGATAMLHRAHKWDSAAGQWLCELMARRPRRLATVALANKMARIIWALLSRKEIYRPAGVSVSAG

SEQ ID NO: 361912 - protein, 399 aa, unidentified
MLFAGWDWASESHAVTVIDEDGMVVDRFSLAHDEAALCGALQRLAAIAAPAELAVAIETSSGLVVDRLLRAGHPVVPIHPNAFYATRPRWGASRAKSDPGDSFKLADYLRTDGHRLRRLQPLDPATEELQALVRMRGDHVDARVAAANQLRALLERHWPGAAEVFARVDSEIALAFLGDYPTPQAAARLGEARMAMFCRRHSYCGRRDPAELLARLQAAPVAASGLDPQVLAEAVGAQVRLLRTLLGTIADLDRAIGASLLSHAKAPVLAPLPRVGELNLAQIVAEVGPVLDRAVDVDHACAELGAGPVTKESGKGKSVHFRWAVNARARQALSIFADNSRHASPWAANLYAAARARGKRHPHAIRILMRAWVRVMWACWHTGTPYDPALHGGERRLAA

SEQ ID NO: 361913 - protein, 347 aa, unidentified
MEHIGIDVHKTESQICRLTEEGEILESRIQTRRERFHEVFGNRPAARILIEASTESEWVARCLEALGHEVIVADPNFAPMYATRSRRIKTDRRDAQALMDACRLGAYRQAHRPSDVQRRVKADLAVRDALVRTRVRYVALIRALLRQHGVRVRSGYPPTFGRRATEAPMSDGVRATIGPLLELLGPVNVRIAEADQVIASRAIGDPVVERLRTVPGVGAVTAVAFVATLDRVERFGRAHEVESYLGLVPREQSSGEKCSRGRISKAGSSRMRWLLMESAWCILRLDRSDLVPLQQWTAKIAMRRGRKIAAVALARRLAGILYALWRDGSTFRGQPAVVEEQPSAAVA

SEQ ID NO: 361914 - protein, 391 aa, unidentified
MIYVGIDVAKDKHDCFITNSEGEVLFQVFTIQNNRNGFDDLFSKIQSISSDASNIKVGLEATGHYSYNLLGYLINKGLHTFVINPLHTNLYRKSLSLRKTKTDKVDARTIAMMLMSDVNLKSYSDTSYHNEELKSLTRYRFDKVQERAQLKQSVSRLVTILFPELEKLVPTIHIASVYALLSELPSAGKIASCHLTHLTKLLENASKGRYSREKAMEIREAARVSIGSDMPAKSLELRHTLRLIGELDSEITEIESEIKRIMDQISSPILTIPGIGYRMGAMILAEIGDFSRFDSPDKILAYAGASPSTYQSGQLESSYSHMEKRGSRYLRFALINAAKYVCHWDETFGAYLQKKISEGKHYNVAITHATKKLVRLIYAMEKSGKPYIKTA

SEQ ID NO: 361915 - protein, 316 aa, unidentified
MVVGIDVAKAELVVGVRPSGERWTEANDEAGVRALAQRLTALGPELVVLEATGGYELLAAAGLAAAGLPVAVVNPRQVRDFARATGQLAKTDRIDAGVLALFGERVRPAVRPLPNAEAQALEALLTRRRQLLEMLHAERNRLGQVFGRGQRPVAKSLKAHIAYLERELRTTDTDLGAMVRASPGWRETDDLLRSVPGVGRVLALTLRAELPELGRLSRREIAKLVGVAPLSRDSGTLRGRRFIHGGRASVRGVLYMGALVASRRNPVIAAFYQRLLAVGKPKQLALVACMRKLLTMLNAMVRSGSPWRHDPVVVRS

SEQ ID NO: 361916 - protein, 418 aa, unidentified
MEHELHYIGIDTAKEKLDVDVLRPDGRHRTKKFANTTKGHDELVSWLKGHKIDHAHICIEATGTYMEPVAECLYDAGYIVSVINPALGKAFAQSEGLRNKTDTVDARMLAEFCRQKRPAAWEAPHPLERALRALVVRHQALTDMHTQELNRTETAREVQRPSIDAHLLWLEAELKRLEKQIKDLTDDDPDMKHRRKLLESIPGIGEKTSAVLLAYIGLKDRFAHARQFAAFAGLTPRRYESGSSVRGASRMSKAGHVSLRRALYMPAMVATSKTEWGRAFRDRLAANGKKGKVILGAMMRKLAQVAYGVLKSGVPFDASRHNPVAGVKIAEGMKKTAPDGAVSGMPAIRETGPGKNLQAITVSTKAYPLRLPNIQIDRQKVAHTTAEHEAVPDGMVVWNAFADVENHPERINHAAYRQ

SEQ ID NO: 361917 - protein, 326 aa, unidentified
MTHKLGIDISKAKFDVALLKADGKYRSKVFPNDATGFKSLLQWLDTHVPTGKAEVHVCMEATGSYHEALALFLSDQGVAVSVVNPLLVKRFIEVDRVRNKTDEGDAKCLARFCQMTQPELWEAPSVGVRTLQALVLRLDTLQEMRQGELNRLEIAHASVRQSMRDVIAGLERSIEAVREQIRQTIDDDPDLKQRQGLLASIPGLGDKTIPQLLAYIGRPERFKSVKALIAYAALAPLIRQSGTSLNQHKGTHPQGHRALKSALYYPAMVAGKYNPLIAAFWQRLKAQNKPGKVIVVACMHKLLAIAYGVLRSKKPFNADHLKPIVT

SEQ ID NO: 361918 - protein, 401 aa, unidentified
MNMTSKSAQFAALIGIDWASQRHALCLYDCATAKRESSILEHTPEAIAQWARGLQERFKGKKIALCLEQSKGPLIYALLEYPFFVLYPINPATAARYRMAFKTSRAKDDPSDAQVCLELVLHHREKLNPWLPNDAPTRELSCLLQHRRAAVDLRTLLTNMLRDALKSYYPQALELAGQDLFAPLGCQFLLKWPSLQELHKARKESVRKFYYAHNCRRMDVIEKRLDAIAQMTPLCRDLALLEPAMVQVRMLARQLLQLGGALKEYDSKIEQLFAQHSDALIWESFPGAGPTLAPRLACAFGTQRSRYQSAVAIQQYSGTAPVTEKSGKNQHWVHRRWARPHFTHQSFFEYASQSVLHCSWAKLYLKEQMARGKAYPTAIRALAFKWQRHHVRVLARPRPLR

SEQ ID NO: 361919 - protein, 433 aa, unidentified
MEEVTDEPLYRDRVCGIDIGKAGMAATIRVPSDRDRSRRAAETRSFGTTKREVLALADWLRSWQVPAVVMEATGDYWKGPFYRLEAEGFECVLADARQVKNLPGRPKRDPSDSRWLAACFERGAVTACFVATPEFRVIRLRTRYRRELTEERTREKQRAEKLLESAAIKLSSVVSDLHGVTGRDIMDHLIAGEHDPKALAQLARARARRKIAQLEEAVEGAEFFTADHAALLKVMLARIDRVQKEIDRLTAVINRLLAPYEEQLQQAESMPGWGRRAAQDAVAETGAGMTRFRTGGHLSSWAGKTPLDNQSGTRTGRAKSKKGNRYLAAITGETAAAVSKTQTREGARYRRLARRRGKAKALAATGNTQLKVYHKLLSNPGMRHQDLGADYYERQRDTRRQISHHVGKLGALGFEVTLCRRPDPDGSDTTQAA

SEQ ID NO: 361920 - protein, 342 aa, unidentified
MSVYVGIDVHRKRSQVAVIDQAGQVLANRNVPNGVEPILKVIGGLPPGTAAAFEACYGTSWLVELLEDYGFDPHLVHPSRCKAIASARLKNDKVDAAILAQLLRADLLPEAWIAPPPVRQLRALLRHRVALVRLRTRLRNRIHAIVADYGHDRPAGGYWTGPGRAWLAALPLPAVSRELIGDDLGLIDALQERIDRLDGEICQRARSDPRVKILTQLPGVGPFTALMILAEVGDIRRFASARQLASWAGLTPTVRGSDRVAHYGHISKEGSAWLRWVLCEAAQTAKRSPQFAATFQRIAQRRGKKIATTAIARKLATRAWHLLADTGPGAAPQPAAPQTAAR

SEQ ID NO: 361921 - protein, 359 aa, unidentified
MTTSTARPAGTGPILAIDLGRYKSVACADDPATRAAAFRTLDTGRADFDRLFRAHPGARVVVEAGTNAGWAADLAAAHGLAVTVANTSGEAWRFTHLKRKTDRDDARRLAELEALGQLPTVALPDPATRQRRALIAHRQALVGRRTAAQNRIRALFAGQGLPSPRGHRAWTATGLAGLDLQAKPLADCGPAELWRGMLHLALADYRSLLALIAAAEAALDRLAAADPATQLLGTAPGVGPRTAEAVAAHLHDPRRFASGKQVSAYAGLVPRQYQSGESDRRGRITRRGPAVLRKLLVECAWAMLRYNAWARAAYGRLTRGGATRKKPAIVALARRLLVRLWAMLRDGTPWRADPAPAVP

SEQ ID NO: 361922 - protein, 343 aa, unidentified
MEAYAGKQFVGIDLHRRRTVIVRTTEAGEVLEAVRIVNDVQRLATVMARAGQCPEVVLEATYGWYWAVDALQAGGASVHLAHPLGVKAFEYRRVKNDFRDAQDLADLLRMGRLPEAWIAPPPTRELRELVRHRAKLVGLRSHCKAEVHAVLAKCGVQVLMSDLFGVWGTELLDGLELPAPYAARIASLRRLMDDVDFEITVFAGIIRGRMAHEPGYTAVQKIPGIGPTLAAVLVAEIGDITRFASAQKLTCWAGLTPKHHESDTHVRRGRITKQGSRLVRWAAIESVKTVSKNSEVGVLRERVADRRGRNIGSVAAARRQLELVFYALRDGHVRALEHLPRVA

SEQ ID NO: 361923 - protein, 352 aa, unidentified
MVVTIGIDVHKDTHCAVAVDDVGRQLGRPVTVRATDAGHRQLLRWSRREFAEDRVEFAVEDCRHVSSRLERALLDAAATVIRVPPKLMAQTRTSARTRGKSDPIDALAIARAALREPNLPRAEHSHASRALKLLVDRREDLVQVRTKAQNRLRWHLHELDPEFDVPARGLDQRRHQDRVAARLEELPGSLVRRLALEILADICDLTGRINALEKEITALVRVQAPQMLALPGCGPLTAAKLVGETANPARFRSEACFAMHSGTAPIPASSGRTNRHRLARGGNRQLNAALHRIAVTQVRLDGLGRAYYQRRRTQGDTTMEALRALKRRLARIVFNLLRPTDQTAVASLPQAA

SEQ ID NO: 361924 - protein, 422 aa, unidentified
MLEQSQDDEQIIARVAALDIGKAEVMCCIRVPRDAPAGRRRQEVQAYSTMTRSLLVMADRLRELGVTRVVMEATSDYWKPVFYLLEAHGFDPWLVNAKDVKHLPGRPKTDKLDAVWLCKIAERQMIRPSFIPPPPIRQLRDLTRYRVDLVSARTAEKNRAEKLLEDAQIKLSVVATNIFGVSGRDMMAALIAGERDPRVLAQMARVRLRAKMSQLEEAFHGHFTDHHAFLLAKMLARVDAISADIAEIDERIEAQLRPFADAVTRLQQIPGIGPVAAAVIIAEIGTDMGRFPTAGHLASWARFTPTVKQSAGHNKGNGSTGRGNPYLARILGEAVVAAGRTRTFLGERYRRLARRRGKQKAIVAVGRSMLIITWHLLSSPSTQLADLGPSFYDSRIQPDRKKREHIHQLEALGYKVNLEPAA

SEQ ID NO: 361925 - protein, 338 aa, unidentified
MTCYSGIDLHSTNSVVVVSDEADRVLYERRLPNDLPKILVALEPHRAQLAGVVVESTYNWYWLVDGLQAAGYAVHLANPAAMKRYEGIKHSGDETDAAYLAHLLRLGILPTGYICPPAERAVRDLARKRSQLVRTRTAQVLAVENGFARERGARLSSNVIKRLEVAGLSEFGLGADVTCSLAANVAVIQALTAEIGKLEARLRERVRLRPQFRVLITVPGIGEVLATIIMLETGPIERFAAVGNFASYARCVDSQHLSNGKKKGQGNVRNGNRHLAWAFIEAANFARRYCPEARRFHDRKRAATNNIVATKALAHKLARACYHMLKDGQPFDVKRCFA

SEQ ID NO: 361926 - protein, 407 aa, unidentified
MCGLKPDKSQVIKPVEFTNAPAGFDVLQEKLAQLAIPPEQVLIGLEATSRYGENLYYFLESQGYQLCLLHPRQTHQFAQQRGLRAKTDKLDATTIARVLLSGEARRGYVPTELIATYRELVRLHTQLSDEVARYKNEIQALLTVLFPEFSQVFADPCRATALALLKLYPSAQAIATAGVEAIAAKLHELAPRNYGHSTAEHLVQLAEHSVSRGFAVAARSTSLKIVCDQLEHTQANMAQLESEIDKLLKTDAGAKGLISVPEFGHKTVAVLRAELGDVTRFQCTDQVVAYAGLDIEVKQSGKWKGQAKLSKRGSGRLRRILYMATVRCIRLPGSAFGAYYHRLVARGMKKRDAMMAVMRKMLIVAYRLLRSEETYDPTKVCAVLVTQPVESPALHTPSSAKLVATGA

SEQ ID NO: 361927 - protein, 409 aa, unidentified
MRIIGLDIHRAFAEAVAWDDGKLRRLGRVDMRRDLLTAFAEQLSADDVVVVEATGNASAVVAVLAPHVKKVVIANPMQVRMIAHAKIKTDTIDAGVLAQLYASGFLPEVWVPDEPTQALRRQVTRRNQIVRQRSRLKNIIQSILHSHLIPSCPHADLCGAKGRAWLVEQVVPEDERLAIERHLREFDRLGEDLKVIERDLARSALADESVKRLMTVPGIDMVVALALTAAIGEVTRFDEPQKLVSYLGLNPSVRQSGPGPAHHGRITKQGRGHARGMLVEAAWAAARAPGPLRAFFLRVRARRGQHVAAVATARKLAVVIWHLLTKSESYVWARPSLHAKKLRDLELKAGYKAARGQKGAAHAYNSKSHRDEERRWVEQAETAYARFVTGWNPQGPKKVRTGAATEVRR

SEQ ID NO: 361928 - protein, 354 aa, unidentified
MLIIGCDFHTRYQQIAMAREGTAELLLERRLDHESGEAHAFYRNLQSSHEPVLVGIEATGPIHWFERLLAELGHELWIGDSAKIRAQEVRKQKTDERDAALILDLLLAKRFPKIWVPTPAERDLRQLLWHRHKLVRLRTMMGNQLHFLAMSQGLCRKGKLFTKKGRAELVSLGLAPWARRRREELLQLLDQLDSPIAELDRAVLEEAKRRDDAVLLMTHPGIGPVTSLAFVLAVGPVTRFHRSRKLVSYFGLNPTEESSGGRRRLGAISKQGNTMVRWLLIETVHHAVRQDPELRQDYQRLKFRRGHAVAKVAIARKLAVRMYWMLRSGADYARLVRRQGSPGATLVDASPSLG

SEQ ID NO: 361929 - protein, 373 aa, unidentified
MLKYALGIDVSSKELECCISTIDHQQVVKVKATSAFFNTPDGFKKLTQWVTKHHKGVGVPLVAVMEATGVYYEGCAYYLHQKGYTLSVVLPNKAKKYMQALGLKSKNDKIDAKGLSRMAAEQALAKWQPMSTFYFTLRAYTRQLQNLQETKTSISNQLHASQAGMYEIKEVVRQLHDLIKTIESKIAKMELAIANHLASDTDVADKLSKMSSIKGVGIMTVAVLLAETNGFALIENSSQLVSYAGYDVVENTSGKKIGKTKISKHGNSRIRRILHMPALNMVRYQVTPFFELYERTLSRHHIKMKSYVAIQKKLLVMLYALWKRGEFFNSNAEGKQVLPSRSDFEEVQKGSPTKGRATQGKQTREVSQFASSR

SEQ ID NO: 361930 - protein, 368 aa, unidentified
MRFGTGAPSPNRPDHFRKLVERLAASGARLRFCYEAGPCGYGLHRQLVEMGHDCIVVAPSLIPLKAGDRVKTDRRDALMLAKLHRAGELTAVWVPDAAHEAMRDLVRARAAMRVTGKARQNLQGFLLRHGRIYPGRKGWTGAYRRWLALVRFTHPAQQIVLQDYIDAVADAEARVERLTGQIADLLPQWSLAPVVEVVQAMRGVGFIVAVTVVAEVGDFNRFDNPRQLMAYLGLTPSEHSSGASVRRGGITKAGSGLARRVLIEGAWSCRMQARVSPKLLARLEALPQVVRDIAWKGQLRMCQRSRHLVAAGKAKVVVTRAIAREMAGFIWAIAKMVTAAPAHTAGQDAWRKGHSSGRPMRRVGGGTR

SEQ ID NO: 361931 - protein, 412 aa, unidentified
MNPVIGLDVSKGESQIQAFLDKGKPYRKSFSIKHDLKGLGSLLEFLHEVEKSANGNQPTVVLESTGHYHFPVIQFLEEQKYVYIIVNPLISHRAKSSSLRKVKTDAIDAYHLCELFYKEELEPYKKRGIQLLNLRNLTRQQESIAEISAKTKIQLHSLLDQVFPEYRGVFGDLYSRVSLLTLLAFPTSEAVLNVSERELSERIRSLCKSRSDLWAQERAKKLKEAALRNPFQRNLYHSNIFSLEMLINLVLQYQEHLSKIATEIDALAKGIEEYHILQSIPGIGEKIAATIISEIGEIDRFNNAKKLVAFAGVDPSVYSSGKFTASVNRITKRGSSRLRHALYMAVQSGIRDARKKKTTDETIARNKRLREFYDKKREEGKPFRVAVIACVNKLLHWIYALLKSRTTFQDIA

SEQ ID NO: 361932 - protein, 358 aa, unidentified
MKDTIKQLDYSGQNIYIGLDTHLRSWKTTIRVGDTYFKTFSQDPSAKILFEYLKRNFPMANYFSAYEASFSGFSAHRELTKLGIKNIVVNPADIPTTDKDRKQKEDARDSRKIAEHLSSSSLQGIYIPSIEAEGDRALQRFRKVLSKEIGRNKNRVKSFLYYHGINIPPQFTDKSYWSKRFTVWLQEVALPTKSARTTLSSIIEIVTFLREKQYQTLKSIKELSQTKGYKENVDLLLSVPGIGLITAMTILTEIEDISRFKTLDKLCSFIGLVPMTNSSGEKESVGGITQRQNKALRSLIVESSWMAIRNDPALMLAYQELIKRMKPTRAIIKISKKLVNRIRYVLKNKKLYVSAVVQ

SEQ ID NO: 361933 - protein, 480 aa, unidentified
MANETEVRSGSNQRLTRSERKQLGRQIWSDRSSLDVVHRDAAGIDIGSREHYVAVGPDRDEQPVRTFGCFTADLQRVAAWLNRCRIKTVVMQSTGVYWMPMYDVLEQHGFDVWLVNARDTRNLPGRKSDVQESQWLLKLHTYGLLRKSFRPAPDIRALRTCWRERAEYVQQAGVCIQRIQKALTEMNIQLTTVLSDLSGATGMKIIRSIVAGERDGMVLAELRDPSVRANKETIARSLEGTWLPEQLAVLKRQLADWDHMQSQMAACDVDLEALMKQMPSAKAAPSEPAIPETKQPGKRKRQKKMSRNEPNFELAGELKRVTGVDLTRIDGIKVMTVQTLITEAGLDMSKWATEDHFVSWIGLAPRNEVSGGKVLKKRTRKVMSRLATALRIAASTLRESDSYLGAQFRRLKARLGAPKAITAMAAKQARLVYRMLKFGQEYVDKGTVQYEERYREQKVRLLAKQAARHGFTLTPLTNSA

SEQ ID NO: 361934 - protein, 351 aa, unidentified
MIVIGSDPHKRGYTFSAVGVETGELRSSETVEATSAGHARLLGWARAVDVERVWAIEDCRHVSGKLERVLLARGERVVRVPPKLMAGRRRGSRQAGKSDPIDALAVARAALEEGIDTLPLARLEGSAREVKLLLDHREDLVAERTRIQNRLRWLVHDRWATLELPAGCLDRMVWLERLAGRLARSPQDADVRVMRHQIRRLRELVREASALERELLLLVRGLQPRLLKLPGVGPLTAAKLIAEIAGIERFRSEAKLARLAGIAPIPASSGARHRMRLHRGGNRQLNAAFHRIAVTQIRMHPPAQHYIARKIAEGKTKREAIRCLKRHLVRTIHNTMIHTTRDTPAPVLALT

SEQ ID NO: 361935 - protein, 461 aa, unidentified
MKQFRRKSSRQKKPGPTHSFSMINKDAAGIDIGSGEHWVAVPEDRDEEPVRCFGCFTADLQAMARWLKECGVTTVAMESTGVYWIPCYQILEEHGFEVKLVNARHVKNVPGRKSDVSDCQWLQRLHTYGLLSGSFRPDDQICVLRSYWRHRANLVRYASDHIQHMQKALTQMNLHLHKVLSNVTGVTGMNIIRAIISGERDPEKLALMRERGVKNTPEAIAKALEGDYRQEHLFALKQAVELYDFYHRQIEACDREIERYLHTFEAKVDPVQNPLPKQKRKKEMRYQSFVDLRTELYRVSGIDFTQIPGLDVVTVQTILSEIGLDPGKFPTEKRFVSWLGLCPNNRITGGQVKSTKTRKTANRAANAFRMAAQSLANSNTGLGGFYRRIRGRLGAPKAITATAHKLARIFYRMWTTGQSYTDLGSDYYENRYKERVLRNITRRARELGYDAVLQPIQQRVA

SEQ ID NO: 361936 - protein, 350 aa, unidentified
MVVVGADVHKRTHTFVAVDEAGRKLGEKTVTAITAGHTEAVMWARERFGIEIIWAIEDCRHLSARLERDLLALGQKVVRVPPKLMAQTRASARTRGKSDPIDALAVARGFLREPDLPVATHDEVSRELKLLVDRREDLVAQRTATINRLLWRVHELDPEQAPKARSLDLAKHRGILRDWLSTQSGIVAELARDELADITRLTETINTLAKRIGDRVRAVAPVLLTLPGCGELTAAKLVGESAGVSRFKSEAAFARHAGAAPVPVWSGNTRGRVRMTRSGNRQLNAALHRIAITQIRLNGLGQAYYRHRLAQGDSTPEALRCLKRRLARVVFGHLHTDHNNRHKPCQTAAA

SEQ ID NO: 361937 - protein, 420 aa, unidentified
MSFKIFKFNCCGLDVHKTWIYACIGITDSNNRTEYKQARFSSFSKGLHQLCVWLAKYNCNDVCMESTGKYWIPVFNILEQHKIRVTLSHPKYTKPMKGNKTDRKDAKWICDLYMCGMVKPSFIPPADIRELRDLVRYRFKLTCMITGEKNRAQNCLTVSNLKLDDVFSDVFGKSSRSITEQILQHPGEKFDVSPFVDSRCKTPIEEIQAAVDGNISKEQDVKLRQCLDHIDELQKHISEVEQEILRLSDKYEAALNLIRTVPGFDKNPMTAIQVLSEIGGDMSVFPTAKHLVSWAGCCPRNDKSDRKIKSTRISCAGSYFKPVLVQIANALIKSKKHFEFTTRYKRIKTRRGHKKAIIARCRMILTAIWHILTDLKPYTSDGFLESRPVKKEKVLTTSQALNLLRQRGISLKMSLRRSPN

SEQ ID NO: 361938 - protein, 378 aa, unidentified
MKRVRFVGLDVHAETIAVAVAEADGEVRSLGVIPNRAESIRKLVKKLGPAEELRVCYEAGPTGYVLYWQLTALGAPCEVVAPTLVPVKSGERVKTDRRDALKLARSYRSGDLTPVWVPDAAHEALRDLVRAREAAKKDQLRARNRLSKFLLRHGKRPPAGVKSSWTGNYLLWIKQEVHFEQFAEEFTLLDYLHEVEHAAGRVERLDRAVEEAVKSAPPPMRAVIEGLQALRGIAQVSAVTIVAELGQISRFARARQLMGYSGAVSSEDSSGERVRRGAITKTGNAHLRRIVMEAAWSYRHRPAVNRALRQRQEMVNEEVKEIAWKAQHRLHARYRKLTARGKNQGQVITAIGRELLGFIWAIGVKVEGAQKEPLQRAA

SEQ ID NO: 361939 - protein, 384 aa, unidentified
MSKHNILFIGLDTHKEFVEVAYIEDQRGAKPVHLGRQPCSKIAIKKLARQFESKYPDATLHFVYEAGPCGYWIYRLLTSLGHCCYVVAPSLIPKKPGDKVKTDKRDAMNLAKLLKSEDLTPIYVPEPEDEAVRDISRAREVAMKDLKDAKYQLKAMLLRNNITCKVKDNWSAPHLRWLTELVLPHPAQQIVLQEAIQTITERMKRLERLVNELENHVKRWRYYPVVKAVQAMRGVRLLVATGIVAELGDLNRFDHPRKLMSYVGLVSSEHSSGGKRRQGAITKCGNGRARRLLIEGAHSYRYSANISTDLQKRQEGLPKAIVDIAWQAQLRLCRRYQRLIHKGKHYNVVVTAIAREMIAYIWAISREVVLTPVNPKLRLSRVPA

SEQ ID NO: 361940 - protein, 349 aa, unidentified
MWMIGVDYHPSFQQIAFCDQDTGECGERRLTHSDGEAERFYRELKQRGVSVRVGMEATGYARWFERLLGKLNYELWIGNAAEIQSKRVRKQKTDRNDAQLLLQLLLEERFPRIWVPSPENRDLRQLLWHRHRLVQMRTRILNQLQALAMNEGWRWKKKLFSEQGRRELEKLALAPWASRRRQELLNLLDQLNPIIGELTASAEQEARKRSEVVRLMTHPGVGALTALAFVLILGTPERFRCGKQIGSYVGMIPSEDSSGGKQRLGHISKQGNSLLRFLLVEAAQAAVRNNAEWKRRYIHLAMRRHKSIAKVAMGRRLGVRLYWMWRNRCDYSSSLSSVRTRESSVPDMV

SEQ ID NO: 361941 - protein, 344 aa, unidentified
MDIVVLGIDLGKNSCSLAGLDGSGRVVLRRRLRRSSVESFVHGLGRCIVAMEACCGAHHLGRVFAAQGHEVRLMSPEYVRPYVKAQKNDELDAEAIAEAATRPTMRFVAMKSQAQSDIQALHRARERLVAERTALINHLRALLLERGIVAPQGRRKLDGELSVFADEDGTEALSPRIRQLIEDLRSEWRALDERIATFDAEFVRMARDDAAVRRLMTIPGIGTINATALAAAVGNAGAFGRGRDMAAWLGLTPRQMTTGGKPRLLGISKRGNRYLRKNLIHGARAVLPSLVARETPLGRWARGLLARAHKNVVVVALANKLARIAWAVLAHDRAYDAGCEAAAT

SEQ ID NO: 361942 - protein, 414 aa, unidentified
MEPIYRGVAGIDVHKKMLAVVVRREQDGRTEYEKRKFGTTQAEIEHLAGWLQHLQVREVAMESTAQYWRPVWYRLEGHFEPHLCHPLKTRAPRGRKRDFRDAQRLADRWWAGDLEDSFIPGAEQRSWRWLTRTRVQMKRKLCVIHNHVEGLLEQGGIKLSAVVSDLFGVSGWAMLEHIALGISDVEVLVREARGVLRRKDAQLREALTGRLEPVYRLLLRQHMDQVRLLRRQIEEINQALARAMKEHIAVLHRLSRIPGIDLYAAQELIAEIGPKAAAFATAGQFASWAGVCPGSQESAGVNYSHRSPKGNRYLRRLLCQISWAAIHTKETFFAGLFGRLKPRIEGRGAAWAVAHRIAKVVWLVLHQEVEYREMGSAPPQERTLLRKFRRLLKDFGNLGVDVRALLNQQLTDPA

SEQ ID NO: 361943 - protein, 343 aa, unidentified
MSIVRTVIGGVDTHADFHVAAAIDGNGAMLGVESFPADAAGYEELLGWLVSFGAVSLVGVEGTGSWGVGLARFLHDQEVETVEVDRPNRQKRRKVGKSDPIDAEAAARAALSGEASVTPKTRNGAVEQMRVLLVARRSARQQRIQTLNQLRHLVFCGPEPIRVRFKDRYQTGLVTEAAKMRPRNGSDPVTFTTNTVIRSLARRIQGLNTEMASIDQMLSDLVAATAPSLLALHGVGVDSAASLLVTAGDNPDRLTSEGSWAHLCGVAPLPASTGKTPSHRLNRGGDRQANAALYRIVLTRMSNHPETRRYVTRRRDQGRNTTEIMRSLKRYVARQVFKQLQMA

SEQ ID NO: 361944 - protein, 315 aa, unidentified
MNTTSANPSKNTRDYIAVDIGKASLAVCAEGLEKSFENTTAGIAALLKACRKFAAPFVVCESGSYSSPLLAALRKHRIPLAIVPGGRVRHFAKGIGILAKTDAIDARLLRRFAQETHPPTTAAPAPELAQLRQFLDARTDIVNRLIQIAGKLENATGTLRRHLLGERRWQERRRQKIDALLNTHMKTHPALQSDEQRLTAVKGIGALTARTLLAHAPEVREIRDKTLAALCGLAPWPNQSGTLDKGSRIRGGRQSIRNILHMAALSAIRHNVILRDFYKRLLSRGKPKSVALVAVMRKLIMLTHRLLSKPDFNLA

SEQ ID NO: 361945 - protein, 356 aa, unidentified
MISNIKYIGMDVHTQSISIAVRNSVGKVLMDCVIETKASTILQFIDGLRGDVRVTFEEGTWAAWLYDLLKPHVTQVVVCNPRKNALLKEGSKSDKNDARKLAELLRLNHLQPVYHGENDIRTLKELSRSYLTINKDLTRVMNRLKALYRGWGIACPGNDVYAPRHRAEWLDKIREAGVRRRAEHYYQQLDVLRLLRQEVRRDLLVESKKHRGWKLLRQISGIGPIRAALLIALMQTPHRFRTKRQLWNYSGLGLETHDSAQYRVVKGQLERSNKPVTLRGLNKDYNHDLKDIFKGAALRASIAAGPLHGFYEALLAKGRKPTMARLTLARKIAAITLIIWKKEVRFDANHLKQQAA

SEQ ID NO: 361946 - protein, 356 aa, unidentified
MESTKYIGMDVHKEATTIAVLDPSGRLVMESIVETKAATIVQLVQGLRGDLHVTFEEGTWAAWLYDLLKPYVTKVVVCDPRKNALLQSGNKSDRIDARKLAELFRAGLVSGVYHGQISLRTLKELARSYLTISKDLTRTMNRLKALYRSWSIPCAGTSVYAPRHRAEWLSKIQEAGVRRRAELFYQQLDSLQLLRQQARQDLVAESRQQEATKLLRQIPYIGPIRAALLVAMIQTPHRFRTKRQLWAYSGLALETRSSGEYRYVQGQLERSHKPVTPRGLNQNHNHDLKSIFKGAAVKASSAAGPFQDFYLALLTKGMKPTMARLTLARKIATISLLMWKKGVCFDAGQLKRQESV

SEQ ID NO: 361947 - protein, 400 aa, unidentified
MLSIGIDVSKGKSTVCGMKPGGEIVYTPFEVQHTREGMSELVSLLRSSGEEVRAVLESTGSYHCPVVAALLENGIFVSVVNSLRMKRFCSQSIRRVKTDQIDAMQIALYGLAYWQELQPTRLPEDTYRELQLLARQYYQMTSILIKAKVDFNAICDQVLPGMQELMNDHAGRHKLSDFVLRYRHTTHILEMGETRFRKDYCKWAEKKGYRNCERMAVLIFATAQNGIPVLPNAPSTQIVITEAIRVLHTVEASRDAILTQMQALAKTLPEYSLVREMPCIGDTLAPRLIAEIGDVRRFHSKRALIAYAGIDAPPYQSGKFCANNRHISKRGNRYLRKTGYEVMQSYVMHKPANDPIFTFIEKKRGEGKSGKLAMVAGLNKFLRIYYGKVTELYRSLPAIE

SEQ ID NO: 361948 - protein, 319 aa, unidentified
MPQRSRIVGIDVSKRKIDACIRSPTLLRVSMPSTPEGQAELLAWLRKHRVGTAVMEASGGYERSWAEILRAARIKVRVVDPKRVRHFAKSAGRLAKNDPIDAETIAWFAETFADQVAQPHDPEREELDRLVKARTGLKALEMQIAQWAEHHQPGLVVKAHATVAKTVRAESRKLDAAIAAKIKANPVFARRAAIIQSVPGLGDRAVAGVIAWLPELGHVDDQAAAALVGVAPYDNDSGGHSGVRCIKGGRRKLRNLLYMPVMGAATQHNPVLKAYYQRLRARGKEAKVALVACMRKLIVILNTMLARDQTWDPPARAAA

SEQ ID NO: 361949 - protein, 439 aa, unidentified
MILIREVADAPVIMGISKPAGLKFPCGEVKMMNPLFVGIDVGSRNNVAYLMKPDGSKHSSFSVQNNLGGAKLLSERIVSALGSMQLSDVIIGLEATSIYGDSLVYALREDGSLGRFQRKIHVLNPKQVRKFKDAYPDLPKNDWVDAFVIADHLRFGRIAKEVYMDDYRYQALRTLTRARFDVIQNLTREKQRFANYLFLKCSGMAQDKDIQNTSATTIALMERFETVDDLANADLEELTAFVTETGRGRFADPAATAKAVQAAARGSYRLPKTVNDTVNQAMSVSIASMRALKEQIKVLEKAIEQQFEIIPNTLTSIPGIGKVYSAGIIAEIGDIHRFNSQASVAKFAGLVWHKNQSGEFEAEHSQMIKSGNRYLRYYLLEAANSVRRCDSEFRRYYDLKYHEVNKYQHKRALALTARKLVRLVFRLLKDNRLYIPPEG

SEQ ID NO: 361950 - protein, 341 aa, unidentified
MQYVGLDVSQKETSVCVVNEAGQSLFEGKVKSDPGALNALLRERAPHAARIGFETGAMASWLWHKLRRVDLPVVCIDARHAHAALSVRMNKSDRNDARGLAELARVGWDREVKVKSEESQEVRAILVARSRLVTIRRDIENQVRSLIKEYGFLFPRAIGKQFRNQVSDLLGEDHQLLGVISPLLSIQEHICEQQSKFDDEVRQLAKSDETTRRLMTVPGVGVVTALTFRHTIDDPSRFRSASTVGAYLGLTPRRNQSGETDITGKISRWGDRLLRSYLFEAATVLLYRTKKWSSLKAWGMKLAKRIGVKKAKVAIARKIAVILHCIWVDGTSFDWGQAKPA

SEQ ID NO: 361951 - protein, 351 aa, unidentified
MQYIAFDSHKRYTLARVEGSEGGKAKECRIRHEKGSIREFLGSCQAGSPVAVETIGNWYWIVEEIEAAGMRPLLVHARKAKMMMGMINKTDRLDAAGLNRLQRSGTLPTVWIPPQDVRDKRELLRARMDLVAQRTQMKNRIHAALARYGINVEDAGSDVFRVGARENLEKAIQELPPQTSFATKCQLDQLDALQENIARLEERIKEVLSLTPEVELLMTMPGVGLLLGSVIALEIGDVSRFPRAENLASYAGTTPRVHSSGDKTRYGQVRGDVNRFLKWAFAEAANAVCRLRAHHPYQHVSKLYERIRAKKNHAKAIGAVSRHLAEASYWILTKKEPYKERDSGTVSSKDA

SEQ ID NO: 361952 - protein, 339 aa, unidentified
MNSNVIAIDIAKEVFQLCEVDKKGKIVMEKRLTRGKLLPFMHQHSPTLIVMEACGGANYWTREFKALGHEVKLIAPHYVKPFVKGNKNDKRDARAIAEAAQRPQMTFVQPKSVEQQDIQSLLRVREGYVAMRTKLINQLRGLLAEYGLVFSKQVSSMRKALPELYDPEAENGLSSQMKQLLSQQYTTLLLFDEHIDMCDLEIKRLATEQEACQRLQAIEGIGPVTALALVAQVGDASVFKNGRHFAAYLGLVPRQHSSGNKQQLLGISKRGDGHLRRLLVHGARSVLIRTPGKTDSRSRWVESIKERKGHNKAAVALANKNARIALALLKNDDVYRVAA

SEQ ID NO: 361953 - protein, 348 aa, unidentified
MTMVGGFDVHRKQITFDYVDDDGLVRWGQIRPATRKTLRAWLGEHCPDGDAEFALEGCTGWRYVTEEVASAGVGVHLGDPAEIAVARGPKKRAKTDRADARLLRTLLLEGRFPESWIPPVHVLEIRTLGRLYCTLMDERRAWQQRIHAQLFHQGCPPIRALLSEAGRDALARVDLSAAGRQYVDTALRRIDELSTEIGPLRTQLVNFARRQVGCQALQAQYGIGWLCAAIIWAEIGDARRFTSSDQLVRFAGLDVTVYSSDGKRSPGHLSRQGSPELRWAAFEAAKCAARRSSPDYAYYHQLAAKRDGHNGKNPTLAVERKILRRCYHTLRELGDAALALPIPEEVAA

SEQ ID NO: 361954 - protein, 343 aa, unidentified
MEYYVGLDVSLKQTSICVVDQAGLVVREGVVDSDPEAISVYVTSRAPNAVRIGLETGPTSTWLWTELKRLGLPVICIDARHAKAVLKMQINKSDRNDAIGIARIMQTGWFKEVHVKDIDSHSVRALLASRALLVKIKRDLENHVRGLLKNLGLVIGRAKFNVFAVRAEELIEGRPELVAAIRPLLEARSAVEQQVSELDRKVMKLARHDTQVRRFMTAPGVGPITALAFKATIDDPTRFARSRSVGAYVGLTSRRHASGEVDWTGRISKCGDAMLRSYLFEAAGVLLTRVPKWSAVKAWGARLAKRNGLRKAKVAVARKLAVILHRMWIDGTEFNWSKKEIAA

SEQ ID NO: 361955 - protein, 389 aa, unidentified
MLLDHPFDGPTAIRTHIAAIFVSLELSRSNWLVTSLSPGKGEKMSKHSVAAGDTAELLALFVELRRKAEVRTGQSYPIVTIQEAGLDGFWLHRVLQQNGIESHVVDPASIATPRRRRRAKTDRLDGETLLRALLAYKRGEPRVCAMVVAPSPEEEDRRRLCRERRTLIEERITHVNRIKGLLFAQGISDYAPLRRDRRARLEALRTGDGRELPSHLKAQLGRALDRIELLVDQIKAVEAGQEALLAAARKPASEEAVPDPVTMLLALKGMGANFAAVLWSEAFYRQFANRRQVAAYAGLAATPWQSGGIRHEQGVSKAGNPRLRTTMIQLAWLWIRHQPQSALTRWFKERSQQGRKRAIVALARKLLVALWKYVTQGVVIEGVAMKPAA

SEQ ID NO: 361956 - protein, 392 aa, unidentified
MYIVGIDIGKNHHEASIVSPEGKQIGRSLRFATTHKGADSLMSFIFKNIGNSPCVFGMEATGHYWYPIYSFLKAKGYTIYVINPIQSDSLRKMYIRQTKNDSIDSFLIAEVIRFGQFTTTSMADENILAMRQLCRYRDSVISSRTEIKLRISTIMEQIFPEYEKQFSSLWVSTSMGILEKYLTPENIENAPIDELFEIIKDKSHNRLTKAKAISIKEAAADTFGIKIAQDAFSFQLKQLIDRMNFLDKQIEALDCQILEYYEKFDCYLHTIPGIGIIGAATILAEIGDISRFKNSSSLIAFAGIDPTVRQSGEFNSTHNHMSKRGSPYLRHAIFLAATTCSFHNSPLNAYYKKKRDQGKHHLTATGAVARKLTTVIYAVLRDSKPYEPKKFC

SEQ ID NO: 361957 - protein, 350 aa, unidentified
MSVNHPNKQLILGVDTHLDLHVAVLINTLGQVICTAEFATNSTGYVKLLRWCQSFGHLTKAGVEGTGTYGAGLSRFLSNHQITVYEVNRPNRARRRLRGKSDPTDAENAARAVLADEAKAIPKTQNGSVEAMRFLLIARRSAVKARTQAINQIRAILITAPDDIRLKYLKSSQSACIEGCANMTAMDGSILLETLSISLNLLAKRWLNLTEELRKIDKNLKKITLTTAPTLMSQYGVGSYVAATLLVTAGDNPERLKKESSFAALCGVSPIEASSGKTVRHRLNRGGSRIANNAIWTITLIRMRSDPCTQQYIARRTKEGMSLKEIQRCLKRYIIRGLFPIILNDLSLSA

SEQ ID NO: 361958 - protein, 494 aa, unidentified
MGACELESGDVALATIPIRKMTIGIAQTLLLIIEWRIAMPKKRTAGDRPELKPVNVGAAAIDIGSTMHMAAVNPACTDVPVRSFGTFTRDLHELADWFKTCGVTSVAMESTGVYWIPVYEILEQRGFEVILVNARYAKNVPGRKTDVSDAAWLRQLHSYGLLRGSFRPDAEIATLRAYLRQRERLVEYAAAHIQHMQKALMEMNLQLHHVVSDITGATGMRIIRAIVAGERNPDVLATYRDVRCHSSIATIRAALVGNDRHEHVFALTQSLELYDVYQAKMLDCDRKLEVLIAALNNKGAKPIGKLSKPRIKTKQVNAPTFDVRTALYGVLGVDLTEIHGLGPSLALKLIGECGTDLRAWPSAKHFTSWLCLAPSNKISGGKVLSARTRRSSGRAPALLRLAATTVGRSDTALGAFYRRLSSRAGKSKAVTATARKIAVLFYNTLRHGMHYRDPGADHYEQQYRGRVLANLQRRAKSLGFVLQVIPGAPDPAVS

SEQ ID NO: 361959 - protein, 353 aa, unidentified
MPVYVAVDFHAREQTISWCDTADGEVHRTKLRHQHDDVRKFYEQFSGEVIVAFEASGYSAWFEQMLAELGHTVWLGNAAEIRRKAPRKQKNDRRDADLMLELMLKSDFPRVHTFSAESRTVLRQLRYRHKLVKVRTIAKNSVHAIGLNAGLPLRGRLLTQTGLEQLQALPLSPVLSQQRDEWLALIRLMNKQIGAVEESLAQRAKDDEAVELLRTHPGIGLLTALALRYTLDPIARFTSTRCVVGYAGLDCVEEQSSERRRMGSISKQGSRLLRFLLNEAGQTAARKDPQLKQFYRRLLRRRDKPKAKVAVARKLLVRSFIMLRDQIDYAEFVRRGVAARVARETHSPKVTDL

SEQ ID NO: 361960 - protein, 360 aa, unidentified
MNATIVGVDLAKNIFELAVAGSDWRITQRQRLARPKFLSFFVHLAPCEVVMEACGSAHFWARRISALGHTVRLLPAHYVKAYVRRNKTDQADAGALIEAARCAEIREVPVKTVEAQQIQSLHRLRSQWMSTRQRCVNTLRGILREFGFAIPLGVNVAKAQIGVALSDTDTDIPAALRETLTEMFQQIAVLEQKILTVEHQLNALTRTDLRVQQLRQIPGIGALTSTALRAIVGDIHRFPSGRHFASWLGLTPNERSSAEKRRLGRISKQGDVYLRTLLVHGARSALLAAHRRCEPVDHWTDCVSGRSIANASAGTTRRPSHWRIELLESSGRPGNLNGRLTATGAQKRTNRCSTHSHSLR

SEQ ID NO: 361961 - protein, 338 aa, unidentified
MNLSRIGLDLAKQVFQVHGVDRHEHVVCRRQLKRAQVRDFFRQLPPCLVAMEACGSAHYWARELRELGHTVRLIAPQFVKPYVKGDKHDAHDAEAICEAASRPSMRYVPVKSAEQQAVQSVHRVRSRLVRARTALCNEVRGLLGEFGLIATRRGRAATMALLETVTATEPAPLPAPMGELLRELKDELQTLEARIARLERQIQAHVRGDARIQRLLAVDGIGPISASAVAASAGDARQFRTGRQFAAWLGLVPRQHSTGGQQRLGNISKRGDTYLRTLLIHGARAVVRCCANKTDARSRWLQGLLQRRPANVVAVALANKNARILWALLSRETCYRPG

SEQ ID NO: 361962 - protein, 372 aa, unidentified
MLIHYIDIAKRNFVIAVSSLSKTKTETNNPKGIAHTIEYLKKHKVALVVTESTGGLEIPAAKAIHRAGIAVIIANPRQTHQFAQSQSLTKTDAKDAKMPAFFAQMKAQKEDWQTMPYHPPTEAEEVLEALVNRRNQSADMRTAEKNRLHQVHETQVGSVKQLIAHFDRLIDESDKQIDDHTHTHFDGKAQVAEQIKGIGSITTATLMAMLPELGRLSHKRIASLVGIAPHPRKSGEAKFKSRCFGGRSAVLKALYMATVAATRFEPLIRDFHQRPLSEGKPYKVAVTACMRKLLETFAKFLSLPTAETQTQIFGCFRPKYRLILPKYPLNPPRIPDNQASGLPFRRQRAHLACWRLSTGSNTSPSDGFAHSL

SEQ ID NO: 361963 - protein, 335 aa, unidentified
MTVYIGVDFHARQQTISYLTTEDGEIQRLQLDHGQPEEVRRFYQQFAGQRVVVGFESSGRAAWFEELLEELGCEIWIGHATAIRLFARRRQKNDRRDADLILDLLVRGDFPRIHRYSAESRTVLQQLRYRQRLVKMRTMLLNSLVFMAASRGVVLRSQLKTKRGLERLRQLSLPPADLKPKIDKVERELAAKAESDIRVRRLRTQYGIGPLTGLCLAHTLERPERFANPRKVTAYVGFDPVEDSSGERRRIGSISKQGSRLLRFLLVEAGQIAVRRDQELARVYQRVLVRRGHAKAKVAIGRRLLVRAFIMLRDEIDYAEFQRRGVAARSSREIA

SEQ ID NO: 361964 - protein, 371 aa, unidentified
MFVIGIDAHKSSHTLVAVDGTGRRQAEKTVDATDSGHHKALRWARGRYPTDELTWAIEDVRHVSGRLERFLLESGERCVRVPTRLMARTRHETSRVPGKSDPVDALAVARAYLREPSLPVACHDDASRELKLLVDYRESLVMQRTAIWNRLLWRIHELDPGRKVGPLDAVRHREPVQRWLATLSGVVAQLAGVELEDIARLTTDIRQWERRIDERVRDIAPNLLDMPGVGTLTAARIIGEAAMVTRFAGSEAAFARFAGVAPAPRWSGSTAGQMRRSKVGNRRLNSAVHRVAVTQLRLGGPGRLYFEKKVQEGHSRSMALRSLKRRVCRVVFTRLNADQRIRYPNSGPPETWAGQRNSSASASDGHEGSAD

SEQ ID NO: 361965 - protein, 330 aa, unidentified
MMVTASSLPVVGLDVSKATLAVCYQVDELIKHLEVSNTKAGFQQLVKACGTQCRFVMEATGTYNLALAYYLHEQGGEVAVLNPLVIKRFIQMHLSKGKSDRKDAQWLLRYGQQQEVKVWHPAETVLVECRQLEQVTEQLLKQKTMVSNALEALQRQPVVSKLALKRLQQTLKTLTQQVEAVEAELLTLLEQRFAAEMTLLCSIPGIGRKTAGMLLIFASGFTHLDNYRQLIAMAGLSPREHTSGTSIRGKVRITKMGGGLIRGKLFMCSFSAKKTNGACAALFDRLVAKGKNKKLALIAVCNKLLKQAFAIIKSGVPYQADFNSKLAPTA

SEQ ID NO: 361966 - protein, 451 aa, unidentified
MARQRQEAMSLEVVHPNAAGIDIGNAAHYVAVPAERDPQPVRCFECFTEDLKKMADWLAGCGIDTVAMQSTGVYWLPVYEILTERGLQVFLVNAAPTKNLPGRKSDVQECQWLMKLHTYGLLNNSFRPTEEICMLRTYWRQRDDHVKAASTAIQRMQKVLTEMNVQIANVISDISGLTGMTILDAILKGERDRYKLAELADPRVKASTEEIAKSLEGNWRPELLFVLRQQRDIYREYQKRIGECDEAIQAHLKTLENRARSQGQPETPKPGKRTGGNAPRFDLRSELFRISGIDLTRIDGINVMTAQTVIAEVGLDMSRWPTEAHFASWLGLCPDNKITGGKVYHRGSRHVENRAATAFRLAATSLWRSKTYLGAKFKRLRAQLGAPKAITAMAHNLARLVYRMLRYGHEYVDKGMEFYQQRYQQQQIKWMQKKARDLGLIITLAPAPATI

SEQ ID NO: 361967 - protein, 303 aa, unidentified
MIVGIDPHPQQHTAAALDDQGKVHDVQTFPSGSEGLQDFMDWLGAFTDVQVAVEGPTQPFFAVWLSRLLAEEIVVTPVPTQKVRERRGRRKTDPDDAVLVARVLHAEPSLPPLRSPEWLRPVQEISRTRSHLAHQLQANRMRLRTVRTPAVQASLEATVAALEAQIASLLRELERQVRAVAPQLLALPGIGVVIAGVLLAETGDVRRFCSPHRFATYCGSAPVPWESGASKHVRVNRGGNRRLNWAVHIIARTRLRTDPASRALVDRKEREGKTHREAMRVLKLYLARHVYKQLVRASSALPA

SEQ ID NO: 361968 - protein, 336 aa, unidentified
MDKVSAVVGIDVSKKKLDISLLVEGKARSKVLENSAAGYQALLTWLEKSKVPMSALHICMESTGVYSEPVALALHDAGLTVSVVNPACIKGFGHSENIRNKNDTIDASLIARYCAAMRPEPWIPPPLEQRQLRAWSQRVQTLKDIRQQEENRLEALAVSGIDDVAEHVKQLIDWLSKEIAKLEHDINNHIDRHPRLKHDADLLASIPGLGATTVAKLLGHLGDIRRFDSAKTFAAFLGVTPKQRSSGTSVRGRTMMSRTGSSALRTALYMPSLVARRHNPILRRFAEHLAHGGMAKKAIIGAVMHKLAHLIYGIIRTGKPFDANYLPKGLAIQDGI

SEQ ID NO: 361969 - protein, 377 aa, unidentified
MSPVTVYNTVIGSNAVLKPQKGDTHMEIIALDAHKRYSQVCVQKQDGRFLCEKRINHGKGQILEFLSQWTAGATVALETVGNWYWIVDEIEQAEMRPKLVHARKAKLMLGSINKTDKLDARGLNRLQQVGTLPTVWIPPVEIRDQRELPRTRMVFANLRTRLKNRIHSVFDKYGLHTEFEGITDIFGRQGREKMALTIKQLPSETRYTLRCMLRELDMVEGQIQRIEKRMKKVFSKTEQVKRLMTLPGIGFILAVAISNEIGDISRFATPQRLASYAGTVPRVHSSGGYTRYGKLRSDVNHYLKWAYSEAGNSTAVNHKRLPFRHTSKLYRRIREKKGHAKAVGAVGRHLAEASFWILSRSEDYKEPKSKSFSSTVA

SEQ ID NO: 361970 - protein, 383 aa, unidentified
MLYSPSADASFSHSTRTIYLALELSRRSWLVALHAPDAAKIELHRLPAGDGQAVLDLLARIRTRVERRTGVRPQVSCCYEAGRDGFWLHRLLEAHGISSHVMDPSSLQVDRRARRVKTDRLDAQALLRALMAWSRGEPKVCSMVRPPSPDEEDARRPSRERATLLQERIRLVNRIQGLCATQGIADYEPLRPDRRPRLARLITGDGRPLPPRLSAEIARQLDWLELVLQQLAEVETRRDAEAAAAKAATSSKLGALLHVKSIGPELATVLAKEVFYRCFASRRHVAAYVGLTPSPFASGRRSREQGITKAGNARARKALIELAWLWVRNQPDSALAVWFRSRVGSATGRVRRIAIVALARKLLILLWRYVETGALPADVVVKP

SEQ ID NO: 361971 - protein, 316 aa, unidentified
MVKWNPLKNSTNNANGFQSLLAEFQSHKITAKNSIVCMEATGVYGESLAYFLVGKNFKVSIENPYKIKRGFDISPKKTDRIDSKRIAEYALRFIDELTFWSPRTEILEEIRIFLSQREQITKQKISLNNALKSLKKKFHQSEKATNLYEEMITSCTTKLKYIDKEIEALISSEPEYKQIIENLKTVPGVGNMLAVHMMVVTEGFESHLNAKELCSYLGIVPLPYESGKSVRRRTSSSGVGPSVLRKLLYLSSMTSRRYDEDMKKYFFRKVAEGKSKKLVLNNIANKLIKILVALITSKKPYIKNFLSINPMLLKKT

SEQ ID NO: 361972 - protein, 425 aa, unidentified
MSIIQNTGSETSGFAAFVGIDWSDEKHDICLLAVGASQSEASVIASTPEAIQEWVQQIQKRFANRPVAICLEQSRGPLIYALMEHAFITLFPINPNQAAKYREAFAPSGAKDDPVDAGLLLDMLCRHRERLTPWKPDDVQTRTIRGLSEERRHAVDLRTTCAQRLTARLKGYFPQVVAWFDNDLTSLMACDFLLRWPTVADTKKAKPAALRTFFYGHNCRSETLIDQRLDAIAKAVPLTKDLGVVIPAVLTVQTLARMVRDLTCAIAIFDKQLAEAFAAHPDAPIFNSFPGAGAVMAPRLLAAFGSDRKRWRDAGSLQSFSGIAPVTERSGKSAWVHRRWKCPKFYLQTFFEYAQHSIPFSAWAGAYYRQEITKGKGRNAVIRSLAFKWIRIQMACWQQKVPYDESRYLQSLIQRGSPLAKLIQT

SEQ ID NO: 361973 - protein, 409 aa, unidentified
MEVMHPRCAGLDVHKDSVVACIRIQGGPKTTHQVETFGTTTQALLRLSDWLSKHQVTQVAMEATGVYWKPVWHVLDGTFELVLANAMHIKNVPGRKTDVNDATWIADLLAHGLIRSSFVPPTAIQDMRTLMRTRKQLVRERAQHVQRIQKTLEDANLKIASVVSDVTGTSGRAILQALIDGKTSPEELLATTTGKLRAAPSTLLEALRGRIRPPHRFLLKLHLGQIEALEKSVAEIDKEVGALLDPFRAKAQRLMTIPGIRDVAAQVLVSEIGVDMSRFPTVGHLISWAGLCPRNDESAGKRRSTRLRQGAPWLKTTLVQSAWSAARCKKGYLPAQFRRIKSRRGPQKAIIAVAASMLTSAYFILRDNVDYKDLGSDYFDRTDRKKAASRLLKRLSDLGFTVEIKEHAS

SEQ ID NO: 361974 - protein, 372 aa, unidentified
MKKNNSIAKEVKPAQKPWKGPITIGMDLGDRTSRYCVLDGAGEVVKEGSVATTRAGMTQLYGAMKKCRIAMEVGTHSPWVSRQLKVLGHEVIVANPRQLKVITESSRKDDRVDAQMLARLARADPKLLRPIRHRGEEAQLDLMVVRARAALVEARTGLVNAVRGFSKSVGERLASCDTDQMGVEKLAELPVSLQTVLKPLVEQVSSLTASIKKYERELEQIAKVKYPETRLLTQVGGVGTLIALGYVLTVEDKDRFEHSRDAGCYVGLKPKRGDSGDSQPQLRITKEGDIYLRTLLVQGAHHILSNRSVDSDLKRWGLKLAERGGKNAKKRAVVAVARKLAVLLHVLWVTGEVYEPLRNSNAAERQSGKKAA

SEQ ID NO: 361975 - protein, 339 aa, unidentified
MPTYNLGLDVHKVRTQYCLMDPAGKILDEGNVPTEEVAGLVPAADCAVVLEATGSWHAAYDALCATGAQVKLAHPSHVKAIASARVKTDRIDARILAHLLRTDLVPEAWAPPARTRELRDLVRLRWRFVSQRTTAKNRISNLLARRCLRYEGTDLFGRGGRAWLAALELDPHARTLTELLLTAIDEADAHVCALTDRLHELLDGDPELRLLQTIPGVGFLTAATLLAELGDARRFRSAGQVSAYFGLVPRVRASADVAHYGRITRSGSPHARRALVEAAHVAVRLPGPVRDRYASLARRRGKKVALVAAARALLELSWTLLMRGEVFRADGMGEPAEMR

SEQ ID NO: 361976 - protein, 324 aa, unidentified
MPAYADPTPKPISADTIFLAFELSGTSWLVALHAPDADKVERHRLPAGVAAEVLGLIARIKARVTRRLGTTPRVACCYEAGRDGFWLHRVLEAEGIASHVMDPTSLQVDRRARRAKTDRLDAQALLRALMAWSRGERQVCSMVRPPSPEHEDERRLSRERGTLLKERLRLSNRIKGLCATQGIYDYEPLGADRRERLARLVTGDGRALPGRLAAEIGRQLDCLELVLRHLAEVEAVRDARAEQARKEGGSKLATLLRLKGIGPEVATVLELEVFHRHFANRRDVAAYAGLAPSPYASGGTSREQGISKAGNRRARKALIELAWL

SEQ ID NO: 361977 - protein, 414 aa, unidentified
MNSWSEITHYAGFDWAKDHHEVVIVDRLGQSVADFQIEHNAQGWQRWREQLAALGPCVAACVETSQGMVVECLLDSGAVVYPISPASAKRYRERKVPSGNKTDHVDAWSLADALRVDGHGWKALAREDPLVAELRLLCRDEVALIEERTALVNQLQSALREYYPAAMEAFEDWTLPSSWAFLEAFLTPQALQSAGKRKWEKFLHTHKLWRPETYQKRMEIFARAGEFVSGPALTRAKSRLAVARVRMLRTLQSQIDAYRAEIEKLFAQHPDHDLFGSLPGAGPKLAPRLLGEIGSDRSRFEDPTGLQCLAGTAPVSYQSGQIHKVYLRRHCNKPLRYTVHLWANQSRQSCPWAAVYYDALRKRGRSHACALRCLGQRWLKILWKMWQTGTRYDPDIHTKNQIKHGSWVLKIQPA

SEQ ID NO: 361978 - protein, 441 aa, unidentified
MIRQNVAGIDLGSERHWVCAPSTDGSGREIASFGATTAELIGMAEWLKARRVESVAMESTGVYWIAPHEVLEAQGLAVLLVDTRQLARVPGRDKKTDPTDCEWIQRLHSCGLLQGSFRPEEAVCMLRTLVRDKANLVAERGDWLRRMQKSLDQMNVRVHRAVSDLDGVTGMAILRAIAAGERDAQQLAKLRDPRCSKSEPEIAEQLQGHWREDHLFSLQQALQMYDAVEERIAAYEKEILRKLADMEREQQRGQTAPPLNNTNKARAIKQRGQEAMRQALYRMSGVDATHIDAIGVETLEVVFSEYGPDLSRFPTEKQFVSHLTLAPHVPTSGGKPLKKRKRYSASTRVAAALRMAALSLRHSQTALGAYYRKMAQRLGADIAVFATARKLATLIYRLLRWGQPYVDEGAAAYETRYRQQRIGRLTATAKQLGYELALINA

SEQ ID NO: 361979 - protein, 340 aa, unidentified
MGWALEEVVENQVFVGIDVSKERLDAALRPRDESFKVANNPRGIATLIKRLKKWRVSRIVLEASGGYEIAAAYDLAAAGLPVAVVNPRQVRDFARATGRLAKTDAIDAQVLAHFAEIIQPQIRLLPDVQTRELMALVARRRQVVDMLTAETNRHGRAVDAVNRAIAAHVRWLRKQLADLDAALERAIRNSPLWSEKARLLRSVAAVGSVTVITLLSHLPELGTLNRRQIAALVGVAPFNHDSGKLRGTCAIWGGRAQVRAVLYMCTLGRNPQLQAFYARLIAAGKKPKVALTACIRKLLIMLNAVLRQRIPWNPELATLPSPFSAARGGAVIGAGSIATA

SEQ ID NO: 361980 - protein, 393 aa, unidentified
MHKPQQQHKPLNDLSRSLTPFDPNRTLIGVIELSKKSWLVAGMIPGVERQPLKKLAADENELLELLERWRAEAEKAGHKINRIAVAFETGRDGFWLARWLRARGIEAHVIHAASVAVSREHRRAKTDRLDTQQLMRAFLGWLRGERQHCKMAAIPTLEDEDAKRPHRERETLVGERTTIINRLKATLTRLGIRNFNPKLVKAPERLEHVRTPEGEPIPPNTQAELLRDMQRLRLVREQIGQIEKARLEHLKRNPNTGPNLMVSILARVIGVGIETADMLVQEVLSRNLRDRRAVARYGGVTGSPDESGSRSREKGLARSGNARVRRGMIQLAWRFLEFQKDSALAKWFRARTENAPRSRKKMIVALARKLLIALWHLVRDGVVPEGVVLRPAH

SEQ ID NO: 361981 - protein, 360 aa, unidentified
MKKDIREGSGLTVGVDLGDRWSRYCVLDPQGQILEEDTIATTGPAFRKLFGDRPAARVVIEVGTHSPWVQRLLHELGHETITANPRHVRLIYSSRNKNDQLDAERLARLARVDPKLLHPIQHRGEAAQADRALLRSRDALVVCRTKLINHTRGIVISMGGRLPTCSTSYFHKRVRQDLPDELKPALTPVLDTIAALSVKIQRLDTRIEQLASKRYPETGLLRQVSGVGSLTALSYVLTLEDPQRFKSSRAIGPYLGLRPRQSQSGDIDPELRITKAGDSDLRRLLVGSAHYILGPFGPDTDLRRWGLALAAKGKKNAKKRAVVAVARKLAVLLHRLWVTAQVYEPLRTHRPAVPAEAISA

SEQ ID NO: 361982 - protein, 352 aa, unidentified
MAKVEFDDLMSIGIDIGKDTFHIVGFDHDGQRVLRKQIKRLALVTTFEKLPRCIVGMEACLSAHFVSRTLRKMGFEPRIIPAIYVKPFNKGQKNDYNDAEAIAEAALRPNLNAVSEKSQDQLDLQALHRVRSRLVSRRTATINQIRAFLIEQGITVRKGLRALKNSFEAILEDRKDEISPRMRKILIGLYGDWMWMDDRIDTVSKEIEDISRTEDNCINVMTVPGIGPMISTAMVAAVGEGEAFDRGRDFAAWVGLVPRQYSTGGRTILGRITKRGSRYLRMLFVQAAKVILMRPHRWPDFSFGAWLTRASERMHRNKLAIALANKLARMAWSILRHKTAFDAPRDEIMAGV

SEQ ID NO: 361983 - protein, 405 aa, unidentified
MEVMYQRCCGLDVHKKLVVACVITPEGKETRTFGTMTENLLELGDWLADCGVTHVAMESTGVYWKPIYNLLEDNFELLVVNARHIKAVPGRKTDVKDAEWLADLLRHGLVRSSFIPGRPQRELRELLRYRRGLIQERSRVTNTIEKVLEGANIKLGAVATDILGVSGRAMLKAMANGTDDPQLLADLAQGTLKQKHTALTQALRGLVGPHQRMMLQSQLRHLAFLDGEVKDVSSEVAKRMEPFQDEITRIDEIPGVGTVVAQNILGEIGLNMGQFPSAKHISSWAGVCPGNNMSAGKRKTGRTGHGNPWLSSALVEAAWAAVKVKASYFSAQYHRLAARRGSKRAIVAVAHSLLVTIYYMLTRGTRFQDLGSNFFDDRNRDKVVARILRRIERLGYKVTIQAAAA

SEQ ID NO: 361984 - protein, 431 aa, unidentified
MLGGNQEKLMSQNQPEIQYAAFVSIDWADQKHVWSLQEANSRTREHGEVGHMPEAIEAWIAQMSQRFAGRPIAVAVEQSRGALVFMLSKYEQLHIFPVPPAMTANLRKAFYSSGAKTDPADTDLLQDVLQMHREKLRRLSPDTEATRLIQNLVEERRKLVDEKTAQSNRLEAHLKIYFPQIPQWFGDVDSPLVCALLERWSALEALQKARPDTLRSFFRKHHCRKEELIESRIKAIGEAMPALKDRAVVEAQLAVVKVLVQVIQVLHQGIEDFNRQIQEAAEAHPDFFIFESLPGAGAVMAPRLLAAFGSQRERYQNAAEVQTLSGIAPVTESSGKSSWIHFRFACSKFVRQSFHEWAALSITQSQWARAYYELQCRRGKRHHAAVRALAFKWIRIIFRCWKERVAYDEKVYLAALAQHNSPLLAATKIAL

SEQ ID NO: 361985 - protein, 354 aa, unidentified
MTSTKYIGMDVHKESISIAVMNAAGKIVMECVIETKANTILQCIDGLRGDLHVTFEEGTSAAWLYDLLKPHVAELIVCDPRKNASMREDNQNDKIDARRLAELLRIDHLSPVYHGEHGLRTLKELVRSYLTVTKDLVRIMTRVKAIYRSWAIPCTGKQVYAARHRAEWLEKINEPGVRRRAEFYYQQLDALRVLRQEVRRELLAESKKQKAWKRLCQIPAIGPIRAAVLLGILQTPHRFRTKRPLWKYSGLAIETCSSADHRSVNGQLQRSKKNSVRGLNRNCNHDLKNLFKGAAVVASSKPGPFQEFHAALLAKGMRPEMARLTLARKIATIVLIVWKKGVCFDAQHLKPQTA

SEQ ID NO: 361986 - protein, 386 aa, unidentified
MSQTTHQPSGPFYIGIDFHKHYSVFCVIDDRNTILERGRIDHKIPIGFELLIKRYSGCRVVFETTMNWHWLYEILEAHMDHKDIVLANAYKMRIIAEAQVKTDKVDAYMLAKFLKAELISTVHIPSKSTRQRKEVLRQRCFFVRQRTMLRNRIQRLLSAQHNLQLPQCSDLFGKKGISALGKLELPDPAGLLLRQQLEMLENLKTRIAEDEMALKKMLEASPELEFVKSIPGMGPILAAVVVSEVDDISRFASAQRFCGYAGLCPTTYSSGGNTFNGRLMRACNKWLRWAFVEAAWVSVGCSPYFGDYYKRKRALGKKANTAIIATARLMARICWQLLTEKRAYASFPPAQKLQGRPEGKPQASSGWVKERKDFAMPKETFPSRSE

SEQ ID NO: 361987 - protein, 360 aa, unidentified
MHYRTFVGLDVHKSTVTACAWNPGTQREERRTFPYDPSAIAEWIHSLEGPTQAVYESGFCGFSLYRSLSELEVDCVIAAVSKIARPKGDKVKTDKRDARFLSRQLAGGNISKVAVPDIETESLRELSRLRCTLRDQLTAAKHRVSQMTLRYGFRFDGKEGNWSEKHRRWLSGIQMPTVYVQAAFDYWLGEVFRLEDKKKRLEKVIRSLCKEEPLQTAVKVFSLIKGVSEITAFCVLVEIGDMTRFRTSGAFSAYLGLVPSEDSSGDKTNRGSITKTGNTHARKALIEAAWAQNRVKSAYTRIPEGTDPEIARAIRSINTRLKRRRERLLWVNRRKSCVANTAIAREMAVSFWALARLLVV

SEQ ID NO: 361988 - protein, 351 aa, unidentified
MKDLMAGIDLHSNNITVGIMDGKGQRLVHQKLPCELKRVLEFLAPYQKRLRGLAVESTYNWYWLVDGLQAANYPAVLANPAKIQQYSGLKHADDKSDAFFLAELLRLNILPTGYVYDAELRPVRDLLRRRMSLVHQRTALMLSFKSLFTRTTGEQMSLSRLKALEVAEAQALYEHPANQLIAGVQIEHIAQLDASIGRLEKAVLNVARELPCYPKLKTLPGVGIILGMTITMEIGDIKRFAGPGQFASYCRTVAAQSISNGKQKGENNRKCGNKYLAWAFVEAANFAKRYDESCRQWYDRKAARTNNIVATKALACKLAKAAWYLAAQETDYDARRVFPQLALGKDKNLKP

SEQ ID NO: 361989 - protein, 404 aa, unidentified
MKGPIVSIDVSKGKSDYQAFKDLNVKYTGSRSIKHNKEGFDEIVNLVREMEKKLETEVCVVYEATGVYHRVLKKVLEDNNIKQFIINPLLSAKTRKNDSLRSPKTDKLDPKSIAKTYYSHSLHNSHKQETIYHELRELSRYYEDILVHIRKDKVAFRAQLDIVFPGYDTLYDDLYGPVALAIIEKYPHPEMLQKKKINTVSKVIQNKTCHRQAVSDTMADKAIEYSKTIYSGCDKDDIEVLILQRFIKKLNEDMAEAERTIGEMIKLAQELPDFNIIKSIPGIGDNLAARIIAELGDMTRFKKKNELVAFAGLDPRISESGQNDGDHMHITKKGNKRLRCLLYLAVTCSIRLKRDDNSIKDFYIKKKQQSNPMCSKAAKTACASKLVRIIYSMCKTGELYKYNK

SEQ ID NO: 361990 - protein, 457 aa, unidentified
MRRKSKRTPGIEEAHPFSGMSRVNPEAAGVDIGAIEIVACVSRDEMTQIVKGFGNYTVDLQALAEWLKGFHVKTVAMESTGVYWIPLFEELERQGFECLLISSRSLRRVSGRKSDISDAQWIQTLHSYGLLEGSFRPQGDLVALRTLLRHRSQLVEHRSPHVQHMQKALLQMNVQLSQAVSDITGMTGQTIMRAILAGERNPQTLAAMREPGCKKSEEEIGKALTGTWREEHLFILKQSVAMYDFYTQQIHACDEEIERVYGLTRPAWEAGEVQPLSQRKRNSHSKNMPHHPEEIRKHLKRISGVDLSVVDGFGVSLAQTVIMEAGTDMGKFPDEKHFCSWLGLAPKHEISGGKVLKNSTLKTKNRAGQAFRMAAQAVKQADCVFGVMYRRLRARLGPAQATVATAHALARVVYRMLKYKVEYEPLNVNEYQKQYEEQQIKYMRKKAAKFGFQLVPA

SEQ ID NO: 361991 - protein, 407 aa, unidentified
MKYVYMGMDASKEKCEVTAIDQRGNSLTAPFTITPDEAGIDQLLTRIEPICKTLNATPIFGMEATGIYHLPIYVKLEELNYHVKVYNALELRAFRNKNIRKTKTDRIDALIIAEMLRFEAIPHQRQHDPATLELRELCRARYRIVKKIANTKKQINRNIDTIFRGYNEIFDDLYTKTSLHLLKKYTTPRAIEKLGLARLTKILKKQSHGHLGEARAQELIAACQKTITPSYMQEPSALETRYLIEQLDLLETQLKDIEKRIEEKYAQFDQHIATIPGIGTISAAVIQSEIGNIEDFNSPEQIVAYAGLDPTVRQSGEYTSTKHKISKRGSPILRHALYMAATTAWFHNPVCQQIYERKKKEKLHHKSAICVVARKLTHIIYSVMKNKKPFQTPNHILLKRNQENIPL

SEQ ID NO: 361992 - protein, 346 aa, unidentified
MDYVALDVHKHYSWARVENDQGQKIFECKLAHSRGTIRNFTNKWSPGTPVAVETVGNWYWVVDEIEAGQGLPQLVNARLAKLMIGSVNKSDKLDAKGMNRLQRAGTLPTVWIAPSAVRDARELPRTRMVLSKQRTQFKNRIHATLEKYGLKVEGVSDAFGKKGRQIIEELSWKLPPHTQQALQLMLDELDHVGANLKTIEGQMQQAFAPCAETTYLQSEPGVGEMLAVVIWTEMGTIERFGRAEQLASYAGLVPRENSSGGKVRYGRVRKDVNLYLKWAFVEAANSAVLNRQRCQYRHVARLYENVKARRGHGKAIVAVARHLAEASFWMLKKGENYREPMSSTQG

SEQ ID NO: 361993 - protein, 428 aa, unidentified
MDQRARKLDIVRAEHTLVVGVDIAKHKHWARVMDGLNGIQVGNAFSFQNTREGFERLLGIVVRAQKATGAARVVVAMEPTGHYWKPLAWYLKKAGITVVLVNPYHVKRYKEFDDNSPSKNDRKDAWVIARLANEASFFEVYLPEGVYAELRGLTQARQQQRNKSNMALNQIRCLLDEYFPEYEDVFTDILGKASLYVLGHRPFPGDILAVSAEELAEELKLASNRRVGLKRALRLQEAARDSVGVTEGLEAARLRLKQLLEEARFWRARLAETESAMADALQRTGLAKYLLSVPGIGVVLAASFLGEIGDPGRYQDSRQIRKLAGLNVVEDSSGQKKGRTEISKRGRPGLRSVLYQMAMTMASKNIQFRALYRYFISRRENPLKPKQALIALGCKLVRVLWTLMKEKRLWDPDRVLGAWRAEQLALAA

SEQ ID NO: 361994 - protein, 314 aa, unidentified
MFIGIDVSKARLDVAIRPSAEKLSVSNDEAGIQALVTRLSEIKPALIVLEATGGLERSVSGTLGSAQLPVVVVNPRQVRDFAKALGQLAKTDRIDAEVLARFAEAIRPPLRPLPDKVSLELRSLIARRRQLIEMMVAEKNRLSTASKAVRKRIEAHIRWLETELDRADKDLDHSIRQSPIWCENEDLLRSVPSVGPVVSRTLLAELPELGRLNRKQIAALVGIAPLYCDSGTFRGRRGIWGGRATVRAVLYMAALVASRRNSVIRNFYKRLRDKGKAPKVALVACMHKLLTILNAMIKHKTRWSEIIPQTSLDF

SEQ ID NO: 361995 - protein, 429 aa, unidentified
MTRISVGVDVSKNRSTVCIMDQDGKVIMRPFLVWHSTEELDFLADTLKRLNGEVRVIMESTSVYQYPIALHLKEKGIFIPIVNAYKVKKFANTDFRGGKTDKKDSRTIASYGISYWDKLVEWQIPKDTYFNLDLLNRTYMNAKKHRQIILQELQHYIDCAMPGMDKELHSLNLSTKKDFMLDFVEKFWHRDEIVNMTEAEFTEVFTAWAKKKGYRPVEGKAAKIYAIAKSCIPYYPANPTVKTILQYIVDKLSGVNRTLVTIVTQMIEEAKKLPEYQIVREMPGVGDPLAARFFGSAGDIRRFKNSKALVAYAGIDSPPDESGDFSSTHRHITKKGSKVFRDTGYEIMMALRAQKRTWEKVRKNPEVYDYMLKKEAEGKPRKVAKIAALNKFLRIIYARIKELYDNMALAERAKTKTRSKTRAKTKATD

SEQ ID NO: 361996 - protein, 429 aa, unidentified
MQNESIPGARGPVFCGVDTHADSHWLCVLDWRGRKVLSRQFPADAAGYEALAGAIAAAGEPACVAMEGTSSYGAGLTRHLASLGMPVREALSPARMQRRRPGQGKCDEADAERAARAAMSGSRLGTPKSQDGWVDGVRCMLAARSGAVKARTSAINTARSLLTTAPEGLRSRFRGMGGPRLMEELPSVRAEGALGAALGALADLWAAARDAALDMERAIEASLEENCPALLAMYGCGPVSAAKLAVAAGDNPGRLRSEASFAAICGACPIPASSGKTVRHRLNRGGDRQANSALHEIARQRVMRDPETAEYAERARGRGKSDREVMRCLKRYVAREAYRALMRPHEIRRPEDASGLVAARRAAKVSQVRAASILGTSEKYISMLERGQRELKPIRRAYEAWVEAGLPLNWDRQAFEAERKMDSKKHLAK

SEQ ID NO: 361997 - protein, 335 aa, unidentified
MKHYAGLDLSMESTQVCIVDDNGRKVVSEKVESSPEAIAMMLERYGPLERAVIETGRMSPAICLGLRELGVPVVCIDARQAHQSLKAMKANKTDPHDAAGLAQLARTGFYKEVHVKSPAAHGVRSVITARSHLVEARVRLDNTIRGLCATFGYRPGAGQGKAFLERIMQAAHIPGLGDAIVSLLSVRAELVEQIKEMDRRLRVIASQSQACEILMTIPGVGVQTSAAFAAAVDEAGRFRQSRNAGAYFGLVPRRHQSGEVDWTGRITKQGDGTVRKLLYEAANSILTRSRKTFALKTWAMKIAKRRGLKKARVALARRLAVIMHAMLRDGTLFQV

SEQ ID NO: 361998 - protein, 334 aa, unidentified
METLYFLGIDVSKKKFDAALTIDGKYFYEAQIENSPGTIKLFFTELKKQLSSLKSLIVCMEHTGIYCLPLLDFLVKNKIRVSVEPALQIKQSQGMTRGKNDQVDAKRIALYALKNCENLRFWRPQRQCIQQLKALLVLRERMVKMKAQLEVPLNECAEFVARSIFKQTLVHSQRSIRALQSDIERIEKEMNKLVSIDQQLSQQYRLATSVPGVGQITALNIIVSTQEFSRIKDAKKFACYAGVAPFEHTSGSSIRGKTRVSKMANMTLKKLLHLCAMSAVQCSDELKIYYKRKVDSGKNEMSAMNAVRNKLISRVFACVKNNRMYEKVYQHGLV

SEQ ID NO: 361999 - protein, 365 aa, unidentified
MIAITAWGQPESVQLKRHKGMKKIAIGIDFAKEKFDVTVKNVTNGTSAYGQYPNTPGGGRSMVAMVRKFAKGIDSSEWLFCGEDTGYYSQTIARYLTEKGYFLWLQNPYAIKHSEGDIRRGKDDKADSAAIADYAHRYEDKARKYDLPSEALEELHLLLTRRDAYVRAKRVIQSGANEIPKRDKQGETVTLIKASTRHLLKEIDDEIDRLEKRMEEIVAKEEAMQKNYEILRSFTGIGIVNSMCFITYTDNFKKFDLNARKIATYWGVAPFGKDSGKTVHVGPHVSNFCNHWLKAILSNAANSAIVWNPIIKPYYERLEKAGKCEGICRNNVKNKIIQTITAMIRKGEKFDPEFIFTNKNGGEKC

SEQ ID NO: 362000 - protein, 337 aa, unidentified
MKYCGIDLHSNNSVVIVSDEEDRIVFSKRLPNDLGQIGAVLWPHRGELAGVVVESTYNWYWLVDGLVDAGYRLHLAHPSAIKKYEGLKYSGDFADARYLAQLLRLGLLAEGYIYPREERGARDLARKRMQLVRCRTAQILSIENSMTRQSGTTLKGEAVKRLTAEQVDAFGFAPDVALAMEANRAVSQALGQQIEAIEKRLKESVGLRPDYHLLKTAPGIGRILATTIMLETGSIGRFAQVGNFSSYCRCVDSLRESNGRKKGEGNTRNGNKYLAWAFVEAANFAIRYCPEARSFYERKKRKANRVLAIKALAHKLARASYHMLRDQKPFDVGRCFG

SEQ ID NO: 362001 - protein, 353 aa, unidentified
MTLYIGVDFHPHQQTVSWCETESGETRTVDLAHNVEEVRKFYTSLPGPAIVGIEASAKAAWFENMLFETNHTLLVGNPVLIRKRATSRHKSDRRDAELILKLLLRDEFPAIWRRPPESNRILEVLRLRLNLVRQRTQVYNRLQSLAHNAGLPKGRMKTSVFQTVIKSIEMNETDSMQRLHLFRLLDNLNEQITELEAWLRKTAKPDTKVQLLMTQKGVGYLTALAAVHTIGDVSRFDRVTKQVVSFVGYDPLEDSSAGKIRFGRISKAGSSLLRFQLGQAVQTATRFDMKLKSFYKRLAKKKPKGVAKTAAARKLLVKLSIMLRDNITADEFDRRGRTVGNARGNQRSEMAVP

SEQ ID NO: 362002 - protein, 347 aa, unidentified
MVTFGGDTHKRTHTVVAVDGNGRQLGERTVAATPSGHLEALGWARQWPERRWALENCRPLSRGFERDLLSAGEAVVQVSPKLMGSARRTGRELGKSDPIDALAVARAALRETNLPVAQLEGKERDVKLLVDHREDLVGERTRIQNRLLGHLHELEPGYVVVAGGLLRTVVLAEVSSRLEKHSGVVAEIARELVARLVELTQSVKRLQRRIEALMPELAPSLLSLPGCGALTAAKLVAETAGVGRFRSSAAFAMHNGTAPIPVWSGNQERHRLNRGGNRQLNAALHRIAITQMRLGADGSAYIARRLTRGNTKTEAIRALRRQISDEVWRRLGRDYSARSTAQVAVAA

SEQ ID NO: 362003 - protein, 335 aa, unidentified
MWHVGIDLHRETIVMAAVNDAGEVMNPLQLRCQDTTEIVRVFKLLGTFRAVIEASGTYRWLYDLLRPYGTVLLAHPLRLRAMIQRRTKTDKLDAQLLANLLRINQIPLAYIPPEPYQQLRDLTRARARLVRDQAQVKIKLRALLARQNRQAPYRVPFGVRGVAWFRKQDFGPMENLVRDELLARLEHYRRHLTILEEHVQAVQQAFPQVEILLEIHGIGLFTALLIVAELGEVERFRTAKQVGAYAGLTARVHQSGGHCYRGSITRQGSPWLRWILVEAAMKVVREDVALKNFYTRVRKRSSAKIARVATARKLAEICWKRLRRWQQERRQPAAA

SEQ ID NO: 362004 - protein, 314 aa, unidentified
MPRLDSVPAQVLGVDIAKDTVTVYDSHTHTVRTIANERPAIRRMLSACGHDCLVVCEPTGGHEKALLEECVKAGLPAHRADTTRLKAFIRSFGKLAKTDAIDARLIARYGLTPGLQLYDPPSPEQAALRQLRQRRDELQQMLHMETNRTEHASTKRLKSSIQRHLGWLRTELEAIEMEIQTLIESAPELERKAKLMRSLKGVGPHTAAAILAYLPEIGSIPKATVAAIAGLAPIAQDSGQQHGNRHIAGGRANLRSSLYMAALVARHHNPTIRTFAMTLKARGKPNKVVLTAVMRKLLTTLNAIMRDQTPWQSA

SEQ ID NO: 362005 - protein, 343 aa, unidentified
MQAITTIGLDIAKSVFQVHGVDANGQVVLRRQLKRRYVLAFFEKLAPCLVGIEACASSHHWARQLQALGHNVRLMPPAYVKPYVKRQKNDATDAEAICEAVSRANMRFVPAKTSEQQSGLVLHRTRHLFIRQRTSVINAIRAHCAEFGIVAPVGRRGVEELLNVIANAKDEQVPAIARACVAALGAQLHRIKQQILEFDRMITAWHRCCETSRRLDEIPGVGPALATALVASVANPRAFRSGRDFSAWIGLVPKQNSSGGKPKLGSISKQGDRYLRGLFTAGALAVIRYAKIHGTRHRPWLTALLARRPTTVAAIALANKIARMAWAMMARGQHYIEPIALAA

SEQ ID NO: 362006 - protein, 352 aa, unidentified
MRRYNTGTVKGKRLYVGVDLHRLRWQVTERTEEQELFNGSIPGCWEALRKRLERYRGWKIQVVYEAGYFGFWLCDKVVEYGAECIVTPPSLVPGEYGNRVKTDRRDSRKLAAYLAKGLLKRVWVPTPEERGHRQVIRRRRQLIGDRVRTQNRIKAELRFYGIEIAQVAGRWSKAYVENLHRLKFADRWMQESFQRLLEEYQFLGEQIKRQTVILEELSKTLLYQERVTILRTVPGIGLIAAMELLLELQDVARFRRANQLAAYVGLTPSQYSSADKVRMGRITAIGKNDLRGTLVEVAWRLIGKDRAMRRKYERIKARAGSKRAIIAVARITLLRTRRMLLDKRPYVLGLAA

SEQ ID NO: 362007 - protein, 407 aa, unidentified
MEVIYERCCGIDVHKKMIVATLRKGRRGETRQFGTFTHHLRELTDWLKGNGCECVAMESTGSYWKPLYNIFEIEELKAIVVNARHMRAVPGRKTDVKDSEWIADLLQHGLLKASFVPDREQRELRELTRFRKSRVEERARDINRLQKILEGANIKVSGVLSDITGVSAQRFLALITSDEQITLQAVSARREPNMKAPPEELLASLDGIVSPIQKELLNEVLRVIREQTANIERMDDMIDRYLNEQYRLAIKAIDALPGIASTSAQQIIAEIGPDMSRFPSADHLCSWAGICPGNNESAGKRKTGRTNKANPVLKSTLVQCALVAEKNKGSFFHAQYQRLVVRRGAKKATVAVAHSMLIAIYHVLKGAPFRDLGSTYYTQFNTERKIQSHLKQLKALGWEPPKSPIPA

SEQ ID NO: 362008 - protein, 442 aa, unidentified
MAMRKREDSPEVFPNAAGIDVGASSHWVAVPRSAAEEPVREFGAMTDDLHALADWLLACGVDTVALESTGVYWIAVYEVLEQRGLTVWLVDARQMKYVPGRKSDVLDCQWLQKLMSLGLLRAAWRPGDEVCVVRAVARQREVLLTEQASWVLRMQKALVQMNLQLTEVLTDVMGMTGQAIVRAIVAGERDPKVLASHRHSRVKASAAEIQRALTGNWRDEHLFVLGQALAMFDSLAQRVLECDAKIEALLIPLGRHHVELTGPGKRCGKNTLQFDARTALARWAGVDLTRINGLSVTTVMTILSEIGPDLSRFANVKHFCSWLGLCPGTKISGGKVLSARTRRSANRVRQALKLAAMSLSRNDSALGAFYRRLCARMDKPRANTAVAHKLARMVYFMLTRGEAFVDQGQHRYEEQQRERSIAALRRRASALGFEITPTGQQA

SEQ ID NO: 362009 - protein, 320 aa, unidentified
MKANSPVEPMSFIGVDVASTHLDVAEHGQSGVRRIANDDSSIRRWLAGLPRMAVLAMEATGRYHLRLAELAHERGLRVYVLNPRDVRHYARAVGQRGKTDRLDALMLARYIDHEHGQLHAWQPSTAQLQRLQELLRRRATLVRHTTALRQGLQDQPALLQAVLQPLKTAVAGLDKQIAQAAAAVPDGAQALQHITSVPGLGLLSAAALLALFTRLRSAGADTVVAFTGLDPRPMDSGNRRGRRCLSKRGPAELRRLLFNAAMSAARTSSWRALYERERAKGLPSTAALIVLARKLVRVAFSLFKNRSDFDPARLGANGRA

SEQ ID NO: 362010 - protein, 419 aa, unidentified
MNKIETKKRRIVNSKTLIVAVDLGKTTDTGYCRCPDGKDIKPFEFSNNLEGFKKFWDRICWMKTAHDLEEVVVGFESTGAYGEPLVHYLRQNPVKLVQVNPMHTKRMKELQGNSPGKTDRKDPKVIADILCLGHALSVVIPEGAAAELRRLTLARERCLQRRTALYNQIQDLIFILFPEFLQVIKDVKSKTARYLLSHYPTPQEIVECGPESLTLILKRVSRGKMGKAQAQALYEVAQQSVGLKEGTRGILLEIAEILSAVEACHRFIEKVEQDMLPLLEQIPYSHSLLSVKGIGEVTVAGLIGEVGDFRHFGTLREVMKLAGLDLFEISSGKHQGNRHISKRGRPLLRKLLYFAAINTIRKGGVMQGCYQRHLDKGMPRTKALIAIARKLLGILFALVRDHNQYIENYSPEEALKLAA

SEQ ID NO: 362011 - protein, 425 aa, unidentified
MNSNMNHKINQVSEHTLVIGIDIAKQKHFACAADDRGRVLEKSFPFFQSDAGFEQLVKRIKFLQSRHQKSEVIVGFEPTGHYWMNLAAYLVDQQIRFVLVNPMHVNRTKELDDNLQTKNDQKDARVIASLIRDGRFTYSRILTGVEAELRNGASLRSKLQEDITSIKNRMIRWTDLYFPEFQHIFKSFGKNACAVLEMTPLPIDFDGKSDEELIQLYKNVEGLQCLSVSKIQKLKLLATKSIGLIEGLEMARFEIEALLSQFKTLSKQLEALSSRLTELAQQLTDYEYILSIPGLGENTAVELLSEIGSLSKYEHPRQLIKLAGLTLRENSSGKHIGQKKISKRGRRKLRAILYRVILPLIQHNIAFKSLYKYYTTRTVNPLKKKEAMVVLCGKLLKILHALCVKRVHFNASLMMRDLHCLQEAA

SEQ ID NO: 362012 - protein, 333 aa, unidentified
MKNEPIKEFVGIDVSKLTLDVHLYVKNLHCVFSNDSKGHRLMFSWIRKQCIKNEELRFCFEHTGIYSLELAMFLKKNSQVIYIVSGLAIKRSMGLKRGKSDKTDAKEIAKYLFQNHYAIKPTELASDAIQELQMHLSFRSNLVKKLASFKMHRKEFGKINESKGYDQIEQVTAEIMDALKKGIKVIEKQIQEIIYTDEALKNTFENISSIKGVGPILAATMIVITRNFTSFETSRQLACYAGIVPFEHSSGTSYRGKNRISSLGNRDLKSLLTMTAISSITYNPELKIYYQRRISEGKSKMSTINIVRNKLVSRIFACANRNSKYVEIYKFAA

SEQ ID NO: 362013 - protein, 347 aa, unidentified
MDVHQATISVAVRDSTGKLVMESVIETKTATILEFLGGLRGSLWVTFEEGTSAAWLYDLLKPHVTKVLVCNPRKNALLRAGNKNDRVDARKLAELLRTGLLSPVYHGESGIRTLRELACSYLTITKDLTRVMRRLKALYRSWAIPCAGQTVYASRHRTAWLEKLTEAGVRRRAERLFQQLDDLQPLRRQARRELLVESRKHPAHTWLRQIPCVGPIRTALLIALIQTPHRFRTKRQLWAYGGLALDTRISGEYRFAGGQLQRSKKLLTLRGLNANHNHELKNVFKSTATMASNCAGPFRDFYTALVAKGMKPSMARLTLARKIAAITLVLWKKGECFDAGQLTRPAA

SEQ ID NO: 362014 - protein, 325 aa, unidentified
MQNDQIIIGIDVSKASLDICVFQMEMKTNLVIENNVKSIGKFFKSFQLPVTIAMENTGRYNWHLYEVLAKTNNTVYVLNPLHLKKSFGLVRGKSDKVDAQRICLYIAKHADEHPRWTPTSKSIQKLNVLISERNKRVEDIRRLKCRGKDYELMKSIGLDKSLDRLNKRQIKLLNEQIHIIEQSIENIFKDDVELNKQKNLISTVPGVGKILAWHLISTTVGFSKINEPRKLACYAGVVPFSNQSGIYQGRSQVSFYADKNLKKLLHLGAMSAIRLNNDLALYYHRKVKEGKNKMSVLNAVRNKIVHRVCSVIKNNKEYQNHLVLS

SEQ ID NO: 362015 - protein, 351 aa, unidentified
MTKYIGMDVHKESISIAVRNDAGKLVMECVIETKANVILDFIHGLRGELHVTFEEGTWATWLYDLLKPHVTKLVVCDPRKNSRQGNKNDRIDARELADRLYMNKLSSVYHGGAGVRTLKELARSYLTISKDLGRVMSRVKAIYRSWGIPCAGKQVYVPRHRAEWLAKITEVGVLRRAEFYYQQLDALRVLRQKVRRDLLAESKNHQATKLLRQIPSIGPIRAALLIALIQTPHRFRTKRPFWKYSGFAIEMHSSADYRSVKGELQKSKKQISVRGLNRDCNHDLKNLFKSAATIASVKPGPFQEFYAALVAKGMRPEMARLTLARKIATIVLIVWKRGVSFDAKYLKSQTA

SEQ ID NO: 362016 - protein, 332 aa, unidentified
MEQISRIGMDTSKHIFQLHGVNTAEEPVLRKKLRRKEKFAFLEQLAPTVIAIEACGASHHCARLLQSFGHSVKLIAPQLVKPYLKRGKNDAADAEALCEAMSRPTMRFVPVKTAEQQAALMLVGVRDRLIRNRTQLSNAIRGYAGEFGLTAAKGKAHLDPLLERIQADESLPALARELFAVQGQEYAQLQAQIDQVDARLIAWHRADECSRRLAKIPGVGPIGAVLLTMKTPEPELFRSGRQFAAWIGLTPKDHSTAGKVRLGGITRAGDQGLRSVLVVGATTVIQHAQRGGRPSPWLTELLKRKPPKLAAVALANKACPGEGRGRRASPGN

SEQ ID NO: 362017 - protein, 395 aa, unidentified
MFIVGIDVAKRSHEVCMITSDGQTVQRPFSIRNNCTGYNLMLEKIRKHTNIKSQIVFAMESTAHYWLALFTRLRKDGYHVILLNPIQTSAMRDMFIRKIKTDAKDSFIIAELIRFGRYAESNVAQDRLLALKELCRNRFYLVDMAGDLKRKLIALIDRVFPEYEAQFDTIFCKSSVALLKKYPTPQKLSNAHLDKLTELLWNSSNGHFGEWKARELKELARNSFGVEDCDGAYSTLILLMLDQIQSLSGKADALEKEIFRLFQSFDTTVTTIPGVGPIIGAVILSEVGDISRFSSADKLAAYIGVDPSVNQSGEFQAAHAHMSKRGSPYLRRCIWMASQVAVQRDPMFRAYYEKKAAEGLKYMTIIGHVTRKMTAVVFAILRDHKVYEPVLPTAA

SEQ ID NO: 362018 - protein, 373 aa, unidentified
MKGRPPILNGCRSNPVTPEGSSPMSNHKFAAADVHAATTTFAVLDDSGKFVMETVVETKAESLLSVVKSISGAVHLTFEEGTHAAWLYDLLRPHVAELLVCDPRKNRNKSGNKSDRIDARQLARWLRSGDLSPVYHGQDSTRILKELVRGYENLVADSVRTKNRLKAVYRSQGESTSGRDVYKLEKQEEWLSKLQSSGLRSRAEWLYSQMESLDDLRGEAEKAVLREAKKHRPCSLVKSVPGIGPIRAATIVAHVATPFRFRTKRQLWAYCGLAVVTWGSSDWEIDGETLLQKRLPVATRGLNRNHNRHLKDVFKGAVRDARAFRPHLDSLVESGMRESMARLTVARKIAATTLAIWKKGEKFVLSKAVIRSE

SEQ ID NO: 362019 - protein, 408 aa, unidentified
MKTLHQRCAGLDVHKQEVVACLRLVTQGRVHREVRRFPTTTRGLLELAAWLEAARCTIVAMEATGVYWKPVWHILDGSFELVLANAAHIKGVPGRKSDVNDATWIADLLAHGLIRASFVPPQPIQDLRDLTRTRKQLSREIVRHTQRLQAVLEEANVKLASVITDILGASGRRILKAMITGETDPSHLAELGSRRLGCSRDTLVEALDGRVRDHHRFLLDQHLKTIEQLEETMAAFDARIEAALAPFRDTVERLTQVPGLSTRAAEVVIAEIGLDMSRFPTAGHLLSWAGLVPALDESAGKRRSTRVTKGAPWLKPVLVQCAWAAARKKGSYFEAQFLRLKGRRGPKKAAVAVAASILTTVYHMLRDGTCYQDLGPNHFIRRDPARTAHKLADRIRSLGYIVEIRSAA

SEQ ID NO: 362020 - protein, 376 aa, unidentified
MNEKLRFLGLDVHAETIAVAVAEPNGEVRSLGMIANREDSIHKFIRKLGSPEHLRACYEAGPTGFVLYWQLTQLGVKCDVVAPSLVPKKPGDRVKTDRRDALKLARSHRSDDLTAVWVPDEGSEALRDLVRAREAAKQDQLRAKHGLTKFLLRTGQRPPLGVKAWTEKYVEWVQQVRYTHPAQEATLLDCLNEVQHMEERVKRLQQSIVEVIQLAPAPMQEVVRGLQALRGIAHISAVTIAVELGNITSRFESARDLMGYSGAFPSEDSTGKRIRRGGITKSGNAHLRRIVVESAWSYRHRPAIGARLRRRQEGLPAEITEIAWKAQNRLHKRYMTLMARGKEQRKTMTAIARELLGFIWAIGIKAEAACKQQMAA

SEQ ID NO: 362021 - protein, 325 aa, unidentified
MKQYKYFFGVDISKKTIDVTLAKDAQLIHRQFSNDSTGMDELMQWLRELDLNFSNVLFCMEATGLYCFPLTQFLAGNAIDAAQIKKASSLDRGKNDKIDSRRIAIYASKNIDRMRLWKPLSSTLEKIKHLASLRERLVETKKRLITPINEFEEVGDVVMAKLLAKTIKSSLAAIDKDLKNVEIRIISIVNEDENLKQLYKLITSVVGIGFVTAINLIVYTNGFTVLRDTRKLACYCGVAPFEYSSGSSIRGKTKVHYMANKKLKCNLHMASLSAVKLDPDLKAYYERKIAEGKNKMSVLNAVKNKLLARVIAVVNRQEEYVRKTA

SEQ ID NO: 362022 - protein, 415 aa, unidentified
MDILYPRCAGLDVHKDTVVASVRLAGDGLVRTEVRTFSTTTPGLLALSAWLAEHGCTHVAMEATGVYWKPVWHILSDGEFTLILANAAHVKNVPGRKTDVADALWLADLLAHGLIRPSFVPEAPTQELRALLRTRKQLVREQASHVQRLQKTLEDANLKLSSVLTQIMGKSGRAILEALIEGEADPDKLLTLVQRGVKAPPETLRAALQGRVTVRHRFLLRLHLRQFDALAAAIVEIDAEVDRDLDPFRQAVRLLSTIPGVSDLTAQVIVSEIGIDMSRFPTAGHLISWAGLCPRNDESAGKRRSTRLRKGAPWLKTTLVQCAWAGARKKASYLQAQFQRLRHRRGPKKAICAVAASILTAAYHMLRDGTFYQDLGPDHFRRAAPEAQANRLARQIAKLGFTCTISPAAEREVSV

SEQ ID NO: 362023 - protein, 343 aa, unidentified
MQTVTTIGLDIAKSVFQVHGIDAEGGAVIRRQLKRRHVVAFFQKLPPCLVGIEACASSHHWSRELRALGHTVRLMPAAYVKPYVKRQKNDAADAEAICEAVTRANMRFVATKTPEQQSCLMLHRTRHLFIRQQTAVINAIRAHLAEFGIVAPVGRHGVEELLRVVADPSDKRVPEVARACLAALGAQLRVLKAQILEFDRMINAWHRSSEMSKRLDEIPGVGPALATALIASVADPKAFRSGRDFSAWIGLVPKQHSSGGKDKLGSISKQGDRYLRSLFTAGALAVIRYAKVHGTKHRPWLTALLARRPTKVAAIALANKIARMAWAMMAKGERYKEPVALAA

SEQ ID NO: 362024 - protein, 321 aa, unidentified
MSQFYLGIDVAKAKLDCALRLPNGKFRAKVIPNSLEGFTTLLTWLNTQKAESVHVCMEATGIYWEDVAQHLAIAGLTVSVVNPAQIKAYGASRLTRSKTDTIDAKLIADFCAERQPPAWQPRCEAEVTLRALVLRLDALQTMRTQESNRLLVAREAVREDIQQHLNWLDSAIRQLINTINDHIDHHPDLKQQRELLDSIPGIGERTSAIILAFYADTSRFANSRQAAAFAGLDPRQYESGSSIKGKPRLSKIGHSFLRKAMYMPAMVTLYKTAWGKQFRNRLSSAGKPNKLIIGAMMRKLIHVAFGVLKSAKPFDSAIHLA

SEQ ID NO: 362025 - protein, 375 aa, unidentified
MHGGRTIGEYSEIFVAFDVAKRKHAVAVAESGRRGEVRFLGEIENSGTAIERTLKKLSGRHGRLHVCFEAGPTGYGLYRQVQALGHACTVVAPALIPRRAGERVKTNRRDAVTLARLHRAGELTGVWVPDAVHEAVRDLVRARQAAADDLRRKRQQLLSFLLRQGRIYGAGGHWTLAHRRWLARQSFEHPAQQIVFQEGVDAIEDAAQRLHRLEKQLAIIVPSWSMAPVVAAFQAMRGASFLVAVTFAAEIGDVRRFDTPRQLMSFLGLVPAESSTGDTIRRKGLTLAGNRRARRALVEAAWTYRFPARVSEALRARLDGLPKGIRDIAWKAQIRLCARYRRLSGVGKKLPVVVAAIAREIAAFLWAIGREVAPM

SEQ ID NO: 362026 - protein, 346 aa, unidentified
MFYCGLDIAGLSSFAFVTDAHGKKVAAGPVATTRAALEARFKPFVRSGLAIAIEAGNQTAWIYEVLVALGAQVTVVNPNKVKLIAESRRKTDKVDAKILCELLRLGGLPESVHMPGRETRALRGLLVARRQLVAMRTKVCNVVRGLLRQEGVRLPSHALMSLVGWERLLEQGFEQEHLAVIVGAYFETFQKLTQSVQALERELAQREKQDARAARLQTMPRVGRIASLTFLAAVDDVNRFDSSRKLVGYSGLAPTVRASGERTEYGAINREGRKELRAVWVQIAHLVAIDDSRATAPLRRWFQRVASRRGKKTATVALARRLLVIAYQLLRSGTDYDVGRLKKPAA

SEQ ID NO: 362027 - protein, 432 aa, unidentified
MEKIREKAAGIDIGSKKVFVAIEGQEVRSFYTFTEDFEKLRDYIFENGIKTAAMEATGVYWSILYEMLEETGIDVWLVDGRQTKQVPGRKTDVKDCQWIQQLHSYGLLNRCFVAESDIKELRSYQRLREDHIRSASMHINHMQKALTEMNIRLKEVLDQIHGVSGLAIIEAILKGERDKEKLLKLCHSKIIKNKKDDVLKALNGRYTKSGLFALRQAYESYYFYQNQIKQCDQMLNDVLQKISRGKTDQNTDVRRKPIRHNKPDIDNLGSMMLKIFNGRDATTLSGITDYSWLQLLSEAGSDLSRWPTEKHYTSWLGLAPGQHNSGKMKKNRRKSGRPKAGQIFRQIAQSLLTSKHIALGAFGRRLGARKGSPIAIKSIARKLAVLYWRIMVKGMAFVEEGIKKYEVQLLMQKQRSLNRLAKELKVKVIYNE

SEQ ID NO: 362028 - protein, 317 aa, unidentified
MSEPLFIGIDVAKDTFHVASCPAAINISLPNSSTGIHKLIDFLKLHSIALIVLEATGGYERPIVAGLLQADLKVVVASPRQVRDFARGIGEFAKTDPIDARVLARFAQVVQPKPKPQFSPKRDELSDLVRRRSQLVDLRTQELNRSQTIRHPRVRKSVQKMLKTLDCQIAELDEIIQQHIKADDDFRQKDKILQSVKSIGPQTSAVLLSQLPELGQLNRQQIAALVGVAPYDFRSGRYAGQSHIRGGRKDIRCALYMSVLSAMRFNPVIHRFANRLSAKGKLHKVVSTACIRKLLTILNTMIRNKTLWQPEQILKNP

SEQ ID NO: 362029 - protein, 412 aa, unidentified
MELLHRRCCGLDVHKETVVACLRLVSDGKVTTEVRTFQTTTADLLRLSEWLAANECTHVAMEATGVYWKPVWHILDDGDFKLVLANAAHVKNVPGRKTDVNDAMWLAELLAHGLIRASFVPDAQTQEMRNLLRTRKQLVREQSSHVLRVQKTLEDANIKLDSVLTDLMGKSGRAMIEALIAGETNPAKLASLADRRVKASPEEFREALRGRVTKHHRFLLRLHLNQIDALDAAMATLDAQVEAKLGPFRTAVELIMSIPGIKNLGAHVIVSEIGIDMSRFPSDAHLISWACICPRNDESAGKRRSNRVRKGGTWLKTTLVQCAWAAVRKKDSYLQAQFYRIKARRGPKKAIMAVVASILTAIYHMLKDGTMYKDLGSNHFNRRSTDQQKTHLIKRLADLGYTVEIKPTMAMA

SEQ ID NO: 362030 - protein, 408 aa, unidentified
MNTLYVGIDVSSKSNVVYLMLPNGDKHSNFSIANSHKGSTQLVKRILSALTSHSLDTVLIGLEATSVYGDNLVYFLREDATLASFNRKIHVLNPKQVKKFHDAYNDLPKNDYVDSFVIADCLRFGRINKEVYLGDYRYKALQNLTRARFFAVQNLVKEKQRFMNVLFKKYSTMTQEKVFSDTFSTTALAVYDEFESAEALANMDLHELTDFIIEKGKNRFPDPDAVAKAIQKAARSSYRLPKTVNDSVNQVLSISITSMKALEVQIKEFDKAIKAQMELLPNVLVSIPGIGPVYSAGIMAEIGDINRFDSQAALAKYAGLAWKQHQSGGFEAEVTRLIPSGNRFLKYYLCEAAFSLVRCDKEYSDFYHLKYKEVNRCQHKRALALTARKFVRLAFRLLKDNRLYCPAK

SEQ ID NO: 362031 - protein, 427 aa, unidentified
MNKTNNGDLNQEFAAFVAIDWADEKHAFTLQAAGQKNKETGTLEQRPEVIGSWVAKLRERFGTQPIAVGVEQSRGALIHALLSHDFLVVFPIHPTTVANFREAFKFSGAKSDPLDTDQILEILTKHLELLKPLAPDTEQTRLLGRLVEDRRKTVDLRTSHIQALQASLKEYFPQALEVLSGNLTSRLAGDFLKKWPSFSAFQQAKPSTVKRFFYGHNVRSPEVMEKVLKVAENSQALTTDRAIVESGARLSQRHAQVIQTLHPIIEGYDQQIQKVFQDHTDAKLFTHLPEAEAALAPRLLVAFGTDRSRYEAAPNVQCLSGIAPVTRSSGKTRIVYARCACPKFLRQSFHEFARLSIAKCQWARNYVDYYSAKGKKYHTIIRALAFKWIRILFRCWKNRMPYDEAKHMEMLRKRGSIFATLHVETNR

SEQ ID NO: 362032 - protein, 350 aa, unidentified
MLIIGCDYHPAFQQIAFMDSTTGDCGERRLEHREEAEKFYRELAAQGMKVRVGMEASGQARWFERLLGELNCELWSGDASVIHAKRVRKQKTDRQDAQLILKLMLKDDFPQIWVPSGENRDLRQLLWHRHRMVQARTRIMNQLQSVAINEGLRCKKRLWRESGREQLEAFRLAPWASRRREDLLKLLDGLNPTIAELTQAIEQEVEKCPAAQQLRTHPGVGPLTALAFVLMIGRADRFQCGKQIASYLGLVPLEDSSGNRRRLGHITKQGNSLLRFLLVEAAQVTARSLPEWRRQYVHLTMRRGRKIAKVAMARKLAVRMYWMMRKEWDFGKLTKFGSHAGKPGTGDGVK

SEQ ID NO: 362033 - protein, 351 aa, unidentified
MSKVTTVGLDIAKHVFHAHGVDDQGRALFSKRISRGKLLDFFAAQPSCTVALEACGGAHHWARQLTQLGHEVRLIPPAYVKPFVKRQKNDAIDAEAICEAAQRPNMRFVAVKSEQQQAAGLVFRTRDLLVRQRAQLINAIRGHLTEYGWIAPKGPSHVAELAHLIEEKRMAGSLPEAARAMFRLMLDQLASLNGRIAVLDKEIARRAREDEVSRRLMTIPGIGPISATAIAALAPPVETFAKGRDFAAWLGLTPVQRSTGGKQKLGATSKMGERTLRRLLIIGSSAVVQQASKRGAAKGTDVGSQTAHVGGGCARQQDGADCLGASCKARGLPSSGRSQRMILADLRSSEM

SEQ ID NO: 362034 - protein, 386 aa, unidentified
MVDGKVTTVVKTFQTTTQELMALSDWLSAEGCTHIAMEATGVYWKPVWHILSDGEFQLVLANAAHVKNLPGRKTDVNDATWLADLMAHGLIRASFVPDEPTQQMRDLLRTRKQFVRERSSHTQRIQKTLEDANIKLDSVISDIVGLSGRRMIEAIIAGQTDTESLTALADRRIHATKAELEAALRGRVTAHHRFMLQLHLDHLDAVNAVIARIDKEVDGQVKPFRVAIEMLTTIPGVSSLAAEVLVSEIGIEMSRFKTEGHLISWAGLCPRNDESAGKRRSNRMKKGAPWLKTTLIQCAWAASRTKGSYLQAQYLRIRSRRGPKKAIGAVAASMLTAAYHMLKDGTLYQDPGASHFDNRDKGKQALRLVNRLQSLGFTVQITSIAA

SEQ ID NO: 362035 - protein, 416 aa, unidentified
MKKNTNSPTNKEPRAKRAKAQRPVQREAKEVLAELVEKLRGKLELKSTSASAAEAGPRGELSPNLDRLTVGLDLGDQWSHFCILGFEGETLSEGQLQTREAEVAEFFQALAPARVVMEVGTHSAWMQEIIAGEGHEVVVANPRLMEGSKRRKRKNDRIDAKKLARLGRVDPQSLHPIRHRSREVRQDLVVLRAREALVAARTELINATRGLVKSMGTRLPKCSSPSFGQKVKDVIPEKVREALLPLVQLADALSDCIQSYDQKIEELGSEKYGHTKLLRQVKGVGPITALAYVLTLENPEHFAKSREVGPYLGLVPKQEDSGESQPQLGISKTGDTMVRKLLVGSAHYILGPFGPDTDLRRYGLRLCERGGKNAKKRAAVAVARKLAVLLHRLWVSGEVYEPLGYAASRAIVQPAA

SEQ ID NO: 362036 - protein, 357 aa, unidentified
MRILALDVGKSKSVAYQVNTRTGVCGFRTVLTRPAVLGRLFARSRPHRLVMEVGPMAGWIGDLARSSGVRQVEVANVAHEAWRWRNVKRKTDRDDAVKLADLSMSGRLPTVHVPAAATRQWRGLIGYRVKLVERRTAVKNRIRALLASAGETMPRGPSGWSQRTLAYLGALSGPLTEVGPQDLWRGELALELDALGRFEEQIGTVEARLETLAAGDRRVGQVQTIPGVGPRLAEHLVALIDDPHRFRSGREVSAYVGLVPRQYQSGETERHGRITRRGNRLARRLLVEVAWQAVRYNPRLRAIYERVHRGSRPRRKVAIVAVARHLAVMAWAMLRDGTTWQAGHGNVPTQAAAGSSR

SEQ ID NO: 362037 - protein, 342 aa, unidentified
MDYYAGIDVSLECSSVCVVDASGKIVREGKVASEPEALISWLRSLGYELSRIGLEAGPLSQWLFAAMRKAGLAVELLETRHVRKAFEAMPVKSDRNDARGIAQLMRLGWFRPVHCKSIGAQEARAVLTARKLVQSKLRDIENHLRGILRGFGLKVGKTTNRSFGTRIRELVANHASLEMIAEALLSIHAVLLREFNTFEKRVRSMARSDAKARLLMSTPAVGPIVALTYASAIDDPARFKSSKQVGAHFGLTPKRHQSGETDYTGRISKIGDGSVRTVLYEAAHVMLTKPVKGCSGLKSWAMRIARRAGMSKAKVALARKLAVIMHRMLVDGKPFNFAVAAA

SEQ ID NO: 362038 - protein, 402 aa, unidentified
MNAVGIDVSKGKSMVAIMRPFGEIVSTPFEIKHTASDIHSLVELINSVEGESRIVMEHTGRYYEVLAHQLSEANLFVSAINPKLIKDFDNDSLRKVKSDKADAVKIARYALDKWQNLKQYNVMDELRNQLKTMNRQFGFYMKHKTAMKNNLIGILDQTYPGVNTYFDSPARSDGSQKWVDFASTYWHVDCVRKVSLNAFIDHYQNWCKRKKYNFSQSKAEEIYGKAKELVPVLPKDAITKLIIKQAVDQLNSASTTVESLRTLMNETASKLPEYPVVMAMKGVGTSLGPQLMAEIGDVSRFTHKSAITAFAGVDPGVNESGTYEQKSVPTSKRGSADLRKTLFQVMDVLIKTHPQDDPVYQFLDKKRAQGKPYYVYMTAGANKFLRIYYGRVKEYLSSLPES

SEQ ID NO: 362039 - protein, 346 aa, unidentified
MPGLASEVDFVVGVDTHRHTHTAAAVDRLGGVVEEITVSADRDGSRELLRFAREKAPGRRCWAIEGTGLYGAGLTRFLLDRDERVVEVERPNRPARRRGKSDELDALCAAREALVMNHVAEPRSPGEREALQSLLVVRRHLVKSKTQAIGLLKAMIVKAPECLRESLGPLSTAEQVRRAARLRKRREASEDASVLVLRSLARRILALDTEARELKKRIEDLVGLLAPQLLAQPGVGPLVAAQVFVVWSHPGRLRSEAAFASLAGVAPIPASSGNTTRHRLNRGGDRQLNAALHVVVLSRLHGHPATRDYAARRTAEGKTPREIKRCLKRYVARDLFKLLESSAKMT

SEQ ID NO: 362040 - protein, 403 aa, unidentified
MNNVAGIDVSKGKSMVSVLRPFGEVVAKPFSVGHTGSELKELADYLKSLDGETRVVMEHTGRYYEPVARFLHDEGVFVSAVNPKLIKDYGNNTLRKVKTDKADSRKIARYGLDNWAELRQHTPMDTIRMQLKTLNRQQSLYTKTKTMMKNNLIALLDQTYPGVNALFDSPVREDGSQKWVDFAMTFWHVDCVRNMSLTAFAERYRKWCKRHGYNFSQSKAVEVHTGAQDLIAMLPKDALTKTMVRQAIDALNAVSASLERLKAEMCTLAAQLPEYPVVMAMHGVGDSLGPQLMAELGDVTRFTHRNAITAFAGVDPGADQSGTHEAKSTRVSKSGAPELRRALFLVMDCLLKTQPQDDPVYRFMDKKRAEGKPYLVYMTAGANKFLRIYYGRVKEYLASLEGN

SEQ ID NO: 362041 - protein, 349 aa, unidentified
MLADEAEFVIGVDTHARSHTLALLDKQQQTRADVEVSACRSGHRRPLRLARLRAPGRRVWALEGTGCYGAGLARFLVGRGERVLEVERPARRERGSRTRLKSDRLDAERAARLLLAGRAGARPRLGEATAALRSLLACREGAIRARTAALNQLRAALLSAPCQLREHLQDQPRAQLLASCARLRPAACSDRERAASALTLQLLARRVQALTREAETLERELTRRVQHAAPALLDQRGVGPISAAVLLCAWSQPGRLRNEAAFARLAGAAPIPASSGKRIRHRLDRGGDRKLNRALHTIALTRRRCDPTTIAYIQRRQREGKTEREAVRCLKRYIARNLYRLLEATATTT

SEQ ID NO: 362042 - protein, 404 aa, unidentified
MFAVAGGSSLVMLGRGLDRLAVESLKHGGRAVVEHTTTYVAFDSSKETLAVAIAEGDLRGEVRSWGKIPNRPEAVRKLVGRLAAKHPKLSFCYEAGPCGYGLYRQILSLGHACMVVAPSLVPTKPGGHIKTDRRDAAMLAALFRAGELQAVWVPDADHEAVRELVRARQTAMQEVRRSRQLLLSFLLRHDRIMPTRHHWTRAHRNWLARQSFPHPAEQFVFEEMIQRIEVACARQERHEDAIRKLLPAWSLAPVVTAIQALRGVAILAAVTLVAEIGDFGRFASPRQLMAWLGLVPKEHSSGHKIARGNITKAGNTRARRVLVEGAWTYRLSARMGEDITQRNAGLPEPIRAAAWKAQVRLCARYRRLQNTGKPQNIVVVAIARELAAFVWSIARMAQPPIVAS

SEQ ID NO: 362043 - protein, 429 aa, unidentified
MQESSSSAPAEGVAAYVGMDWADQRHDVILRAASEPAKVEYRRLPQQPEALMEWVAELQQRFAGKGKILVALEQSRGALIYHLMGYEFLELYPINPSQLASFRQTFSPGGAKDDRPDAELICELLYCHRDRLKAWKPDDELTRKLTFLNEGRRKAVDQRTQLANEIKSQLKVYFPLALEVLDNDCSTALAADLLLQWPTLDSLQKQRAHKLRKFFYAHNCRQEQKLLERLELIKAAKPLTRDLAVIEPTALRVQLLAQQLKSLLPYIARYEKQIAELFDAHPDSFLFRDLPGAGSALGPRLLTAFGTDRERFERSMEISSLSGIGPVRRASGKKSGKHATVHFRSACPKFLRQSFHEFAACSIRYCSWAEACYETQRKRGKGHHAAVRAVAFKWIRILFACWKQRVPYDPQRYQQALQTRGSEYAEITA

SEQ ID NO: 362044 - protein, 416 aa, unidentified
MDNQTLYVGCDVSSDNNYYCFLLGCGATIRKTSLPNNAKGSNQLVDLILEDLEGYDLSKLIFGLEATNNFHFHILNFLALHEKLENYDVILYRINAKLIKNFKDGYPDKSKTDKYDAFIIADKLRFGRLPEPFTPFNEFVSLKRLTRTRFHIIKQLEREMNYFLSNLYIKFSEYKKLPFSNTFGTTSIALVTEFDIEEITQISNEKLIDFLIEKGKNHFTDPKAYAKEIKKIARNCYRIDRSVNKTINLILEVSLSTIKALKESLSRIDIAINREISKFKHTLESIPGIGPVLSAGILAEITDINLFENDSKLAKYAGLTWLHKQSNQYKSEETHMNKSGNKYLRYYFIQAAESVRKNCDEYRDYYNKKYRESTKHKHRRALVLSARKLVRLIFVLLRKNTLYDPSRYLKNRGGGC

SEQ ID NO: 362045 - protein, 327 aa, unidentified
MTQPVLGIDISKATFDVVLLVGEKKIHHQFSNDLEGFKQLDVWLRRNEASKVHACMEATGQYGDKLAAYLYHGGHDVSVVNPARIKAYAGSRLRRNKTDKADAELIAYYCLKENPALWSPPETDFRDLQAMERHLEDQQAMLRQEQNRLESGVETPWVVQDLEDHIRYLKERISETKKAMQELINANARLKRQRDLLVTIPGIGVLTAAKILGEIRDTTQFESARQLAAYAGVTPRHFVSGSSVHKKSRITKTGNINIRRILYMSAISAKHCNQIIAPFCSRLLQKGLTPMQVVCAAIHKLLHLIFGILKSGLPFDPNYLQVSAFTP

SEQ ID NO: 362046 - protein, 413 aa, unidentified
MSRVIGLDVSKHSAEVAVLVPGRETPERRRFPAQPAAIRAFALELGPQDRVALESCTNAFAFHRLLCQHAGQVVVSNPLKTRVIAEAKVKTDKVDAEILARLLAADFLPAVWVPDLATDHLRHLVLHRQGLVTQRTQVKNRIHAILHRNLIAPEMTDLFGKTGRRFLQHVELPEEERRLLDADLRTLDFFTKEIGVAEIGLAKAADQDPDMRRMMTVPGLALTSAVGLKAAIGDIRRFKAASKLVSYFGLNPSVYQSGLKAYNGHISRRGRSHARTICIEVAHQLVKAPGPFHAFFERLRRRKPYNVALTAVARKLVVLVWHMLTRGEDYRYMPPALTRRKLAQVHKLATGEGLARGTTKPAPKPADDERIGLEAEREYRDFIHERFGENGPPVPGHPEPSEAKKRRSRQNSG

SEQ ID NO: 362047 - protein, 401 aa, unidentified
MNQLYAGIDWATKTHAVGVVDDQGGIRARFQVANTGKGFGGLVRRLVRLQVAGVAIERPDGPLVEAMLEAGLRVVVITPRQVKALRSRYAAAGAKSDAADALLLADVLRTDGHRLATLHQDSDATQVLRALSRTRKDLQKARMALCNQLLAQLERCFPGAVGLFADLHSQVAICFLRRYPTSQAAAGLTQAKLAAFLRRIHYPGHTPVAVLLQRLATAPAAKISQAEAAGRAVCVAALLGAIQACHNRERELEAEIIERLEVHADAKVFTSLPKAGHGVRAAALLAEIGDVRSRFPDEEALAALAGVAPVTKQSGTRRQVGFRWACDKKLRNALVDFADDSRHASPWAANLYAQALQRTRRHPHAVRILARAWIRVIWRIWQDHTTYDPSKHRGAVRLLAT

SEQ ID NO: 362048 - protein, 343 aa, unidentified
MQVITIGLDLAKHWFQVHGVDANGQVVVRRRLWRSGVIAYFRSLEPCLVGMEACATAHYWARELTRLGHTVKLMPPAYVKAYVKRNKNDAADAEAICEAVTRPSMRFVPVKDAEQQSVLMLHRARSLLIRQRTMLVNALRARMAEFGIIAPQGLRHVEILTKAIAHQQEGLPELARSILQTIVDQLNGTSDRIREIEGRLARWHRQSRVSRLLATVPGVGIMGASAIAATVADPSVFRSGREFAAWLGMTPRQNSSGGKERLGRTSKRGDKYIRSLLTAGAVAVLRHARNRQTRDGQWVRALLARKPTKLAAVALANKTARIVWAVMRRGDGYRAKQVFEQPA

SEQ ID NO: 362049 - protein, 378 aa, unidentified
MNRIIKIGMDVHTTNYTLCIFEPSFEHDGTVHCITQVKPEVKNIIRVIETFKKKHENEELNIVCGYEAGCLGYSLYHELKEKGIECVILAPTTMKTEKGGRKLKNDYRDAKMIAECLAYGGYSAVHVPTELDNSVKEFIRIRDDIKENLKSIKQQIIAFLTRNGKQFEGKSFWTRKHIDWINTISFSEPLLQDTLKEYMIEYNHLCDRVETLDKQIEEISLKEEYVEKVQQLQCLIGIKTHTALSLIVETSDFNRFKKGNMYSAYLGLIPGDDSSAGHENKLGITKAGNSHLRKLLVEAAQGYTRGKVGFKSKDLKSRQEKCSSEVVAYADRANERLRRKYYRMTLRGKRYNVAKTAIARELACFVWGIMTDHIDLCN

SEQ ID NO: 362050 - protein, 341 aa, unidentified
MNIKRVGIDLAKQVFQVHGVDHQDKVVLRKQLRRNQLLSFFATLPPCLIGMEACGGAHHWARELQKLGHTVKMIAPQFVKPYVKSNKNDANDAEAICEAVGRPTMRFVTIKTIVQQDLQAIHRIRSELVRQRTAKVNQIRGFLAEYGLVVGRQVATLRRALPELLENAENGLSFDFRGLLEDLRQDLIRLDERVAEMDKKVHTLANSMPAAKRLQSIPGIGPISATAILCAVGDGKQFKRGRDLAAWLGLTPRQQSSGGKDRLLGISKRGDSYLRTLLIQGAKSVLKVVNNKTDPRSLWLQNLCGRRHKNIAAVALANKNARIVWALLSNETSYLPEGKPA

SEQ ID NO: 362051 - protein, 338 aa, unidentified
MIVVGLDVHKHSLTAVAVDELGRAVAEQTSAARGEAVVEWARALDGERLWAVEDCRHVTRGLERTLLEAGERLVRVPPRLTAPQRRRGRVRGKSDAIDALAVARAALQEPELDGPRAGEETLRELKLLVDHRDDLVAERRRCQQRLRWHLHELDPTLTVPLGALDRAVWIDRLARQLARRDQSTQVRIARDLLARCRTLTRSIGELDRELHTRTQALAPRLLELAGCGALSAAKLLCEIGPIDRFRTDAQLARHAGVAPLDASSGKHQRHRLDRGGNRQLNCALHRIAVTQGRVHPPARAYLERKQNEGKTRREAIRCLKRQLARTVYTTLKNEPLLT

SEQ ID NO: 362052 - protein, 376 aa, unidentified
MSRVQRFVGLDVHAETIAVAIAEPNGEVRPLGIIPNRLESVRKLVRKLEPVKNVKACYEAGPAGYALYWQLTALGIACEVVAPSLAPVKAGDRVKTDRRDAEKLARCYRAGDLTAVWVPDAAHEALRDLVRAREDAKQDQHRARHRLSKFLLRHGRRPPETVKKSWTQKYLTWIKEQVHFDQPALEATLLDYVYEVDHQAGRIQRLEKAIDEVIQQAPPEMRAVIEALQALRGVAQITAVSVVAELGSLSRFPSPRPLMGYSGLVSSESSSGNRIQRGRITKTGNAHLRRVIVEAAWAYQHRPWVGGALLKRQQGLAPDIKDIAWKAQWRLHTRYQKLAARGKNKNQIVTAVGRELLGFIWAIAVRTEARGSARAA

SEQ ID NO: 362053 - protein, 428 aa, unidentified
MALHSRTLSSADEAETTNGGLLHISSVHGNEQIADGRSHKEHDSRILGFQPTCTFVSFVEETKLQVLVNRGMTTQEKTRCMYVGIDVHKDTHTAVGISPYGEKMFEITVGNYKNDFEMLKEKVEEMKGVLSPYIGLEDVRGYGERLAEYLYQIYPVYHVPSILVDRQRQNATHPEKSDSLDAQGVAKVMIQNINTLLPYTISQEGQKAKQLKEISVDREDLVLERTRLKNQVHTLLYRIYNTEYANKYKDPFSIKALTFWRNAKPKCDPFLLKTMKRKIRRLLDIHREVTDLEKDMKILLDTGEYTIHTASGCGMVLASTIIGEIGDIHRFTSPGALAKYAGTAPRERSSGKKVRHVKSRSGNRRLNCAFHRMALSQISRMGNDRARTYFKKKISEGKSKSQALVCLRRQMVNIIWMMLKHKTVYRNA

SEQ ID NO: 362054 - protein, 329 aa, unidentified
MGQAIGIDIGKEQFDVCVLDEQRQKHQQAFPNTKKGIKALQQWLKQQGVRQAAEAHIALEATGIYGELVAETLYQRGYRVSVINPARIKAYAQSQMQRNKTDKLDAALIADYCRTQEPALWSPPSPEMRELRALTRHLDDLKDEKQRTRNRLEAQRHSQAVARQLQAQIRFLERQIAETEQMIGDHLDQHPDLKEQADLLDSIPGVGLTTAAHFLAEVGDVRRFKDVRELVAFVGLNPMQHQSGKRSATHGISRMGGSRLRAALFMPAMAAKRCNPRLKAWAEALLQRGLTKLQVVVAVMRKLVHLAYGILKSGTRFDPHHGTSLAFPA

SEQ ID NO: 362055 - protein, 322 aa, unidentified
MQSNSFLGVDVSKTELVIADAAAPRQTIRIANRKRPVRKWLRALPSGPVIGVESTGSFHELLVDLAHQQGVTVYLINPRALFHYSQAVNRGRKTDPLDADLIARYLVSEYERLRPYVPPTPEERTLFRLYRQRAQVVRKKVDLGQSLRELDAVCRPALETALAGLQQLVEALEQRIKQLISQDAERAALAKRLRTMPGFGPLTSAHLAVLLPRLRPHSADAVVGYLGLDLQPRDSGQKLGLRRLSKQGPSESRRLLYLAAQTATRTSPEWQAYYAACLKKGRAPTEAINIVARRLLRIAYALYRQGTVYEAEYQRKILASAT

SEQ ID NO: 362056 - protein, 372 aa, unidentified
MSELIRIGIDTSKSVFVLHGVDEKEMPVLRKKLRRRDVVGFLSKLTPTRIGIEACGAAHYWGRTIVALGHEAVLLPPQLVKPYIARNKNDRADAEGICEAMSRPRMRFVPIKTAEQQAAQMLIGLRDRLVRQRTQLSNAIRGYAAEFGLVAAKGLDKIEPLLTRVASDAALPDLAKELFALHGKEYAQLMARLRQVEAKLMAWHRHNELSRRLAAIPAIGPIGACALAIKVTDPRVFSCGRDFAAWIGLTPKDHSTAGKQRLGVITRAGDETLRSLMVVGATSVIQQARRGRASPWLLDLLKRKPAKLAAVALANKTARIAWKLMVSGERYNPHHANPSRSTPSSPPAGSVAPCSRRQGRFAPPSAVPCGQP

SEQ ID NO: 362057 - protein, 418 aa, unidentified
MKKDNNSRKKSEPTSKRAKTRGPMRRDTKEVLAELVGKLKEKLDPKKVAATSAGEEHPRGELRPNLDRLTVGVDLGDQWSHYCILGLEGETLAEGQLRTKQEDIAEFFQALNAARVVFEVGTHSPWVQEVICGCGHEVLVANPRLMEGSKRRKRKNDRIDANKLARLGRVDPQSLHPMQHRSREVRQDLVVLRARDALVAARTELINATRGLVKSMGSRLPKCSSPSFAQKVEETVPIELRDALMPLVRMAAALSDCIQGYDEKIEKLGREKYEHTALLRQVKGVGPITSLAYVLTLENPDRFVKSRDVGPYLGLVPKQEDSGESQPQLGISKAGDTMMRRLLVGSAHYILGPFGPDTDLRRYGLRLCERGGKNAKKRAAVAVARKLAVLLHCLWVSGEVYEPLRQGMSATMTPAAAA

SEQ ID NO: 362058 - protein, 348 aa, unidentified
MDHIIRIGMDTSKHVFQLHGVNAAEEPVLRRKLRRNDMVVFFERLAPTIIAIEAAGASHHWARLLRSFGHEVKLIAPQLVKPYVKRGKNDAADAEALCEAMSRPTMRFVPVKTAERQAALMLLGLRDRLVRNRTQLANAIRGYAAEFGLAAAKGIAHLAPLLARIQSDESLPSLARELFAAHAQEYAQLQAQIDEVEGKLMAWHKTNPGSRRLAQIPGIGPIGAAMLIMKTPAPETFRSGRQFAAWIGLTPKDHSTAGKVRLGVITRAGDEGLRSALVVGATAVIRHLRNGKGRSMLSAWVEQLLKRKPPKLAAVALANKLARIAWKLMVTGETYTAKPRPVASAGVA

SEQ ID NO: 362059 - protein, 412 aa, unidentified
MDSIVERCAGLDVGKRQVQACVRVPDPGGGRRVEIKTFPTFTSGLELLADWLDREGVTQVVMEATGQYWKPVWYVLEDRAFELMLVNARHVKILPGRKTDVADAAWLAELLEHGLLRGSFVPPPPIRELRDLTRYRKKLVQARTAETQRVTKVLEDAGIKLDSVASDVLGVSGRAMIAALIDGERDPDVLAELARGRLRVKLPTLREALRGRFRDHHAVMLRLGLEHLAQLEHAIGELDDRIDKVIPPFARARDHLDSIPGVARRAAECLIAEIGVDMTQFPTAGHLASWACMCPGNNITGGKRRSGRTRIGNPALRDILTECAWAAARTRDTYLSAQYWRLARRIGNKKAAIAVGHSILVIAWHLLTNDTDYDELGGDYFLRRHDNPTHQRDRHVKALRELGYQVTLAKAG

SEQ ID NO: 362060 - protein, 341 aa, unidentified
MEQFIGLDVSMKDTFVSVREGGKRVWRGKCPSDPALIAQVIRQRAPDAQRVVFETGPLSVWFYHALIEEGLPAICIDARHAKAVLDMAPNKTDANDADGLAHLAEVGYYREVRVKGFESMLTRTLVGARGQLIKAATQFSNHIRGVMKTFGLPVAKGGGRVFEGHVRRLLESNAVLEQIILPLLDAWRGLRNQAAELSRQLVAAARVSEQCQLLCTIPGVGAVTASAFVAAIEEPGNFRNSRAVGAWIGLTTRRYQSGEVDFDGHISRRGDNHLRSLLYEAATVILTRASADSALRSWGLKLRERLGFKRAAVAVARKLAVIMHAMLKTGECFDRVIAAPV

SEQ ID NO: 362061 - protein, 411 aa, unidentified
MGQATRVWHLRRFSRQPTRRSMSQPNDSNKSVIPLEQDGTMIAVIEMGQASWLVAGIVPGLERQPLKKLGSDEQALFQLLRRWRNEAVQAGRTIKRLVVAYEAGRDGFWLARWLQARDIEAYVIHPNSVAVSREHRRAKTDRLDTELLKRAFLGWLRGEAGHCSMAAIPTIEEEDARRPNRERENLVGERTRIVNRMKATLARFGIRSFKFTLRHVDERLNDLRTAEAASLPANTHAELRRDIARLRVVGDQIKEIEQQRLQRIEQAAPSEKGPHAMTRLLARVIGIGVETADMLVNEILSRQLRDRKAVARYAGLTGSPDESGKRRREKGLSRAGNARVRRGMIQLAWRFLMFQKDSALAQWYRARTADVRGGTRKTMIVALARKLLIALWRMVTTGEIPEGISLRPAVA

SEQ ID NO: 362062 - protein, 493 aa, unidentified
MGACELESGDVALAAIPIRKMTIGIAQTLLLIIDWRIAMPKRTTGERPELKPVNVGAAAIDIGSKMHMAAVNPASTDVPVRSFGTFTQDLHDLADWFKACGMTSVAMESTGVYWIPVYEILEQRGFEVILVNARYAKNVPGRKTDVSDAAWLRQLHSYGLLRGSFRPDAEIATLRAYLRQRERLVEYAAAHIQHMQKALMEMNLQLHHVVSDITGATGMRIIRAIVAGERNPDVLATYRDVRCHSSIETIRAALVGNDRHEHIFALTQSLELYDVYQAKMLDCDRKLEVLIAALNNKGAKPVGKLSKPRIKTKQVNTPTFDVRSALYGLLGVDLTEIHGLGPSLALKLVGECGTDLRAWPSAKHFTSWLCLAPGNKISGGKVLSSRTRRSSSRAAALLRLAATTVGRSDTALGAFYRRLSSRAGKSKAVTATARKIAVLFYNTLRHGMSYRDPGADHYEQQYRNRVLANLQRRAKSLGFVLQAIPGDADPAVS

SEQ ID NO: 362063 - protein, 344 aa, unidentified
MTYYAGLDVSLRTVNVCVIDEQGERVAETKLASDVQDIGAYLDDLNMEIESVGLEAGTLTQYLTYGLQSAGFEVICMEARQVKAALSAMRNKTDKHDARGIAQLLRSGWYSRVHVKSMESHHIRMLLASRKAVLSKCIDLENEIRGLFKVFGIKLPPNLGHGAFDDTVRDIIEADETLSHALLPMLEARLVLYHTFRVLDNRTRKLAHDDPVCQRLMSAPGVGFVTALTFKAGVDDPSRFKRSRTVAAHFGLTPRRFQSGELDIDGHISKCGDATVRCALYTAANAMLTRSSRWSSLKVWGMNLAKTRGHRKAVIAVARKLAVILHRMWIDDTQFRWGTEGARS

SEQ ID NO: 362064 - protein, 366 aa, unidentified
MGWMAPLRHLSAKLLSDRISSEWEPSMGEVTTIGLDLAKHVFQVHGVDAEGATVLRKQLRRAQVLAFFSRLPPCLVGLEACATAHYWARELRALGHEVRLMPAQYVKAYIKRNKHDAADAEAICEAVQRPTMRFVPVKTAEQQATALLHRGREQLVRQRTMLVNALRAHLAEFGIVAAQGLRNVGELIAIVRDDGDTRLPDVARQVLQVLANQIEQIETAVAALERQLLAWHKTNPVSQRLASIPGIGPIIATAIATTVADPKVFRSGREFAAWLGLVPRQNSTGGKTRLGGITKRGNRYLRRLLINGASANLLRSKATKADPWVIGLRRRRPPLVVAVALANKTARIAWAVMLREKEYQPRAVAA

SEQ ID NO: 362065 - protein, 339 aa, unidentified
MKLYVAIDLHSNNNVVVALDETDKVLLEKRLPNDLAVVLEHLGPYKDDVQAIAVESTYNWYWLVDGLMKAGYEVKLVNTLAVKTYDGLKYTGDEHDARHLAHLLRLGLLPTGHIYPRQERAARDLLRKRAQLVRNRTMHILSVQNLVIRNSGKRITSDAIRKLNDEALTGICGGDAALIMAIKSSLAVLCCLDDQIKTLERAALARAKLRPEFKVLRSISGVGEILGMTIMYEAGAIERFTEVGQFASYARCVESARWSNGKKKGEGNRKNGNKYLSWAFVEAAHYTVRHNERIRAYYQRKKARTNGAVAVKAVAHKLARACYHMIKDRSAFDEALAFA

SEQ ID NO: 362066 - protein, 463 aa, unidentified
MKHKKASGKGARRSRPLLERVNPNAAGIDCGSEMHYVAVPTDRDPEPVRCFKTFTGDLHRLADWVVSCGVKTVAMEATGVYWIPVYEILEARGLEVLLVNARHVKNVPGRKSDVSDCEWLQELHSVGLLRGSFRPVAEIAALRSYVRHRETLIESAATTINRMQKALVQMNVQLHVVISDITGATGQRILRDIVNGQTDPQHLAKHRDGRCQASEAEIAAALTGNYRPEHLFVLKQNLELYDEFQRQIKACDTQIEDHLKTLAAKAAPPQAPLPAARTRRKARSNEPKFDVRTPLHQLSGVDLSQIDGIGPYNSLRLISEIGTDMSRWPTEDHFASWVTLAPHNKITGGRLISSRTQPSANRAADILRVAAMSVGYTQTALGAFYRRLASRIGKAKANTATARKLAILVYRVLKGEIVYKDPGADAYNARHRETVLRRLRRQAAVLGFGLVNGQTGEILEGVS

SEQ ID NO: 362067 - protein, 456 aa, unidentified
MPRGQRRTTRAVTTPVLHPHAAGIDIGATELYVCVPLDRDPQPIRRFGTFTEDLLALAAWLAQCGVTSVAMESTGVYWIPLYQILEERQFEVCLVNARHVKNVPGRKSDVQDCQWLQYLHSVGLLRGSFRPPETVCAVRSLLRHRDSLVQLAATHTQHMQKALTQMNLQLHHVLSDITGVTGLAILDAILAGERDPQELARHRDPRIKASPETIAKALVGDYRLEHLFTLRQSLASYRHYQQLIGECDGEVQALLGDFASQIDPAVHPLPPSTSARRTPHGTAPRFDLRAELYRVLGTDLTQVPGLQTPTVHTLFAELGADLSPFPSGDHFASWLGLCPDNRISGGKVLSVKTRRVKHRVAQALRLAAQSLSRSQSVLGGFFRRMRAKLGAPKAITATAHKLARIVYHLLTTRQPYDESRLAAVEADHRRRTESRLRTQARALGFQLVPVTEQSVS

SEQ ID NO: 362068 - protein, 362 aa, unidentified
MKADNNTTSFFEKVLLFIGIDVHKAKWVVTVRTYDLELKTFSMIPSAEELEKFLLKNYLGADYRIVYECCFSGFWIYDYFSKKGYKIIVTPTNRIYKDGSTIKTDKIDSRKLALQLSRELLREVLVPAKRIREYKYIFRIYDKQKMRQGQILRQIKAILEQKNHPLKWARWNKGLLEKLKVIKFDDKLFDLKFGNLLKEYEYLVSQIKDSEKIIELIKESASGGDELGKRINILEKINGIGIISSVRMCLYLFDKKDRFESSEKLNHYLGLKPSERSSGDKIVRGRSGMCGNRQLRSIIIQLAWMTVRKDGSLLEKFDKVYKASGSKQKAIVAVARKLMTKIFAAIQKEEDYRINVRTVSAA

SEQ ID NO: 362069 - protein, 337 aa, unidentified
MRMVGCDFHPSFQQVAILDTETGEIEEKSLTHASREAEQFYGSIARPALVGMEAVGNSQWFVGLLERLGHEVWIGDAAQIRASYVRQQKTDRRDAGHILKLLIEGRFPRIWTPTTEMRDHRQLLVHRHRLVPLRTRVKNELQHLALNQGLQWKRKLWTTEGRVKLETLPLEKWTAWRRHDLLQLLGMLEGQIELLNQAVAEVAETYPAVRLLMTQPGVGPITALAFVLTIGDVGRFSRSKQVSSYVGLIPREHSSGGKQRMGSISKQGNRFLRTLLVEAAQSVVRFDPEFRREYLHRCHQKHRAVAKVAAARKLAVRLFWMLRTQRPYPEVLAPRAA

SEQ ID NO: 362070 - protein, 356 aa, unidentified
MTIVAHAHPFVIGVDAHARNHAVAVLACPTGEVVDEAQFPATVAGLQRAVSWVARRTGGDLDVLWVIEGVGTYGARLARVANDTGYAVAEAGRMNARANRGVGKSDPLDARRIAQSVLAVDEGMLRRPRADDGVRAAVRVLIASRDHLSAERTSAVNALTALIRVADLRIDARRPLTAAQITAMAAWRGRDEDLATAVARREAVRLAKRVIAADREIAANTKQLTDLLNASPARVLLDQPGIGPVTAAVTLAAWSHPGRVRSEAAFASLAGVNPIPASSGNTVRHRINRGGDRRLNRALHMATVTRIRMDPRTRAYVEKRTAEGRSLREIRRCLKRYLARQIYRQLNAAEIALNPT

SEQ ID NO: 362071 - protein, 415 aa, unidentified
MQHVSKFKKFTAKTLIAAVDFSKSKHSGYFTTYTGEEIAPFEFSNTLKGFEKFWDKLQKFKRKCELEDVVVSFESTGSYGLPFIHYIKNKGVRMLQVNPKHTKRAKEITDNSPNKNDQKDPRVIANLILFKNGLTVNIPTGQISELRNLVNCRETLLVEQNKLNNQLESTLAIYFPELLTFFKSLLTKTALYILNHYPTPYDIQKADPDNLPRELKKVSKGRVAEERTNKLINMAYQSIGIKEGRESYKTIIKYYLQQIDLINEQKKQVEKQIENILESIPQGKLLLTVKGLGRISAAVILSEVIDFNSFRTIREINKYTGYNLYEISSGKYFGKRRIAKRGRALLRKTLFFASLNMIKEGGIFHEQYQRHIEKGMPKMKALIAISRKLLRIIFAMFRDNREFEIQKIKTIKTAA

SEQ ID NO: 362072 - protein, 339 aa, unidentified
MSELATVGIDLAKSVFQIHGVDESGQVLVRRQLRRGQLLAFFQKRPRCLIGMEACAGSHDWGRRLQEMGHDVRLMPPSYVKPYVKRQKNDGNDAEAICTAVRQPHIPLVPKKSVEQQDIQALHRARQRLVNHRTALVSQMRGLLLDRGIAFAKSITRVRRMIPEILARADSGLSTMARETIAELWDFFCDLERRIEHFDKKIEAVFKSSEPCQRVARIKGVGPKTATAIVAAVGDGSDFRNGRHMAAWLGLVPRQFSSGDKAVLMGISKRGSQHLRSLLVHGARAVVRTAPNKNDPISQWANQLRERRGFNRATVAIANKNARIIWAVLRTGDQYRAAA

SEQ ID NO: 362073 - protein, 366 aa, unidentified
MKKISTVVLEGMQIFKENQLTIGLDLGDRISRCCILDEAGQIILEQELPTTAKGIEQVFSKIPRSRIALETGTHSPWISRQLGQYGHEVIVAHARNVRLISESSRKDDRLDARTLGRLARIDPTLLSPVRHRSAKAQMHLTVIRARAVLVSARTALVNATRGLTKSNGQRLPQCGTEQIHREIAKGLSQELRDALDPLLREIESLNERIAECDTRIEQIAREMYPEVARLKQVKGVGPLIALTYVLTLDDPYRFRRSRDVGCFLGLRPGRRNSGRSEPQLHISKEGDRYLRTLLVQGAHYVMGPFGQDSDLRRWGLKLAERGGKNAKKRAVVAVARKLAVLLHKLWVSKEIYEPLRNNRNAMAQVA

SEQ ID NO: 362074 - protein, 321 aa, unidentified
MPSFGIDVCKVTFVVAYSSVKTNKTRTFKNTVNGVHEFVQTISASEHNCVLEATGNYSALLVYLLSEAGITISLENPLKIKNFARVMLTVTKTDEIDARLIALYGEKMQPAPYKLRSDAILVLKQKRTVLRQLKKQLVATRNLKGSMEVLPFFDPKCKKTIEKTITFLEKQIKEMEEELASLAQGEYKKQMDLLTSIKGIGVTLAAPLIVATGRFSYFDNAKQLTRYLGLSPTYQQSGTSVNVKGHINRNGDSSLRSQLYVAAFSSLRCNTECKACFDRLRSNGKPGKVVVIAVANKLVRQAFAVVTQGKPYVDGFKSEKP

SEQ ID NO: 362075 - protein, 430 aa, unidentified
MKLTQTHKQNQRIERISENTLVVGVDIAKNKHIARAFNYRGIELGNRCVFTNDLTGMKALLDWIGRLKDEHGLTDVLLGVEPTGHYWFPMHHYLKRQGIPVVLVNPHHVKKSKELDDNSPTKNDTKDARVVGKLVLEGRYTEPQLPEGVYAELRVLMNVREYLNKQLNRIKGKIHNWLDRYFPEYLQVFKEWEGKASLLTLRQFPLPQDVVDAGEERIVAAWKQEVQRAVGPKRARLLVQTAKDSIGLQEGFQAARCELSMLLEQYDLLTRQMEELMEQVAKELDAIPGAQAILSMPCMGVATVAGIYAEIGDLHGYRHPQQIIRHAGLNLKENSSGLHQGRTLITKRGRSRLRRILYQATLILVARDPAFKALHNNFTTRRENPLKKKQSLIALCGKLVRILFKLGTKEQHYDPSKVLGAYREAQLQTA

SEQ ID NO: 362076 - protein, 342 aa, unidentified
MTQPAPARITVGVDTHAEVHVAVANDSFGRRLDAISVPTTPAGYGELLGWARRLGPINAWGVEGTGSFGAGLTRFLHRHGQVVVEVNRPDRQTRRRRGKSDPLDAEAAARAVQAQQGSVPKAADGQVEMIRSLRVARATAIKARTQAINALKGLLVTAPDELREQLRTLSAVRLVQTAAELEPGPVTTPAAAARLGVRTLGRRYQALSAELTILDTELDRLTVTAAPKLLALFGVGSDSAGALLVAAGDNPDRLRSNACFSMLCGASPIQASSGKTQRHRLNRGGDRQANAALYRIVIARLRHDQQTKDYLDRRIREGKSKKEAIRCLKRYVAREVFAALQP

SEQ ID NO: 362077 - protein, 309 aa, unidentified
MENVVGIDVSKDRLDVHVLASGESFVVANDHDGLDGLCARLLKDGADIVALEATGGYEMLCVAALSGAGLVVVVVNPAQVRAYAHALGRRAKTDPIDAAVIARFAAATKPQIRPLRDAESQALSALVSRRRQIVSMITAEEQRLRMALAKETQKSIRRLLSALRRELDSLNGEIDVHIRKSPLWRVRETLLTSVPGVGRITACTLLAEMPELGSLDRRQIAALAGLAPWTRQSGQWRGRSFIGGGRAVVRTALFMAALVACRHNPALKAFRNRLVEAGKTKMAATVAAMRKLLTILNAIIRDNKTWQNA

SEQ ID NO: 362078 - protein, 344 aa, unidentified
MQIAVLGIDLGKNSCSVVGLDSTGAVIKRRRMRPESIAAFTEKLPACIVAMEACCGAHHLGRMMAGQGHQVRLMSPEYVRPYVKAQKNDDRDAEAIAEAATRPTMRFVELKSESQLDVQTLHRARDRLVGERTALINQLRAVLLERGVTIPQGRRKLEQHLGAIAASDDDHSLSPRIRRLIDDVRAEWVELDRRIATFDNEFAAYARSDSDARRLATIPGIGVLNATALLAAIGDGRTFARGRDLAAWLGLVPRQVTTGGKPRLVGITKRGNKYLRKLLIHGARAALPSLATSATPLGGWLRALMQRVHKNAAVVALANKLARIVWVVLRRGEEFNAAAVTAMA

SEQ ID NO: 362079 - protein, 411 aa, unidentified
MRLFVGDDWAEDHHDVEVMDEAGKVLAKRRLPEGVAGIAQLHELIGRHVPGDAEDAEVVIGIETDRGPWVAALVAAGYVVFPVNPLQASRYRERHGVSGAKSDQGDSHMLADMVRTDSHQLRPAAGDSPEAGGIKVVARTHKTLIWERTRGVQRLRYQLREYFPAALEAFEDLDARDTLELLGKAPDPARAAKLTRAQVAAALKRARRRDIAGKTDAILAALRGEHLGQPAALTAAYAATARSLVAVITTLNEQVKILEGQVEDHFGRHPDAEIYQSQPGLGAILGARVLGEFGDDPHRYAGAKSRKNYGGTSPITRASGKKKVVAARFVHNDRLLDALMSWAFSSLNASPGARAFYDEQRAKGLEHNDALRRLANRLVGILHGCLKTRTLYDEATAWGHRENLPQSSVAA

SEQ ID NO: 362080 - protein, 376 aa, unidentified
MREKLRFLGLDVHAETIAVAVAEANGETRSLGTIANREDSIRKFIKKLGPAEQLRACYEAGPTGFVLYWQLTQLGVECAVVAPSLVPKKAGDRVKTDRRDALKLARSHRSGDLTAVWVPDEDSEALRDLVRQREAAKQDQLRARHRLTKFLLRTGRRPTLGLKAWTERYMAWLEQIRYTQPAQQATLVDCLNEVEHMSARVKRLEEAILEVVKLAPQSMQEVIRGLQALRGVAHISSVTIAAELGNISSRFESARKLMGYCGLFPSEDSSGKRIRRGGITKAGNAHLRRIVVESAWSYRHLPRVGAKLRKRQQGVPAEITEIAWKAQNRLHKRYMKLTMAGKDQRKIMTAVGRELLGFIWAIGIKAEAACQQQLAA

SEQ ID NO: 362081 - protein, 367 aa, unidentified
MRVSVGVDLHKGQFTVYWRRGEDPLGRFERCRTNELGYRWFEGQLKKLREEGQEVRVAVESTGNTRYFKRRVEAIGVAVVVINTMKFKVVSESVKKTDRHDAATIAEFLEKDMLPEARLCSTESEELRRVLRTRTVLVRSVVAVKNQVHGLLLSLGIEAKRGSLQSQIGRRRVLNVLAEHGLAGQAVEPLLETIDRLEAEVKKLERILEQKVQGDRAVELLKTIPGAGIITAATIRAYVDDIGRFVGYKQFSAYAGLVPWVQSSNTTERYGSITKRGPCELRTALVQVVLGMVRNKRTTGGYRIMGRYAAMKKEKGSGKAIIATARKLSKIVWYMLRTEAPFDPQRMKDPGVRKIAEEMRATALPAA

SEQ ID NO: 362082 - protein, 391 aa, unidentified
MDKAWAGVDAGKEFHWAHVLDASGRELLSRKVENDEAQLLKLIDEALALAEEVIWALDQPGGGAALLLALLWERNQRVLYVPGLTVDRARDAYRGESKTDARDAHVIADQARMRPDLGELKPGEAEIAELQLLLARRRDLITDQSRTITRLRETLVSLFPALERALDLNSKGPLTLLTHYQTPAQLRRAGHKRIATYLRNRSVKGSNKVAHKALAAAKAQSVSLPAQEVASGIVADLAAEVLSLKGRIESIDEEIGERFFARPEARILTSLPGMGLILGAEFVVAVGDVSAFESADRLAAYAGLVPATRDSGKRVGNRRRMRGGNKTLKRVFYQSAFSSLRGCAESKAFYERKRAEGKRHTQALIALARRRVNVLWAMLRDGTTFETRSAA

SEQ ID NO: 362083 - protein, 402 aa, unidentified
MNAVGIDVSKSKSMVAIMRPFGEIVSTPFEIKHTASDIHSLVELINSVEGESRIVMEHTGRYYEVLAHQLSEANLFVSAINPKLIKDFDNDSLRKVKSDKADSVKIARYALDKWQNLKQYNVMDELRNQLKTMNRQFGFYMKHKTAMKNNLIGILDQTYPGVNTYFDSPARSDGSQKWVDFASTYWHVDCVRKMSLNAFIDHYQNWCKRKKYNFSQSKAEEIYGKAKELVPVLPKDAITKLIIKQAVDQLNSASTTVESLRTLMNETASKLPEYPVVMAMKGVGTSLGPQLMAEIGDVSRFTHKSAITAFAGVDPGVNESGTYEQKSVPTSKRGSSDLRKTLFQVMDVLIKTHPQDDPVYQFLDKKRAQGKPYYVYMTAGANKFLRIYYGRVKEYLSSLPES

SEQ ID NO: 362084 - protein, 254 aa, unidentified
MNRFEEEKGLLRFDNTKDGIQEFVAWLQTIEVKTDQMILGIEGGAGMQHELLRQLTERYPHVFEVNPVYTKQRRAFGTRADKSDPFDAKLIAEVLTKKIGALPRITKREVSAQKLILKKLVWFYEEVTLQGARKKTQIKQTKAQYELCSNPSEKRILGEILKDQNRTLALIRKQQNKLEKRLKDLLKTAGSGNLVTIPGIDTILAGKIIAHAGGIERFPTIDKFIKYAGIAPTEKSSGKSRRYIKNTKGNRKLR

SEQ ID NO: 362085 - protein, 427 aa, unidentified
MSEVRSTQTEPEFAAFIGIDWADQKHIWSLQTANSEQRESGELEHTPEAVESWVAHLYQRFAQRPIAVAVEQSRGALVFMLSKYEPFHLFPVPAQMAASMRQALYPSGAKDDPRDADLLLDLLVQHRNKLRRLSPDSEATRRVQNLVEERRKLVDEKTAQINRLTDHLKVYFPQVLEWFGRLDTELVCALLVRWPALEELQKASPASVRAFFRKHRCRDRERIEHRMEAILRALPAIQDRAVIEAKSAVVKVIVQLVRILVEGIEDLDGQIEEAAAAHPDFFIFNSLPGAGPVMAPRLLAAFGSQRERYRSAREIQSFSGIAPVTESSGKRKWVHFRWACPKFLRQSFHEWAGHSIVQSEWARVYYHQQRSKGNTHHAAVRALAFKWIRIVFRCWQDGVAYDENTYMAALVKRGSPLGAGVATGKTL

SEQ ID NO: 362086 - protein, 412 aa, unidentified
MFCGIDWAEDHHDVALVDADGALVAKRRIDDSADGFAELLAMLADAGDTATDLIPVAIETPRGLLVAGLRQTGRRVYSINPMAVARYRERHSVSRKKSDHVDAMTLANILRTDAHAHRPLPADSELVQAIAVLSRATQDAIWRRSRATQELRAVLREYYPRFLAAFAKGGATNLASAEARVVLALAPTPAAAAKVTKARIAAALRRAGRQRGIDALAAQVLEDLRKPQLRQPRVVEEAFGRQALALLATLNAECASADHLTEATTTAFQQHPHYAIITSFPGLADLSGARVLGEIGDDRARFTDARSLNAYAGSAPVTRASGRSISITRRTVKNDRLNATGFVWAFASIGRAGAPRDHYHRRRARGDRHAAALRHLFNRFLGQLHHCLETGQTYDPAKAFGPALDPPTGAAT

SEQ ID NO: 362087 - protein, 338 aa, unidentified
MAPRRPCPRNPNGHQGSTARIQRNRVMDKAPTFVGIDVSKRRLDIHSRPSGESFTIGHDDEGVAALVERLAALAPTLVVLEATGGLEVRLAAALAAAGLPVAVVNPRRVRAFARATGRLAKTDRLDAATIARFAEAVRPPVRPLPDEATRHLGALVARRRQLLEMLVAERNRRHAADPALHEGIDAHLRWLGEALAGIERDLDAAVRESAAWRAKEELLRSVPGVGPVSARTLLAELPELGSLTRRQAAALVGVAPFSRDSGKMRGKRAIWGGRAALRACLYMAAVAAVRGSNPAIAGFYERLRQAGKPSKLALTACMRKLVVTLNAMLRAGTAWKQA

SEQ ID NO: 362088 - protein, 350 aa, unidentified
MLIVGCDYHPGSQQIAYVDSETGEFQEQRLAHREEAEKFYRDLAAQGMKVRVGMEASGHARWLERLLAELNIELWMGDAAKIRAKRVRKKKTDREDARHILKLMLKDDFPKIWVPSWENRDLRQLLWHRHRMVQMRTRIMNQLQAVALNEGLRCKKRLWTKHGRAQLESIRLAPWASRRRRDLLELLDRLNPTISELTQRIEQQVEQFPVAQRLMTHPGVGALTALAFVLIIGEAERFECGKQIAAYLGLVPEEDSSGESRRLGHISKQGSGLMRFFLVEAAQVTVRSDAEWRNKFLHLAMRRGRKIAKVAMARRLAVRLYWMWRQQWDYPQLKKFGPHAGQPGTGVGVQ

SEQ ID NO: 362089 - protein, 343 aa, unidentified
MNKLNVIGVDLAKNVIQVSVLSPSNRELRNSALSRRKFSEFLGRQRPSLVAFEACATSHYWARVAQRHGHEVKIIPAKAVFPFRQGHKTDENDALAVAEAARRPNVKLAPLKTVEQQGMQAIQRSRELLVHERVALSNHLRGLLMEFGIVIPQGFASLYRRLPEILEDGENELPDLYRPTLSLLYGRLCDLREDLERLNSEIEALVQNNPMCRRLLALEGIGPIGSVLLYATLGTGEAFANGRQFSAYLGLTPKQFSSGGKVNLVGISKRVANKRLRAVLIQGARAYVYHMKEPKTAKDRWLWAIVERSGKCKAAVALANKNVRTAWAMLTQNTEYQRYPLAA

SEQ ID NO: 362090 - protein, 357 aa, unidentified
MVSKKISVKSKKNNSCSLAENESYDHYIALDWSEKNMAMARMGKKDTDPTVIDVPSNLKEVKLYLSKLQGKKIITIEETTTSQWLYVELYDYVERILICDPYRNRLLTDGPKTDRIDAGKLCKLLKHGMMKEVYHSTNEMYELRKLVSYYDDEVRAGVRLLNQKSALYRAENKSWKKKEELEGSRVNKFIVAQLDEKIESYQEKKKKYEEEFEKISKKTKVLRNLKSIPGLGPISSVTILSIVIDGRRFKSANHYLSYCGLVKHEKISGGRSYGRRLPRYSRRLKSVYVSAAVRVASTENPLRDYYEYLLNEKKLPVYNAKNALARYIAKISLGIIKSGEKYKPYKWRESKKGREAA

SEQ ID NO: 362091 - protein, 362 aa, unidentified
MKKDNRFRVANTSKMTIGIDLGDRYSYFYTLDAAGENTESGRVQTTRSALEKRFRGGEGARVVIEAGTHSPWVSRLLTECGHEVLVANPRKLALITKNERKDDPVDAELLARLGRVEPQLLSPIAHRGAEAQADLAVIRARDAVVAARTQLVNHVRGAVKSWGSRMPRCSPRSFAQKGESEVPEPLRGALQPLLEVIEGMTEQIKGYDRQIEEACRENYPETELLRQVGGVGAVTSLAFVLTLEAANRFGRSRSVGGFLGLHPGRDKSGAQDPELRITKAGDQLLRRLLVGSAQYILGPFGPDCDLRRWGLKLASRGRKNAKKRAVVAVARKLAVLLHRLWAGGEVYEPLRLAAPTALSTPA

SEQ ID NO: 362092 - protein, 328 aa, unidentified
MTTNVSELIFVGVDMAKAKFDVAMDDKSTTQEMTNDQAGIAQMLKMLTPLKERVAVVLMEATGGLERALATALCAAGYSVMVANPRQARDFAKSLGYLAKTDSLDARVLSAFGRMLYGSSRRDKLLMKPTTPQQDLLVALNTRRTQLVTMRVAESNRLGGAHASQHKSIKAIITALNKQIDAIDKKIDKNLDDHMRDKLDLLKDLKGLGPVTQAVLMGSLPELGSLSNREIAKLVGVAPLNRDSGKSKGKRTTWGGRSDVRATLYMAVLSAKRFNPHIKAFYERLIAAGKPPKVALTACMHKLLAIINAVLRSGKPYREDYASTTAAT

SEQ ID NO: 362093 - protein, 381 aa, unidentified
MAIYCTYFGIDSHLRTTTICALTPEDGELRTRTFKGNDYGEMAAWMADFPQPSHGVYESGCTGFVPARMLTCGDTLVEPVASSKLPSSADSRSRKNDRRDAERLARLALAGEVSPVWVPPEQVEGLRELAQAMDDLACVREAARQRVNAILCRHGISWDERTPTGRLKKRWGQHFWNWLRSIDLGDAGSQAAYLAALSAAESAEVAYDELRARAEGIAKASDLGPVIDALMCVKGVGLASALAFAAEVGDFSRFASGRKVTAYFGLAPSERSSAESRRLGRISRNGCALVRKLLVEGAWVLARGNPAHRKRGGASVPLAIREHARACSGRLLERRRGLIARGLMPCKANTATAAEMARMLLYIGRDAQEAAASATEVARAA

SEQ ID NO: 362094 - protein, 348 aa, unidentified
MAHFVGLDVSVKETSVCVVDDAGKVIFEQKVLTEPADIIALLTSLGVTYGRIGIEAGPLSQWLVNALTAADLPVICVETRHMKALLTAQQINKTDRNDARGIAQMMRVGLFKPVHVKMLVAQQQRLLLTNRKLLQRKLLDLESELRGTLRNFGLKVGVVSGGRYEARVHELVAGFPGLAAITEPLLNVRRVMRQQFAVLHKMLLDTVRGDQVCRRLMTAPGVGAVVALTYRATIDQPQRFVHSRAVGAHIGLTPKRYQSGEVDYDGRVSKCGDALLRTMLYEAAHSLLIQSRKWSWLKAWGMRVAQRRGIRRAIVAVARRLAVVLHRMWVDGSEFRWSKDNAAVPAVA

SEQ ID NO: 362095 - protein, 345 aa, unidentified
MTEHIETNGCDLGDKQSELCILRASGEIERPKALKTTRAAMQAFFTRPHAHVIIEVRAHSRWVSQLLKELGHQVTVANPRRVQLISQNDSKDDRVDAGLLARLGRADRELLAPIEHRGNQAQADLAVTKARDGLVRCRTRLVNQARGLVKSFGERLPKCSTEWFHRKAWPAVPGELKPALEPLFQVLGELEVKIKEYDRALARMAKRYPDVQILSQPDGVGLLTALVSLLTLEDKACFEKSRSVGAFLGLRPKKDKSGDSDTQLRITKAGDPFLRRLLVGSANFILGPFGADSDLRTWGLGLSKRGGKNAKKRAKVAVARKLAVLMHRLWVTGEAYEPTGYRKAA

SEQ ID NO: 362096 - protein, 397 aa, unidentified
MPTNEATPTNTLPYAVGLDVHQKTISVAVLDPGGRLVERRTIRTCPKMLDELHRDLAKLAGPTPVRLGLEASTAGKACFQHLRQLGCDVRMAHPKKLKALLGDTKTDENDALMLATVLRLGTFPEAYVPPPDIESLRTLVRLRGEVVEKLKRAKIQVRSLLVKHHLQHESAKYDDIFGVQALRWLKDDVKLEDPWDRRQLVFLLEEGALHTRQEHELMTELAKVATTREEVRLLQSVPGIDYTLALTIVAEAGEIRRFRNRKRFAAYCGLVPKNRDSGEKVAQHTKRRHGNPQLTYAFEMAVQAIRSMGRGRFYVLLKALEKRVGIPKAITAVAHRLSFTVYALWKKGVLYEETEAKFYSAKRRRLAKRAAEPVEIPSLAGAVDKLIGQLGHAEATT

SEQ ID NO: 362097 - protein, 340 aa, unidentified
MDEYGGRQYVGIDLHRRRSVIVRMTPEGERLGSTVRIDNDAFELAQQVASWGESPQVVLEATYGWYWAADVLADAGANVHLAHPLGVKGFAYRRVKNDERDAHDLADLLRMGRLPEAWVAPPQVRGLREEVRHRCKLVALRSGLKAQVHSVLAKQGVHVPMSDLFGVDGTKLLDELALDAPFHARVLSLRRLIDAFTFEIDILAERTCGQLSRDPGFRAVQAIPGVGPVLGAVFVAEIGDVTRFPRPEKLCSWAGMTPRHRESDTKVRRGRITKQGNHLVRWAAVEAVQRLSGGAIGRTRARLTERRGANIAKVAAARKLLTLVYYALRDGHIRCLARPA

SEQ ID NO: 362098 - protein, 312 aa, unidentified
MIEQCFVGIDVSQDRLDVLLLPQATGFSVANNEAGWNALIARLRDLPVAAIGLEPSGGYERGVIRALLTASLSVRRINPNRLRQFARARGALAKNDRLDARLIAEYVATMPTHVVRHDPAAARIAEIVTVRRQLCDEHVAIENQAAQLEDAMLRRLAKRRLARIETDIRLLEKRLTETIAAEADLARRYARLTSMPGVGPVLAFTLIALLPELGCMSRKQIAALVGLAPYDFDSGKLRGHRSIYGGRMPVRNVLYMAALSACRYNPALKAFHNRLAAAGKKPKVILVAVMRKMITMLNAMLRDGASWQPQAA

SEQ ID NO: 362099 - protein, 307 aa, unidentified
MSQVYIGVDISKHWIDISHPVHGCARHAMDDLDGFAAQARAEQAIVIFEATGRHDRPLALALRTAGARFVRLTPTAPKDLARVLGIKAKSDRADAVLLRRYGELLQPAPQDAAPQDTAALREYIVRRRQLVSLRQIERTRAAEHMPAQVAASGARVIALLSDEIAAIDALIAAEIKRSETLSRKARRLQTAPGVGPVTAATLLAELPELGQLNARKLAALAGLAPMDNDSGQRRGRRRIKGGRCTVRRALYSAGMHASRGAGALRPFRDTLVERGKPPKVAITAAARKLLTILNAMIRDQKDFSYTT

SEQ ID NO: 362100 - protein, 334 aa, unidentified
MSSLVCGLDVHKNSVFATVMSYGGEVVEKRKLSNDEVVSFLDRYPVNKVAMEASTSIVPIYTALREKGYTILVSHPKKTRLIAESCIKTDRIDSWAITELARLDALPLSYIPPDNIAALREKVRRRAFLVRMRTKLKVKIRAQLAINGHKPPIEYGLFTLKGLEWLHSQQLDSVEPYLPVISSLDVQVKKLSKELQALAPQDDEVKLLMTIPGVGYYSALLVKSEIGDISRFSDGEKLCSYAGLVPSVSSSGSHTRYGSITKEGSRWLRWIMVECVHTHLKYDTGITRSYHAIAQRKGKSVAKVAAARRLLMYCYSVLRNRQPYHDPAGHYESS

SEQ ID NO: 362101 - protein, 412 aa, unidentified
MQDILTCVMGLDVHRDIIVACLVKGAVDAEPEAETRTFSTLIPEMQKLRDWVIESECRNIAMESTGIYWQPIYEMLESCFDGEISILVVNARHMKNVPGRKTDMKDAQWIATLLRAGLLKGSFIPDKAFRELRHLTRYRKSVVHDITAQKNRIDKFLQSSGFRFTAFLSDTFGASGRNIIRHLIEHGSIDREALDKCLKTKTRNRIDEILVALNGSLSEHQCRFLNMVFRHLEDLEAHKHTVEDEITEEVLKHTDTLNLLCSIPGIDVTAAAAIIAEIGTDMSSFPDSQHICSWAGLSPGNNESAGKRKSVHINKGNPYLKSMLCEVAWIMASHRKLYLSGWYWKVKQRKGAKRATIALARKILSIIYTMLKTGTPYNEECFEQRRLRCERKRANRLVNELQKLGYVVVAPD

SEQ ID NO: 362102 - protein, 396 aa, unidentified
MEPQLNDHPTATAAETATLLISFELSQSKWVLTMQRPNSSKLSRFMVAACDTEKVRSLLTTQRAQAERQCGQAMKIVSIYEAGLDGFWLHRWLETQGVESHVVDPASILGPQRKRNAKTDRIDGVKLVRSLASWLGGDRQACSMVVPPSVAQEDCRRLSRERGELVDERTRLSNRIGGLLANQGIAGFKPLKKGARQALDALRTGDGRELAPHLRTAIARILQRLELLVEQIKAAEAERDALLRVAPADAAPAAVKSASPAAAMGASLLRLRAIGPEFAAVLPMECLYRRFDNRRQVAAFTGLAPTPWSSGSVEREQGISKAGNRRLRKTLIELAWSWQRHQPASALTQWFHNRVKGQGKRERRIAIVALARKLIVALWRYVNDGVLPEGAMLKAA

SEQ ID NO: 362103 - protein, 400 aa, unidentified
MISVGIDVSKGHSTICVLKPHGEIVSVPFEVEHTEQDLQQLVEQIQSFSDGELRVVLEATGIYHLPVVAFLQQQGIFVSVINPLSMKKYASIALRQGKTDKIDSVKIANYGIDNWYHLVDYQPETETYQELRLLSRQYLHYTSLKIKAKVNLTNLLDKTMPGIKPLLRSQSEHSNQEKLCAVVNRYWHFDNITRFTESRFVKDFAAWGEKQHFYANEKKARDIYAVAQQGVTTLSSHLPSTKLLVQAAVRTLKELEATLSLILQEMQSLAELLPEYQVAIEMPGIGPTLAVRLIAEVGDVRRFHSANALIAYAGLDSPPHQSGMLVKKRSISKRGSPALRKTGFEIISSIRKTKPSVDNAVYLFMLKKQEEGKPVKVAKIAGLNKFLRIYYARAKEAYLN

SEQ ID NO: 362104 - protein, 327 aa, unidentified
MNKYSETFGIDISKDVFDCYGSTQGHLQFKNTESGFKKFQKLLRKDSLVVMEATGYYHYRFAQFLYHQGFIVSVVNPLSIKRFIQMKLAKVKTDKSDAKAICNYGLSQEVPLYNALTEVQSECLQLFRWMDSLLKKRTATKNKIHGEKVLGIPSKYVYHSLSRTLKHLDRELQGIDKKLLSLVKQDQQKQLTLLKSIPGIGVKTALFLIVITDGFKKFETASQLCSYAGITPIIRASGSSVRGRSRISKVGNRKLRNLLFLCAFSAYKHNKGCRELYERIVNKGKSKKLAMLAVSNKLLKQAFAIAKSGIPYDETHVSLLPKKHVVK

SEQ ID NO: 362105 - protein, 344 aa, unidentified
MSIAVLGIDLGKNVCSLVGLNETGAVVLRRRARRETLIGMADKLPRCIVAMEACCGAHHLGRIFAARGHDVRLMSPEYVRPYVKAQKNDDRDAEGIAEAATRPTMRFVELKTQDQLDMQTLHRSRERLVAERTALINQLRAILLERGMVVAQGKRQLREFLVKLMDEREGDGLSPRMALLVADARAQWAELDRRIAAFDAEFAAAAKANDDARRLTEIPGFGVLTATALIAAIGRGEAFEHGRDFAAWLGLVPRQFTTGGKAKLLGISKRGNKYLRKMLIHGARAALTHVAARDNALGRWAKALLGRAHKNIAIVALANKLARIAWAVLRRGAPFSAKAEAIAA

SEQ ID NO: 362106 - protein, 316 aa, unidentified
MGERSVFVGIDVAKAQLDLAQRPEGPGLSAANTESGIATVVAHLRIVKPTLIVLEATGGLERPLVRALVDATLPVVVVNPRHVRDFAKATGQLAKTDALDAQVLARFAQAVRPALRPVPDAPTQELAALIARRRQVVEMLTAERNRLGGAPKRVQRRIQVHLNWLTTELARAGDDLDQAIRNSPIWREQEDLLQSVPGVGPVVTRTLLAELPELGTLNRKQIAALVGVAPLNRDSGMLRGRRMVWGGRAQVRAVLYMGAIVAARFNPVLRAFYQRLRAAGKAKKVALTACMRKLLIILNAIMKHRTPWRTEIAQCA

SEQ ID NO: 362107 - protein, 340 aa, unidentified
MSIVCGFDVHRDQITFDLVDRLSGEVRTGRVVPATRAGLRTWLGSVDASRLSVALEATTGWRFVVDELERAGAGAVLAEPADTRALRGPKRRAKTDRADARHLRELLERDAVPESWIPPMHLQELRTLIRLRQSLADERHVWLQRVHAQLFHQGAPAPHGAVLGGNGAASRATLSAAGRELVETAERMCEAIDREIAGLDQQLAPWARRHPACRALQRLFGVGPITAVALYAEIGDARRLSSSRKLVRLAGLDVTVSESADKRSPGRLSRQGAPILRWAAYEAALSACRRGSPDHADYQLLRQRLGHGRATLTIARKLLRRAYHVLVAVGDDLLEPLPQP

SEQ ID NO: 362108 - protein, 355 aa, unidentified
MNSKKYIGMDVHKESISIAVRNDAGKIVMECVIETKASMILQFINGLRGDLQVTFEEGTSAAWLYDLLKPHVTRLVVCDPRKNASMKEGNKSDKIDARRLAELLRLNHLSAVYHGEHGLRSLKELVRSYLTITKDLGRVMSRVKAIYRSWGIACTGKQVYAPRHRAEWLAKITEPGVRRRAEFYYQQLDALRGLRQEVRRDLVAESKKHPAWKRLCQIPSIGPIRAAVLLGILQTPHRFRTKRQLWTYSGFGIETRSSADHRSVDGQLERAKKQISIRGLNQNCNHDLKNLFKGAAIVASSKPGPFQEFYTALLTKGIRPEMARLTLARKIATIALIVWKRGASFDAKYLKPQTA

SEQ ID NO: 362109 - protein, 330 aa, unidentified
MKFKNIIGIDTGKKSIDFSFLENGEKKLLGQVENSIKKISTFLIGLKVNFKETLFCMEHTGIYNFHLLGVLQSHSANIWLENPIQIKRSMGLTRGKNDKIDAIRISEYAYLHQEKVKLWHPTRLVIQNLKLLMGQRSRLNKAKKLIEIPVVESKEFITKEQHKLLKQNCKSTLAGIKKDLDMVTSQIKTIIDSDDTLKELFSYVSSVPNVGLITATAIIVSTNEFQKIETARKFACHAGVAPFEYTSGSSVRGKTRISHMADKELKTVLHLATLSAISRPGEFREYFVRKVKEGKNKMLVINAIRNKLIHRVFACVRDQRKYFKKDLTFA

SEQ ID NO: 362110 - protein, 308 aa, unidentified
MHYLYYVGLDVSKETFDASLVAFEDANEMAHRKFANSRKGICSCLHWVEKRHGILLDDVIFCAEDMGSYISEMAVCASDRTLNFNFSLISPLVIKYSMGIARGKTDRVDARRIAEYAITHYRKIALYLPAEKELCQLRTWLILRAHLAKQRVAKLVLLEKLDYKEKFADVSIQRSMLQEEIAYAETHMKTIEREMKELITADSNICRNYKLLTSIKGVGPITAIVMLCSTLNFTKITDHRKFACYCGLAPFEHSSGTSVCGGCHTSSMANRDIKVQLNRRALIAIRCDPQLKAFTNAKWLKVNINSAS

SEQ ID NO: 362111 - protein, 371 aa, unidentified
MEHTRFVGLDIHKERISIAVAESGRSCAVEYLGEISNDPVAIGRLCDRLERPSKTLAFCYEAGPCGYGVHRQLISLGHRCDVVAPSLIPTRPGDRVKTNRRDATMLARLHRAGELTPVWVPDADHEAMRDLIRLRSVVRQIVSRARQHLQGFLLRHGRKHGRGTAWRMAYRRWLSTLAFEHPAQQIAFQDYVDAVMDAERRLQRVEEQISGLLPEWNLRPVVDALQAMRGIALITAVVLVAEVGDFTRFANPRQLMAYFGLIPGEQSSGETIRRGGITKTGNAHARRALVEGAWAYRMKARIGRHKVDRIEALPKVVRDIAWRAQLRLCTRYRRLSARGKTANVVNVAIAREMVGFIWSIACTVQSAPKTA

SEQ ID NO: 362112 - protein, 293 aa, unidentified
MVMSGLRNSESTDVEVVLGVDTHLDFHVAVALDELGRRLGELRMPTTTKGYERLVCWAEGFGVVRCTGVEGTSSYGAGLVRYLTSAGIAVEEVERPKRRHLRRNGKSDPLDAEAAARAVLAGETAGTPKSADGHVEMIRVLRTARRCAAKARSQAANQLQALVLTAPDGLRERLRWLSSRRLVATACRLRPGTQPETPEAAIKLALRSVARPQEALSEEIAELDVQLDRLVADAAPELLALPAVGTDHAATLSIVAGDNPKRLRSEASFASLCGASPVEASSGKVVGHRLNLM

SEQ ID NO: 362113 - protein, 347 aa, unidentified
MYPFYLGIDLHLKRTFMVLMDAKGEVIDKQRISNDDISRYLQEKVPRETYAVLEATRNWPFMYDLLNEHVQKVDLVHAKGVRAIANAAVKTDQIDASTLAHLARMNYIPKAYAASKGMRDLRQLLRYREWMVNQRTKAKNRIHAALAGYNLVSPVTDLFGVAGRTYLDEVMEKELRPAARQVVADHLAMIDHLGERIHSLEKGISLNERQNHIVKLLMSMPGVGRLIALTILAEIGDISRFHSPKSLCSWAGLTPRVHNSDAVVQHGHITKEGSRYLRTAMVRTATVACRISSKWCVIHSHLALRCGRRAAWVAVARRLLTVIYYMWKRDQPYQDNYGQKQSDALGS

SEQ ID NO: 362114 - protein, 374 aa, unidentified
MSKNTRYLGLDVHAETITAAIAEGRQKIRSVGQFPNRPEAIRKFIEKLGGPNGLKVCYEAGPTGYALYWQLTKMGVECEVVAPSLIPKKPGERIKTDRRDAEKLAQCYQAGTLTAVWVPDGAHEALRDLVRARGAAKDDESRAKHRLVKYLLHYALRHPDNCRAWTHPWWRWLQALKLEHEAQRETLLAHIAEVLHQGERVSRLDKAIERAIESVSPEKKAVINALQALRGVAQLTAVTIMTEVGTFQRFRKPTELMGYTGLVPSEYSSGGKESKGRITRTGNAHLRHVLGETACHTRHKPWLSNRLKQVLPTLSPGVSEIAWKAQERLHRKFVKMTYQNKQPGKVLTAVARELVGFIWAIGSKVEREALAKAA

SEQ ID NO: 362115 - protein, 396 aa, unidentified
MSKVIMIGCDLHDRSMLLRYAVDKDEPQQLSFDNDSRGRNLMVSRLKSLAKNKQASRIVFAYEASGLGFGLCDMLLEQGIECHVLSPTLLPKTPKGAKLKTDAKDAQMLLEQVRGHVLAGNDLPVVWTPPQRLRDDRELVRARIDAGDEMTRVKLKILSALKRRGIVKPSWYTSRWSKRFVAWLRDEVIAGLDATVAAVFERLVDRYELYQREQVKLDKAIRNLSQESRYKVAHAELRKIPGVGLLVAMTFLTEMGDLTRFANRREVGAYLGLCPSSFESGEANNRKGRITRQGPSRLRKMLCQAAWVSVRDSEAAQKDYHRIKQGQSKRTKKALVALMRKLGVLMWHRALSCGVSSELIGRGGPRALESDASARAQQRDIVDPFTSPSLRPSCAG

SEQ ID NO: 362116 - protein, 347 aa, unidentified
MSEYIGIDLHKAKSFVTRLDRRGQVLEQIELQHATGALQQYLERVPADTRIAVEATGNWMWLYELIEERHPDLVLAHPLKTKAIASARIKTDKIDATTLAHLLRADLVPAAYIPPRAVRDTREILRFRASLVRLRTQVKNKIAAILSKNGLTPPTKTAFGVKSRQFLATVAVRPCYRLALDGYLRQLGHLTDEIDQVAQTIETQVATDSQAQLLCTMPGIGAYSALLILSEIGDVHRFPDSRHLCSYAGLVPSVHASGGKTRLGRLTKQGSTWLRWILIELSMHAIKGAPQFRQLYQRVARKHGRNAGRTAVARAMLKTIYAMLKHQEAFRPIEQGSTGQRLGAMAG

SEQ ID NO: 362117 - protein, 406 aa, unidentified
MKQIVSVGIDVSKGKSTVCAMIHPNTIIKESFEVLHTVEEMSMLADYIGSLDGEIRIVMESTGHYHLPVAQFLYQKGFFVCVENAYIIRQFSRIMLHGAKTDPLDAKKLAKYGLAYWSELKPYKFHPSCYTELSLLSKQYQTYIKLLIAAKQNVIHLMDEMLPGFKEALDTASSVQFSKVKYVDFAKEFYHVDMIKSMGKEIFRENYKQWCKEKGYRFQSEKADELFHLAEDGIPTLPTEFPSTRLCMEVATEQVSQLGYALEQILSQMQNLAKTLPEYQTIRQMGGMGEKLCVRFIADIGDVRRFHNGKALVAYAGIDAPPYQSGQYTGTKRRISKRGNSALRKTGYEVMKSLKSHPPKTDTRVYDFIIKKENEGKSKKQAKIAGLNKFLQIYYARVIEIYKNIV

SEQ ID NO: 362118 - protein, 348 aa, unidentified
MHQGILLTVDYHDENCVIRRRDLDRATEEVVRVPTTADDLLRVVADARRRAGPRGRVVWLQESTTGWARVRGLLGKKAEFVLANVLQMPRPPKGRRTKTDTIDTARLQREYLNGALPRAHQPPAWWRQVRRVVGGRENLVSRRTALRNWINRYLAHETWESRVGLWSAKGHCRLRALAATWPRRDALVVTTKLDELEHLETQLTAVEAELGVIYQECADAKRLDAVRGIGVVSAVSIVARIGPVKRFGSAEQLIAFAGLAPGVHESDGTRRDGRIGGGGTDVHLRHYLIEATVWARQLPRYAKTYERVEKRRGKKIGRLVVARLLLRSIYKVLRDGLAFTAEGKTTAA

SEQ ID NO: 362119 - protein, 351 aa, unidentified
MDATTVGVDLAKNVFVACVADCTGRIVERREFNRASFLSWLGTLPAGTVIGMEACGSAHHWGRTAQRLGLAPRLMAAEFVRPYRKRQSVKNDRADAEAILVALLSPGMRFIPVKTEAQQQRLAWHSLRVGWVEERTALLNRIRGLLAEFGSIVDPGPKHLRALLAERERDTASPPALRGLIHSVRDQLDALDARIGECDRQITAQQANDPLAKRARDLPGVGLITADAVTASVGDASMFKNGRQFAAWLGLTPSQSGSGGKTKLGRITRRGDDYLRTLLVQGARSVLAATLRKQRRESPDTLTRLQQWIVALNGRIGYHKTLVAIANKHARQLWAVLAKGESYNPQAWQRA

SEQ ID NO: 362120 - protein, 353 aa, unidentified
MSQQNARIAVVGIDIGKNSFHIVGQDGRGEIVLRQKWSRSQVEARFANMSPCLIGMEACVGAHHLSRRLRALGHDARLMPAKYVRPYSKGQKNDFRDAEAIAEAVQRPTMKFVATKTADQLDLQALHRVRERLVSQRTGIINQIRAFLLERSIAVRQGIRFLRAELPRILAMPPDVLSPRMVRIIEDLACDWRRLDERVEGLSNEIETIARQDAGCERLMSVPGIGPIISSAMVAAIGAGDVFTKGRDFAAWLGLVPKQISTGDRTILGKISRRGNRYLRVLFVQAAWVVLIKPKIWERHGLKPWIEAARKRLHHNVLAIALANKLARIAWSVLAHGRAFEARKIDQAANQSA

SEQ ID NO: 362121 - protein, 421 aa, unidentified
MKPQVSEAFAAFVGLDWADTKHDVCLQATGTEQREFLRLEHSPEEINDWVQTLRTRFNGQPVAVCLELNKGPIVSALRNYEFLVLFPVNPLTVAKYREAFTPSRAKDDPTDAELQVEILLKHRDKLTPLSPQSPTMRALAQLVEHRRRLVGDKVRLTNRLTSALKNYFPHVLQWFQEKDTVLFCDFLSRWPTLKAVQLARRATVEGFFRAHHVRSADVITTRIQAIKSALALTTDEGVITPNVLLVQALVAQLRVTLQAIADFERAIAQRAQDHPDFPLFEAWPGAGDVFAPRPLVAFGEQRERFTSADELQKYAGIAPVTERSGKKSWVHWRLQCPKFLRQTFVEWAAESTRHSFWPQVYYQQQRDKGKAHQAAVRALAFKWIRILFRCWQDRTPYDESVYLQALKRRSAPLLHNLANRA

SEQ ID NO: 362122 - protein, 343 aa, unidentified
MQIARIGLDLAKYVFEIHGVDAHGTTVLRKTLRRHAVSTFFANLPPCLVGMEASNGAHFWAKTLLDLGHDVRLISPQFVTPYVKSNKNDRNDAEAICEAVGRPNMRFVPVKSAEQLAVQAVHRIRTRLVADRVRLVNQVRGLLGEHGIVVAKDIGNLRRALAGLGDNEDRALNPMVRALMGELREELTELDARIVGYDRKIRELYRNSEICQRLGKVEGIGPVTATALVAAVGDRSSFKNGRQFAAWLGLVPKQRSSGGRARLFGISKRGDRYLRTLLIHGARAALGRVRDKQDPRSLWLGKMQLRRHPNVVAVALANKNARIAWSLLTSDNVYDASLSVGAA

SEQ ID NO: 362123 - protein, 326 aa, unidentified
MQGKEASEQETNVKCNVGIDVSKDWLDIYVLPTGERLQVGNHGAGIRQLKRWLSRFDVALIAIEATGKWHRELHRSLAASAIAVAIVDPFRVRMFAKAQGILAKTDRLDARVLAAFAAVMTPAMRPPTPQVMAELAELVTARNSAVDAETAFKNQLSAAHSQFLKRQMQRRIVRAAKDIAELEAEILKRIMADHGLARRYAILTSIPSFGLVTAATLIACLAEIGTLTVKQVAMLAGLAPIADQSGQRDGVRVVWGGRSAVRRALYLAALSAARFNADMKAFYDRLVASGKAPKAALIAVARKLAILANTLVSDDRLWEPRQIKYA

SEQ ID NO: 362124 - protein, 344 aa, unidentified
MEHVTIIGIDISKRSFQLHGATAEGKPVFRKKLSRGKFLSFLAEVPPCVVVMEACGGAHFWGRQIIALGHECKSIPPIYVKPFLKRQKNDTNDAEAIVEAAQRPTMRFVAVKSEEAQADAMLFRTRGLLVRQRTQTINSIRGQLAEFGVIAVQGVASITVLQQGVAEVKEMLPEYVVSMAELLLDQIAAFNAKITDIDRKIRARARQKEEFKRLMTIPGVGPICAMAVNAFAPPMESFSCGRDFAAWVGLTPRQNSTAGKQRLGRITKMGQRDLRRLLVLGATSVLRHMRKREELDDPWLRRMIAEKPPKLVAVALANKMARMIWALSVKKETYRVPTAAAVAA

SEQ ID NO: 362125 - protein, 348 aa, unidentified
MLHAGLDLSRKRLDYCLLDEVGERVEVGAAPPDGDGLTAFARRTEERHGRVQVRAAIESMNGARFVHDTLERCGWEVEVADALKVKGLAPLACKTDKIDAWVLAELSRRELVPAIWLPSFERRQERERARWRLFLVRKRSALKHRVHAQLLAFGHACPVSDLFGRSGRQLLERLQFPEPWRSGVLAATGMIEELDRQIRGIDSELKALGADHRYIPLLMSAPGIAWVLGYTIAAEIGDINRFASPKKLCGYTGLCPKTYQSGSKDRRGHLTHAGPKYLRWALIEAAQHAGRHPLYRERYQQTKRRLGKQRGPKVAQVDIARRLAEAIWHMLTRNQPFAPAGATSALAA

SEQ ID NO: 362126 - protein, 343 aa, unidentified
MQVSTIGLDLAKNVFQAHGVSAEGKVVLKKQLRRGQVLSTFAKLPPCLVGMEACAGAHYWARELRKLGHDVRLMPARDVKAYVKRDKTDAADAAAICEAVSRPSMRFVALKTPEQQGRLMQHRVRDLLLRQRTQTINALRAHMAELGLVAATGRQGLGLLLAILADAKDERLPQDARASLKLLASQIAALQAQIDTLDKRLHAQHRQCPASRRLETIPGIGVIGATALAATITDPKAFKSGRDLAAFIGLVPRNNSSGGKQRLGPISKQGDRYLRRILVVGAHSILKQARARPDKHPWLARLMARKPGKLAAVALANKTARIAWAVLARGETYRAPTAPAAAG

SEQ ID NO: 362127 - protein, 343 aa, unidentified
MQTITTIGFDIAKSVFQVHGVDAGGQVIIRRQLKRRHVLAFFQKLPPCLVGIEACASSHHWSRELQALGHTVRLMPPAYVKPYVKRQKNDMADAEAICEAVTRANMRFVPTKSPEQQSCLMLHRTRHLFIRQQTAVINSIRAHLAEFGIVAPVGRKGVTELLRVVADPNDKRVPEVARACLAALGDQLLGLKEQILEFDRMIMAWHRSNQTSKRLHYIPGVGPMLATALVASVADPRAFRSGRNFSAWIGLVPKQHSSGGKERLGSISKQGDRYLRSLFVAGALAVIRYAKIHGAGHRPWLTALLGRRPTKVAAIALANKIARMAWAMMAKGERYKQPAALAR

SEQ ID NO: 362128 - protein, 375 aa, unidentified
MKEKVRFLGLDVHAETIAVAVAEPDGSLRSLGTIANRGESIRKLVKKLGPVEQLRACYEAGPTGYVLYWQLSELGVDCKVIAPTLVPVKAGDRVKTDRRDAERLARSYRSGDLTAVWVPDEGSEALRDLVRAREAAKQDQLRARHRLSKLLLRTGRRPAPGVKAWTQAYMTWVGQIRFTQMAQESTRLDYVHEVEHMGERVGRLERGIEEAIKLASPAIREVVKGLQALRGIAKISAVTIAAELGNISRFEGARQLMGYSGVVPSEDSSGKRMKRGSITKTGNAHLRRIVVEAAWSYRLRPGVGPALRKRQQGVAEEIKEIAWKAQHRLHKRYQRLEAAGKDRRKIITAVGRELLGFVWAIGIKAEAATSQRMAA

SEQ ID NO: 362129 - protein, 335 aa, unidentified
MKVFYLGVDVSKKKLDLCLRSNGKDILYDVIPNDLSSIKSWLTRTFEKFFLSEDSLVVCAEHTGQYTYPLVCATKSIGVYLCLEDAAKIKYCHGIPRGKNDKIDACRIAMYAERYNDCLQPYTASELIIQKLKNLSTERSMLVADRAKYQSQLKVQVDYMEHSIYIAKCNRVEGIINTFTDYIAQIDLEIKELINQAPVIAHQMDLLMSVDGVGERVALKMIMETDAFTSFTDPRKFCCHAGVVPFVYVSGSSQRSKNRVSNRADKSIKHLLHMAALSVSQVKNSPLKKYYDRKVEEGKNKMSVLNAVRAKLVTIMFAVIRTDAFFSRNYQNSLA

SEQ ID NO: 362130 - protein, 362 aa, unidentified
MLIIGCDYHPSGQQVFGIDTESGEVFADRWIAHTGNELEEFYSGLPAGAVVGVECSGNMLWFERRLAHYGHRLRLGDAAQIRSKETRKQKHDRRDAELIARLLLEDNFPDLKWVPTLAERDQRQLLMHRHKLVRMRAQVKNQLQHIALNQGQQKKRQLWTKAGRELLESLRLEPWTARRRDDLLRWLDLLNRDCESLEREVEQAAEARAEARLLMTHPGIGPVISLAFVLTIGSIERFQRSRELVSYLGLNPSEDSSGERRRLGGISKQGSSFMRLLLIQGAQTAVRGDEDLRRQYRRLANKKHRAVAKVMVARKLAVRMFWMLKTHTTHAELVRTRGSSSHPGVGKTDCLSERPASPRIQP

SEQ ID NO: 362131 - protein, 416 aa, unidentified
MKQTQNTRGYNRYFAIDTHREYHLVGGQNEDQEWEVNPRRVSIEKFSEWAQQNLRAGDIVVLETTTNVWDTYDIVAPLASRVLVANAAAVGEIAGARVKTDKEDVKRLLKLLFGGIVPEVWVPPAHVRELRAFISYRNRLVKMATMVRNRLQSLLHKHSLMLPEEGLLNQAWWDAQSSISALEKMQIRQELYLLDEIKKLQAAVNEELEKQSTGELWGKQALQLMQLPGVGVIVAMTVLSAIGDITRFEDAKHLVGYAGIGAGVHDSGKTHKEKHITKKGRKELRWIMVEAAWRAVRMSPYWKEQYEKHLRRMRKPNQAIVAIARKLLVAVWHVLTKEETDVHASEEDLAYKMLLLSWSLNDNVRMGLSYKQFAKYALMKLGIENDITRFVRKDVPRRLAAKEEVLARMEELGITQ

SEQ ID NO: 362132 - protein, 429 aa, unidentified
MIMGFTKPIEHSNLTTKEGDFMNPLYVGIDVSSKSNVVYFMLPDGSKHSNFSVANSHDGSTQLVKRILCALESKSLDTVLIGLESTSVYGDNLVYFLREDASLASFNRKIHVLNPKQVKKFKDAYNDLPKNDYVDSFVIADCLRFGRINKEVYLGDYRYKALQNLTRARYFAVCNLTKEKQRFMNVLFKKYSTMTQEKVFSDTFSTTALAVYDEFESAEALAYMDLHELTTFIMEKGKNRFPDPDAVAKAIQKAARSSYRLPKTVNDSVNQVLSISITSIKALEAQIKEFDKAISAQMELLPNVLISIPGIGPVYSAGIMAEIGDINRFDNQAQLAKYAGLAWTQHQSGDFEAQNTRLIRSGNRFLKYYLCEATFSLVRCDKEYKAFYHQKYKEVNRYQHKRALALTARKFVRLVFTLLKDNRLYRSAE

SEQ ID NO: 362133 - protein, 429 aa, unidentified
MMKWLEAKRQIYDGELRTMNNVAGVDVSKGKSMVSVLRPFGEVVAKPFPVGHTGSELKELANYLKSLAGETRVVMEHTGRYYEPVARFLHEEGIFISAVNPKLIKDYGNNTLRKVKTDKADAQKIARYGLDNWAELRQHTLMDTIRMQLKTLNRQQGLYSKTKTMMKNNLIALLDQIYPDVNDLFDSPVREDGSQKWVDFAATFWHVDCVRTMSLTAFTERYRKWCKQHGYNFSQNRAVEIHAAAKDLIAMLPKAPLTKTMVRQAIDALNAVSKSLERLKLEMRTLAAQLPEHPIVMAMHGVGDSLGPQLMAELGDVTRFTHRNAITAFAGVDPGADQSGTHEAKSTRISKSGPPELRRALFLVMDCLLKTMPQDDPVYQFMDKKRAEGKPYLVYMTAGANKFLRIYYGRVKEYLASLPPEENSGSILP

SEQ ID NO: 362134 - protein, 393 aa, unidentified
MQTIGIDVGKRQHIAAICHQGEREARKAVLRFSTDRAGLGQLEDWLARQGQITRAVLESSGHYHLNLAAALQRQGVPVAVVNPIESKYFGKRRLQRTKSDPADARTLAHLAMVDQPEIRDVLTGAELREAARFAMALVDERGRVCQKITRLIELGFPELEQAYDDPTCTSALAVLRQAPTASAVARKRPATLALAARPGGSRAIGAKKAAQIQDLARATIAAPELAAQIGFQMRLRIAQYDLLTAQIAEAEAHLATLLDGELVRRLRTIPGVGPAICATLIAEIGDIRRFERFDQLVAYIGVHPAEKSSGQKGANPETSWRMSKAGNAYLRTALYQLAIVGIRYNPIIRAHYARKRAQGKSKMNAVGHCMKKGLAIVWGVWRSGEDFAAPATP

SEQ ID NO: 362135 - protein, 463 aa, unidentified
MTLPPPAFAGLQTGNRGTRRRAPVSDRPGASLAAAGPSLPPPLQGVELSLALPEALFFTGIDWAAATHAVCVMDAAGKITAEFTIEHSADGIATLIRRLARYGDPAGMPIGIERPNGQLAGLLLEAGHPMVPVSPNAIKTWREGEVLSGAKSDAGDAAVIAEYLRLRQHRLRVAAPHSDQTKALRTVVHTRDDLVEMRVASINQLSALLEAHWPGAKAIFADVESPVSLAFLTRYPTPDAARHLGEKRIAAFCTAQGYSGKRPAAVLLARLRSAPAGTTGAALTRALRDAVLALVTVLTAQNAAIKSLSRCAAAHLSEHPDGAVFTSLPRSGQINAAQMLAERGDCRQAYDGPDSVAALAGCTPVTKQSGKHRDVHFRWACNKRFRKAMTTFADNSRHASPWAAKIYNDARGNGKDHPHAVRILARAWIRVIWPCWLNTVPYDPARHGAAAALTTQATGQIAA

SEQ ID NO: 362136 - protein, 310 aa, unidentified
MEKYFVGIDVSKDRLDVHLRPSGEAFAVPRDGEGLAALAERLGRVPLELVVLEATGGFEVTVAAAIAAAGLPLAVVNPRQIRDFARATGRLAKTDVLDAEIIARFAEQVRPPARPIPDAQARALGELVTRRRQIIEMIVAEGNRRRQLTQPRLVKRLDRHLQALQKELTAIESDIDDEIRGSPAWREKEDLLTSVPGIGAKIARILIAELPELGTLGRRQIAALVGLAPINRDSGNRRGRRHIAGGRAGVRSALYMGAVTAVRCNPAIIPFAQRLRTAGKQPKLVLVAAARKLLTIANALIRDHLPWRLA

SEQ ID NO: 362137 - protein, 356 aa, unidentified
MAMYYIGADVHSNSIEMAIFNRKRIIKRYKVPASISAVTQVLGLLNGKKYMAIEEGPMSGWLYRNLHRQVDRFTVSDPRRNKLISSDGDHDDKIDSAKLAILLAGGYLREVYHSDDEQRVEFKHWVSLYHDRVRDAVRNINKIRARCRMHGVTIPRRVLCQPEHRAAWLKALKNPALSNQLSMLWIGYDATAKQARMAKQRIINLSKRYPIIHLWKQLPGIGIIRAVTVFTYLDIPWRFKKKNKLWKYCGIGLQRTASGTDKKGRPKPARLQLPQASNRVLKNAILGAALTAINQKQNIFKSDYERMVRNGVIPTNARHTVARKLLTVMWGIWKRSCQEGLDEVSLPKLNENCVYV

SEQ ID NO: 362138 - protein, 343 aa, unidentified
MDHYAGIDVSLEQSSLCIVDATGRIVREAKVASEPEALITFLRGLNLPLVRIGLEAGPLSQWLQAALVKAGFEAVLLETRHVKAALAAMIVKTDRKDARGIAQLLRMGWFRPVHRKSMPAQEVRALLVARKQLQAKMRDVELSLRGLLRGFGLKVGEISKGQFAARVRTLVAGHTMLERVAEAMLSAREALRVEFGKLHRAMLAIVRADAVCRRLMTVPGVGALVAVTFTSGVDAPERFARSKGVGAHFGLTPRKHQSGETDITGAVSRVGDAMVRTALYEAAHILLTRAVRFSALKRWALEVAKRRGMRRAKVALARKLAIVLHRIWVDGTTFRWGREIAAA

SEQ ID NO: 362139 - protein, 384 aa, unidentified
MRRQSRIREEPVVAQDGITFVGMDAHKKAINVAMLLPKTKQPVEWQVANEPAAIRRLAKKLVREAPGEVRCCYEAGPCGYALQRELEAAGGIICEVVAPSLIPVKPGDRIKTDRKDARKLAELQRGDLLTVVQPPTADEESVRDLCRCREDAQEDLGRARQRMGKFLLRRGLIFTVSKKAWGKLHRQWLRGLAFDHAADQAVFGDYLLAIEQLEERVLTLAAKLGEAAQQDAYREPVAWLRCFRGIDTVTAVTLVAELHDFRRFRSARELMAYLGLVPSEYSSGESRHRGSITKAGNRHARRVLVETAWHYRHRSKSGETLRRRREGQPARVIALADRAQERLCRRYRHLVERGKPTPKVVVAIARELVGFLWGALQKPVEVRS

SEQ ID NO: 362140 - protein, 345 aa, unidentified
MPIVGGLDIHRKQITFDYLDTVTGQVQRGQVSPADRAHLRAWLARFAGREDVAFAVEGCTGWRYVAEELAAAGVAAHVAEPADTAFARGRKRHAKTDKTDSRHLRTLLAEGRLPECWIPPGRILECRALLELYHDLRAEHTAWVQRIHAVLFHQGAPALGEGTLRTGQGLAALRAAAAEHLSPAGQLQVATALEVTAALEARLHEVRHQLLDAARHLAGAKVLAARLYGVGPVTALALTCWLAGEGRFSSSRQAVRFAGLDVTVWSSDRKGPPGRLSRQGPPVLRWAVYEAGKTHARSSAPDHRYYAQVKDRCNGKRAALSEARKILRQACHILAELGDDALSAA

SEQ ID NO: 362141 - protein, 376 aa, unidentified
MQNDSTLFVGVDLHKDSITVAYALDHGEIETLGKTGTSQIEIDRLCKRLKAKGRHIKVVYEAGPCGYGLQRRLAAKGFECMVCAPSLIPRKPGERVKTDRRDAIKLVRSLRAGDLTAVHVPSVEDEAFRDLARAWASARSDVKRARQQLKAFLLSHGVRYTGSANWGPAHRRWLAAVSFGNTWQDLAYNELRRTIEDRLAQCQRLEAALREAVQQWRFYPAVLALQAMRGIQFTSAVGLLSELGDLTRFAHPRQVMAWVGVTPSEYSSGAKRRQGSITKTGNSYARKLLIESAWSYRYTAKVSPDIERRHEGLPKAIVDRAWDAQLRLCARYRKLVARGKNANVAIIAVARELAGFIWDIGRLGMAEASPGAQVQA

SEQ ID NO: 362142 - protein, 400 aa, unidentified
MTDISDVGVFLGLDVGKSAHHGHGLTPAGKKVFDKQLPNSEPKLRAVFDKLRTKFGTVLVIVDQPASIGALPLAVARDAGCQVAYLPGLAMRRIADLYPGEAKTDAKDATVIADAARTMPHTLRSLEVADELTAELTVLVGFDQDLAAEATRTSNRIRGLLTQFHPSLERVLGPRLDHPAVTWLLERYGSPAALRKAGRRRLVEVIRPRAPRMAERLIDDVFDALDEQTVVVPGTGTLDVIVPSLARSLAAVHEQRRALETQIAALLEAHPLREVLTSMPGVGVRTAAVLLVTVGDGSSFPTAAHLASYAGLAPATKSSGTSIHGEHAPRSGNRQLKRAMFLSAFAALHDPASRSYYDRCRTRGKTHTQALLRLARHRTSVIFAMLRDGTFYEPRTPTTA

SEQ ID NO: 362143 - protein, 341 aa, unidentified
MEHYAGIDVSLEYSSVCVVDSSGKFVHEGKVASEPEALIAWFASLGFGLVRIGLEAGPLSQWLYAALRQAGLAVELLETRHVRDAFKAMPVKSDRNDARGIAQLMRLGWFRPVHCKSLAAQEVRAVLTARKLVQSKLRDVENSLRGILRGFGLKVGKTTQRSFAARIRELVAGHPNLQTVAAALLSVHAVLLREFQAFEKQVRALVRRDARARRLMSTPGVGSIVALTYASAVDDPGRFRSSKQAGAHYGLTPKKYQSGETDYSGRISKVGDAAVRTALYEAAHIMLVKPLKGCTQLKSWAMRIARRAGMKKAKVALARKLAVILHRMLADGTVFNAAASR

SEQ ID NO: 362144 - protein, 391 aa, unidentified
MLYLGIDQHGKQLTISLRDEEGTVILRRQVSTKPERIEAFFEGLCALAEPAGGFLAILEVCGFNDWLLKRLRQAGCLKVVLMHPEKRSRRKTDRRDAQALSELLWLNRHRILQGERTPGLRQVVIPTRLEQQQRELTSQRQRLGRQRTRCLNQIQGLLRRHNLTWECPTQSFQTQAVDRWLRELTTSVKLTRLERMHLSHWLAQKELLESQIEELNELIVRYARHSESVSLLRSMPGVGAYSGLALASRIGKIQRFPRPRSLANYFGLTPSCRNSGETTDRLGSITKDGSRLARFILGQLVLHVLKRDPQLREWYRGIKVRRGSKIARVAVMRRLTTVMWQMLTHRRPYEIGGAPQEIQKVSSSESVKNHAQARQKGSPRSRPRHRIGGAG

SEQ ID NO: 362145 - protein, 305 aa, unidentified
MFSRFIGVDVSKTKIDVFLSETGEVFQVKNSTTNIERFVQKIDCRSKTLAVIDLTGGYEAACVDVFYRAGFAIHRAEGRKVKAFMRAVGQLAKTDSIDARALADYGQRLQDKLPLFQPIENEIKPYVFRLTELKQILKSEKNRLNAPSIVPRIRLEISKHTEFLQTEIDELSKELQAIVKQNPVLLKKQQALTSQIGIGETSANVLLACLPELGILSRRKIAALAGLAPYAQDSGTIQKVRHVVGGRCDVKRTLFICSLVAIQKDPIMRAFYEKLIQKGKRKMVAIVAVMRKMIIILNAKCKNID

SEQ ID NO: 362146 - protein, 480 aa, unidentified
MNVKATRTKKQVNVENQAIKLLSKEELGIKIEVIKKELRSYTWRDLETNGKFAKNDKLSFITDDMLIAGCDIGSETHYIRAIDVRGRELSSRAFEFSNTSEGFANAKAWILALAAKNDKKQIALGLEQTGHYWFALAAWMVSNGISVVQVNPYAVKQSKEIEDNSQLKDDRKDPKLIANLVKDGNYGMPYLPEKVYADMRRLSMFRDQLTEDRIRNINRLHRELKIYFPEYMDAFGKIDGAFTLEVLKVSAIPSDITALGAEGIKNIWHNEKLRGRGYSRANEIVSYAEKSVGLTDGTDAVREAVKWYAEQILKLDEQLAVIESTLHEKCREIPYAENILEIRGVGENILAGILAEMGDISRFDDVKEIQKLSGMGLVACSSGKHKGQTKISHRGRKRLRYWLFQAAKSAVSHADEFKQLHEYYTTRTNNPLKKMQSLIVIACKILRVSYTILKTGTTYDPQKLLKDIKRPTASQAPMAA

SEQ ID NO: 362147 - protein, 408 aa, unidentified
MRIIGLDIHRAFAEAVAWENGKLKRLGRIDMRRDRLAAFAASLPATDVVVVEATGNAAAVAAVIGPHVKRVVIANPKQVRMIAHARIKTDTIDAGVLAQLYASGFLPEVWIADEPTQALRREVTRRNQIVRQRTRLKNIMQSILHAQLIPACPHQDLCAPKGRAWLSEQVLPTDERRAIERHLREFDRLGEDLQAVERDLARTALTDERVARLMTIPGIDMVVALALVAAVGAVERFDSPQKLVSYLGLNPSVRQSGPGPAYHGRITKQGRGHARGMLVEAAWAAARVPGPLRAFFQRVRARRGQHVAAVATARKLAVLIWHLLRKGESYLWARPALHARKMRNLELKAGHQPARGQRGAAHAYNLRSCREQERRWVEQAELAYARFVARWNPNGPRARTGAAKEERR

SEQ ID NO: 362148 - protein, 384 aa, unidentified
MKIAIGMDLHKATAVCYAVFAGNGEASDREREFLDDFNRNYRSQASTPESMTRIAKALSDHDAYVLIENSTKTYETYWVLTNLGVNVVVAQSQDLYRITRSVKKTDKNDSMELAAYLRRYLHGEREFAVCTMPPKEWMMKREMCRTIFKEKAHLGDLKRRMRMHLLLHGIQLSREYSDIFSKKAINELSRLDDPVVKMILSEAVSLKRRNEEEIKLLRHLFQGNRMYELIQTIPGFGFVSAAYLTSMIMDLNRFRDRKMFTAYFGVVPKIRESSDVSHRCATTHRGDEEVRRLVMQAAFVHVNTVEDSMVKRMWDRLSSRDKAFREVQCACARKLLTVVWSVLKEDRPYIEQEEIILRSLEMSDALLEESDESDSSAVTEIAME

SEQ ID NO: 362149 - protein, 312 aa, unidentified
MADMVRLAGIDVSKQTLDVYVMPSGERSTVTYDRRGLSKLRRWLLDLGVAVAAVEASGGYEREVSEVLEKAGLVIHRLNPLRVRRFAQLRGRLAKTDRLDARTIAEFARAYPQDRQVRRDPRRDRLAEHLLVRRHIQDGIVDCINQLEHLRDRRLRRLVSARKAALERTLATLDRRLAELIAEHDDLVALSDQLRTVPGVGPVLATTLIALLPELGALTRRQVASLVGVAPFDRSSGQQVGAKSIHAGRVLVRNALYMAAMVASQRNPMIKAFAQRLAAKPGKVRLVACMRKLLVTLNAMVRDKAQWQPRTA

SEQ ID NO: 362150 - protein, 312 aa, unidentified
MIEQCFGGIDVSQDRLDVLLLPQGTGFSVANDEAGWSTLIGRLRGLPVAAIGLEPSGGYERGVLRALLAAGLSVRRINPNRLRQFARARGALAKNDRLDARLIAEYVATMPTHVVRHDPAAARIAEIVTVRRQLCDEHVAIENQAAQLEDAMLRRLAKRRLARIETDIRLLEKRLTETIAAEADLARRYARLTSMPGVGPVLAFTLIALLPELGRMSRKRIAALVGLAPYDFDSGKLRGHRSIYGGRMPVRNVLYMAALSACRYNPALKTFHNRLAAAGKKPKVILVAVMRKMITTLNAMLRDGVSWQPQAD

SEQ ID NO: 362151 - protein, 450 aa, unidentified
MPAISGIDWAAEWNDVLIADSASGEPLAERRFAHDEAGISALIELLLAKRVERVAIERPEGLLVGRLLGAGLRVIAIHPNQVKAARERFRAAAGKSDRFDAFVLCELARTDSHRFRVLVADSDDTKALRALSRAREDLVQTRVALANQLRAELERFWPGAAEIFAEIDSPIGLAFLARYPSPLDAAGLGEKRLATFLARHAYCGRKPAAELLGRLRDAPRGRAGDSEIEARRAIVLALVAALKPIVTKISELTREIAHRVRSHSDGHIFLSLFRDPKSVVCAAALLAEIGDCRARYRSAEALAADAGMTPVAVESGKRKVACFRHGCDHRLRAATCTLADATRHWHPWAADRYATARARGQDHQRAIRTLGRAWIRVLWRCWQDGVAYDPARHRGLQQHIAVTIPDESRPRLDLKATQRMAGAAVTRRAARRDEREALDGKPTSATSTGG

SEQ ID NO: 362152 - protein, 419 aa, unidentified
MSFKILKNNCCGLDVHKTWIYACIGITDSNGRTEYKQARFSSFTKGLQELCDWLVKYNCNDVCMESTGKYWIPVFNILEKNNLWVTLSHPKYTKPQKGNKTDRKDAKWICDLYMCGMVKPSFIPPADIRQLRDLVRYRFKLTCMITGEKNRAQNCLTVSNFKLDDVFSDVFGKSSRFITEQILQHPGETFDVAPFVDGRCKTPIEEIQAAVDGAISMEQAVKLRQCLNHIDELEKHQAEIEREIFRLSDKYESILNLIRTVPGFDKNPLTAIQVLSEIGGDMSVFPTAKNLVSWAGCCPRNDQSNHKIKSTRISRAGSYFKPVLVQVANALIKSKKHPEFTTRYRRIKARRGHKKAIIAICRMILTAIWHILTDLKPYTPEGFLDSRPVNKEKVLTTSQALNLLKQRGYFIKDDPLSVS

SEQ ID NO: 362153 - protein, 357 aa, unidentified
MTTEEKRQTMFVGIDVHKDTHTAVGVSPFGEKMFEMTVGNYKKDFEILTKKVTEISGSLSPYYGLEDCHGYGERLSAYLYEAGHQILAVPSVMVDRDRQKATHPEKSDSLDALGVAKVMMQNIDSLPAYTISEESKKAKQIKELSMDREYLVEERTRLKNHLHNLLHRIWNTEYQEKFKDPFTLKALRYWSKSKPKCDPFLYRSMKRKTKRLLDIYHEIIDLEKEMEILLNENYTIQTASGCGTVIAGMIVGEIGDIARFHSPGALAKYSGCSPRECSSGKKHRHMKTRSGNRRLNCAFHRMALSQISRSGNDLARTYFKRKVSEGKSKSQALVCLRRQMVNIIWCMMKSKTVYRNA

SEQ ID NO: 362154 - protein, 339 aa, unidentified
MREVSTIGLDLAKNVFQVHGVDAAGETVVRRMLRRARVLVYFAQLPPCLIGMEACGTAHYWGRELGKLGHRVKLIPPAYAKAYVRRNKNDAADAAAICEAVSRPSMRFVEIKSEAQQAAAGIHKVREMLMKQRTMLINALRGLMAEFGIVVGAGTRHVGELTAILVDPEEHRIPALLKDGLRRMAEMLRALERQLVGIDKQIVDWGRGNATCRHLITAPGYGPILSSAMAAIVVNPAVFRSGRDFSASLGLVPRQDSTGGKVKLGPISKRGNGYLRRLLVNGAMSVLVSKRAKQDPWLVKLLANKERKVAAVALANKMARIGWALMMRQEDFRTTPAAA

SEQ ID NO: 362155 - protein, 392 aa, unidentified
MYIVGIDIGKNHHEASIVSPEGKQIGRSLRFTTTHKGADSLMSFIFKNIGNSPCVFGMEATGHYWYPIYSFIKAKGYTIYVINPIQSDSLRKMYIRQTKNDSIDSFLIAEVIRFGQFGTTSMADENILAMRQLCRYRDSVISSRTEIKLRIGTIMEQIFPEYEKQFSSLWVSTSMGILEKYLTPENIENAPIDELFEIIKDKSHNRLTRAKAISIKEAAADTFGIKIAQDAFSFQLKQLIDRMNFLDKQIEALDCQILEYYEKFDCYLHTIPGIGMIAAATILAEIGDINRFKNSSALVAFAGIDPTVRQSGEFSSTHNHMSKRGSPYLRHAIFLAATTCSFHNSPLNAYYKKKREQGKHHLTATGAVARKLTTVIYAVLRDGKPYEPKSFC

SEQ ID NO: 362156 - protein, 343 aa, unidentified
MQIHSVGIDLGKTTFHLVALGVAGKVIVRKKFNRKQLLVYTANVPASLIGLEACSGAHFLGRALRKQGHDVRLIPAQFVKPFVKSNKNDFIDAEAIAEAVERKNMRFVPIKTDDQLDLQGIHRVRDRLICRRTAVINQLRAFLLERGMVFAHRPANLKAAMADILENAEADLTPQMRSLINMLWDEWKLVEEQIKKLDLELERISAADAGCTRIRQIPGIGPVVATAIVAAIGNGAAFHKGRDFAAWLGIVPRQYSTGGKAKLLGISKRGNIYLRKILIHGARAVVLRIKRDRAPIGPWLDALDARAPKNVVVVAMANKLARIAWAVLSSGEDYRPMGNTVAA

SEQ ID NO: 362157 - protein, 375 aa, unidentified
MREKLRFLGMDVHAETIAAAIAEPDGEVRSLGTIPNRMESVRKLLKKLGPVEKLRVCYEAGPTGYVLYWQLAELGVQCEVIAPSLVPVKAGDRVKTDRRDAEKLARSYRSGDLTAVWVPDAGSEALRDLVRAREAAKQDELRARHRLGKFLLRSGHRPPSGVRAWTHLHLIWVSQIRFKQVAQESTRLDYLHEVEHMRERVLRLEQAIVEAVKLASPALQEVIQDLQALRGIAHISAVTIAAELGQISRFEGARQLMGYCGVVPSEDSSGKRTRRGSITKTGNAHLRRIVVEAAWSYHRPPAIWAGLRKRQQSVSEEAKEIAWKAQHRLHKRYARLAAKGKDKRKIVTAVGRELLGFIWAIGTRAEATARQRIAA

SEQ ID NO: 362158 - protein, 345 aa, unidentified
MDIGKRNCKACIMNSDGSIAEESVYNNTLAEAEIFAYSMVKKYGRCVAVCEATANLWLKTYQAFEKYNIGVKLANPLKTKAIAEAKIKTDTIDARTLAHLLRSDLVAECYIASREIREDRLLLRLRINLVQDRTRVMNRVHSLLDKYDVICDYNNIFGVKGTRWLKSLKLSHNDQILLHEYVMQIEFLNTEIKNIESKITCEASKNESVKILMSMTGIDYFSAMMIASEIGDITRFRTPEKLVSWSGLCPSIHQSGNSLYMGRMKYGNKKVRWILIQAANTAVRKDDRIKKFYIRIAKRHGHNIAITHVANKMVTIIWHMLVNKKLYNERKQNLYETKLKRIQNT

SEQ ID NO: 362159 - protein, 457 aa, unidentified
MRKKNKRTPGVEEAHPFSGMSRIHAYAAGVDIGAIEIVACVPGDENTQIVKAFGNYTVDLQALAQWMKSYRIKTVAMESTGVYWIPLFEELERQGFECLLISSRSLRRVAGRKSDISDAQWIQTLHTYGLLEGSFRPQGDLVALRTLLRHRSQLVEHRSPHIQHMQKALLQMNVQLSQAATDVTGMTGLKIIRAILAGEREPQALAALREAGCKKSAEEIGKALTGTWREEHLFVLKQSVLLYDFYTEQIQACDEEIERLYGLTRPDWETGEVEPFTRRKKNSRSKNLPQHPEEIRKHLKRISGVDLSVVDGFGVSLAQTVIMEVGTDMSRFPDEKHFCSWLGLAPKHEISGGKVLKNNTLKTRNRAGQAFRMAAQSVKQAECVFGVFYRRLKARLGPSQATVATAHAIARVVYRMLKYQVEYEPLSLNEYQRQYEAQQIKYIKKRAAKFGFQLVPT

SEQ ID NO: 362160 - protein, 367 aa, unidentified
MKKISTVVAKQSRNNSQPTLTIGLDLGDRNSCYCVLDESGQIQVEQRVRTNAKALQEIFSAMPRSRIALEIGTHSPWISRLLSELGHEVIVANARKVRLIGESRKKDDRLDAQTLARLARIDPELLSPVRHRSAQAQADLMMIRARAGLVRTRTGLVNTARGLAKSYGERLRSCNVRNMNPEKAESLSPELQTALAPLLAAIESVSERIAEYNGRIEKLAQERYPQVALLTQIKGVGTLIALTFLLTLEDPHRFAKSRDVGGYLGLQPGRRNSGQSEPQMHISKEGDPYLRTLLVQGAQHILGPFGVDCDLRRWGLKLAERGGRNGKKRAIVATARKLAVLLHHLWVSAEVYEPLHNNDRVPVAAAA

SEQ ID NO: 362161 - protein, 387 aa, unidentified
MPQPNDLSRSLVALDQNSTIIAVIEMSHSSWLVAGMLPGIERQPRKKLEPSPERLLGLLHRWQYEAVRAGRTITRIALAFEAGRDGFWLARWLAARGVEAHVIHASSVAVSREHRRAKTDRLDTELLKRGFLGWLRGERGHCSMARVPTIAEEDAKRPNRERDCLVGERTRIVNRIKSTLARLGIRNFKPTLRKAAERLASVHTPEGMPLPPNTLAELRRDMARLGFVVSQIREIEDARQKQLEQQHETGPHAMVQRLARIVGVGVETADLLVHELLSRTMRDRRAVARYAGLTGSPDESGARRREQGLARAGNARVRRAMIQLAWRFLMFQKESALALWYRARTADSRSGTRKTMIVALARKLIIALWRFVTTGEPLEGVVLRPAF

SEQ ID NO: 362162 - protein, 319 aa, unidentified
MEGSPRVFENFVGIDIAQDKFDAAVLPSVDCLTLDYNDRGVHQLVERLRRLPGCLIVVEGTGGLEQRLVVELQDAGFAVAVVNPRQVRDYARGIGYLAKTDRIDAQVLARFAQEVLPHAREKKPEKLRELDELIARRRQLLQIRTAESQRRERTTSARAGKSIDKVLHCLAKELKNIEAAITEILKSDDTYRRKCEIVQSTPGVGEITSATLVAELPELGKLNRQEISALAGLAPYNRDSGQQQGRRSIMGGRACIRHALYMAALTARRCNPVIKRFAERLQKAGKAFKVVMTACMRKLLTILNTMLKRNILWQPKIAG

SEQ ID NO: 362163 - protein, 354 aa, unidentified
MEKITTVGLDLAKQAIAVHGVGAEGRMMLRKVLRRDQLLSWSASLSPCVIAMEACGGAHHWARELTRQGHTVRIIAAEYVQPFRLGGKNDTNDAEAICTAARQAHMRFVAIKSVEQQAALCVHRLRQGSVEERTALINRLRGLLTEFGVVAPLSPEKLRREWARCQDPDDPRLPLLVRQLVGEQVRALDQVEERMATYAEQIAAQARGSEVAKRLQTIVGVGPTTAAAIVATVSAPQEFSNGRQFSAWLGLTPKQHSSGGKTRLGRITKRGDAYVRTLLILGAKSALQAALRKPPELRHQLQRWIVDTLDRIGYHKTLVAIANKHARIIWTLLVKGEDFDVQRMTLKVAVVAAA

SEQ ID NO: 362164 - protein, 343 aa, unidentified
MTHYVGLDVSQKTTAICVVDTAGHRLWRGQCASVPEQIEQTVRRQAGDDAQIGIETGPMTPWLVHELRGRGLKVACLDARHARAALKMQLNKTDQNDAEGLAQIVRTGWYRSVHVKSLEAHHARALLGARAQLVGMTTRLSNHIRGVLKTFGILPGAMRGLPFERRVEALLTDRSDVAPVVRPMLAAWRQLREQIATFDKAVRALVKASPTCRLLMSVPGIGAVSVLAYVSTVEDPGRFSRSRAVGAHLGLTPRQYQSGEVDRHGRISRCGDTLARTLLYEAAVVILHRVKRASSLKDWALAIAKRSGMGKARVALARKLSVILHSVWRSGEPFRWSEQAADA

SEQ ID NO: 362165 - protein, 310 aa, unidentified
MEATVVGIDVSKDRLDVYVYPVGERFVVTRNSDGLEALNARLAPFGAQAVAVEATGGFETVVAASLGGAGLPVIVVNPAQVRAFARALGKRAKTDPIDAEVIARFVVATKPQIRPLPDEATRFLADLVARRRQIIQMIVAEKQRERQMPTRQLKQSAARLIKALEKELNALDTGIGDAVRGSPAWREKEQLLTSVPGVGDVIARTMVAEMPELGSLDRRQIASLAGLAPWTRQSGKWQGRSFTGGGRTAPRNALFMGAMVAIRHNPTLKAFYQRLIAAGKPKLVAIVAVARKLLTILNAILRDKKPWQPA

SEQ ID NO: 362166 - protein, 345 aa, unidentified
MEIRTIGIDLGKTVFHLVGVNARGEVVVRKKCSRTQLLRCTSNLRACLIGMEACGGSHFLGRALREQGHDVRLMPAQYVKPYVKTNKNDYIDAEAIAEAVTRPTMRFVPIKTDDQLDLQSLHRVRERWVVRRTAVINQMRGLLLERGITIRKGRQHLEASLPGILEDADNKLSGALRVLLTQLRWEMQGLHRQIEESDKLIVRIARELEPCRRLVAIPGIGPLIATATIAAIGNGAAFKKGRGFAAWLGVVPGEHSTGGKQQLTGTSRRGNKYLRKLFVLGAHTVLLQRTKQTSGLSTWLASLTARKRKQVATVALANKMARMVWAVLCKGAAYRPPHLPQPAAA

SEQ ID NO: 362167 - protein, 381 aa, unidentified
MSEHTLSVGFDVHAETISAAAAEDGRGGEVRYLGRIPHSPESVRKLVKKLGGPERIRVCYEAGPCGYGLYRQLTEMGVYCEVVAPTLVPVQSGDRVKTDRKDALKLARCFRGGDLTAVWVPDEQHEALRDLVRAREAAKKDQTRARHRVGKFLLRNGRRRPQRTRAWGSVHMNWLRHQRFDTFAQQATMADYLGEVDHAIERLQRLEQALEQAIEEMPPTSKALVQGLQALRGVAKTTAVTVVAELGRLSRFDHPSQLMGYSGAVPSEHSTGGPGKERRGGITKTGNSHLRRVLVESAWSYRHRPSVQGELRRRQQGLSEEVRGIAWKAQHRLHNRYRRLSGRDKPKPKVVTAIARELLGFIWAIGIQVEQEQASGTPGAR

SEQ ID NO: 362168 - protein, 351 aa, unidentified
MERYIGLDVHRDSCTVAVVGPSGKRLKSFVVETNGSALVEVIRSIAGRRHICLEEGTQSAWLYEILSPHAEEVVVVVPEKRRGTKSDKRDAWTRAEELRTGAILTRVYKAPTHLAALKNAVRGHLMAVRDVVRAKNRLKAIWRSRGIRSTAGVYEAETRGRWIKRLPKAYRPLAEGLGQQLDVLEPLRDQAERSLLEEAKTHPTVRMISTAPGMGRIRSCQVVAIVATPHRFRTRQQFWSYCGLAIVTRSSADWVYVNGHKERRDVRQTRGLTRKRNPLLKQVFKGAATTVITQLSDHPLHEDYLRMIDSGIKPNLARVTLARRISAIVLSMWKHQEVYDPSRHRVVDDQQ

SEQ ID NO: 362169 - protein, 321 aa, unidentified
MQPVTVTVYAGVDVAKASLQLHLQGRQTEFPNQPAGLAKLRQQLQTIPHVHVVCEATGGYERPLVQALHQAQIPVSVANPAQVRAAAQAQGQRAKTDRIDAALLTDYGQRYQPKPTPPTSASQDQLVALTQWLTQLIQAQALAKTQAEHHEAAFVCKQHAKLMAHFQSQIEAVEKQIRALVAQDALLQQRVECLDQITGVGPRTAWLVLAHMPELGQINRQQVAALAGLAPWTRESGTMKGLRCIGGGRPEVRLALYMAALSAARFNPVLQPFYQRLRAKEKPGKVALTAVMRRLLVYMNHQLKALAAAQAATKIDHAKTP

SEQ ID NO: 362170 - protein, 413 aa, unidentified
MKVVYERCAGLDVHKKTVVVGRVVPGSKGGSQVEVRTFGTMTHELLNMADWLRAGGVTHVAMESTGVYWKPVFNILEGEFKVLLVNAKHIKFVPGRKSDVKDAQWIAELLQHGLLKASFVPEQPQREIRELVRYRTHLIQERTREVNRVQKVLEDANIKLASVATDVMGVSGRSMLQAIIAGKDDPAALAELAKGRMRTRIDELEQALTGHVRSSHRLLLRMHLEHIDELNTMLTELNEEIDHLMPPFDPDQLVERLDAIPGVGTITAQVVIAELGIDMSRFPTDGHAASWAGPAPGKNESAGRNHSARTLKANRYLRSALVEAAHAAGKTDTYLGEKFRRIARRRGKKRAAVAVARTILTIIYHMIRNCSQYIERGSAYFDQLNPLSTQQWLTKRLERLGFKVTLEPLPMAA

SEQ ID NO: 362171 - protein, 343 aa, unidentified
MAGIDLHSNNLVIGIVDQDGQRIKDRKLACDLKLVDAFLAPYKAQFKSLAVESTYNWYWLVDGLRALGYPVVLANPAEIEQYSGIKHADDKNDAYFLADLLRLNILPTGYIYDAKLRPVRDLLRRRLGLVHQRTALMLSFKSLYTRTTGQDMSLSRLKGLEVAEAKTLYEHPANRLIATIQKEHIDKLDQSVETIEKTVLASARELPCYEPLQTLPGIGRILGMTITMEIGELGRFQGAGNFASYCRTVASKRLSNGKKKGENNPKCGNKYLAWAFVEAANFAKRYDEQCRKWFDRKAAKTGPVTATKALACKLAKAAWHVINENSAYDPRRMFPELAPKQNE

SEQ ID NO: 362172 - protein, 351 aa, unidentified
MQVIGVDCHKARHTAVLVDAAGQEQARWDGENTPAGWQALAAWGQHQATTLVWGIEGTGQYGRGLAQLLVAAGQTVHEVNPRLTAAQRRVSRRRGKSDAADALAIARVVQQEPHLPRVQAEDVTAVLAVQVIARDRMVHDLTALRNRLHQHLTQLRPVLPTPRPTLTSRAGIAALVDLQIPAGDAMVQAYAQLVRLLAAQMLLVMTQIAELTATIAALCGAWTAPLQAVTGVGVLSAGMLAAHLGGKTFQTDAALAMYAGVAPLDASSGRQVRHRLNRSGNRFLNAVFHRIALSQAAHSPRARAYLAKHRANGKTAKEALRCLKRMLARVILTAWRQCQPPPLAHISLPLT

SEQ ID NO: 362173 - protein, 343 aa, unidentified
MSITMIGLDTAKSVFQIHAVDKAGKVQLRRKLRRSELIPFFEKLDRCTVVMEACGAAHHWGRALTGLGHDVKLITPEAVKPFVKKGKKNDAADAAGVCLAASRPDVKFVPIKSLEQQGMLALHSARSLLVKQQTMLVNAMRGLAAEFGLTVAKGRDKLEDLVALVKADKALPSKARQAFTELFVQCSVLAETIATLEAEIVAHARHNEAARRLMTIPGIGPIAASLIVVTVVDFSVFKSARNFGAWLGLVPRQHSTGGKTRLGRITKAGNREIRRLLVIGATAMVGRAQHWNSAAGVWTRGLLERRPFRLVTVALANKMARIAWALMTRKEVYHAKGRTAAEA

SEQ ID NO: 362174 - protein, 388 aa, unidentified
MDVSKDYFCASGLDVQGNVMFSLTATADKSGFIAMMSALSSHAANLEKVMVAMESSGCYHLNLFSFLTSKNIKTIVVNPLLIANYSKLSLRKTKTDKKDALVIAHYLLSHRETISRCTVSQSYQELRDVAREREFTGKMIAAVKNDIKRMLQSTFPELEKLVNVFSDTMLHFLKTFPSARLIAATDEKDLRQAFIHPDKRMRLVVKPEQIREAALNSVASISPAKEMMLPGKIETLIYLQQRLDELTTLMIRLCKATLEEDLKIITSIDGISTKTAAPFLAELGDLSNYQSYKKVIAFAGVDPSIHQSGKFQGSSKISKRGNRHLRKVIYTMTFCAVRMEGQFKQYFLKRKNEGLPFRKALFATAHKLIRVIFAMLKKRTYFMANQTA

SEQ ID NO: 362175 - protein, 358 aa, unidentified
MDQQHQPKQHDAGLDVSLDATSICILDAKGAVVWRGKCASTPEAIRDALRQHAPALVRAGLETGQLSNWLTHGLRRLGVPVVCLDARHAKAALKLQLNKTDANDALGLAQIVRTGWYREVAVKGMDAQTLRLLLVARAQLVSQRQALANTVRGLLKTFGLRIARGSGGLFAPRVREAAKGNDALLAIVEPMLLAWQALREQAAILDRQILARARDDATARRLMTVPGVGVVVALAYMAVIDDPARFRRSSSVGAYVGLTPKRHQSGEEDWSGHISRCGDDLLRTYLFEAATVLLHRHPRACALRDWGLALAKRVGMRRAKVAVARKIAVLLHTLWRRGEDFRWPELAVAPPASTATAA

SEQ ID NO: 362176 - protein, 333 aa, unidentified
MNPISEVGIDIADASFEAKKRLGGRTYARRFDNTAAGHRQAICWILKGAQGARVCLEATGVYHLQLALSLARTPGIELMLVNPRGARRFAEAQLIRAKTDKVDADGLLQYLARMPFRAWTPPADEVLALQCLAHRLAQLGKEKKREQARLHAAQRAGSHTRLVQQNLRAHIDYLAQQQQAIEREALALTQRHAALAEDLRLLDTAPGVAERSAVKLLAEIAVLPPHLTASQWVAQAGIDPRPDESGDKTGPRRISKQGNARIRAALFYPAMTAEQHDPHVKAYYQSLIARGKKPLQAQVAVMRKLLHAFWGMLHHREPWDGNKFYRLDAFKTA

SEQ ID NO: 362177 - protein, 387 aa, unidentified
MGAVLIGVDPAKRSNTIEVINASEKTLATGRFDNSTVGYREMRALARKWPDRVWVIEGATGVGLHLAQRLVSDGERVLDVPAKLSTRVRAMDTGHGRKNDPADAHAVAVVGLRSPGLRKVSLDDETVALKLMSERRRDLVRSRTQAVNRLHQILMQLIASGAPKALSVAQAKALVATVRPRDAVGKARRQLAVDLIDDVVVFDRKIKTMEARLSEAVAATGTHLTEIVGIAAVTAATIIGEVGNVSRFATSNHFATYTGTAPIEASSGEVVRHRLSRAGNRRLNSALHIAAMANKRHDPRGRAYYERKLAAQKGHMGALRSLKRQLSDVVFRVLLEDQARANPGGQMGATLTASAVDQIPKANTSDKPQPGFTAEATPTRRPTKAAS

SEQ ID NO: 362178 - protein, 358 aa, unidentified
MADKVTVAAVVGGVDTHKDLHVAAVVDQNNKVLGTQYFATTRQGYRLMLAWMTSFGALKRIGVECTGTYGSGLLRYLQNAGLEVLEVTAPDRMERRKRGKSDTIDAECAAHAAFSGIRTVTPKTRNSMIESLRVLKTCRKTAISARRVALQIIHSNIISAPDDLREQLRNMTRMQLIRTLGSWRPDASEYRNVTNVYRISLKSLARRCLELHDEIADLDVMIAAIVDELAPELIKRNAIGYESASQLLITAGDNPQRLRSESGFAALCGVSPVPVSSGKMNRYRLNRGGDRAANSALHIIAIGRLRTDDKTKEYVARRVAEGHTKMEAIRCLKRYISREVYTLLRNQNRQVNSIPIMA

SEQ ID NO: 362179 - protein, 397 aa, unidentified
MVVVAVDVGKNTVACSVTDDQRHRLFGPIDFAMTQSGLAATVTRICEVVPPEAGIKVGIEAAGHYHQPLLTLTSWPAGWEVLELNPAHVTEQRRVQGRRRVKTDAIDLEAITELVLAGHGTRVTVRAEVSGELAAWVRHRSRRVAARTAVKNQLLGQLDRAFPGLTLALPDVLATKVGRMVAEQFADPARLAALGETRFIRFAATRGLQIRQPVAARLVAAAREALPTRDAVVARQIVANDMQMLAVLDQQVAQAEDQLRALLPHTPFAVLTTVPGWATVRASAYGAAVGDPNRWPGPRQIYRAAGLSPMQYESAGKRRDGTISREGSVQLRRALIDLGVGLWLNDPAAKTYAAGLKGRGKNGGVIACALAHRANRIAYALVRDQRPYDLRRWPRED

SEQ ID NO: 362180 - protein, 425 aa, unidentified
MTDVLVRLAAGGGLTREGVVGLRPDLEAFCRPPPSEECQRDLIGAWLDAPTEACPLALRRRWPPQERGPKVIVIGIDPHMRTHTAVALERATGEIVAERTVAARVQGRGELVLWARSLDVERVWALEDCRHVSGSLERFLLARGERVVRVPPKLMAQARKGARTRGKSDAIDALSVARAFLREPELPAAFLAEKEREIRLLTDHREDLVGERTRIGNRLRWHLHDLDSELEIPPGALDRYVWLDRLQTWLCGRAQTVQVEIASELVARLRELTRRINALERELEALLAYEATELLCLVGCSTLTAAKLVGEVAGVDRFSAESKLAKHTGTAPLEVSSGERQRHRLNRSGNRQLNCALHRIAVTQARMHPPARAYLARKQAEGKSRREALRCLKRHLARAVFNALKDMERRKMHETSTLALEPALT

SEQ ID NO: 362181 - protein, 360 aa, unidentified
MNATTVAVDLAKSVFQLAVADEHWRVIDTQRLTRTQFERWFTNRDVTLVIMESCGSAHHWARWLNGLGIEVKLLPAQYIRAYVKRNKTDAVDAAALLEAARSSDIRPVRIKSVEQQALQGLHRIRSLWMGTRTSRINALRGFCREFGIAIPVGARTGIEAISRVLADPRSAVPDMIRGTARLLIEEIRLLEARIAQIERELAEIARHSPACTTLLSIPGIGLLTATAMVAATSGDVSHFKDARHFASWFGLTPREYSSGSSRYLGRISKKGDRYLRMLLTHGARSVLRAAAVAVNAGRQVCGIRQWALAVQQRTHHNKAACALANKLARICYATLRDHAPFAESERISKKLNRESFAMPA

SEQ ID NO: 362182 - protein, 312 aa, unidentified
MEKTIGIDVSKARLDVHVLNSKSDLQFDNSADGIKECCKLCLEVEPEIIVMEATGGYEYAAAAELSANGLPVAVVNPRRIRDFAKAVGVTAKTDKIDARIIALYAVNCKPMPQGVLDDNSRRIKALTSRRQQLLEMRTAENNRMEHAIDKEIRRSLETIIKSINKEIEKVDRQIGDHIDNIPELKEKADKLKSVPGIGDTTAAMLISELPELGTFNRRQIASLVGVAPINRDSGTFRGKRMTGGGRKNVRNRLFMPTLVAIRYNPPLRKYYRRLVEEKGKTKMIAVVAAMRKLLCTMNAMLKNNQQWKMKIS

SEQ ID NO: 362183 - protein, 366 aa, unidentified
MFTERTSVGLDVHARSVAAAAIDSVTGELVQATLTPDYGDVRGWLDRLAGPVAVAYEAGPTGFGLYRHLQAAGVRCEVAAPSKLQRPAGDRVKTDAKDAIHLARLLRLDEITSVAIPTIAQEAARDLVRAREDCRGDLMRARHRLSKLLLRHGIVYYDGKAWTGKHDIWLRHDALRRLPSDAATRLTFDADYDAVLTVKARRDRLDTAIEEAAADCEFTAIVRRLGCLRGIGTLTAFALAVEIGDWTRFTGNTIGSFVGLVPSEHSSGGSRSQGSITRTGNGHARRLLVEAAWHHRPRYTVGKVLRARWDLAPAAARARGNDGNRRLHRRWVQFIDRRKRSTVADVAIARELAGWCWSLAVLDTST

SEQ ID NO: 362184 - protein, 315 aa, unidentified
MTTSSGKFVGIDVAKDKLDIAVLGEKKASQVENDEVGIAKLIKRLQTLDPELIVVEATGGYQRAVVLGLYEAGLPVAVVNPSRVRQYARASGLFAKTDKLDAFNLAEFGKQMKPRKFEAKSEGGRYVSGLLVRRRQLEEMLKAEKSRLRTVPAAMRPSVERIIEVLKEEIKQLEKELDKFMKENEEWQAQEQILTSAKGVGRVTAATLLAELPELGKLDRKKIAALVGLAPMNADSGKKRGYRKTKGGRMEVRNVLYMSTLVATRYNPLIQVQYQQLLKRGKVKKVALTACMRKFLTILNAMMRDKVPFRQTDIA

SEQ ID NO: 362185 - protein, 349 aa, unidentified
MRFYNQQHRFYCGVDLHARTMYLCILDQAGEVVLDRNLTANPDAFLRAVAPFRDGLVVAVECLFCWYWLADLCAREQIAFVLGHALYMRAIHGGKSKNDQIDAGKIAQLLRGGNIPVAYVYPAGMRATRDLLRRRMDLVHKRAEAIAHIQNTNSQYNYAPFSKKLGYAANREQLRIAERFTEPSVRRMIDIDLALIDRYDELLGEVELYLTRTAKIDDVNTFQRLRSVPGIGKILALVLLYEIHDVRRFPTVGDFLSYARLVRCVHESAGKQLGSGGKKIGNAHLRWAFAEAACLFVRQSERAKKWLARQEHKRGKGKALGILAAKLGRAVYHLLTKKVAFEEQRFWND

SEQ ID NO: 362186 - protein, 403 aa, unidentified
MRLFVGDDWAEDHHDVELMDATGRRLATARLPEGVAGMARLHAMIGERVGEDPDEDVEVVVGIETDRGPWVAALVAAGYTVMAVNPLQAARFRDRLGMSGAKSDAGDAHVLADMVRTHAHELRPVAGDSARAAAIKVVARTHKTLIWERTRHTQRLRHALRDYFPAALVAFADLDAADTLELLAKAPTPAQAARLTSPQISAALKRARRRNVAEKAAVIQTALRAEHLGQPEVVADAYAASVQALIAVLIVLNTQVTTLQGQVEAHFGQHPAAEIITSQPGLGPILGARVLAEFGDDPHRYTCAKARKNYAGTSPITRASGKKKAVLARFVHNDRLIDALMTQAFAALKASPGARAYYDRHRARGASHNAALRRCPGSGTDARVTRAPTQTVDPDGIPSIPSM

SEQ ID NO: 362187 - protein, 372 aa, unidentified
MNNIRFIGLDVHKQSISVAVADGGRSGSVEYLGEIDNDPVAIGKLCARLQRPGKTLSFCYEAGPCGYGVLRQIQGLGHQCDVVAPSLIPRKPGDRVKTDRRDATMLARLHRAGELTAVWAPDADHEAMRDLIRLRGVVRQVVTRARQHLQGFLLRHGRTHGQGTAWRMAYRRWLSTLAFEHPAQQIAFQDYVDAVTDAERRLKGVEEQILKLIPAWSLCPVVDALQAVRGIALVTAVILVAEVGDFTRFANPRQLMAYFGLVPGERSSGETTRRGGITKTGNSYARKALVEGAWAYRMKPRVGRHKVDRIEALPKPVRDIAWKAQIRLCARYRQLSARGKTANVVIVAIAREMVGFVWSIACMVQSAPKAAR

SEQ ID NO: 362188 - protein, 429 aa, unidentified
MNCTQNKKIEQVKETTMIVGIDVGSEKHYFRAFNWRGIELTRKPVAFSNSMEGFNSFYNTIVELMQKSELEEALVGIEPTGHYWFDLGQFMGEKDIKFVMVNPHHVHKTKELDDNSPSKNDRKDPRVIAGLVRDGRYFYSYMPTGAYAELRNASNRRFVLVEEQTRAKNRLQKWIAVYFPEYKGIYTHIDAKGGMLVLKKAPTPEEIVRLGVEGIIKIWKDAKLRGNGHKKAVLILAAAMRSIGLKAGLTEARMEIQDLIEDYELQTKRLERVNDLIKGLCQQVRYADKLLEIKGIGITTVAGFIAEVGDITRFDSTKELQKLAGLELVADSSGKHNGKTKISKRGRKRLRYLLFEAAISVVGKNEEFKEIHRYYTTREKNPLKKMQSLIAVACKLIRVFHAILTKGIRYDASKMLKDIRHPGEQLKAA

SEQ ID NO: 362189 - protein, 365 aa, unidentified
MTTRQHSTSSSTDPPNRGEVVLGVDTHGEVHVAAVVSPLGKVLGTESFPATAAGYRRLLVWARKQGTVRRAGVEGTGTFGAGLSRYLLAQQVEVYEVSRPDRSARRLLGKSDPLDAQAAARAVVSGRARARAKSGDGPVHSARMFKLAKDSAVKARTQAINQLKAVLVIAEPALRERLSSLGNRELFRTCARLGPGDGEDGESAVAQATHMTLRMLAERIEQLTGQIDQLNQRLTQLLEHHAPQLLVPVGIGPDSAVTLLITMGDNPERLNTEASFAALCGVSPIEYSSGRRSTRRLNHGGDRQANAALHRIVFTRLRHEPRTQAYYERRTQEGKTRREIIRCLKRYAAREVFNLVRPVSRAPTL

SEQ ID NO: 362190 - protein, 406 aa, unidentified
MEAAVITAVGIDVSKSKSTVAVRRPGGEIALRPFEVHHTNSDLKKLASTLKKLGGDIRIVMEHTSTYWRPIALTLKEAGFFVSIVNAMLIHDFSDNTIRKLKTDRADALKIANYALTFWDTLPPFNNEEETRLLLKMQSRANERITATATALRNGLIALADQTFPGVNIAFAPNTKNANGHEKWVDFFLRYRHKDCVCQYSMEAFKESYRGWCKRKNYKFRTDTAHKIYLLAQEGVATLPKCESTKMLITQACKSLNAVCEAKQSTQLEMQRLAAMLPEYEVVMQMEGAGLITGPALMAEIGDVRRFKNKKALVAFAGIDAPPFQSGTFESKSRHVSKRGSPHLRRTIFIVSNIILTRSNPENAVYCFMDKKLLRAGKHPKGSPKRTKEQDVRFADTLEKILNCNH

SEQ ID NO: 362191 - protein, 333 aa, unidentified
MDREYIGVDLHKSFFQACALTAAGERVWEGRFPRTPDGIGRFVARGVDARGAIAVEASGPTWAFVDALASTGATVYVVDPRKTKLKAGYAAKTDRLDARRLADALRRESVVSIYIPPPELRELREMCRGRHQVVRLRTRLAQMIRALLLRCDAGEPPGTRLYSPRALAWLAAVQLGPEATRTLRRLERLYREVHKDAHAADAELKQRAAADPIAVALTGLTGVGPVLAVTLRAEIGDITRFHRGAALACYAGVVPRVDQSADRRYHGRITRSGSPWLRWALVEAASHAIKRPDAVGRWARRLAVRKGAMKARVALARVLCDDVIAAWPRSPSV

SEQ ID NO: 362192 - protein, 412 aa, unidentified
MSVFCGIDWAESHHDVALVDQDGQLVAKRRISDDLAGYRLLLDLLAEHGDSPETPIPVAIETSSGLLVAVLRTGRRKIFAINPLAAARYRDRHGVSRKKSDPGDALILANILRTDMHAHRPLPDDSDLARAITVLARAQQDAVWARQQIANQIRSLLREYYPVALAAFLGKQGGLTRPEARAVLAVAPTPSTAARMTLPQLRAALKRAGRSRGIDAEAERLKTALRFEQAHQPALVEEAMGRQLLALLTQLDAACKAVEDLTEAVEASFRRHPDADILLSFPGMGIQLGARVLAEIGDDRARFADARALKAYAGSAPITRASGKKRFVGRRYIKNNRLTNAGHQWAFAALTASPGAAAHYRRRRDRGDWHAQAQRHLFNRMIGQLYHCLQTRQHFDEQHAFTSSSADLAVAA

SEQ ID NO: 362193 - protein, 342 aa, unidentified
MTQYKRIAIDTSKAVFTLHGIDQADRPILRINLSRAQMIAFFTKLPAIEIAMEACGGSHYWARELAALGHRVVLIPPQYIKPYVKRGKNDRNDAEAICEAAGRPGMHFVPVKSADQQAQGMVLKVRETLVDQRTALVNTLRGHAAEFGVIAGKGVSNIIPLLEKIAAETAIPLEARETMALLGEEIARLDARLKQMETKLNQAHKANPVSVRLASIPGVGPITALTLATEIDPTAFESGRHLAAWAGLTPREHSTGGKQRLGGISRAGNERLRALFVLGATSVIKVAERPGNKLANEWLLKLLRRRPRKVAAVALANKMVRIAWAMMMSGETYRRAPAAGVS

SEQ ID NO: 362194 - protein, 446 aa, unidentified
MAQRTRMKLDIANPNAAGVDVGSASHFVAVPPDRDDEAVREFTSFTEDLERLADWLVGCGIDTVAMESTGVYWIPLFELLEARGLTVYLVNARHVKNVSGRKSDVLDCQWLQQLMSYGLLSGAFRPKNEICALRAIMRQRTMLLSYQGQHIQHMQKALSQMNIQLANVISDVVGETGQRILRAIIAGERDPLKLAELKHGRIQASTEQIAMSLRGNWREEHLFALTQAVELFDAYSQALQRCDVRLESMLGALSRTKDEPGPTKRRRISKVKNAPKFDVRTYLFRICGVDLTAIDGIDTTTALKIIAEIGPDLSRFKSAKHFASWLGLCPGTKISGGKLLSGATKRTANRVAQALKMAAISLRASQSALGAYFRRMCARLAKGKAVTAVAHKLARLIYTMLTKGAAYVDQGQQHYEERYRQRVLFHLKKKAAAMGLELVPVQPQQT

SEQ ID NO: 362195 - protein, 315 aa, unidentified
MRSTAAQSVGVDISKDALDVAIHPGGESFRITNNPEGHRALIKRLKGFDIARVVFEATGAYHRLFQQALVEAGLPWVKVNPYQARHFAQATGKLAKTDRCDALMLARMGAALDLETRAPASKTVEALKELVNARDALIKDRVAALNRQAIAVSPLIKRQLAQRLRQIDGQIEAIDRRLKTLRNADSDLCQRFDILTSIPGVGEVTANVLVVETPELGRLEHAQAASLVGLAPVPRDSGQTHGKRSIRGGRPRARQALYMPALNAIRLNPEFKAKYEAMVKAGKPAKVAIVAIMRKLLILANALIRDRRKWAPANP

SEQ ID NO: 362196 - protein, 343 aa, unidentified
MQTVTTIGLDIAKSVFQVHGVDANGQVVIRRQLKRRYILAFFQKLPPCLVGIEACASSHHWSRELQALGHTVRLMPPAYVKPYVKRHKNDATDAEAICEAVSRPNMRFVATKTPGQQSCLTLHRTRHLFIRQQTSVINAIRAHLAEFGIVAPVGRHGVEQLLQVVADKSDKRLPEVARTCVAALGAQLQTLKAKILEFDRLIMAWHRSSETSRRLDDIPGVGPALATALVASIADPNAFRSGRDFSAWIGVVPKQNSSGGKDRLGSISKRGDRYLRGLFVAGALAVIRYAKIYGTKHRPWLTALLARRPTKVAAIALANKIARMAWAMMAKGERYKEPVALAV

SEQ ID NO: 362197 - protein, 359 aa, unidentified
MFAGIDSHKDSLAVAVVDEVGLPVARCDEPNTRSGFLRIGELLAKHHVTRVGIEGSGHFGRCVAAYLALDWNEPGVAVLEVPTLMTSRERGARPGKGKTDPIDAVAIARITMREPDLPPVRLAVGDAADLRALLDYREDLVTERGDLVNRAHVDLHGLFPGYHEQIPDLTSKTHLQAAQLLLAGDPRVRAEVTRRRLARIVAIDVEAAGLKRRIARMVADTGSSLTSIYGVGPIIAARFLAEVVDINRYANRNTFAATNGTAPLAASSGRTQRHRFNPGGNRRLNRCLYTIAITQIRADTEGRAYYLRKREAGKTRREALRCLKRRLSDIVYGTMRRDADGVDAASATRARPTANRPAA

SEQ ID NO: 362198 - protein, 338 aa, unidentified
MYYTGIDLHKKTSFITTIDESGKVVFRRNFPNKEEQILDYFVNLDGPTRIVIEAMCSWFGLYDLLKAHNFNVVISNPLKTRAIASAKIKNDKVDSHMLARLLRADLIATVHVCSLKTRKLKELLRHRQRLVRDTTRMKNRIHMLLMKNNTSIAVSDLFGVKGMRHLKNAELPGYHRKQLKSYLTVYNCLTEQIQPLTIQIRDLAQKDPMAKLLMTIPGIGPLTAMFIIAEIEDIFRFPSYRNLSSYAGLVPCLDASADKSRTGRITKQGSPYLRSALVEAAQVIPRMKKTRLNVFFRKRIVRAGYQKAIVATAHKMLQVVYYVLKNQAPYQEHYSASA

SEQ ID NO: 362199 - protein, 370 aa, unidentified
MKKRITFVGLDTHKNSIEAALADGGRNTEVRLYGTIGGDLASLDKMIRKLQTTGAELRFVYEAGPCGYEIYRHLRAHGFHCDVVAPSMVPKRSGDRIKTDRRDARNLARLYRAGELTAIYVPREDDEAMRDLVRGRQDAIHAQRKARQQLGGFLLRHGFRYSGKCVWTLAHRRWMAEIKMPHPSQQVILEDYVHSVEECTQRVHRLTEQILQLMPDWRMHPLVTALQALRGVAPVVAATAVAEIGPMGRFERPRQLMAYLGLVPSESSSGGSVRRGAITKAGNGHARRALIEAAQAYSHPARISRVILKRQEAVPEPIRQIAWKAQLRLCSRFRKLTARGKSRNRAVTAIARELSGFMWAIAKQVPVPQD

SEQ ID NO: 362200 - protein, 393 aa, unidentified
MICVGIDVAKDKHDCFILSSEGEVLADVFTIQNNAEGFDMLLQTIRRCARPEDKIKVGLEATGHYSYNILGFLLDKGLDTYVINPLHTNLYRKSLSLRKTKTDRVDARTIAAMLMSDVDLKSYTDTAYHNEELKSLTRYRFDKVRERAKLKQSVSRLVTILFPELEKLVPTLHMESVYALLSEFPGAKQVAEAHLTHLKAVLYGASKGRYGRDMATTLRDAARCSVGSVMPAKSLELQHTIRLIRELDAEIEDIETVIQSMMDEIQSPITTIPGIGVRMGAMILAEIGDFSRFDSPDKILAYAGMSPSTYQSGQLSLSGPYSHMEKRGSRYLRYALYNATKYVCLWDPAFAAYLAKKRGEGKHYNVALSHAAKKLVRLICALEKSQQSYRNAA

SEQ ID NO: 362201 - protein, 399 aa, unidentified
MRQQLWAGIDAGKTDHHCVVIDTDGQRLLSQRITNDETALQELITAVTALADGGEVTWAIDLNHGGAALLITLLIAADQRLLYIPGRTVHHASGGYRGDGKTDAKDAAVIADQARMRRDLQPLRPGDETAADLRILTARRGDLVADRTRAINRLRAQLLEYFPALERAFDYSNNKAALILLTGYQTPDGLRRAGAARLETWLRKRKARNASAIADTAIAAADAQRTTVPGQQLAAAMVARLAKEVMTLDTEISDTETMIEDRFRRHRHAEIILSMPGFGLTLGAEFLAATGGDMTAFDSVDRLAGVSGLAPVPRDSGRIHGNHKRPRRYDRRLLRACYLSAQIAIRNDPVSRTYYDRKRLEGKTHTQAVLALARRRLNVLWAMLRDHAVYQPATTTAAA

SEQ ID NO: 362202 - protein, 314 aa, unidentified
MSEKTFVGIDVAKDTLDVAIRPEGIQRNFPNDEEGWHSLLLFVRPLGPSLIVLEATGGYQMGIVRVLAAAALPVVVVNPRQVRDFAKATGRLAKTDSLDAGAIAHFAEAVKPDIRPLKTGEAEKLDALMTRRRQLIDMITSEKNRLHSATEWTKQDIETHIAWLEHALEKTDSDLDNLIKKSPLWKEKRSILLSVPGIGPVTAATLIVDMPELGTLNRKKISALVGVAPFNRDSGTMKGKRTIWGGRASVRSSLYMATLTAVRFNPVIKPFYQRLVKAGKLPKVALVACMRKLLVILNTMVKTNTNWRINPCAP

SEQ ID NO: 362203 - protein, 415 aa, unidentified
MKVVFPTCCGVDVHKTFLVATIITTPADSLQPNYQKKRFSTFNSDLNRFADWLLEHNCLDVCMESTGKYWVPVFNILEKRGIRVVIANPKWVKAVKGNKDDAKDSKWIGDLFRIGLVKSSFIPNLNIRILREFTRYRYKLVSMKSSEKNRFQNAFTVCNVALDSVVSDMFGKSATAITDYLTSDESFDSEHCVSLLQRSLKKKAEQVLESIEGFFIADEQKARIKIIREHHDFIEKMIAKVDTCVNEMVAKYEGEINLLCTIPGIDRRSAITIISEIGTDMSQFGSSKRLCCWAGLTPGNNESAGKKKSVRISRAGVYLKPALVQVAHAAVKDNDHPYYKLKYERIAKRRGKKRAIIAIARMILTAVYSMFCTGEVWNPVDLYKVDMPEHLKEQQLAKAIKQATRFLEKQGLSVA

SEQ ID NO: 362204 - protein, 338 aa, unidentified
MIVIGVDVHKQSVTAVAVDEAGRMLDEQTIAVANGDLLAWARELGEQRLWALEDCRQLTRWLERQLLAAGEQLVRVPPKLMAPERRAGRARGKSDPIDALAVARAALREPGLSRPRPDEQPFRELKLLVDHREDLVDERRRAQQRLRWHLHQLDPSFVVPLRRLDRPTHLERVGRWLARREQDVQARIARELVSRCRSLTRSIAELDLELQQRTAETAPALLDMPGCGPLTAAKLLAEVGPIDRFQTDAQLARHSGVAPLEASSGRVQRHRLDRGGNRQLNAAFYRIAITQARYHPAARAYLERKQAEGKSRREAIRCLKRQLARVVFNTLKASPLLT

SEQ ID NO: 362205 - protein, 403 aa, unidentified
MNMNAVGIDVSKGKSMVAILRPYGEIVSSPFEIKHTSSNIQSLIAQIRSIDGESRIVMEHTGRYYEPLARELSLAGLFVTAVNPKLIKDFGAHSLRKVKSDKADSVKIARYTLDSWTELKQYSLMDELRNQLKTMNRQFGFYMKHKTAMKNNLIGILDQTYPGVNTYFDCPAREDGSQKWVDFATTYWHVDCVRKLSLNAFVDHYQKWCKHRKYNFSKDKAEEIYGAAKELVPILPKDDLTKLIVKQSIEQLNTASRTVEELRTLMNDTAAKLPEYPVVMGMKGVGPSLGPQLMAEIGDVTRFTHKGAITAFAGVDPGVNESGTYEQKSVPTSKRGSSSLRKTLFQVMDCLIKTKPQDDPVYAFIDKKRAQGKPYYVYMTAGANKFLRIYYGRVKEYLMSLPK

SEQ ID NO: 362206 - protein, 387 aa, unidentified
MTKKKGRVVGLDVHPDSFAGAVVEGSEPGSAQVLSTSTRVQLEQLEQWALRHTRTEDRLVLEASGNAFAVAGRLRAIGRRVEILDSHRAGKVGKVYCANDRVDAVKIARIYLSALSPIVWQPDPKTLERREVFSAYQAVVKESTRAKQQLRSMLNEHCVRLEKGFRLCHPNAIRRLVGLREWTPARRMLLQQLHGSLVAARVRRTCLRRHMAQEIVAEEALLRLTRLCGINLVTLYGVVAAVGDVRRFSHSKKLVAYLGLNPSVSQSGKFEGDGALKRHGRGALRALLIQSGKKLLEVNNPLQKWGLAVASRRGRNKAAVAVARKLCVALWHVLMGHAIGALERLDTLETKLSKFATEMGGAVLSALGYNNKADFVKKKLYVLRNYP

SEQ ID NO: 362207 - protein, 473 aa, unidentified
MVRPDECPVIPLGSLCLFNAVRAWVSALKAMLKVINPKAAAADVGSEDIYASIAGGPPERFGTVTRELHRLRDWLLSHSVDSFAMEFTGVYWIALFEVLEKTSIRVCLVNGAHVKTLPGRKTDVADCMWLAELHSHGLLRPGFVPPPAIRRLRDYMRLRENHVAQGSTCLLQAQKALELMNIKVHDVISDLAGVSGQKMIRAILEGEKRPEVLIALCDPRILERKRQRLLDALEGTWAEQHLFALKQAWQGWEFSRRLMLDCDREIERILPTLPKSPQLPDGQTGGEPSRGKRPSKNSPQIEGLHQQLLTLLPGRDPTLILGIGDQSLMQLISEVGTDLGAFATKYRFTSWLGLAPGKQNSGKQKKNRSRKGGRAGQIFRVLAQTVGRAKDSALAGFYRRIRAQRGGLVANKALARKLAEFYYDAMTKGMRYVEAGLEKGEQRYREQATKKLEALSRKFGYRLVKESDPIPAT

SEQ ID NO: 362208 - protein, 482 aa, unidentified
MKPKPQEKTKKATDHPTQRHWREMNRKQRREMMRKIQSEDISLEVVHPDAAGIDIGNESHYVAVPPSRGSQPVRRFGCTTAELKAMADWLKQCGIRTVAMQSTGVYWIAVYDILEQASLEVYLVNARETKNLPGRKTDVQESQWLMKLHTYGLLRNSFRPSQEIRRMRTYWRQRDDLVQSAGRHIQRMQKALTQMNIQLANVLSDVSGVTGQAIIKAILAGERDPHKLAMLRNSRVKASEEQIARSLEGNWQEDLLFVLQQEQDGYEFCQKQMAECDRQLNHYLEQREDRSQGAPLPEEKRKGRLKKKSGNKPQFDLRTGLFRMSGTDLTRIDGIDVVTATTILSEAGWDMSKWETEDHFVSWLRLCPDNRISGNKVIGKGRLPTNNRVTIALKMAASTLRLSDTYLGAQFRRFRTRLGAPVAIKAMAAKLARLVFRMLRYGMTYVDKGAACYQAQHRHLQIKQLKWKAASLGYQLIPVPAA

SEQ ID NO: 362209 - protein, 342 aa, unidentified
MSMVKSVVGGVDTHADAHVAAALDSNGGVLGVESFPADEAGFEDLLGWLVGFGPVGLVGVEGTGSWGVGLAPFLTASDVAVVEVDRPNRQARRKVGKSDPTDAVAAARAALSGAASGVPKTRNGPVEQMRVLLVAKRSARAQRIQTLNQLRHLVFTGPESIRTRFKDRYKTGLITEAARMRPRPGSDPVLFTTNVVIRSLARRIQGVNNEIRSIDAMLGELVAAVAPSLLELYGVGVDAAASLLVTAGDNPDRLRSEASWAHLCGVTPVPASSGKTIRYRLNRGGDRNANSALYRIVLTRMSSHDETRRYVARRRAEGLSSLEVIRCLKRYVARRVFKELAA

SEQ ID NO: 362210 - protein, 375 aa, unidentified
MKEKVRFLGLDVHAETIAVAVAEPDGEVRSLGTIANREGSIRKLVKKLGPVEQLRACYEAGPTGYVLYWQLTQLGVECAVVAPTLVPVKAGDRVKTDRRDAEKLARSHRSDDLTAVWVPDEGSEALRDLVRAREAAKQDQLRARHRLSKFLLRRGRRPAMGLKAWTERYLAWVQQIHFSQPAQEFTLLDYLHEVQHMDERVKRLEQAIAEAVKLASPQVQEVIRGLQALRGVAHLSAVTIAAELGNISRFESARKLMGYSGAVPSEDSSGKRQRRGNITKTGNAHLRRIVVESAWSYRFRPAIGPRLRQRQEGVSEEIKEIAWKAQIRLHKRYSKLMAAGKDKKKIITAVGRELLGFVWAIGIKAETAGKLPMAA

SEQ ID NO: 362211 - protein, 388 aa, unidentified
MEVQTVDSLSPVAADHDPVRCLLAIELSKKSWIVAITTTLSDKISQYTLDGCDWKGLLELMERVRTRVAREVGRPVEMISCYEAGYDGFWLHRLLERHGVRSHVIDPASVQVDRRARRAKTDHIDAKRLLRSLMAYLRGEPKVWSVLRVPSVAEEDDRRLHRERDRLIAERGQHVNRIKGLCAIHGIYDYEPMRRDRMLRLEQLHNGDGRKLPPRLKAEIARELQRLELILGMLKEIEAERDAIALTEKVSAHTNAKKIQNLVKLKAIGAEIATVLTGEVFYRPFNNRLQVASYVGLTPSPFQSGSKCRDQGISKAGNPKARSTMIELAWLWLRHQPDSPLSIWFRERVGTRKGRIRRITIVAVARKLLIALWRYLETGVVPTGAVLN

SEQ ID NO: 362212 - protein, 360 aa, unidentified
MAKARTVVGLDVHATKIVAAVLDAEAGQLQMFGMSGESTTAAAFCAGLPRPVRVAYEAGPTGYGLARELSRRGVECVVAAPSKIPRASGDRVKTDRRDAEHLVRLLFAGKLHAVRVPGPEEEALRDLVRAREAVRLDLMRSRHRLSKLLLRHGIRFDDGKAWTDRHRQWLATITLPWPAAQATMLDVRGAIDALTHRREQLQREIVGMLPASPWVVQVGRLRCLRGVDTLTAVGLCAEIGDFERFARAEQLMSYVGLVPCESTTGQQRRLGSITKTGSEHARRLLVEAAWHYRPRPKIGKALGDRQDGQPAHAIAIAWSAQQRLHRTWKRLEQRAKRRTIIAAAAARELAGFAWAITQIE

SEQ ID NO: 362213 - protein, 401 aa, unidentified
MQQRLWAGIDAGKTAHHCMVVDADGQRVLSRRIDNDESALLELIRAVTSLAEGGHLTWAIDLNAGGAALLITLLLAHDQELLYIPGRTVHHAAGSYRGDGKTDAKDATIIADQARMRRDLHPLRRGDELVAELRILTSRRSDLSADRTRTINRLRERLGEYFPALERAFDYSNNQAALILLTGYQTPAALRRIGTARLETWLQNRHARKVSSVAASAVAAAHTQYTVVPGEQLAADLVARLTQEVIDLDAALKEIDVMIEDRFRRHRYAEIIVSLPGFGPRLGAEFLAALGGDIALYDSADRLAGVAGLAPVPRDSGRVSGNLHRPRRFNRRLLRASYLAAQLSIRHDPASKHYYDRKRAEGKRHTQAVLALARRRNNVLWAMLRDRTHYQQPTGDPATAA

SEQ ID NO: 362214 - protein, 344 aa, unidentified
MQITTVGIDLAKNVFQVHGVNDRGMAVLRKQLRRDQVAAFFANLPPCLVGMEACGGAHQWARKLQGLGHTVKLMAPQFIKPYVKSNKNDAADAEAICEAVSRPTMRFVPIKNIEQQSVLALHRVRQGFVRARTAQANQIRGLLGEYGLIVPQGIGHIAIRVPDLIEDASNELPGTFRLLIHRLLEHLKQLQRQVAEIEGQIKAWHRSSEASRRLAKVPGIGLLTATALVATVGDAKNFDNGRQLAAWLGLVPRQHSSGGKSTLLGMSKRGDAYLRTLLIHGARSVIYRAGQRAHADTWLVKLIRRRNANVAAVALANKTARITWALLARDREFQFDYTTVAATA

SEQ ID NO: 362215 - protein, 386 aa, unidentified
MSLVTSVPVSLTSTHPGISPPMYPMVVGVDVSKDKLSCALVLRATQEMQWRMDVANTVAGIDRLIGRLIGDIARLFNGAAMSPAMTVALVVEPTGRYSDLIVRQANENGIPILLAPPARAKAFLNSLQSRAKTDPLDGVGLAYFGLSRMLRPFEVKSETVEQIEQLLSARKSLSSSVAGFEMQRRELKYAAASLEPAIAALKTQIKAIDKQIAQMMVGTKTTPAAPELAAARALDAVPGIGPVIAAAVAAKLSSKSFTSPEAFVAYIGLDIAVRQSGKRLGQNGLTKQGDAGLRRLLYLGAQANLKCKDPDNPFKLLYKREREKGLKSTGALCAVARKLARLCWSIHRYNTEYDPARVLTQPKLEKKQTIASDILTDQEVQKGTVH

SEQ ID NO: 362216 - protein, 351 aa, unidentified
MMIIGVDYHPSFQAIAFLMEETGECGEQELHHSDGQAEKFYRDLKQRGISVRVGMEATGYSRWFERLLAELGFELWIGDPAEIKAKRVKKQKTDRNDARLLRRLMLENNFPQIWVPSPENRDLRQLLWHRHRLVQMRTRIMNQLQALAMNEGYRWKKKLFREQGRAQLEKLTLAPWASRRRQELLELLDRMNPTIEELTAAVEREARKRPEALRLMTHPGVGPLTALAFVLIIGTWERFPCGKQIGTYVGMIPSEDSSAGKQRLGHISKQGNSLLRFLLVEAAQAAARSHPDWRRRYMHLAMRRHKSIAKVAMGRRLAIRLYWMWRNGCEYSQSLEFGSYAGQLGIGHGVK

SEQ ID NO: 362217 - protein, 351 aa, unidentified
MSHNLNSTITVIGIDIGKNSFHVVGLDVRGGIVLRQKWSRSQVEARLANMPTCLIGMEACVGAHHLSRKLKALGHDARLMPAKYVRPYSKGQKNDFRDAEAIAEAVQRPTMKFVATKTVDQLDLQALHRVRERLVSQRTGIVNQIRAFLLERGIAVRQGQWFLRAELPRILAMPPDVLSPRIVRIISSLAADWRLLDERIEELSGEITAFAKQDSGCERLMSIPGIGPLISSAMVAAIGTGDVFSNGRDFAAWLGLVPKQISTGDRTILGKISKRGNRYLRTLFVQAAWVVLVKIKPSRWEGHGLKHWIEAAKKRLHRNVLAIALANKLARIAWSVLARGRAFEASKLQAA

SEQ ID NO: 362218 - protein, 390 aa, unidentified
MSKVFFGIDVSKDSFNYCLIDESMKTIESGRFNMDREGFEPFKEIIDRYPDSIIGLESTGGYHTNLLSFLISFKKEVCLINPVLIKRFASSVTLRKTKTDVIDASVIAHFILKNKDYIHYFILDTTDEIKTLARMREDIARDVAKAKIRLKQHLAITFPELVSRYNPFTDTILTILKAFPTVEDIRRAKVPDIKAVMEGIRGRDACISPEGLKDLAEGSIGKSSDRYRVIIRHDVDMLFFLTGKLKEITDAFMEEIERTSKKDMDILTSIKGIGDITASHFMVEVGDVNRFKSKGSLIAYAGTDPSIVHSGTTINRKGRISKRGSTSLRRCLYLMAYGVMKFNSYFREYYLKKRGEGMQHRKAMIALCNKLLRVIYALLKKGEYFCCPVH

SEQ ID NO: 362219 - protein, 352 aa, unidentified
MIIIGVDFHPEFQQIASVDTETGEFQEKRLGHREEAETFYRALAGQEVRVGMEASGHARWFERQLAELQIELWIGDAAEIRTRRVRKQKTDRQDAQLILKLMLKDDFPKIWVPSWENRDLRQLLWHRHRMVQARTRIMNQLQAVALNEGLRCKKRLWRKHGREQLEAFRLAPWASRRRRDLLELLDRLNPTIAELSQAIEQEAKKFPEARCLMTHPGVGALTALAFVLIIGRADRFQCGKQIASYLGLVPLEDSSGNRRRLGHLTKQGSSMLRFLLVEAAQVTARSIPEWRSKYFHLAMRRGRKIAKVAMARRLAVRLYWMWRKGWDYEQVKKFGSHAGQLETGHGVQSNTE

SEQ ID NO: 362220 - protein, 414 aa, unidentified
MEQKLIYLGIDWADDHHDIVITDDSAKTLNQFQIDHTPDGFAQLHANIANHQKSPADVLIAIETNRGLLVHELLRTRYTVYAINPKAVNRYKDRHVLSKAKSDILDAQALAHLLRTDRHRFKALVPLPEDYRLLDRFCGDLRKLIDEKSRIVNQTISCLKEFYPKALELFSLNSQIFIDFLKAFPDHDTLRACKKKTFLAFIKKHRYPYPGKIEELWETIQSSTLQADTVTARAGKLRLLMLLDQLENLKIHCTHYEQEIQKILDTLPESNSIQSLPGVGDRLAPELVAALGPNGKDTHHRFHSAEEIAKLSGCVPIVKQSGKWEKVSIRHACVRSLRRTFHDWAFTSLKTSSWARAYYDYHKARNQSHFTILRNLGKKWIKILFAVWSKGTTYDEALHIQNLKARNIPWAMAL

SEQ ID NO: 362221 - protein, 407 aa, unidentified
MFVGIDWASTEHAVCVLDQAGKTVRAFGIPHSAAGFDDLVARLRRLGAPAGLPVAIERPDGRLVDRLLEAGHPVVPVRSNAIKAWREGEVVSGAKSDTGDAKVIAEYLRLRHHQLRTLTPFSDATRALRAVVRARGELVRQRVAAINQLTATLDAFWPGAKAVFPDVEREIALAFLERYPTPESAAGLGEQRMAAFLTRHRYCGRTPAAELLARLRAAPAGVAGGAEATARRDAVLAFVGVLRALNQAIRDLDRSVVARLGEHPDSKVFASLPRSGQVNAAQMLACWGDCRDAYDGPEAIAALAGIVPVTRQSGKHAAVSFRWACNKRFRNAMTTFAHNSRLASPWAAKLYADAIARGHDHPHATRVLARAWVRVIWRCWIDQVPYDPVKHGAAQRLAEEAAAAAAA

SEQ ID NO: 362222 - protein, 343 aa, unidentified
MQAITTVGLDIAKSVFQVHGIDAVGQVVIRRQLKRRYVLAFFQKLAPCLIGIEACASSHHWSRELQALDHTVRLMPPAYVKPYVKRQKNDATDAEAICEAVTRANMRFVATKTPEQQSCLMLHRTRHLFIRQQTSVINAIRAHLAEFGIVAPVGRHGMEELLHVVADVSDKRLPEVARACLAALGGQLRMLRAQILNFDRMIMVWHRSNETSKRLDELPGVGPTLATALVASVANPKAFRSGRDFSAWIGLVPKQNSSGGKHKLGSISKQGDRYLRSLFTIGALAVIRYAKIHGTRHRPWLTALLARRPTKVAAIALANKIARMAWAMMARGERYREPVALAA

SEQ ID NO: 362223 - protein, 425 aa, unidentified
MNYKQNEKINQVKESTLVVGIDIGSTKQYARAFDWRGIELGKVFTFSNSREGFEAFKAWMQHLQDKYRKSDVIVGIEPTGHYWFDLGAYLEDEGILLVMVNPYAVKQTKELDDNSQSKNDRKDPKVIAKLVTEGRYSAPYTPDGVYADLRIMVANRKRLIREMTQIKNRFARWFAIYFPEYTDVFGDYEAQSSMLLLKKVCTPEAIVELGAEKINQIWRDAKLRAVGMKRATTLCETAKRSIGLKKGSSAARYEMKLLLEDYEYKKAQLDAVMEEIEKLCRKIPESEQMLAIKGIGVITVAGFLAEVGDVRRFESPRQIQKLAGLSLRENSSGKHKGQTTISKRGRSNLRAVLFNAAIPLIAKNPEFKSLHEYYTTRANNPLKKKQSVIAISCKLIRVFYAILAKGVTYDAQKLISDIHRQPQVA

SEQ ID NO: 362224 - protein, 401 aa, unidentified
MMRSIGMDVHRSFAQVAIHDDGAIVANFRVAMEHDAVVAFGRSLQADDEVVLEATGNTATIVRLLTPFVARVVIANPLQVKAIAHARVKTDKVDAKILAQLHAAGFLPEVWAADDETLALRRLVSERAAVVRSIRRSKSRVQAVLHANLIPKYAGHLFGKGGRRWLAKAPLPKTERDLLERHLDELNWLAGRLETLERDLIHISLDDPQMRKLMTVAGISSVIATAVIASIGDISRFATPQKLASYFGLTPRVRQSGDRGAIHGRISKQGNATARTMLVEAAWGAASVPGPLRAFFLRIKDRKGANVAAVATARKIATLIWHLLTKDAPYQWARPAFVAMKMRKLELRAGAPKAHGKAGPGRDYWIKELRHREIELVANAENAYARMVEAWREKPPKPKTG

SEQ ID NO: 362225 - protein, 338 aa, unidentified
MNHYGGIDVSLKESHVCVVDASGKIIREGKVASEPEDLIGWFGGLGLVVTRIGLEAGPLSQWLYAALRDAGLAIELLETRHVRNALKIMPVKTDRKDAQGIAELMRLGWFRPVHCKSMEAQEVRAMLTARKLVQKMLHEAEMSLRGILRGFGLKVGKTTPVTFEARIRELVAGHPSLEGIAQSLLAARAVLRRELNGFEKRLRAIARCDTRARLLTSVPAVGTIVALTYVSAIDDPARFKSSKIVGAHFGLTPKKYQSGETDRSGGISKIGDASVRAALYESAHIMLTKPIKGCTALKAWAMRIAKRAGMNKAKVALARKLAVIMHRMLADGTTFTPA

SEQ ID NO: 362226 - protein, 336 aa, unidentified
MKKNYGFIIGLDVSKAKLDYCITNQATMHQEFGCVANTARGIEAFLTSLKKKLKVEKEDILFCLENTGVYSMPACYWMQNGQFDYWVVSALEIKRSKGIVRGKTDRADSRDIALYAMSHLHELKLSILPEKDFLEIRLLLAEREKVIKAISLFNMTNENKNFLPKDVLKTTLQHNAKMITFLKKQLLQIDASIEKLIQSNPVFKQQDDLLQSIPGVGRQTSVLLIVYTQAFTLFKNHRQFACYAGVAPFEYSSGSSVRRRTKVSHLANKKLKTALNMAALTAKKFDSQLKQYYESKVEAGKNKMLVLNAIRCKIISRAFAVINRNSKFVDTLKAVA

SEQ ID NO: 362227 - protein, 332 aa, unidentified
MSAVVCGLDVHKETTYATVLDRDGQVLVQRKMPNEDIPRFLEPIHPDKLAMEASTYIIPLYRKLVEEGYNVTVSHPKKTRLIAEARIKSDRVDSRALAELLRLDSLPESYNPPREIAEIREKVRRRAFLVRQVTKLRVKIRDALAIEGVKPPTGHGLFTAKGVEWLRSLSLEPVDCYLRLIEPLKREVKLLSSQLKREAGKDPEVRLLMTIPGVGYYIALLVKAEIGDVKRFSDGDHLASYAGLVPSTRSSGGVERHGGITRQGSRWLRWALVEAAMVHVRVDSPVTRFYHGVAERRGRKAALVAAARKLATVCFSVLVNGRPYFNPLGAQA

SEQ ID NO: 362228 - protein, 419 aa, unidentified
MKSTKTKKVKKINAKTVIAALDIGKNVQYGYFRAPNGNDVKPFAFYNSQKSYNAFWQKLCEFKTKEGLEQIVIGFESTGPYAEPLFHFLRTKDVKLVQVNPVHTKRVKELVGNSPNKTDKKDPRVIADVISLGHALSLVVPNGAAAHLRRLTQARERALKQRTATINQLQDLIFVIFPEFLSIMKGISTKTAAYLISHHPSAESICAIGVEALATKIKQTSRGRLGRERAQQLVAAARASVGINQGKESILLEVEHLNRRIENENRFIDKLEHQMAEYLQCIAYSGSILSIKGIGTVTVAGLIGEVADFNNFDTISEVMKLAGLDLYEISSGRHKGQRRISKRGRPLMRKLLFYAAINTVKAKGIMHEKYQQMLARGMLKMKALVAISRKLLGLIFAVVRDNSMYVQDYCSKYHYKLAA

SEQ ID NO: 362229 - protein, 331 aa, unidentified
MNYSHFVGLDVGKNTFDASLMSAEEKELSHKSFDNTPEGIQSMLAWIDNYQLSLSEVLFCAENMGSYVTELSVSSVTMGFSLTLVCPLTIKKSIGLQRGKNDRIDAKRIANYAVLHYRKLKLYKLPDKDLVRLRGWIIIRDNLVKQKVSGTKLLVTFSQMAKLADVTESISFLEEQLDSVKEKILKVEEAMEQLIAANNSLYTNYLLLRSIKGIGIINAIVLLCVTDNFQRFDNPRKLACYCGVAPFEHTSGISIRGKTQTSPLASKEIKVYLTRAAITAISWDPQMKAYYQRKIAEGKHKASVINAVRAKIIARAFAVIRRQTPFVTLVA

SEQ ID NO: 362230 - protein, 343 aa, unidentified
MSIDTMIGVDLAKSVFQIHGASMNGEILFQRKLSRQAFSVFMAQHSAAVVVMEACGSAHYWARLLSGFGHEVRLIAPRYVRPFVKRQKNDAADAEAIVVAAQRPEMRFVEPKSVAQQSAAILYRSRQRLVRQRTETVNALRAALYEFGHIVPQGIRHVRRIGAILEAPNSDLPTLMREECLAMLDQVAALSSWIDTKTAKIKELAATTPISKRLQTMPGVGPLVATAVETFAPEMATFNNGRDFAAWLGLVPRQFSSGGKERLGRITKAGQSDIRQMLIIGAMSRLNWMGRKSIPESSWLARMMARKPRMLVAIALANKMARQIWAMLTKNEDYRNPTPVMAA

SEQ ID NO: 362231 - protein, 306 aa, unidentified
MLIGVDVSKDTLVACQLDGKPFRLANAPPQITEWLDTLPADTRVAMEATGRYHRSLAELAVARGLTVYVLNPFDVHHYAKSLAPRATTDHIMADVIAQYAASARKLAAYRPAPAFVDELKSVMRARSGLMRQRVRLAHQCREAPALTRLLSPLLDDLQRAMTDLTHRLTELARAQAGYAALVGIPGIGELTAAYLLALLATHRFRTSDAFVAFLGLDLRVKDSGKGQKKRTLSKRGDPEARRLLYLAAIAAERHQPVFATLRQRALTAGRTKTEAAVIVARKLTRIVWSLYTHGTTYTAERVLTQG

SEQ ID NO: 362232 - protein, 403 aa, unidentified
MSEEPVPAFEVWCGLDVGKQDHHACALDATGKRLFDAPLPQDQRRLEDLFAKLKVHGRVLVIVDQPNTIGALPIAVARSVGVEVAYLPGLAMRRIADLHPGTAKTDARDAYVIADAARTLPHTLRRVDEETLAELKVLVGFDDDLAGEATRLSNRIRGLLTQVHPALERVLGPRLATKQVLTLIKAHGGPQGMTKTGKTRLLRTATKANPRRAGELVDAIGKALGEQTVTVPGTAAAETVLPKLATTLATLLDQRAEIATQVEQVLDAHPLAEVLTSMPGVGVRTAARILLDVGDGSAFRTAGHLAAYAGLAPVTRRSGTSIRGEFPARSGNKHLKRALFLSAFAALRADPVSRAYYDRKRAQGKKHNAALICLARRRCDVLHAMLRTGSHYQPPAVESVPAT

SEQ ID NO: 362233 - protein, 371 aa, unidentified
MGESNKTLFVGLDVHKDTIAVAYAAADRGTEVVSLGMIGTRQCDIDKLIRKLESKGAPLAIAYEAGPCGYWLYRYLTRQGFSCSVVAPSLIPRKPGDRVKTDRRDAVTLARLLRSGDLSSIYVPTVDDEAIRDLSRAREDAVHDLKRSKVRLKAFLLRQDIRYEGRANWHAAHLRWLARVVCPTPAQQIVFQEYVHTVTEQTERVRRLEAELHAAVKTWRLQPVVNAVQALRGLDLTGAVTLIAEVGDLTRFDTPRKLMSYLGLTPSEYSSGAHRRQGGITKAGNGHARRALVEGAWAYRYPAKVSRHLQLRLEHVPAEVQAIAWKAQLRLCKRYRLLSARGKHVNQVVVAIAREMAAFAWAIARTVPAAA

SEQ ID NO: 362234 - protein, 370 aa, unidentified
MQFIGVDLHTNKFTCCYRDEEGPSEGKGGKTTETFELTAYGLAQFCQTLTPETYVLVEATITTFCFARIIQPMVKEMIVANTYELKQISMARKNTDKIDADILCRIIKMQVLSGEKAISQVSIPPLEIQELRGLFTTYRLFKKQTVQIKNRIHSLLKEKLYGFTQEEIFGKKSRKALREMKGEPVLSIQIDLLFTQLEHLEMLIETLQDKIKEHGAGFIKEIDILTSMKGVSVFIAIAIIADIIKVERFKNSKAFTSYLRCAPRVSNSNTSKSALGTNKKGRRLSASLLTQSMHHVLGVSGKLNKWYTELTRYKKAGLVRTGLRRRLFAEMFQMLKKGEYHYGREKEKHEAKMSQYRNFLEKRKILLETA

SEQ ID NO: 362235 - protein, 474 aa, unidentified
MKTEPSSQAQPKKGRRKTTTEPASPAIDEVAQGGGYAAGGTFGSPAYPAATPDAPAKQRSRGKTLVELPSPSCPGDTPTRSKGAVDLGAKGSSTMRSVALDLGRKKIAYCEVSAGKVVARSMVTGWLSLEPMLGPSAAPARVAIEACREAWFVHAKLTAWGNDVLLVDTTRSRQLGIGQHQRKTDRIDAEVLARAVEAGGIPVAHVLSPHRQELRRRLAIRRALVETRAQYVTTVRGIACEQGVVLRSCDPEQFVANLRKTPLSEPLRTTIGPLLATLEPLEIQLAAVEQQLFALCAKEPVITLLSTIPGVGPVVAASFVSVIDDAGRFSSAHHVESYLGLVPSEKTTGGKRRLGAITKQGNTYLRALLVQSAWVILRQSARVDPLQRWALAIVERRGKRIAVIALARRLAGVLWAMWRNNTVYDPELVARTGARGLRRAAQSTELRAAALERAALKTRRHRTRPASAAEVSHS

SEQ ID NO: 362236 - protein, 427 aa, unidentified
MRVLHDRVAAIDVHKDMVKVAVRVPGARRGARKTDVAEYRTFYGVLQEMGRELRRRGVTHVVMEASGIYTEPVYYALAELDFTQVLVVNPAHVKALKGHKTDAKDAVRLLDLYECGAVVRGSYIPSPELKEVRDLTRYRVKTVQARTSEIQRLQKTLESAGIKLSSVVSDVTGASATAMIEALIDGERRGRVMADLAQTRLRTAGKMADLSMALSGRFTEHHALMCRLHLDQIDGLGQQIDGLDERIAVRTARYSRETGLLATIPGFGDVVIAGWLGAIGPAPHEHFATAQRLASWATLCPGNYMSAKKSKGGRTGDGGAYIKPLLVQAAWAAIRVPGRLQARFHRLVRRFGGPRNKGAQKRAIVAIAHTLLKIAYQILKTGRPYTDLGDGLYDTRDTTQAKQDYLIRQLRKLNPGCHITITPAEAA

SEQ ID NO: 362237 - protein, 360 aa, unidentified
MDKHKYVALDVDSANIVVGVYDRQGEALMQCYLRNNGQVISEFFKTMTGVVHVTFEEGTQAIWLYELIRPLVAEVIVCNPRENKLLQAGNKSDRIDVAKLGKLLRLGELRPVYQGPSAAQGLKQLVHGYQALVDDTTRVKNRLKALYRGRGLSCKGELIYGREQRQQWLGQLETKEMQSRAASLYEELDCVLRLRAEAEKVMCRAARKHEAYKWISSAPGLGAIRTAQILATAITPHRFRGQRQFWPYCGLAVVTRSSSDYEWVDGGARRKRKPIQTRGLNQNYNRTMKAVFKGAAISALQQHPEFPEYYQRLCAQGTRPEMARLTVARKLAAIVLILWKKGELYNSERLNQAAPGAGQQ

SEQ ID NO: 362238 - protein, 426 aa, unidentified
MQTETTGVPDAAADPIQVIHPRCCGLDVHKGEVQACLLLTTPGGTVRQEQRAFSTMTDDLLALLDWLMAAGCTHVAMESTGVYWKPIYNLLEGQVEVLVVNAQHIKAVPGRKTDVKDAAWIAGLLRHGLVRPSFVPDREQRELRELTRYRKSLVDERSAEVNRLQKTLEGANIKLAGVASDVMGASGREMLERLVAGQTDPALLAQCARGKMRRKIPELERALAGSVGSHQRFLVARQLAHIDYLDETIAEVGAEISRRLAPFEEEIALLDTIPGVGRDTAEALIAEIGTDMGQFPSAAHLASWAGMCPGNHESAGKRKSGKTRKGSRWLRALLVVAAQAAGRGKKTALGARFRALMARRGRKRAAVAIGHAILTIAYHVLSRREPYDDGLLRRADEPRPPSPTHLVQQLQALGFAVSLTPNRPAA

SEQ ID NO: 362239 - protein, 353 aa, unidentified
MEYIAFDAHKHYTLASVARPDGGLVREQRIPHASGALQQFLQRCERGSPVAVETVGNWYWIIDEIEAAGCVPQLVHARKAKLMMGMINKTDKLDARGLNRLQRAGTLPTVWIPPGELRDQRDLPRTRMVLVRQRTQLKNRIHATLAKYALHDREVSDLFGARGRALLRQRLALLPPHTAYATQHLLEQVEALDRHVRDFEHRIQAVLKPTPAIQLLMTLPGVGLVLAVVIALEVGDVTRFATAEKLAAYAGSTPRVHASGGKTRFGRLRPDVNRYLKWAFVEAANAICLNRGRAPRRHVSRLYERVARRKGHPKAIGAVARHLAEATYWILSKQEPYREPKASAVSPTGDQRG

SEQ ID NO: 362240 - protein, 419 aa, unidentified
MFPDTALIVGVDVHQHTNVTLVMDGCGDVVDNHHSFANNGSGTEQFARYLTRIAASGGFATIHIAAEATNNFWLPLFCQLEQLPSQSERPVTLYPFNPRLVHNFKKALGEEEKTDLRDAGVIAERLRFGKKLPRPFAMEEMYLPLRTLTRYRYHLVRELVRVKSYCLSLIYLKATDYTDKKKRPFGDTFGATSQAVLRQFATLDEIAAMPFDELVEWLDLKGKRRFPNPEENARKLQQVAADAYRLPDEWATVIHDIIALNLRHIALLKNLISRVETAITQQMEHIPHTLETIPGIGPVFAAGIIAEIGDLARFEYNEAKVASYAGLRWPRSQSDEFEAEDRPMSRSGNRFLRYYFCEAAQLVRLHAPEYRDYYNRKYKEVRKHQHKRAVVLTARKLVRLVVRLLTTNEPYRLRQAPKE

SEQ ID NO: 362241 - protein, 315 aa, unidentified
MTKPLPSVNVGVDVGKAQLDLYLLEREQAISIPNDERAIASLLRRLVRYRLERIVIEATGRLEQTFVRAALSKGLPIVVVSPLKIRRFAGAIGQLAKTDQIDARLIAQFAAAVKPTPRPASGDNAKLIKDLVVRRRQLTALRTMEKNRRQVMPEALQQSIDRIIKTLDQELAALEVLIDHAVDQHAPSHLKRELLTSMPGIGNCVAATLIGDLPELGSLNRREIAALTGVAPFNRDSGSLRGKRRIRGGRSHSRTALFLSAMVAIRFNPDIKRFYERLLAVGKHKKLALIACIRKIVIALNAMLRDNVPWRSAIA

SEQ ID NO: 362242 - protein, 391 aa, unidentified
MFYIGVDIAKNNHEASIIDSDGKLVSESFSFSNSIRGLEKFQKFISSFSIDSNNCIIGMEATGHYWLSLYSFLIDLGFSCIVINPIQSDAFRKMYIRQTKNDSVDSFVIAQILRFGEFSVSHFSDEDTFALRNLSRFRFALVDEASDWKRKLVCILDQVFPEYSSLFSNIYGVASKELLSKYPLPEDMISIPADELAKMLSKCSKGRFGIDKAKEIQEKASNSFGVKFALKSFPFQIKQIIAQISFLEDQIADIEDEISSMINSLCPVITSITGIGDVLGAAIFSEIGDISRFERANQLVAYAGLDVAVKQSGNFNATDTKISKRGSPYLRRAIWLAASVAAFKDPALSVYYQKLRQRGKAHGTAIGAVARKLTNIIFAVLRDNKTYIPNI

SEQ ID NO: 362243 - protein, 489 aa, unidentified
MSRASQQQQGKKDATLNAKALKRKARGSHRPQGEGHQRRSQLRITNRDAAGIDIGSQVHYVAVPEERAERAVRSFGAYTAQLDEIAHWLKECAVKTVAMESTGIYWIPLYQKLEEAGFEVLLVDARQAKHVPGRKSDVQDCQWLQQLHTYGLLRAAFRPEDWVCRLRTLQRHRKSLVEYAAMWVQHMQKALNEMNLHLHHVLSDISGCSGLAILDAILAGERDPRKLASLADYRVKKSQAQIEAALTGDYRPELLFVLNQSLQDYRQIQQQIAQCDLSIEKQLAQMADCTNPSQNSGPRQQGPESAGGKRGKIKPKDGLEVSLAGHLKRILGIDLTTIPGLNVLAILTLISEIGTNMSKWRNEKAFVSWLGLSPNNKISGQRLLSSRTRKVVNRAATTLRLAAMVLGHTNTPLGSFYRRKRAQLGAPKAITATARKLGCLIYRLIKNGEGYQEPDLHVYELKYKDQILNSLRKRANSFGFDLVEVPKAA

SEQ ID NO: 362244 - protein, 376 aa, unidentified
MNYSTVYVGMDVHKETFSLCCYTNEKEEAKYPQKVKGHYSKILNYIEAMRFHYGDDALFICGYEAGCLGFTLYHQLMSHGIKCIILAPTTMLQPKGKKKIKTDKRDAALIARCLAHRDYRPVHVPTEQDEQTKEYIRMRDDHKQALKKVKQQILAFCLRHNYRYDGTCNNWTQAHLKWLRALQMEDLYQETLKEYMLTYDQLVEKLERLDKRIEELASNETYKEKVSKLSCFIGVKAVTALAIVTEVGDFNRFASAQQFSSYLGLTPGENTSADDQNRLSITKAGNRHVRLLLVEAAQSLARGQVGFKSKALKTRQAGNLPEVIAYADKANERLRRRYYRMVLHNNKKPNVAKTAIARELACFMWGMLTGKIAALP

SEQ ID NO: 362245 - protein, 445 aa, unidentified
MTRRTIGIDLAIRGDHVGQIFDDGRPVSKPIRFRNDPASLDAFVAKATEGMSPGGTVQALMEPTGMSWFPVAHRLADAGVEVIRVKGQRVRALRRYLSEHAKTDLADAHVLGAMPLFGGPRFDPVHIPAPKSHALQRLTKQRSRFQDAVAGAKRRLLDLVRWASPGLEAVLPDLRTRLSLALLQSWVDPAAVLKARRSTLARFVGQNASGNHPHSGPFVDALVDGLKRAARDALALHGRHVDFAELQAEVALEVGIIIRRLEAIAELDRRIATLYAEIHPSDALRTIPGVGPHLAPVLIGVLHTSERFRSERHIRGFCGLFPNRADSGGAERPGQKISQSGNDRIKRALILAADTARRIDPDLAEVYWRLMTTKGHHHKQALCAVANRLVNRIFRVLRTGAPYGLRDLDGRPIEIAEAKAIIAARYTVPESVRESRRVNRIQTAA

SEQ ID NO: 362246 - protein, 400 aa, unidentified
MLSIGIDVSKGKSTVCGMKPGGEIVYAPFEVQHTREGMSELVSLLHNSGEEVRVVLESTGSYHCPVVAALLENGIFVSVVNSLRMKRFCSQSIRKVKTDRIDAMQIALYGLAYWQELQPTKLPEDTYRELQLLARQYYQMTSILIKAKVDFNALCDQALPGMQELMSDHAGRHKLSDFVLRYRHTTHILEMGETRFRKDYCKWAEKKGYRNCERMAVLIFATAQNGIPVLPNAPSTKIVITEAIRVLHTVEASRDAILTQMQALAKTLPEYSLVREMPCIGDTLAPRLIAEIGDVRRFHSKRALIAYAGIDAPPYQSGKFRANNRHISKRGNRYLRKTGYEVMQSYVMHKPANDPIFTFIEKKRGEGKSGKLAMVAGLNKFLRVYYGKVTELYRSLSAIE

SEQ ID NO: 362247 - protein, 502 aa, unidentified
MEGDWSSGIRDRFLIDFLGLRPLIIVQGWSRGFPEASRQKKGGDVEKIYFGLDVGGRFHRLCFLDEDKNPLGRELTISDDLEGFEALREEMEKLRKRYPEAAFHGGAEATGIYWRNIFSFFRRCLPWVKLSLLNPLQTRRFRELELNRVKTDSTDARSIARFVATFEPPAAPDLPAEYLDLCELCRFRKLKVVEHARYLNHLHRYLKQAFPELCGKVKRGAGLRYLALLMHLPTAYEVRQAEESEIASLTFGKKDSRLGEKFAREAKELAVRSCASQNGPGIGFALRSIAANLLRIREELSALEEKISELYQAFPATPLFTIPGIGPLQAAVMEAEIKSVGRFPSAKHLVGYVGAYPELRESGDSRLGKPRMTRKGNRYLNQAVYLSVLAAISPRSPDNTIKHFYWSKVAEGKERMVALGSAMRKLTHIIYGVLMSGKPYDPTYEYPEEGFEIRFVDREKGCFVEGKDLSFCEKVIPIRYKRATAPRPHKAAARGRVALNQE

SEQ ID NO: 362248 - protein, 417 aa, unidentified
MAEEVEWFVGIDWASQSHQVCLVDAHGACLGERAVAHGGAGIEELCDWLIARTGATPEVIGVAIEMTRGPIVEALLERGFCVYGINPKQLDRFRDRFTVAGAKDDRRDAHVLGDSLRTDRHAFRRLSNDEPVIVKLREWSRMADDLQQERARLASRMREQLWRYYPQMLELADDLAADWFLDLWNQAPTPAKAVRLRATTIERFVKAHRLRRWQAPEVLRILKQKPLSVAPGVVEAASDHIRTLTARIRLVNQQLKSAHCKLDELCAHLIPSEENEPGQQCEQRDVVILRSMPGLGRIILAVLLAEVWQPLRRRDYHALRTLSGVAPVTRRSGKTCVVVRRYSRNKRLENALYHWARLATQHAALSRGRYAALRRRGHSHGRALRTVADRLLSVACTLLAQQTLFDPTSEVRDAAGA

SEQ ID NO: 362249 - protein, 405 aa, unidentified
MNSVGIDVSKGRSTIAVIRPFGEVVSTPFEIRHTASELRDLACSLKSLSGETRVIMEHTGRYYEPVAQTLSSAGIFVSAVNPLLIKSYGNNSIRKVKTDKADALKIARYGLDNWSQLREHTVMEKHREQLKILNRQFNLYTKNKTALKNNLIALLDQTYPGVKNFFDSPVRDDGSQKWVDFAADFWHVDCVRDSSEKAFAKLYQKWCKRHGYNFNQSKATTVYENSKELVPTLPKNDYTKILVCEAINQLNAISRTVEVLRIEMNRMAQQLPEYPVVMALFGVGASLGPQLMAEIGDVLRFAHRGALTAFAGVDPSPNQSGDYERKSNPASKRGSPYLRRSLFLVMTVLLQNAPDGDPVYQFLDKKRSEGKPYYVYMTAGANKFLRIYYGRVKEYLNSLQTAALS

SEQ ID NO: 362250 - protein, 410 aa, unidentified
MNPLYVGIDVSSQKNVVFFMKPDGSKHSCFTVDNSLCGARQLSKRIVSALTSESLSDLIIGLEATSVYGDNLVCFLREDGSISPFNRKIHVLNPKQVKKFKDSYPDLPKNDAVDSYVIADALRFGRINNEVYMDDYRYKALQSLTRARFFAVQNQTKEKQRFLNYLFMKYSSMAQEKVFSDTFSTTALAVYEEFESADELAYMDLNELTAFIREKGKNRFPNPEEVAKSIQAAARGSYRLPKTVNDSINQVLSISISSMRALDAQIKAFDKAIAEQMELIPNTLTSIKGIGPVYSAGIISEIGNINRFPNQAALAKYAGLAWTQYQSGNFEAQNTRLIKSGNRFLKYYLSEAAFSLVRCDSEYKHYYHLKYKEVNKYQHHRALVLTARKFVRLVFTLLKENRLYIPPEEK

SEQ ID NO: 362251 - protein, 408 aa, unidentified
MAAVMIGAGPHKESHTAVAIGMSEEILGQVRVRASAAQAGRLLAWAQSWPERTWAVEGAGGLGHLLSQQLVAAGEQVLDVPPKLAARVRLLASGNVNKNDPNDARSVAVAALRSPACLPVRAEDHTAVLKVWAKRHRDLSRARNQVVCRLHAVLCDLVPGGVSKRITAGQAARILDQVQPRGAAGAARWILAEQFLADLRRAGAQRNDVKKKLAAAVQASGTTVTEIFGVGPAVAAAVLGDVRDISRFPSSDHFAACNGTAPVEVSSGGRVVCRLSLRGNRRMNHAVHMAAVTQVRYPRSKGRAYYDKKIAEGKTSKEALRALKRQVSDALYKQMKADARRAAASAAGPGGHPGNGSVASVAGLHPADRLFGQATPGPDSTLRPQPGQSKGKRSARQVRRPVTARTPA

SEQ ID NO: 362252 - protein, 326 aa, unidentified
MEHELHYIGIDTAKEKLDVDVLRPDGRHRTKKFANTTKGHDELVSWLKGHKIDHAHICIEATGSYMEPVAECLYDAGYIVSVINPALGKAFAQSEGLRNKTDTVDARMLAEFCRQKRPAAWEAPHPLERALRALVVRHQALTDMHTQELNRTETAREVQRPSIDAHLLWLEAELKRLEKQIKDLTDDDPDMKHRRKLLESIPGIGEKTSAVLLAYIGLKDRFAHARQFAAFAGLTPRRYESGSSVRGASRMSKAGHVSLRRALYMPAMVATSKTEWGRAFRDRLAANGKKGKVILGAMMRKLAQVAYGVLKSGVPFDASRHNPVAA

SEQ ID NO: 362253 - protein, 369 aa, unidentified
MSHAVKESTVKNPSTIGLDLAKNIMHLHALDEQGNTLWKKTLKTDDLVIFLNKLEPCLIGIEACGGSHYWHQMLSSLGHTVRMISAMRVKAFVEGQKNDKNDAAAIANAVINKQTRFVPPRTIRQQEIGSLHTMRGLKIKQRTQIINHMRGTMNEYGISCRTGAIWFEKNIQEIIEKALKANTFPTLVADELVIQVNDLKVIKGRIQDVEKYLLAIAREDPCKRLMTIPGIGFLISTMLYGYAGNVEYYKTSRGFAASLGLVPRQYSTGGKQTLGKISKRGDTYVRANLVQGSRAALMGALKKRQNEKPPSSSLMDWALRCYDRKGMNKAAVAVANKISRIAWKILKTERMTFVSSQVVMPSEGEKNRP

SEQ ID NO: 362254 - protein, 341 aa, unidentified
MNTTTYGLDIAKTVFQLYWVEPSGKCFNRRFSRPKLLEFLANREPGRIALEACGSAHWWARQLQALGHEPVLLHARYVRPFVQTNKTDAADAKAIWTAAQQPGMPIVAPKTESQQCVLGLHAMRQLRVKMRTMLVNQLRGTLFEFGIRIRPGLRAGLQEIVQRMDELEQNVPPLLFEFVREQLQSIERLDQEIARLDQRIDAWGRQNRACKTILAIPGIGMLTATAMVATIGDAHTFKSGRQLAAYLGLVPKQTGTGGKVWLSGISKRGDPYLRTLLIHGARVVLSHLRRKNQPGWSLMLAQRRPKNVAAVALANKTVRTIWALLAHDRTYDRDYVSVRPA

SEQ ID NO: 362255 - protein, 411 aa, unidentified
MQVIYERCCGLDVHKRTITACVLKWLGGDWKKEIRQFGTMTHDLLALSDWLVREGCTHVAMESTGVYWKPVYNILEGQFELLVVNAQHLKAVPGRKTDVRDAEWIAELLANGLLRGSFVPPVRVRELRELTRYRTSLVCDCARTINRLQKVLEGANLKLASVVSDIRGVSARLMLEALVAGERDTSQLANLAKGRLKEKHAQLVEALSCRLQPHQSFLIAEHLAQIDYLEGAIERLSRQIEEKLRPFEQEMAWLDTIPGVNRRTAEVLWAETGGDMARFASARHLASWAGMCPGNNESAGKRRTGRTRKGSPWLRHCLIEAAHGAAHTKNRYLSSQYHRLAARRGKKKAQVAVGHSILVIAYHLLTRKQPYSDLGANYFDERDRQAVTKRCVNRLHKLGFKVTLEKLQMAA

SEQ ID NO: 362256 - protein, 349 aa, unidentified
MLADQVDHVVGVDRHRDEHVLAVVVAPSGAVVAQRSVRASARGYAQALRFVEQYSNGRRVWAVEGVGHYGAGLARHLSSRGETVLEIGRGPRDEQRLRGKDDQLDAIRAARTALASRTLTLPRAGERREALRLLLLARRSAVDVRRDALVQLRSVVVTCPDRLREQLRQLPAGRLVVRCSRFRRSSACTLDELASRLVLRSLARRVEAATVEAAELEREIHAHVRALAPGLLEEAGVGPIVAAQLIVTWSHHGRVRSEAAFARLAGVAPIPASSGQTIRHRLSRGGDRQLNCALHTVILHRRQHDPTTKDYIARRLAEGKTTRDAVRSLKRYLARHLYRVLDSQAPHMA

SEQ ID NO: 362257 - protein, 399 aa, unidentified
MAAWIGIDVGKSHHHACVIDSEGTKLWDQKIANDETKIEALIDRVVTTVEGPVVWAVDLVSPAAALLNTTLLLREQTVVYVPGRTTSVMAPVFRGEAKTDAKDARVIADTARMRRDLSPVVVENDLVAELRQLHAYRTDVMADWVRGINRLRDMLGSIFPALEAAFDYSTRSPLILVSRFCTPAAIRNAGEAGVAKYLRENKAWAKGIPAMAEAAVVAANGQRHRLPGEAGTARLICKLAARLLEIDREIKDLDREIAALFRTHPSARIIESLPGMGPGLGSEFLVITGGNMVAFRDSGKLASYAGLVPVPRDSGRITGNMHRPKRYNRRLRRVFYMAALSSLKTQGPSREFYDRKRAQNMVHTKALIALARRLVDVLWALLRDGREFTVDVPGAATAA

SEQ ID NO: 362258 - protein, 408 aa, unidentified
MTKFHVGVDVGRTHHVARVLDTSTGQMSRSFQISVGYEGFERFHRYLEGFSLDQQDFFVAIEATGAYHTALADYLWDCGYTLTLVNPARSKSFRKAEGHVAKTDRVDAGVLCRMISGVNLRPAIPKPEEQERLRILTRWYFRLQQDRTKVLNRVSAAVDVVFPEFWQVFSKITQVTPRMVLRTYATPDELIRADTEVLACLMKSASHGRYRRKDAELLETLASRTVGIHTLYTPIAFQIRQALDQIDLIDQQIRELGPQIEQEFHAMGFTAEEFPVGGVITLATIVAHLPSPQSIPSLKSLHAFVGWCPRDRQSGQYKSSRPRMAKGCPPLRWALYGLSLACMSYATTYKVYITRRKAEGKIGGHILIIVGRKLLDRIWAIARTKSVFLPQKPAQLSEPGRTELVAIS

SEQ ID NO: 362259 - protein, 309 aa, unidentified
MKEELVYVGVDIAKAYLDAAIGNEKRRFANDALGHRQLINWIKQMPASVQVICEPSGGYERALVRALVAAQLKISLVPANRVRQFARAAGILAKTDRMDAKVLCAFGEAMQPGTISASQLEQEHLRELESQRRHLTHLLVMEQNRAARMSDLWVCKLNRRLITQIKKQIEQVDLLIQQQIKASRELSSKAEKLTAISGVGARTAALLLAQMPELGQLNRREVAALVGVAPFNRDSGRMRGKRAIYGGRRSVRHGLYMAALVAARHNPILRAFYLRLRAAGKPAKVALTATMRKLLIVLNSSLKPDLTNA

SEQ ID NO: 362260 - protein, 348 aa, unidentified
MIIIGVDFHPEFQQIAWVDTDSGEFREQRLGHRQEAENFYRALAGQKVRVGMEASGHARWFERLLAELQFELWIGDAAEIRTKRVRKQKTDRQDAQLILQLLLEDRFPKIWVPSWENRDLRQLLWHRHRMVQARTRVMNQLQAVALNEGLHCKKRLWREAGREQLESFALAPWASRRRRDLLELLDRLNPTIVELSQAIEQEVEKCPAAQRLQTHPGVGALTALSFVLIIGRADRFQCGKQIASYLGLVPLEDSSGNRRRLGHITKQGNSLLRFLLVEAAQVTVRSDPEWRSKYFHLAMRRGRKIAKVAMARKLAVRMYWMWRQGWDYEQWKKFGSHAGQPGHRDGVQ

SEQ ID NO: 362261 - protein, 410 aa, unidentified
METIVERAAGLDVHKAQVTACVRRPGLGGVRAQELAEFQTTVRGLLALRDWLQAHRVTEVAMEATGVYWKPVWAILEDEFDCLLVNARHVKQVPGRKTDISDAAWLCQLLEAGLLQRSFVPPKPIRALRNLTRYRKAQIGERQREANRLHKILEDTGIKLDCVATDILGVSGRAILDALVAGTTDPQVLSELARGRLRAKLPALKEALVGRFDAQHALIVSAILAHLDFLDEQIELLSEGIAEQLRPFAAAVELLSTIPGVQRRTAEVIVAEIGADMSRFPSARHLASWTGQCPGNDRSAGKRRSGKTRHGSKWLDTALTEAALAATRSKDVYLAAQYQRLRPRCGHSRALGAVKHSIITACWHMLTTGELYRETGGDYFSRRDPERATRRLVAQLERLGHHVTLESAAA

SEQ ID NO: 362262 - protein, 459 aa, unidentified
MNKVKQHKTSQFEKMPVVNLAAGGIDVGSRSHFVAIGQNTEDVKEFGVYTEDLHTLCKHLVASGITTVALESTGSYWQPLFVLLQQYNLDPILVNGKFTKNVKGRKTDVQDCQWIQKLHTMGMLEGSFIPDLFTEQVRQYYRHRQTLVANAASYINKMQKALRLINIRLDTALRDVMGRSGKDIIEAILKGERDAKVLASLAQPTVKTSKEEIVAALTGDWREEYIFELRQCYEIYQHYHKKIDECDEVIKQIVTAEVQRKQTEENLAKAEGVKIKKKKARKNEARINIQQLAVDLTGGVDISRIEGVGLGLVLCITSETGLDLKAFPTAKHFSSWLSVAPDIKKTGGKVINSRTRKGKGRLARALMHAANAIGNMKTGNYLVHFFKRIERRRGRPTAIIATANKLSKIIWNMLVKKQTYNPIMPKEYLDKIRKREVKNIQRKIKQLNIQEEEIVFATP

SEQ ID NO: 362263 - protein, 385 aa, unidentified
MSQPLNAAGVVLYERTLVLAIELSSKTWVLAAQVPGLPQTKAKRTIEPDKLALQAAIEGYRARAVATGHAVDRVIATYEAGWSGFWLARWLTTKGVEVHVIQPSSVPVDRRVRRAKSDGIDAELLLRTPLAWLRGEPRVCSMVPIPDEADEDARRCVRERTELISERVGLTNRIGAVLATLGVGEYNPLLQSRRRRLADLRTALDEPIPPNALAKIERLLSRLELVLGQIAELEEDRDAVAEAAAPDRAGKMIQQLCSLRGIGVQSATVLVREAFVRSFANGKALGSYAGLTATPYSSGGVEREQGIGKAGNRRLRSVMVELAWLWQRYQPGSAQVTWFRERVGSTGRRVRKVMVVALARKLLIALWRFVIDGVAPEGATMKPAT

SEQ ID NO: 362264 - protein, 425 aa, unidentified
MEGDPDRSREEDPMGDWIATGALGEGELSNHPTLEPAMQGVAAQSEAPIAIRTDLCAIFVSLELSRSTWLITSLSPGAGEKMSKHSVSASDTGGLFSRFAELQQKARTRTGRTFSIITIQEAGLDGFWIHRLLQGEGIESWVVDPASVLTSRRGRRAKTDKIDGETLVRTLLAYKRGEPRVCAMVKAPTPEEEDRRRICRERKTLTAERVRHVNRIKGLLFAQGVGDYEPLRRNRRGRLEELATGDGRPLPEHLKAQISRELDRLEIILAQLKAVGSERDAMLEPAKEGPPTPASLLAQLKGIGPEFAAVLWSEGLFRSFNNRRQVAAYAGLAPTPWQSGSVAHEQGVSKAGNPRLRTTMIQLAWLWLRHQPGSALSIWFRERVQRNGGRGKKTAIVAMARKLLVALWKYAVHGILIDGTKAKAA

SEQ ID NO: 362265 - protein, 370 aa, unidentified
MLGSPALMEHVNNTELSSHEGTRCQFNGSSGVIKLGIDVHQQFYTVVMQEGGSNPKPPQRFSKQGLVHWAARIKNQGGEMHAVYEACGFGFGLQRALSGLGIKCYVVCPQKLDEHNRRVKTDSLDAKALCLKLDRFVQGNRDALALVRVPSEKEEQLRAIHRQREQLVKARKQLEAQGRSLMVNHGVEPVKSWWKSRTFAALQVASWLKELLRNSQPILVALQEKIRALTVELQNAADPDQARGLGAMSSVIIDREIGNWHRFNNRRQVGSYTGLCPGEYSSGNTRLQSCVTKHGNPRLRAALVELAWRLVRFQPNYKPVLKWRETLRQGALSTGAARKKAIVAVARQLAVDLWRIRTGRVSAESLGLSN

SEQ ID NO: 362266 - protein, 482 aa, unidentified
MACKPKPPNQPSNAGAKARKGKRRRRTGMCLEDRPILEPNAAGIDIGSREIFVAVPPDRDPNPVRVFPTFTENLQELAAWLLQCGMTTAAMESTGVYWIPLYDILEQRGIKPCLVNARHMKNVPGRRTDWHECQWLQFLHSVGLLRSAFRPEAQVCAVRTLIRHRSELVQAASQHIQHMHKALTQMNLQIHHVISDITGTTGLAILDAILEGQRDPVILAQFRDPRIKASEETIRKSLVGNWRREHLFTLKQSRELYRTYQQRIVACDQEIESLLTEFTPRVDPTEKPLPPDRKRNRAARKRRKKTGNPDATFDLRTEAYKLFGVDVTQIPGVETIALPLFSEVGRDLSKWPTGGHFASWLALCPDNDISGGRVLWRGMRKVNNQAGSLFRLAAYSLHHSLTPMGDYLRRMKSKIGPAAATTATAHKIAIVFYTIVKRQVEYDETIWSTRDINRKKSLEAKLKRQAKQLGYELIPTGEKPAA

SEQ ID NO: 362267 - protein, 361 aa, unidentified
MKRVQSNTLDFSGQNIYVGIDVHLKSWSVAILSEHSILKRFSQIPEPEALHKYLVSNYPGANYFSVYEAGFCGFWIHEKLMDLGITNIVVNPADVPTMSKEKLRKTDAVDCNKLARELRSGSLVGIYVPKADVLEMRSLIRMRNLIVKDSTRAKNRIKSLLGFHGVDIPEEFTRCSIGCWSKRFLTWLHSLELSTEYGKKTLELHLEQFVRLRKMLLQETRAIREISRNAPFERPIRLLTSVPGIGVTTAATLMVELDGIVRFRNEDHLASFIGLVPMCHSSGESNGTGDITVRRHFMLRCLLVEAAWIAIRKDPAMTVDYTEYRKRMNPQKSIIKIARRLVNRIYYVLKHEKEYIPCVVK

SEQ ID NO: 362268 - protein, 355 aa, unidentified
MDRTKYIGMDVHQASISIAVRDASGKLVMESLIETKAATILEFLQGLKGTLWVTFEEGTSAAWLYDLLKPHVAKVIVCDPRKNALLKTGNKNDRVDARKLSHLLHAGLLTPVYHGESGVRTLRELARSYLTLTKDLTRVMNRLKALYRSWAIPCVGEKVYSPRHRSAWLEQLSEAGVRRRAEQLYQQLDILLQIRRDARRELLRESRKHPAHELLRQIPQLGPIRVALLIALVQTPHRFRTKRQLWAYCGLALQTRSSGEYRFTAGQLQHSKKLPALRGLNSNHNHDLKNVFKSAATHVSTSPDALGDFYRSLLAKGMKPAMARLTLARKMAAIVLTVWKKGARFDPGELKRQAA

SEQ ID NO: 362269 - protein, 411 aa, unidentified
MHNRQNYLYVGVDLHKEHHTAVIINCWQEKLREIQFDNKPSAFSKFLLEVETYVSDGLSVVFGLEDVGGYGRALAKYLVDHEQVVKEVNPALSFLERKSQVMIQKNDSWDAECVARILVNKFNQLPDAKPNDLFWSIQQLVSRRNALVKAQSALKNQLHIQLNHHYPSYKKFFSELDGKTALAFWQQYPSPSCLEGTNIKRLTAFLLDVSNNTCSVKKASDILKLVKEDGQTMKEYQEMRNFLVRSIVREIEFKKKEMKYIERELKQLVKLLDYQLETMPGIELVTASALIAEIGDVRRSPNANKLARFAGIAPVYFGSGGKGKTHKSKQGNRALHALFYNLAVQQVQVAKGSKLPRNPVFHAYYQKKLKEGKTKGQALVCIMRRLVNIIYGMMKYKTAYELPIVEEKEVV

SEQ ID NO: 362270 - protein, 332 aa, unidentified
MYLGIDVHKQYAQVAVMDEAGKIVEEVRVENANLDDLAQRYAGAQAALEATSNYYHIHDTLSEHLDVAVAHPQELTQIADTDKKTDRVDAKELARMVRLNAVPESYVPTDEIREARALVRGRQTLVEDRSKYANKIHGLLSDQGITENVKPLNVKGREFLQELSLPMPWDTLLESYLDVIERLTEEIQELDETIEERAGSLKETQLLMTIPGVSYYTALTIYAELGEIDRFDGHKEVVSYVGLNPVIRESGDSRIEGNISKRGSSRVRWLLVQAANTAVHTCNDKYLSRFYDRLASRKNSQKAIVATARKMLVSIYHMLDRGEVYDPPGVSS

SEQ ID NO: 362271 - protein, 368 aa, unidentified
MLTSIAPLTYVGLDVHQNSISIALIRPGAQTPDEDEIPNTAEAVRKLVRRWKEPAAVRVCYEAGPTGYGLQRTFASLGVDCAVIAPALIPVRAGVRIKTDRRDARKLAGLFRAGELTTIRIPPPEEEAVRDLIRAREDLCEDILRARHRLSKFLLRHDRVYRDGKDKWTERHLAWIRRQHFETAGLDDLVGHHLAIIESRLRQRDLMDAAIAEVASSERYADAVRRLCCLRGVKPLTALTLLVEVGDFRRFAGAAAFMGFTGLVPSEASSGERHHRGSITKTGNAHLRRVLVEAAWAYRQKPALGARWRTRFADQPAELVAYAIAAQQRLHARYWRMVSRGKRANVATVAVARELAGFIWGVMNERWA

SEQ ID NO: 362272 - protein, 521 aa, unidentified
MRILIAEDDQVLADGLLRSLRGAGYAVDQVGTGSEADAALASHEFDLVILDLGLPRMHGFEVLKKLRGRGKSTPVLILTAADSVEQRVKGLDLGADDYMAKPFSLQELEARVRALMRRGLGTASSILKHGPLSFDATGRVAYLNDQMLDLSARELSLLEVLLQRSGRLVSKDQLVERLCEWGEEVSNNAIEVYIHRLRKKIEQGPVRIACAAKQHLDACWADVELRVANDASGHDELTAKLKAADVDLVMVEATGGYERALVCALQGAGIAVVRVNPRQAREFSKSLGTLAKTDRVDARVLRDFADLISRHRERSRYITPLVEVERQELAALTTRRRQLVEMRVAETNRLEQASKLTYRSIKRVIALLDKQIAQIDQDADDHLDRHFKSQRKLLDSVKGVGPVTILTLIAQLPELGLLNRRQISKLVGLAPLANDSGQRKGPRRIWGGRATVRAVLYMATLSAIRHNPVIRQFHSRLIAAGKAKKVAIVACMRKLLVILNAMLRDKAQWSAVKHLQLTEKS

SEQ ID NO: 362273 - protein, 381 aa, unidentified
MNHSTTPQTEQDLFAHYYIGQDLHQDNVVVHVCRNEFSNGSIRSKTILSKKFSIVGPEAIAAYFKALEPYCFNQPHTAIVESTYNWYWMADGFESRGWNLRLADPSTVSRANIKYADDYTDAAYLVECLRTGSLRTTWVMPKDDRAIRDLARYRMTLVEDRARLKTIIVNMITNHLSIKLTSDKLIREIDKSVETAIESPSEEVAQQVLATYFDHRLVRIKVGSLLNRIRFLATEIGQLDQELLSLLKPNLYSKSLQTIKGCGFVTSMIIALEIGEIERFNTHKDFVSYCRLAPTSKLSNGKSKGVGNAKNGNAYLSWAFTELANLVVRFNPEAKRYYDRLFNRSRLRVKAIRSVAAKMARAIFMMLKHGETFDLKRCFGC

SEQ ID NO: 362274 - protein, 361 aa, unidentified
MQSTTIIAFDQHAATTVAAVLLPGQRTPALHSLTSDCPTILRFVERLRRQGSVTCCYEAGPCGFELQRALTAKKIPCDVIAPALIPRRAGDRIKTDRRDAGQLAVLYRAGALTPIHIPTEQEEAARDLLRCREDIRADLLRARHRLSKFLLRHGRRFTATKKAWSKRHDHWLRAQTWPLAALDQTHRAYLRAVDEVVTRLRDVEQDLRALLDLEPLHARVRRLRCFRGIDDLTALTIAAELGDPRRFATAPRLMAYVGLVPSEHSSGASRKQGGITKTGNAHLRRVLVESAWHYRHHPFVSATVRTRQRGAPAAVIAAAWAAQQRLHRRYARLAARGKRKQHIVTVVARELTGFLWAALIR

SEQ ID NO: 362275 - protein, 361 aa, unidentified
MKIMTGIDLHSNNALCGLMDESGQRLVHKQLPCELPAILQLLEPYKDRIATVAIESTYNWYWLADGLQDHGYHVVLANPARMKPYDGLKHTDDVSDAFFLTELLRLKILPTGHLYDRKTRPVRDLLRRRLMLVHQRTTLILSFKSLNERTLGRRIALSRVKTMPVAEARALFADPADQLLSGTEIELVGRFTQAIEQLEAHVLGVAGKWDPYQRLQTLPGIGKILGLTIALETGDPKRFATAGNFASYCRCVKSRRESNGKKKGENNRKCGNTYLAWAFVEAAHFARRYNAACRRFYDRKKQPTHPVIATKALACKLAKAAWHVMAEDAPYDAERVFGPGQKTDFGETGREPAKGSGHPSQ

SEQ ID NO: 362276 - protein, 349 aa, unidentified
MALATISVLGVDLGKNVCSVVGLDASGKVVMRRKMRRETLIGLAENLAPCVVGMEACCGAHHLGRVFAAHGHDVRLMSPEYVRPYVKAQKNDDRDAEGIAEAATRPTMRFVDLKSQDQLDVQTLHRSRDRLVGERTALTNQLRAILLERGHIAPKGRRKLEEFLAELMDDRGGAELSPRMVLLVADARAQWAELDRRIAAFDDEFVRWAKENEEARRLTTIPGIGAIVASALVAAVGHGETFARGRDLAAWLGLVPRQFTTGGKPKLLGISKRGNRYLRKQLIHGARAALPHVAERDTPLGRWAKGLMARAHHNVAVVAFANKLARIAWAVMRHGDRFAATPTRMPAAA

SEQ ID NO: 362277 - protein, 343 aa, unidentified
MQTITTMGLDIAKSVFQVHGTDAVGNVIIRRQLKRRYVLAFFQKLPPCLVGIEACASSHHWSRELKALGHTVRLMPPAYVKPYVKRQKNDATDAEAICEAVRRPNMRFVETKTPEQQSGLMLHRTRHLFIRQQTAVINAIRAHLAEFGIVAPVGRNGVEQLLGVVADSNDERLPEVVRACVAALGAQLRMLKTQILEFDRRIVAWHRSNETSQRLDEIPGVGPALATALVASIADPKAFRSGRDFSAWIGLVPKQRSSGGKDKLGSITKQGDRYLRSLFTAGALAVIRYAKIHGTKHRPWLTALLARRPTKVAAIALANKIARTAWAMMAKGERYREPVAMAA

SEQ ID NO: 362278 - protein, 344 aa, unidentified
MEPMYYIGLDVHKQKISYCVKDRSGQLHAEGSLPATRFDLDCWMKTLPQPWSAAMEATMFTGWIYDHLKPHAAALKVAHPLMLRAIAAAKKKNDRIDASKICDCLRCDFLPECYMAPTAIRERRRTLRYRNLLVRQMVQMKIKISSLLMEAGVSYNKQRLHKAGYFRELLATNPDIDEGLRALLRQCRETVVRLGKTESALIRSLEHDRLLAQRVERLMSIPAIGPITALTWALEVGEVQRFSSIKKAVSYCGLCGAEKSSGNTVQRTPLSKQRNKHLQTTLIEAAKMAPRYSPTLALLYDREKQRGNANRATLAVARKLVAYLVAVDRGQTRFLAVDHEACAA

SEQ ID NO: 362279 - protein, 391 aa, unidentified
MIYIGIDVAKDKHDCFITNSDSEVLFKAFTIFNNLDGFNDLYQKIESVMDDVTKVKVGLEATGHYSYNLLGYLIDKGLAAYVINPLHTNLYRKSLSLRQTKTDKVDARTIASMLMSDVNLKSYSDTSYHNEELKSLTRYRFDKVKERAKLKSSVSRLVCILFPELEKLVPTLHMASVYALLSEFPSAKHVATAHLTRLTNLLSESSKGRYGKDTAITFRDSARASIGSNMPAKSLELKHTIKLIQELDSEIDEIENEIKIIMDEINSPILSIPGINYRMGAMIIAEIGDFNRFDSPDKILAYAGFSPSTYQSGQLDGAYAHMEKRGSRYLRYALYNATKYVCHWDPTFAAYLAKKRAEGKHYNVAISHAVKKLVRVIYHLEKTKQQYIKAA

SEQ ID NO: 362280 - protein, 354 aa, unidentified
MESTADTYVGLDVHRKIVVATALDGTGHELAQEKFGPEPSELTDFLSRLPGRKHVALEACSMWAPYYDTAASTGAEVTLTNPYKTRLIAEASLKSDKVDSEALARLLRVDSLPTSFAPSPEVRALRTLVQDRVFYRRYWTAVANHTYHFLIARGIPYEDRLLKFRRKREVLRKLHLPEIDRGLATLLALEERCKELEREIHSAWVESEDGQLLTTIPGIGELTAMALVAYLCPIERFPTSRHAASYVGLVPRSYQSADRQYHGKLKRDSNGFVRWLLVEASWTHRHRERKGDVARTARRITRHRGSGKGTVAGAHKLLRIVFAILKERQPYLPHAPEPTAPTQALRRLRTTASQ

SEQ ID NO: 362281 - protein, 375 aa, unidentified
MNNNNTLYVGLDVHKESITVAYAINSEPVELMGKIGTSPTDIQNLCKRLRSKSSQGSIVYEAGPCGYGLYRRLVKSGFDCMVCAPSLIPKKPGERVKTDRRDAIRLVRSLRAGDLSAVYVPGVEDEAFRDLARAWASARDDLRHARQRLKSFLLVHGVHYVERADWGPAHRRWLSKYSFESPWRQLAFDEHRRTIEDRQAQCERLESALKEAVTEWRLYPVVEALQAMRGIQFITAVGLISELGDLTRFEHPRQLMSWFGITPSEYSSGGSRHQGSITKAGNSYARKLLVEAAWSYRHPARISPAIQKRQENLPRPVIDRAWDTQLRLCKRYRKLQAKEKNVNITIVAVARELAGFIWDMGRIAMSVAQQPQCHK

SEQ ID NO: 362282 - protein, 424 aa, unidentified
MSKKKSSPAGLQALYARACGLDVHKKLVVACVRILDSKDGTVQSTLRKFGTMTADLLELRQWLAELKVTHVAMESTGVYWQPVFNLLEGHFKVWVVNAQHIKKVPGRKTDMKDAEWIAQLLQCGLLRPSFVPERQQRELRDLTRQQTKLVQQRNAVDNRIQKVLETANIKLGSVASDVLGVSGRKMIEGLIAGEKDVTALADLAQRQLRGKIPELQRALEGELTEHHRFLLRQLLGQYDFLEKEIASVSERLGAVAPPSFRAAVEQLDAIAGVGERGARALLAETGTDMSRFPTHKHFASWAGRCPGNHESAGKRRSGKTPAANRHLDAVLTEMAHAAVRTKNSYFKAQYHRLAGRRGKKRAIGALKHSLLVTVYFMLRDNRPYKDLGVDYFDKLNPQQRIRYHVRRLQELGQEVELSPIPDAA

SEQ ID NO: 362283 - protein, 408 aa, unidentified
MQIAPGLKKHIREVRHMIIVGIDIASEKHDYFMLHKETGTVFSTSSVTIGNDEEGFKKLHSDIQSFCGVTGDSNVRIGLESTGIYHTNIIAFLLTQDYKVMMINPILTNMTRKASRIHSQKNDNLDAQTICKFMIDHADEFSPYTPSLYHKTALKSLSRKRFFIVEDLRKAKLAVNNLVQLIFPEFKSLFSNIYGDSAIAILKEYGSAQRIARAREVKISSLLNGHCKCSAKQIIDAAKRSVGLKDDFYAFELLDAIEEMEHIQNRIKGYDLQIKKYVDELCPNLLSIPGVGYTTAGLICGEIGDIDRFHSAESLVSYSGIDVIVYESGKYKAKHLIPSKKGSKYLRYALFQVSRIIWQHDPVFSSYYAKKQSEGKHYYVILGHIQKKVARVIYSVLKNNSVYQPRFV

SEQ ID NO: 362284 - protein, 309 aa, unidentified
MSGTYIGIDISKERLDVAALPSGLKWQFSNDEAGLNKLLVKLKKQFPTLIVMEPTGGFEAPLASILTAEGLPVAIVNARQIRDYARAVGKLAKTDSLDAMVIAEFAQKVEPEVRQLRDEENQEIKDMVSRRRQLMEMLTAEKNRLATARKVIKPNIMAHIKWLTQELEDLDRKLRQQIEDSPIWREKDDLLRSIPGVGKVTSTTLLAELPELGTLNRREIASLAGVAPFNQDSGTMRGKRRIWGGRTSVRAALYMAALVGTRYNPVIKAFYTRLLEKGKPKKVALVACMRKLLTILNSIIRYRKAWDYA

SEQ ID NO: 362285 - protein, 438 aa, unidentified
MSNKVIFNLDDLFISVGIDVGADFSWMSIALPNQQFVGKPYKILHNSIDSLTTAVSKIKEAEELYSLESRIFLESTGIYHYPLFCYLRDKGFNCSVINPIITKNSTNINIRKVHNDRFDSKKAALVGLKPDLKVSLIPSALALNCRNLCREYYDLMDNRSAYVNKLQGELRMAFPQYLGIFSKVTVNTSLTLLETYTSPSAFLKADKQEIIDIIKSTARFGLTYAQNKYNAIIQAATDANQFGYIIDSNIKRIRLYISFIRKYDEEINNILESLHELVDANEDADFVKQIHLIETFKGAGFLSAVSIMGEIGDFSAFSKPKQLFAYFGLDPAVKQSGKFEGTKVQMSKRGSAIARRVIHTLTLQSISISRNGEAKNPVLREYYLKKCDSKPKLVAMGAVSHKVCNMIFAILRDNKPFKIIAPQEHIKQYNAAKCDIAA

SEQ ID NO: 362286 - protein, 330 aa, unidentified
MYLGIDTHKRYSQVAVVDDDGNLQDEIRLPNDRLSELAEQHAGDEAAIEASGNYRPIYEMLDEHLNVTLVNPSKNRIIADATVKTDRVDAKRLAQMLRANMLAESYVPPDEIRVLRDLVRTRKSLVEERTAEKNRVRAVLTRTDNTYDSELFGPTGREFLAELSLSDADRAIIEAHLSVIDAYDEQIERLEEKIERKVLESPAAQRLLTIPGVGQYTAAVIVAEIGEVDRFDEDKQLVSYAGLDPVVHQSGDKEVRGSISKEGSAPLRWALVQCANIAVRCDEYLGNFYTRLKQRKNHQIAIVATARKMLVSIFHMLTRKESYDPPGVSA

SEQ ID NO: 362287 - protein, 358 aa, unidentified
MNNIINYIVENQEIFIGLEDSKKTWKLCARSGGVVIHEASMPAKYEVLNNYFSNKFPGCLIHVMYEAGFRGFELHDQLKAAGYDCVVTPPHTVTEEKSQRKKNDRIDCRRLAKNLENGDYHSCYPPERKLREDRQISRLYEQGQRDIVRECNRIRRTLEFHGLDQLFPEKNWSRNQYRQVHERLNKMDIAPSLKFTFNAYFDKLEHLWEIQKQVLNELKALAQLEPYRRSVDIWKSAPGIGVLTAIRLALEWGDVRSRFVRKENFSSFLGMIPSEYSTGEQERKGPITKQGNRQVRAWLIECTWRALKYDPALLDKFNRVVKSTGSRKKAIVATARKLAIRLRAVLIQGTPYTIGLIK

SEQ ID NO: 362288 - protein, 377 aa, unidentified
MNIQLANVISDVAGVTGQKIIREIVAGERDAQVLAAYRDVRISATGIDLAKNVFAVHGVNGAGVVQVRQPKVARAKLGALIAGLPPGVIGMEACSGAHHWARQFQAHGHTVRLMAPKLVTPYRMSGKRGKNDAADAAAICEALQRPNMRFVPIKTEEQQAQLMVHRARQGFVTERTACINRIRGLLAEFGIVLPLKAEVVRRQAREHLEDLPGYANLVIGDLLSEVAHLDERIGQYDKYVHAMARQSTPAQQLMRLMGIGETTATALVAMVGNASEFSCGRQFAAWIGLVPGQYSSGGKARLGRITKAGDPYLRSLLVMGARAVLNAAKSKTDSISRWAVAVEQRRGYWKAVVAIAAKNARLAWAVLSKGDAFKLPA

SEQ ID NO: 362289 - protein, 342 aa, unidentified
MEKVSIIGLDLAKRSLQAHGARADGGVAFRKKLSRDKVLAFLAEHPRCVVAMEACGSAHHWGRAIGALGHEVRLIAPVYVKPFVRRQKNDAADAEAICEAAVRPTMRFVAIKTEEQQARAMLFRTRDLLVRQRTQLINALRGHLTEHGVVAPQGPANVKGLAEAIGSETTSLPLLVVELSRVLLGQIDELSKTIAELEKATVQEAARGATMRRLQTMPGVGPITAMAIETFAPPMAVFRRGRDFAAWLGLVPRQHSTGGKPLLGKTSKMGQRDIRRLLITGAMAVIRSASRKGRSEGGWLHRMLARKPRVVLAIALANKMARAIWAMLTRGEDCRVPAAAAC

SEQ ID NO: 362290 - protein, 464 aa, unidentified
MPLRLGIDIACRAAHQVSLADEQGRFIWTGRRFRTTPQDLDRLWAMLPDDTDPAGVLVVMEPTRNAWVPLAAWFRRRGADVVLVPPERSADLRRYYAKHTKSDRLDSQLLARLPMLHPDGLHVEQGLGPGDALKRAAKLHSTLTHRRSQSLARLDALLEILGPAWHAVIGADLANRTPLKFLAAGYADPHVVKRLGRTRLARFCYRHSRGACGEPHAAALLAAAQETLQLWSGGELAYPDLAEDIAIEARLALQLTEEIKDLDERTALLLRETDPTGIVTSAPGVAAITAAAILGRLGDPNRFTSLAGARAFTGLVPTLDASGVNNRHGGPTKRGDAVLRQALFMAAGQARRIDPTLAAKYHRLMTDAGKHHNSALCHIATTLLTRIIACWRAGQPYQLRDVDGTPVTIDQARAIIAERYAIPKDRRARRRTTTDTGTDLRSKESPSAPSTGPSTPNATTTTAA

SEQ ID NO: 362291 - protein, 353 aa, unidentified
MKRTTKYVALDVHQATTVAAVREESGRVIARSILPTEAAALVEYFQGMRGSIQVAFEEGTQAQWLHDLLAPVVDRVIVCDRRGEHRGNKADQVDADKLSQRLVNGDLRPVYHGSSDRMTLQELTRAYTNLVEDSTRAMLRLKSLFRARAVRAPGKRIYGTKDRPLWLARLPDRGARFRAEALYAELDVLRELRPRAKTLMVVEARRDPAWQILGSIPNLGPVRVSLLLATMKTPWRFRTKRNLWAYAGLAVVTESSADHEFIAGRPVRRRRKPLTRGLNKNHNRVLKNVFKSTASASIGQQGPFQDLYRGMVARGMREDMARLTLARKFAALTLRLWKTGEAYDPAKLTVRAT

SEQ ID NO: 362292 - protein, 391 aa, unidentified
MILVGVDVAKDKHDCYIMTSEGEVLFKSFTIANNMEGFNQLYEKILSVIDNFDNVKIGLEATGHYSYNILGYLLDKGLTPYVINPLHSNLYRKSLSLRKTKTDKVDSRIIASMLMSDVSLKPYSNTLYHNEELKSLTRYRFTKVQERAKLKISISRLVTILFPELEKLVPTLQMNSIYALLYEFPSAHAISKAHLTRLTNLLNTTSKGHYTKDKAVLIREAAKNSIGSNMPAKSLELKHTIKLIKELTSEINEIEEEIKIIMNKINSPILTIPGIGLSTGAQILAEIGDFKNFSSPDKLLAFAGLSPSTYQSGNMYSSNAKMEKRGSKYLRFALFNAAIYVSYWEPTFSQYLKKKRVEGKHYYVAISHVVKKLVRLIFHLEKTNERYSTVV

SEQ ID NO: 362293 - protein, 342 aa, unidentified
MKNLMIGVDLAKAVFQVHGALRTGEVQFRKKLTRKQFPASMAQHEPSMVIFEACGSAHFWAREMEALGHEVKLIAPQYVRPFVKRQKNDAADAEALVIAARQPEMRFVEPKTVEQQSCAAVFRGREHLVHQRTADVNALRALLYKHGYVFPVGMSHLNRMTALVQDETVDLHALIREECLDLLGQIAEKTARIIERTKKLKTLATQSNRARRLQTMPGVGPLTAVAVEAFGPDMVEFKIGRNFAAWSGLVPRQHSSGGKERLGRMTKAGQADIRRLLIIGAMSRLNWLGQRTITEGSWLSRMLARKPRMLVAIALANKMARQIWAMLTKNKDYRDPAMAVVA

SEQ ID NO: 362294 - protein, 342 aa, unidentified
MGRWIGVDLHKNRFTVCYLGTNGEHKLLEFTVSAKGIKSFKETLTNDDEVAVESTGNAGYFVRQIEDTVKVVRVINPLQFKVISSSAKKTDEHDAVIIARYLSKGLIPEVRMRTKEESQISSLISTSDRMVKLRTALKNKVHNILNTNGIVTEREVFSSDKGLDNVLTLNIDEAYLFELRIIVDQIHSLNKSIDEINKELTNRGKKIDGHKNLTSITGTGDISAAILLNTIGNINDFDSDKKLAAYIGIVPRVYVSNETSQYGKITKMGNKIARTALVQSTLVTIRYNPYLRSFYSRLKAKKGSGEAIIATSRKLLTIIYRTLKNDWVFEDFSKFKLAAVTA

SEQ ID NO: 362295 - protein, 349 aa, unidentified
MRFYQQEHRFYCGVDLHARCRYLCILDHTGQPLLHRNYPADARAFLDAVAPFRDGLVVAVECMFTWYWLADLCAEQGIPFVLGHALYMKAIHGGKSKNDRIDSEKIATLLRGGTLPVAYVYPKGLRETRDLLRRRMHLVHRRAEAITHVVNTNSQYNLPPFGKKLIYAKNREALKIAQRFADPSVRKNVEADLAVIDRHDEVIAELELYLERTVKVEDGQTYYLLRTIPGVGKILALVLLYEIHDIRRFADVGNFLSYARLIRPDHESAGKKCGFGQKKIGNAHLRWALGEAVALVVRDSDQAKKWLARRQKKSGKGKAMGILAAKLGRAIYWMLRRKEAFDPKCFWQS

SEQ ID NO: 362296 - protein, 355 aa, unidentified
MKQQAIQYLALDVHQATSVGTVRDESGAIRMRVTVPTEAKAIVGLVKGIGRPLYVAFEEGTQAQWLHDLLRPHADGVVVCNVRGRSETVNKSDRIDADWLSKQLRLNALKSVHHGSAGVATLKELVRCYMNLVDDATRVMLRVKAIYRGRAVATAGKGVYRPSQRKAWLAKLENRGARARAASLLEQLDTVLKLRTEARTAMIAEARRQSGWKILRAIPFLGPVRVAQLLAIIGTPYRFRTRRQLWPYAGLAVVTRSSADGEIVEGKVRRRKRAPLTRGLNRNFNRVLKNVFKGAANAAAVKAGPLKESYDRCVAGGVHEEMAKLTLARKIASIVLRLWKKGELWDPAKVMMQAT

SEQ ID NO: 362297 - protein, 341 aa, unidentified
MDYCGIDVHQKESEICILNEEGEVIERSRIPTSRKALTAYFGKKARVKLVMEAGGSSQWVSRLIEKQGHEVIVCPPRQIRMIAESTLKSDEIDAEILARLGRIDVGFLGRVTHRSEEVQLLQANLTVRSALVKSRTKWVNTVRGVLRGFGYKVSGGSTGTFHQRCTNTDIPEPLMETIRPLLTQLELITEEIERIEDKLNTIACDFPEVDHLRCIPGVGLLTALSFVLSIDDPERFRRSRDVPAFFGLRPAVRGSGDVKHYGKITKQGDPEIRRLLVQAAHAMMNTKKDCHLKQWAAKVTARRGKGKATIALARKIAALMHHLWITGEVFQAFPSNFKRAA

SEQ ID NO: 362298 - protein, 343 aa, unidentified
MLIIGCDYHPSFQQIAFVDDATGEYGQRRLEHGNEEAQQYYRSLKGQKVLVGVEATGSMRWFERLLAECGHELWWGNPAKIRAAAVGRQKTDKRDADLILQLLIEKRFPRLWVPSVEQREGRQLVLHRHRLVQMRTRVKNQLQALAMNEGVQRKHKLWSQAGQAELQGLSLGPWASVRRTDLTDLRKYLDGKIDVLNQGLEQQVEQRPEVRRLMTHPGVGPVVATAFVLTIGEPGRFKKSKEVAAYLGLVPLEDSSGGRQRLGHITKQGNSMLRGLLVEAAHVAARREPEWQRKYKRLAMKKNRSIAAVAVARCLAVRLWWMWKLGLDYGPMKESRSHAESLV

SEQ ID NO: 362299 - protein, 449 aa, unidentified
MSRPQVIDDEEHERIHDKVAAIDVAKDAGVVCTRTPHPSRPGARRSRIWTVKARMNTIRALGRQLHKDGIEIVTLESTSDYWRIWFFVLEAAGLAVQLDGAAQAKNLPGRPKTDKLDAQWLARLTEMGLLRASFVPPKAIRDLRDYTRARTRLVQERTRCWQRLEKLLEGAQVKLSSVASKLTTVSAQDMIRAMIAGQRDPRVLAALARTGMKAKHDELVQALDGMFDDHHGELAQLLLDQIAGLDGKITQLGTRIEQAVTALPDAWGINAGGTTGPQAGTGPDAAVIPAVTRLAEIPGISENLARAVIAETGLDRRRFPTAGHLVSRAGLCPTARQSGPRTRAGKKGQGNTWLRGHLGQAAAGAARTATFLGERYHRIARRRGKAKAQVAVARSILVIIWHLLADPSARYTDLGYGYYQDRTDKDRKLRNHMRQIEALGFTVTLNKTA

SEQ ID NO: 362300 - protein, 359 aa, unidentified
MQKQINKLDYKGQNIFTGIDAHKKQWTITVMVENVPYKTFSQPSSVDTLYGYLKKNFPRANYYSAYEAGFCGFWPHFRLQELGVNSIVVNPSDIPTSDKEKRQKDDPRDSRKIARSLQNGDLKGIYVPSQSTLEDRLLVRTRFTFVKELTRFKNRVKSLLNLHGITIPEEFGNNRAYWSRRFISWLESIEFTQPSATSALQIIISQCKHLRTNQLEITRQIRKLSKTKKYHKQFKNLISVPGIGPTIAMLILTEIENIDRFKNLDQLCSFIGLIPSTNSSGDKVRTGDITPRGHKLLRSLIVEAAWVAIRNDPALMLCYANYTKRMDPNKAIIRIAKKLLNRIRYVLKNEQKYEKALIL

SEQ ID NO: 362301 - protein, 339 aa, unidentified
MQHIAIDLGGAKSQICVRAADGTLLMEKPITNSGIGSFLKRQPHSRVVLETCAEAFGFADIALSLAHEVRVVPAALVKTLGVGSRGVKTDQRDAQILSQVSCRVDLPSVHVPTEVARARRNMCQVREELVSTRTSLINCARGWARTQLLKIPQGVSKTFGLRLRRAAAQHPKGLPEYIERMLVVLDTLNEQITLADKELLNVAKDDPTCLRLMSVPGVGPVTSIRFVAALDDRTRFNSAHAVQSYLGLTPGENSSSKRQQRTGITKAGPSGIRKALVQAAWNIQRLRPLDPICQWATGIALRRGKFVATVAVARKLAGILFAMWRDGTMYCQKLTAAPA

SEQ ID NO: 362302 - protein, 480 aa, unidentified
MNVKATRTKKQVNVENQAIKLLSKEELGIKIEVIKKELRSYTWRDLETNGKFAKNDKLSFITDDMLIAGCDIGSETHYIRAIDVRGRELSSRAFEFSNTSEGFANAKAWMLALAAKNDKKQIALGLEPTGHYRFALAAWMVSNGISVVQVNPYAVKQSKEIEDNSQLKDDRKDPKLIANLVKDGNYGMPYLPEKVYADMRRLSMFRDQLTEDRIRNINRLHRELKIYFPEYMDAFGKIDGAFTLEVLKVSAIPSDITALGAEGIKNIWHNEKLRGRGYSRANEIVSYAEKSVGLTDGTDAGREAVKWYAEQILKLDEQLAVIESTLHEKCREIPYAENILEIRGVGENILAGILAEMGDISRFDDVKEIQKLSGMGLVACSSGKHKGQTKISHRGRKRLRYWLFQAAKSAVSHADEFKQLHEYYTTRTNNPLKKMQSLVVIACKILRVSYTILKTGTTYDPQKLLKDIKRPTASQAPMAA

SEQ ID NO: 362303 - protein, 366 aa, unidentified
MKKPSTTALRRIRQLQDGQLTIGLDLGDRSSFYCVLNSAGEVILEERVATNPEAMKKTFEKMPSSRIALETGTHSPWVSRLLTELGHEAIVAHSRNVRLIGESRRKDDRLDAQALARLARIDPQLLSPIQHRSAQAQADLAVIRARYALVRARTALVCAARGLTKAFGERIRGRNPKGFGSATAEALSPQLQVALAPMLSALEAITTRIREYDALIEKLAEESYPEVALLKQVKGVGTLIALTYILTLEDPRRFRKSRDAGCYVGLQPGRRNSGQSEPQMHITREGDSYLRMVLVQGAQHILGPFGEDSDLRRWGLKLAERGGKRGKRRAIIAVARKLAVLLHHLWISCEEYEPLHNTRKRRLIAA

SEQ ID NO: 362304 - protein, 389 aa, unidentified
MKNRYASVVCGGVDVHYKFSTVTFRDAAGRVVAREQLHHADREGLREQLARWPKGIPIVLEASFGWGWLSDLMEEVGLKPQLSNCYKVEKYRQTQGWVKTNKKDADLLSMLPGETREKPEPWWQVWRAPADVRDRREWMRYRADMVALTTGTKNRIHAVFHRHGIFFEEKTDLFGGLGRRFLDQLSQDGRHAGGVLPDGARQVLRGLVNLHAYLRGQLLEVAKTLHGQLERDELAKLLDGIPGIGLILSHTLRSEIGDIGRFKNHRKLAAYVCLAPRSDETGEPHPGRPPLGRHLGERGNRTLKWAFIEAAHGAVKHGGKWRAMFDRVTDGGRKDRGRGYIKVARELVQVVYIVWSRNVAYFEAPPRKPRKGRPPRRSRKDSRPGTGQP

SEQ ID NO: 362305 - protein, 398 aa, unidentified
MKVSGLDVHKDSIFCAIYNGNAYSPVNEYDSTLPKIRQMGEYLRSEGVTKVAMESTSTYWVPVWDVLIEMGFELMLVNPFLIKQMPGRKSDIKDAQWISCLLHKGMLRGSMIPSPLIQQLRVYSRKYTKLQEQKTRSLQKMDRLMVMCGFRIGSCMSNLATKSVMLIIRALIKGETNPEVLERLVYGNTANKKSGKLREALTGNLKEHYRQQLEWEREEYDLFEKQAEQCLAQMQKICREHYGEEIKLLKSIPGVSDISAMMIIAETGGDMRVFENSGKITGWAGLRPRNDESAGKYKSTATTKGNKYLRSVLVQVSWAASRIKDGWFKEKFNRFAMRKSRKKALIAIARKLLTVTWNVLYYKKPYHPQWVHIYDPVKVEAKMNYHQREVERMQKMLH

SEQ ID NO: 362306 - protein, 309 aa, unidentified
MSTNNSIIYIGLDIGKDSLQVNLQNQNFPIPNTRPGHRKLITHLKAIAQPLLVVCEATGGYEQSIVAALHQAGIPVAIVEPARVRHFAKACALRAKTDRIDAALLTEFGQQTAPRAQAPLNPNTAALRELTRHRLQLQAMAQNVVQQARHLTLPALRKQNAALLRQLRTHLQKLQKQIEALLQQDAALQTKAQRLQQVVGIGPKTIVSLLAEMPELGKLNRAQAAALAGVAPHARESGRWQGKRFIGGGRPLARKALYMAALVASRYHPTLKLRYQSLIARGKAPKVALVALMRHLIIHLNSLLKPLAV

SEQ ID NO: 362307 - protein, 409 aa, unidentified
MKVYLGIDWSQDTHAACFVNESGRDIARLSLPHSVDGLDKLDRARAQLGVSPDECWVGIETAHSLVVDFLWAHNYTHVFIIPPAATHSASKRYRQSGAQNDASAAFVLADMVRTDQQRLIAWRPDSALIQQMRARVSLLLYLTQQLTRTSNRLQAVLHRYYPAALTVFSQPMPPLAWHFIVAYPTPKAIESLAFTDFEAFVRQHHYRQPQRTLLASFARLQQPQPQASEAVSQAYAPEAVLLSQQLLALNQAKTTQLKELGDLFDQHDDADLFRSFPGTGDFLAPALLAKCGDDRARFPSPIGWQCLAGTCPITEESGHRRRVLFRKACDHEFRAITQQWAMCSLSQSVWAATYWEKMRPTCDSASAAYRRLANRWLAIAWRCWQDHKPYDETYHLQQRAQRQQPRSAQ

SEQ ID NO: 362308 - protein, 387 aa, unidentified
MPQPNDLSRSLTTLEQDSTLIVVIEMSLSSWLVAGIVPGIERHPAKKLEPDEAALLQLLQRWSHEASKAGHAITRTTVAFEAGRDGFWLARWLLARGIEAHVIHPTSVAVSREHRRAKTDRLDTELLKRAFLGWLRGERDHCSMAAIPTLAEEDARRPNRERESLVGERSRIVNRMKGTLARLGVRGFKPTLRKAPEQLERLRTPEGTSLPPNTLGELRRNMARLRFVIEQIEEIEATRLVRLQQQPEESAHAMVRLLARVVGVGIETADMLVQEVLSRNLRDRRAVARYAGLTGSPDESGIRRREKGLARAGNARVRRGMIQLAWRFVIFQKGSALAQWFRARTADARPGTRKTMIVALARKLLLALWRMVTVGQMPEGVALRAPT

SEQ ID NO: 362309 - protein, 314 aa, unidentified
MKAMRTHVAGVDVHKEMLAITVLIGDADSEPKVYQFECQTFTEDLMKAGLKLQELGVKEVALESTGVYWKPIYNVWAPMGINITVAQAAHVKNVPGRKTDMNDSHWLAQLHRFGLIRASFIPNNVFQHMRLLSRHRTNLTEDLARVKNRVQKVLEDGNIKWGSIVSDVFGKSGLAVLGLIADGCTNASTLALKVTTKIKRKEEAVKALTNCLTRDHCFIVKELMDQYYYLEARIKGVEDQLAEKAKPYAHLVEKLDEIPGIDKVLAMGILAEATDDMNHFEDERKFAAWAGVASGNNESAGKKKDQNAGKAIPI

SEQ ID NO: 362310 - protein, 411 aa, unidentified
MGMYEGTRIKPSGFFTASLPRIQLGSSRYWLEDALGQYLRNKLHCWYVFLNCPKNTTNKELVMGNKIGYENEKVYLGIDVHKKTYTFTAQCNDVIVKTATVPANPSQFAESLHRWFSGSKIFSVYEAGFGGFKLHRILDAGGIKNIVVNPASVEVAAKDKVKTDRRDSKKLAEQLATGRLTGIYIPTEKEELARLITRTREQILENRNRVSHQIKGRLHFFGLLDPDDKRVVNEAFIKDIESWQLAHELKMSLKLSIDLWRFLTAQLAELKIDMKTQSFEDAYNEALYQSVPGVGDVSARIFSNELGDLSKRFKNQQALFQFVGLVPTEYSSGESQRKGHISHQGSSRIRKALVECAWRAIETDGVLTESFNRIAARRGKKRAIVATARKLLGRMRACFATQTEYCVGLTA

SEQ ID NO: 362311 - protein, 338 aa, unidentified
MSIVMGLDQHRAQITADWLDIETGEVKRGRVAPADRAGVRRFLERFAGQQLEVGLEATTGWRFVVEELRRVGAVVHLAEPAETAERRGPKKRAKGDRADARHIRELLMIRRLPESWIPPDHILDLRARVRLRHELGEQRSEWQQRIQATLYHHGCPQRRSLMAGDGRDWLAAQPLPATARERVTVALAMIDALELQIAPIEKELRAYARRQAGCRALMAHYGIGELTAVTILAELGDCSRFSSSRQAVRYAGMAITVYQSDRHRAPGHISRQGPPVLRWALYEAAQVARRPGSPDREYYLEAAERIGGNRACLSVARKLLKRSYHTLRELGEEALAPA

SEQ ID NO: 362312 - protein, 433 aa, unidentified
MLKLNYMSTLFVGIDVSSKTNAVYAMDFEENKYISSSLGNNQPGADQLVNMIAECMQKHKNLDTVLIVLESTSVYSVHISSFLSTSEVLMPYKPYVFCVNPKATSNYRKSYIGMEKTDPTDAYLIADFGRVGRTKKLEPWRGGQFIALKRLTRHRMHLSECITREKTYMVSNLYLKFSELQLLEGDDKPFGSLYGATSSSVLTEFLSPQEIIDMPEEELLTFLAGKSRNRISDLSKTSELLRKAARDSYRLGKCMYEPLNISLASSFNCIHAYQKEIKLIEQAIEKCINGMNPNALIILQSIPGIGPVWASGILSEIGDITVFHSSDALAKYAGLYWPKGDSGDFTSEDNKMSKAGNPYLRYYLGEAANSVRKHIPEYADFYARKYAEVTKHQHKRALALTSRKLVRLVFGLLVKNQLYTGEKLDAEYNIESN

SEQ ID NO: 362313 - protein, 428 aa, unidentified
MSQADRIRLEEFRQFKKEVRGSAEYLIVGIDVAKDKHHAFLGTATGKALYRRLVFENDLEGFRKLLVQVEALKVQHGLSRVVFGLEPTGNYHKPLGEHLIKCGHRVVFVSGVAVKENRKSLDGRWDKHDDKDAANVADLVSRGRCLFYEYPGMALRDLRDLLSLKRRLRRIEHGHRVRIRNHLVAEYFPELERYYEQSQKVSLAVVRWCLDPSVIAGMEYGKFEQLVAPGRERLYQEKRLPLIWKMAVDSVGCEVGEGAEFEAKVMVEGLRQIRESLRALDEKIQEICSGFAEYDFLLSIPGFGPDVSSKVLGAIGDPFRFQSGAQVLKLAGYDLSAERSGKSAEMVPPVISKKGKADLRYALYQAALIASVRDRHFMVYFSDRLRGREREPGIKTKMRVKLAAKLLIIAWTLMKEKEPFNPDYLKSA

SEQ ID NO: 362314 - protein, 435 aa, unidentified
MNFIGVDLHKKSITVCVMDEKRKVLARKTFACTQTDEIVEFCRQFRPFKVVVEATASYVWFVELVEPLAEKVVLANPKKLRVIAESTKKTDRLDAQVLTEFLVLDMIPESYQPTPRQRQHRALVRHRQYLQGRITSVRSKIRHILSNYNADRKDLFSANCGPAYLKEVRLSDVDRFVIKQLWAEWQDHLAQRLAVSKKLKAFVAKAPQREAEAREILKTAPEVGPVTAEVVLSELGDISRFRNAKAVCAYAGLVPVVRQSGERKSKDMKITKEGSGLLRWALVEAAWRLVGNSPKWAALFARLTHRSGKKRAIVAVARKLLCVLYAMLRTSTPYKIVTTPTAAPPTTGKKLVRTSTPDQTTTTETTAPRTTRKRLVRTSTPDQTTTMETTAPRTTRKKLLGTSTPDQTTTTGATAPRTTGKKLVRPSTPDQTTTP

SEQ ID NO: 362315 - protein, 343 aa, unidentified
MALIGIDSHKDILGCAETDENGRLVKYREINNTIEGHAEIRGWTQECDVRLVAIEGSGNYGRPLAKMLIAANVSVVEVPPQMTAAARKGLRTGTKNDLVDALLIAQIALRVDDLGAPKPGGPIEDLRKLVQYRRELVQDRNRAVNRLHADLEQIRVGYHREITTSIGSTKSLQRCRDLLAKDRSVHAQIARKRITTVLALGREIKALTKQVQTAVQAAETPLTDIDGVGPIVAAEILTEVADLTRFPTKSKFAMANGTAPLEASSGRVKRHRLNRGGNRQLNKAIHVAAIAQISRPDTEGRRYYEKRLADGKTKREAIRALKRRISDRIWTALQTTKPIVSLT

SEQ ID NO: 362316 - protein, 397 aa, unidentified
MIAVGIDISKSKSKVAVLNSDGSVRTRPFDVHHNRQELDALVAYIKETGEQPTILMEPTSHYHYPVLKVLQDAELPVCLINPYQMKKYGDTELRKAKTDKKDALRIAKYALEKSYLLTPYTSTDQKFDDLKFLSRQYSQRINNVKYAKVQLINLLDETMPGITDLLPLKSRNPDNCVLLLFIKRFRSFDYIRKIGKTRFLSSYDTLVRKTTDRYAAGKGLAIYELALGSITTRGDNSFMALAQEQCVDLVSLAQKSADSLILQMQNIAETIPEYKILRAMNGVGDRLGPVILAEIGDVRRFHSGKALNAYAGNDAPPYQSGQFESRNRHISKRGNPALRKACFEVMQALKLTRPQDDPVYLFLLKKEQEGKPYNVAKMAGVNKFLRIYYARAMELYK

SEQ ID NO: 362317 - protein, 333 aa, unidentified
MRIIGLDIHRVFADAVVLEDGAYRRLGRIGMTRDHLEGFAATLHATDHVVVEATGNATAVLEILAAKVERVAVANPFQVHLIARAKTKTDKIDARVLARLYAAGFLPEVWIPDETTLARRRQVTRGNQLVKSRVRLKSIVQSILHTHLVPRCPHTDLFGTKGRAWLRAQVLPEDERAAIERHLENYDRQTAAQKDVERDIAAVALEDVDVKRLMTIPGIDMVVAVGVMAAIGRIDRFASPEKLVAYLGLNPSVRPSGDGPAHHGKITKRGRSHARHMLVEAAWQTVRSPGPMRAFYARIRAKRASHVAAVAVARKRAVLIWHMLTKADDYAWG

SEQ ID NO: 362318 - protein, 345 aa, unidentified
MHIASIGIDLGKTTFHLVALGEHNKILLRKKFSRPQLLAYTANLPASLIGLEACAGAHFMGAALREQGHQVRLIPAQFVKPYRKSNKNDFIDAEAIAEAVTKQNMRFAQLKTQEQLDWQAMHRVRDRLVRRRTALINEIRGFLLERGITFAAQPTHLRKNLPTVIEDAEQNLSPRLRWLLDRMWQEWKQTETEIEAITDEIERISNDDARCRQLRQIPGFGPLVSTATVAAIGNGAAFRRGRDFAAWVGVVPRQYSTGGKQKLYGISKRGNVYLRRMLIHGARAVLFRVKYNTGGFGQWVQRLAQRAPSNKVVVAIANKLARIAWAVLSSGQDYRHQPLLQLAAA

SEQ ID NO: 362319 - protein, 405 aa, unidentified
MSELEKGLVFAGVDTHKDTHTLCLLDHTGRAIGTFRFAADAKGYDALAGKIGGPATCVGVGIEGTGSYGAGLTRRLLELGYCVYEVMVPGRARRKPGRPKSDPADAEVAARQVLARVNLSKPKDQSGWTEELRQLMIARDRLVQATSAMINAAKSLIVTAPEDLRRSLEGLSRKNLRSALSTLDPAAGGIILALGSLGKAWDLQDREADAIEERMKRVLEANAPALLAIYGCGTVSAAALAVAGGGNPERLKSEAEFASLCGVAPLLASSGKTERHRLNRGGDRRANRALYQIAVTRMSYDQRTKDYVGKRKRDGKSKKEAIRCLKRYIAREVFRALRNPLEIKGPSWKDLRPARQALGITLVEAGKALNVGFQRVSYAETGRLMNVRFLEEYDAWLKSQAKRES

SEQ ID NO: 362320 - protein, 389 aa, unidentified
MKIYVGIDIAKLNHFAAAISSDGEIILEPFKFSNDADGFQLLVSKLDSFDKNSIIIGLESTAHYGDNLVRYLVAEFYQVCVLNPIKTCQMRKNNICKTKTYKVDTYVIAKTLMMQDDLRFVSFYDLDMMDLKALGRFRQKTIKQRTRLKIQLTTYVDQVFPEIQYFFKSGLHQNAVYALLKEAPSPKEIASMHMTHLANLLKVNSHGHFTKEQAKELRVLAQKSVGANDSAISIQITQTIQQIELLDSQLEKIEAEMTNIMKFNDSVIMTIPGIGYINGGMILGEIGDIHRFSNPNKLLAFAGLDPSVYQSGNFQAKTTRMSKRGFRVLRYALVNAAWNVVRNNATFKAYYDAKRAEGQSHYNALGHCAGKLVRVIWKMLTDKVEFNLE

SEQ ID NO: 362321 - protein, 406 aa, unidentified
MAVREKLWVGIDVGKAAHHACAVDEVGKVVFSQRVANGQAAIETLIARAQGKATEICWAVDLTSGPAGLLIALLLGTGDPVAYVTGRTVNRMSGAFGGEGKSDAKDAKIIAETARLRRDLPLIAQPGQALADLTVLTARREDLMSDWVRGVNRLRELLASIFPALEAALDYSSRGPLILLTGFQTPTAIRAAGRQGLLQHLTDHGARTTTAATVTAKALAAAEQQSIALPTEAATASLIARLARQLLDLDREVKDLTKQITETFRTHPQAEIIESLPGLGPVLGAEFLVATADNLGAFATPARLAAFAGLAPMTRDSGRIQGNLRKPQRYNRRLRRVFFMAALVSSMRDGLSKTFYQRKRSEGKHHIQALLALARRLVDVLWALLRDGRPFTPTAPPTASTTAAAA

SEQ ID NO: 362322 - protein, 321 aa, unidentified
MNTTMPLGIDVSKAKLDCALWLGSKYRTKTFANTPEGFARLSEWLHQHGADQVHACMEATGIYWEAAALYLADAGQRVSVINPALAKAHGQSLGLRSKTDAVDAKLLADFCREKQPPAWTPPSGAERRLRALVLRHQSLVEMQTQEKNRCESLREEVRTSVETHLAWLAAELERIEQAIAKLLDDDDHLRGQRELLASIPGLGERTIAVLLAYGVSGERFQSARQFVAFAGLSPRLHESGSSVRGKPRLSKIGHAFLRRALYMPAMVTLYKTAWGQRFRQRLAIHGKPPKLIIGAMMRKLAQVAFGVIKSGRPFNPAFHGA

SEQ ID NO: 362323 - protein, 318 aa, unidentified
MRIKECDLQARQQTLAMLDTGTGEVVNRTLPHEGESVREFYSTLPGPVRVGIEATGSMKWFLQLMQELGIDCQVGHPATIRAAEPRRQKHDQRDAGLLLKLLVENRFPSIWQPSQELLDLRGLLLHRHQWVRLRTRIQNALQAIALANGLRRGSSLWSESGQRAIASLPLATHTAQRRSELQAMYARFEAEIEQLKQQVLQQAGPRPTAGLLMTHPGVGPITALATDVFLGDPKRFSNGKALASYIGIIPREHSSGGRQRLGGLSKQGNPLLRLLWCEAAAHAVRRDPELRRFYRRKLVQKGLGKARVAAARKLGPGN

SEQ ID NO: 362324 - protein, 349 aa, unidentified
MAEQRISYTGERIDIGIDVHKETYTVTCLCQRQMVKTATVPAAPARLAESLPRWFPGARLFSAYEAGFSGFVLHRILTTAGITNIVVNPASVAVAANEKVKTDRRDAKKLARDLADGRLRGISVPTEAEELARLLPRTRAQLVAHRATLTRQIKAKLHQFGLITPGSRRLMSSRYLREMAAWQLPTELHVSLMLLADQWRFATRQLLEVRRLLREQAKAQGALETVYRSVPGIGEVVARTLATELGDMARFANERALFSYTGLTPSEYSSGASIRRGHISRQGVSRLRHVLVETAWRALSRDPILQAMFDRIAATRGKQRAIVAIARRLIGRIRACFRHGTTYAIGTVS

SEQ ID NO: 362325 - protein, 355 aa, unidentified
MSVYVGIDVHRKRSQVAVINEGGEVLANRNVPNGTQPVLGVIGGLPPGTPVAFEAAFGWGWLVELLEDYGFAPHLVHPLQCKAIASARLKNDKVDAAILAQLLRADLLPEAWIAPPPVRQLRALLRHRAQLVRLRTLLRNRIHAVLADHGHDRPAGCWSGPGRAWLAALELPAVSREVIDDDVALIDALQVPIDRLDWEIHQRARSEPAVKVLTQLPGVGPFTALVLLAEIGDISRFGSARKLASWAGLTPTVRGSDRTVRHGHISKQGSAWLRWILCEAAQTAKRHPDFAASYQAMARRRGKKIATTAIARKLLTRAYHLLTAASGGEPASREGRQAPGELAFSHEPASPRSMT

SEQ ID NO: 362326 - protein, 431 aa, unidentified
MFALVGRVRLLEQAQDEEQIITRVAGLDIGKAALVCCARVPDETRPGRRLQEVRTYPTMTRSLIGLAERLAALGVTRVVMEATSDYWKPVFYLLEAHGFEVWLVNARDVKHLPGRPKTDKLDAVWLCKVAERQMIRPSFVPPAPIRMLRDLTRYRVDLIAEAGAERQRAEKLLEDAQIKLSVVVSDLFGTSGRAMMAALIAGQRDPHTLAELARSSLRRKIPALQEALTGHFTDHHAFLLGKMIARVEQVEADIREVDARIEAQLAPFAPAAARLREIPGVGPAAAAAIIAEIGVDMNRFPTPAHLAGWAKFAPGVKESAGRRKGTGSTGRGNRYLARVLGQIAVSAARTSTFLGERYRRIARRRGAKRAIVAIGRSVLTIIWHLLSDPAAGFRDLGADFYLSRTDTERRKRNHIHQLEALGYRVTLDLAA

SEQ ID NO: 362327 - protein, 351 aa, unidentified
METQQITTPKLYIGIDIHKRSWKVHCATDISSGKTFSMNPDPAKLKSYIERHYNGHEVFTAYEAGCCGYYAHRSFEGYGWRSLVVNPADIHRRGKEKHTKTDRIDAQLIARELKDGRLQGIHVPHIEREQLRSLFRRRNDLVKNYRRIKSLIKGLLLNQGVVTPLEFDNSHWSHDFRNWLDNLEFAYSPARMTLDSHMRYFRFVDKELRDVSTALRRYCKVHYKKDYILLRSIPGIGGIVACGIICELGDLRRFNNLKQLAGYVGLAPGIYQSGNKLRSTGLTRRAHRLIRSYFIEAAWQAIRTDPVMQDYYRKHLGKNVKTIIVKIARKLLSRTLAVIKTGIPYQIGVVS

SEQ ID NO: 362328 - protein, 337 aa, unidentified
MQVYGIDLSKEKFDVNFFDTDGKEKNRTVKNRLDSISKFLSKVPEGSVLCAENTGSYGDLLVFLCNRCGVSIALVPGYTVKHSLGILKGKSDPIDASRLREYGERFFDKLSFKTYQSESGSELRQLYSLRSQLVKSRKKLRTGEHAREQMPMQSIKVNLILKASLNALDQQIEAVDEEMELIIKNDRELAGNYGLAVSVKGVGPVIATDLIIKTGNFKTIGTARKAASYAGVCPFPNASGNMVGKPRTSPFADKELKSLLYMGAKSAVKHNKEYRLYYQKKQQEGKPHYLIMNNVMNKLLRTVYSVVNSKKPYDKDYVCLDPREINKNVNGSEKIVA

SEQ ID NO: 362329 - protein, 349 aa, unidentified
MAEVSTIGLDIAKAVFHAHGADARGQMVFSRRLTRAKLLEFFAAQPRCVVALEACGGAHHWAREIASLGHEVKLIPPAYVKPFVKRNKNDAVDAEAICEAAQRPSMRYAAIKTEAQQAAGMVFRTRDLLVRQRTQLINAIRGHLTEFGWVAPKGPSHISVLASLLEEGEEIGASLPEAARAMFLVMTGQLEQLNDQVALLDKEIARRAREDEAARRLMTIPGIGPITATALLALAPPAEGFARGRDFAAWLGLTPRQHSTSGKERLGAISRMGERTLRRLLIIGSSAVVLQASKRGAPRGSWLEQMLARKPRMLVTVALANKTARIIWAVLMKGEDYREGYRAPVAAAA

SEQ ID NO: 362330 - protein, 413 aa, unidentified
MKKHSSFLEQRESGKAAKSARRDSREVMAELVAQLTKQLDVESVSVPGEDKNVPDCESPNLDRLTVGVDLGDQWSNYCILGLDGETLTEGQFRTRRQEMAEFFQGLARSRVVIEVGTHSAWVREVIAGLGHEVLVANTRRMEGSKRRRRKNDRIDAAKLARLGRVDPKSLYPIQHRSTEVREDLLVLRAREALVESRTKLISAVRGLVKTMGTRVSSSSSDAFSRKAAAEIPQQIRETIQPLLRLIANLSEEIKSYDRRIEQLASEKYMHTKLLRQVTGVGPVTALGYVLTLETPLRFARSRDVGPYLGLVPRQEDSGDSQPQLGISKAGDRMLRKLLVGSAHYILGPFGPDTDLRRFGKKLCERGGKNARKRATVAVARKLAVLLHRLWVSGDVYEPLGHGTLNKTEHAAAA

SEQ ID NO: 362331 - protein, 324 aa, unidentified
MLDIFDDAVGRPERIANTLQAITERVAGWRCGNVFVVFEATGVYDRELAEALRQADIRFARINPARARDFARADGRLAKTDAIDARMLAIFARKMMPAVEPAPEPARSALASLAKRRDQLVQIRAQEKNRRSEATDRTTIEGIQRHLDFLNGEIKAIEASIKTLIKAEPDISEQARLMRSAPGIGPVACMQLLAKMPELGCLGSKQVAALAGLAPFNVDSGSYRGKRAIGGGRKRVRDALYMAALNAVRRDLTMKAFYQKLRTVGKPAKLALIAVARKLLTTLNAIAARPQSLRPAATHITVAGSRSGRRCGYYLHAARKSWRP

SEQ ID NO: 362332 - protein, 394 aa, unidentified
MFIVGIDIAKRSHEAIIINEDGQIVRKAFSFRNNCTGYNLLLEQVRKQTYLKSQIIFAMESTAHYWLALYARLSKDGYTVMVLNPIQSHSLRELYIRKAKTDAKDALIIADLVRFGRCKASNVPQDKLLALRELCRGRAYLVDVAADLKRKLTALLDRIFPEYETLFDPIFGKASVAVLRKYRTPQKIKNANMKKLTELISENSAGHFGEWKARQLKEAASSSFGIEDHFDVYATLLDAFLEQILSLTSQTEQLEKQISDILAEFGSHLTSIPGIGSILAATILSEVGDISRFSSADKLLAYAGLDPSVKQSGETKSSQSRMSKRGSPYLRRAIWLASGVAVQCDPMFRAYYEKKTSEGLHYMNVIGHVSRKMTSVIFAVLRDGQPYRPILPAV

SEQ ID NO: 362333 - protein, 357 aa, unidentified
MHKLEGQTGFKGSVHNILLPRARRVDCTICLEARLHLSLEVFVMEAIHPIACGLDVHKNSITACILVERKKYLRTFGTMTEDLFELLDWIKDMGCPIVAMESTGVYWKPVYNLLELSDIKALVVNAKHIKNVPGRKSDVKDAQWIAQLLQHGLLKGSYIPSREQRELRELVRYRRSLVEEVSRESNRIQKVLEGANIKLGSVASNVLGVSGRKMLRSLINGEDNPEIIAELSLGKLRNKIPELKKALKGLIGTHQQFMLKTQLNHIEYLEKQVESIDREISRRLEECKEDLELIQTIPGIGKRTAEQILAEVGTDMSIFKDEKHLASWAGLVPVENESAGKKKANKPGRGINIYEVL

SEQ ID NO: 362334 - protein, 340 aa, unidentified
MDRIGLDLHKRESQLCTLTAAGEVVEQRIVTSRERFSAVLGGRPPARILLEASTESEWVARHLESLGHEVIVADPTYAPMYATRSRRVKTDRRDARTLADACRLGAFRVVHRASDAQRHVRAELAVRDALIRTRTRYVAVVKALLRRDGWRLPSGMPEHTARKVAALPLGPAVLTELAPLLALLAPLQDQIDAADRQLEGGAARDPVVRRLRSVPGIGPVTAVAFAAALDTVDRFASARQVAGYLGLAPSERSSGEQQRRGPITKTGNPRVRVLLVEAGWRLLRSRHPAAAPLRAWAERLAVRRGRAIAAVALARRLARILYAVWRDGREYCPARLTSAA

SEQ ID NO: 362335 - protein, 440 aa, unidentified
MSEPVASTRSEEEWAAFAAIDWADQKHFWRLVPAGCEQQEHGQLENTPEAVEVWAAALHQRFGGRPIAVCLEQSRGALVYMLAKYSHLVLFPVHPTTAARYRETFCPSGAKDDPNDTASLLDLLLRHRERLRRLQPDTDETRLLQFLVEERRKLVDEKTRQNNRLIDCLKLYFPQVLHWFDDLAGELAGAFLQRWPSLQEAKRAHPGTLKRFFHEHNSRSEERITERMQAIQSGTPATSDVAVIEASTMTVRGLVALLATLRDQIVIFERRIAELVAAHPDGALFASLPGAGAALVPRLITAFGTQRDRFDSAYEVQCYSGIAPVTEASGKSHWVHFRWSCPKFLRQTFQEFAAQSIRQCDWAREYYQLQRDRHKSHHAAVRALAYKWIRIIFRCWKDGRPYDEQMYLSSVRRRTAVLGAALAAATGCGWEDVAGFKKFC

SEQ ID NO: 362336 - protein, 356 aa, unidentified
MTTCDERTVVGGVDCHSQVHHAAALDGTGRRLGERAFPATQPGYEQLLVWLRGYGPVTTVGVESTGSYGAGLTRYLLQAGVRVVEINQPHAHLRQRRGKTDAIDAEAAARKVLSGEATSVPKETTGAVEAIRQLRLTRRSAVKARAGALRQLGDLIVTAPAKLRERLSRKTLPGQAAICARFRPDRQRLADPVQAAKLALRTLARRIAALDAEIAQLDAHLEQLVRATAPRTIALLGIGPQHAGQLLVTAGQNITRLHGEAAFAHLCGADPIPASSGKTTRHRLNPGGDRAANSALHMIAVVRLRYCERTQKYAKRRIAEGRSKREILRCLKRYIAREVYRALCVDLAHLDMATAA

SEQ ID NO: 362337 - protein, 453 aa, unidentified
MAKVARKIKTSKGLRLKIVNPDAAGIDVADGEMQVCVPEDRDGENNRRFDSFTCDLREICAWLKACRITTVAMEATGVYWLNIFLMLQEEGFDVVLANPLQVKNLMDEKTDEADAEWLMLLHSYGMVKPCFQPDNVARRIRNLTRHRSNLIATAGREVQHMQKAMEQMNVKLSTVISDILGKSGQAIIRAIVAGDHDPKSLAQLADGRCRKPKEVIAKSLEGTWDEDLLFILTQSVELYDTCQEKVAACEQEIEKLMMQYAAQVDMDGAGELVRTNKRSNYKNAPDIDTEKYAHALWGVNLMAVPGVAAGSLLQLVGELGHDFASKFDTCSKFCKWCNLSPNNKITGGKLISSRIPRRKNPVGQILRQCANTVKDEKGELGTYFRRMKSRNGHMQAIVATAHKIARIIYTMVKYKREYDPRMVGCDERELLERRIARTQRQLQKLNERLAKAG

SEQ ID NO: 362338 - protein, 489 aa, unidentified
MNSTALTATVQPNLDVNYIGMDVHSDNVVVCVRRNTINSSGQLVGKTIKTKKVVIKSSQEPLVELLSKYADGQQHIMTAESTFNWYWLADIAEDHGWNFRLADPCTVSQANIKATNDETDAEYLADRLRTGSLKSTSVLPRKLRGVRDLMRHRLRVMQEVSEKKVRLSNLYHNHCAHPMHGKLLTALQDAYDEISVDAVLESGICNNGSELIIGDLLTGLREAEARLAKIEAAVYERIDEVDEYKAERLLLKTSMKGCGDVLSAIIVTEIGDISRFRTMGDFVSYCRLAPTSKLSNGKSKGQGNAKNGNAYLSWALTELATLMARFNEPIRRYLERKQDKTGLRVVAVRALAAKLARCVYQVLRKNESFDLALAFDGKPTRAPTAIAEKPATEVVQSPQEPEVPPITAAPEPRLQVPLTEAPIVVKEPSPVKAKRGARTKAVSPASPAPAVNAEGRQTARKADRVKARCALTATPPSCAGTSCVKSRRE

SEQ ID NO: 362339 - protein, 456 aa, unidentified
MTEKKTRHVKSSGQLSTINEHAAGLDVGSTFHVVAVRSDQDDEPVRTFQSFSGDLHAMADWLKRVGITTVAMESTGVYWIPVFEILEAHGFEVLLVNARDVKNVPGRKTDVNDAQWLQRLHQHGLLRASFRPRDELVGLRAYLRHRQGVVEYAASHVQHMQKALMQMNVQLHHVVADITGVTGLKIVRAIVAGRRAPEELAKHRDARCAASEETIRQALTGNYRPEHVFALKQALELWDVYQAKIAECDVEIEAALKSLNDQHPSPGTSPPARRQPKVKNEPNFDVRTALHKMLGTDLSQIHGFGPYTILRLVAECGDDMTKWPTEKHFTSWLSLAPGNKISGGRVLSSHTRRSSNRTAALLRLVAVSVGKTQTALGAFYRRLGARIGKAKAVTATARKLAILFYRAVRFGMTYADPGAKYYEERYRSRVIENLTRRARNLGYQLVPNAVPIEGVS

SEQ ID NO: 362340 - protein, 345 aa, unidentified
MAMFVGLDVSLKTTSICVVEADGSPVWEGKAESEPTPLVKALTRWRDKITLVGIEACPLSEWLYGALVESGFQMVCIETRHAQRFLSSRPNKTDRSDARGIADMMRLGHYRPVHVKSKASQLLRTVLIARKKFVDHMLAIENTIRGLLKVHGLKLGNVHRCGFAAKVEKLLADAADLRMAIEPLLEARNMMRKQKAVFDRRLGQMARRDEVCKRLMTVSGVGPIVSLLFKATIDDPNRFKDSKAVAAHLGLTPRVYQSGEIDRSGHISKCGDKLMRHALYEAGNSHLRRSKKWSVLRAWGVKLAKRVGSKKACVAVARKLAIIMHRMWVDGTDFQFGQSPAVKAP

SEQ ID NO: 362341 - protein, 320 aa, unidentified
MKVSIGIDVSMDTLDVALYDGKSHKILRCENRETGFSEIEKELIGYDRANILISMEATGIYHLKMAVYFHERGYSVSVLNPLIMKRYTEMKMLRAKTDSVDARAIAEYGYTESPCYFIPKKGQNERITQLLKLIDGLHRTKSEIRNRFHALKRVPGADETALLICEELEACINAEIRQAEQKINQILKEYYSDDNKRLREIPGVGERLSSLVIGFFGKFENFDNAKQVSSFIGLNPSPRQSGISLNGRGIISKKGNRYIRKIFYMAALSASKHNSACKAQYERLIANGKSKRVALIAVANKLARQIFAVMKYDRIYDPNI

SEQ ID NO: 362342 - protein, 350 aa, unidentified
MLIIGCDYHPSVQQIAFVDTETGECGERRLQHMAEAEQFYRQLRARGLRVRIGLEASGYSRWFERLIEELGFELWIGDAAVISRQRVRKHKTDREDAELILKLLIENRFPRIWVATAENRDLRQLLWHRHRLVQMQTRLRNQLHAVALNEGVRLKKRMWRPKGRAQLEVLSLMPWGNRRRQDLLRMLDQVDANVAELTAAIEQEAVKRPEVVRLMTHPGVGALTALAFVLIIGTPDRFASSRQVSSYLGLVPTEHSSGERRLLGHISKQGNTLLRFLLVAAAQITVRRDPDWHRRYLHLAMRRERAVAKIAMARRLAVRLYWMWRNGCDYAHLPKLGSHAGQPGNPVGRY

SEQ ID NO: 362343 - protein, 410 aa, unidentified
MELQHARCCGLDVHKNSVVACLRLVSDGKITTEVRTFGTTTAELFRLSEWLASNECTHVAMEATGVYWKPVWHILDDGEFALVLANAAHVKNVPGRKTDVNDAMWLAELLAHGLIRASFVPDPQTQEMRTLLRTRKQFTRENSRQVQRVQKTLEDANIKLDSVLSDVMGKSGRAMIEALIAGETNPVKLASLADRRVKASQDELRESLRGRVTKHHRFLLRLHIDQIDALDAAIAKIDAEVQADLAPFRAAVEQVISIPGIKEIGAEVILSEIGIDMSRFPSAAHLISWACICPRNDESAGKRRSNRVRRGSVWLKTTVVQCAWAAVKKKDSYLQAQFFRIRARRGDRKAILAVAASMLTAIYHMLKDGTMYQDLGRNYFDRRSNEAQKQRLVKRLAELGYAAELTPITA

SEQ ID NO: 362344 - protein, 374 aa, unidentified
MIPRSFDRFVGLDVHSATIAVALAERGGEVRFIGTIPNRTEAVLRLVRRLNGEGPWTACYEAGPTGYALYWQLTKAGVHCDVIAPTLVPMKAGDRIKTDRRDALRLAQSLRAGELTPVWVPDHAHEALRDLVRAREAAKQDQLRIRHRLSKFLLRYGHRPDANMTPWTQKYLDWIRSSVKFEQQAQEWTLEDHLNEIEHCSLRIARLDELIDKAVEGAPESMKQVIAGLQALRGIGKVSAVTIVTEVGQLTRFPTARQFMGYSGTIPSEHSSGEKTRRGSITKTGNAHLRRIVVEAAWSQRHKPVISRLKKLQLVHLSPEVQEIASKAMHRLYSRYTRLTAREKSKQQVVTAVARELLGFIWAIGISIERQEAA

SEQ ID NO: 362345 - protein, 373 aa, unidentified
MLYLGIDQHANQLTIDLGTENGDLVLHRQVKTEWKPLRKFLGELESLARKEGGYMAIVEVCGFNDYLMDLLKEYGCDQVVLVQPDGRKKCKTDRRDARTLRESLWINRARLREGKRPAKLRVVRVASEDDAMDRQLTTLRSQLTTQRTRLINRVKTILRKRNLQHDCPTKGIQTKKARKWLWALTLPEMDRFEMNVLLREWDLIDEQLDQVDKKIQERYRQSDVASVVGTIPGMGYFNGLSIACRIGDVEDFPRGGSLANYWGLTPGARNSGEKNTPLGITKAGSSHARYVLGQVVVHVLRRDRWMRQWYQKIKRRRGSKVGRVAVMRRLATIICSMVKYDMPYMTGGPEKFEEYLRKHKGFFGETHITAGRV

SEQ ID NO: 362346 - protein, 371 aa, unidentified
MHFITKFVGLDVSKEKISVAIADSGNEAPRYYGSIPHTPEALRKLIKHLGPAETLSFCYEAGPTGYATYRWITSMGAHCTVVAPSLIPKRPGDHVKTDRRDAEQLARLFRAGELTPVYVPDQADEALRELVRIREAAKADLHRARQRILKFLLRHHIEPPVTIKRRWTKKYLDWLRQLSFPYASMQLAFDEMLHALFEIEQRMERLGKELARQMESSPKAPLIQALQSLRGIGRLTAITLVAEIGTFSRFRSPAQLMAYLGLVSREYSTGLSTRRGSMTKTGNGRARRAVVESAWSYRYRPAVKGDLAERLEGMPAEVQRISWKAQERLHGKYRRLVYAKNKHKNVAIGAVARELVGFIWAVAQFVEQKAS

SEQ ID NO: 362347 - protein, 334 aa, unidentified
MKSDTVHIGVDVSKGKLDIYVPDRKEGLRAETREVDNGPAGFRELRDLARKTKATVCVEPTGGYELELIAFMHKFNVPVAYADALRVRHFAKAEGCLSKSDRIDAALISRFADKVGVRVLEAGDVEAVELKRKVKFRQTMLDSRTAMICRLETEIDADVRAMLKAQIQHLDKLIAKVERSCMESVGRNEAMKERHRRFTEVGGVGDLTAIAVFSGLPEIGSISDAKLNRLAGLVPEEDQSGKRNGARQIWGGRKEVRNALYMAAVASIMWNSILGSYYRKKRAEGHPHKWAIVPVMRKLLSLLNRIARDPSFRPTPEPESTKRDAKVGRKKKTA

SEQ ID NO: 362348 - protein, 355 aa, unidentified
MTSTKYIGMDVHKESISIAVRNGAGKIVMECVIETKASMILQLIDGLRGDLQVTFEEGTSAAWLYDLLKPHVKKLVVCDPRKNASMREGNQSDKIDARRLAELLRLNHLSPVYHGEHGLRSLKELVRSFLAITKDHGRVMSRVKAIYRSWAIPCSGKQVYAPRHRAEWLGKITEPGVRRRAEFYYQQLDALRTVRQQVRRELLAEGKKHPAWKRLRQIPSIGPIRAAVLLGILQTPHRFRTKRQLWAYSGLGIETQSSADHRRVDGQFERVKKQSSIRGLNRNCNHDLKNLFKGAAIVASSKPGPFQEFYTALLTKGLRPEMARLTLARKIATIVLIVWKRGVCFDAQHLKPQTA

SEQ ID NO: 362349 - protein, 364 aa, unidentified
MKMYTAKTKYHCGIDLHKSMSHICVMDKEGKIYVHKEIKNNDFQYMKKILTPYWDDLTIACETTYNWYKLSDFCETEPVQFALGHALYMGAIHGGKAKNDKIDSKKITDLLRTNLLPKAYACPRQFRSHRDLLRRRIKLVSIRSGISIYLNLFEDQNNLKHSSAELRRNVKSSFQFMDLQTFLPEDHAMARNYQLNADLLKLFTDQLKQIDKDLVKFTLDSQFKEEFEIVKSMKGIGDILGMTLVYETHDIKRFKTPGDYASYCRVVKCKKESAGKSYGYSGTKMGNPNLKWAFGEIAMLSKSDPVMKLFADELDQRHGKRKGRSIFIHKICRAIYFMLLRKIPFDPIDFFGREKYERLTKKVH

SEQ ID NO: 362350 - protein, 404 aa, unidentified
MELKPLYRCVAALDVHQAKLTVCVLQEDAEGELQVELREFGGFKRDRQAMAEWVASFHPEEVVMESTGIYWKSPYAALERCGICASVVNARHVKQVPGRKTDIGDAQWLAILARSGLLRGGFVPPANFRELRLTSRQMQKLTGILAAEKNRLHKVLTDAGIRLPVVVSDIHGQSARAMVKGLIAGQSPEQVLTYASKRLKASEEELLDALAGELTDEHRFVLGELMDHIEDLQRRIARFSEHLLQGLAPQQGLLQALQTIPGLDERGAAMLLVEIGDDMDAFGSAEKLASWAGVCPGNHESAGKRKSGKKRKGNPYVRRILCEAANAASRTRSALAELFKSLFIRRGRKRAIFALAHKILKIVFVLISRGDYYRDATVDYEAMSVERNAPRWIRMLRKYGYIAA

SEQ ID NO: 362351 - protein, 395 aa, unidentified
MFIVGIDVAKRSHEVCMITSDGQTVQRPFSIRNNCTGYNLMLEKIRKHTNIKSQIVFAMESTAHYWLALFTRLRKDGYHVILLNPIQTSAMRDMFIRKIKTDAKDSFIIAELIRFGRYAESNVAQDRLLALKELCRNRFYLVDMAGDLKRKLIALIDRVFPEYEAQFDTIFCKSSVALLKKYPTPQKLSNAHLDKLTELLWNSSNGHFGEWKARELKELARNSFGVEDCDGAYSTLILLMLDQIQSLSGKADALEKEISRLFQSFDTTVTTIPGVGPIIGAVILSEVGDISRFSSADKLAAYIGVDPSVNQSGEFQAAHAHMSKRGSPYLRRCIWMASQVAVQRDPMFRAYYEKKTAEGLKYMTIIGHVTRKMTAVIFAILRDHKVYEPVLPTAA

SEQ ID NO: 362352 - protein, 360 aa, unidentified
MKIIGCDFHPSFQQIAMLDTVTGELVERKLLHPEQATRFYESLAGEEVLVGLESMGNTLWFERVLNRLGFTLWIGDALAIRVSNPRKQKTDKRDAGHILRLLQEGRFPRIWVPSLAERDLRQLLKHRHTLVQMRTRIKNQLQHIALNQGWQKKRRLWTQSGQEWLRQLELEPWTSRRRDDLLQMLEEMERRITQLNATVEQAAAQRPEAVLLMSHPGVGPILALATVLTLGDVSRFPRGKHVASYLGLIPKEASSGQRRRLGAISKQGNSFMRFLLVQAGMSAARGDAGLSRVYQRLLAQRKHHGVAKVAVARRLVVRLYWMLREKKQYPAVVRMQGSPSHPVVAVMTVALNGRSASQAK

SEQ ID NO: 362353 - protein, 419 aa, unidentified
MNKLYIGMDVSQNDVKVYILDQEGNEATRRFCVDNNPQGAETIVNNILKYCHNLSINKVFIGLESTSVYGWHLQFYLADHQGLKPFDPMIISFNAKIVEAFKKSLGNLPKNDWIDAFTIAERLRFGRLPNSCPVDFRYLALQRLTRHRFHIVDNIVREKNYYLSNLFLKFSGLCQNQVFSTNFSATATQLFDEFLTLDDIAARPLDELVDFVVEHGKELFSDPKATALALKDAVRKSYRMNASVENSLNFVIKSCLDNIQTLEKQKKATEKAIAQEILGFNNQYLCLTSVKGIGPTIAAGLISEIGGISRFEDDNALAKFSGLYWSEYQSADFTAEDTYLKRTGNEYLRYYFIQAADQLRKYLPEYSQYYTRKFNEAKTHKHKRALVLTARKAVRLIFALLREEKLYKPPALKGGIIEK

SEQ ID NO: 362354 - protein, 356 aa, unidentified
MDTSKNTIMVAVLWPDEEIPVTERILNDEPSVRRLLGRLADKADGPQYLRCCYEAGPGGYDLYRLLDSMGIACDVVAPSLIPKGSGDRVKTDKRDSRRLARLHRAGELTPVRVPSRDEEAVRDLARARTALLEDRKTAQKRLTAILMRHGRTWRGPAYWTRAHRDWIAAQKFAEPALATAVGCYRAALETRETELAAIEAELLPWVSREPLAEPAARLMCYRGIAELTALTLAAEVVDWRRFPAARAFMGFTGLCPAEDSSGDTARRGHITKAGPQPVRTALVESALAYRHPPAIGAVLRRRQRGASPDTLARSRKAQRRLHARYIHLASHGKTPPEAVTAVARELAGFTWAEMTS

SEQ ID NO: 362355 - protein, 393 aa, unidentified
MPEDTISQVMIAVDPHKASWTAAAVDAKLRALATIRVSVGDDGYRTLRRFARRWRDAGWAIEGATGLGAPLTNRLSDDGVDVIDVPAKLAARVRLLSAGHGRKSDDTDAVSVGVAALTGHGLTTARMDATVTALRAIVEHRDDLVKTRTQTVNRLHVVLTHLIPAGAPRSLSADRAAEMLRRVRPREVAGKTLRGLAVDLVAELRQLDRRIAKAASDIKAAVVDSGSSLTELCGIATLTAGKIIARVGSIHRFRSAAAFASYTGTAPIEASSGGVVRHRLSRAGDRQLNCCLHTMAITQISRDTPGRAYYQRKRAAGKSHKEALRCLKRRLSDVAYRQLLRDSGPEPCGGPGRTIGGDSHVLRGRLTPHTGASDKSLPEPTASHSTSRTDAAT

SEQ ID NO: 362356 - protein, 408 aa, unidentified
MEVMHQRCAGLDVHKKTVVACVREQRGGKAEHEVRTFGTTTKELEVLSAWLAERQCTHVAMEATSVYWKPVWYVLEEHFDLVLANASHIRNVPGRKTDVSDATWIADLLAHGLITASFVPETAIQEMRTLTRTRKQLVRERSRHVLRLHKVLETANVKIGSLVSDLLGTSGRAIVEAIAGGETDPARLIALTTGRLRASRESLQEAVRGRVTDHHRFMLRLHLDQVDAVDKAIETLDEEVGKAIEPFRDSVEQLKSIPGVSNIVAHVLVGEVGTDMSRFPTAGHLISWAGLCPRNDESAGKRRSTRLRKGDNWLKTTLVQAAWAAARKKGSYLQAQFLRLRSRRGPKKAVIAVAASILTAAYHMLKDGTFYEDLGGDYFQRRDHERIKRRLLQRLESLGYQVELRQAA

SEQ ID NO: 362357 - protein, 344 aa, unidentified
MKITTVGIDLAKNVFQVHGIDEHGKAVLKKQLRRDQMAAFFVNLPPCLIGMEACGSAHHWGRKLASMGHTVRLMAPQFVKPYVKTNKNDAADAEAICEAVGRPNMRFVPVKNIEQQAVLALHRVRQGFVRARTAQANQIRGLLGEFGLIVPQGIGHITTRVPELVEDGVNELPGAFRLLIARLLDHLKELDRQVQELEDKIQAWHRSSELSRNLAMVPGIGPITASALVASIGDARNFDNGRQVAAWLGLVPRQHSSGGKSNLLGMSKRGDTYLRTLLIHGARSVIYRISQRPDTCSWIGAVVTRRNKNVAAVALANKNARIVWALLAHDRQFDPGFARSTATA

SEQ ID NO: 362358 - protein, 436 aa, unidentified
MDEVEDEPLFRERVAGIDIGKTTIMVTIRVPSDTRRGRRQQETREFRAVRKDLLALADWLRCWGVTRIGMEATGDYWKPVYFLLEREGFDCVLYHASQVKALPGRPKTDKLDSVWLAKITERGNLPGSFVPPEDIRRLRTHTRYRRHLVQTRTAEKNRCEKLLEDAHLKLSSVISDIHGVSGREMLTAIIAGQRDPKVLAQMARTRMRGKIAQLEEALDCSFFTGQHAFILQMMLANIDHLTAQVTELNARIDELCQPYERQIAQLDAIPGFGIITAQDIIGEIGVDMTVFPTAGHLCSWARQAPQVSESAGKRKGKNATGRGNPYLGGTLGEAAANAGRTSTFPGTKYRRLVRHMPKKKAQGAISGSQLVIAYELLSDPDAEYQDLGTDYYEQRANIRREVRSHARAIERRGYRVILEPIDPGLDPDILPITKAS

SEQ ID NO: 362359 - protein, 378 aa, unidentified
MRFYNRVHRFYCGVDLHARTMYLCILDHGGAVVLHREVPAEPGAFLEAIAPFREGLVVACECLFCWYWLADLCQAENIAFVLGHALYMKAIHGGKAADDKIDSSKIAHLLRGGNLPFAYAYPKGLRETRDLLRRRMYLVHKRAEVVAHVVNTNSQYNLPPFGKKLIYARNRQVLKIAQRFGDASVRKNIELDLALLDSLDELIGDVELYLDRTVKVDDADSFYRLRSIPGVGKILALVLFYEIHDIGRFASEGEFLSYARLVRPLKTSAGKVKGGGGAKIGNAHLKWAFSEAACLLARESGQAKRFLARKEKQHGKPKALGILAARLGRAVYHMLRQKRAFDAKRFWNGEPKVPPTPKGKSVMTPGRRRKGARCVLEA

SEQ ID NO: 362360 - protein, 443 aa, unidentified
MEVIYPRCAGLDVHKKTVTACAMHTRKNGRKKQEIRTFGTMTEDLQELLAWLQGWQCTHVAMESTGVYWQPVYNILEDHMELLLVNARHVKNVPGRKTDVTDAEWLTDLLRHGLLRGSFVPPREQRHLRDLTRQRSKLVEERARQVNRLQKVLEDANIKLASVATDVMGVSGRAMLEQLIQGQAAPALLAELARGRMRTKREALTKALTGRVNDHHRFLLEQHLIHIDFLDGQIEQFSRQIETQIDTLSQMPEYMVAMPSNDAAQPGEQREPLTYARAIELLDTIPGIDRWLAQVLVAEMGIDMSRFATDKHLAAWAGVAPGNNESAGKRRSGKTPPGNRHLRKGLVQAARGASRKKNTYLKSKYHRIAARRGKKKAIVAVGHSILVSAYHMLSRHEPYHDLGGDYFDQFKREHVANHLVRRLEKLGFQVVIDAPVIPDSVGP

SEQ ID NO: 362361 - protein, 433 aa, unidentified
MLKLNYMSTLFVGIDVSSKTNAVYAMDFEENKYISSSFGNNQPGADQLVNMIAECMQKHKNLDTVLIVLESTSVYSVHISNFLSTSEVLMPYKPYVFCVNPKATSNYRKSYIGMEKTDPTDAYLIADFGRVGRTKKLEPWRGGQFIALKRLTRHRMHLSECITREKTYMVSNLYLKFSELQLLEGDDKPFGSLYGATSSAVLTEFLSPQEIIDMPEEELLTFLAGKSRNRISDLSKTSELLRKAARDSYRLDKCMYEPLNVSLASSFNCIHAYQKEIKLIEQAIEKCINGMNPNALLILQSIPGIGPIWASGILSEIGDITVFHSSDALAKYAGLYWPKGDSGDFTSEDNKMSKAGSPYLRYYLGEAANSVRKHIPEYADFYARKYAEVTKHQHKRALALTSRKFVRLVFGLLAKNQLYTGEKLDTEYNIESN

SEQ ID NO: 362362 - protein, 479 aa, unidentified
MLRLGPWINVEARGLPLPRGRWIVASSTSVKLLTYLVPPEMRPARATAWAGRFAAQEGLTVVEVLHERCAGMDISKKDVKVCIRVPGGRGGRYRNEVTTFGSITGQILKLRAFLLEQQVTLVVMESTGDYWKPFYYVLENAPFELLLVNPRHVRGLPGRKTDVSDAQWLADLGAHGLVRGSLVPPPPIRELRDLTRTHADLTRDRTREYTREYNRLQSVLEDAGIKLTSVASKVNGVSCRLMLDALVAGERNPKILAQLAKGSLREKRDELTQAMTGRFTAHHEFMVRLHLQVIDQLTAAIDDLSTRIEVVTGPFRAQLALLETIPGVSTQIAQVIIAETGGDMTKFPTAGHLASWAGICPGHNQSAEVTKKAKTRPGNSYLKGALGNAAMSGMQVHETFLQDRHHRLKPRIGGLRTIVALEHSILRSAWYKLTTNQPYRELGAGYHQRRHPQNALRSITRQANRLGFSVRFDPITQTA

SEQ ID NO: 362363 - protein, 410 aa, unidentified
MGLYCGIDWASEHHDIAVVDDDGQVVARGRLGNDAAGFAQALTLLAEAGDSADHPIPVGIETDRGLWVAALRQTGRLIYPINPLAASQYRARYALSWAKSDATDAVLLANIVRTDAAAHRPLPADTGLAQAIRVLARAQQDAVWARQQIGNQIRDLLKDFYPAALVAFAELPSGGLARADARTILAAAPTPAEAAKLTPARLRRLLVKAGRRRDLDRDVERLRAVLTDTYLHQPPVVENAMGIQLSALLRQFEAACTAADDLAEAASAHFEQHPDVKIITSFPGLGMLAGARVLAEIGDDRARFADARGLKAFAGSAPITRASGKKTVVTHRHIKNRRLAAVGAIWAVASLRSSPGARRPFDARRAAGDWNRQAQRHLFNKFLGQLHHCLQTSQPYNEHRAFPPPLPHAA

SEQ ID NO: 362364 - protein, 340 aa, unidentified
MGEITTVGLDLAKHVFQVHGVDAEGATVLRKQLRRAQVLAFFSRLPRCMVGVEACATAHYWARELRALGHEVRLMPAQYVKAYVKRNKNDAADAEAICEAVVRPTMRFVPVKTTDQQAAVLLHRGRERLVRQRTMLVNALRAHLAEFGVIAPQGLRNVGKLIAIVRDEEDARLPDLARQVLQVLAVQIEQLEAGIAALEKQLMAWHKANPVSQRLATIPGIGPIIATAIAAIVAEPSGFRSGREFAAWLGLVPRQNSTGGKTRLGGISKRGNQYLRRLLINGASANLLRSKATNADPWVIGLRRRRPSMVVAVALANKTARIAWAVMHRQEDYRRMALAA

SEQ ID NO: 362365 - protein, 410 aa, unidentified
MEVIHKRCAGGDVDAKRIVVCVRIARDRRIHRETRTFDTTTKGLLALAEWLEENRCTHILLESTGVYWRPVYHILSERLTVVLANAAEVKNVPGRKSDVSDAAWLADLMAHGLVRASFVPPPPIQELRDLTRTRKQLVREVARHKQRLQKILEDANVKIAHVLSDLLGESGRRTLEALIAGETDPSRLADLGDVRLKSAREDRVEALRGRVTEHHRFMLNLHLTQIRSVEKTIDDLDQRIGKAVTPFRDILGRVVKIPGISKVNAPAVLGEIGIDMGPFPTGAQIVSWAGVCPQLNTSAGRKLSTKTRRGNVWLKTLLVQAAWAASRTKGTYFEAKYRRLRARRGPQKALIAVAASLLTAIYHVIRDSAEYRDLGGDHFDRLANKDLLAKRYLRRLEKLGFHVTVTTEAA

SEQ ID NO: 362366 - protein, 367 aa, unidentified
MKKHTSIDQSVSSSDLSACTTVAVDLAKQVFQVAGEDVLGQVHYEQRIKSREAFYEFLRQLPPHVVVLMETGPGAQAWARQLQDQGNLARILPAGLVATHRSGPKNDRNDALAILRAGRDEKICAVPVKSVAALAMQALHRARQGYVRRRTAVSNQMRGLLLEHGVALAQGDVAISQKIPRVLEDATQPVPGLLRELIDELLAEWRHLGERISVLTGRLEVAANADMTAKRLMTVRGIGPVTATALVAKETKPERFPNARKFAAYFGMVPDQYSSGQTVRLGDMTKRGDVYLRSLMIQGAHAVLQQLRPDSQQPDDRRLLRWMSRLGRKEAAVRLANRNLRIVWVLLQNDQTYRRQAGDGQQATMSH

SEQ ID NO: 362367 - protein, 362 aa, unidentified
MNPFAFSNDLSGFQKLLDCLKDFSLDELLIGMESTAHYAENLASFLFTRGFKLCIINPIQTASLRKSSIRKTKTDSIDTFLIIKALSLNHFRLFTQHDFDSMQLKSLCRFRQKLMKVRTKVKIQLVSYVDLLFPELQFFFKSGIHIKACYALLKEEPNPDKIASMHLTRLSNLLKKTSKGHFGKQHAIALKELAAQSVGIKNDTLSLQILQSINQIELFSSQLDEVEKLINQIMDNMDSVIKTIPGIGSLNGAMIIGEIGDVRRFEKPCQLLAYAGLDPCIYQSGKFTASRTRMSKRGSKILRYALINAAWQTTLVNQTFRDYYNLKISQGRGHYSALGHVAHKLVRVIHKMMTDNVEFNLD

SEQ ID NO: 362368 - protein, 376 aa, unidentified
MEHDSTLYVGLDVHKDSITVAYAFGTGEVELPGKTGTTKTDIDRLCKRLQSKARHVRVVYEAGPCGYGLYRQLVQKGFDCMVCAPSLIPRKPGERVKTDRRDAVKLVRSLRAGDLSAVYVPTVEDEAFRDLARAWMTAKDDLRQARQRLKSFLLAHDVRYAGHADWGPAHRRWVSQYAFGSEWQQFAFEELRRTIEDRLAQCQRVEAALREAVTNWRFYPTVLGLQAMRGVQFTTAVGMLAELGDLSRFEHPRQLMAWLGVVPSEHSSGDKRRQGSITKTGNSYARKLLVEAAWSYRHPARVSADIQCRHEGIPKAIIDRAWDAQVRLCRRYRRLAARGKNANTTVVAVARELSGFIWDIGRLAMSLALPYRTEAT

SEQ ID NO: 362369 - protein, 412 aa, unidentified
MDSIYRCCCGLDVHKDTVAACLRKIGDDGKTHIEKRTYSTMTKGLLALSDWMASEGVTHVAMESTGVYWKPIWNILEGGFRVLLVNARHIKQVPGRKTDMKDCEWIAQLLQHGLLNSSFVPPTPVRKLRDLTRHRAKVVGEQAAVANRIQKTLEDANIKLASVATDVMGVSGRVMLKAMISGQEDPKVLANLAQRRLREKIPQLMLALDGRVTEHHRFMLGTLLEQWEYLETLVKRLDGRIEDVMRPFEESVELLKTIPGVEQRTAENLIAEIGNNMEQFPSAEHLASWAGMCPGNNESAGKRKSGATPKGNRWLRRTLNQSAWAASHTKKTYLSAQYRRLASRRGKKRAIVAVGHTILKIVYHMLKHKVSYCDLGNDYFDRLNSESLKRHLVKRLEKLGHKVTLEPLKEVA

SEQ ID NO: 362370 - protein, 427 aa, unidentified
MNYTQNEKIMSITERTLVIGIDIAKKVQYARAFDYRGIELGKVRSFENTAEGFRIFEDWAKSLANQKQKNNIVVGMEPTGHYWFNLGHFLKDLGVKLVLVNPFHVKRSKELDDNSQTKNDIKDPKTIAKLVIDGRYFEPYIPEGIYSELRVAMDMREGLGKNLSKIKNKVTQWLDKYFPEFNDVFGDWEGKAALITLNEFPTPEKVLSIDVQQIVVAWRKEVKRAVGNQRAVRLVEAAKISIGIKEGLRMAEKDLIVNLEQYDLYSRQLDLLELEIEELALQIPGAKEIITIKGVGIITAAGFIAEVGDIKRFTHPSQIQKLAGLNLIENSSGKHKGKTSISKRGRSRLRALLFRVMMPLVAKNPEFKMLHEHYKNRKDNPLKKKQSLILLCCKLIRILYTIMIKQVEYNPQKLILDISNLQLKEAV

SEQ ID NO: 362371 - protein, 374 aa, unidentified
MGDHIEAFVAFDTSKLRNAVAIAEAGRTGEIRFLGEIDNNGAATGKLVRKLAAKYERLTFCYEAGPTGYGLYRQIEGLGYECVVVAPSLIPKKPGARVKTNRRDALSLAKQLRAGELTAVWVPDRRHEAMRDLTRGREAAVEDLRSKRQQISSFLLRQGLHFTGKKTWTKAHMSWLASQKLEYAEQRIAFEEMLLAIRQAQERIERLEQAIRAAVPDWSLAEVVTALMAMRGIDLIAATAFLAEIGDLSRFQTPRELMAYLGLVPSEDSTGDTVRRGPITKAGNRRARRILVECSWSYRHPPRVGKKKQEKVAAAPRAVREIAWKAQCRLSARYRALTRKGKLATVAVTAVARELAGFIWAINREIAAPRSVAM

SEQ ID NO: 362372 - protein, 391 aa, unidentified
MIYVGIDVAKDKHDCFITNSEGEILFKAFTIQNNRTGFDELYQKIQSVEKDKSKIKVGLEATGHYNYNLLGYLIDNGLTAYVINPLHTNLYRKSLSLRKTKTDKVDARTIAMMLMSDVNLKSYSDTSYHNEELKSLTRYRFDKIRERAQLKQSISRLVTILFPELERLVPTLHMASVYALLSELPSANAIAGCHLTRLKTLLEEASKGRYSRDKAIEIRDAARSSIGSNMPAKSLELKHTIKLIKELDSEIAEIETEIQKIMDEINSPILTIPGISYRMGAMIIAEIGDFSRFDSPDKILAYAGISPSTYQSGQLESSYSHMEKRGSKYLRYALINAAKYVCHWDPTFEAYLQKKRAEGKHYNVAISHAAKKLVRLIYAMEKSGKAYTPAT

SEQ ID NO: 362373 - protein, 430 aa, unidentified
MKSNTQNKKIEVITETTLVIGIDVGSETHYARAFDYRGIEFSKKPFKFSNSEAGFEMFKAWILDIKEKHEKDKVVPGMEPTGHYWFNLGKFLQDNEMKPVLVNPHHVKKSKELDDNNPTKNDRKDPKVIAGLIKEGRYMIPYLPDGIYADLRTASNMRFQIQSELTRVQNRISRWFNIYFPEYKTVYGKPDAISGMMILKKAPLPEDILTLGVEGVNQIWRDAKIRAVGKKRAQTLVEAARHSVGTKEGATAARIEIRMLLEDYESRNSRLQEVMLLIEELVKQIPMAEKLMEIKGVGIKTVSGFLAEVGDITRFSSPKELQKLAGLALVENSSGKHKGQTTISRRGRKRLRYLLFEVAMSLVGKNPEFGALHHYYTTRKINPLKKMQSLMAVAAKLIRVFYAMLTKGVEYDPAKMLGDIKRPTVYMQAA

SEQ ID NO: 362374 - protein, 403 aa, unidentified
METLIGLDWSQQRHNICILNPHGAITAQFAIAHSPTGFAELEQRVAKLGVTPPACAVALETAHNLVVDFLWARQFQVYVIAPSVLSHSRGRYTASGAHDDDRDAFILADLLRTDHARFAPWQPDGALVRQLRAQLSLVDNLTKTVVAQQNRLAAVLQRYYPAALQLFGDLTTQITLHFLLRYPAPQAARALAYPDFVAFCQEYHYAWPKLLPERYAAFQQPVPQADPVLVLAYQNETRFLAQLLLTLVQQKAQLIREAQPLFTQHPDHTIFAALPGAGDLLAPKLLVLFGDHRDRFPTAQAVQTLAGTCPVTRQSGKQRRVTFRHACNHDYRLTMQQLALASIRESEWAASYFQQCRARGHSKSQAYRCLANRWLAIIWHLWQTRQEYDEARHLQDIHRQRRP

SEQ ID NO: 362375 - protein, 370 aa, unidentified
MQKNNRNSKSPTRNTRQKPRKSDQVTIGMDLGDKTSRFCALNVEGEVLAEGACPTTKKGMAQFFGALAHSRIAIEVGTHSPWVSRELKKYGHEVIVANARQVKLISQSSRKNDKLDAQMLARLARMDPALLRPIRHRSEEAQKDLLTIRIRAGLVEARSGLINTARGLTKATGERSRSCDADQMDTEKLEELPADLRETFQPLLEEVASLTEKIKECDRKIEQIARDRYPETQLLRQVSGVGPLIALTFVLTIEDKERFSKSRDVGCYVGLRPRQSESGERQPELRITKEGDVYLRKLLVQGAHCVLAKRAPDTDLKRWGTNLAGRGGKNTKKRAIVAVARKLAILLHHLWVTGEVYEPLRNSKAMAKAA

SEQ ID NO: 362376 - protein, 372 aa, unidentified
MEERIKVHVGLDVHKDSISVAAAEQGRAPGRLIGKVAHDVGKLLKVLAKIGSAEDLHIVYEAGPTGFGLQRALVAKGYVCEIIAPSQIPRRPGDRVKTDGRDSVQLAECSRAGQLSAVWIPDPEDEAIRDLSRAREDAVNSRVQARHQLKGFLLRHDVRYTGKTSWSLAYYRWLGTLNFGASAAQTAFTEYWLAVKSADERVDRLTKALVASIAGWRFEPMVGALQALRGIAAITAIGLVAEIGDLKRFSHPRKLMGYLGLVPSERSSGERTSRGSITKTGNAHARRLLTEAAWNYRFKARVSREALARQDGLSEAIRTTAWKAQLRLTQRFAALRDRGVQVNKACVAIARELAGFIWAIGLQAQREKEQVA

SEQ ID NO: 362377 - protein, 410 aa, unidentified
MAYKVAGIDVHKKVLMVVVWDVSDRESEPQRRRFGTTTSELRQLSTWLREQGVQEAVMESTAQYWRPVWYELEPHMGLQLAQAFSNRAPRGRKHDFRDAERLIRRLVAGELTLSFVPEPEQRTWRTITRMKVQLSEDKSRLHSQLECLLEEMRIKLSSVISDLLGVSGYRILRALAGGETDLKKLAALGDDRLQCSEKQLIDALTGNPQPVHLQLLALYLDRHQMLVGQIAKLDGMIAQALKPHQEAVARLAVVPGLGADSAQQVIAEVGAEAGTFPSAAHLSAWVGTCPGRDESGEENHSSRSAKGNKYLRRVLNQAAHAAVKKKGSHFQAVFRRLLPRLGYKAAIWAVAHRLCRLVWNILHEGVTYVERGSEPDPSTKRRRAQKLVKTLRKLGYEVDLKPITAACAAA

SEQ ID NO: 362378 - protein, 407 aa, unidentified
MEVICPRCAGLDVHKQTVVACVRIASNGAPLQEVRTFATTTSGLLALADWLESFGIEQVAMEATGVYLKPVWHVLESHFELVLANAAHVKNVPGRKTDVNDAMWLADLLAHGLIRASFVPPVAVQELRTLTRTRKQFVRERSAHVQRIEKVLEDANLKLGVVLTDIMGQSGRAVLQAIIDGQDDPHQLAALVSVRVKATRSEVLEALRGHISAHHRFMLKLHLDHIKTLDAAITAMEQEVGRGLEPFRIAARLLSTMPGLSAISAHVVVAEIGIDMSRFATPGHLLSWACLCPRNDESAGKRRSTRLRRGGNWLKTTLVQAAWAAVKVKGSYLQAQFQRLRARRGAKKAIIAVAASMLTAAWHMLRDGTEWQDLGAAHFDRTDARKTANRLIRRLQQIGYIVTATPA

SEQ ID NO: 362379 - protein, 393 aa, unidentified
MARMAQLEPTHVTVGVDTHRDVHVAVALDQLGRRLDQIELAATRAGYERLLAWASSLGVVAVFGVEGTGCYGAGLARYLGARRVLVVEVMRPNRQTRRRRGKSDPTDAEAAARAVLSGEAAGAPKAGDDLVEMIRVLRVARSSAIKARTQAINALRSLLVTAPPELREQLGARSTSRLVDKAARLRPGHLGSPLAASKLALRQLARRCQTLEAEITSLDAELVQLTAAASPRLIETFGVGADTAGALLVAAGDNPERLRSEAAFSMLCGSSPIKASSGKTNRHRLNRGGNRQANAALYRIVLVRMRYHQPTRAYVVRRTSEGKSKREIIRCLKRYVARETYTLLTQTGDTIRPNTSHNSSSTTAAIRYQRGANALARAVLTDRSGPQRPSRES

SEQ ID NO: 362380 - protein, 430 aa, unidentified
MEIVYPRSCGVDVHKSFIVAVICISESVKPKYIKKRFSTFNNQLIQFRDWLIENNCQNVCMESTGKYYIPVYNALEGHISNVVVANPKWVKAIKGEKDDNKDAKWIADLFKFGIVRSSYIPEKDIRILREFTRYQYKLVNMRSSEKNRFQNALTTGNCKLDIVFSDIFGKSASAIVDTILSNNPYTSEDILSKVHAGCKASHEDILSAVEGIQLNKFQKARIRIVQKHMEYLDSLLDEIQHHIDLMVANYEEYIQLLCTIPGINRKSAITIISEIGTDMSQWSSHRKLVAWAGLAPGCNESAGKKKSVKISKAGVYLKPCLVQVAHAAVKDKNCDYYADKFNKITKRRGKKRAIIAIARKILIAVYHLLKTGEVFNPTDMADVETTKKQRIEYVKNNLRNAFNQLSRTGLSEAEILQLIRKESTNSPQIE

SEQ ID NO: 362381 - protein, 361 aa, unidentified
MLNTNLKHSGDFKGENFYIGLDVHKNTWSVTVRTSNFEIAHFSQPPQPKALFSYLQKRFPCGSFHSAYEAGFCGTSAHTELCRLGIDNMIVHAADIPNTDKEKKNKTDLHDSRAIAKYLEKGLLNPIHVLTNEQQELRSLYRLREIEVRNTTRAVNRLKGFIYFTGIKVPEEFSDQKGFTIKKLLWLKKLELSTPVGTTCLQQYIQDYKDQRSKVNLVTRQLRKYVIQIFADAYRNLVSIPGIGSIVAIALLTEIGDFRRFDNPKEYCSYLGMIPWEQSTGDQVKTKGSQPRCNKHLRPMLVEAAWMAIRKDSGLLLYYKRHAASNNKHAIMKVARKLALMAKGVVIKNQPYDPEYLLKNK

SEQ ID NO: 362382 - protein, 325 aa, unidentified
MRPPQSQVKPQTQVGLDVSSQTLDAHIRVDGKAFSVPNTDAGFDQLCEILSAYSVSMILMEATGGYEDNVACYLQLQGFDVVVINPRFARRFAQSMGRLAKTDRIDAAILAQMAFMIDSGPDRDRYIKPVTDEQRKQLSRLSSRRRQVVDLITIEKQRLTHADDYARESINGVISLLNVELKRIESDILRYVKKNFSELANRLLSIPGVGEQAMIVLIADLAELGHVNRRRISALLGVAPFNHDSGKFKGQRRIRDGRQTVRNVLYMGVISATRFNPVIKAFYDSLLLRGKPRKVAIIACMHKLIRIINAMMRTGKPFDTSLHGV

SEQ ID NO: 362383 - protein, 431 aa, unidentified
MTEHDHAAPLPPFAALVGIDWADRKHDVCLLDLDTGRREHLVLAHTPEAIDDWACQLRSRFGGRPVAVCLEQSKGALVYALLKYDFLVLFPLNPARLKSYRQAVSSSGAKDDPTDAQFLLEYLECHRAHLVAWRPDDARTRQLGLIGEERRKAVDLRTRLGNRLRTCLKNYFPQALDLLGEGLHTRMACDFLLKWPTLAAAQKATPKALRRFYHSHNSRQAGLIDRRIEALRAARPLTTDTALVQSYRLTATLLARQLLELAGAIEAYDKELARLMAEHPDAALFERLPGAGAALAPRLLVAFGSDRQRFSGPGDVQTYSGIAPVTRRSGRSSSVHRRTACPRFLRQTFHEFAGHSVPRSAWAGAYYRQQRARGRGHHAAVRSLAFKWIRIIYRCWKERTPYDEATYLASLRRKGAPLLAYLPPATTPSDG

SEQ ID NO: 362384 - protein, 349 aa, unidentified
MKIIGCDFHPGYQQIAMLDEETGELSEKALSHEKTEEVRAFYSALPGPVRVGIEASGQSQWFERLLAELGHELWIGDAAKIRAGCERKQKTDRRDALLLLQLLMEGRFPRIWVPTPAERDVRQLLLHRAKLVRMRTQVKNQLQALALNQGVQRKWKLWSVAGRKQLEGLPLLPWASRRRAELLVLHDQLEASIGELDRAAVEQANIRPTVRRLMTHPGVGPITALAFVLTVGPAQRFRRGKQVASYFGLIPSEHSSGGRGQRLGHISKQGNTFLRGLLVEAAQSAVRHEPEMRREYQRLAQRKCRALAKVAMARKLAVRLYWMLRSEVDYAQLIQGSHAGQPESFRGRG

SEQ ID NO: 362385 - protein, 408 aa, unidentified
MSEQPSPAVFVGLDVGKSDHHAVAVTSTGRAVYDKALPNDEARLRAILEALIVEHGPVLMVVDQPATIGALPVAVAQAMESVTVAYLPGLAMRRIADLHPGAAKTDARDALIIAEAARTMPHTLRNIRVDEAQIAELGVLAGFDDDLAAQITATSNRLRGMLTQIHPALERVLGPRVTHPAVADLLTRYPTPAKLQTAGRGHVRARLKKHAPRLAEPLTEEVFDALGQQSVVVAGTEAAATVIPILAGQLAGLIHQRATVATQVEALVEAHPLSAVLTSMPGIGVRTAARILTEVVGKDFRDAGHLASYAGIAPVTRRSGTSIRGEHAAKGGNKRLKRALFLSAFASLNHPPSRAYYDRKRAQGKRHNQAIIALARRRIDVLYAMLRDGTLYQDPTEPQSPSPVALAA

SEQ ID NO: 362386 - protein, 312 aa, unidentified
MSACFIGIDVSKDRLDIAIRPTNESMSCTNDDEGIDLLIKRLQPLQPDLIVMEATGSYHQLVLGRLLASGFTAIAVNPRQARDFARAIGRLAKTDRIDSHVLAEFAEKIRPELRPIADEATQQLDAVCTRRRQLVGMIAAEKNRYHSGPASIRVQIKKHIVWLEKQIVELENDLDKLIRSTPAWREKDDLLRSCKGIGPTTSHTMLASLPELGSLSRHRIAALVGIAPYNRDTGKHRGQRHIQGGRTDVRCVLYMATLAAIRSNIVIRAFHKKLIAAGKPKKVAITACMRKLLTILNAMVRSNTRWNPDFVA

SEQ ID NO: 362387 - protein, 322 aa, unidentified
MATLSFCGIDVSKDRLDAMVLPEQQSSCMGNDPAGWAQLVEWLSDFSIAAIGLEASGGYERGVMRALLAAGLSVRQINAFKLRQFANASGVLAKNDRLDARMIASFIAVMPTRAAQRRTPGIEQMSEIVTVRRHLSDQKIAAENATKLLEDAMLQRLSRRRIEQLASDIAQLDNRLAEIVAADSALSHRYQVLTSMPGVGLVLACTLIALLPELGRMSRKQIAALVGVAPYDFDSGKLKGKRCIWGGRAPVRHVLYMAAMSAGNWNPTLKAFRHRLKTAGKVPKVTIVAVMRKMITTLNAMVRDDVAWADHLAGRRSAPTAR

SEQ ID NO: 362388 - protein, 429 aa, unidentified
MRQVALDVHQGFCEVAIREDGVTRSAGRVETGRDTLELFAQSLCPTDEVVMEATGPAMEIARIIEPYVARVVVANAQDVRAISHARVKSDRFDARTLAELLAAGMLEPVWVPDAVTSGLRRRVARRAALVRQRTRAKNEIHATLARCLLGRSPVSDLFGTQGRAWLSEQQLGEEEAETVAGCLRQIEFLDAEVAQVDQKLAEWAASSKDVRRLMSIPGVGAGVAVTLMAAIGDISRFSSARQLVAYLGLDPKVRQSGDEPARHGRISKRGNAQARSVLVEAAWVAVRQPGPLHAFGERIRARKGSQVAAVAVARKLACLAWQLLTKDEDYAFAQPSRVRAKIRRVELDAGAPPLRTRHGGQRISASTAERDAERELTERAEAAYRRLIADWKATGPAKNTGAGATHGHASQKPSKRQATRQAQAQTPAL

SEQ ID NO: 362389 - protein, 387 aa, unidentified
MPLANDLSRSTMSLKQDETIIAVIEMSQSSWLVAGIVPGLARHPLKKLEPDQNALLPLLGRWRDEAAKAGRTVTRITVAYEAGRDGFWLARWLRTRGIEAHVIHPTSVAVSREHRRAKTDRLDTELLKRAFLGWLRGEPDHCSMAAVPTVEEEDARRPHREREALIGERTRIVNRMKSVLVRFGIRGFKPTLRRAAERLEALCTPEGTALPPNTRAELRRDMARLRFVADQIREIEQARAERLERAPEERTNAMVAMLARIVGVGLETADMLVHEVLSRNLRDRRAVARYAGLTGSPDESGSRRREKGLARTGNIRVRQGMIELAWRLLVFQKESALVRWFRARTEDARGATRKTMIVALARKLLVSLWRLVADGTVPEGFVLRPPT

SEQ ID NO: 362390 - protein, 386 aa, unidentified
MPQLNDLSRSLVILEQDATLIAVIEMGQSSWLVAGIVPGVERSPLKKLAVDESALLKLLNRWREEAEKAGRRVERIAIAFEAGRDGFWLARWLRARDIEAHVIHASSVAVSREHRRAKTDRLDTELLKRAFLGWLRGERDHCKMVAIPTIGDEDAKRPNRERESLVGEQTRIVNRMKAALSRLGIRGFNPKLKKAAERLEDLRTPEEEPIPPNTLAELRRDMERRRLVRSQIRDIEDARLERIEQARGDGPHAMVRLLARVIGVGIETADMLVQEVLSRNLRDRRAVARYGGLTGSPDESGKKRREKGLARSGNARVRRGMIQLAWRFLMFQKDSALAHWFYARTKHAPQTRKTMIVALARKLLIALWRFVREGAIPEGIVLRPAL

SEQ ID NO: 362391 - protein, 400 aa, unidentified
MLSIGIDVSKGKSTVCGMKPGGEIVYAPFEVQHTREGMSELVSLLRSSGEEVRAVLESTGSYHCPVVAALLENGIFVSVVNSLRMKRFCSQSIRKVKTDRIDAMQIALYGLAYWQELQPARLPEDTYRELQLLARQYYQMTSMLIKAKVDFNAICDQVLPGMQELMNDHAGRHKLSDFVLRYRHTTHILEMGETRFRKDYCKWAEKKGYRNCERMAALIFATAQNGIPVLPNAPSTQIVITEAIRVLHTVEASRDAILTQMQALAKTLPEYSLVREMPCIGDTLAPRLIAEIGDVRRFRSKRALIAYAGIDAPPYQSGKFCANNRHISKRGNRYLRKTGYEVMQSYVMHKPANDPIFTFIEKKRGEGKSGKLAMVAGLNKFLRVYYGKVTELYRSLPAIE

SEQ ID NO: 362392 - protein, 356 aa, unidentified
MHSMNQEVRRVIGGVDSHADTHHAAALDDRGCLLGSKPFAVSAAGYQELLAWLASFGPIDRVGVESTGSYAAGLTRHLAGAGVRVLEVNQPHAHTRRRRGKTDAIDAEMAARHALSLASAVTPKQTCGIVESIRQLRIPRDSAVKSRSVAMVQLGELIRTAPSELREQLAIRSTLKGKAALCRRLRPDTDRLSEPANAAKLALRSLARRITLLDDEIADLDRQLTPLVATAAPRTSALLGISTGHAGQLLITAGQNIDRLHSEGAFAALCGASPIPIASGKRGRYRLNPGGDRQANRALHMIAICRLRHCPKTRAYAQRRTTEGKSKREIIRCLKRYIARQTYATLRDDLRSLSPS

SEQ ID NO: 362393 - protein, 388 aa, unidentified
MDVLYQSCAGIDVHQATVVVCILHGPLTSTRPKREMAQFDTTTKGLKACHDFLTQFHVEAVGMESTGVYWRPVWHELCDDFELILAQPAHMKAIPGQKTDKKDAHWIAQLTRIGLLPRSFVPDETIQELRELTRQRKHYVESRNRETNRIHKILQSGGIKLTTYIEDIMGASGRNLLQLLIDETPLTPRMIHQSVYTSLKRKVPQLLEALDGYFSAHHRFMLGQSLEIYDFYQKQIDCLEERINGYLNLYERPVEILDSIPGMDLITASVIIAEIGVDMSQFPTAGHLASWAGLCPGNNESACKKRSTKIRHGNSYLKRCLCQAVFAAKRQKGSPLAERYYQIQSRRGPQKATIALAHQLLKIAYILLKENLTYQEFVLQKRLLETSQ

SEQ ID NO: 362394 - protein, 349 aa, unidentified
MSYVGIDFHKAYSFITEMDEAGKIRHQIKLSNDYDTLKGYLNSLSSPTKIAIEATCNWYYFYELIEDHDLEVVLAHPLKTKAIASARLMNDKVSSETLAHLLRTNLLPTAYIPDQETRDTREILRLRAFLTTLRTRLKNRVHAILLKNGIPCPYSDIFGKRSLVWLQALTLRVCYQNAISSCTRLANYLNEELDGLNQTIEALAYNHPYARILETHPGIARYSGLLIATEIGDITRFANAGKLCSYAGLVPTMHASGGKIRMGSLTKQGSRWLRWILVEAVSHAVNKSSHYEKLYNRVAYKHGKGSARVAVARSICRAIYTMLKFNRPYQERQLRSAPWGHNRQKGSRV

SEQ ID NO: 362395 - protein, 391 aa, unidentified
MICVGIDVAKDKHDCFIISSEGVVLADVFTIPNNREGFNCLLGRIQACAMPGNEIKVGLEATGHYSCNILGFLLDNGLDSFVINPLHTNLYRKSLSLRKTKTDRVDARTIAAMLMSDVGLKPYTDTAYHNEELKSLTRYRFDKVKERAQLKQSVARLVCILFPELEKLVPTLHMASVYALLDEFPGAQQIADAHLTHLKAVLHDASKGRYGRDRAIELREAAKASIGSRMPAKSLELRHTIRLIRELDAEIDEIESAIQQIMDEIHSPITTIPGIGTRMGAMILAEVGDFSRFDSPDKILAYAGLSPSTYQSGQLTNCYAHMEKRGSRYLRFAIFNAAKYVCLWDPTFAAYLAKKRAQGKHYNVAISHAAKKLVRLIYALEKSREPYHQAA

SEQ ID NO: 362396 - protein, 332 aa, unidentified
MSYCIGIDVSKSSINVHIKRNSQDLVYENNVKSFKSLFSKLKKLYKKDIENIIFIFEPTGSYSEALRKYCSEKQIKCFIINPKQFSNYAKALGEEVKNDVNDARVLSRALHLARDGEVKVPVFNEDVEHIKELMSFYKFTKKQETQQKNHLESLTSKAGDKFSIKELEKLIEESKNTGLKILEQVQTLIDSTDEYRVAYENIISIKGVGQIAAIALLHLFLKYPDANQRQITSLAGLNPIYRQSGTSVQSNSKISKTGSSFYRGVLFMAVLSATRYDKNLKAFYERLKSNGKHSTLAQMAVMRKMIIIAHSLYKNNKKYDEDFNTKEDDEGE

SEQ ID NO: 362397 - protein, 344 aa, unidentified
MTSMNFIGLDIHKKTISYCVKDAAGEVLAEGTILSTRQSLDVWMRTLCEPWTVAMEATMFTGWIYDYLFPHAAAVKVAHPLMLRAIAAAKKKNDRIDACKIADCLRCNFLQECYMASTEIRERRRTLRYRKLLVRQNVQLRNKVSQMLMESGVVYNKQKLHKVGYFKELMTTNPDIGEGLRPLLTICRETIVRIGKTEGALVRSLARDPLLSDRVQRLMTIPAVGPITALTWILEVDDVARFGSVKQAISYCGLCGAERSSADMVKRMPISKQRNKHLQSVLVEAAKLGPRLSPDLALVYETEKQKGHANRATIAVARKLVAYLLAVDRSGREFVVAGERREAA

SEQ ID NO: 362398 - protein, 368 aa, unidentified
MDNATHLGLDVHKDTIAVAVLRPGQAEPDERTIANTPEALRALIRRGSFGRPLACYEAGPTGYETHRLLTSLGVPCDVVAPTMIPRRPGARVKTDRIDARNLARLHRAGELTAIRVPTSAEEAIRDLVRVREDIKDDRRKTQHRVKSFLLRQGRRYPGRDKGWSDKFDLWARSQRFEEPAADAAYRHYLAALDVRRSQLATITTEIEAAAQLPPLAEPVARLRCLRGIETLSAVSITAEVCDFRRFPGAPSFMAFTGLVPSEHSSGPSVHRGSITKTGNAHVRRVLVEAAWSYRHRPAIGINLRRRSEGQPPEVLAYAWAAQCRLHSRFHSVATRKKPQRRRGRRRQRAFRVHLGSHDRPRRSPMNDA

SEQ ID NO: 362399 - protein, 398 aa, unidentified
MTRKNTLKTLPIDTEYRVVGLDLAKSDVSVAAIPIDDNTPSLVDRMNYADLLEWAEKISPTLFAMEPCNGFSLLCLQLESLGHEVKVISGATVSMWINTHLSGQKTDLNDAIALARLAISDAELTPIRHKTITEIRIQTVQAVRQQLITQRTKSLVSFKGLAQQWGIPCSAGHRNLKKLREAVEAKVDLISKPVAESLLSLLDAVKSLDYQIGQLDKTLQELVMSNQQGRLIQTVLGVGTQISARIITVVGNVNRFESPRALVAYVGLAPRNIITGHKNAPKKKSSNAPDLSHKGQGKISRRGDKLLRSQVIQGAACLYMQYCKNQLPQCQLRRWLKKQIDSGKPYGKIIVSLAAKLIRIVWAVLRYGEEFNIQKAGMSRSMWGDMAPKSPISEEVPA

SEQ ID NO: 362400 - protein, 354 aa, unidentified
MKNCYKKLAKGEAIFVGIDLHKKTWHVTIRTADVELFNSNIPGKWDALKYQLIKYKSHPIHAVYEAGYFGFWIHDHLVNFGADCIVTPPSLIPLEYGNKVKTDRRDSSKLALLLAKGMLKRVHVPTKEERFHRQVTRRRRQLVNDRVRTQSRIKAELQLYGIDLPHPSGKWTQVYFENLSRIRFKNYWMQQGFNQLLEQYRFLDNQIGQQTKLIRELSEEPRYKDKVKILCTIPGVGILVAMELLLELQDISRFQKADQLAAYVGLTPSQYSSAEKIRMGRITCIGKKVLRAMLVQASWQLIRKDGVMREKYQKIKARGGGKRAIIAIARTLVIRMRRLLLDEVPYVSGIISSS

SEQ ID NO: 362401 - protein, 410 aa, unidentified
MEPILASCAGMDVHEKKVDVCIAHGPFDKPPKFEIRTFSTMTSDLEELMAWLKKYEVTAIGMESTGIYWKPIFNVMECDFAIVLANAQRLKAIPRKKTDIIDCKRIANLLRYGLLPNSFIPPREIRELRDLNRTRRKLVGIMTSEKNRLIKVLEAANIKLSSVVTKIYGVSSLALIRSLLEKDKISREEISQLAKGKLKKKVDLLEKALNGKLTDHHRFLLGMHLENIDYLAKQIEKIDEEIQRKMVPFQKESKLIQTIPGISEVNASAILAEIGVDMSQFPDAAHISSWAGVCPGNNESAGKKKSGRTQKGNSFLKGALTESAWAASKTKDTSYSAFYRNIVRRRGTKRALVALAHRMLIDIYYVLRTGEPYQDAGAEAVCERTMKRRERSMIRSLEKAGYSVVKAEAA

SEQ ID NO: 362402 - protein, 347 aa, unidentified
MKTVMAGIDLHSNNAMVGLVDQDGARVAHQKLQCDLKEIVAFLEPYKAGLESVAVESTYNWYWLVDGLKAAGYPVVLANPSKIDQYSGIKHADDKNDAFFLAELSRLKILPTGYVYDPILRPVRDLLRRRMSLVHQRTSLMLSFKSLYTRTTGRAMKLSQLKGMTVAEAKALYEHPANQLIAQVHKGDIEGLSQSIEKIEEVVLKASSHLPYYPKLKTLPGVGIVLGLTITLEVGEIGRFADAGHFASYCRTVDSQRLSNNKKKGENNQKCGNKYLAWAFVEAAHFARRSDELCRRWYDRKAAKTSTVIATKALACKLAKAAWYLMAEGSEYDAKRVFPELAVKAQK

SEQ ID NO: 362403 - protein, 345 aa, unidentified
MELHTIGIDLGKTVFHLVGLNRHGDVVVRKKFSRIQLLRFTANVHVELMGMEACGGAHFLGRALREQGHEVRLIPAQYVKPYVKTNKSDYIDAEAIAEAVARPTMRFVPIKTDDQLDLQSLHRVRERWVMRRTAVINQIRGLLLERGITLRKGRCHVGGALPGILEDADAKLSGALRMLLAQLKLELDHLDMRIDEADALIKKTARENEACQRLVAIPGIGPVTATALIAAIGNGGAFRKGREFAAWMGVVPREHSTGGKQKLLGISKRGNSYLRRLFVQGARAVMQQRTKQSSGLSRWLAQLTSRTHRNVAGVALANKLARVAWAVLAKNEPYRPPVLADVAAA

SEQ ID NO: 362404 - protein, 355 aa, unidentified
MKYYTSTTEFNCGIDLHAHQMYICLVDRQGKKLVHTNIRNNDFQFFLKLIEPYKHDLTVCCECMFGWYWLADACQDAGLTFVLAHALYLKAIHGGKNKNDRIDSEKLAHLLRSNFIPPSYVYPADRRPLRALLRQRLFFVWQRSDLLARIQSVQLAHNRPPIRQTRSNRDPWEKRLLEHEPHPVRQLAIQNELGMIRHFDTQISQLEEQLHRLTKESAPREYALLQTVPGIGEHLGMTILYEIGDIQRFPTVKDFLSYCRLVKGTVASAGKIKGLRGAKLGNPYLRWAFGEVAVIAKRDHYLIAPMAQRLEAQMRGNKFKANTVLAIKLARAVYFMLKNKTVFDPERLAAVLMKN

SEQ ID NO: 362405 - protein, 473 aa, unidentified
MFMTTLPVLNPKAGAVDVGSEQMHVSIAGDAPKVFGSTTAQLQALRDYLLEQGVSSVAMEATGVYWLCLYAVLEQAGLEVVMVNGRHVKNLPGRKTDMKDCQWQATLHAHGLLRGGFVPKEQIRRLQDYQRLRADHITMAATHQLHMQKALERMNIKFHDVISHLTGVSGLKVIRAILAGERDPAALLALCDPLIQKKKAARVRESLVGTWKEEHLFALRQALAGWEFYQGQIAECDRALEHVLKEIAPGDPGTPAAPGWGRRNGVNAPQIEGLSGLLCRLCDGKNPTAIPGITDYTLLQLVAETGTDLAQHWRTEKHFTAWLGVAPGSRQSGKRRGPKTFAQPCGANFLRDRPQRGPDGGQGAGGILSPPEKSAGWLGRQRGPGPQVGATLLARNGAWHPLRGRRIKEIPRPSRANRTALAAKARQKTRNDSPATNQNRLTVHGKKPNKKQIKLHQERHIRHFPADVAPDGA

SEQ ID NO: 362406 - protein, 421 aa, unidentified
MSYKIAAIDIHKKVLMVVVASTQAEVADATGAAVEFQWQKFGAGADQRHQVVSWLQQHRVQEVVMESTAQYWKPVWLDLEPHFVKLHLAQAQSNRAPKGRKNDFLDAKRLARRLLAGELILSYVPEPEQRRWRLMSRGRLQLVRERVRLQSQLEALLEEARIKLSSVISDLLGVSGRRILAALSKGESNPVQLAELGDKSLKCTKEELVDALKGSPEPGHIALLKLHLERLELLDKQIDELSRMSAQALQAHQDAVVRIAKVPGFGVESAQQIIAEVGVDAEVFPSAGEFASWAGVCPGSDVSAEQNHSSRCPKGNRYVRRLLSEAAQAAVKKKGSHFQNVFQRFLPSLGYNGAIWAVAHRLARLVWKILHDGVSYIEQAQETNPRAKKRRVQKLAQCLRRLGYSVTLTEINPAPAIGGAQ

SEQ ID NO: 362407 - protein, 344 aa, unidentified
MQITTIGLDLAKSVFQVHGIDTTGQVVVRRSLRRSQMLPFFAKLPACLVGIEACGTSHHWARELIKLGHEVRLMPPAYVKPYVKRGKTDAADAEAVCEAVTRPTMRFVPVKSPEQQAALSMHRTRDLLVKQRTQLINMIRGLLAEFGVDIPKGLERALLMARQIVDGKAPDVPLEAAKIVGTLSQQALDTHVRLREIDRDLAVWLRGNDVARRLTTIPGIGPVGATALAASVTDPHQFRSGRQFAAWLGLTPLQKSSGGKERLGRITKMGDKYLRKLLIVGMTSLVRRAKQNPGKIDPRLADLLARKPARVATVAMANKTARVIWAIMARGETYRTGHQPALAA

SEQ ID NO: 362408 - protein, 429 aa, unidentified
MNEVMAGMDLHRNNVVCGLVDREGRRLVEQRLPCELETIVRWLEPYRERLRTIAVESTYNWYWLVDGLQERAFDVVLANPARIVQYSGLKHADDTSDAFFLAELLRLDILPTGHIYDRKLRPVRDLLRRRLLLVRQATAHKLSFKSLYARTTGQTLGLSQLERLTLEEGAKLFGAAAEQLIAREQLRLLGELKQSILTIEKSVVGVVKDWPNYRWLQSVPGVGKILGLTIALETGPIERFAGAGDYASYCRCVQSRRISNGKVKGANNGKNGNRYLAWAWVEAAQYARRYHGPCRRFFDRKAAQVNGALASKALACKLAKAAWHVMREGVAFDWARAFPGGVPGGEPERQVRAAGSAPTPIPPHRPAREKDPTSLTPLGDVSSRVSPGRGGHRTPPPPAQTQSKKKAKRLNPPTPIRTRSRTQRIMKRT

SEQ ID NO: 362409 - protein, 311 aa, unidentified
MYYIGIDVSKKDLSVFDGKDLNFINKEGLKSFKKYLKKKYRLSEIALIFEPTGVYSLYLKEFCAENSIKAYIVNPKKSHNFARALGIRPKNDKIDARTLYKFHKLIDLKDIQVPKIDQQAKTLASYLVSYEFALKQRISLSNHLESLRDKRLIDLMKKDLKRAKKLENKLFNEILEYVRQNQNLKEDYQRLLTISGVGDKTAIALLTLFKTYQGTNRAQITALAGLDPVKRESGTSVKYKVKISKNGKGIYRKIFYLPTICATVHNQKIRVFYQRLLAHHKTKKLAVIASMRKLLLIAHAMYRDKTEYVAV

SEQ ID NO: 362410 - protein, 401 aa, unidentified
MNAVGIDVSKGKSMVCVMRPFGEVVLEPFEVLHTAQNLHDLAEKLKALDGETRVVLEATGNYHKPVAFVLHDAGLFVSVVNPVLIHDYDNNSLRRVKTDRKDAVKIANYTLDKWTRLRQYLPEDDTRLALKNCYRQYQQAVAVRTMLKNNLISSLDLTFPDANKLFSSPAKSNGCEKWVDFIGDFWHSECVSSLSSDAFAKKYLKWCQKHGYNFTRSKSDTIYACAVNAASLPKSPTSKLLIQQQVAQLKAVSQSVAAFQQEMLRLSQQLPEFDTVMKMYGVGPSLGPQLMAEIGDVRRFSSKKSLIAFAGIEPQPNDSGKIVGNDSGISKVGSAVLRRTLFLIMTVILKTQPQDEPVFQFMNKKRSEGKPYKVYMMASANKFLRIYYARVKAVMDSKHSK

SEQ ID NO: 362411 - protein, 335 aa, unidentified
MSIIGCDLHSRYQVIAVVDTDTGEMVTRRLEHENGEARTFYAGLPKPSLIGIEATGYTQWFERLAAELGHELWVGDPAEIRARAVRRQKTDTRDAEHLLDLLLTKRFPRLWVPTPEERDARQLLKHRNKLVRMQTSVRNQLHFLAMSQGVCRKQKLWSARGRAELEGLSLGPWASQRRKELLELLDGLRPRIAELDQAVQTEAERRPEAVELMKHKGVGPVAALAFVLTIGPVERFAHSRALVSYLGLNPSEDSSGGHQRLGHISKQGNEMLRWLLVEAGHSAAQFDPELRRKYQRLKFRRGAKVAKVAIARHLAVRLYWTLRQARGGAAGSHAR

SEQ ID NO: 362412 - protein, 391 aa, unidentified
MSMYFVGIDISKYKHDCCIISAADQQIVSKFTVKNDKDGFEHLLTTLNSLSNPEDIKIGFESTAHYALNLELFLENAHHSFMEVNPVLIKEYKKSTTLRRTKTDSVDCESIARWLMTVEYKPHSKGFYHSYSLKSLTRLRDRLIRQRSFYLVKITNVLDHTFPEFKPFFNERLSKTAIYLLENYGSAEKMAHMNSASYDKLRCASRGKFSIQQFLRLKELAANTVGVNNSIFDIELNSLLTLYNSLCKEIKTLEAEITKLIEEVHPHYMSIPGIGPISAAVIYAEYGDISNFSNPGQMLAFAGIEPGINDSGTESHGGRMVKHGSSQLRYVLLNACLPLTRFDIIFATYYAKKRAEGKKHRVAITHVAKKLIRVIYALERQDVDFNVQKLR

SEQ ID NO: 362413 - protein, 324 aa, unidentified
MYAALDLHEKSIQCVLKDDQGKIVRESKLGKDEDRILGFLDGTQARVVMESGYNHQHIYDVLKKEGYDVTVAHPLLVKAIAYARLKNDKVDARMLADLLRADMIPEAYVPDRDVREIRDLVRRRHYMVKLRTMMKNKVHAEIATRWIKHESELFTEEGKSFLRSLSIDAINDYLDTIEFLSRKIRELDEKVEQKAEPDKYARLLVTIPGVGWYAALLISSEIADISRFPDYEHLCSYARLSPGVRQSGETQHTTRGVGDSLLNWIMIQCTRVHIRRCESSAITKFYEQVSARRGEKIAIVAAARKLMRAVYIMLKEEQAFRLDG

SEQ ID NO: 362414 - protein, 375 aa, unidentified
MSNHSEAFVAFDSSKLRNAVAIADSGRTGEIRFLGEIENSTTATAKLVRKLASKYERLTFCYEAGPTGYELYRQIKSLGQECIVVAPSLIPKKPGDRVKTNRRDAVSLAKLLRAGELTAVWVPDRHHEAMRDLTRARDTAVDDLRSKRQQISAFLLRQGLHYCAGKKTWSQAHLNWLARQKFEYLEHRLVFEEMMTAMRQAQERLERLEQAIRAAVPDWSLADLVTALMAMRGIDLISAATFLAEIGDLSRFQSPSELMAYLGLVPSEDSTGDHIKRGPITKAGNRRARRTLVECSWSYQHPPRVGKDKQAKVAAAPQAVREIAWKAQSRLNRRYRALVRRGKLKTVAITAVAREFAGFIWAVAREATAARAAAK

SEQ ID NO: 362415 - protein, 370 aa, unidentified
MSQSRTLFIGMDVHKDSIAVAYVAQDHGAEVTYLGARGTRQCDIDQLVRKMQSKAKHLLFVYEAGPCGYWLYRYLPRKGSDCWVVAPSLIPHKPGDRVNTDRRDARQLARRARSGDLTVVYVPKVEEEAIRALSRAREDAISDLKDAKFRLKAFLLRQDIRYVGRAHWGPAHLRWLSEVVCPTPAQQIVFQEYVRAVQEHTERLQRLAQELQEQVNAWRLNPVVEALQALRGVQFTVAVTMVAEIGDLTRFDTPRELMQFLGLIPSAYSSGEQRRQGSITKAGKTHARKAVVEGAWAYRYPAKVSRHLQLRLEKPPKMIQDLSWKAQVRLCTRYRRLVSRGKHATVVTVAMARELVGCMGAIATQVPLTA

SEQ ID NO: 362416 - protein, 345 aa, unidentified
MRFYNSQHQYYAGIDLHARKMYICVIDTQGEVVYHRDLIADLDHLKRALDQFRPDVIVGVECVFTWYWMSDYCHNNNIPFTLGHALYMKAIHGGKTKNDKIDSFKIATMLRGGMFPMAYVYPEKMRAARDLLRRRQYLVHHQSELIGHIQNTNTQYNNPPFTKNLVHPSNRKEISGRFENCYVQRSVQIDIDLLDFYHKLIRGIEYEITRNAKHHDPLAYTLLRTVPGIGPILSLVILYEIYDINRFEKVGNFISYSRLVKCSHESAGKKVKGGHNKIGNSHLKWAFSEAAVLFLRNNQLGKDLYQKLSSRYGKAKALSLLAQKLGRTVYFMLKRKEPFIEAKFY

SEQ ID NO: 362417 - protein, 328 aa, unidentified
MDVSKQSVDVCVLSGDDIFLEKQILGTISEIESFLQSFLKEHSFSASDVLVCAEYTGKYTYPLCLSCQRVGVGLWLENPYAIKHSCGLERGKSDRQDARKIARYARRYEDKVRLFVLPQKAISSLRELVSEQELYIVDKKKYQGQLTDEKSFMNPQDYREKSARLKILLKDLKAAIGQIQKKIQKIIEEDETLSHQFKLLCSIDGIGERTAVKVIVETNAFRDFTDARKFCCHAGLAPFSYTSGSSIHSRNRVSHRADKSIKAFLHMGALTAATRMEGELHEYYMKKVSEGKNKMSVLNAVRAKLVQRMFAVIRNNKFYEKEYRNTLA

SEQ ID NO: 362418 - protein, 311 aa, unidentified
MYYIGIDVSKKDLSVFDGKDLNFINQEGLKSFKKYLKKKYSLSEIVIIFEPTGVYSLYLKEFCAENGIKAYIVNPKKSHNFARALGIRPKTDKIDARTLYQFHKLIDLKDIQVPKVDQQAKTLSSYLVSYEFALKQRISLSHHLESLRDKQLITLIKKELKRAQRLEDKIFHDIKEYLGKNQNLKEDYQRLSTIPGIGEKAAIALLTLFKTYPGTSRAQITALAGLDPIKRESGTSVKYKVKISKNGKGVYRKILYLPTLCATVHNQKIKIFYQRLLTNHKPKKLAVIASMRKILLIAHAMYQDKTEYIAV

SEQ ID NO: 362419 - protein, 350 aa, unidentified
MLIIGCDYHPSFQQIAFVDTSSGELSERRLFHREEAEQFYGKLKEQSVPVRVGMEASGHARWFERMLRDLQFELWIGNAAEIRAKRVRRQKTDRQDAQLLLRLLMEDCFPRIWVADAENRDLRQLLWHRHRLVQMRTRVMNQLHVVALNEGLRRKKALWRQAGRQELESLALAPWANRRRQDLLDLLDQLTRKIQQLTQALEEEVEKRPVTRRLMTHPGVGPLTALAFELVIGTPERFHCGKQIASYVGLVPSEESSGNRRQLGHISKQGNALLRYLLVEAAQVTIRTQAQWRSRFFHLAMRRGRKIAKVAMARKLAVHLYWMWRQGCDYGHLQKLGSHAGEPGNPYGVR

SEQ ID NO: 362420 - protein, 346 aa, unidentified
MNETTTIGLDIAKQVFQVHGVAIDGTVTVKRQLRRSEVIRFFDRLPRCRVGLEACGGAHFWARELTVLGHDVRLIPASYVKPYVKRGKTDAIDAEAICEAVSRPTMRFVPIKTVDCQAGVMLLKTRYLLVKQRTQSINSLRGHLSELGIIAARGTGKVETLIAIIRDKTDERIPAVARRALEMLAEQVEALVRRIATLENEIVSEVRRDDTMRRLATIPGVGPITAATIVALVPDPGAFNSGRHFAAWIGLTPKMHSTGGKERLGRISKMGNPVLRSLLVVGATAVSRHARRGATVSPWLTGLLARRPAKVAAIALANKMARVIWALLTKGGVFTRRPATAAQHAA

SEQ ID NO: 362421 - protein, 415 aa, unidentified
MEVVHPRCAGIDISKTDAKVCVRVQGTGGRRTSSTVTTWGAMTNEILALKDFLVEQRVTVVVMESTSDYWRPFYYVLETEVEVLLVNARDVKSVPGRKTDVSDAAWLADLGAHGLLRSSFVPPEPIRQLRDLTRARTHITQGRTREIQRLEKLLESAGIKLSSVASDITGVSGRLMLQALIDSQGTADPAVMADLAKRRMRSKIPVLTEALNGRFTAHHAFMTQLFLDRIDVHTRDIAALSERIDGLMKPFLPARELLESIPGFSQIIAEIFIAETGGDMTQFPTAGHLASWAGVSPGSNESAGRVKSTKTRPGNRYLKGALGVAALNQARSKKTYFSAKYRRLASTRGPMKALVAVEHAMLTAAWNMLSNSEFYRDPGPDYYTRHDPAKTKARAVKLLEALGYDVTLQQVAQAG

SEQ ID NO: 362422 - protein, 313 aa, unidentified
MSQNTMTTIYTGLDIAKLNLQLHLAGRIHDLPNTAAGHRRLLKLLTTQAGVHVVCEATGGYERDVVAALHEAKLPVSVLNPARVRHFARATGQRAKTDDIDAAVLTAYGQALQPKPTAPRTEQEQQLAELIRRRVQVLEILVAQRQQAERLTVPALRRQAQSLVRRLERDVAQIEEQLKALRTQAAILDARVQKLEAITGVGAITALGVLAELPELGTLNRRQAAALAGLAPHPRESGQWHGRRSIGGGRAPVRRALYMAALVAAHSNRQLKEFYKRLRAAGKPAKVALTAVMRKLIVLMNHILKNPNFALQN

SEQ ID NO: 362423 - protein, 342 aa, unidentified
MVIIGCDYHPSMQQIAWIDTETGDCGEQQLRNNNGEAERFYRDLKQRATSVRVGIEATGHARWFERLLSELQIELWIGDAAEIANRRTRKQQTDRRDAQHLLRLLIEDRFPRLWAPSPENRDLRQLLWHRHRLVQMRTRIKNQLQAIALSEGIQRKGQLWSKAGRAQFEAYPLSPWAARRRSDLLQLHDQLTARIDELSRAIEQQAKARPEVERLMSHPGVGPITALAFVLVLGSPDRFRCGKQVGSYLGLIPCEESSGGRQKLGHISKQGNTFLRFLLQEAAQSVVNSNQEWRRRYMQLALRRDPRIAKVAMARRLAVSLYWLWRNTSDSKETKSFGSHVG

SEQ ID NO: 362424 - protein, 524 aa, unidentified
MAVKSSSKNRRKAQPHALHKPRGVIHPRVQAVGPEHFAVVCVDCAKARSRMMVADFYGRVLLEPTTVEHNRSDFEAALKSVREAMAQHRIQDAIVVVERTGRYHGPAQRAFRQAGFEVRIVHPFTTKQYRLPADPGNKTDDTDLSAIHRAAVNGFGLLEPEPDPIYVQLQLLARHRHDLVRTRVALQQRMLEHLQSFMPGYSNCVGDVFGSPVVLWVARNLGSAAAIVQADVAGLSQQVRQAGLRVYRSTLEKIVAWARSAPPAEEPVSLHHRIFLELDADQIRKAQSIQAIESDLAGLLAQTPYVLLLGIVGINVVSAAQFAGEMGPIERYPNARAITGRAGLYPARYQSDQVDRRDGALVRNANHDLRHTILMIADNLIKCNDYFKVLAAGWRLKGKDARSIRVQAAGRFSRIGYQMVAGRMTFQHPCARQRDSILDKLIRFSLEHSIAPDQLFRNLDAAVAQLPRAAYREEAAALAEELAPVPKLRGTGPRLLETILPAILAKLEVNLVESPESGEADPTE

SEQ ID NO: 362425 - protein, 341 aa, unidentified
MLKFTIGADISKDKINFALRFLNDYLLEKEVENTTSALNKFIKEVQSLVKSIAKEKKSEYTIEFIMEHTGIYGNLLIECLAGHKVLMYIVAGLEIKNSTGISRGKNDKIDAKRIADYGVRFADKLKPYTLCDQTLSELKGLNTLRTQMVRIKAQLTQANDDIKKFQSKELQKKSDKLKKPVVNELDQAIEKIEAQMLELIKSDESIYENYKIAQSVPGVGKIVAVAFICATNNFTKFESAKALGSYCGVVPFGKESGRYKGKDKVSPIANKALKTLLHLGAVASIGGNNPFAVYYKRKVTEDKKNKMLALNNVRNKIVKTMFACIKNKTKYKADYSFSFAA

SEQ ID NO: 362426 - protein, 437 aa, unidentified
MPDVPWVHRKKGGASMSKKNSSPAGLQALYARVCGLDLHKKLIVACVRVLNTKDGTVQSTLRKFGTMTPDLIELRQWLTEQKVTHVAMESTGIYWQPVFNLFEGHFKLLLVNAQHLKKVPGRKTDMKDAEWIAQLLQCGLLKASFVPDRQQRELRDLTRQQTKLVQQRNAVDNRIQKVLETANIKLGSVASDVLGVSGRKMIEALMAGEKDVTVLADLAQRQLRGKIPELQRALEGELTEHHRFLLRQLLGQYDFLEKEIAIVSERLGAVASPSFRAAVEQLDAIAGVGERGARALLAETGTDMSRFPTHKHFASWAGRCPGNHESAGKRRSGKTPAANRHLDAVLTEMAHAAVRTKNSYFKAQYHRLAGRRGKKRAIGAVKHSLLVTVYFMLRDNRPYKDLGVDYFDKLNPQQRIRYHVRQLQALGQEVELSPMAA

SEQ ID NO: 362427 - protein, 403 aa, unidentified
MVLVGIDWSEKWHDVCLMDESGRVLTRRRVEDSLRGLTQLQSLIAEQASDPGEVLIGIETPHGLLVRALRAAGYTIYAVNPQAASRYRDRHAVSKKKSDRGDAMMLADLVRTDRHKHRPLAEDSQLAEAIKVLARSHKSLIWTRQQLGNQLRSSLREFYPGALEAFGDRLCEADSLALLKQAPTPTQGRRLSLAKIASALRGAGRRNVEQRAVAIRDALRGPQLEQPALVAQAHGVAAAALASLIQDLIAQIHHLEKELDRSLRAHPDAEIYLSQPGLSTVLGARALAEFGDDPNSYQDGKARKNYAGTSPITKRSGKTKVVLARFVRNERLADVCQWWAFAAISTSPGARRYYNTQRARGKGHQEALRTVANRLVGILHGCLRHRQLYREDIAWPSPEAAAA

SEQ ID NO: 362428 - protein, 408 aa, unidentified
MKTLHRRCAGLDVHKKEVVACLRLVVRGKANYEVRRFATTTRGLLELADWLEQAGCTHVAMEATGVYWKPVWHMLEGRFQQILANAAHIKGVPGRKSDMNDATWIADLLAHGLIRASFVPPQPIQDLRDLTRTRKQLTREIVQHTQRIQAVLEEANVKLSSVITDILGAGGRRILKAIVAGETDPTKLAELGGPRLAATRAELAEALLGRLRSHHRFLIGQHLKTIEQLEETIAAFDARIEAALEPFRDAVERLKEVPGLSETSAQVLIAEIGTDMSQFPTAGHLLSWAGLIPRLDESAGKRRSTRVRKGAPWLKPVLVQCAWAASRKKNSYFQAQFLRLKARRGPKKAVVAVAASILTTAYHMLADGTCYQDLGTDHFARRNPARTVAKLASRIRNLGFHVEIRPAA

SEQ ID NO: 362429 - protein, 346 aa, unidentified
MAHYAAFDVSDKETAIHVLDEHGKLVWKGKRPSEPEALAAALRRHAPELVRVGLETGRLTPWLFHALKGLGVPVVCLDARHARAATALQRNKTDARDAETLAQLVRTGWFREARVKSWAAHAVRHLVGARAQLVGMATDLSNQIRSLLRTFGLRITGRAGGTFERKVREQITGSPEVAAVAEPLLAAWRAMRDQIAALDRKLIEAARSNATCRLLMTCPGVGVVVATSFAAAVAAPDHFRCSRAVGAYLGLTPRRHQSGESDHSAGVSKRGDKLLRSYLFEAAACLLIRVQRPSALKAWGVGLVQRLGFKRAAVAVARKLSVVLHAMWRENRPFQAWPTPAVAAAA

SEQ ID NO: 362430 - protein, 419 aa, unidentified
MDETSDIGLWIGIDWADQKHQFALRESGSSRIEAGEITQKPEALREWMNRLRERSGGRWVAIAVEQSRGALIYALMDYDFLLIYPINPKSLAHYRKVFYPSGGKDDPRDADLALDFLFKHRDQLRLWKPESPEIRCLRLLTEERRKLVDLRTELTNQLTSNLKTYYPQALEWAGLLKDDTACDFLERWPSLAELQQAGTGTIRRFFKSHGARRQNLEEQLAQIPDALPLTRDPAVLTAGAMLTVSLVQQIRPLNRSIERFERKIAELFKNHPDHFIFTGLPGCGPALGPRLLTLFGDDRERFDSAEQVQIVTGIAPLIESSGKKTKQSPGVVHFRWACPKFVRQSVHEFAVHSLSRSAWARAYYEMQLSRGKTHHMAARALGFKWLRILFVCWRDRVAYDEARYLESLKANNSPLLAFM

SEQ ID NO: 362431 - protein, 425 aa, unidentified
MQEKLLRVTDKTIIVGVDVAKKEHWARVTDYRGVDICKPIKVRNDEESFERLLMRVEKIRTARSCDQVMIGLEPSGHYWKAFGWYLHLHLSNPVLVGVNPYHTKQAKELDDNSQTKSDKKDALTIAHLVRDGRYFDVYLPEGAYAELRILCNERKRLQKQVNRTNNCIVALVDEYFPEYDEVWEKVTGQTSRKILRTLPFPSDILATGEKNLTNTLSIFSSGTEGKVRAERLVEAASRSVGVTEGKRVAKMRLLNLLDELELFEREVEAIEVAMENIMDEMEMGELLQSMKGVGPITAAVFLGEVGDVSRFDNWKQVRKLAGLNLVEQSSGQHKGKTKVSKRGRPYLRWMLFLAGQSGMKHNPEMRGYYRCLRERKQNPLTGYQAFVAVGLKVMRILFHMAKNRVQYDPAKALGAVREQQIAALA

SEQ ID NO: 362432 - protein, 356 aa, unidentified
MTRIAQLEPTRVTVGVDTHRDVHVAVALDQLGRRLGEIELATTRAGYQRLLAWAERFGAVEAFGIEGTGCYGAGLARHLRARNVLVIEVMRPNRQTRRLKGKSDPTDAEAAARTVLSVEAAGSPKAGDDLVEMIRVLRVARQTAIKARTQAINALRSLLVTAPPELRDELRALSTSRLVGKAARLRSGPLDSTLTASKRALRHLARRYQALEAEITSLDTQLAQLTAAASPRLVGAFGVGADTAGALLVAAGDNPERLRSEAAFSMLCGSSPINASSGKTNRHRLNRGGNRQANAALHRIVLVRMRYHQPTRAYVDRRFSEGKSKREIMRCLKRYVAREVYTALTQPGEQKLARAA

SEQ ID NO: 362433 - protein, 318 aa, unidentified
MDDSTPLSGFWGIDVASEKFDVACCGQRDIETLPNDESGIATLIHRLSTCPIGLIVVEATGGYETKLVVALEAAGLPVVIVNPLRVRQFAQALGILAKTDAVDARVLARFGQDVRPPRRPLSSENARRFHALVARRRQLLDIRAMERTRRKQCQFAEITLSVDRLLESLDDQIEQLDHQLAELVQQDEVWRERDELLQSVQGVGPAVSQALLADLPELGQLNRRQISSLVGVAPFNRESGKHKRYQMITGGRAAVRSALFMAAFNAVRCNAPIRQFFERLRQAGKPYKVALTACMRKLLTVLNAMIRDRTPWRKPAVT

SEQ ID NO: 362434 - protein, 345 aa, unidentified
MHLVKVTEDRRRNNFTELERYDNCVAVDWAMTNMAIAVIRRDKKQMMTADVPTDIFELKSFLRGLPGKTIVTFEESMGAHWLYLELKGIVDRVLVCDPFKNKLLSDGPKTDKIDAMKLCDLLRNGLLTEVFHTDDDRLYELRRLVSAYDDIVKHGVRSQNQWYALIRGMGSKKNKLDDTTTFISSFIDRDISFYEETKAAYEEKFENLCKTNRLLKALRSLDGIGPIRAVKILATVIEPKRFPSMGKYFAYCGLVRVEKTSGRKKYGTRKPHYNRMLKGIYNGAAMTVINGNGPLREYYDHLLSRGVAEYNARVAVARYIARLSLGILKTGERYQPYRWRKNKEK

SEQ ID NO: 362435 - protein, 345 aa, unidentified
MKLTTVGIDLAKNVFQVHGVDERGQPVLRKQLKRDQVASFFAVLEPCLIGMEACGSAHHWARKLQGFGHTIKLMAPQFVKPYVKTNKNDVADAEAICEAVARPNMRFVPIKTTEQQGVLAMHRARQGFVKARTAQANSIRGLLGEFGIVIAQGISHITERLPGILEDGENGLPGAFRQLIQRLGDHLKELDRQVVQLEREIQQWHRGNEDSCRLAQIPGVGPITASALVASVGDAKSFASGRQIAAWLGLVPRQHSSGGKSTLLGISKRGDCYLRTLMVHGARAVVRYAESKTDLSADWLKGLLGRRNTNVAVVAQANKNARIAWALLAHNCRFRPDYTPDVTGV

SEQ ID NO: 362436 - protein, 410 aa, unidentified
MDLYCGIDWATAHHDVAVVDADGRVVARGRVGNDAAGFGQLLTLLAEAGDGPEDPIPVGIETDRGLWVAALRETGRVIYPINPLAASRYRSRYAVSGAKSDATDAVLLANIIRTDPDAHRPLPADTGLAQAIRVLARAQQDAVWARQQIGNQIRDLLKDFYPAALLAFAELPSGGLARRDARTILAAAPTPAQAAKLTPARLRRLLVKAGRRRDLDRDVERLRQVFTDTYLHQPPVVENAMGIQLGTLLRQFDAACAAVDELAEAAIAHFEQHPDAAIITSFPGLGNLTGARVLAEIGDDRARFTDARGLKAFAGSAPITRASGKKTVVLHRHIKNRRLAAVGSIWALASLRASPGARRHFDARRAAGDWNRQAQRHLFNKFLGQLHHCLQTDQLYNEHRAFPPPLTLAA

SEQ ID NO: 362437 - protein, 477 aa, unidentified
MNKKQRDNLQSPKAKSKRRRRNKGMCLEDRPVLEPNAAGIDVGAREMFVAVPPGRDEKPVRVFATFTEDLERLTDWLEQCGVTTVALESTGVYWIPLFEILEQRGIRPCLVNARHMKNVPGRRTDWHECQWLQFLHSVGLLRAAFRPGQDVCAVRTILRHRNELVAAASQHVQHMHKALTQMNLQIHHVISDITGSTGRAIVDAILAGQRDGAQLSKLRDPHIKADTETIRKSLEGNWRPEHLFTLGQSRDLYRIYQQQIVNCDLEIEKMLQGFAPRIDPGERPLPPDRKRNRAGSKRRRKNGHPHPEFDLRTEAYKLFGVDVSQIPGLEENALPLFSEVGRDMSRWPSAAHFVSWLALCPDNDISGGKLLWRGARRVKNRAGHLFRMAAYALHRSLTPLGNYLRRMKAKLGPQAATMATAHKIAVIFYTMIKNQVEYDETIWDARDAEREKKLQAKLKRQAKQLGYELVPIEPHAA

SEQ ID NO: 362438 - protein, 339 aa, unidentified
MDQVSTIGFDIAKHVFQVHGTDAQGRVFRRKLRRKEVIAYFASLPPSLIGMEACGSAHYWARQLQALGHEVRLMPPAYVKPYVKRGKNDAIDAEACWEAVGRPTMRFVAIKSEEQQSVLMLHRARDLLIGQRTQTSNALRGHLAELGIIAKQGRGGTDELLALVEGNEEGQMPELARTALLVLAGQLRELRLQISKIEREIHAWHRSNAVSRRLETAPGIGPITASAIVATVPDPSRFKSGRQFSAWIGLTPNEDSTGGKQRLGRITRAGDPYLRRLLVVGAHAVLRYSGNAKSAPTKWAAGLLGKKPYTVAAVALANKMARIIWAMMMKGEAFRTAEA

SEQ ID NO: 362439 - protein, 332 aa, unidentified
MNLVSTLGIDLAKNTFSLHGVNTNGEVVLRRTLSRAKLSELVAQLQPCLIGMEACSGAHEWARRFVASGHTVKLMAAKFVMPYRKSGKNDGNDAEAICEAVARPNMRFVPVKSLEQQSDLTLHRVRQGFVDERTATLNRLRGLLAEFGHVLPLRAVEVHRRVPQLLGKLPTRVAACARDLLEHAARLQAKTFEYEHEIRAHVRSNALARRAQTRMGIGPITASALVATVGNGRDFKNGRQFAAWLGLVPRQYSTGGKTRLGHITKRGDPYLRTLLVMGARAVLQRAASLTDPLSQWALAVRERRGYHRACIAIAAKNARVAWALLAREPVPA

SEQ ID NO: 362440 - protein, 366 aa, unidentified
MQEISTMQASGSDNFKGRQITIGLDLGDRSSSYCVLGATGDILLEDKLPTTSQAMKQLFGRMLRSRIAMETGTHSPWVSRLLTELGHEVIVAHAQRVRLIVKGRKKDDRLDARTLARLARIDPQLLNPVRHRSAQAQMHLTEIRARAELVRARTALVNSVRGLVKSYGERLRKCGTQQVGRDLAMGLSAELRAALDPLLREIESLNEHIKEYDRRIEKMAKEAYPEVALLKQVKGVGDLIALGYVLTIEDPHRFKKSRDVGCFLGLQPGRRNSGESEPQMHITKEGDRYLRTLLVQGAHYILGPFGEDSDLRRWGRKLSERGGKKAKRRAVVAVARKLAVLLHRLWVSGEAYEPLRNNQKTVSVAA

SEQ ID NO: 362441 - protein, 410 aa, unidentified
MDAILSCVAGLDVHKQTVVACVRWLDQGKVRTIVKTFGTVTRDLLELADWLQGRGVSHVAMESTGVFWKPIFHLLEGRFQEILLVNAQHIKQVPGRKTDVKDCEWIAQLLQCGLLRGSFVPPPEIRRLRDLTRQRTQLVGDRARVANRIQKVLEDANIKLASVATDVLGVSGRAMLEAMVAGNDDPEQLADLAKQRLRQKLPELRQALQGKVTSHHRFLLRTLLKQVDGLDQLIAEYSTQIDEEMIPFAAARTRLTTIPGISKRTAECMIAELGIRMEQFPTEAHLASWAGLCSGMNESAGKKRSAKTRKGSRWLRTAMVQAAWAASHTKNTYFAAQYKRLAKRRGAKKALIALAHTMLGVVYHMLKRGTDFQELGGDYFEHQNKDRITRHLVERLQRLGHRVVLEPQNA

SEQ ID NO: 362442 - protein, 368 aa, unidentified
MEILYPRCAGLDVHKDSVVARVRCVSAPQADETRSFATTTGALDRTAGVAEHSRCHPCRDGGDGVYWKPVWHLLEEHFELVLANAQHIKNVPGRKTDVNDAAWIADLLAHGLIRSSFVPPAPIQELRDLTRTRKQLVREISQHTLRIQKTLEDANLKLSSVLSNVIGASGRAILSALIAGETDPERLADLAQGTARHKRTALIAALHGRITPHHRKLLRLHLDLIAALEAALAELDRDVGKLLAPIRTSARLLTTMPGVSELTAQVVLAEIGADMARFPTPAHLLSWATMCPGTTKSAGKRRSTRTRKGSPWLKTALVTAAWAAVRVKNSYLQAQFLRLRARRGAKKAILAVAASMLTAIWHMLKGRR

SEQ ID NO: 362443 - protein, 369 aa, unidentified
MGKYSEVFVAFDVAKKKHAVAIAEGGRTGEVRFMGDVENNPLPIERTIRRLAARYDRLHVCFEAGPTGYGLYRQVKALGHDCMVVAPALIPKRAGERIKTNRRDAVTLARLHRAGELTGVWAPDPAHEAVRDLARAREAAGDDLRRKRQQLLSFLLRHSRIYSGGGHWTLAHRRWLAGQKFDHAAQQIVFQEGIDTIEDALQRLRRLEKQLGLVAPEWSMAPVVEAYQAMRGASFLVAVTFAAEIGDVRRFDTPRQLTSFLGLVPAESSTGDTVRRKGLTLAGNRRARRALVEAAWTYRYPARVSETLRARLEGLPKPVRDIAWKAQVRLCARYRRLSATGKKPPVVVAAIAREMAAFLWAIGREVAPA

SEQ ID NO: 362444 - protein, 362 aa, unidentified
MAQARTWVGLDVHASKIVAAVLDAATGELRSFGLPGCAVEAASFCAQPSAPVRATYEAGPTGYRLARELARRKVDCVVAAPGKIPRASGERVKTDRRDAEHLARLLLAGRLCPVRVPGEAEEALRDLVRAREDIRGDLMRARHRLSKLLLRQGVRYAGNARPWSDQHRAWLAKLELAEQAAQVTLADYRGAIEALLHRRSELERQIAARIPGSHWQREVALLRCLRGIDTLSAAGLCAEIGDFRRFERAGQLMSYVGLVPSESTTGEQRRLGSITKTGSRHARRLLVEAAWHYRHRPHLGKALAERQTGQPAAAVAISWSAQRRLHRSWERLRARRKRPTLVAVAVARELAGFCWAIATVEN

SEQ ID NO: 362445 - protein, 451 aa, unidentified
MARGNRSLPQAPRGQPLRITHPNAAGIDIGGSAHFVAVPPDRDDEPVREFRAFTADLMALADWLRACGVDTVAMESTGVYWIPLYELLSTRGFEVLLVNARHVKNVSGRKSDVLDCQWLQQLHSYGLLHGAFRPSDGVCALRSFMRQRHALLRTQARSVQHMQKALVQMNLQLTSVIADVVGVTGQAIVRAINAGERDPWKLAALRNCRIKASEEDIALALQGNWRHEHLFALRQALAAFDFCGQQLTELDAQIEAQLGRLHISDALPAKGRRRSIARNAPKFDLRTRLFQMCGVDLTRVDGIDVTTALAVVSETGADLSRFKTSKHFASWLRLSPGTKISGGKTLSGRTLPSSNRAAQALRLAAAALRTSQSALGAYYRRLCARMDRAKAVTAAAHKLARLIYAMLTRGEEYADQGQAYYEERYRQRVVANLSRRAQQLGLRLVPEATTA

SEQ ID NO: 362446 - protein, 339 aa, unidentified
MKNTKYFIGLDVHKKKTTYVVKDRIGNIVLEGETATLYSELYERLEPYLKSSIIGLESCTSYYTLYQNFLKNNYNIKVANTIQLRQLIAKNDKLDAKRLAEMLRLGTFPTSYIPDEEIQRLRSLLQVRHSMMEEKVRCNNRIQAFLDRNGIVMPDQEAFGKKWRQKLLQYIGSGEVSLELRYEYDHFVYLEKKSEHLGQEISGYTMKHWKKEYKLIQSITGFGPVLSCYVIAHILPISRFSSNRKLRRYAGVVPTFHESGDKRSKGHIPKTSSRKHLRWALIQAANAAGRTNTKLGRYYRKKKKQKNNAGIAHVAVASSMIDIIYKVLTTKKPYNPKIC

SEQ ID NO: 362447 - protein, 382 aa, unidentified
MNKIIRIGIDTSKSVFVLHGVDAAEQPVLRRKLRRSQVLEFFRKLEPTKIGMEACGGAHYWARELQALGHEVVLLPPQYVKPYVKRNKNDAADAEAICEAMSRPTMRFVPVKTTEQQAALMLAGTRDGLIGRRTQLSNTIRGYAAEFGLTTAKGLDKIELLLAGIAASAELPTLAKELFAAYGREYAQLQRQIIKIEARLMAWHKDNELSRRLVEVPSIGPIGATLLAMKVTNPHAFRCGRDFSAWIGLTPKDHSTAGKTRLGVITRAGDEALRSVLVAGATAVIQQAQKGRGYAPPWLVELLKRKPRKLAAVALANKMARVAWKLMVSGERYNPARTAAQSAAREGRGAAPRGGSAPRPSLASRITPLGGGCHDRGVTSSA

SEQ ID NO: 362448 - protein, 412 aa, unidentified
MEVLHARCCGIDIHKKSITVCVPIREAGRKEQKHLREFGTTTSEILSCADWLRSLGVTHVAMESTGVYWRPVWNLLEGQFDLLLANATHMRNVPGPKTDIKDSEWIAQLLQHGLLKPSFVPHTGLRDLRELSRDRTSLVAERSRLKNRIQKILEEANIKLGSVASDVLGKSGRAMLTAMVEGQENPQQLADLALGQLRLKIPQLVEALRGRVRGVHRFRLKQQLERVDFIDAQIAQLEAEIEKQNAPFDEAVSLLAEIPGFDRTTAWSVIAEIGIDMNQFPSADDLASWAGVCPGNNESGGKRLSGKTRKGSRWLRQKLCQSAWCASRCKNSYFAAFFQRIAAHQGRKRAIVAVSHSLLVVCYYLLKRKCHFQDLGVNYFDQLNHEKLTRYFVKRLTRLGHRVTLEPCSAAA

SEQ ID NO: 362449 - protein, 347 aa, unidentified
MVTFGGDSHKRTHTLVAVDENGRQLGVVTVAATSSGHMEAMGWARQWPQRRWALENCRHLSRVLERDLLSAGEAVVQVSPKLMGSARKVGRELGKSDPIDAMAVARAALREPHLPVAQLEGKSREVKLLVDHREDLVSERTRIQNRLLWHLHELEPGYQVVSSGLLRTVVLAEVSIRLQSHNGVVAEIARELVGRLVELTESVKRLQRRIDGLMRELAPSLLSLPGCAALSAAKLVAETADVSRFRSSAAFAMHNGTAPIPVWSGNQERHRLNRGGNRQLNVALHRIAITQMRLGGAASAYIARRLTMGNTKTEAIRALRRQISDEVYRRLRQDHIERSTAIMAAAA

SEQ ID NO: 362450 - protein, 367 aa, unidentified
MSSVASPEGLIHLGMDTSKNTIVVATLLPGEENPVTDRVFNEEEAIRRLVGRFPDRSVLRAWYEAGPGGYDLYRLLTSMGVACQVVAPSLIPKGGSDKVKTDKRDSRRLARLGRAGELTPVRVPSPAEEAVRDLARARAVVLDDRKRARQRLTAVLMRHGRIWRGGSYWTAAHRAWIAAQRFGEPALAAAVGHYRAALEVREAELAAIEAELAPWAAREPLAGPVARLGCYRGIAELSGLTLAAEVVDWRRFPAARAFMSYTGLVPAEYSSGERTRRGHITKAGSEPVRTALTEAACAYRHAPAIGAGLRRRQHGAAPETLARSWKAQRRLHARYVHLVHAGGKAAPEAVVAVARELAGFVWAEMTA

SEQ ID NO: 362451 - protein, 319 aa, unidentified
MSKRVLGIDAAKKKLDVALMFDGKVLLKKFDNIPKGFKLLAGWLASLHIEQVHACLEATGPYSEAVAEFLHESGHRVSVVNPFRIKSFANSDLQRNKTDEADARTIAAFCLAKDPDDWQPVAPEIKQLRDLTRRIEALERMLGVEKNRLEMAPAATRPSIDRMIDNLSKEIDAVQRLIKDHINKHPDLKQQSELLQTIPGIGEKTARLLLGEIECRGFDSARALAAHAGVTPRRFQSGSSLNRTQLSKLGNGRIRKALYFPAIVAVKCNEVIKLFAQRLSRNGKTPMQIVCASMRKLLHIAFGVIKHSRPFDPDLAFHI

SEQ ID NO: 362452 - protein, 414 aa, unidentified
MLTELTPSPATRFVALDVHRQYLMVGAVDSQQQVVLSPRRFGFAAFAEWAQVHFTHADAVVLEATSNAWLLYDQLQPLVAEVVVAHPQAVKLIAAARVKTDKRDTIKLASLLAANLIPAVWVPPQAVRELRALVTHRSRLVQQRTQAANRLHSVLHRHNVDPPPGMPFALHQREWWLTLDLPLAEKLRVQQDLSLYQTLDTLIQESDAELGRLSTCDPWIKQVPFLVQLPGLGVLSALRILAAIGEITRFPSAKHLVGYAGLGASVHQSGETDRGGRITKQGRSDLRGVMVEAAWVAVEHHPHWKAQFERLAARIGKQKAIVAIARKLLVVIWHVLSQQEADCHAQVEAVTRKLLHWISQTGTTPGKRRDRLLLLYGYLDQLGLSEEVEQVTYHGSTYRLSERQKQLRATQHKG

SEQ ID NO: 362453 - protein, 353 aa, unidentified
MVIIGCDYHPSMQQIAWCDNHSGAQGERRLEHASGEAEKFYRELKQRGVQVRVGLEASGHTRWFERLLAELEMELWIGHPAKIAAQRVRKQKTDRGDAQLLLQLLQEDRFPRLWIPSPENRDLRQLLWHRHRLVQMRTRVKNQLQSIAMNEGVRRQSRLWSKPGRAQLESFVLAPWTARRRHDLLQLLDQLNPQIAELSRAIEQEAERRPEVLRLMTHPGVGPITALAFVLVLGTPQRFRCGKQVGSYLGLIPCEDSSAGKQRLGHLSKQGNTLLRYLLVEAAQAAVRCDAQWRRRFVHLAMRRQRNIAIAAMARRLAVSLYWLWRKAEDPPAAPSSGSHAGPLDSAGGSLKS

SEQ ID NO: 362454 - protein, 471 aa, unidentified
MAFVGGEDQAAFLRLVNEVGATRTVLVGIDVGKHDALGLIADGRGELLGEPVLFGLDEPGVCSLESAVRASCRERSAAVVRVGVEACGHYHRLLVHRLRSGGWDTVDLSPAQVHAARTQMGYRRAKSDLRDAAAMIELLIRGAGRSHTCHVDAITELQAWVGHRNRKQAARVALGNQLLAGVDLVFPSLQSCFSDPLERKNFWLVLRVLDADVDRIVGLDVSQLRVLAAENGVRLEGPKAAAIIEAARRSLRLREPERQARLAILRSDTTRLAELFTELATAESTIAGLLAATPASVLTSLPGVGAIRAADYAAALGDHTRYPTAEHAYRASGLVPSQYESAGNSRRGGIAREGSADLRHAVIEMGRGLAQHDPHFAAYKRALLARGKRPKVANVAVGHRAHRLAFSLIRNQETYDPDRFATAISNRGERRTAADRPVNGRRAATCANDVTCPPPPTVTQAAARRNTPVAS

SEQ ID NO: 362455 - protein, 345 aa, unidentified
MGDIIRIGMDTSKQYFQLHGVDADEDVVLRKKFRRKEMEKYFEKLAPTEIGIEACGSSHHWARWLVSIGHKVKMIPAQLVKPYVKRGKNDAADAEAIAEAMSRPRMRFVPVKTVDQQADLMLLSMRDRLIHNRTQLSNAIRGHATEFGHTAPTGTAHLTPLLESLQADEVLPVRARRLFACMAKEYERLAAHIKEVEVELADWHRNNECSQRLDKIPGVGPVSAALLIMKIPDPAAFKSGRDFAAFLGLTPTDHSTAGKVKLGGITRAGDKALRSTLVVGATAVIQHVMKTGKGAPWLVDLLKRKAPKLAAVALANKIARTAWKLMLSGEIYNPIQPKPKVAVKA

SEQ ID NO: 362456 - protein, 408 aa, unidentified
MKTLHRRCAGVDVHSANIVACIRVMTKGKVQHEIRQFSASTRDLLALRDWLEAEKITHVAMEATGVYWKPVWHILEEKFTLILANAAHVRNLPGRKSDVNDATWLSDLLAHGLIRPSFVPPAPVQELRDLTRTRTQVTREAARHIQRIQKVLEDANIKLASLISDVAGPSGRRILKAIVAGETNALKLAALGSRRFKCSPSELIAALDGHVTDNHRFLIGQHLGMLDDLERRIEAFDKRIADVLAPFCHLVALLMTIPGVSRVSAEIILAEIGFDMTPFPTAGHLLSWAGMVPRQDESAGKRRSTRLRHGAPWLKPVLTQCGWAASRSRRTYLQAQYFRLKARRGPKKAVIAVAASILTGVYHMLKNHVPYHDLGPDHFAKRDPARTAAKLAQRIKDLGYDVQYSAAA

SEQ ID NO: 362457 - protein, 546 aa, unidentified
MTTPPWEPAFRLVKPLRKSVSPFGGDLCFGWLGSPRLYLYKPLGCVSALWKWMPARKDKTMKYPKVLMMLESIPYLSVGLDVGADFTWMSIMLPNGILTGKPFKIIHSDPQSRELAVAKIKEAQEMYSLESRCFLESTGIYHIPLLYFLRDKGFDCSVINPIITKNSTNMNVRKLHNDKFDSKKAAKVGLDASLKTSIIPDDEVIDLRNLVRDYYYFKDLQSAVVLKLTAELKVSFPAYRKVFSKVTTQTSLKLLEAYPLAADMLAAPKDILVETIRKTARFGEKYAVSKYDAIRAAAKDAAVFGRALQSSALRIRLYIKTYREYQEHLDNILEDLHKAVDKLEGTPVYDRIFLLQSLRGVGFLSAAVLIAEMGSFDLFSSPKKLYAYFGLDPAVKQSGKFNGDKVHMSKRGSSLARRILHMVAINNLKVDKGTKTPVNPVIHGYYSDKCKSKKKNVAVGAVMHKICNIIFAMLRDNKPFEIITPQEHTVSGIWQRIPTRYRTQPNRFIMNFKDFHMGGLIKVTLFYINCLKKTFLTFFILPIDIS

SEQ ID NO: 362458 - protein, 429 aa, unidentified
MKIIYPRVCGIDVHKQFIVAVICISESVEPIYLKKRFSTFHNDLIRFREWLIQNDCQNVCMESTGKYYIPVYNVLESHISNIVVANPKWVRAVKGEKDDDKDAKWIADLFKFDIVRSSFIPQKDFRILRELTRYKYKLVNMRSSEKNRFQNALTSGNCKLDMVFTDVFGKSASNIIDLILSDNPYTDEDILSKVHKKCKASPDMILDSVNGTDLTPVQKSRIELVNDHIKQLSSNIQRLDKLIDLMIEPYEDYISFLCQIPGVSRNSAIIILSEIGVDMNQFTSSRRITSWAGLTPSSNQSAGKKKSVRISRAGVYLKPCLVEVAHAAVKDKKHPYYANKFNKISKRRGKKRAYIAIARKILVAAYHMLLTGEIWNPADLAEVETPVEQRIKYVKNNLKSDIKQLLDIGLTVEELTIMIQQNANIIATQ

SEQ ID NO: 362459 - protein, 346 aa, unidentified
MLYAGLDLSRKRLDVHILDEDGRTVEVTAVSPDAPGLRRLAAHVLRFGDEVDGAIESMTGARFVHDTLERYGWDVAIADAAKVKGIAPLAAKTDRIDARVLAELARRELVPEIWLPDPSVRAERERARFRLHLVHHRTALKNRIHATLMTFGHPVPFADLFGAGGRELLTRLALPEPWTGTLATSLRMVDVLGAEIDACEADLRRLGADHPSIPLLLTVPGIGPILAYTIASEIGDIGRFSSPKKLTGYTGLCPIVRQSGNRDVRGPLAKNGPKYLRWALIEAATHAARDAHYRERYERTKRRLGRQRGAKVARIDIARKLAEAIWHVLTKNEPFAPAGPTMLLVA

SEQ ID NO: 362460 - protein, 401 aa, unidentified
MVSDFRKGRYNLMKIFVGIDIAKLNHFSAAISSDGEIIIESFKFTNKADGFQLLVSKLELFDKNSIIIGLESTAHYDYNLVRYLVAEFYKVCVLNPIKICQVRKKNIGKTKTDKVDTYVIAKTLMMQDDLRFVSFYDLDMMDLKALGRFRQKIIKQRTRLKIQLTTYVEQVFLKIQYFFKSGLHQNAVYALLKEAPSAKEIASMHMTHLANLLKVNSHGHFTKEQAKELRVLAQKSVGANDSAISIQITQTIQQIELLDSQLEKIEAEMTDIMKFNDSVIMTIPGIGYINGGMILGEIGDIHRFSNPNKLLAFAGLDPSVYQSGNFQAKTTRMSKRGSRVLRYALVNAAWNVVRNNATFKAYYDAKRAEGRSHYNALGHCAGKLVRVIWKMLTDEVEFNLE

SEQ ID NO: 362461 - protein, 320 aa, unidentified
MIFSPDYVGVDVSKKHLDLAITGSSRLRVSNNPAGMARLVQKISSLTRPHLVCEATGSYTRLMARSLSQHGIALSTINPRRVRDLARADGLLAKTDAIDAAAILRFAHLMHPDPDPLYDPNAVEMADLVRRRRQMVDMLAMEKQRREHPEAALAQASIDAHIGFLSSQIGEMDRAITRQIDSDATLRRRAELLTTIPGIGQTTAAVLLAEMPELGGIGNKQAAALAGVAPFNRDSGEMRGQAHIAGGRLSVRCALYMATLSAIRANPPIRDFYKRLRAQGKPGKLAIVAAMRKLITTANAVLANNTPWHTNNTPWHTNTA

SEQ ID NO: 362462 - protein, 320 aa, unidentified
MSASSVVVGIDVAKAHVDVAVLGAQFDAQRFDNQAEGHSVLIAALKPLEVALVVMEATGGYETELACALQAAGLPVAVVNPRQARDFAKSMGRLAKTDAADARMLAEFAAVLLRRDDLARFLRPLADPQQQWLAALVTRRRQLLAMLLAERQRLQITPKALHPSIEAIIAAIQAQLDDIEGQMVGHVREHFAELDRLLQSASGIGPVASATLIAELPELGRLNRREIAALVGVAPMANDSGASRGRRRIQGGRFDVRRVLYMAALTASRRNPVIKAFYERLIAAGKCPKVALVACMRKLLTVLNAMVRTNKPWDNALHGA

SEQ ID NO: 362463 - protein, 403 aa, unidentified
MNMNAVGIDVSKGKSMVAILRPFGEIVSTPFEVKHTVSGIRSLIGHIKAIDGESRIVMEHTGRYYEPLVRELSQADLFVSAVNPKLIKDFGDNSLRKVKSDKADAVKIARYTLDSWTELRQYSLMDEIRNQLKTMNRQFDFYMKHKTAMKNNLIGVLDQTYPGANTYFDSPAREDGSQKWVDFATTYWHVDCVRKLSLNAFINHYQKWCKRRKYNFSQSKAVEIYEASKEIVSVLPKDDLTKLIIKQAVEQLNMASQTVEQVRTMMNDAASKLPEYPVVMAMKGVGKSLGPQLMAEIGDVSRFTHKGAITAFAGVDPGVNESGSYEQKSVPASKRGSGTLRKTLFQVMDALIKTKPQDDPVYLFMDKKRSQGKPYYVYMTAGANKFLRIYYGRVKEYLSSLPK

SEQ ID NO: 362464 - protein, 302 aa, unidentified
MKQYDEAFIGIDTAKNKHAVAIADAGREGEIRYLGEIDSAPATVGRIIRKLAGRYKRLHFCYEAGPTGYGLYRQVRALGHDCIVVAPSLVPKRPGERVKTNRRDAVTLARLLRAGDLTAVWVPDAVHEAVRDLVRARAAASQDLRRKRQQLLSFLLRHGRIYNGRKHWTRAHLRWLAQQQFAHPTQQIVFQDAVDTIEDAATRLRRLDEQVAAIVPSWSMAPVVEAYQAMRGVSFLVAVTFVAEIGDLQRFDNPRQLMAFLGLVPSERSTGERVRRAGLTLAGNKRARRVLVEGAWSYRHLY

SEQ ID NO: 362465 - protein, 346 aa, unidentified
MMIIGCDFHPSWQQVCWLDTETGETGERKLVHAEGDAERFYRQIPAPALIGMEATGNSHWFVDLLAEIGQELWVGDAAQIRASYVRQQKTDRRDAAHILKLLVEGRFPRIWMPSSEVRDLRQLLLHRYKLVIIRTRVKNELQHLCLNQGVQRKRKLWSQAGQKLLRELPLRPWASRRRDDLLRLMTMLDQQIEPLDQAVKAEAQRDKMALLLQTQPGVGPITALAYVLTLGDVRRFARGKQVASYLGLIPREHSSGGRQKLGAITKQGNRMLRMLLVEAAQTTVRLDPQFRKQYLHRCHQKPKAVAKVAAARKLAVRLYWMLRTQTGYPEIVRIESSPRVPLVGAS

SEQ ID NO: 362466 - protein, 343 aa, unidentified
MQTITTIGLDIAKSVFQVHGVDAQGGVVIRRQLKRRYVLAFFQKLPACLVGIEACASSHHWSRELRALGHTVRLMPPAYVKPYVKRQKNDAADAEAICEAVTRANMRFVATKTPEQQSCLMLHRTRHLFIRQQTAVINVIRAHLAEFGIVAPVGRKGVEELLDVVADPSDKRVPEVARMCLAALGAQLYRLKQQILEFDRMIMTWHQSNEASRRLDAIPGVGPMLATALVACIADPKVFRSGRNFSAWIGLVPKQHSSGGKDRLGSISKQGDRYLRSLFMAGALAVIRYAKIHGTKHRPWLTALLARRPIKVAAIALANKIARMAWAMMARGERYKEPVALAA

SEQ ID NO: 362467 - protein, 319 aa, unidentified
MLVGIDVAKAELVVGTRPAAERWTVANDERGVRTLVERLTRDAPELIVLEATGGYELLAVGALAAAGLPVVVVNPRQVRDFARATGQLAKTDRIDADVLALFAERVRPDVRPLRGEDAQELDALLTRRRQLLDMLQAERNRLGQVFGRAHARVKKSLKAHVAYLERELRVADADLGTMVRQSPAWRERDDLLQSVPGVGPVLSRTLLADLPELGELSRREIAKLVGIAPLSRDSGTLRGRRFIQGGRASVRAVLYMAALVATKRNAVIRAFYQRLVAAGKPKKLALVACMRKLLTILNVMARTHERWRANLAPPALVGA

SEQ ID NO: 362468 - protein, 358 aa, unidentified
MNTHRVQDFVVEGKEVFVGLEDSKKTWKIAVRCTKMLIHEVSMEAKYSLLIRYLRNKFPQCTIHLIYEAGFKGFNLYDRLTEDGIDCIVFPPHMVTEPKVNKVKTDKRDARRLALILENHDYKDSCHVPDKERREDRQISRTLIAVQKDIIRNRNRIRKILDFHGIDVPFAGKDTWGRKEFGALRELSLSEPLKLTLNLFLDQLEQLWAHQSSLRDALRRLCHKERYRPAFEIARSLPGIGWFTAIRLILELGEDLSHFTSGKKIAGFVGLASSEHSTGETEKKGRITGLGSGFIRSVLIECSWTAIRRDQALLSKFMRVWRASGMKKKGIVAVARIMIVRLRACMLSGRPYTIGMVR

SEQ ID NO: 362469 - protein, 428 aa, unidentified
MPYNIAGIDVHKKMLHVVFSDVEGDGEYQFVRQKFDTSPSQLRMLADWLLEQQVEEVAMESTAQYWKPVWETLERYWKPVCEKREGAKPESGTLHLAQALSNRGRRGRKKDFRDAERLVKRLVANELILSFVPDPEQRLWRTVMRTKYQMTCNRVQLQNRLEALLEEAHIKLSGLVSDLLGASARRMLKAIADGESDPAALAALADRKLRATPQQLSDALGACTELNPVYRRLIKMALEDLESIEKRMVQLEQEMADLLRPQEDQVKRLAEVPGLGVDSAQQIMAEVGATAATFPSAEHLSSWVGACPGDEESAEVRQSHRSPQGNRHMRRILNQAANAAVKLKGGIFEILYRRYVPRLGHNQTIGVIAHKLCRLVWKILHQGVHYEERGPAVSKVSKQKRTQRMLRELRALGYRIELAATQAGSPSA

SEQ ID NO: 362470 - protein, 379 aa, unidentified
MDHAISDTSAETVLRGALELSKNSWLLALQLPDRAQPSLYPIRGGDTEGLMGKLTAASDRWAKVSGKAPSIVLCYEAGYDAFWLARFLKARGIECLVVDAASMQVNRRARRAKTDRIDVGMLLRALIAWGQGDRHVWSVVRIPSVDEEDLRRSHRERDRLVRERTAHINRIKGLLFGQGIRDINVKSKYKTLQIDKLVTGEGHPLPPRLASEITREIARLALIQEQIAALERERDQAPTPCKATERKRVQLMGLTGIGPAIAAVMTREVYYRQFDNRQQVAGFLGLATSPHDSGDVERSQGISRAGRGQVRGIMIQAAWLWLKHQPKSAITRWFVQRTAGQSGRIRRIMLIAVARKLAIALWRFLEQGLVPQGAMLATR

SEQ ID NO: 362471 - protein, 377 aa, unidentified
MGREQREEKIGQLSVGVDLHKSQLTICVMREDGELVQEGMYRTTAEGYRAFVQKMHEWEQELGCSVAMAVETTGNARYLRNRMEAEGFSVVVVNTNKFKVISQSTKKNDRGDAATLAYYLGKDMLPESHLADQSSEELRRMIKCRSLLVSSMVKMKNQIHGMLLGYGITTKAAQLQSNKKRQALVKDLADQGFTEAAASLEVILGIIEGVQEQIKVLEKRLHEMARDDEDVDLLMSIPGVGFLTASTIAAYTKDMDKRFCGDFKRFASYVGIVPSVHNSNERVHMGRITKHGPQELRTALVQATMGMIRLSKITGEWRLMTDYRAMKTGKGSGKSIIATTRKLARIIFAMLHNREPFNPALMVRDKCLFTVEEVIGA

SEQ ID NO: 362472 - protein, 410 aa, unidentified
MEVLIGCCSGLDVHKDSVEACVRKLGSGGRLDQQTRHWGTTTRDLTAMAKWLKAEGVTHVAMESTGVYWKPVFNVLEEEFEVLLVNARMIKHVPGRKTDVADCQWIARLLQHGLLKGSFIPPRWQRELRDLTRQRAQLTDERSRTSNRIQKVLEDANVKLGSVATDVVGVSGRRMLEAIAAGQDDPAQLADLAQRRLRNKIPQLEDALCGKLNDHHRWMLRLLLDQLQATEKFIARLDERIAELTRPHKPVLEKLDAIPGIDRRIGEVLIAEIGLDVIPFPTDAHLASWAGLCPGNNESAGKKRSGKTNKGSRWLRQALVQAAGAASRKKDSYFHAHARNLMRRRGSKRGAIAVAHSLLLVIYHVLKGRAEYRDLGRDYLDRLREQQLVRFHVKRLQQLGLAVTVAPVAA

SEQ ID NO: 362473 - protein, 339 aa, unidentified
MELYAGLDLHSRNTYIGIMDKEFNRVFKKRVPNHLEHILQTLAPFRDQIKGFVVESTYNWYWLVDGLMDAGYSSAHLANPAAIKQYEGLKHSDDQHDAFFLAKLLILGILPQGYIYPKKGRPVRDLARKRMFLVQHKTAHILSLQSLIARCCAMKVRANDMRHLTVKELEGWLKEEYLVLSAQANLDSINFLKQKVKQLEKAIIQKVKLNKEFKYLLTVPGIGNILAMTIMLEVGDIKRFPKVGNFTSYCRCVPSRRFSDGKSKGSGNRKNGNRYLSWAFTEAVHLGRRYNERFRRYYNRKVAQANTSLATKALGNKLARICYYIMRDQVPFQEELFCQ

SEQ ID NO: 362474 - protein, 407 aa, unidentified
MDVVHPKCAGLDVHQQTVVACARVGSGKTVTHAVRTFGSTTPELLALSDWLATHGCTHVAMESTGVYWKPVWLVLDGHFELVLANAMHIRNIPGRKSDVNDATWIADLLAHGLIRSSFVPPEPIQELRDLTRTRKQLVREIAQHTLRIQKTLETANIKLTAVLADITGVSGRAILQALVAGERDPERLATLANERVKASRADLVAALHGRVTGHHRFMLHLHLTQIAALEAAVREVEARLGDALAPFRAALDRLITMPGVSETVARVIVAEIGFNMTRFPTAGHLVSWAGLCPRLHESAGKRLSNRTRSSNPWLKTTLVQAAWAATRKKDGYFRAQFLRLKSRRGPKKAIIAVTASMLTAAYHMLKHGVDYRDLGADHFDRRDKAKLAKRLIARLQDLGITVEVRAA

SEQ ID NO: 362475 - protein, 410 aa, unidentified
MNVIYERCCGMDIHKNTIAACLITGRKKEIRSFSTMTSSLLGLIDWLRSADCQCVAMEATGSYWKPIYNLLEMEEIPTLVVNAQHIKAVPGRKTDVKDSEWIADLLRHGLLNGSFIPKREQRELKELVRYRRSMVAERARELNRIQKVLEGANIKLGSVVSDIDGKSSRRMLDMLIAGCTDVQAMADKALRQMRKKIPQIEEALHGFMGDHQRTMLRLMLKHIDILEEQVLSLDQVIQERMKPVNDQVSLVDSIPGVAERSAQVIIAEIGINMNQFPSDSHLASWAGVCPGNNESAGKRKSGKTRKGSDMLRTTLMECAKVAGHLKNTYFSAQYARIAARRGHNRATVAVAHAILKAAYHILKNNTPYKELGPDYFDQRRKAEIVKKSVKRLETFGFTVTIEQSANSSTA

SEQ ID NO: 362476 - protein, 459 aa, unidentified
MVHKRKTMRSGHVGRPENIPILNPNAAGMDIGADEIYAAVPTDRDGPPVQCFGTFTGELYRLSEWLKHCRVDTVAMEATGVYWIPVYQILETSGFELCLVNARYFQNVPGRKTDVSDCQWLQRLHSAGLLRGSFRPAQEVCVLRSLTRHRDNLIRLASTHVLHMQKALDQMNVQLHHVLSDITGLSGLAILDAILAGERDPRVLARLRDGRVKASEDTMVQALTGDYRGEHLFTLKQSLTAYRQYQKFVRACDREIEQQLKQFDAKVDVKAVPLAPPKVRRKKLFSNEPKFDLRSHLYRVFGVDLTAVPGISVLTAHTILAEVGPDISKFRSASAFASWLGLCPHNDISGGKVLSVKTRRVNNRAALAFRMAANALLRSQSSLGDFFRRMRAKLGAPAAITATAHKLARIVFHMLATREAYDEAILRSNERGFRARAEARLRAQAKALGYSVVAMTMAP

SEQ ID NO: 362477 - protein, 422 aa, unidentified
MLAEARDDEVIIERIAAVDVGKAELACCVRVPDERRPGRRLQEVEVYPTMTRSLLRLAGRLRCLGVTRVVMEATSDYWKPVFYVLEAAGFETWLVNAKDVKHLPGRPKTDKLDCIWLCKVAERQMIRPSFVPPPPIRRLRDMTRYRIDLVTTRTAEKQRAEKLLEDACIKLSVVASDIFGVSARAMMASLIAGERDPKVLAQLARTAMRRKISALEEAFTGHFTDHHAFLLAKMLARVDALDADIAELDAVIEQMIAPFASAAERLDEVTGIGQVAAAVIIAEIGTDMTRFPTSGHLVSWAKYAPGVKESAGKKKGAGTTGHGNPYLARILGEAAIATSRTDTFLGERFRRIARRRGSKKAIVAVGRSILVIIWHLLSDPTVRYADLGPGFYDARISHSRKTHNHVRQLEALGYKVSLEPAA

SEQ ID NO: 362478 - protein, 356 aa, unidentified
MSRDIKYIGMDVHKEAIVIAVLNGSGKLVMETIVETKASSILQFIHGLRGELHVTWEEGTWAAWLYDLLQPQVEQVLVCNPRRNALLKEGSKSDQVDAQKLADLLRTGMLRPVYHGENGLRTLRELGRSYQTISKDLTRVMNRLKALYRGWGIPCAGTQVYGPRYREQWLNKIPQAGVRRRAELLYQQLDGLQALRRHLRPEFLAESRKHKASKLLRQIPCIGPIRAARLLALMQTPHRFRSKRQLWTYSGLGIETHDSAQFRFVSGQLQRSRKPQQIRGLNRNHNHEMKEIFKSAATRASCGRGPFHDFYAALLAKGMKPEMARLTLARKIAAITLTLWKKEERFDVEQLKTQAA

SEQ ID NO: 362479 - protein, 382 aa, unidentified
MSQTASRWDSTSWGSGLFMALELGWSKWRLAFGSAMDQKAWQMTIAARDVMALTRAIGKARQRLGLPSDCPVFSCYEAGRDGFWIHRLLLKMQIHNIVVDSSSIEVARRARRAKTDRLDAAKLLSMLQRHHAGEKKLWSIVHVPTPEQEDGRHLQRQIRTLKKEQTRQLNRIRGLLANQGVAVRANRGGLLEPLDSIRIWDGSPLPVGLRRRLEVEIARHAFIHRQLLDLELERDARIRQSQDRAAQIARHLMRLRGIAQVGAETYSREFSWRGFTNRRQVGSLIGLTPTPHQSGDSSREQGISHAGNRHMRGIAIDLAWLWLRQQPHSELTLWFNRRFAHASPRLRKIGIVALARKLTIALWRYADFAEIPKGALLKSDAA

SEQ ID NO: 362480 - protein, 315 aa, unidentified
MRKDGRGTACLSASMSMERLDVHLHPGGEAFAVPRDGEGLSDLVRRLEGRAVALVVLEATGGFETVVAAAVAAAGLPLAVVNPRQIRDFARAIGRLAKTDVLDAAVIARFAEAVRPEPRPVPSEAAQALGEMVARRRQIVETMVAERNRRRHLTQPRLLKGVDRVLAVLQAQLSEIETDIDAAIRQTPAWRERDDLLKSVPGIGAATARTLIAELPELGSLGRREIASLVGLAPMNRDSGTLRGRRTIKGGRSTVRSALFMSIMVAIRHKLALHATYERLRKAGKPPKVAIVACMRKLLTIANAIIRDKKPWQTA

SEQ ID NO: 362481 - protein, 484 aa, unidentified
MTDYYKFMMVENNIKICYSFLGFMGRGMALTDCLLMDGFSWELSSSVQNASPDVSYRIMSPLPHKEEGMTNNSLEQQRRSKMQKLYAGIDISKDTHHVCVLLPDNNTQELKVKHETKKLREFVEHLKRLQEEYQAEVVIGLEAINGYASPLDKMLIDAGFRVLNINSARLYNFRRLYGAPFKNDPHDARLIATYIRSGEVLEHKNLKPAIEVKEIPPVHRKLRRLSRYRNELVREKVRVSNRLTKLLGEYAPLFLSLGPVSKNKALWKFLARYPYVSEWKSLSEGEIVDISFGDGYRIGRKRARKIKEVLEMVEVYEREDEEEIGMIVRDYAMRLLELSGKIKEVDEKIMEAGEESEVYMRLLEEPGISHGIASVIVGEIGTILRFDRESSFAAYNGSGVLDDQSGKKKNTKKIILYNRELKRAMRNWAYARMRCHEETKRYYLKKRKEGKTHLQALKCIERILSRKLYKLLRRLEMKSLTFTT

SEQ ID NO: 362482 - protein, 400 aa, unidentified
MRVVFGIDVSKASSEVAILVNGEKVHGYTISNDAIGFARLLGDLRTVHKPEIIFEATGVYSRRLQTFLDDNGYAYTRLNPLEAKKQLDSLRVRKTDQIDAEKLAQSQFVLNRKPTYVQEEVYQNLRDLSRFYQNLTEDIVRAKNRLHKVLQVTFPELENILSTPSGEQYWNLVIAFPCKDCVLELSNDELSKSIRLSTSKRISDKRVAYLAEKLIALANQSYCAVKKTSPILEEVRYYTKELLRLSEQRQAVLDEMVELAQPLPEYDILLSIPGIAETTATSIIGELGDIRRFQSANQINAFIGIDLRHYESGNFLAKEHITKRGNPYARKILFKCIHNIASASHTNPCHIADFYEKRKRQSQTTSTKPHTIASIHRLIRTMYYLIMHNKLYDYASTQNR

SEQ ID NO: 362483 - protein, 344 aa, unidentified
MQSMYYIGLDVHKRTISYCVKDGSGTIHDEGTIPATRFDLDRWMKTLPQPWTAAMEATVFTGWIYDHLQPHAAALKVAHPLMLRAIAAAKKKNDRIDANKICDCLRCDFLPECYMASTAIRERRRTLRYRNLLVRQMVQMKNKISMLLMEAGVSYNKQRLHKAGYFRELLATNPAIDEGLCSLLRLCRETVVRLGKTESALVRSLERDSLLIDRVERLMSIPAVGPITALTWALEIGDPQRFPSIRKAISYCGLCGAEKSSANTVQRTPLSKQRNKHLQTTLIEAAKMAPRNSPELAMLYAKEKQKGNANRATLAVARKLVAYLMAVDRGQRNFQVVQTNCIAA

SEQ ID NO: 362484 - protein, 346 aa, unidentified
MNFYQTQHEFYCGIDLHANQMYACVVDQAGKKHLHRNFKTRQSDKFFADIQRFGSDIVLGCESTFNWYWLADQCRERQLPFVLGHALYLKAIHGGKVKNDKVDSEKLAYLLRGGNFAVAYAYPNTWRSTRDLLRRRTHYVRRRGQTLTHITNVHHQYNLPATKKLQYESNRPGVAEGFSDPAVRYSIETDIEMLRSYDTRIRQLEKFLEQSAKVHDANNFFRLQTIPGVGRIIAMTMLYEIHDIRRFPQVGDFLSYARLVRGEHTSNGKSYGSPGKKIGNAYLKWAFSEAVPLLKRQSPQAKAFCQRIENKHGKARANSLLAVKLGRAVYFMLRRGDVFDLGRMIR

SEQ ID NO: 362485 - protein, 352 aa, unidentified
MLIIGCDFHPSFSQIAVLDLETGESYERRLRHREGAEQFYRSLAGRQVRVGMEACGHYPWFEGLLEECGHELWLGDAAKIRAGVVRKQKTDRRDAEHLLKLLLEDRFPRIWVPSLEERDARQLLVQRHKQVVLRTQVKNQLQAIALSHGVQKKRKLWTEQGRVELEKLPLLPYADARRKQLLQSLDALEAEVEQLTRKVEEEAARRPAAVKLQTHPGVGPVTALAMVLTLGDVLRFQRPRQVASYLGLIPAEHSSGGRQQLGHITKQGNSFMRFLLVEAGQTAARFDERLGRFYFRLGVRRHRALAKVAVARKLATRLYLMLREDWDYAQLCRAVMQVSPSHSVAASSKPTV

SEQ ID NO: 362486 - protein, 412 aa, unidentified
MNIVYERCAGLDVHKRSMTACASTPDAKGQRHKERESFSTMTPDVLRLRQWLTARGVTHVALESTGVYWQPIYAVLEGHFELLLVNAQHIKAVPGRKTDVRDAEWLADLLQHGLLRSSFVPPASQRQVRELTRYRTSLSEERSRAVNRLQKILEGANIKLASVTSDLMGASARAMLEALLEGEGDPSTLAELARGRMRSKRDLLAQALQGRFTAHHRFLIREQLAHIDDLEEHIAELSKEIAERLRPFEAQLKRLETIPGIKRRLAEVILAEIGADMSRFPSARHLASWAGMCPGNHESAGKRLSGRTRKGSPWLRTALVEAAHAAIHTKECYLSAQYHRLVIRRGGKKATIAIGHTLLVIVYHVLAEEKDYEELGGNYFDEWDRQAVQKRLVRRLEKLGYEVMLTPTSPAV

SEQ ID NO: 362487 - protein, 346 aa, unidentified
MKQITTIGLDLAKHVFQVHGADADGAPVLRRKLRRAEVHAFFAKLPSCLVGMEACGSSHYWSREIAALGHEVRLIPPIYVKPYIKRGKTDAADAEAICEAVTRKTMRFVPIKSADQQAAAMVLKARDLLVRQQTQTINALRAHLSEFGIITGIGTAKVAALIAIVRDADDTRLPGAARFALSAIADQIEALARQVEKLEREIVAIAKRDEDMRRLATIPGVGAIIAASIKALVPDPDGFKSARHFAAWLGLTPKSHSSGGKERLSGISKMGNTTLRSLLVLGATSVLRYVRHNENAPRWLVALLARRPFKIVAVALANKMARIIWVLLTKGGTYQKPAVATGAANA

SEQ ID NO: 362488 - protein, 310 aa, unidentified
MHEEVWVGVDVAKAHLDVCVLPGDESWRTSNNEVDIAELTQRLQALEPRGVILEATGGLEQALVVALLDAGVPVHVMNPRQMRDFARAIGRLAKTDKLDAAVLALFGQTVRPEPRELPDEATQTLKALVARRHQILEMLVMEKIRRQQAPKRVRKSIDVNVAWLKKLLQDIDDDLDATIRSSPMWREKDDLLRSVPGIGRVVSSVLMAGLPELGRAARRKLAALVGVAPFNRDSGLMRGRRTIWGGRSAVRVALYQAVLVATRHNALIRAFYQRLLAAGKPKKVALVACMRKLLGILNAMLSSGQRWQPA

SEQ ID NO: 362489 - protein, 370 aa, unidentified
MDEPTTFIGLDVHKATVAIGIAEGWRTGEVRFLGEIPNRPVAIARMAEKLAKQHPGRLLFCYEAGPCGYGIQRQLKQSGHDCIVVAPSLMPTRPGDRIKTDRRDALTLARLHRAGELTAVWVPDPAHEAMRDLVRARTHAVERVRKARQQLQGFLLRQGRIYTGTATWTAAHRHWLATVRFDHAAHQIILQEYIDAIADAEQRRDRLTQQIERLLPTWSLKPVVDALQAMRGVALITAVTLAAEVGDFRRFGNPRQLMAYLGLVPCEHSSGPKARRGGITKAGSGHARHVLIEGAWTYRLPARVSPKLQARLEGLPKAVRAIAWKAQLRLCARYKAMIAKGKPWNVVTTAIAREMVGFIWAIAQRVEPAN

SEQ ID NO: 362490 - protein, 419 aa, unidentified
MSYCPVAGIDVSKQFSDMCILSPDNKIFAQEKIYHDETSINRANALLQKAERLFFSKPVIVMESTSHYHLILFQFFSEHGYDVIVVNPLQSNSMKDFSIRKRKTDRVDAFKLAMMYRTKTLRPSQIPQTATRALRQLCRHRAELLNDVSSYKNRLTALLDQTFPGYDKVFSDVGGVTSCAVLVRFPTPTILLVEEESELVEVIAAASKSGYSLKAGLLISAAQKAQTLGIHSCADETLIVCTIQMLRTLSESVLQIETAIDNLLAQIREMRNNVSLLQSIPGIGSHSAALLLGEIRDISLFKKPKQLAAYFGLDPTERQSGSFRGTKNKLSKRGSSYARAALHMGIVNSICKRGKDSAANPVLLSYYEKKCKNKPAKVAQAASMHKLVFIIFAVLRDQKPFELKTPEQHAVEQGFVKAA

SEQ ID NO: 362491 - protein, 412 aa, unidentified
MSLALPDALFFTGVGWAAETHAVCVMDAGGKIVAGFTIEHSADGIAALIRRLARHGDPGDMPVAIERPNGRLVDLLLEAGHPVVPVKPNAIRAWRDGEVLSGAKPGAGDAAVIAEYLRLRQHKLKAAAPYPEETKALRTVVRARDDLAGMRVAATSQLSALLDAHWPGARAIFADVESPVSLEFLTRYPTPASARHLGEKRMAAFCVKHGYSGRRTAAQLLARLHRAPAGATGQALTEALRDAVLAAAGVLAALNASVKSLDRSTAAHLGEHPDSAIFTSLPRPGQVNAAQVLAGWGDCRPACEHPGSVAALAGCTPVTRAPGKYRAVHFRWACNKRFRTAVTTFAGNSRHASPWAAKIYNGARASGKDHPHAIRILARAWIRVIWRCWIDRTPYDPAKHRAATTLLKLKAA

SEQ ID NO: 362492 - protein, 341 aa, unidentified
MKNLFIGVDFSKEKVDVAIIFADGLTETAPRVFNEFKTTVSGYKQLVKWVEQNSCGIDSSLWLFCGENTGDYSKGLCNFLYGKGYDMWLENAKSIKDASGLRRLKSDRADASMIAEYAMRNYDRAIMYEPLSESLAQLRELFLYRQMVVHHRCSFQVRRGEKKLTMEKSPVKTMISQSGRHIVSELNKEVEKIDKRIAELIKSDEELTEVFTIVTSVPGIGTQNAVCLMVYTDNFRRFNYDSRKIACYYGIAPFGKDSGTSVHSDPRVHYMANRRIKSMLTQAALAAINFNPVIARYYMRLVERGKKKQVALNNVKNKLIRLVTAMVRNRQIFSPEYKISA

SEQ ID NO: 362493 - protein, 411 aa, unidentified
MRRVIGMDIHRTFAEVAFWEEGRLRHHGRVDMTRAGLEGFGRSLRGDEEIVVEATGNAMSVVRVLSPFVARVIVANPMQVKAIAHARIKTDKIDAGILAQLQASGFLPEVWVPDVRTERLRRLVARRNQIVRHRTRVKNEVHAILQAHLVPKCPHADLFNGRGRDWLARQDLPDDERSAITRHVREIDRLAEDLGDLDAEIAKDTVDDPAVQRLLTIAGVNAIVASGIVAAVGDISRFKEPQKLVSYFGLNPRVRQSGIGLAQYGRISKHGRSHARGLLVEAAWAASRAPGPLRAFFLRVRNKRGHQVAAVATARKLVVLIWHLLTKEQDYLWLRPSLVAAKRRQLALKAGAPSEKGKGRRGSAYAYNLKELRDREREGSEQAEKAYEHLVRQWKPHGQKRRTDATNEERR

SEQ ID NO: 362494 - protein, 340 aa, unidentified
MSEIKTIGLDLAKHVFQVHGVDAAGECVLRKRLRRGQVISFFAQLPRCLVGIEACATAHYWARELQAAGHEVRLMPAQYVKAYVKRNKTDAADAEAICEAVRRPTMRFVPIKTAEQQAAVLLHRGRERLVRQRTTLVNALRAHLAEFGVVAPAGLRNVSQLIAIVRDASDRRLPDLARPVLRVLATQVELAQAAVAKVEKELTAWHRSNPLSQRLATIPGIGPIIATAIAAMVVEPSGFASAREFAAWLGLVPRQHSTGGKARLGGISKRGNRYLRRLLINGASANLLRSKATNADPWVIGLRRRRPSLVVAVALANKTARIAWAVMHRQEDYRSLAAAA

SEQ ID NO: 362495 - protein, 444 aa, unidentified
MNRRTRRSIQRVSNQKELSIINPHVAGIDIGSEEHYVAVPPNSCEQPVQKFGCFTKDIQAMAKWLRKCNVKSIAMESTGVYWIPVFQILETEGFEVLLVNAYDVKNLPGRKTDVLDCQWIQMLHCYGLLRGSFRPNDETVILRAYVRQRDRLTRLATMHVQRMQKAMTEMNMQLHHAISDITGASGLRIIESILHGERNPQKLALLCDYRIKKSMKTVAASLEGDWREEQLFLLDQEYAAWKYVQHQIQEVDTQIEQQLGNMQKKTTIGNAQNIKSVLQEVCGIDLCKVHGLDTNTVLVLISEIGVDMSHWKTEKQFASWLGLCPNHRITGGVVHRRHTRKVVNRASRALRLAALSLRRSSCALGAFFRRIQARSGMPKAITATAHKLARLYYQLISTQQEYRDTGVDYYEQKYRNNLIKFLKRKAESLGCQVVDNQAVTAPAR

SEQ ID NO: 362496 - protein, 407 aa, unidentified
MGMCIRYCICEPSKKRALIDVCSFVWLVGVGYSNSIVKKEVKKRIKIESKNKDYYIAVDIGKRNCVVCVTDKNGSIIEETKYDNTLQEAERFASNLNKKYTNRKCHAVCESTANMWLKTYKAFEKNGIDVKLANPLKTKAIAQARIKTDKLDARILAHLLRSDLIAESYIAPDNVREDRSLLRLRINLVHDRTRVANRVHSLLDKYDLKCKYYHLSGVNSIKWLKSITPKLKGNDQIQLANHIKNIEFLNSEIKQIEEQISTEASKNENVKILMSMAGIDYFSAMLISSEIGDISRFNTASKLVSWCGLCPTVHQSGNTMYMGRIKKDGNKKINWIMIQAANTASRTDENRLKKYYKKMAKRHGHNVAITHVANKMIRIIWAMLTYKQLYKERKNELYETKLKKMQK

SEQ ID NO: 362497 - protein, 433 aa, unidentified
MQDVQDEPLFAERVAGLDIAKAEVEVTLRVPSDTTAGRRQQETRTYGTTRRELDSLADWLHCWAVTRAGMEATGEYWKPVFFLLESRGFDCQLYNAGQVKALPGRPKTDRADSIWLAKITERGSVASSFVPPEPVRRLRTHTRYRRHLTQARTAEKQRVEKLLEDGHLKLSSVISDIHGVSGRAMLEALAAGQRDAKALAQLARGTMRGKIRRLEEALDCSFFTAEHAAVLAMMLAAIDCYTAQIEALTARIETLTEPYLRQVEQLDQIDGIGAICAQDIIAEIGADMTLFRTASHLVSWARWSPQVKQSAGKRKGSNATGRGNPYLGAALGEAVICAGRTQSYLGAKYRRLARRMPKKKALVATGNSMLTIVHTLLSDPAARYQDLGADYYEQRMHARRQARNHVRSLERLGYKVTIQALNPDTGEFLTPAG

SEQ ID NO: 362498 - protein, 344 aa, unidentified
MTTKLMAGIDLHSNNLFCAIVDLEGRRVFEKKLPCQMEQVLQALKPFKKRLEKIAVESTYNWYWLVDGLQDHGYPVVLANPAAMEQYDGLKHADDKSDGFFLAEMLRLNILPTGYICDRAVRPVRDLLRRRMGLVHKRTSLILSVKSLHTRMTGQDLGTGRIKRLDPEDGEKLFSHPADQLITMLDLQLVEQLGQSIQKIEAAILATVKSLPNYQVLQTMPGVGKILGLTITLETVDPRRFASPGDYASYCRCVDSRRMSNGKKKGENNGKCGNKYLAWAFVEAANFAQRHDADCRRFYDRKKAQVNGMVATKALACKLAKAAWHMMSQHTNYDGARMFPGARP

SEQ ID NO: 362499 - protein, 348 aa, unidentified
MTLVGCDLHSRKQQIAVLNTSTGEVLEQELAHDGDTVERFYRALPPPVTIGIEATGYTQWFHALMHRLGHTVLVGEAAKIRAMVVRKVKTDRHDARHLLDLLKHDRFPTVWMPDPGTRDLRALITHRVRLVRMRTMVKNGLQAIALNQRLALRSALWSQRGLAQLQALPLAMHTRRRRDDNLELLGWLTARIDRLDDQIAAIAEGDRHAQLLLTHPGVGPLTALTTVLVLGPIHRFPGSKHVVSYVGLAPAVNASADKQKLGKITKQGNALLRWVLGQAAPLAARADDDLRRRYFSVLHRRGRPKAKIALARKLLVRLYVMLRDQIDYEEFRRRGRAPGAHRAPMLTM

SEQ ID NO: 362500 - protein, 345 aa, unidentified
MHSTRVGVDLAKDVIQVCVSKRKKVQSNIEMTPEEFLCWLNTSKPATIIFEACSTSNYWKQKALQAGHDARLISAKLVSVVRQNQKTDKNDALAIIQAALLPDVTFIGGKTVEQQQLQSIKRLRELTIKQRDASQNQIVALLSELNLRISKSRGSITRSIEDILEDADNELSTQCRATISIAKEQLSLLIKAVKSYDECLEKSASLHPDCKKLLKLEGVGTLNAINLYLAIGCAEIGAFSKGKDASACIGLTPVQHSSGGVVKLGSIGRFSRNSALRSQLVCGAMAAIQHIVKREAKTKKEVWLKALVERRGKKCAAVALANKTVRTAYAMLTHGTEYRAELLTA

SEQ ID NO: 362501 - protein, 440 aa, unidentified
MSQKLPALDPLAAFVDVGSEHMHVSVGGNRPQVFGTVTSQLHALRDWLLAQGVHSVAMEATGVYWLPLYGVLESAGLEVRMVNGRQTRNLPGRKTDMADSQWGATLHMHGLLHAGFVPPADIRRLQDYLRLRAAHVAAAATCVQLMQKALDRMNIKLHDVISSLAGVSGMAVVRAIVAGERSPQALVALCDMQIRRKKEQAVIEALRGTWADEHIFALDQALQSWDHYQKLIADCDTRITAVLPPHDETQPPLPRSTKQTGINAPEISKLREILAQMCGGRDLTKLPALSQYGVLQLIGEVGTDLSVWPTEKHFTSWAGLAPGSDDSGKRKKRVRRGRNRTGRLFCMLAQSLVRSKDIALGGFYRRLAARRGGLVATKALARKLAGWFWRVMVKGDDYVEKGLARYEEQVRKTREQALRRLAKELGRQLVPLPTTDAMAS

SEQ ID NO: 362502 - protein, 333 aa, unidentified
MLPPNCGTATPYILRNTVGLDISKLTFDASAIVGNAEYSAKFDNDSKGLNQFSDRLKSLGCQNLHICMEATGNYYEEVADYFAQYYSVYVVNPLKISKYAESRFKRTKTDKQDAKLIAQYCRSAQESELVKRQKPTDEQYRLSRMTAAYAQIKSECAAMKNRHHAAKDEEAAKAYAQIIKAMNEQLEVLKEKIKEQTEKPNCKEGVKRLETIPAIGRMTAAVLFHHLTSSKFETSNKFAAFAGLSPQQKESGTSVRGKGKLTKFGNRKLRAVLFMPAMVAYRIRAFPDFIKRLEEKKKPKKVIIAALMRKLAVIAYHVHKKGGDYDPSRYKSA

SEQ ID NO: 362503 - protein, 474 aa, unidentified
MINDTRKKLKTKSVKFGGLQRINQHAAGVDIGAKSIFVCVNVEEGRHEVREFLTFTADLREAAVWLKKYGTKTVAMESTGSYWIPVYDIFEEEGLEVCLVNAHHLKAIPGKKTDVLDCQWIQTLHSYGLLRGSFRPGSHGVSFRAYVRQRSKITELSAMQIQLMNKALIQMNIRLDQVFSTITIASSMTIIRAIVGGERNSAVLAEYRNFQCKKTKQDVMKALEGNYRPEHLFALEQALRTYDFFQEQILECDTKIKEMLESSEVLQQNTLDPKSSQQVSAICEKTMPKKKKKSTGKNTYNFDAATKLKNAIHIDLTAIPGIDVNTAIKIISEIGTDMNRWPTEKHFISWLSLCPGNKISGGKVLSSRATPTSNKARQAFKIASNSLYRSTSALGAFFRRMRAHLGAPAAIVAAAHKLAKIVYQMLKEQKEFHDIGQEAYEQQFKKRRLTNLRRIASELGYDLKPQEEQASAVV

SEQ ID NO: 362504 - protein, 312 aa, unidentified
MADMVRLAGLDVSKDKLDVYVTPSGESRTVGYDRRGLAGLRRWLVGLGVALVALEASGGYEREVSEVLEEAGLIVHRLNPLRVRRFAQLKGRLAKTDRLDARTIAEFARTWPQERQLRRDPRRERLAEHLLVRRHTQQAILDCINQLEHLRDGRLRRLVMARKASMERTLARLDRCLVELIAEHDDLAELSRRLRSVPAVGPVLATTLIALLPELGSLTRRQVASLVGVAPFDRSSGRQIGAKSIQAGRGLVRNALYMAALVASRHNPAIAAFAERLAGKPAKVRLVACMRKLIVTLNAMVRDGSQWQPRIA

SEQ ID NO: 362505 - protein, 369 aa, unidentified
MYLLSDVMVSSQIRHPSAMIEFELTIKPEKTKMKITTIGLDIAKRVFHVVCCNKEGRLLKKKMLKRAEVLAFFHSHPECLVAIESCATSSYWAREIQRCGHEVKLIPPQHVKAFLVGNKNDYNDALAIAIAARQPHIRAVGIKSVEQQDNQAQHKARALAVGQRTALCNQIRGLVAEYGICVPQGVHTLRKHISIWLEDGNQQLSIQFKALLLQLNKQLHTLDSSIEVYDKAIMQYAKNNAICQRLLSVPGIGPMISSAYFNEVGNGRAYRKGRDVSASLGLVPKQHSSGGKDVLLGISKKGNRYLRCLLVQGAKAVVSRAKSKDDKLSLWINHLVFTRGHNRACVAYANKMARMAWAITVSGEEYSPV

SEQ ID NO: 362506 - protein, 396 aa, unidentified
MRNDVTIYVGIDFSKEKFNACLLMEQGVMGESEFPNSKTGYLKLTKWVKNTSELGRSFDSSLVLFCGEHTGTCSIGLCEYLYAKGMKIWLESALKIKYGSGLKRIKDDKADAEMIAYYAKRFYEPGSCALFEPDSADLKTLRTLYQFRNRVVCDRVAIGNRISSGAFDCSTLVRNRMVKHHKEAQKDEKDIEKEMVRLMETSEELASNYQILISFKGIGPITAAALIIYTSNFKKFDNPRKFACYCGIAPFGKQSGTSINTKPHVSRFAHIGIKAAIVQACKSAMQHNAVIKAYAQRLYAKGKHEGIVMNNVKNKVMHIIFKMIQTQTLWEQEYQQKHPKECKPIPGKNGIGATEAAPIINATLKTSSSVVECTFLEKHSFQKNSKKTSSFSCVET

SEQ ID NO: 362507 - protein, 371 aa, unidentified
MSKCTRFVGLDDSKHSIDVAVASEGREGEIRAYGTIPNTTEALKKLVRSLGRPKDLYFVYEAGPCGYGTYRDLMALGANCMVAAPSKTPRRPGDRIKTDRRDAITLARLHRAGELQPVWVPDEETEAMRDLTRAREDAKYAQTKARQRLGSFMLRHGRRFPGRSHWTKTHLRWLAEQRFARPSQQICLEEYVGAVEQTTDRVHRLEAELRELVSVWSMGPVVSAMTAHRGVSLVVAATVCAELGDLTRFDRVRELMGFVGLVPSLHATGLGRRVGAITKTGNGHVRRVLVEAAWSYRHPARRTLYMRRKLDGQSEEIQTLSWKGQVRLCGRFRRMIARGKHPNKVTVAIARELLAFLWATARMVEPMSPAA

SEQ ID NO: 362508 - protein, 422 aa, unidentified
MVRAIGLDVHRDFCEVAIAEEGKVRSAGRIATQPDVLELFAQSLTADDRVALEVTGNAWEIARIIEPHVARVIVVSPSDTGIRQARAKTDRLDARTLAKLLAAGSLDSVWMPDERTRVMRRRLSRRSQLVEARTRVKNEIHAILIRRLKGRPDASDVFGKKGRTWLAELELPIEERETLDSGLRQIDFLDAEIKLVDRVIAHDALNWPEARRLMTVPGVNLIVASTFLAAVGDIHRFPDRRKLVAYLGLDPKVRQSGDAPATHGHISKQGAAPVRVALVEASWSVVRQPGPLHAFYQRIRARRGHQIAITAAARKLACLFWILLWRQQDYAFGQPSLTAKKLRRLEITAGAPRWQDRQGVWIAHRLLRNAELQLARQAEHAYAQTVRDRQAAGQVKAGASATPGRASQQPTKGKAARQTTSP

SEQ ID NO: 362509 - protein, 340 aa, unidentified
MSVYVGIDVHRKRSQVAVVAEDGTVQLNKNVVNGSEPFLRLIGDLPAGTPVAFEAAFGWSWLAELLEDYGFDAHLVHPLRCKAIASARLKNDKVDAAILAQLLRADLLPEAWIAPPAVRQLRALVRHRISLVRLGTQQRNRIHAVLADYGHDRPGGCWSGPGRAWLASLPLPAVSREVIDDDLALIDALQVRIDRLDWEVHQQARRDPRVKVLTQLPGVGPFTALVLLAEIGEVSRFGSARKLASWAGLTPNVRGSDRVAHYGHISKQGSAWLRWILCEAAQTAKRHPDFAASYQAMARRRGKKIATTAVARKVLTRAYHLLAAASGGTPTSPEGSPGPG

SEQ ID NO: 362510 - protein, 367 aa, unidentified
MAKVRSWAGLDVHAASVVAVTVDAASGELAVHRLPGRTEQVVQFCCTLPAPTRVAYEAGPTGFGLARALTAVGIECVVAAPGKIERPAQDKIKTDRRDAERLVRLLMIDGLYAVRVPTSGEEALRDLVRAREDLRGDLMRARHRLGKLLMRHDIRYDGTGDNWTARHRDWLGKVNLGDRGAQLTLIDYLGAIDTLLVRRDTLETAIGELATDSPWALTVARLRCLRGVDTLTAVGLCAEVGDFTRFAKAHSLSNYLGLIPSEKTTGQQRRQGAITKSGSRHARRLLIEAAWHYRRPPSLGAPLKRRQAGQDPAVIALAWKAQQRLNHTWQRLDAQRGKRRTIVAVAVARHLAGFCWAIVTTTPSEPA

SEQ ID NO: 362511 - protein, 302 aa, unidentified
MGEVSTIGLDIAKSVFQIHGVDVEGAVVIRKRVNRAKVFEFFAALPSCLVGIEACPTAHHWSRRLQALGHTVRLMPPSYVKGYLKRSKNDANDAAAICEAVTRPSMRFVPTKSEQQQSILMLHRSRQLLVRQRTMLSNAIRGHMAELGIISAKGRNGTTELLDILANERDGCIPTAARFSLDVLARQYAVLMTEISVIEKRIHAWHRSCEESRRLQEIPGVGPIVATALIAEVGDWKAFSSGRGLAAWIGLCRGNIRLAARSDLAESQSRAIDICDGCSSPALWLSFAMRAGTAQRGCGWFA

SEQ ID NO: 362512 - protein, 505 aa, unidentified
MPAFTTRRQPATSSLPNGKQAKAKAQRQAYNRRKTRAKVKSEALRQKEAAQVEALPVQHPHAAGIDIGSRSHWVCVGFSIQADSCLIQEFPAHTAGLKAIAAFLREHQVNTIAMESTGIYWIPLYELLQAEGFEVLLIDPSYSHQLRGRPKTDRRDCQWIYRLHSVGLLAAAFRPDEKTCQLRAYLRQRANIVRQASKHVQHMQKALEQMNLKLTEILSDITGVTGRFIIRAILRGTRAPEKLAKYRDKQCKASEAEIAQALTGSYREEHLFELKQAYEAWQFSLGQVEKVDDQIALQLGRMKCDRALPPLKPKSRPKRRVNSPRFDVRTALYYVVGLDLTEIEGISDLTALTLISEIGPSVSQFATVKKFCSWLGLCPNWKKTGGRVKSSRTRRGVNRAAQALRLAAQSLHHSQGALGGFLRRMKARLGAQAAVTATAHKLARIVYLALKHGLTYVRQSQEEYEAQMREKQLKALKRKARQLGLEIIERTSGVVPTAAAALVQG

SEQ ID NO: 362513 - protein, 375 aa, unidentified
MMAMEKCKVSKRIREVMNSTVAGIDLGDSESLATVLSPMGDVVKRFSFKMNDEGLALLAENVPRDARIAFEATMMAYPFSRSLRSLGYSDITVAHPTELAWIVKSKRKHDKIDSLKIARLHLVGMLPESHLLSKEEQMKRDLLVQRVKIGQEMGRMKASVISYLKREGVYDALPKSADNFSLARRRAILSLRFNDDRDLVMRTLMDRLDFLQKQRAPLEERVKALVKESDEVKLLMTIPGVDYYLASLLCSYIGDIERFPDSDHLASFFGIIPESKDSSRVRRRGKMSKDGPPMGRWALSIAVDTVMRTNPHIREYYQHHKKRMGSGSLAHVKTMRKLLRMVDHMLRTGEHWRWEDAELTGKKVSKLEAEGGEDA

SEQ ID NO: 362514 - protein, 400 aa, unidentified
MKRLSGGIDVGSESHHIIILDEEDNFLYNQKVSHKLNEFTESIKLFKQIEKKERGKLSFALEGKNGYSAPFDRILLDQGFTLYNVDNFKLKRFREAFAGEWRDDERDSLMLSKMLKLKNYINSEREKVFIKIEKPSPVTESLKLLSRHQQTLIDEKVRLTNRLCKKLLEVCPEILKLGKVENKKTIAILTKYADFSKYKKITLKSLLKIKGIGKIKAPFLLKRLNNMEYIGLTDIYKTIILSYAKRISELQEEIKDIDKKLDEIGEKNKEVKHLKTIPGVATKLASRLIGEIGNINRFPSEKQLAIYCGIACVNNDSGKVTKAKAVYKANKICKQTLIIMAGCSIRFNFQCSTYYLKKRAEGKSHNHTLRCLARQLIKVIYKMLTEDRDYIVRKALRKVA

SEQ ID NO: 362515 - protein, 405 aa, unidentified
MINIGIDWSETHHDVCFLNDAGAVVTRVTVPHSPDGFLKLETTRQQLGVAPSECRVGLETAHNLLIDFLWAKGYSQVYVIPPSVVKGTRGRYRQSGARTDESDALLLADVLRTDRGRFQPWHPDDALTRQMRVKVSLHAYLTQQTTRFSNRLRAVLVRYYPAATQVFSGLKTQIALHFVQEFPTPQAAAALSFTQFRTFAKTHGYTRVKELPACFARLQQAQPEADPTTIAIYQDEAVALAAVLLNLVQTQLTVARELLTLFELHPDYSIFHSLPGAGAFLGPALLVKFGNDRARFPMPAGVQALAGTCPVTDSSGKRRIIKFRQSCDREFRRIAQQWAITSLAESAWAQSYWQQVRPRCQSDSHAYRCLANRWLAIAWKLWQARVPYDEDYHLQQRAAHSKPRD

SEQ ID NO: 362516 - protein, 425 aa, unidentified
MPTAACAARCSAARWSATVDSDRRSGRVRLQPPTLETTMQVISNRRETSGAIRNDLGAIFVSMELSRSTWLITSLSPGGGEKMSRHTLPAGDIGALLTRFSELGQKALMRTERSFPIIVIQEAGLDGFWIHRVLESEGIESHVVDPASIATSRRRRRAKTDRIDGEALLRALLAYKRGEPRVCTMVKTPAPEEEDRRRLCRERRVLTNERVLHVNRIKGLLFSQGAAGYEPLRRGRRQRLEELRTGDGRPLPPHLKAQISRELDRLELLLEQIKSVESERDALLAAQQTTPKPAAMLLAIKGVGPESAAILWSEGLCRHFDNRRQVASYAGLAPTPWQSGAIHREQGVSKAGNPRLRTTLFQLAWLWLRHQPQSALAIWFKERVNRNGGRLKKTTIVALARKLLVALWRYVTAGVIIEGATMVSA

SEQ ID NO: 362517 - protein, 343 aa, unidentified
MDYYAGIDVSLEQSSICVVDGSGKIVREAKVASEPEALLQHFADLELPIVTIGLEAGPLSQWLRAALVEAGQDVVLLETRHVKAALSAMTVKTDRKDARGIAQLLRMGWYRPVHAKSANAQDVRALLVGRKLLQAKLLDVELSIRGILRGYGLKVGEVSRGRFEARIRELIEGHEMLGTVIGAMLQARGALWNEFTRLHRAMLKITRADPVCQRLMSTPGVGALVAITYRSAVDDPGRFEKSRTVGAYFGLTPKKYQSGETDIDGGVTKVGDAMVRTALYEAAHIMLTRATRFSALKRWAMDVAKRRGMKRAKVALARKLATVLHRMWVDVSAFRWGKDTVAP

SEQ ID NO: 362518 - protein, 454 aa, unidentified
MDILQRICAGLDVHKDTVVACVRWLDDRDRVHTEVRTFGTTTPDLLQLLDWLLARQVPIVAMESTGVYWKPLFNLLEGRMKVLLVNPEHIKKVPGRKTDVKDCAWIAQLLQHGLLKASFVPERPIRDLRDLTRQRTQLTAQKASVANRIQKVLEDANIKLGSVASDVLGLSGRDMLRALIAGQTDGAALANLARGRLRDKLPQLRKALTGCVTDHHRFLLRLHLDHLTHLESLLGQLDQRIGQEMAKDCPPEPPSGEGPAATVAVGPRGVPELAAADQPAQPSSGGTRVPLWSALWLLTTIPGISRRTAEVVLAEIGSDMGRFATSGQLASWSGLCPGNHESAGQRRSGRTVHGDRWLRSALVQAAWAASRARKTYLAAQYRRLARRRGRKKALLAVAHTLLVMCYQLLKKGQPYQELGPDYFDQLEPERRTRQLVRQLESLGHKVTLEPQAVA

SEQ ID NO: 362519 - protein, 351 aa, unidentified
MDHIGIDVHKKESQICTLAEGGELIEQRIRTEPERFAAVLGERPRARIVIEASTESEWVARCLEGLGHEVIVADPNFAPMYATRTRKVKTDRRDARALAEACLLGAYRPAHRLSDPQRHVRGRLTVRDAVVRTRSRYISLIRALLRQQGYRVPSGSAEGFLHRVRAMTLPGRLVSTIAPLLAVMRHLNAQLAYSDETIARVTAHDARVQRLRTVPSVGPVTAAAFVATLDDAQRFRHAHQVEAYLGLVPRELSSGETQHRGHITKAGPPRMRWLLVQVAVSILRRRPPEAEALHTWALHIAARRGKHIAVVALARRVAGILSALLRDGTTFDPRRSPRPVVAATVPAAVTG

SEQ ID NO: 362520 - protein, 329 aa, unidentified
MNNAGIDTSNKTLDVVVRKKGKSLDCVQFDNDYAGHMAIITYLRKHKVTRVGIEATGYYHLDLALELDDAKDIEVMIINPRASKNFARAMMQRNKTDASDANVLAEFAERMDFVKWTSPVGEVLDIRACGRRLVSLGKEKTKAKNQLHAFSRTRRTPRFVIDDIHLSIEQIEAQVDKLISHALRLIKQCEFLKERYRRLTSMKGVADKTAIKLLGELGVLAMDMSAKQWVAHAGLYPRAFESGTSVKKRTYIGKVGNRYIREALYMAALSASSHDPHIRGFYLHLIEDNGLTKLQAVCAVMRKMLLAMHGMLKDNKPFDGARFYNLKHS

SEQ ID NO: 362521 - protein, 316 aa, unidentified
MYLGIDVSKLTIDCCLIADGQNHQKKFQNNKGGFEQLIKWLQSHKVTDKLHCVCEATGTYYEALAEYLYLRYTITVENPRKIKGYAIAELQRSKTDTQDAKLIAQYCQDRKHKLKAWQPPAKEQKQLQEIARYLDYLKQQRATEKAKQHEAPDYIKSHIQTTISNLTAQIQTVKKQLLQFYKDNPSYNNLRKRLKTITGIGEQATAVLLSTYKRHEFKNAKQFTAYLGLDPRKYQSGTSVNGKSRISKIGSSEIRKSLYMPAVVAYRCNAFPEFVGRLKNKGKHIKLILIAIMRKLAVIAFTLLKNGQDFQVERYK

SEQ ID NO: 362522 - protein, 343 aa, unidentified
MKITAIGLDLAKNVFQVHGVDERGHALVKKTLKRAQLAAFFASVPPCLVGMEACSGAHFWARKLQGFGHTVRLISPQFVRPYVKSNKTDAADAAAICEAVSRPDMRFVPIKSIESQGLLVLHRARQGFIRSRVAQTNQIRGFLAEFGIIIPQGAYHIQPRVAEILEDAEIALPGTVRELLLQLVAHVRYAHEQEQLLEARIKRWHKDNEASSRLAQIPGIGPLTASALVASIGDVSAFRNGRQLAAWLGLVPRQHSTGGKAHLLGISRRGDTYLRTLLTHGARSVIICAKQKPGYEQSWLGRLLKRKHHNVVVCALANHNARVVWALLKHDRQYRADFSPQAA

SEQ ID NO: 362523 - protein, 445 aa, unidentified
MSEPMPLAKSEPEWAAFAAIDWADQKHFWRLVPAGSSQQEQGELENTPEAVEAWAAALQQRFGGRPIAVCLEQVRGALVYMLSKYAHLVLFPVHPTMAARYRETFCTSGAKDDPGDTASLLDLLMRHRERLRPLQPDTVETRLMQFLVEERRRTVNEKTRQSNRLTDCLKLYFPQVLRWFDGVDTALVGDLLERWPSLEELRRAHPGTLRKFFHEHNCRSEERNQERIDAIYQAVPASHDAAVLEAGALTARGLVALLRTLRDHIDKLDRRIAELVATHPEGALFASLPGAGSVLVPRLIVAFGTRRERYESAYEMQCYSGIAPVKEASGKTSWVHFRRACPKFLRQTFHEFALHSIGQSEWAKAYYQHLREDEHKSPHAAVRSLAYKWIRIIFRCWKDGKPYDEEAYLNSLRRRGSQLGAALAPATGLGWQTVAGFQKLSENKA

SEQ ID NO: 362524 - protein, 368 aa, unidentified
MNNYTLEVARTAGAKELKNQKAAKAKRIVIGTDVHKNSYQAARKIDNGPIGAVAKFRSQEELLLYVEKQKEQAEEVVVVYEAGPLGYVLYRALKARGLRCYVCAPDSREQKRKRRKNNTIDTRTLTSNLFNYLHGNERALQLVRVPTEEQEQARWQSRQHDQLVEERKRLGAKGNALLLSRGFGSWKNWWRPKAFSRLSQLVPGWLLELLETWVDLLRKLDEKIRRAKVALAQRWSGPRPKGAGAPSLVQLQSEVLDWGRYSNPRKIGCLAGMVPSEWSTGDRQWQGSITKVGVPAIRRVITEMVWRIILFQPQYRPVQKWQEVLRGSTRGLKKKAVVAIGRQLMVDLWRLQTGRVSAQELNLVMIGG

SEQ ID NO: 362525 - protein, 536 aa, unidentified
MGMLVGQKLPGASALGRPFVVQCGCSPDSQDPKLTGAPCSPFARLVPVRRDVDSGGFRRLGEDPDEQHTVVDSDRVWKSRILLPKDGALMSRRQATSHVTMRCVYANAAGLDLSQSEIWAAVPADRTPTPVHKFGTFTPDVLALADWLTACRIDTVAMEATGVLWIPVFEVLEAKGFQVCVVNARHIKNVPGRKSDVQDCQWIQYLHSVGLLSRSFRPDAEMAALRAYIRHRSSLLDSRAAHIQHMQKALQQMNVQLTQVLSDITGVTGLAIIRSIVRGDRDPDHLAALRKPGCARSAADIAKALTGNYRPEHVFALKQALALYDNYTAYVQECDAEIEQYVTSLTPAADDLPPLPPSEKRDSNSKNAPSYDARALLYRLTGVDLVAISGLNETSVQTIVSEVGLDMTRWPTVKHFCSWLGLAPHNDISGGKVLRSRTLRARNAAGQAFRLAAQSVSRSTRSVYGAFYRRVKGRLGAEQAIVATAHKIARTFYYVLKNRTAFHDIGAAEYDRQAQEREVAHLRQRAKKLGFTLVPA

SEQ ID NO: 362526 - protein, 347 aa, unidentified
MRFYTKTHKHYCGIDLHARTMYVCILDQEGQVLLHRNLPCDPERFLRTIAPYRDDLVVAVECIFTWYWLADLCAQEGISFVLGHALYMKAIHGAKAKNDKIDSKKTAALLRGGLIPQAYVYPPEMRATRDLLRRRLHFVRHRGQLLAHIQNTHHQYNLPAPGKRIAYRANREGIGEGFEDVSVQTSLAADLALIDHYDVVIRDLELTALRQARGHDLDSFERLKTIPGIGKVLALTILYEIHDIGRFPRVQEFASYSRLVKCQKSSVGKVLGTSGSKIGNAHLKWAFSEAAVLLLGKCPEGKKVLARIERKHSKGKALSILAHRIGRAAYFMLARKRAFDLERFVRL

SEQ ID NO: 362527 - protein, 342 aa, unidentified
MEQVNIIGLDVAKRTFQLHGSHSNGGVAFRKKVSRDKVLTFLSEQPRCVVAMEACGSAHHWGRAIRDVGHEVRLIPPVYVKPFVKRQKNDTADAEAIAEAASRPTMRFVAVKTEEQQARAMLFRTRDLLVRQRTQLINALRGHLAEFGVVAPQGPANLSPLSQAVEEPETSLPLLVVELGRIYLDQIETLSKKIAEFEKATAREAARATTTRRLLTMPGVGPITAMAIETFAPPMEVFKRGRDFAAWLGLVPRQHSTGGKQHLGKTSKMGQRDIRRLLIIEAMAVVRWAIRKGDPTATWLHRMLARKPRMLVAIALANKMARSIWAMLTKAEDYRVPVVATP

SEQ ID NO: 362528 - protein, 343 aa, unidentified
MKLIRVGVDLAKSVFQVHGVDCSEKAAWRRKLSRAEWIKAVQQNVPLEAEIGMEACGSAHHWARELRALGYSVKLIAPQFVKPYVKSNKNDATDAEAICEAMSRPGMRFVSVKTVDQQDVQAAHRIRSELMDQRKAKVNQIRGLTAEYGLVAPREILHLRRAIPLWLEDQENGLSPRFRRLLTGLWDDLRVLDGRLVELDQEITTIAASDPVAKRLQQLRGVGPLIATALVATVGDASQFSNGRQMAASLGLTPKQNSSGGKERLLGISKRGDCYVRCVLIHGARSMINSAKTKTDPLSLWVLRIAATRHPNVAAVALANKTARIAWAMIRHETDYQPALAAH

SEQ ID NO: 362529 - protein, 344 aa, unidentified
MIWVGLDVHKRFSRMGCFDPATGEVQDLGSVSNEALALEKALEELPCPKTVVLEAGRSSYHMAGLLESMAEEVWVVDPGEVRRLQHTISKTDRRDAAALAWWAAKGVLKPQWRPDAQTMDLRELTRGKTALTRMSTQVRTMIRMLLARHGHECPHRDLMGERGQLWLEEVELEGHAAQMLAGLREILVVVQAKVDDFERMVEQTSKKHPVAWRLRTIPGIGPFLSLALAVEIGDINRFPGPTQLRGYSGLVPAVYQSGDKDARGPLTKAGNRWLRYAAVLAAQRIGQMKEPDPRLKRIFLSVAFRHGRNPAKIAVARRLLDLIYYMLKKGQDYRTSKPRVATTA

SEQ ID NO: 362530 - protein, 387 aa, unidentified
MKTNQIKPIHDRNTSTPSPGQSNPAVAAAPAPPAPLRHVFTLGLDVDLLNVVTAIQCDRGAIALAQKFSRARLLAWVQKQTAAGHEVHTVYEACGFGYTLHHALVAAGAHSLVTTPMRLSPERRRKNDRLDARALCVRLSRHREGHAHELKPIRIPSAAEQQRRELGRQREFFKRERGRLENHGRALRIEFEHETLPAGWAGPRKWKQIAPQCSEFVRGQLEPVVLQIRACQARMQELTARIQATVAQEKIPTGLGALTVALLEGEVCDWKRFRHRKAIGSYTGCCPSEHSSGGVQRFGHIDRHGNKHVRVLLVEAVWRLLRWQPDWHARVKYLQKLKHGASLKKKIAVALARQLAIDLWRWRTGRCTAAQLGWTVESAKDEAGTAQ

SEQ ID NO: 362531 - protein, 346 aa, unidentified
MKITTIGIDLAKEVFQVHGVDEHGKTVLRKQLRRNKMTNFFANLEPCLIGMEACGSSHYWARKLSEFGHTVKLMSPQFVKPYVKTNKHDMADAEAICEAVSRPNMRFVPIKNVEQQAILSVHRARQGLVKARTAQANQIRGLLAEFGIVMPQGIHSIAKRVPDILEDAENVLPGTMRHLLKRLNDHLAELNRQVEELELQIKLWHKNNEASQKLEAIPGIGPITASAIVATVGDAREFKNGRQLAPWFGLVPKQCSSGGKQLLLGISKRGDIYLRTLLIHGARAVVRYAENKAEPGSWLRKLIMRRNKNIATVALANKNARIIWALLAKGTTFHPNHASAACAAAS

SEQ ID NO: 362532 - protein, 344 aa, unidentified
MHITSIGIDLGKTTFHLVALGERNKILLRRKFSRSQLLACTANLPSSLIGLEASSGSHFLGTALREQGHQVRLIPAQFVKPYRKSNKNDFIDAEAIAEAVTKQNMRFVPIKTQEQLDWQAMHRVRDRLVQRRTALINQIRGFLLERGLTFAARPIHLRKNLPAVIEDAEQKLSSRLRWLLDRLWQEWQQLESNIQAMSDELEHISREDARCRQLRQIPGFGPLVSTATVAAIGNGAAFRRGRDFAAWVGVVPRQYSTGGKQKLFGISKRGNIYLRRMLIHGARSVLVRVKRDTGGFGEWVHQLAQRAPRNKVIVAIANKLARIAWAVLSSGKDYRHQPLQQAAA

SEQ ID NO: 362533 - protein, 319 aa, unidentified
MQSNPMIHGVDVAKDELVALCLGQDVVCRLRNCAADIRSWLRKLPKGSIVAMESTGEYHQLLARLAYAAGMRVFVLNARRVYFYAQALEVRGKTDRVDAGVIARYVCEHGHKLHEWQPAPALHGRIDELIRRRAVLVVKRESLRQCMRGCKDVQAQFKQLDHAIDSLVSFIDRKINELVKQDERLRTARGLIQTVAGFGPQGSALLAVLLERVPFANSDSLVAYSGWDPRPADSGRKHGRRKLTKCGPSYMRKQWFMVGFSAARAKALKPLYQALLARGLASTEVFVILGRKLLRAAFAVWKTKQPFDLARFLGTPKTA

SEQ ID NO: 362534 - protein, 374 aa, unidentified
MKDGQKFIGLDVSKDIIAIGIADEGRGSPRYHGKIQNTPEAIRKLFKKLGDPEKLLVCYEAGSCGYSIYRQLLSMDIECIVVAPTLIPKRTGDRVKTDRRDSVRLAQLLRAGELTAVWVPDEIHEALRDLIHARSDTREDLQKARQRLVHFLLRHEIRPPQGVRNWTIRHRDWLNKLTFEKSSLRIVFQEYLHSIYEVEEKKKRIEAQVHEEPIKSEHAPVIQALQTLRGIAEVTAVTLVAEIGQFSRFSNPRQLMSYVGLVPKEYSSGSSRWQGPITKIGNSHIRRALVECSWAYRHRPSLKGELLKRQAGQQIEAQKIAWKAQHRLNLKYNRITARGKAGKFAVVAVARELLGFIWAIGCSIEDQKLNQSVA

SEQ ID NO: 362535 - protein, 372 aa, unidentified
MSQDSITWVGLDAHKNSIKVAAYFPGQPDPVEWQEATTVEAIHRLARKLRRDAPGLVQCCYEAGPTGYPLQRQLRSLGLCCTVIAPSLTPVKPGSRIKNDRRDARKLAELFRAGLLTEVHPPSERDEALRDLCRCRDDVRVDLLRARHRLSKFLLRRHCIYRETKRHWGSRHWAWLEQLRFDEPMSQATFDSYVLAVQQLEERQQQLDVQLAAFGAEEPYREPAAWLRCFKGIDTVTAVCLVAELHDFRRFQSARQLMAYVGLVPSECSSGERERRGSITKAGNRHVRRLLVEAAWHHRFRPALSAPLRKRREGQPARVLAIADRAQERLAARFRRMSFRGTSSPKVIVAMARELVGYIWAVLHPDATLTRA

SEQ ID NO: 362536 - protein, 354 aa, unidentified
MIIIGVDFHPEFQQIAWLDTDSGEFQEKRLMHREEADSFYRALAAGGQKVRVGMEASGFGRWFERLLAELQVELWIGDAAEIQSKRARKQKTDRQDAQHILKLMLKDDFPRIWVPSWENRDLRQLLWHRHRLVQARTRIMNQLQAVAINEGLRCKKRLWRAGGRQQLESFPLGPWASRRRSDLLELLDGLSPTIAELSQAIEQEAEKRREAQRLRTHPGVGALTALAFVLIIGDVKRFQCGKQIASYVGLVPLEKSSGNRRRLGHITKQGSSMLRFLLVEAAQVTVRGVPEWRSHYFRLMMRRGRKTAKVAMARRLAVRLYWMWRQGLDYEELVKFGSHAGQPGNRDGVQRSLE

SEQ ID NO: 362537 - protein, 357 aa, unidentified
MRFYTKQHPFYCGIDLHARTMYVCILSQDGEVVLHRNMPASPDALLKAIAPYREDMVIAVECIFTWYWLADLCAQERLSFVLGHALYMKAIHGGKAKNDKIDSQKIAVLLRGGMLPQAYVYPAPMRATRDLLRRRMHLMRKRAELLAHIQNTNSQYNLPEIGKKLAYKGNRDGVAERFLDPAVQKSVEVDLALIDHYDRLLSDVELTIVQTAKQHNAQALYRRQSVPGIGKILRLVLLYEIHDITRFPRVQDFVSYCRLVKCAKESAGKRYGTSGKKIGNAYLKWAFSEAAVLFLRNNAQGQKFLARLEKKHGKGKALTILAHKLARAVYYMLTRDTVFEMDIFLNGYGSRAGEPAA

SEQ ID NO: 362538 - protein, 308 aa, unidentified
MRDVIGIDVSKAFLDAYRTTTKEHKQFPNNPRGCCALLRWLDHTKVIFEATGSYHRVLEKTLAETGIAFVKVNPRQARRFAEAAGFMAKTDKIDAAMLAKMEAALDLKESTAKVELLHVLKELSMSRLGLIKDRTATANRLQIAQQALVRRQLKARLRFIEKQLAELDGALIELIESDDQLNRRYQILRSIPGIGAITAITILIEMPELGSLDSKEAASLAGLAPLSRQSGTWKGHAYIKGGRRTLRCAMYMPAVVALRFNPNLKQKYTALREVGKPAKVAITAIMRKLIIIANALLKQERMWSDKTA

SEQ ID NO: 362539 - protein, 339 aa, unidentified
MKLYAGIDLHANSHYLGIVDEQSKVVFKHSMVNDLTKTLSVLEPFRSELMGVVVESTFNWYWLVDGLMEHGYRVHLANPAAIQQYEGLKHVDDERDAIWLANLLRLGILPEGYIYPKQERPVRDLLRKRLQLVRHRTSHILSIQNMVSRSLGVRMTSNEVKGLDEQQVAELFKEEHLFLAVRSGVEVIRYLGEKIRGIEKVVKGHVKLRREFEKILTLPGVGQILGLTIMLEAGDIRRFPAVGNYASYCRCVRSTRLSNSKPKGEGNRKNGNKYLAWAYVEAAHFAIRDYPEVSRYYHRKAAGANKVVAIKAVSHKRARASYYIMRDQVEYDPSKLFHY

SEQ ID NO: 362540 - protein, 420 aa, unidentified
MEIDHGEQHLIERVAAIDIGNAEMVCCVRVPGAGRARAQEVRTYSTMTPNVLEMTDWLTGLGVTRVVMEATSDYWKPVFYLLEEQVPETWLVNARDVKHLPGRPKTDRLDAVWLCKVAERQMLRPSFVPPPAVRRLRDVMRYRTDLVAVRTAEKQRVEKLLEDAGVKLSVVASDIFGVSGRAMMAALIAGERDPARLADMALGRMRARTGLLEKAFMARFSEHHAFLLATMLARVDTASEDIAAMDARVTAVLDEELHDAAARLTSIPGIGAVTAVAILAEIGTDMTRFPTAAHLCSWAKFTPLTSESAGRTKGRQSTGHGNRYLARTLGEVAVMAGRSHTFLGARYHRIARRRGKPRAIVAVGRSLLVIIWHLLSHPGTTFTDLGADYYETRINHQRTARTHIRALEGLGYQVTLAPAS

SEQ ID NO: 362541 - protein, 430 aa, unidentified
MTIPKPTSLDAVLVAIDIAKHRNEVLIEIPGRARRRRITVLNRRDEHDRLVEALRSIGMPVTIGFEATGNYHRTLAYRLLAEGFALRLVSSVALARTREALTNGWDKNDPLDAQVILHMLRIGATQTFHDPLAHGLNDIQELSKTHEIVSRAKTELWHRLLTHYLPLYFPEAERFRGNARSDWFLAFLEAFPTPGSITALDKEAFIAAAWDVVGRKVSKRRLLADIYETATESIGLPVDLGSDAVAMFRLVLAEGRSLIRQRDEIERRAEAMLAEHSDYRLLKTIPGVGPINALTVLAEAGDLRRFRHHRQFLKFCGLDLATHQSGQFRGRTKLSKFGNARLRRALWMAGQIAIRQRDNSFRDKFERYVAADRHNADLRRKAYTAIAAKMARTAHAVIKSGVEYRPFFEGGGSGRENPSLCGPSRRVATS

SEQ ID NO: 362542 - protein, 376 aa, unidentified
MGRWINPLPVHRNIFDRRRLEAPWAQTRDLAWAPPVTWRTSPNSRMGFKARIYKEGHCTMSHTQEGQSLGIDLSKEWISAELFPSGQTWTADRTQDALREWIKELPHGIILAVMEASGGYEALPAGLLHEAGIPVAVVNPRQIRGFAVAMNLKAKTDEIDAGLIAQFAHTIHPTPKPMSSPEQERLKELLRRRGQLMKMLTGEKNRLGMAGDPRVRNSIETHLEWMVRELSNIDKELTSLIKASPLWKAKEDFLKSVPGVGTITARSILAGIPELGSLNRKEAASLAGLAPFTHQSGKWQGHSFITGGRPGVRRSLYMATLCAIRFNPDISTFYARLIQSGKPKKVAIIACMRKLLTILNALMREERFWQISSFSA

SEQ ID NO: 362543 - protein, 358 aa, unidentified
MQIIGVDLHTRQQAVAMLNVETGEIVEKTLQHEGESVREFYSTLAGPTRVGIEATGSMQWFLELMEELGIDCQVGHPAKIRAAEPRKQKHDRRDAALVLQLLVENRFPSIWMPSREQRDVRSLILYRHQWVRIRTRVQNALQAIALSHGLRRGSSLWGKAGQQAIASLSLTCYTAERRTALQSLYRQLEEQIDDLNRKVEELAWQRPQARRLMTHPGVGPITALATETFLGEPKRFVDGKAVASYVGLIPSEHSSGGRQRLGGLSKQGNPLLRFLWCEAVGHAVRKDAELQRFYQHKLVQKGLGKAKVAAARKLGIRLWILLRDQIDYQEFCRRGRLRQKHGGAHAGMPACEHDPAQQ

SEQ ID NO: 362544 - protein, 461 aa, unidentified
MSRKKPTGKQKGAVQKRVDWKALEIVHPDAAGIDVGGSEHWVAVSPDRDPEPVRRFGCFTADLREMGQWLVQRGVRSVAMQSTGVYWMPVFEVLEQHGLEVYLVNARHTKNVPGRKSDVQECQWLLKLHAFGLLNNSFQPSDEIRIARTLWRQRGNLVAEASSVIQRMQKALTEMNVQLSNVLSDLSGMSGMKIIGAILEGERDPWKLAALVEPEVKATPEDIAKSLEGNWREELLFVLRQQVELYRIYQQKINDCDLQLRKHLESFGSKRDLQAQPIGPKPKGKKGSRNAPAFDLRTELYRITGIDWAQINGIDVLTAQTVIAEAGADLSAFPSEKQFASWLGLCPTNEQSGGKILNRRTRKVVNRATVAFRNAASTLLRSQSYLGAQYRRLRTRLGAPKAITAMARKLACLFYRLIKHGQPYVDKGTEYYEARYREQQIRSLAKRAQKLGLQLIIPKTA

SEQ ID NO: 362545 - protein, 475 aa, unidentified
MAQQDTSKSVPRAGQIRPAKQMPIVHPHAAGIDLGNKAHFVCVPADSVPPGQSPVRQFGVFNPDLDQMVDLLKQCRVETVAMESTGVMWIPVFQKLEAAGLEVLLVNTKGLKHVPGRKSDMLDCQWIQLTHSYGLLSGSFRPADIICRLRTLMRQRENLVQGASSETQHMQKAMQEMGVHLHVVVSDVTGDTGLRIIDAILEGQRDPEELVKLRDWRVRKSTVAEMKAALQGDWREELLFVLGQSRRVYTFFQEQLAILDAKIIALLAEIPEAPPPPAESWLAPGSDSSGAPEQSAGGERPVSGSADHVSVPAQGKGQSPGRKKGKFKPNGAGNPLPKDVSPQLAKIYGTDLTLIPGLGILGVLIILSEIGADLKGRWRDGDAFAAWMGLCPGSKISGGKVLSSRTPHVVNRAAVLLRLAALAIGRTETCLGLFYRRIKARHGAPKATTATARKLAVLIYHLLSNDVVSGFHCVC

SEQ ID NO: 362546 - protein, 355 aa, unidentified
MNKIKTNFEGQTIFVGMDIHKAHWNLGIHLNDMFVKSVHQKPNPFLMADYLKQHFPGANYKAAYEAGKFGFWIQRQLTKLGIECLVVNPADIPKSQKDTLQKTDPRDARNIGIRLQSGVLHSIHIPDEQQEADRIFFRHRKRIWKDLTRCKNRIKGCLAFSGIDIPEQYDNASWSHNFILWLKSIDCRQISRRSALNYMIAQMEFLRVELLQISNDIRKMMREQRYKTNYYLLRSIPGIGPLTAASLLVEIGDIKRFETFYHLNSFVGLLPMEHSSGEKESKGILTVRKHRQLRSDLVESAWTAKRTDPAMSLYFQEQVKRKDSKIVIIKIARKLLNRIRYVLINQTAYEYGIVK

SEQ ID NO: 362547 - protein, 339 aa, unidentified
MQLYAGLDLHSRNTYIGIMDKAFKRVFGKRVSNDLPLIIKTLEPFQDQLEGIVVESTFNWYWLIDGLMDAGYHCLHLANPSAMKQYEGIKHTDDQHDAFFLAQMLILGILPQGYIYPKKDRPVRDLARKRLFLVHHKTAHILSLQSLISRCCGQRVSANDIRKLTVENLQQLLTEEHVVLSAQANLETIGFLKQQIKRLEKAIQKKVKLNKAFQQLLTVPGIGLILAMTIMLEVGDIGRFPKVGNFASYCRCVSSKRLSDGKSKGHGNRKNGNRYLSWAFTEAAHLSRRYNVLFRSYYNRKLAQANTSLATKALSNKLARICYYIMRDQVPFRGNLQSQ

SEQ ID NO: 362548 - protein, 351 aa, unidentified
MLQKTNAVAVRTIGIDTGKNTLHLIGLDQQGTIVLREKLARGRIGRRLANASPCLIGIEAGMATHYVARELLALGHDVRQVPPAYAKPFRQGHKNDFRDAYAIAEAVLRPSTRCVPVKTDDQLDLQALHRVRSRLVGQRTAVINQIRSFLLERGIAVRQDLGFWRQQLPEILAKRTDVLSPRMIGIIEDLSGDWRRLDERIERVTEEIEQLAHGSESCRQLMTVPGIGPLIASAMVAAIANGAAFAKGRDFAAWLGLVPKQMSTGDRTILGHISKRGNRYLRTLFMQGARVILLRPANWARHSFGPWLRAAAKRLHHNVLATALANKLARIAWTVLAQRRNYETRVVTETA

SEQ ID NO: 362549 - protein, 339 aa, unidentified
MKVSTLGIDLAKNVFQLHGVGCNGQTVLKKKLTRDKFLPFLMQLEPCLIGMEACASSHHFARVLRQYGHEVKLIPPQYVKPYVKTNKTDAADAEAICEAVARPNMRFVQIKTAEQQAILVLHTERNILIRERTACANSMRAILAEFGIIMPRTLSQLYKKIPEILEEYDNELSPFVRCSVARQLEHLQGVEDQITLIEQELSSWAKTQPACQRVLKVPGVGLMTATYLVASVGNGQQFHSAKQFAAWLGLVPREFSSGGKQRLGRISKRGDRYFRYLLVHGARAVAAVIERHKDNMPWLYRLLSKKAYNVAVVAQANKTARILWSMLVHHTEYRTLSAV

SEQ ID NO: 362550 - protein, 443 aa, unidentified
MAARKRELTVMHPNAAGIDIGSASHYVAVSPDRSKDAVREFGCFTEDLEAMAHWLLDCGVDVVAMESTGVYWIAPYDVLESHGLKVHLVNARHVKNVSGRKSDVLDCQWLQQLMTFGLLSGAFRPEGNVCALRAVSRQRDALLREQARQVQRMQKALTQMNVQLTNVITDIVGKTGQDIIRAIVGGERDPKKLAKLRNYRIHASEKEIAKSLEGNWRDEHVFCLGQALALFDTYQKLIAEADAKLEELIKPMRHHQRTLPPNKKKGRGKNAPSFDVLNMLYQWVGVDLTRIGGIDVTTALKVVVEIGTDLSKFKNAKHFASWLGLCPGTKISGGKKLSGASKRLPNRVAQALKLAAQGLHHSQCALGAYYRRMAARCGAGKAITATAHKLARLIFAMLTKGEEYVQRSQQQYEESMRKRTVAYLKRKAMILGYRIEPIKVEAV

SEQ ID NO: 362551 - protein, 340 aa, unidentified
MLYIGLDVHEKYTKIQAMDEEGFLAMTKTIPTTSEAFDLVFSQLPDTARVSMEAGRSYWWLSQLLNSYSAVSQVSVVDPRRCRNLAKELSVLSGYGRAKNDRIDAEMSAEILRRGMSPAIHLPTLEQLEQRTLVRHRTQLVQQSTSSGSRLQGLLSMHGVRISTRSLVDDFQAQLESLESLPAYVRSVLHHLLGQIQLYQRQMQHCERRLSKCLPPSHPQIKILTSAPGIGIVLARIILTEILSISYFDAPNYLISYAGLAPVENESGGKKGVVELNHHCNYYLKYAFVQAAHTARHYPKYRKKYNQDVKRHGKIRAKLNLARRIAKSVYWMLTRQEPFH

SEQ ID NO: 362552 - protein, 323 aa, unidentified
MKEKKSMMEETVCVGVDIAKSTMDVAVSNSKEAQQFANDDDGISRAVCYIASLKPAGIILEATGGLEMPLAAALQAACLPVAVINPRQVRDFARATGALAKTDTIDARILALFGVRIRPEIRILPDKLTCEMGNLLTRRRQLVEMITAEHNRLLQADDDILQGIETHISWLEEALSKINEDMENRIKRSPSWHEKDTILKSVPGVGKVVSSTLLIELPELGKLNRRKIAALAGVAPLNRDSGTLRGKRTVWGGRAKLRAVLYMASLVASRRNPVIADFYQRLLDAGKAKKVALVACMRKLLTILNAMMRTMTVWRTQTVSVDA

SEQ ID NO: 362553 - protein, 400 aa, unidentified
MFAGIDWGGSFHQVCLINAHGHVIVQQRVQHDLAGLTELDRLLLVHRNAASRLRVAIERADGLLVEHLHTIEVEVFCVSPQISARARERYRLAAAKSDAFDAFVLADTLRHEHRHWRALSPASPALAELRAISRDRDRVVIAQQATENRLRAVLEAYHPAPLHLFSSLDRDITLDFVTDYPTPEQAARVGEARMQQFCRRHGYSGRADPTVLVERLRPHLLSAAEGTEAGKAFSATMFTEELRLLNAHLRAYDKRLVELLDQHPDTPIFTSFPGIGPVVAAALISEMGEDRGRFPAPEALLAEAGLSPVTRASGRTRQVRFRYAANRRVRHMIDWWAFVAAREDAWSRRIYDDARARRQGKYRALRGLGSRWTRILWRCWTDHTTYDPAIHHKHQEPAQA

SEQ ID NO: 362554 - protein, 378 aa, unidentified
MPSETTVYVAVELSVSSWLVAARSAGAEKSRLHRIQGGDTTTLLALITKLRSRASTTLGRAVDVACCFEAGRDGFWLHRLLTAHGIAAYVLEPISILVNRRARRAKTDRLDAEGMLRLLATWLAGDRQVCSMVRVPTPEEEDAKRPHREREHLVQERVRIENRIEALLFTQGIRKRPSLRSWVRDVAEPRTGDGRELPCLLRIELERLRRRLVLALELIHAVEADRAEALAATADDKMTQKIAALQRLRGIGPNFAAVLVREVLYRSFANRRQLASYVGIAPMPYQSGGMDRDRSISRAGNPRARTTLIQLAWLWLRYQPGSALATWFRERVGMLQGRTRRISIVAMARKLLIALWRYVETGVMPEGVEIRAEADATA

SEQ ID NO: 362555 - protein, 384 aa, unidentified
MKVVCGLDVHKDSVFCCILCANGEKIQHKFGVLTEELVTLRDLMVSEGVEECAMESTSIYWIPIWRVLEGSVKLHLVNPYFIKQLPGKKSDVNDAEWIATCLSKELIASSFVPDDKIQRLRQYDRRIFDLNASISRNLVKLDQCIQRCNIRISNYISTTDSKGYRSIVKLISQGVTDAEVLVKELHGRTINRHGRETLVKALTGVVSETDIDIIKQLVEEIELQQRHKDEAQQKMTALCMEWFPQEVENLQTIPGVKERSSTSIIAEIGTDMTHFQTPKKLVSWVGLRPRNEESAGKIKARGITHGNRFVRKTMIECSWGAARMKDSFFAEFSYRQCIERRKNKMKVQVAIARKILVAVWYVLSQGTQYIKPTDHYTATDMTAV

SEQ ID NO: 362556 - protein, 375 aa, unidentified
MNQHSRAFVGIDTSKLRNAVAVAEDGRDGDVRYLGEIDTTEAATRKLVAKLAAKYRQLTFCYEAGPTGYGLYRLIRKLGHDCIVAAPSLIPKKPGDRVKTNRRDAVGLAKLSRAGELTAVWVPDERHEAMRDLSRAREAARKDLKGKRQQVSSFMLRLGRHYPGKKTWGPAHMNWLMLQKLEHREQRIALEELLGAVRQESERVERLEQAIRDAVPEWSLAELVTALQAMRGIDLVAAVTVLAEIGDLSRFQNPRELMGYLGLVPSESSTGDTVNRGGITKAGNSRARRILVEAAWSYRHPPRVSREKQIKVAAAPRAVREIAWKAQMRLCGRFRSLTRKGKRPTVVATAIARELSAFIWAINREVVESHATANQ

SEQ ID NO: 362557 - protein, 371 aa, unidentified
MDQSSKILYVGLDVHKESIAVAYAPDDRGAEVVSLGAIGTRQYDIDKLIRKLQSQGATLVFVYEAGPCGYGLYRYLTGKGFACHVVAPSLIPRKAGDRVKTDRRDAMTLARLMRSGDLSSIYVPGVEDEALRDLSRGRDDAMQDLKRSKRRLKSFLLRQDIRYEGRATWNPAHLRWLAEVVCPTPPQQIVFQEYLRAVSEQQERRQRLEHELHEAVQGWRLYPMVQAIQALRGVELTGAVILMTELGDITRFENPRQLMSYLGLTPSEYSSGARRRQGGITKAGNSHARRALVEGAWAYRYPAKVSRHLQLRLETLPTEVQAISWKAQVRLCKRYRQLTARGKHVNQVVVAIAREMAAFAWAIARLVPLAA

SEQ ID NO: 362558 - protein, 318 aa, unidentified
MSDHDAFVVMGIDICEATLDWSRSDDGRYASVGYNRAQLEQLIRELREHPVSLVVCEATGGLERELVGTLIAAGVPVAVVNPRQVRDFARSNGQLAKTDRLDAGSIAAFGVAVRPRIYVPKDELVQALADQMARRQQLVAMRVEEKNRLDRAAKAVRKNIRKHVEWLDRQIRALDSDIDGMLKASPQWQAKLELLEGLKGIGPVMRASCLAWLPELGQLNRKAIAALVGVAPFACDSGTMRGKRVIWGGRKVVRDALYMSALVATRHNPTIKAYYQRLIQRGKPKKLALVACMRKLLTIINALFKTKQPYRERALAAG

SEQ ID NO: 362559 - protein, 355 aa, unidentified
MESIGIDVHKVNSQVCVVGENAEVLEERRIQTDRERFAAALGKRPKARVLIEASTESEWVARCLEQLGHEVIVADPNFAPMYATRSKRVKTDRRDARTLAQACRLGAYRPAHRTSEEQRRVRAGLAVREGLVRTRTRYISLVRSLLRREGIRVRSGAASSFSARVSELSLPEWLAAEMAPVLAVMDKLNGEIRAADDRIAKRAREDEVVGRLCTAPGVGVVTAVAFRATLDEAGRFRGAHQVECYLGLVPREMSSGEKQHRGGITKSGNARARWLLVEAAWAIRRSRTAESAGLRMWAQRIEARRGKRVATVALARRLAGILFAMWRDRTCFEPRKIRTVEPGRLRTVAVAPKAA

SEQ ID NO: 362560 - protein, 370 aa, unidentified
MIRLARAMQYLINTELSSHEETRFEFNRSTGAIKLGIDVHQDFYVVVEQVEGGNPKPPQRFDKQAFLHWASKLKQRGAEVHAVYEACGFGFSLQRNLTALGIKCHVVCPQKLDERNKRVKTDGLDAKALCLKLDRFVPGNRDALALVRVPTEEEERSRAIHRQREQLVGARKRLEAQGRSLMVNHGVDPVQNWWKPRTFATLPVPHWMRELLLNSQPILLALQEKIAVLTLQLQNAAAPNQPRGLGKMTSVVIDREIGDWHRFNNRRQIASYTGLCPGEYSSGNTRLQSCVTKHGNPRLRAALVELAWRLVRFQPNYKPIVKWRQILAKGALATGAARKKAIVAVARQLAVDLWRIKTGRLRAQELGLIN

SEQ ID NO: 362561 - protein, 315 aa, unidentified
MNKERLNYSHYIGIDVSKLTIDVCIDCKKDTFSYENSREGFNKLWLDHRASLNGSLVVVETTGWHEKAVLAFLVMKKVTVHRAAARQVKRFIQSYGTMAKTDSIDARALSKYAKERAENLLPYSKPDKTQDKLQVLYSHYTDLTKALVQEKNRIQSPGYDCVVKSIKKIINILEQQIAIVIDKINKIIMSNEAMKNKFHILKTVDGIGDKTAIALIASMPELGSISRKQAASLSGLAPHPNDSGKNNGYRRTKGGRHNIKEILHMAALGAIRKKDSVLSEFFRHLVNNNHKKKMVALTAVKRKIIVIANARLAAL

SEQ ID NO: 362562 - protein, 452 aa, unidentified
MVSRAKTSGKGMETINANAAGIDIGSERHYVAVDPGKSNEPVRSFGCYTPDLEEMARWLIDCGVTTVAMESTGVYWIPVYQVLEQQGLDVELVDARHVKNVPGRKTDVVDCQWIQQLHSYGLLRGCFIPESRIAVLREYWRHRASLVESVSREILHMQKSLEQMNVQLHKVLSDITGVTGMKIMRAIVAGEHRPLVLAGMREPGVKKSESEIISALSGNYRAEQLFTLKQALEVYDFLHAKIMDCDKKIEECLSGFESKADPQQMVAKPSKCKTRRKNQPHFDLHKQLYRISGVDLTAIDGIDSLTAQSIICEVGFDLSMFASEKHFASWLALSPENRITGGKVRTRRTKRSGNRVATALRLAAQSLHASKTALGAFFRRVRARKGPSKAITATARKLACLVYRMLCYGMEYTDLGQQQYEQRYQEQQHLLLQKRAAALGYQLTPLQKGGVS

SEQ ID NO: 362563 - protein, 400 aa, unidentified
MSGLKGSFDGFVGIDVSKDKFDACGITGDETKLFQFSTTMDRKGFEKLKGHLAAVSISSVLIGMESTASYHVNLFSYLVSEGYRVILINPLLISNYVKMQLRKTKTDKKDAVVIAQFLLTNGDTLIQRATPSLISDLRDLSRQRESLVDEMTSLKIEIKQLLNITFPELEHMAGIFTKSILKLLQQYPSAFALRDADLGQLSQMLIADSYGHKREAFAAALIKAARSSIGSKSFAKEMILKQKIALLLHIEDALQEITGMFIEMSRKLMDEEIDLMTSLKGIGEKAAANFLIEMGGDINQFERSGKIIAMAGLDPAVYQSGKHEGKGRITKRGNRHLRKIIWLMTTKVIQYTDTFSVYYLKRRKEGLPYKMAVLATAHKLIRVIYAMLTHRTTFCAQVNS

SEQ ID NO: 362564 - protein, 345 aa, unidentified
MKIVGCDLHTRYQQIAMLDAETGEGVERRLEHESGEARAFYAGLAGRVRVGIEATGHTRWFERMLGELGHELWIGDAAQIRASMVRKQKTDARDAAHLLELLLSDRFPRIWRPSLAERDLRQLVWHRQKLVWMRNAVGNQLHALAMGEGVCRKKKLFTKKGRVELEGLKLGPWASHRRQELLRMLDQLDASRKELDQAVAEQAEQNPAAVLLMTHPGVGPVTSLAFVLTLGPVQRFERSKQVVSYLGLNPREHSSGGRQRRGTISKQGNPMMRSLLVEAGHTAARLDAELRQDYQRLKLRRGSGVAKVAIARKLAVRMYWMLRSPASYAQLVRMQGSPRGTLVGP

SEQ ID NO: 362565 - protein, 345 aa, unidentified
MWHVGLDVHWRTSTGCILDENGREVKTATVKGGWDKMLAWLDREVRRPFAICYEASCGYGALYDRLRLKASRVVVAHPGQVRLIFRAKRKTDRIDARKLARLLFLDAVPPVYVPSADVRSWRRLIETRRRLVAKRTRAKNGLRSLLRSHGVRPPMRGLWTRRGLAWLREASWPSEGAALERDLLLEELETLAEQVHRVTRVLDRLGRGHPGVMLLRTIPGVGPRTAEAVVAYIDVPDRFADSRQVGAYFGLVPRQDQSAAVNRLGHITKEGPPSVRHLVVESSWQVIRRSPTARARFQRISGGQKERRKIALVAVGHWLVRCMHAMLRTGECWRETVPAASSAAA

SEQ ID NO: 362566 - protein, 342 aa, unidentified
MLIIGCDYHPGMQQIAWFDNESGECDELRLEHGTGEAEKFYRELKRRGVRVRVGIEASGHTRWFERLLAELEMELWIGNPAKIAAQRVRKQKTDRGDAQLLLQLLREDRFPRVWVPSPENRDLRQLLWHRHRLVQMRTRVKNQLHAMALNEGVQRRSRLWSKQGRAQLESFALDRWTARRRHDLLELFDQLTPQIAELSQAIEQEAERRPEVQRLMTHPGVGPITALAFVLVLGTPDRFRCGKQVGSYLGLIPCEDSSAGKQRLGHLSKQGNTLLRYLLVEAAQAAVRCDAQWRRCFVHLAMRRQRNVAIAAMARKLAVSLYWLWRNAEDPPAAPQSGSHVG

SEQ ID NO: 362567 - protein, 405 aa, unidentified
MYYCGIDIAKYKHEATVIDKTGKALLDSISFSNSAEGCGKLLILFERLSIAKDELLIGMEATGHYWLSVYGYLLENGFEVKVINPIQSEAFRKMYIRQTKNDSKDSFIIAQIMRFGQFSATSLSDEVIIAMRQLSRYRLALVDNCGDCKRRVIALLDQVFPEYDSLFSDTFGVTSKEVLAKYPTPEDMLSVPTGKLTNLLGKASHGRFGKQKAEQLKSMAAGSFGVSFAKDAFAFQIRQLIEQLNFLETQIGELEEQIAVLLKQTGSYITTIPGIGDTLGAIILSEIGDIRRFDAPGKLVAFAGLDVRVSQSGEFTGTRQKISKRGSPYLRRAIWLAASRAAFCDPVLSKYYQGLRARGKHHLTAIGAVCRKLCNIIFAILSQNRPYQMLPPNDKKTSVSSFSPT

SEQ ID NO: 362568 - protein, 395 aa, unidentified
MKHILSFDIAKGKSVYCFIDEKKNVIRDATMIEHKKDEFDALFNFASKYENLVVIMESTSIYHLPVENYFRSKAIDTIVMNPKLVKQYRDTLNKSKTDKLDCFKIARCYLGTIDNLYQKQDEYFMFNPLARQYWSLVEGQTRLKNRYKQLIEIVFPEFNLLFNDLYSDLALNFIHDFPHPVLFVNRRNDYLMNYLKTKNGTTQAFRFKNKVLKMKELAKNSLCYVSVDSLQVQNLIQVIEMIQYHKQEIKKIKNQLINNLKSTKLFKIINSIPGFGDFSTALFLAEVGDITRFNERKEFISFIGIDSVTSQSGVASYQGPISKSGSKFARTILFNVVTTLIQISAHIDKDNPIYLFFRKKQSEGKHHYKCIIACENKLCKIIYKMCTSDCTYINK

SEQ ID NO: 362569 - protein, 423 aa, unidentified
MEVLHECVAGLDVHKDNVVGCVRTVSGDKTTREHRTFDATTDGLLALLEWLTSCRCELVAMEATGVYWMPVWRILSDGAFKLIVVNAAHIKAVPGRKTDMKDSTWLADLAAFGLLKASFVPDEEQHELRALMRTRKQLVREQTRHVQRIQKTLTEANIKLDSVISDIMGRNGRRMIEAMITGVRDPRKLAALADQRLKATPKQLYDALHGRLTDHHRFLLQLHLGQWDTLDATIKGVDREVATRVFRMDTEGTAAKANFSDLIDQLVTIPGVSRLSALTILSEIGTDMSRFATAGHLVAWAGMCPGQNESAGKRKRTRLRKGAPWLKTMLVQCAWAAKRKKDSYYKAQFFRLQSRRGPQKAICAVAASLLTAIYHMLKDGTIHQDLGSGYFDQRPPEIKVKRLVNQIAKLGFEVTLQPIAKAA

SEQ ID NO: 362570 - protein, 371 aa, unidentified
MKEVTTRYVGLDVHKATISIAVADDGVAPVLFGTIANDATAVRKAVSQLKRGGKLVAAYEAGPTGYGLHRQLTQLGVDCVVVAPALIPRRAGDRVKTDKRDAIALARLLRSGDLTPVWVPGQQDEALRDLVRSRFDAKDDLRRAMHRLAKFLLRQSIQAPPGIKPWSARHLQWLETLRLDHPTSQLVFQDYRVAVHAARERVRRLEADLERCAEQSPRLGTILALQVLRGVAFLSAVTIVAEVGDFRRFPNAPRFMSFTGLTVSEHSSGQSRRQGRITRAGNRYLRHILVQAAHNARFAPSLEGDLKRRLKDVPADLVALSVTAQNRLHRRYRHLDRRIGRPKAVTAVGRELAGFVWAIGQRMEASAQQLC

SEQ ID NO: 362571 - protein, 297 aa, unidentified
MKEYIGVDLGKRNAVVVKKDRHGKITSKITVPVTQAALESYFSKQDRRSQVVVEATGNWMYLYETIERYTPEVVLAHPLKTRAIAEARIKTDTIDATTLAELLRLDGIPKAYIPPREVRDMRELLRYRASLVSIRVGIKNKIHAVLTKNGIDCIFSDVLGRSSQLWLKNLNLRACYRQEIDGYLRIADALKVSVDEITKTIKAEVAENPQAQMLMGIPGISYYSALLILSEMGEVSRFPDAKHLCSYAGLVPSIYSSGSKTYNGRITKQGFSVVTLDFGGDQHPCGQWRCEFPEGVP

SEQ ID NO: 362572 - protein, 312 aa, unidentified
MTSEKFVGIDVSKRWLEVRVHGEEESRQIGNDPDGFRHLIEWLQQVQPVLIVFEATGGYENRAVKALSAAGFCVAVVNPTRVRRFAEALGILAKTDKIDAEVIAHFASVVRPARNAQQTPLEEQLSAFVERRRQLLVTLVAEKNRLSTCPEVVRADIEALITFLEERIEQLGDEIRTCILQNAEWQERAEVIDSAPGVGEVTASTLVADLPELGKLNRQKIAALVGLAPFNRDSGPKRGKRRIFGGRAGIRKTLYMATLSATRFNPVIRAFYQSLLKRGKEKKVALIACMRKLLVILNAMVRKGERWHFSPA

SEQ ID NO: 362573 - protein, 350 aa, unidentified
MQIIGVDLHTRQQTVAMLNVETGEVIEKTLRHEGDSVREFYSTLPRPTRVGIEATGSMQWFLELMEELGIDCEVGHPAKIRAAEPRKQKHDRRDAALVLQLLVENRFPSIWMPSSEQRDVRSLILYRHQWVRIRTRVQNALQAIALSHGLRRGSSLWSKMGQHAIASLSLTRYTAERRTALQSLYRHLEAQIEDLNRKVEELAWQRPQARRLMTHPGVGPITALATETFLGEPKRFVDGKAVASYVGLIPSEHSSGGRQRLGGLSKQGNPLLRFLWCEAVGHAVRKDADLQRFYQHKLVQKGLGKAKVAAARKLGIRLWILLRDQIDYQEFCRRGQLRQKHGGAHAGMPA

SEQ ID NO: 362574 - protein, 429 aa, unidentified
MDNAASLRNAIVAWIGLDWADQKHDICWQAADSATLEHRVVEQKSEALHTWVAELRQRFPQGLIAIGLEQSRGSLFYVLMNYAFFLLYPIPPKSLKDYRQALYPSGSKDDPVDAQLLLEFLRKHPQRFRPWRADSAETRQLALLNEHRRQLVDDRTALTNRLTTLLKGYFPQALDWVKDLRTPLAWDFIDQFPSLERAQQASRLAVLKVYRTHTRRPAGEIEALCDEIQSARPLTTDRAILESSALLAPILVAQLRALAAGIERVEQQLGNLFAAHPDHARLQSFPGAGKALAPRLLAAWGSDRQRFASAANMQCFAGPAPVTSRSGKSQWVHRRFAYPTFLGQTFHEFAAQSRLKSPWAKAYYQQMREKGNDHHPAVRALAFKWIRIMFRCWQDRTPYDEARYQQALNRRGSPLAQTLRRSANPPACA

SEQ ID NO: 362575 - protein, 358 aa, unidentified
MKKHTTGKEAKLIIGVDFGDRHSEVCVMDESGEVRVRTQLKTTAAAFEKFFKAMGPARIAMEVGTHSPWVSRLLKSWGHEVLVANARKVRLIYQSPSKSDRRDAEALARLARLDPKLLSPISHRSGERQSHLALLRARDALVRARAQLVNHVRGAVKAMGGRLPACSTVAFATKASSHLPDAMKLALEPLLKVIEKLTEQIEETGRGIGQVARQHYPEVVVVTQPTGVGLLTGLRFVLTLEEPGRFRRNRTVGAYLGLTPRRSQSGDQDRQMHITKAGDSEMRRNLMQCSHYILGPFGPDSDLRRFGMKLAERGGKSAKKRALVAVARRLAVLMLSLWKTGEVYEPLRHAQILARVPA

SEQ ID NO: 362576 - protein, 340 aa, unidentified
MNISVIGLDLAKSIFHLVGLDRHGKQGLKKKLRRTQMLPYFANLKPCTVAMEACASAHYWARELRKLGHQVKLLPAQHVKPYVRGNKNDYNDALGIAEASRVPQMREVAVKSIEQQSIQALHRLRRSAVGDRTALCNQVRGLLAEFGITLNQGVATLRKAIPCLLEDAENGLHAPCRDALSLKYEQLCQLDELVKNLSDTIQKEANVHPEMKLLQSIPGYGPILSSTFYSVIGDGKGFRKGRDASASIGVVPRQHSTGGKNVLLGISKKGDKYLRSLMVHGARSLIKHAHKKEDALSVWVTALIERRGKNKATVALANKLTRIGWAVVRTGKPYKENYAV

SEQ ID NO: 362577 - protein, 418 aa, unidentified
MAETFEWFVGIDWGSDTHALCLLNIAGEIVGTRTVAHTAEAVHEAVQWLCAQTGAAPAQIAVGIETPRGALVDTVIEQGFAVFALNPKQLDRFRDRFTAAGAKDDSRDAHVLGDAVRTDRRACRRVRPADPLRVQLREIARLRDELLEQEGRLTNRLREQLYRIDAPWLTLCPAADEPWLWAILAEAPDPAGWPQLPRRRIAATLRAARIRRLTADDVRTALQRPRLTVAPGVVDAVALRLAALVAQVRLVHDQRTTAERHIDRVLDRLATAPGPDGEPGEHRDVEILQSLPGVGRMVTATMLGEAGDAVADRDYAMLRAHTGTAPVTKRSGKRLLHVQMRYACRKRLRAACYHWSRTSIQHDAAARAYYTRLRERGHSHARALRSVADRWLRILIAMLKTRTLYKPSQFIEPAAVSA

SEQ ID NO: 362578 - protein, 425 aa, unidentified
MNTTDFAATLGLDWADQKHDLWIHPADGTKSEHLRLEQTPEALHEWAAKLGERFGRRRVAIGIETSRGAVISALLAYDFIVFFPVNPKALKDYRAAFAVSGAKDDRTDAMLLEEFVRLHRDKLRALEPDTELTRKLGGLTANRRHLVDQRTRFVNQLHSLLKTYYPLAETLLDGRMTTPMAADFLARWPDLSTLQKAAVKTLRAFFYQHNSRGGKKMEERLAAVKTARALTQDQAIIAPARCLTTALAGLLKVLHQAIAGLDQDIARDFDQHPDAALFRSLPGAGPAMAPRLLAAFGTRRERFASAAEVAQFYGIAPVVKQSGNTKTTHMRSRCPKFGRQTFHENAGCALMKEPWAKRYYEDQKGKPDGRHHMACRALAFKLIRIYYACWKQNTPYDGQRYLKALEKHSSPLHQKLQTPTKNTGE

SEQ ID NO: 362579 - protein, 409 aa, unidentified
MNPLYVGIDVSGRNNVVFLMKPDGSKIKNFSVPNSKDGSQKLVKEILAALTSFALTDVIIGLEATSVYGDNLVCFLRENGSLVPFNRKIHVLNPKQVNKFKESYNDLPKNDDVDSFVIADCLRFGRINKEVYLDDYRYKALQNLTRARFLAVQNLTREKQRFMNVLFKKYSSLAQEKVFSDTFGTTALAVYEKFDSADILAYMDLHELTAFLREKGKNHFPNPEEVAKAIQKAARSSYRLPKTVNDSVNQVLSISITSMKALEAQIKEFDKAIAAQMELIPNTLTSIKGIGPVYSAGIITEIGDINRFPNQAKLAKYAGLAWGQHQSGEFEAQNTRLIRTGNRFLKYYLGEAAMSLVRCDAEYSRFYHLKYKEVNKYQHKRALALTARKLVRLVYRLLKDNRLYIAPKG

SEQ ID NO: 362580 - protein, 389 aa, unidentified
MLQLNDLSRSLAALNQDSTLVVVIEMGQSSWLVRGMIPGVSRQPLKKLASDESGLLKLLHRWRSEAIRTGREIERIVVAYEAGRDGFWLARWLRARNTEAFVIHPSSVAVSREHRRAKTDRLDTELLMRAFLGWLRGERRHCSMAAIPTIEEEDAKRPNREREKLVGERTRTVNRIKATLARLGILPLKPTLRKAEERLAGLRTREGAPFPENTQAELRRDMVRLRLVSVQIKEIEQERLRKLAAGAPAQKGPQAMIRLIARVLGIGIETADMLVNEILSRHLRDSKAVARYAGLTGSPDESGRRRREKGLARAGNARVRRGMIQLAWRFLRFQKESALAQWFRARTADGRGGTRKTMIVALARKLLIALWRLATTGEIPQGVSLRPAA

SEQ ID NO: 362581 - protein, 429 aa, unidentified
MRKRQAAAGADVAKEFSKICIMTPDMQVFKRLHVAHNKLEDFEKLFGLLDQVEEDFGCSTTVVLEATGHYHKILLRALVKRHIEVVVINPIQSDSISNLNIRKAKTDRIDAKKLAALFHVKEDDLRVVTQVDTQIDALKDLVRQYHAYQDEMTVHKLRLGSFVDRVMLGYDTILALSSASGLAVLKAYPSPRALLKARKSTVLRLLRESSRKGPTWAETKYEALMAMAKVMVKLGEPGLYLSEMVRREIAQIEYIQGLCAQIVADVEALVDESRRTDASDLAQHMDLLDSIPGIGFLTAAALIAELGDPNAFRSAQAMTAYAGLDPNVVQSGKFKGNRVSISKRGSRFLRRVLFYIASANIRKLRNGTYANPPIKDYYERKCQSKPKMVALVAVMHKMIYIIFAVLRDRKPFELRDPKKHAAALMGKVA

SEQ ID NO: 362582 - protein, 364 aa, unidentified
MLIIGCDYHPGFQQIACVDKDTGELSERRLGHREEAEQFYHELKQRNLVVRVGMESSGHSRWFERLLQELGFELWIGDPAEIRTKRVRKQKTDRQDAQLLLQLMLENRFPRVWVPDAENRDLRQLLWHRHRLVQMRTRVMNQLHVVPLNEGFRRKKALWRRAGRKELESIALAPWASRRRQDLLDLLDQLTPKIQELTRALEEEVEKRPVTRLLMSHPGVGPLTALAYELVIGTPERFHCGKQLASYVGLVPEEKSSGDRRRLGHISKQGNVLLRFLLVEAAQVTVRSQQVWRSNFFHLAMRRGRKIAKVAMARKLAVHLYWMWRQGCDYGQMQKLGSHAGEPGNPDGVQSTTDVMIGHPAPSQ

SEQ ID NO: 362583 - protein, 344 aa, unidentified
MKKNLFFIGLDISKADFAASIYQTPGQSIVTKEAIPNDPKGFEMLLLWLKDHHIDKKNCRICMEATGVYSQAIAYYLLFAGFPVSVEPPLKVKRAFDPIGHKTDPVDSKQIAEYAYRFQDELTSWQPRDEILEKIRQLLSVREQFTKQKVALKNAIQAYARQRVQVILIKKAQKETLAQIEKQIARIDKELARLIKQDPEILQKANHLKSIPGYGMLLAAHLLVITENFTKIQNSKRLASFVGIVPYQHQSGTSVFKRAKIRHFGPGPSRKLLRLAAQSVATHDVTFRGYYLRKLAQGKAKALVLNNIANKLLKVACAMVRNNTRYIKEHRSIHPMYLKSLKSA

SEQ ID NO: 362584 - protein, 330 aa, unidentified
MHIGVDVGKECLDICYPDGSKEHIGNTKRSRAKLIRKARAMSAIVSFEATGPYEENLADECLAAGVSAVRLDAWKTRKYAESQGMLEKTDAIDCEMIRDFAASLKPEQLRFVRPMSDGYRRLKRATSVRRNLIKAKTLVVNQLENILDKDVRASVSRVIDALERQIEKMDALCTEAIRSDEKMNALAVRFEQVVGVGPVLISTMLSSCPDIGSFTSKGIAKMAGVAPIENKSCTIRKKSKPRRGRRELRSALYMAAVSACHSNHILEPVYKRFTDRGMPRRVALIALARHIAILMNYIAKYPDFNPAADPKKVALLALPKRKPGRPRKNP

SEQ ID NO: 362585 - protein, 368 aa, unidentified
MSTNVMYVGLDVHKNSINVAIAEAGGEVRTYGSIGGELKDLEKVIRKLRSQGTELHFAYEAGPCGYQVYRFLKEKGYPCLVAAPSLIPRRPGDRIKCDRRDALSLARLLRAGELTAVRVPDPDDEAMRDLVRAREDAKSVERRAKQRTAAFLLRHGHRYPGKTTWGQRYWRWLRERVMPHTAQQIVLQEYLAAVQEATARVDRLTAQIRELLPQWHWEPVVRALQALRGVSLLVAATVVAEIGDLSRFQNPKELMAYLGLVPSEHSSGSTVRRGGITKTGNGHARRVLVEAAWAYRLRARITRTLWQRLTGLPQPVCDLAWKAQIRLCGRYRRLLARGKAKNTITTAIARELAGFIWAISQALEGSPA

SEQ ID NO: 362586 - protein, 349 aa, unidentified
MLHVGLDLSRRRLDVCVLSDEGELVEELAAPPDSDGLRYLVGKLAHHGQPVRAVIESMTGARFIHDTLEQLGWDVLIADAQRVKGLAPVACKTDRVDSRVLAVLSHRDLVPAIWLPDPRVRREREQARFRLHLVKHKSMLKHRIHATLMTFGHPCPVTDLFGLEGRKLLERFEIPQPWRETVDASLYLIDYLESEITAIERELRAIGADHPYVPLLVTVPGIGWVLAFTIAAEIGDITRFPSAKKLVGYTGLCPRVRQSGDSDRRGPLSKQGPRYLRWAMLETTMHALRHPAYRERYQRTKQRLGKQRGARVAQVDLARKLTEAIWHMLSTNQPFDPAAAGGATLRLTA

SEQ ID NO: 362587 - protein, 403 aa, unidentified
MNSVGIDISKGRSTVAVMRPFGEVVISPFEVRHTDSELSELARQLKSLNGETRVVMEATGNYHAPVAKLLHDAGLYVSVINAKLVHGYGNNDLRRVKTDKKDAVKLANYGLDRWLTLPRYVPEEDTRLLLKNCYRQYRQYSKVQTILKNNLISLLDTVFPNANRLFSSPIRVDGSEKWVDFVAEFWHCRCVSEKSQKAFTNKYQRWCRKHGYNFSEAKAHTIHAEACGHIDVIPKSETTKLLVEQAVAQLRATSAALAALKHEMQALASMLPEYPVVMDMFGVGPTLGSQLIAEIGDVRRFYSKKALVAYAGLDAPPNDSGDVTGRHKSMSKIGASSLRRTLFLVMSVYLQTAPLDEPVYQFMDRKRAEGKPYRIYMMASANKFLRIYYATVKAYLESLEHTA

SEQ ID NO: 362588 - protein, 420 aa, unidentified
MDTLNTTSFTAFIGIDWADAKHDICIQSAADDDEREFDVIPHKVELIDEWACTMRQRFGSPIAVAVELSKGPIVYALQKHDCFVIFPVNPSTLARYREAFQPSRAKDDPTDAELAVDLIIRHHERFKPLQPQSVEIRMLVSLVEQRRNLVADKIRITNRLRVALKQYYPQMLEWFDHIDTLLFCDFLTRWPTLLQVKRARQSTLRKFFHEHSMRFEHVLEQRLIAIKAATPLTLDEAVVVPHRLQALVYVEQLRVLLDAIKRFDIQIESVAKQHDDYALFTALPGAGPSLAPRLLVAFGEQRERYKSAAEVQKYSGVAPVTERSGKKHWVHWRWQCPTFMRQTFVEWAAQTINKSYWAGEYYRQQREKGSTYQAAVRALAFKWIRILYRCWQTRTPYDEVTYLKALERRGSPLLAARKLT

SEQ ID NO: 362589 - protein, 341 aa, unidentified
MKEHVASFSRMYVDLRVECLSTLAIPNGPGGFVKLSKWIRKLIDPSMPCQIVLEATGVYHETLACFLTEKGWPVSVVLPNRAKYFSKTLTVKTVNDKVSSQTLAAMGLEKKLDVWLPPDPIYNQLRQLTRERDQLKAESTQIKCQLHAEESGAWPNKSSIKRMNQRLSLIERQVEEVETSIREVVAESPEIDQAVRRMTSIVGVGMLTAVTVLAETNGFNLVRNKKQLVSYAGLDVVERTSGISVRGRSRISHRGNRYLRKCLYFPAMTAARHSNDHKALYNRLISKHGIAMKAAVAVQRKLLVMMYAIWKNGTIYDPNYESKKQQNELGQTRRPALTELA

SEQ ID NO: 362590 - protein, 441 aa, unidentified
MEKVISFEQVNEAAAGIDIGSEKVFVSPDGLLVENFGTYTSEYYRCINYLQEQGIKRVAMEATGIYWISLYNLLESAGIKVSLVNPKETKQKKGKKTDVRDCRWIQKLFSAGLLKESFIPEGKLLEIRYLVRERLDIIEMGSTYVNKMQRCLELMNIKLTQVISQVHGTSGMRMLKAIIKGERNPDVLLLLCDERIKKQKGVEVIKALEGNYNDTWLFMLEQNISLWERHQEQITQIDKRIEVLLEDLTTGKSVEEGVVGKIKPVRHHRPQINNLHETLVKFFGVNVTSISGVNSYTCLRLIGETGADMSRFETKKHFTSWCGLSAGHHQSGKRSKWVKQAPCNKAGQIFKEAAQSLENSKYIAIGSFIRRLKARRGASVAYKAGARKIAEAYYNILTKGTAYVERGLQQYEQQIKQREIATLKKLAKKHQVQIIEKQEAA

SEQ ID NO: 362591 - protein, 343 aa, unidentified
MITIGIDPHKRSLTAAALDPHSRLLSQLRLPATSQAATQLLAWAAAWPERRWAVEGASGLGRPIAQRLVAVGEPVVDVPAKLAARARLLGTSSARKTDLADACSVAAAALHHRRLRPVALEDQTVILRLLSDRRDDLIAERTRTLSRLHVLLADLHPGGANRELSATRAADLLRRIHPITGVDLERKRIARELLTDVRRLDRQIKTASQAIRTAVRDHGTTLTEVFGVGPVLAAKLLGHAGDITRFPDRDHFASYTGTAPVEASSGDVRRHRLNRGGNRQLNTALHLVAVCQIRDPSPGQAYYRRKLTQAKTPEEARRSLKRHLANVVYSHLVTDHRHRMRAC

SEQ ID NO: 362592 - protein, 404 aa, unidentified
MRFIGIDIASEKHVLAIVDEDGNALQKPVGFTEDREGYDKLLGLAATPEDALIVMEATGHYWQNVFVELVAAGYKVTLVNPLQTRRFAEVGLQRTKTDAIDAIGIARFGAQRKPAPTAIPDQVTQDLRELVRLRDRWMQELGDRVRQLHRVVDLTFPELTRHVRSLDSELATTVLSHWPTAAQLAKQSVRRVAATVYDGRHEIGNALAQELVTAAKTSVGKHQTYPYQVQTETLCEDIATLRHRLRSFDRQIRDALEQHEVGKLLTTIDGIGPTTAARLVAELGDISRFEHIGALAAYVGLAPGLKHSGKSTPMRAGLSPIGHVRLRAKLWMPTLTAVRKNPWLRAFYERLLARGKLPMVALTASMRKLLAAVLSVAKHRRPFVPQLPPHLVENQHAPHADPAC

SEQ ID NO: 362593 - protein, 412 aa, unidentified
MKLFVGIDVSSQDLKVCTMDSDGDTLDSFTVLNNYDGATHLRDKLLFLAKKQATKEIHVGLESTSVYSWHPAMFLHEDDSLRKLGSKVFTINPKLISKFREAYSELDKTDYVDAWIIADRLRFGRLPMTMVMQEQYIALQRLTRMRFHLVHNLTREKQYFLQHLFYKCSAFTSEVESNVFGHAITELLLEQYSLDEIGSMEMADLADYLKEKGKNRFPDPEKVAKCIQKAARSSYRLSKCVEDTIDILLATSIESIRTIKQQILQIDKAIERLLDGIPNTLESIPGVGRVYCAGILAEIGDIHRFDDQAAVAKYAGLTWRKHQSGNFEAEDTKRIKSGNRFLRYYLVEAANSVKRYDPEFRDYYQKKFAEVPKHKHKRALVLTARKFVRLVDALLRNDQIYTPGRKVNPANH

SEQ ID NO: 362594 - protein, 411 aa, unidentified
MDKENFIYVGIDLHKETHTAVMIDCYNQKLGEITFPNRPADFPKLVTKVKKCNTDGKEVVYGLENAYGYGRALAVWLIDKGYLVKDVNTAISHQQAKHRGAMYRKSDSDDAKAIALATLNMLDKLPDACPNDAYWSLGQLVHRRDNIMKQRTRLVNQLHEQLCIAYPSYKQFFNDISRPTALYFWEHYPSRKYLKGKSVEDLRAELVPVSHNKCSTKTCEKILDAVASDKVKNNAYQDARDMVTLSIVSDLQHYDSQLAEVDKMLEQMYKMLGCTLTTISGVNVITAVKILAEIGDIKRFSNANKLAQFAGIAPLHLSSSGKGKDVATKQGNRRLQATIYFLAIQMVQVSSKGTPRNPVVRAYYEKRKAEGKTSQQALICISRRLISIIYGMLKYGTEYRMPVVENAGEKL

SEQ ID NO: 362595 - protein, 423 aa, unidentified
MKSSGTQTFRAYVGIDWADTKHDFCLQERGSDRREFGCIAHQVECIDEWAKSLQQRFGTPVAIALELAKGPIVYALQKYDFLVLFPINPLTLAKYREAFKPSRAKDDPSDAELALDLLIRHPGRFAALRPQSVGMRTLISLTERRRELVNDKIRLTNRLTHTLKEYYPQALDWFDQHDTVLFCDFLTRWPTPLQARRAHQASLKAFFHAHNAHRPQIIAARLKAIKAAVPLTQDPGVIVPCRLHVMVLIEQLRLALQAIEQFDRHIAELAPTLPDYRLFAGLPGAGPHLAPRLLVAFGEDRERFQRAEELQKYAGIAPVTERSGKKTWVHWRWQCPTFLRQTFIEWAGQTINKSFWAGAYYYQQRARGSTYQAAVRALAFKWIRILYSCWKTRTPYDESKYLNALKRRQSPLLNNLVPIPQNA

SEQ ID NO: 362596 - protein, 459 aa, unidentified
MSRPHKKQKRLPTDATEGLPVLNLNAAGIDVGSREHYVAVPPGRDPRPVQQFGSFTADLHRLTKWLVACGIETVVMQATGVYWVALFQVLQDYGLDVQVVNAQHTKTLPGRKTDVQECQWLQKLHTFGLLNHSFRPAEATRVLRSYLRQRENLVTSASICVQHMQKALTEMNVQLANVISDITGVTGMAILRALVAGERNLHKLAQLKHKQIHATPAEIVQSLEGNWREELIFVLRQSLDLYDFHLAQIQECDRQIETHMQAMESKVDVSVHPMPPSRQGQKRRKHGPRFDVRQQLYRCTGVDLTRIDGLDVQTVQTVLSEVGVAMSHWPTESHFASWLGLCPDNRTSGGKVLQRRTRRVVNRAATALRMGAWNLIRSQSALGAKFRRLRARLGAPKAITAMAHQLARLLYRMLKFGTAYVDKGMEHYESKYRLQQMKWLHKQAAAFHLQLIPLQRGPE

SEQ ID NO: 362597 - protein, 359 aa, unidentified
MEHLAIDLGSKKSQICVRAADGTVVEERKLETLALGPYLASRPPSRVIVETCAESFRVADIALEAGHEVRVVPATLVRTLGVGARKTKTDKRDAQILSEVSCRIDLPSVHIPTKTSRERKTICGMRETLVGARTQVINCVRGWLRTQGIRVKGGADGFAERVREAHAAQRNAPVADYVESLLTTSEHLASQIRDADKRLSKLAKADSICTRMMSVPGVGPVTSVRYAAALDDRSRFSSAHHVESYVGLVPGEKQSSERQERLAITKAGSTRLRWALVQAAWTARNTRPNDPMVRWSLEVEKRRGKRVAVVALARKLAGILYAIWRDGTAYDPRRGAKAIRVPQLPELAPELELDDVASH

SEQ ID NO: 362598 - protein, 345 aa, unidentified
MEQSIRCGVDIAKIVFQIHGVNAKSGETIMVKKLARNEMLRYFANKPPMLIGIEACSGSHYWARELTKLGHTVKLMTPQYVAPYRRGGKNDANDAEAICEALARPNMRFVAVKSESQQAVLVMHRMRDQWVRERTSLMNQIRSYLHEFGIVINQGRAALAKTLPLVAESEILPLLFRQSIADLADRLTDLETRITALNKRIEDWSKQDTIAKALLELCGVGSITASAAVATAGDVSVFKNGRQFAAWLGLVPKQNSSGGKTQLGAITKRGDRYLRTLLVQGARTVMLAASRAQKSTQTTPMFDWIYKLQERRPNNVVAVAIAAKQARMLWAIMAKQQQDALGLAI

SEQ ID NO: 362599 - protein, 397 aa, unidentified
MPAVWVGVDSGKRTHHCVVINQIGMVLLSRRVNNDEAELLELIGAVVDLADGDQVCWATDLNAGGAALLITLLAAHSQRLLYIPGRVVHHAAATYQGSGKTDAKDARIIADQARMRTDLQPVRDADQISVDLRMLTARRTDLICDRVRAINRLRATLLEYFPALERAFDYSKNKAALTLLSEYQTPDRLRRLGATRLAAWLRKRGCRNSAAVAAAAVDAAHQQFTTLPAEPIGSTLVIRLAAEISAIDRDLVELDAQLTDRFRQHEAAEILLSVPGFGPVLAATFLANIGGNLNGFDTVDRLAAVAGLAPVPYDSGRISGNLHRPRRFNRRLLRTCYLAALSSLKNSPASRAFYDRKRREGKSHKQALIALARRRLNVIWALLRDRAHYQEPALAAA

SEQ ID NO: 362600 - protein, 346 aa, unidentified
MCQYVGLDVSMKEVSICVVDESGAVLARDSVATDPETITAYVATAAPDAERVVHESGQLSTWLTRELAKRGVPIVCIDARVAHKALSARLNKSDSADAEGLAHLARTGWFVEVHVRSEASDRVRTLIGARERLLRMRKELEAHVRGILKTFGIRMGPVGHASNRQSFRDQLAEAVADDPVLSLIAERMIPIHRTLCVSVETLEDELVALAGKSHTARRLMTVPGVGAITALAFMATIDDPQRFRRSTDVGAFLGLTPRRYQSGEIDRSGRISKCGDADMRRLLVSAAATLITQVRRFSPLKSWAVRLSGRKGFKKAAVAAARKIAVILHAIWRDETEFNWTKETVT

SEQ ID NO: 362601 - protein, 319 aa, unidentified
MAQNGLIVAGIDIAKDKADVCIRALSQRQTFPGTSEGRRQLISWLRKHKVTKAVMEASGGYEREWTRTLREKDIEVRIVDPKRVRHFAQSAGRLAKNDVIDSDTIGWFAEIFGEAPSQVHDAAREKLQQMVNARQGLLDMKTMLSNKGEHDVPEPVQKSHARLLKTIAVELAKLEAAITATIKATPHFAARAEIIESVPGLAGTTSAGLIAAMPELGQVSNEAISALLGVAPYDDDSGKRQGGRQIKGGRRKVRNLFYMACLGAATRHNPALKAFYRHLIAKGKKAKVALVACMRKLIVILNIMIARGEKWDASRYAAG

SEQ ID NO: 362602 - protein, 349 aa, unidentified
MTEQCRSYAGECVYVGVDVHKETYTVTCVCHKQIVKAATVQAEPASLAASLRRWFPGATLASVYEAGFSAFVLHRALTKAGISNIVVNPASLAVAANNKVKTDRRDSKRLAVDLADGRLRGIYVPTEEEELARLLPRTRAQLVEHRATLARQIKAKLHQFGLIAPSTRRLLSHRYLREIDAWTLPPELRASLKMLAEQWRFVTRQLIEMRRLLRAQATGQAAIDKVYRSVPGIGEVVARTLATELGDMSRFANERALFSYTGLTPSEYSSGAAVRRGPISRQGSSRVRHLLVETAWRALPYDVVLQTMFERIAATRGKKRAIVAIARRLIGRIRACFRQGTLYAVGTLA

SEQ ID NO: 362603 - protein, 412 aa, unidentified
MKKHSNSAKQCESSPRVSVLQDSREVMSELVAKLAKQLDGERLPVAELQDEARNAARPNLNGLTVGVDLGDQWSSYCILDLSGETLAEGQFATRREEIREFFQGLAISRVVIEVGTHSAWVQEVIAGLGHEVLVANPRMMEGSKRRRRKNDRIDAGKLARLGRVDPKSLYPIRHRSSQVRADLLVLRARDALVASRTELINTVRALVKTMGARLCSCSSEAFSKKAEMEIPTEFRETLQPLMRLIARLNDEIKSYDQKIEQLASKKYKHTQLLRQVTGVGPITALAYVLTLETSLRFANSRDVGPYLGLVPKQEDSGDSQPQLGISKAGDQMLRKLLVGSAQYILGPFGPDTDLRRFGMKLCERGGKNAKKRAVVAVARKLAVLLHRLWVSGEVYVPLGHASFARTAQAVAA

SEQ ID NO: 362604 - protein, 391 aa, unidentified
MIYVGIDVAKDKHDCFITNSNGEVLFKAFTISNNQDGFNVLYQRIESVMEDVTKVKVGLEATGHYNYNLLGYLIDKSLPTYVINPLHTNLYRKSLSLRLTKTDKVDARTIAYMLMSDVNLKSYSDTSYHNEELKSLTRYRFNKVKERAKLKTSVSRLVCILFPELEKLVPTLHMASVYALLSEFPGAKQVAGAHLTRLTNLLSDASKGRYGKDTAITFREAARASIGSNMPAKSLELKHTIKLILELGSEIEEIENEIKIIIDEINSPILSIPGINYRMGAMIIAEIGDFSRFDSPDKILAYAGFSPSTYQSGQLDSAYSHMEKRGSKYLRYALYNAAKYVCHWDATFAEYLAKKRAEGKHYNVAISHAVKKLVRVIYHLVKSNQQYMKVA

SEQ ID NO: 362605 - protein, 343 aa, unidentified
MQTIVTIGLDIAKSVFQVHGVDAIGDVIMRRQLKRRSVLAFFEKLSPCLVGIEACASSHHWSRELQALGHTVRLIPPAYVKPYVKRQKNDATDAEAICEAVTRANMRFVPTKTPEQQSGLLLHRTRHLFIRQQTAVINAIRGHLAEFGIVAPVGRHGVEELLNVVADPNDKRVPEIARACLSAFGAQLRRIKEQILEFDRLIRAWHRSNEMSMRLDEAPGVGPVLATAVVATVADPKAFRSGRNFSAWIGIVPKQYSSGGKNRLGGISKQGDRYLRGLFVAGALAVIRYAKIHGTKHRPWLTALLARRPTKVAAIALANKIARMVWAMMVKGERYKEPVALAR

SEQ ID NO: 362606 - protein, 345 aa, unidentified
MHRTRVGVDLAKKVIQVCIYKNKKVQSNIEMTPEEFLSWLINNKPVTIIFEACSSSNYWKQKSIAAGHDARLISAKLVSVVRQNQKTDKNDALAIVQATFMPDVTYIGGKTVEQQQLQSIKRLRELTVKQRDASQKQLIALLFELNIKITHRRGRIVAAIEAVLEDAENGLSTQCRRAIFLAQEHLKALLEAVRHYDDCIAKSVNTHPVCKRLMKLEGVGPMNAINLYIALGCAEIGTFSKGKDASACIGLTPIQHSSGGIVKLGSIGRFTKNSILRSQLICGATAAVQHAVKRKAKTKKDAWIQGLVERRGRKCAAVALANKTVRTAFAMLTQGTEYKAEILTA

SEQ ID NO: 362607 - protein, 351 aa, unidentified
MSVYVGIDVHRKRSQVAVIDRDGEVLANRNVPNGVEPVLGVIGGLPPGTPAAFEAAFGWGWLVELLEGYGFDPHLVHPLQCKAIASARLKNDKVDAAILAQLLRADLLPEAWIAPPAVRQLRALLRHRIQLVRLRTLLRNRIHAVLADHGHDRPGGCWSGPGRAWLACLELPAASREVVEDDLAVIDALQPVIDRLDGEVRQRARADPRVKVLTQLPGVGPFTALVILAETGDISRFASARQLASWAGLTPTVRGSDRTVRHGHISKQGSTWLRWVLCEAAQTAKRHPDFAASYQAIARRRGKKIATTAIARRLLARAWHLLTGAQAAGTTSGPARALPDREGVAQPRASS

SEQ ID NO: 362608 - protein, 414 aa, unidentified
MGNRTKNAARVNEKVMIVAIDIGKEKNTAYCRYKNGCDSKPFEFSNTHEGFKLFWEQVAKTKMVFNADKIIAGFESTGCYGEPLMHYLLKKPVILVQVNPMHTKRVKELADNSPNKTDRKDPQVIADIIQLGHYLSLVVPTGAAAELRQLTHFRESIMDDRIAIVNQLQALVGKIFPEFLMVMKEIKSKSALYLLEHYPFPEDIVRYGVKRLAKKLRTISRGRLGNERAQELVAMARNSVGIKEGRQSIRMRIQYTVQKIREYDTCIDEIEDQMKQYLHRIACSSSLMSIKGIKHVTVAGIIGEVGNFNDFHNGDALEKLAGLDLYEISSGKHKGQKRISKRGRSLLRKILYFASINVVKKGCIMHDYYQRLINGGKPKIKALIAVSRKLLRIMFALVRDKAVCRTNQLAQRAA

SEQ ID NO: 362609 - protein, 395 aa, unidentified
MFIVGIDIAKRSHEAIIIAEDGQVVRKAFSFRNNCTGYNLLLEQVRRLTLVKSQIVFAMESTAHYWLALYARLLKDGYAVMVLNPIQSHSLRELYIRKAKTDARDSLIIADLVRFGRCKASNVPQDKILALRELCRSRAYLVDMAADLKRKLIALLDRIFPEYESLFDSVFSKASIAVLSKYSTPQKVKNANLGKLTDLLMESSNGHFGEWKAHQLKEAACSSFGIDDSGGVYSTLLGMFLEQILSLTAQADSLEKQISVFFQEFNNPLTSIPGVGTVLAATILSEIGDITRFSSADKLLAYAGLDPSVKQSGEFKSNQNRMSKRGSPYLRRAIWLASTVAVHRDPMFQTYYEKKISEGLHYMNVIGHVSRKMTAVIFAVLRDGQPYQPILQSAG

SEQ ID NO: 362610 - protein, 381 aa, unidentified
MLDQTAHNPVPTVYAAIELSKKSWVVAIVQPAKGQPSIYRIKGGAFSDLVMRLRTATPGGERLLLCYEAGYDGFWLARSLQTEKIDCRVLDPASLQVNRRARRVKTDRIDVLMLVRALIAVDRGDRHVCSIVRVPTVEEEDARRSHRERQRLIRERTAHINRIKGLLFGQGIRGVEPRLRRSRIDFSDLRTGEGLPLPARLRAELEREYARLDLVETQLRVTEAERDTADAQDPSIEYKRNMLIQLRGVGPASAAILTREIFGRRFANRRQLGSYLGLTPSAYDSGSTTRCQGISKAGNSFARRVMIEVAWLWRKYQPNSALAKWYEERAAGQSPRIRRIMLVALARKLIVALWRYVEIGLVPAGAVSCANNGAALDAAAA

SEQ ID NO: 362611 - protein, 347 aa, unidentified
MRFYTNSHRYYCGIDLHARSMYICIIDHQGEVVLHRNMDARPEPLLKAIEPFREDIVVGVECIFTWYWLANLCAEHDIPFILGHALYMKAIHGGKAKNDRIDSRKIAALMRGGTFPMAYVYPAKMRATRDLLRRRNHLTRKRADLLSHIQNTNSQYNMEPFEANISYKRNRVGVAEQFADPDVRMSMEADLELIALLDDLKNRLELHIVRNAKNHDPQALYRLRTVPGIGPIISLVILYEIGDISRFPRVQDFASYARLVKCAKESAGKRSGTGGSKIGNVHLKWAFSEAAVLFLRGNPEGMKFRKRLEKKHGKAKSLSILAHKLGRAVYYVLKRDQAFDMEKFVRT

SEQ ID NO: 362612 - protein, 311 aa, unidentified
MGATVARNVGVDISKDTLDVAIHPEGNGFRVANTPEGHRALIKRLAGFEIARIVFEVTGAYHRLLQKALVEAGLPWVKVNPRQARRFAQAAGKLAKTDRCDALMLARMGAALELEPNLPVSPTVETMKEFVNARHALVKDRVAALNRQAIAVSTLIKRQLAQRLRQIEAIDKRLKTLRKADADVSERFDILTSIPSFGEGTANVLMVETSELGRLDHQQAASLVGLAPVANDSGQTCGKRSIRGGRPRARQALYMAALSAIRFNPQLKTKYQALIKAGKPAKVALVAVMTKLLILANALIRDNRKWAPTAP

SEQ ID NO: 362613 - protein, 356 aa, unidentified
MSQKLNSIVAVIGIDIGKNSFHIVGQDRRGALVLRQKWSRGQVEARLANLPPSLIGMEACTGAHHLSRKLQALGHDARLMPAKYVRPYSKGEKNDYRDAEAIAEAVQRPTMKFVATKTAEQLDLQALHRVRERLVSQRTGIINQIRAFLLERGIAVRQGLHFLRAELPGILAKRTDVLSPRMLRVIEDLAGDWRRLDERIESLSGEIDALARHDKGCERLMTVPGIGPIISSAIVAAIGTGDAFSKGRDFGAWLGLVPKQMSTGDRTILGSISRRGNRYLRKLFVQAAWVVLVKLGPEQWERYGLKSWIEAAKKRLHHNVLAIALANKLARIAWAVLHNGRAFECVKTNATASRPV

SEQ ID NO: 362614 - protein, 309 aa, unidentified
MLTAEADKCKTKVVVNTAVGVQALLAWCAKHGAQPAQLHAILEPTGLYHEQAATALPQVRVSLVNPAQARDFAKALALRSKNDALDSYVLARYGQTLSPALWHPAPLHARQLRALLTRREALSKDLLRELNRKEKSQFSPSAPLVDGSIDKAIAFLREQIKQIERAIDQHIDNHPDLKQDCELLNSIPAIGPQAGNAILAVMHNRHIDSAQSLAAYLGVVPVQRQSGSSLNSCARLSKAGPSQVRATLYMAALVGTRHNPHIRALYQRLLKAGKSKKAALGAAMRKQVHLCFGVLKNRIPYQPNYAMNG

SEQ ID NO: 362615 - protein, 355 aa, unidentified
MNSEKYIGMDVHKESISIAVMNGAGKIVMECVIETKASVILQFIHGLSGDLQVTFEEGTWAAWLYDLLKPHVTKLVVCDPRKNASMKEGNKSDKIDARRLAELLRLNHLNPVYHGEHGLRSLKELVRSYLTITKDLGRVMSRVKAIYRSWGIPCTGKQVYAPRHRAEWLGKISELGVRRRAEFYYQQLDALRALRKQVRRDLLAECKKHQAWKQLCQIPSMGPIRAAVLLGILQTPHRFRTKRQLWTYSGLGIETRSSADHRNVDGHLERAKKQISVRGLNQNCNHDLKNLFKGAAIVASSKPGPFQEFYTALLTQGIRPEMARLTLARKIATIALMVWKRGASFDAQHLKPQTA

SEQ ID NO: 362616 - protein, 332 aa, unidentified
MYNYIGIDVSKQTLKVFDETKEYEVPNEKGLKTFKKLLKKDYGKEWIETKLIYEPTGPYSNYLREFASTNKLKVYEVNPKKSANFAKVLGNRSKTDAVDAKMLYRFHLLLKESELFIPEIDKITEQLGSFIHSYEIIQKTRTMLSNHLHSMEYKSGADTKIKESIKKEIKHLCEMEENLEKETEAFVENNPETREDLNNLLSIKGIGVISAINLLYLFRKYSDTNRNEITALAGLDPVQRQSGSSLNGGRKISRAGDPILRKVLYLACMNSIQHNERIRMFYEHLVTNNHKKPKVALVACMRKILLVAHQIYVNKSEYKLLYIDNKNLCLPS

SEQ ID NO: 362617 - protein, 430 aa, unidentified
MEIVYPRSCGVDVHKSFIVAVICISESVKPKYIKKRFSTFNNQLIQFKNWLIENNCQNVCMESTGKYYIPVYNALEGHISNVVVANPKWVKAIKGEKDDNKDAKWIADLFKFGIVRSSYIPEKDIRVLREFTRYQYKLVNMRSSEKNRFQNALTTGNCKLDIVFSDIFGKSASAIVDTILSNDPYTSEDILSKVHAGCKASHEDILSAVDGIQLNQFQKDRIKIVQKHMEYLDSLLDEIQHHIDLMVANYEEYIQILCTIPGINRKSAITIISEIGTDMSQWSSHRKLASWAGLAPGCNESAGKKKSVKVSKAGVYLKPCLVQVAHAAVKDKNCDYYAAKFKKISKRRGKKRAIIAIARKILTAVYHLLKTGEVFNPTDMADVETTKKQRIEYVKNNLRNAFNQLSRTGLSEAEILQLIRKESTNSPQIE

SEQ ID NO: 362618 - protein, 423 aa, unidentified
MKFKQHDAQNQRIERITSNHLVIGIDIAKETQVARAVTYRGIELGRPCSFKNDDLGFQKFLSWIKSLQKQHNKTGIIIGMEPTGHYWLNLAWWLLEQGFEVVTVNPYHVKSNKENRDNSPTKSDLKDALVIADMVKNGYYSPLRLPTGNYQALRILMSDREFVVKQFITIQNQIHRWLDIWFPEYHRVFKDWSCKTSLVTLRLFPLPSELKTLSPEEVYAEWKPYMKRRASISFARALVEQAQQSIAQNIAPAQVKRSLLFLLDQYEHLSEQLKQLEQEAFSLLKVIPQAQSLLTIPGIGKIIVAGILAETGDLRMYRHGRQVLRLAGLHLGEDSSGKHKGQVRITKRGRSGLRKFLYLAVLHLVVNNEEFKSLHHFYTRTKKMKKVHSIIKLCGKLSRIMVGIVHQDLFYVPEKVVTATTAA

SEQ ID NO: 362619 - protein, 337 aa, unidentified
MEMLYAALDVHKQVLQAAVLDPGSGELRDARLPATREALREWALPLRGRVVAVAIEATSGWRWVWRELSALGFEVELAEPAQTRALRGKKRKAKNDRLDARWLALLLAKEMLPRSWIPPEDIQRLRDLTRLRQALRHDRTGWAQRLHALLAHEGWPCSRSQLLSMKGRRWLAGLRLDAHVRGLVDAHLAVIDAVSAQMAEIERELRLLARDDRRLVALQTIYGVGPIVACHLLAEIGDARRFRRADQVVRVAGLDPVVLDSAETRRRGKLSKQGSPHLRWALVQAAQHAAIKPANSPDGGHYLALRERIGSQRAAISTARRIAKRAYHVLAVLEDAA

SEQ ID NO: 362620 - protein, 345 aa, unidentified
MDHFAGLDVSVKETSVCIVDETGKIVREVKLASEPDALVAVLTSPSHHFKRIGLEAGPLSQWLYNALAEAGLPVICVETRHMRAVLKAQINKTDRNDARGMAQMMRVGLYRPVHVKTLRSQKLRMLLTHRKLLQSKAIAIDNDLRGTLRNFGLKVGMVGTAKFEARIKELVENLPDLAMLVEPLLVVRRVLREQIGVLHRRLLAIVRDDDVCRRLMTVPGVGPVVALTYRATVDVPARFKNSKAVGAVFGLTPSRHQSGESDRPGSVSRCGDEMMRMMLYEAAQTMLVVSTKWSWLKAWAMKIARRRGMKKAIVALARRLAVIMHRIWVDGTEFRWTREQAPIAT

SEQ ID NO: 362621 - protein, 385 aa, unidentified
MIHVGMDVHIRNSVLNAKDADGQPLARGRSGNTVFDLGEFFTPLMRRAKETGESIRVVMESTSNSRAIQRLLTRLGKEAGIDLTADVLHARKLRVIAESVNKCDRVDADILTELSRSNFKLPTCYMPDDDEFALREHLRARADLVRIRTMVKNRVHAILHRRGILTPAGDLFGPRGDTFLDQLDLDQAGRITLDRFRTLIDQLDESIKQSTTCLRTVMREPRWSKPAALLQTMPGIGLITALTILAELGDVSRFRSRAAVANYAGLVPRHRDSNDKRWSGHITRQGSAHLRGVLIEAAWMAAPRVPVYRALFDRVAQKKNKKTAIVAVARRMLEDAWMLLIKDEAFRYVPAFLGNAREVGTRMPASPEHRERRSRVSQAASSVAG

SEQ ID NO: 362622 - protein, 374 aa, unidentified
MSSNVCHQIIYLAIELSSSSWVIAYRVPRNDKAKLHRLEAGDGAGLLAFIAGLRHRLDPPDDASTLVVSCFEAGRDGFWLHRLLTAHGVINHVVEPTSILVTRGARRAKTDRLDAVGLLRVLAAKFAGDPGACRTVVVPSVEEEDAKRPHREREFLVQERVRIENRIAALLATQGVRERPSLRSWDADMRALRTGDGRPLPTHLVAELNRLRRRLSLTLEMIRELDAVREQALEAQHDSASRMVKALCTIRGIGVNFASVLTREVFYRTFDNRRQIASYLGLAPTPFQSGGMDRDRRINRAGNSRARKTLVQLAWLWLRYQPESSHAAWFRDRVGSLQGRIRRITIVALARKLLIAIWRFVTLGLAPEGAIIAA

SEQ ID NO: 362623 - protein, 340 aa, unidentified
MKVHVCGIDIGKTVFHLVGLSKEGHIVTKKRFSRKQLVTFTVNLPTCLIGIEACPGAHFLARILLKQGHDVKLMPAEYVRPFVKSNKNDYVDAEAIAEAVQRPTMRFVPVKNEAQLDLQALHRVRDRWMGRKTAVINQLRGFLLEHGITVAAGPAHLKRQVPSILEDAENLLSPRMRMLLLELRDEWNKLEEQIDASNQELAQFAKKEDGCRRLLTIPGIGPLTATALTAAIGNGAAFRKGRDLAAWLGLVPRQHSTGGKARLLGISKRGDPYLRRLFVHGGRAVLAQVKRERHQFGGWLDRLEARSPRNVAIVAMANKIARMAWAILTSGQSYNSAFST

SEQ ID NO: 362624 - protein, 391 aa, unidentified
MSQSDYSFWLDRLKQYLQDERYGKSVMRKYPHAVRRFLRDVAQHGQALEAISPTDVGQYLGRLRTRDQHALSTFSRNENRMAIHMLLRLVHDGDWPTQTMRDSAEDVAILVRLIAPEFVTPFRKGGKNDAADAEAIAVAARQPTMRFVTIKTVEQQAILSWHRARQGWVDERTALINRLRGLLAEFGIVLDRSRSTLRTALPRLTEDARLPVQVRALLLEAREQFTALDVRVARCDAEIAAHLVDNAPAQRLRALLGIGPLTASALVAMVSNASSFKNGRQFGAWLGLTPQQHSSGGKSRLGKVTRHGDGYLRGLLVQGARSALQSALRCLPERLSRLGRWIVDLFHRKGYHKTLVAIANKHARMLWAMLAHDETYDPLAWQRYRAPAATV

SEQ ID NO: 362625 - protein, 336 aa, unidentified
MEKQEYFFGVDVSKATLDIALVRDGELVLEEKISNDKKSIGKFFQKVKKSLGITSDRMVVCMEHTGIYGLIVLELLHQMKVRTCVEPALQIKQSQGMTRGKNDQVDARRIAQYAFKNRLELRFWAPQRPVLQRLQALLSLRDRLIKVKVQLETPIQEVTGYLEPDIVKSLASSSKAAIKGIEKDLKEVDKQIDELVRKDDTLKTLFDRTTSVPGIGKITGLYMIVASGEFERIKEAKQFACYSGVAPFEHQSGSSLRGRSRVSRMANMTMKKLLHLAAMSAIQWCEELRAYYLRKVEAGKNKMAVINAVRNKLISRVYACIKQKRLYEKTPQTALA

SEQ ID NO: 362626 - protein, 374 aa, unidentified
MKKDTTKTKASASGRKKLKNGKLTIGIDLGDRSSRYCILDEQGEVLKEGSLATTQNGFNQILGALPHSRVALEAGTHSPWVSRHLKKLGHTVIVANPRRVRLIAQSRTKHDRLDAATLARLAHADPQLLYPIQHRSEQAQTDLAMIRVRAGLVESRTALINTARGLTKSFGERLPKCDAGNVHAELAKPLPDGVRQAVEPLLEQVGELTQRIRDYDTEIEKIAAERYPEVQLLTPVWGLGTLTALTYILTIDDPHRFRQSRDVGSFLGLRPGRRESGQMRRELGITKEGDVYLRKLLVQCALVILSRGGRDSDLRRWGLKLAGRGVKNAKKRARVAVARKLAVLLHHLWVNGVVYEPLYNSSKQKQEQEQKAAA

SEQ ID NO: 362627 - protein, 371 aa, unidentified
MNKFTKYVGLDVHKETIAVAVAEAEGGEVRYHGEIANTPAALDKLIKQLRKGDAALSFCYEAGPCGYGIHRQLTEQGWDCQVVAPSLIPKKAGDRVKTDRRDSLMLARLHRAGELTAVWVPDTAQEALRDLTRAREDLKHLQRQAKQRLLAFLLRHGQRYAGQSRWTQAHYRWLETVKLAHPVQQIVFQEYLDTVKTLNKRVDMLDQQIASTATESVFWPVIQSLMALRGVNLLTATTVVAEIGDLKRFASAPQLMAYLGVVPSEYSSGGSKSRGGITKTGNGHVRRVLVEAAWCYRFPARKTAVLQRRAEKASDAVQDIAWKAQTRLCGRYRLLEARGKLKVQACTAIARELAGFIWAIGQTVSPATASA

SEQ ID NO: 362628 - protein, 455 aa, unidentified
MARAKSSGVDALSMVNPGAAAIDIGSTMHMAAINPHADDHPVRAFGTFTNELHEMARWFKACGVTSVAMESTGVYWIPAYEVLEQHGLHVILVNARYAKNVPGRKTDVSDAAWLQRLHSYGLLRGSFRPEAGVATLRSYLRQRERLIEYTASHIQHMQKALMEMNVQLHHVVSDITGATGMRIIRAVAAGERTPSVLAEMRDVRCHSSPEKISAALSGNWREEHIFALCQSLELYDFYQTKIRECDRKLEIVLKALAVGQDHDARNLPKVRTKTKQANEPDFEVRTALYRVVGVDLTQIHGIGPSLALKLIGECGTDLAAWPSAKHFTSWLCLAPGNKISGGKLLSSKTRRSSSRAAALLRLAAITLGRGDTALGAFYRRISARAGKAKAVTATARKIAVLFYNSLRHGMKYDDPGATQYEERYRSRVIANLRRRAKAFGFSLQEMPAEPAMSVS

SEQ ID NO: 362629 - protein, 328 aa, unidentified
MRVILDNCCGLDVHKDSIVACILKTVNISENTQKNEVDKEIRVFDTFPSGLKKLKSWLESENCQHVAMESTGVYWHPVYDTLENSFDGNIEILVVNARHMKNVRGKKTDIKDAEWLADLLRHGLVRGSFIPHHDVRKLRQQTRYRKTIVNDISTQKNRIEKTLQMAGFKLSTFLSDVFGVSGRNLINVLIKKGHLTASDVETEAKYIDTDKRASIAKAINGKLDEVQRNFLSMQIDHLNAQQSHLTSIEESIAKLSVLFEEAIRRVDTIPGIGITAATAIIAETGTDMSKFLSSEHFCSWAGVTPGANISADKKKTQEFCTGIPTSKD

SEQ ID NO: 362630 - protein, 342 aa, unidentified
MEITTVGIDLAKSIFQVHAVDAAGHVVVRKALRRAQVVPFFARLPRCLVGMEACGTAHHWARELMSLGHDVRLMPPAFVKPYVKRGKTDANDAAAICEAVTRPSMRFVPVKATEQQAVLALHRPRDLLVKQRTQLVNMIRGLLAEFGIEMARGLRHALELGARLSAGDAAEVPPLAQRVVTGLADQIGAVQIQLARLEKELLAWHLDSDLSQRLATIPGVSIVSATALAASVSEPERFRSGRQFAASLGLTPLQNCSGGKERPGRISRMGDRYLRRLLVVGMTSLVRRAKATHTSVDPRLSTLLQRKPVRVVTVAAANRTARVAWSIMTRGGTYRAPAAAAA

SEQ ID NO: 362631 - protein, 376 aa, unidentified
MAQTDVQYPTIHLAIELSRSAWLVAARLPGVEKPSLHRIEGGDTAALLALAAALRARAAARLGTPVRVACCFEAGRDGFWLHRLLTAEGIAAYVLEPTSILVNRRARRAKTDRLDALGMLRVLAAYLGGDRQVCSMVRVPTPEEEDAKRPHREREELVRERVRLENRIAALLATQGVRERPSLRNWERDLAALRTGDGRPLPPHLRAELDRLRRRLVLTLELIRELEAERDAALAAGPRDAAGRKIAALCRLRGVGANFAAVLTREVFYRAFDNRRQLAGYVGLAPVPHQSGEADRDRRISRAGNARARTTLIQLAWLWLRYQPDSAPARWFRDRVGALRGRTRRIAIVAMARKLLIVLWRYAETGLVPEGVEVAA

SEQ ID NO: 362632 - protein, 323 aa, unidentified
MNKNIKFFGIDISHLVFDVADSNGNFYQFKNTLSGFKKFAKILDIDSHCVMEATGYYHYQLAYYLLESGIRVSVENPLAVKRFIQMKLSKIKTDKSDAKQICEYAKQVDLKLWKGNSKHQTECLQITRLLAVYTKQSTMIKNKLHGESVLGNPSKAVVSSLKRSLKQVQKEIKMLENKLLILVKQEHQEVLTRLKSIPGIGNKTALMLVVLTDGFERFTSGSELCSYAGLTPVIKRSGSSVTGRSKISKMGNQKLRNLLFMCSFNACKYNKACKDIYERLVAKGKSKKLALIAVCNKLLKQAFAIAKSGLIYEDSYRSTMVKN

SEQ ID NO: 362633 - protein, 360 aa, unidentified
MQKQITTLDFKGQNIFVGIDVHLKSWTVTILTEELFHKTFTQPACAETLCNYLKRNFPGGDYNSVYEAGFSGFWAHYKLKEMGINNIVTNPADVPTSQKEHLQKDDPTDSRKLARSLRSNELKAIFVPNRATLEDRSLVRMRATLVKDMTRFKQRIKSFLYFYGISYPTQFEKSGTHWSKRFMKWLGEEISLEHDSGTQALKILVQEAEQQRKLLLEVLTKIRLLSRSEKYAKNIALLRTIPGIGPITAITFLVEIENIERFPNTDHFAGFVGLVPNRHSSGAKSSNGEMTFRGQKTLKSLLVESSWTAARSDPALMMCYLGYVKRMEPNKAVVRIARKVLNRMYFVLKNKMEYVPGVVN

SEQ ID NO: 362634 - protein, 452 aa, unidentified
MKKRIYRRMPVNDFQPETVSPADLGGKLVFAIDIAKVDMVAAVAAGDGRVLQTICWKAPDQNSTVLSILRGFRAAGITVEAVMEPSGTYGDVLRHQLEKDAYPVFMVSGKRTYDAKEIFDGVPSLHDAKSAAIIARLHVDGLSTRLPDEVPERRQLKAALAILDLHQERYLQLAHRLESWLARHWPELPTLIELTSSSLMALLARIGGPVDVAANPEQATKLLRGISHRLLPEDKIAAIIASANTSVGVPLVGFERDALMAIAADAYRAHRAFATARTKVAQLADTTPAATLVPVIGPTTAAAVFADIGDARSFPCARAFLKAMGLNLKEKSSGTVQGQIKITKRGPSRVRQLLWLAAFRWIQDDPIANAWYQRKKQRDGGRASRAAVALMRKLAKGLYHVGRGGTFDSSKLFDTRRLQVAGAGFPKGDLPLHRLSATRKSDVCLEASCGTF

SEQ ID NO: 362635 - protein, 323 aa, unidentified
MRMTYVGIDVSKATFVVAYSPAKGSRTREFKNTVKGIHEFIQTISATKHHCVLEATGNYSALLVYLLSQRGIVTSLENPLKIKNFARAMLSVTKTDEIDARLIALYGERMQPAPYKLRSDAILTLKQKRTVIRQLRKQLIANRNLKGSMEVLPFFDSRCRRAIEKTIIFLDKQICELEKDLSEIANKEYKKQMDLLTSIKGIGITVATALIVATGGFTYFDNAKQLTRYLGLSPTYQQSGTSVHVKGHINHNGDPALRSQLYVAAFASLRCNKECKTCYDRLRENGKPGKVAVIAVANKLIRQAFAVVKHEQPYINGFISSKA

SEQ ID NO: 362636 - protein, 416 aa, unidentified
MQKKDCIEFEQVVERGCGMDVHKATVVVTIQGKGIKSITKSYSTFTSSLIKLKEWLKKHGITHIAMESTGVYWKPVFNVLGDDFVILLVNARHVKNVPGHKTDKKDSRWLAKLLLSGLLKGSFIPERPFRELRDLTRYRKKLVQQIAADKNRFLRILEDGNIKLSMVLSNVFGASGSKMVNHILSVNDYRPEDLMQYVHGRIKASREDIKEALTGYITDHHKFMMRTILGNMVKTESTISEIDEQIDTVLVPYMLEKDLLEMIPGVGREVSIGIIAEISTDMDNFPNQKHLASWAGMSPGSNESAGKNKSGRTTHGNKHLRGLLTEAAWAAAKTKNTYFSSKYKSLVGRRGKKKAIIAIGHKILIAAYFIIKDKVEYKELGEDYLNNFRKDKLIAYYKKQIERLDPNLEFDKVEAA

SEQ ID NO: 362637 - protein, 409 aa, unidentified
METVYARVAGLDVHKDSVAACVRWLEGGGRVGQETRRFGTTTRQLLKLRDWLARSEVTHVAMESTGVYWKPIYNILEGGFEVLLVNARHVKNVPGRKTDVKDSEWLAHLQQCGLLKASFIPPRPQREWRDLTRTRAQLVRQRAAVSNRIQKVLEDANVKLASVASDILGVSGRAMLEAIVGGQSAQRTLAQMARGRMREKIPQLEEALEGRLSEHHRFLLRSLLDQVAHLEEQIERFEQRIEELNAPFAQAVEAVAEMPGFGTTSAQAVISEIGTDMKAFASAENLSSWCGICPGNHESAGKRQSGRTRKGNVWLRATLIQAAWAATHTKDSYFRAQYRRLVGRRGKKRALVAVAHSQLVVIYHLLTTGRHYQDLGVDYFGQRDIEKIARHHIKRLEALGYTVTKKEAA

SEQ ID NO: 362638 - protein, 503 aa, unidentified
MSAPTTRRKAASSSPASAQEAQAHRQAYDRRKTRAKVKSEARHQKEAAQVEALPVQHPHAAGIDIGSRSHWVCVGFATEAGSCLIQELPAHTAGLKAIAAFLREHQVSSVAMESTGVYWIPLYELLQAEGFEVLLVDPSYTHQLRGRPKTDRRDCQWIYRLHSVGLLAAAFRPDEKTCQLRAYLRQRANVIRQASRHVQHMQKALEQMNLKLTEILSDITGVTGRSILRAILRGTRAPEKLAKYRDKQCKASEAEIAQALTGSYREEHLFELKLAYEAWQFSLGQVAKVDGQIALQLGRMKCDRALPPLKSKPRPKRRVNSPGFDVRTALYYVVGLDLTEIEGISELTALTVISEIGPGVSRFATVKKFCSWLGLCPNWKKTGGRVKSSRTRRGVNRAAQALRLAAQSLHHSQGALGGFLRRMKGRLGAQAAVTATAHKLARIVYLALKHGLTYVRQSQEEYEAQMKEKQIKALRRKARQLGLEVVEKTPASDAPAAAASVEG

SEQ ID NO: 362639 - protein, 403 aa, unidentified
MIFVGDDWAEDHHDVWVMNEAGRRLGSRRLPEGLTGIRQLHALLGAHAEEPEQVVVGIETDRGLWVEALVAAGYQVLAINPLAVARYRDRHHVSGAKSDVSDAKLLADVVRTDRHNHRLLAGDSAEVEAIKVLGRAHQNLIWARVRHTNALRSALREYYPAALAAFEDLDHGDALGVLGRAPTPDAGARLSLSAIQSALKRGGRQRYIASRAKEIQAALRSEQLTAPPAVATAFAATTRAAVAIIAELNRQVAELETSLATHFEAHPDADIYRSLPGLGVVLGARVLGEFGDDPNRYTDAKSRKNYAGTSPLTVASGKKYRVVARYIRNSRLYDAIDQWAFCALSTSPGARAFYDQRIAAGDGHHQALRALGNRLVGILHGCLRHHTLYDEDKAWAHRAPAAA

SEQ ID NO: 362640 - protein, 371 aa, unidentified
MKSIIYIGMDVHKKTYSLCALLKETGEIIGETKIPADVSLIIKFIENAKKSVDSDDVQIKTGYEAGCLGYSLYWQLAAKGIECDILAPSTMHRSAKNKVVKNDRRDAKNIAANLANGTYKSVYVPTDEDVEIKEYIRMMHDFKIELKKVKQHINAFLLRFGHHYPGKSKWIPAHIKWLKELELSDMYREILDEYLSQLEILSEKIERFKYRLEELSQKETYNKKIGQLRCIKGIDTTAAMTMHAETSNFDRFPTANAFASYCGLTPGEDSSGESYHRLGITKQGNSMIRTTMVEAAQVLVRGTIGKKGKKVKSKQKDQDVKVIDYADKAVVRLQKKYHRMIFRGVKRNIAITAVARELACFVWGIETGHIS

SEQ ID NO: 362641 - protein, 335 aa, unidentified
MENIALIGIDLGKNSFHIHCQDRRGKAVYRKKFTRSKLIEFLATCPATTIAMEAYGGSHFMACKLEELGHFPKLISPQFVRPFVKSNKNDFVDAEAICEAASRPSMRFVQPRTESQQAMRALHRVRESLVQDKVKTTNQMHAFLLEFGISVPRGSAVISRLSTILEDNNLLLYLSQLLLKLQQHYHYLVEQIKELESQLKRKLDEDEVGQRLLSIPCVGTLTASTISTEIGDGKQYASSRDFAAATGLVPRQYSTGGGRTTLLGISKRGNKKIRTLLVQCARVFIQKLEHQSGRLADWGRELLCRKSNFVVTCALANKLARIAWALTTRQQTYEA

SEQ ID NO: 362642 - protein, 416 aa, unidentified
MKRERKTREVRYMGLDIHKHYITVGGMNAEQEIVLRPRDVVMERFKTWAESNLRKTDEVVLEATTNTWDVYDTIVSLVKRVVVAHPAEVKQIANARVKTDHQDVIRLVRLLIAELVPEVWVPPLEVRELRAMISYRWRLVKMATAIQNRMHSLLHRHNIQAPDGKIDVGANRAWWEQLQLSALETLRLKQELKTLRMVREHIVDVEKELGRLSTSERWGSQTVRVMQLPGVGVIVTMTILSAIGDIRRFESPKKLVGYAGMGAGVHDSGQKHREKGITKFGRKELRWALVEASWQAVRSNPRWRAQYDELCKRKHPNQAIVAIARKLLVTLWYLLSKQESYNGWSDEDLAYKMLTWAWHMDRRALNGMSNQQFAKYGLIQLGRGEHLTRIVKGGQPRRIAAKEEVLALKPELYLKQ

SEQ ID NO: 362643 - protein, 371 aa, unidentified
MSRLAKVESFYKNVNLTSDDEVFVGVDVHKKSYHVALHLNDMPAIDFRMGAEPKKLNEKLQPMAQSIKKIVYETGPTGYGLARNLIKNKLPAYVVATSRIPRSAVGDDKTDKLDSIKLAQYAAKGLLHPVTIPTPKQEADRQLYRMRHRQALQFAKVKVQIKSFLLMHGIGEPEGLANWKIVSVQYLRDMRLIDTLRLSLDELLSDYDYFKNRIKVLNKVLADNLNKGVLGRRMDLLKTHPGVGSVVACQFATELFHYRNFSSTRQLYKYLGLCPRVSQSGERSSSGSINKAANGRLRNNLIQGAWSWVRTDIEARKCFWRIYENCGGLKQKAIVAMARKMSGHLWAMLMTDRPYDKNKAKSRLNNERQKK

SEQ ID NO: 362644 - protein, 425 aa, unidentified
MNFNTNEKINQVSENTLVIGIDIAKRKHYACAVDDRGRILQKSFPIIQSKIGFDDFYERLMTLKEKHEKQEILVGFEPTGHYWMNLAAFLTHYGIPFVMVNPMHVNRSKELDDNLQTKNDQKDALVIARLIRDGRFSYPRLLEGVEAELRNGATLRSKLQEDLSALQNRIIRWLDRFFPEFTQVFKSFGKMAYAVLEKTPLPMDIQGKTPEELLCLYRQVDGLKSPQLPKSKQLVRIAPHSIGLTEGLVMARFEIATLLSQYHMMQAQLDELTCQLTALAKQMTDYDYLASVPGIGDITIVDLLSEVGSLAQYAHPRQLIKLAGLTLRENSSGQSKGQKRISKRGRRKLRALLFRVMMPLILHNSAFKALHEYYTTRTKNPLRKKQSIVVLCGKLLKILHALCKKKVMFDEHQMMTDFTVLKAAS

SEQ ID NO: 362645 - protein, 403 aa, unidentified
MSINGAPVMAATVVAVDVGKNTAALSVTDVGRRRLLGPVDFAMTAPALTAVLERVCAVLPPAAVRVGIEAAGHYHRPLLAAGVWPAGWQVLELSPARVAEQRRVQGRRRVKTDAIDLEAITELVLAGHGVPVTARAAAVIELTGWAMHRSRRVLTRTATKNQLLAQLDRCFPGVTLALPDVLGTRIGRLVAVEFADPHRLAALGVTRFVRFAASRGLRVRHSAADRLVAAARAALPAPEALVARQVLADDLALLAGLDAQIFAAEAHIARLLPDTPFAPLITVPGWGVVRAGNYGAAVGDPHRWPGARQIYRASGLSPAQYESAGKRRDGSISREGSVALRRALIDLGIGLWHADPSARRYGQALRARGKKGGVIGCAMAHRANKIAYAMVRDQTGYDPSRWA

SEQ ID NO: 362646 - protein, 320 aa, unidentified
MQTPTEVLNIGADVAKDEIVVACSQGSFPVRKLANQRSALLAFLKDLPAGSRIGMESTGAYHELLADAAHKLGFVVFVLNPKDARHYAKAVGLRGKTDRVDAELIARMVAHEHTKLHPWIAPTAEQREMARLIKRRAKLSSLRQALAMSLKGLEGFATDLKALRARFDQVLVRIDQRVKALVEASPDRKQHVTHLRTICGVGPVVSAALVNTLERVPLKSADAFVAFTGLDPRPDDSGQHRGKRRLSKRGPAELRRLLYVAAMSAKKKQAWKPLFEHYRAKGLSSTAALVIMARRIARTAWSMYTYKTDFDPARLTKSLT

SEQ ID NO: 362647 - protein, 445 aa, unidentified
MFIQSQDDSHCCYSFFIKVVIYMMKLKYSICCGLDVHKNVIVATIVITNKDGISEYMQKSFSTINSDIQRFHNWLIENNCYHVCMESTGKYWIPIFNYLENDIDVCLTHPKYVKAIKGKKTDKKDSKWIADLYKFDLVRCSFIPPKDFRQLRELARYRFKLVCMKSSEKNRIQNCMTVSNVGIASVLSDPFGKTATEIMSYLLEHTADSIDEKAVRKLIKKGAKAKSDEIIEAIRGYNIETDQAKKLELARGHLEYLDNMITQTEVELYVRIKPYYEFVEFVSTMPGMTELSSTIVLAETGVDMNIFDDAKHLCSWCGLSPANNESAGKKKSVRIAKAGDYLKPMMVQCALAAVQSKKQPYFAIKYGRIKKRRGHKKAIIAIARMMMVCIYHMVSEKKPFTPTDYEDLMAPQNHVERVVLNENNVFAYLESLGYDSSKLVKRNDN

SEQ ID NO: 362648 - protein, 367 aa, unidentified
MMTDHDDCDDPETPRVIGGVDTHKDVHVAAVLDELGRLLATATFPTTAPGYRQLSRWLCGFGEVLAVGVEGTGSWGAGLSRHLRARGVNVVEVNRTNRQTRRRKGKTDTVDAEAAARAVLAGDAVVVPKASNGPIESVRQLRVAWAGAMKARTAAANQMHSLTDTAPEELRARLRGLTTLGRARLCARLRPVDVMEPCSAAKVALRAVASRWLALHDEIRELDKHIKAILDTIAAPILARHGVGYETTGALLCAAGDNPERLNSEGSYAALCGSSPVEISSGKTLRHRLNRAGDRHANAALWTIVMVRIRSKHAPTVSYIERRTTAGLSKREAIRCLKRYVAREIYNDIRAVITTYNNMINEPQIAA

SEQ ID NO: 362649 - protein, 326 aa, unidentified
MQCFLGIDVSKAKLDVALLLANGKFKSKQFANHAAGFAALVQWLLGHVPDGHAWAHACMEATGSYHEALACFLSDQGLVVSVVNPLLVKRFAQANRLRNKTDGGDAKCLAQFCQTSRPERWQAPSISVRALQALVARLDALQAMRQAECNRLEVAHSAVAGSVRQVINDLDGAIAQVKAQIASTIDDDPDLKKRAGLLHSIPGLGDKTIPQLLAYIGRPERFKSVKALMAYAALTPLIRQSGTSLDSRRGTHPMGHQELKRSLYFPAMVAARYNPLVAAFWNRLKAQNKPGKVVVVACMHKLLAIAYGVLRSGKPFDPNHLKQITT

SEQ ID NO: 362650 - protein, 310 aa, unidentified
MNIQPGFVGCDISKNHLDIFDEALSRPERIANEAAALATLIERWKDKEVLVLFEATGPYDACLRRALTAAAIPFARVNPARARDFARATGRLAKTDAIDARMLAAMARALRPDCAPAPSPEREALARLHKRRDQLVLMRKQERTRLAAIDDPVIVEDVEAHIAWLSTRIDRIERQTRALIENNAHLTEDQRLLRSVPGIGPVVAATLIALMPELGTRSPKTIAALAGLAPFNVDSGQFRGKRVIKGGRRRVREALYMAAITTIRSKHRFARIYKAMIDAGKPPKVALIAIARRILITANAILRERKPFQP

SEQ ID NO: 362651 - protein, 410 aa, unidentified
MEVLHAHCAGLDVHKESVVACVRHMANSKVTTVVKTFKTTTQELMALSNWLSAEGATHIAMEATGVYWKPVWHILSDGEFELILANAAHVKNVPGRKTDVNDATWLADLMAHGLIRASFVPDEPTQRMRDLLRTRKQMVRERSSHIQRIQKTLEDANIKLDSVVTDILGLSGRRIIEALIAGQTMPQALASLAHRRIHASADELEAALRGRVTRHHRFLLKLHLDQIDALDAALTRIDEEVSANVEPFRTAIEMLSSIPGISTLSAEVIVAEIGIDMSRFQTAGHLISGAGLCPKNDESAGKRRSNRMKKGAPWLKTTLIQCAWAACRKKDSYLQAQYLRIRSRRAAKKAIGAVAASMLAAAYNMLKDGTLYQDLGPNHFDNRAKGKHVLRLVNRLQNLGFDVQITPIAA

SEQ ID NO: 362652 - protein, 385 aa, unidentified
MAPPTRPRIVIGLDVGKSAHWACVVTREGELLASGPIPNREDAIDGLYAQYPGALVVVDQVRNIGSLALSRAKLAGMPRAYLPGLAAHGASRLFAGDVKTDERDAMVIAKTALGIPDALLAVADRPPEIEAARSLAAQRDFLTCENTRSKNRLRSILLESCPEFEAQADLSDPATLKLMAAVGGPWSISEASPQAVGALTRGCRRAKVAALVESVGSSSRPHPAAVACEDRAVRLLARRISENAAEIESLTSEISALLAADETYRCLLTVPGIGPRTASELVISIDIADFAGHDRLASYCGLAPRNRRSGTSISSVSASRQGNKRLKNLLIFSCNCLARSRNRWGEYYARCRDRGMPHGKALKAVARKRLKVIYAIMRDKVPYAA

SEQ ID NO: 362653 - protein, 317 aa, unidentified
MAMQVERSIVGADVAKAELVIHHDDRDEIIRLKNSKLEIRRWLKQQPLNTAIAVEATNIYHMDLVELAHGLGFEVYVIDGFQLSNYRKSVGGRVKTDPSDARLLSRFLKNEGQDLRPWSPPPAVYGKLQSLLRRRAALVTARTAMTQSWANETLLKAAFETFVTSIDRLDQLIQKKIKEVLREAGLQEQVARCQAVEGIGFLTATALVMAFVRGEFKSSDSYIAFLGMDLRVNDSGQKNGRRRLTKRGCSEIRRLLHNAAMAASRSAAWKGLYEQHRSTGKATTQALVILARKLARVAFALMKNQDEYVTKGAKMAC

SEQ ID NO: 362654 - protein, 471 aa, unidentified
MIWLVEASFIAGSSCHMQGCELTREGMERFKFKFIFVKEAFVMNVLPVAGIDVGKEFSEMAILSPTNKVYARMKFFHDSFKKVDKAIDLLKKAEKDFAIRPVIAMESTGHYHKILFHAFAEAGFEIVITNPLQTNCINNLGIRKVKSDKVDARKVALLYRFQELKTTSIPNDTTDCLKSLCRQYYKMTDQLTAYKNKLIGIVDQVMLNFTDVFKDVTSKTALALLEKYPTPTLMLEGKRDEIISLISKTSRMGVKRATSKYELLIQKAKDFEPLSISSPANISLIQININMVRTLEKSISDIEDAIAKLIEDDSNKDMPVLALTLELLCSIPGIGLMTAATILAEVGDFSKFQKPNKLVAFFGIDPSVKQSGKFEGTQNKMSKRGSRFLRKALYISALANIRKKRNGELNNPVLYEYYQKKCVNKPKMVALGAVMHKLVYIIFAVLRDKKTFELRTPEQHAKHLAAKNDAA

SEQ ID NO: 362655 - protein, 332 aa, unidentified
MFIGIDVHKRYSQIAVLNENGEIVEEVRVENANLDDFAQQYAGSKAALEATSNYYHIHDTLSEYLDVTVANPGELKLISDSDKKTDRVDAKQLARMVRLGSIPESYVPTDEVRQARALVRGRQKLVENRTEYANKIHGLLSDHGITQEVKPLSVEGREFLTELSLPAPWDALLESYLELIQTLTEQIESLETEIEERAGSLKETQLLMTIPGVSYFTALTIYAELGEIDRFDRAKEVVSYVGLNPIIRESGDSRFEGSISKRGSGRVRWLLVQASYTAVHTCEDEYLSRFYNRLARKKNSKTAIVATARKLLVSMYHMLDREEVYDPPGVSA

SEQ ID NO: 362656 - protein, 343 aa, unidentified
MEEVSIIGLDLAKHVFQAHGASADGKALLRRKLYRKDVLPFFAIQAPCLVVMEACGGSHYWARQIRQLGHEVKLIAPAHVKPFVKRNKTDAADAEAICEAAVRPNMRFVPIKSEAAQGNVTLLRARQLLERQRTQAINALRGLMSEYGLVVPEGRRHVTTLVGMVEDDSFGLAQVARVGLRALAATIESLTRHLADLDGQIRASVKQDEAARRLMTIPGVGPMTAAAMLALVVDPSIFRCGRDFSASLGLTPREHSSGGKQRLGAISKRGDRTLRRLVMLGATAVVRQAVIKPPAPTSWLAKMLARKPRMLVITALANKIARVVWALMAKGGVYRERTEATAG

SEQ ID NO: 362657 - protein, 445 aa, unidentified
MDNKEGHQQAKQLVKEFMKHYELTEVYVGMESTGGYENNWFLLFRSMQSQGVSQVMRINPKAVKAMGTARMVRTITDAVSAENIAQYMLSFVKENKPVNKQDNQFRVVRHISAWTKNVNKQITQTSNHLEKIIYQTFPELLVYCRHGFPDWLLHMLQKYPLPSDILKAGKSRLTKISFITEPKAQSIIQKAKDTVAGSAADDLLAATIRSMITVLLCHRQQINMHKKALTKQFGEAQEVQLIDTMPGITAETAVLMMIEIESVDDYPGAKQLCSHFGMHPTFKQSGDGTWAARLSKMGRSSIRGVLYMPAITAIRTNEYFKTLYAGQRAKGKKHKQAICVVMHKMLCMIYGILRSKKPFDLSLHTKNQQQGEQKQKEAEKTAQQRKKERKNKRERYITANPLEAPISRKQTKQIKKELLAPIDKNQDIRGPEALNKDKQINCLSS

SEQ ID NO: 362658 - protein, 314 aa, unidentified
MDETKHFVGIDVSKAALDVHVLPVGKSQRFPNDGDGHAALEGWLSSHPVERVVLEATGGYERKAVQALQQQGYHVCVVNPARPRDFAKAGSRLAKTDRLDAAVLAHYAQVFDPPSAPRPGDVEAKLARYASARDSFVAEKTRLRNQLGLNDDADLERMHRDILETIEAKLAELDRMIQSCIREKAEVSQRYDQLRAVPGIGPVAAVSLLAFLPELGQVSRRAIAALVGVAPFARDSGMMRGQRRIAGGRAKVRRMLFMASLSAARHNPIIKTFYERLIKGGTGKKQAIIACSRKLLTILNAMVRDNREWQPMST

SEQ ID NO: 362659 - protein, 395 aa, unidentified
MYFVGIDISKYKHDCFICTETGEVIESNFSFPNTSDGFEQLLNLLKSIDNFKEIRIGFESTGHYGMNLKLFLEKNNYSFMEFNPKLVKEFISGQTLRKTKTDKKDAYQITKYLISVDYKPHPKQFYHKYSLKSLSRMREKLVKQRSYYEVALTNVLDHIFPEYKSFFNNTFSASSIFILSKYKSPDKIKNMKDYDSIRKISRGKFTSAQFFLLKDLAKNTIGTSNEIFELELETLLILRSQIEVEIKKLESNIEEIIKELNPPILSIKGIGYILGAGIVSEYGDVSRFKSADAMVAFAGIEPSICQSGTESHTGHMVKHGSGHLRYYLLNAADCIFLHEPIFTFLHSPKLSLFYYKKRNEGKSHRVALNHVAKKLIRIIYKLETENITFDSSKVK

SEQ ID NO: 362660 - protein, 341 aa, unidentified
MEEYIGLDVSMKETAVSIRRAGERIWRGKCATDPSIIAELIRKRAPSVKRIVFETGPLSVWFYHSLRTEGLPAICIDARHAKAALDMATNKTDANDADGLAQLAEVGFFREVRVKGFDSMLTRTLVAARTRLVRITTELSNQIRGVMKTFGLLVPAGKGGTFEKNVRSLLADQDRLASIVLPMLEAWRGIRVRAAELGRQLVRDARQSRACRILMSIPGIGAITATSFTTAIEEPDNFRKSRSVGAWIGLTTRRYQSGEVDYDGHISRRGDRPLRGLLYEAAAVILTRSSTHSTLRSWGLQLRERIGFKRAAVAVARKLAVIMHAMLKTGELFNPNAGAAA

SEQ ID NO: 362661 - protein, 340 aa, unidentified
MTITTVGIDLAKNVFAVHCVDQHGKTVLVKPKVPRAALPELIASLPPCVIGMEACSGAHYWARLFRQYGHEPRLMAAKFVSPYCMAGKSGKNDAADAQAICESVRRPHMRFVPVKDESQQAMQCLHRTRQGFIEEKTATYNRLRGLISEFGVIAPQSTDALRHMVSEQKKSLPLQVQQCVDDLLEHIDRIENNVTEYDRILSRMAKADHRSQRLMELKGIGPTTACALVASIGNAHDSKNGRQLAAWLGLTPSQYSSGGKSKLGRITKAGDSYLRTLLVQGALSVLIGAEKKTDSFSRWVCSLVERRGYWRAVVVIAAKNARLCWASLHYGDDFRLYSVS

SEQ ID NO: 362662 - protein, 326 aa, unidentified
MQKTLKFIGIDISKGTLDICVLEHNQAKHCQILNQRKQIQKFFKKVNNENSHICLENTGKYGWLLIDVLSKLNLKFYQINALHLKRSMGIIRGKSDTVDALRIAQFIAKNYQELQNHKPKQNTIKTIQVLMSKRNLLVKQRAQHKALKKENQLLKNIGLPTLEKQTKLIIKLLNEQILGIENLIQKIIQQDKTLNINHKIVTSIPGVGKVVSWNMIVKTNGYNTTLNPRKFACYAGIAPFAQKSGTSINKKARVSHLADKTIKKLLHMAAMRAIQLDNDLKDYYIRKVKQGKNKMLVLNAIRNKIVHRIFAMIKNQKLYDYNLHLS

SEQ ID NO: 362663 - protein, 406 aa, unidentified
MKQIVSVGIDVSKGKSTVCAMIHPNTIIKESFEVLHTVEEMSMLADYIGSLDGAIRIVMESTGHYHLPVAQFLYQKGFFVCVENAYIIRQFSRIMLHGAKTDPLDAKKLAKYGLAYWSELKPYKFHPSCYTELSLLSKQYQTYIKLLIAAKQNVIHLMDEMLPGFKEALDTASSVQFSKVKYVDFAKEFYHVDMIKTMGKEIFRENYKQWCKEKGYRFQSEKADELFHLAEDGIPTLPTEFPSTRLCMEVATEQVSQLGYALEQILSQMQNLAKTLPEYQTIRQMGGMGEKLCVRFIADIGDVRRFHNGKALVAYAGIDAPPYQSGQYTGTKRRISKRGNSALRKTGYEVMKSLKSHPPKTDTRVYDFIIKKENEGKSKKQAKIAGLNKFLQIYYARVIEIYKNIV

SEQ ID NO: 362664 - protein, 384 aa, unidentified
MRTDHLAGADAENVILAASLELAGAQWKIALHDGRRQSPAVHTVRGAQAALRVQALLEVIERYKQKWSLPQDVRVVVSYEAGQDGFWIYRALRSRGMDCYVIDAASIPVERHRRRAKTDRLDAIKLVTNLRVWLHGERDRMRVVRVPSLQDEASRQLIRDRGQLHKEVLQHRERMRKLLITMGCWDGFDHRTFAKRLASGKLVCHDGTPLPSELHERLLRETARLALAEEQLAALERALQERLPAPVRERITYLRHLKGVGQLGASRLMLELFWREFGNRRQLGACVGLVPQPYDSGQSRIDQGISKQGNRRVRTQLIEMAWCWLRYQPSSALAQWFNKRTQGTGANRRARRIAIVALARRLVIALWRYLKDGVIPQNAQFKGA

SEQ ID NO: 362665 - protein, 372 aa, unidentified
MTSIIYVGMDVHTTNYTLCCYSMEDDRFFAEVQVEPDAKNILKYLARIEKQQSRDCRIVCGYEAGCLGYSLYHQLHAHGIDCVILAPTTMMTKPGKRIKTDRRDARLISKCLAFHTYSPVYIPTEVDDAVKEYIRMRDDANSALARVKQQIIAFCIRHGKIHDGKSYWTNKHLEWLSSLDLGNKILSEVLQEYLIRYYQLREQVDMYDMRINELAQAEPYRQKVEKLGCFRGIAAHTALSFCVEVGDFRRFATAQQFASYLGLVPGECSSGDKQQYTGITKAGNSHLRKLLVETAQVFGRSATKSGKSVALKERQAKCDSLTVAYADKANARLKKKYFKIAMRSKVNIAKTAVAREMACFIWGMMTDNISCA

SEQ ID NO: 362666 - protein, 345 aa, unidentified
MSLFVGMDVSQRSTHLCVVDADGKRVWRGKCATDPTILAEIIRTRAGSDARVGVETGPLTPWLVHALRAAHVDMICIEARHAHAVMAAAQVNKNDRHDAQALAQLVRTGWYRAVHVKSYTAHQLRAVLGARAQLVGMVTRVSNHIRDVMKIFGLVVVGVRGTAFAIRVEELAVDRPEVQSIVAPMLATWRHLRSQVAAFDKQLLAIAKTRPECRLLMSVPGIGYVSALAFMGAIDTPERFARSRAVGPHLGLAPKQHQSGDVDRLGEISKCGDAYVRTVLVEAANSLLIRCQKSSPLRTWGLTLEKRSGPKKARTALARKLAVIMHAVWRSGKPYATELPARISA

SEQ ID NO: 362667 - protein, 334 aa, unidentified
MFMESVADHRGARIPTTRQGYRRMLAWMRSFGELQRVGIEATGTCGAGRLRHLQKAGVEVLEMTGPDRHDRRKRGKTDDLDAQAAAHAAFAGRCTVTPKTRDGMIEALRVLKACRKTALRARRVALRTIGNTIVAAPDHLRDSLRKMTRMQLIRTLAAGRPDMGGCRELETACRTALRSLARRHLGLQDEVCDLDAKITSIVDERAPDRVARNSIGDGSAAQLLVTAGDNPERSKSEAGFASLCGVGPVPAPSGRTDRHRRNRGGDRAANSALHIVAIGRLRCAAPRIPASARRIAGGRSKLEAIRCLKRSIAREVFNLIRSRYREINQARISA

SEQ ID NO: 362668 - protein, 315 aa, unidentified
MHTIEQPNQPVHIGIDVAKATLQIDLLGKSRKLPNTTAGHQALLELLPENVFIIMESTGSYHIAPLECFQAAGIPVAIVNPVRVKQFGKARGTLAKTDPVDAALLTDFGRAFLPRPTPPRDPERVLLGELVNLRDTLIAQVTLWNNLVEHQQSAVARKLSEAQARAATKAMTDVEVRIAKLIKESQTMAPVADVLRENKGVGAVTAAVLLAEMPELGRLNRRQAAALAGVAPCANDSGKHEGKRYIRGGRPRIKRALYLAALSAVRHHTTLSPAYKALRASGKPAKVALIAIARKLLVILNAKLKEYYATLAQPA

SEQ ID NO: 362669 - protein, 357 aa, unidentified
MNLKYSIGIDVSKKDFHCCLSVIDSSQKVTVKSSRKLSNSPSGFKEFMVWIKEHRKEDLPLRTVMEATGVYHEQLAWFLHSKGLVLSILLPNKAKKYLQADGANSKNDSIDARGLSKIGAEKNLELWAPGSEKLYELRHYTRQHQNLKEAINVIGNQLEALNHGQFKSREVIKQLNKTVKLLEQQVAEMEKAMGKLVKTDRFLNLHYENITAIKGINLLSFCVIVAETNGFALFKNSASLVKYSGYDVIENQSGKHIGKTKISKKGNSRIRRILFMPAFCAVRDDQPQFKNLYERVVERTGFKMKGYVAVQKKLLVMMYHLWKNEQRYNPQFNCLEKIIAPEKSRATHDKIPEGSFH

SEQ ID NO: 362670 - protein, 342 aa, unidentified
METGTTIAVDLAKSVFEIAVSERPGKVSERHRLSRKQFLSFFQRPPATVVMEACGSAHHWGRQIRELGHRVVLLPPHQTRPYVVRNKTDRTDTKGLLEAYRNEDIHPVPVKSLDQQVITALHRVRSAWLAERTAKINTVRGLLREIGITIPAGAQHVAPVARNSAADADCPIPDALRATFFELGTEIEELEERMAGVERQLQVLAKESELIRRLQTIPGIGLLTATALAAFIGDAGRFPSGRHFASYIGITPRENSSGLRRRLGSISKRGDGYLRMLLIHGARSVLHHTSPGDSDRLRAWALELQTRVGHNKAAVALANRMARIAWALWKHQCDYEVRSRNA

SEQ ID NO: 362671 - protein, 323 aa, unidentified
MASEVVEFEQIVHLGCGIDVHKETIVATIDGVGLKGETRTFGATTRSLTELKEWLVENRITHVVMESTGVYWKPVYNVLESTDMSIWIVNARHVKYVPGYKTDKRDSKWLCKLLLAGLLKPSFVPPKEQRELRDLTRYRRKMIAQIASEKNRIIRILEDCNIKLSSVLSDTQGVVGTKIIDLLCKNGKISMKDIDEFYHGKLKASKKEIEEACEGVITEHHVFMLQTIRRDIVSCEEIISDITFRIKMILLPYRHVLARLDEIPGLDMKSIEDLVAEIGLDMETFPTDKHLASWAGVSPGNNESAGKKKVDALHMAISMSRQF

SEQ ID NO: 362672 - protein, 338 aa, unidentified
MQKSYLGIDVSKLSFDMSLIAVISGRKQPAIISKFDNSTGGLKDFKKWLTEHQVTFDENSLLVIENTGIYHRPIWNFCTTNLLPVFIGNAADLKWSFGIARSKNDKVDSMRLCDYAYKNHEDIKPTTGLNKALVTLKDLLSNRSKLLRQKNAIKQTLGELKMSNDKATQQLLEKLNKAALDGLKTSIKLIESEMLRLVQKDDAVFTNYKLMLSVPGIGKITAIFIICCTSNFAIKVTGKQLANYAGVVPHEHQSGTSVKGRSRVHFMANKELKSILTMGALSAINTYPEFKDYYERKMSEGKKHLQALNAIKNKMLLRVAAVVNQQKLYENKYQAACA

SEQ ID NO: 362673 - protein, 341 aa, unidentified
MRYIGLDVHKDNITACVLTSTGKPKFERDFIKDSESWNLSELMEYGDKDGFCIMMESGTYAYQPFRFFSDQGVETHVVHAQALKVITQSDKKTDKKDAYTIARMLRLWKRGEIDLQMAFIPTREQCELKDLCRYREELSVKITDEVKRIKSHMSRNCEHLPKNFERLQKVGSRDFIKATYQSDYTLMNRMNDFERLLAERDSVQNEVESRLPDSREVELLTTIPGIARQTAVQIMSMIVDIDRFEDSEKFCAYFGLVPRVRDSGGKEHHGHMTKSGDRMMRMIMERVTSTHVMYCDSFITKYYKRKCSEMGTKKALITASRKMLSVIYAMLKSGSDFRFAA

SEQ ID NO: 362674 - protein, 375 aa, unidentified
MKEKVRFLGLDVHAETIAVAVAEPDGSVRSLGTIANRAESIRKLVQKLGSVERLKACYEAGPTGYVLYWQLAELGIHCDVIAPTLAPVKAGDRVKTDRRDAERLARSFRSGDLTAVWVPDEGSEALRDLVRAREAAKQDQLRARHRLSKFLLRSGQRPAAGLKAWTQHYMAWVRQLHFAQVAQESTRLDYLQEVEHMAERVKRLEQAIAEAVQLASPELQEVVKDLQALRGIAQISAVTIAAELGNITRFEGARQLMGYSGAVPSEDSSGKRTQRGSITKTGNAHLRRIAVEAAWSYRLRPGVGPALRKRQEGVADEIKEIAWKAQHRLHRRYSRLAAAGKDQRKIITAVGRELLGFIWAIGVKAETAAKQRMAA

SEQ ID NO: 362675 - protein, 367 aa, unidentified
MQKISTMRTRGNSNRICKGQLTIGLDLGDRSSSYCVLNAAGEITLEQKLPTTPDGMKQTFGKMPRCRLAMETGTHSPWVSRLLTALGHEVIVAHAQNVRLIVKSRRKDDRMDARTLARLARLDPELLSPVQHRSAQAQLHLTEIRARAGLVSARTALVNAARGLVKSYGERLGKCGTFQFSQETATGLSSGLREALQPLLLEVESLNERIKEYDRRIEKMAKERYPETALLKQIKGVGDVIATTYVLTIEDPHRFRKSRDAGCFVGLQPGRRNSGESEPQLHISKQGDEYLRTLLVQGAHYILGPFGEDSDLRRWGQKLAARGGKNGKKRAVVAVARKLAVLLHRLWVSGEVYEPLRNSLKVMSAVA

SEQ ID NO: 362676 - protein, 344 aa, unidentified
MGEVSTIGLDIAKSVFQVHGVDDAGAVTIRKRVSRAKMLEFFAELPPCLVGIEACPSAHHWGRELQALGHTVKLMPPSYVKAYLKRSKNDANDAAAICEAVTRPSMRFVPIKTKEQQTALMLHRTRQLLVRQRTMLSNALRGHLAELGIVSAKGRNGTGELLRIIADGADNRVPPAVRGILDVLAQQYSAIGAEIGSIDKSILVLHRACEASRRLAEIPGIGPIGATALVAEIGDWKTFSSGRSLAAWIGLVPKQHTTGGKDRLGSITKQGNRYLRWLLVVGAMAVIRSARKHGTQKRPWLGRLMERRPTKVAAVALANKIARMAWAIMVHGDRYKEPKLLLAA

SEQ ID NO: 362677 - protein, 368 aa, unidentified
MSRKSNKLYVGMDVHKESIDIAIAEEGGEVRHHGQIGGDTNALWRAVRKLESSGCKLVFVYEAGPCGFGIYRGLIARGHMCWVVAPSNTPRRVRDRIKTDRRDSVKLAGLARAGELTPIYVPDVADESMRDLVRAREDAVVMQRQARQRLAALLLRNDVRYAGKTAWTAAHRRWIADVNLTQPAQRLAFEEYVQTVEEATLRVERLTGCIAQQVAQWRWLPVVNALQACRGIQLIHAVRIVAELGDLSRFSHPRQLMSYLGLIPSEDSSGERRRQGSITKAGNGSARRALVEAAWAYQYTAKVSGLIARRQVKAPKAALDIAWKAQVRLCARFRRLAARGVSRNKIVVAIARELAGFVWAIGQQVKPI

SEQ ID NO: 362678 - protein, 394 aa, unidentified
MRMLYVGIDVSKHKHDCFITNAEGEALTDVFTISNSRDGFDELYRRIKSLRSRPSQENTKVGLEATGHYSDNIIGFLRKIGLPPVILNPLQVNLYRKGETLRKTKTDKSDARYIARLLIAKELKPHSQSSYHSEELKSLTRHRHRMVWTRSRFKVLYDRLRSIVFPELEGFIKLPNSVTELKLLLEFPTTEAIANCHLAHLTNLVEKFSHGRYSKDWAIELKALAKNSIGSASQAKALELRQTIRQIMSLSEEIDIIDGEIKTLVNASGTSLMSIPGIGYTLAAVIMAEVGDISRFASPDKLQAFAGLEPTRYQSGQFSGQRDVMVKRGSTYLRWALLQASRTVSRFDPTFGEYLGRKVAEGKHYNSAMGHVAKKLIRVIFKLMNTGETYMAKA

SEQ ID NO: 362679 - protein, 367 aa, unidentified
MTVTIVDAARPVTGSGNTHPDLQAAPCLVTGGVDTHLDLNVAAALDPVGGLLAVAEFPTTSAGHRDLLGWLSGFGPVARVGVEGTGSYGAGLARFLRRAGVEIVEVDRPNRQARRRSGKSDPLDAVEAARAALSGRACGAAKSRDGNVEAIRALVVAKRSARSAKIQALNQIRHLSFTAPEELRQRLAGVSRHHLAARAAALRPATGEGADPVVAATKTALRILGRRVLALDEEKARIDALLTGLVTQTAPQLLAVFGVGVDTAAALLVTAGDNPGRLRSEAAWAHLCGTAPIPASSGKVTRYRLSRGGDRQANRALWGIVITRLRNDPRTRAYMARRLGEGRSKPEVIRVLKRYVAREVYHRLPRP

SEQ ID NO: 362680 - protein, 407 aa, unidentified
MSNLRQIRPTVDCVRVPDGDHPGRRLQEVQACPAMTRSVLGLADHLGRLGVTRVVMEATADYWKPVFYLLEAAGLETWLVNAKDVKHLPGRPKTDKLDAVWLCKVAERQMLRPSFVPPPPIRQLRDLTRYRADLVAARTAEKQRVEKLLEDACIKLSAVVADIFGVSGRDMLAALVAGERDPKVLAQLARRSMRAKIAVLEEAFTGHFTTHHAFLLRTMPGRVDAISADIAALDDRIAAQAAPLAGAVARLDEIPGISLASAHVILAEIGTDMTRFPTAAHLASWARLAPGISESAGKKKGKGSTGHGNAYLASVLGNAAAGAAKTDTFLGEKYRRIARRRGSKRAIVALGRSILVIAWHLLSDPEARFYDLGPGHHAARIDPERRKRTHIRELEALGYTVTRKPAA

SEQ ID NO: 362681 - protein, 401 aa, unidentified
MKEFTAEGAKIQTAAAWESATCERVDEYYSLYVGLDVHKDSIAIGVAWPGRGEAEYRGEIANKPKTVAKLVQRLSEECGGGVVLFCYEAGPCGYGLYRQIVESGHDCEVVAPSLVPRKPGDRVKTDRRDALKLSRQLRSGDLTAVWVPDGEQEAMRDLTRARGDMKSQQLKARQQLNAFVLRHGHHWPTHKNRWTKSHYHWLESLKFEHSWQQVVLQEYIDAVKAANQRVADITDQMMSALGQWSLKPVVESLVALRGIDKVAAMVLLAELGDISRFDSPRQLMAYLGLVPSEHSTGKRRSQGAITLTGNAHARRMLVESAWSYRFPARQTMHLKRKAVNASQQAKAIAWRAQKRLCGRYRSLTQAGKNQKLVCVAIARELVGFIWDVVRHEMPRAQTQTP

SEQ ID NO: 362682 - protein, 366 aa, unidentified
MGEHSEVFVAFDVAKKKHAVAIAEGGRTGEVRFLGDVDNALLSIERTIKRLADRYEKLHLCFEAGPTGYGLYRQVKALGHDCMVVAPALIPKRAGERIKTSRRDAVTLARLHRAGELTGVWAPDAAHEAVRDLVRARAAASDDLRRKRQQLLSFLLRHSRIYSGGGHWTLAHRRWLAGQKFEHAAQQIVFQEGIDSIDDALQRLRREAARRHRSGVVHGSRRGGLSGDARRFVSRRRNLRRGDRRRATVRYAATADVLGLVPAESSTGDTIRRKGLTLAGNRRARRALVEAAWTYRYPARVSDTLRARLDGLPKSVRDIAWKAQVRLCARYRRLSATGKKLPVVVAAIAREMAAFLWAIGREVEPA

SEQ ID NO: 362683 - protein, 366 aa, unidentified
MKKISTVRVNGNMIFKGHKLTIGVDLGDRWSCYCVLDEAGEILLEQKVATTPEAMKQIFEKIPRSLIAMETGTHSPWVSRLLRELGHEVLVAHAQKVQLISKSNRKDDRHDARTLARLARIDPELLGPVRHRSAKAQIHLTVIRARAELVSARTALVNAARGLVKSYGQRLPKCGTQQVSRELAAGLNTELREILEPLLKEIESLNERIKEYEVRMEKIARESYPQVELLKQVKGVGTQIALTYVLTLEDPHRFPKSRDVGCFLGLRPGRRDSGESQPQMHISKEGDRYLRTMLVQGAHYILGPFGEDSDLRRWGLKLAARGGKNGKKRAVVAVARKLAVLLHRLWVSGEVYEPLRNSQKALRAVA

SEQ ID NO: 362684 - protein, 350 aa, unidentified
MTQRNKPRDAAVFGIDIGKNTFHVVGLDSTGAPIQRATFRRETLLQFFERAARTVVGMEACPGSQWLARKLKALGHTVRIVPAKFVKPYVKSNKNDIIDAEAIAEAVTRPTMRFVEIRSPEQVDLQALHRVRDRLVAQRTRVICQMRAFCLEYGIAMHQGAGKFKADLPRVVADEENDLSSAMRRLLTELFDDVKNLEARIKEVTGEIEAVAAADDTARRLMTVPGIGPLAATALLAAAGRGLQFRKARDMAAWLGLVPREYSTGGKTTLLGISKRGSSYLRRLLIHGARSCLLHLDRSRDRLGSWIDGLQSRMHNNKATVALAAKMARVAWVVITKPGATYERRGLAAA

SEQ ID NO: 362685 - protein, 318 aa, unidentified
MTGQASIYVGIDVSKGRLDVAIGEQGEFWNVANDEKGIAKLVERMKEVQPELIVLESTGGLELPVMAELYASQVPVALVNPGRVREFARSIGLLAKTDKLDARLLARFAEAVKPPVTHLPDEQEQHLIALVTRRRQLIEMLVAEQNRLNTVRHSMRVNLEQHITWLRQALADLDREIQQFIHQSPIWKDKGDLLQSVPGVGPVTACTLLAELPELGRLDRKKIAALVGVAPFNDDSGHRRGKRRVKGGRSSVRSVLYMAALSASKFNPVLSLFYKRLIQHGKEKKVALTACMRKLLTFLNAILRDQKRWNPSLKQFAS

SEQ ID NO: 362686 - protein, 324 aa, unidentified
MRFCGIDLHSNNSVVVVTDETDKVLVSRRCPNDLQKILALLAPYRDELTGIVVESTYNWYWLVDGLMAAGYNVKLANTVAMKRYDGLKHSDDETDAAHLAHLLRLGILPTGHIHPPTERALRDLARKRIQLVRDRTRMCWRCRTSSPGRPAVCVSSNAIKRWTAQDVVALGLEADICLAMQTNVAVIAALNLEIERIEARLLEGAKLRPDYARLKSIPGIGEVLAIVIMLETGDVSRFAQVGNFASYARCVDSARYSNGKKKGERQHQERQCLFGVAFIEAANFARRFNEEARRFFDRKKARANGVVATQGAGAQTGAGELPRC

SEQ ID NO: 362687 - protein, 335 aa, unidentified
MDREYVGIDFHRRRSVIVRKNAAGEKLSSVRVANDPWVIAAAVAEAGPEPEVVIEATYGWYWIVDWLHEQGATVHLANPSGLNWGTRRVKNDERDATDLIDMLRLGRLPEARIAPPATRELRELVRYRAKLVALRSGLKAQVHAVMAKEGVLPAVTDMFCKAGNAQLDTMALGEAYTIRVESLRDLIEVYDREVAMLETKIRERLRGDRGYRAIQAINGIGPTMAAILVAEIGDVTRFRSAAALCSWAGLTPKHKESDTTVHRGQLTKQGSRLVRWAVIEGTVRYHGGSKLGADFRTIAERRGKNKATVAIARKVLTLVYYGLRDGEIRCLAKTA

SEQ ID NO: 362688 - protein, 311 aa, unidentified
MTILTSQMVVGIDIAKAEVVAYRTDQQSIEPIKNDRTSLKRWLKTLPAQSAIALEATNIYHLDTVELAHEMGHQVYVVDAYRVSHYRRGVGQRAKNDPCDARLLARYLTNEQVKLRVWSPPPKAYNLLKSLLHRRATLIQNHAGLMLSWANEPLLKKVQAAQQRAFKQADQAIQKLLRKVSKEAGIEENIDRCKAIEGVGELTATGLATTFMRGDFANSDAFIAFLGMDLAVDDSGKKNGPRYLTKKGDPEIRRLAYNAAMAACRSVKWKPFYESYLARGFSKTQALVALARKLCRVAFALMKNQSKYQPT

SEQ ID NO: 362689 - protein, 346 aa, unidentified
MEYIALDVHKKYTWARVENTEGEKLYESRLQHAHGSIKNFINRWERQSPVAVETVGNWYWIVDEIEEGGGKPQLVNARLAKLMMGSVNKSDKLDAKGMNRLQRTGTLPTVWIPPSSVRDARELPRTRMVFSRQRTQLKNRVHATLAKYGFVVEEASDAFGKKGRAIVEGILVKLPPYTEQAVRRVLGQLDHVNENLKVIEAQMMEAFAPCAETNLLKSLPGVGDILAVVIWTEIGTMERFARAEQFASYCGLVAREHSSGGKFHYGAVRRDVNVYLKWAFVEAANSSILNRERCGYDHISRLYQRIKSRRGHGKAKVAVARHLSEASFWMLKKGESYREPVSSTQR

SEQ ID NO: 362690 - protein, 366 aa, unidentified
MGWTPPRRPWCARVVAFVTTEQEASVSKVSTIGVDLAKHVFQAHGADASGKVVFRKRLRREKVLEFFAGKPACVVAMEACSSAHHWARELARLGHIVRLIPPAYVKPFVKRQKNDAADAEAICEAAQRPTMRFVAVKSATAQANAVVFRARDLLVRQRTQAINALRGHLGEYGLVVAKGPGHVIKLVEHVEDPGSDVPDAARLVLRTLVEALRFLSERIDLLDREIARRAREDDEVRRLTSIPGVGPITATALAALAPSADAFKKGRDFAAWVGLTPTQHSTGGKQKLGTTSKMGERTLRRLLIIGASSVVRKALRQGIAAESWLGRMLARKPRMLVIVALANKMARIAWAVQAKGGVYRAPAVVA

SEQ ID NO: 362691 - protein, 462 aa, unidentified
MSRPRSTPATHRIEGLPTIFANAAGIDIGADEIVVAVPPDRDPEPVRVFRTFTPDLEALAAWLLSCRIDTVAMESTGVYWVPIYELLEQQGMVPYLVNGRHVKTVPGRKSDWNDAQWLQKLHALGLLAASFRPDAEIAALRTLVRYRAELIQHRAPHILHIQKAMQQMNIQLERVLSDIMGVTGQAIIRAIVAGERDPVVLAQLRNPACKSSEEMIAKALTGTWKEELLFVLQQALVIYDVYTAQIAVSDSELEHYLQQMEARSGDPTAPLPDLPPAKTDSHSKNAPSFNARAHYARLLGVDLVAVMGLSSSSVQTIISEIGTDMSRFPTVKHFGAWLGLAPRNDISGGKVLRSRTRKVTNRATQAFRQAAQSVSRSDSAVGAYYRSMRARKGPEQANVATAHKIARIVYHLLKYGEAYEAESVAAYEQQRQERELRVLTRRAAKLGYTLTAVQEPSPDPLP

SEQ ID NO: 362692 - protein, 462 aa, unidentified
MPRPSRTPATYRIEGLPTIFVNAAGMDIGADEIVVALPPDRDPQPIRAFRSFTPDLEALVIWLLECGIDTVAMESTGVYWIPIYELLEQHGIVPYLVNGRHVKSVPGRKSDWNDAQWLQKLHALGLLRASFRPDTEISALRTLVRYRAELIAHRAPHILHMQRALQQMNVQLERVLSDIMGTTGQEIIRAIVAGERDPVVLAQLRNPACKSSEEMIAKALRGTWKPELLFVLAQALTLYDVYTAQVVVCDGELERYLGQLEARSGDPQAPLPDLPATKTDSHSKNAPGFNARAHYARLLGVDLVAVMGLSASSVQTIISEIGTDMSRFATEKHFCAWLGLAPRNDISGGKVLRSRTRKVTNRATQAFRQAAQSVSRSDSAVGAYYRSMRARKGPEQANVATAHKIARMVYHLLKYGEAYEAESAAAYEQQRQERELRQLTRRAAKLGYTLAPVQELLADTSP

SEQ ID NO: 362693 - protein, 432 aa, unidentified
MNELDVGSALPFSSNISQGCVPSLGRHSFCNSSQKKVTTMFFVGIDIAKNSHEAAVIDESGNVVVKPFKFPNSLGGFEKFLAAVKGVSEDLSQFEFGMEATGHYWLNLYTKLMDFNVVVHVINPVQSDALRGLYIRKTKNDAKDAFIIAELIRFGRYSETTLSDTDLFSLRELTRQRFYLVDCISDAKRKAISFIDKIFPEYQTLFSDIFGATSVELLQTYTSPDVIAELDTELFTRFLKSVSHGRFGKSKAEEIQDVAKNTFGSFLFADSATLAIRQFIQQIKLLEEQIAELEEFISEKFASFDCKLDTIVGVGTTLAASFLAEIGDITRFESPDKLAAFAGIDPSVKQSGEFSGTRNKMSKRGSPYLRRSFWLAAVSGIRSNPALKAIYDKKHAQGKHHAVAVSAVMHKLCNIVFAILKSNEPYKIILPE

SEQ ID NO: 362694 - protein, 349 aa, unidentified
MLHVGLDLSRRRVDVCLISSEGELVEHFRAPADRDGLYGLSRRVAVYDEPVRGVVESMNGARFVHDELVRYGWEVLVADAQRVKGLAPLACKTDRIDARVLAELSFRDLVPAIWLPTPELRQERERSRWRLHLVKHRSILKNRVHASLIAFGHQVPMADLFGAGGRRLLAELDFPEPWLGHVRASVELIDDLDRRIAEIERWLQRSGADHRYIPLLMSAPGIGWVTGFTIAAEIGDISRFSSPVKLTGYTGLCPRVNQSGDMDRRGPISKHGPRYLRWGLMEAAIHASAHPLYKERYQRTKRRLGRQRGAKVAQIELARKLTEAIWYMLTRNQPFMPFAPEGAISRLTA

SEQ ID NO: 362695 - protein, 384 aa, unidentified
MNKHSMIFIGLDTHKEFHEVAYCEEQRGATPVHYGRIPSSKVSVKKLLRQFKSKYPGATLHVVYEAGPCGYWIYRLITSLGHCCYIVAPSLIPKKPGERIKTDRRDALKLVRSLKSEDLTPIYVPEPEDEAVRDLSRAREAAMKDLKEAKYQLKALLLRNNIRYEGTANWSKKHLRWLTELILPHPAQQIVLQEQLQTIEERIRRLERLDNELTHHVHQWRYYPVVKAVQAMRGVRLLVAVGVVAELGDLNRFDHPRKLMAYLGLVPSEQSSGGKRHLGAITKAGNGRARRLLIEGAHSYRYPANVSTELQLRQEGLPKDIVDIAWKAQLRLCKRYQRMSKKGKHYNLIITAIAREMAAYIWAIAKEVVLTPVNPKLRLSRVPA

SEQ ID NO: 362696 - protein, 434 aa, unidentified
MINSTCPFDLVIGLDRSDRKADLYLIDTASGQTERQTIGTSPEALHDWLLHLRQKYPDARVAICLEQPAASLILFLEAYLWITLYAINPITLQKFREAFVTSRAKDDGKDAQYLGELLWTHHSKLKPWQPDDSQTRRLQQLVSHRRAVIDERTALSNRLKALLKQYFPQALELCGEDLWRPLATAFLLKWPTLQSLQKAKPENIKSFYYLRGSRSQKLIAERLEQIAKAIPLTDETAVLESHTLRVQLICRQLQLLQKTIAQFDERAAAAFKAHEDHELFASLPGAGPVLAPRLLASMGSERERFAHSSNLQRFSGIAPITKQSGATRYIHRRYRCPVFCKQSFHEYAKESILFSRWAAAFYLQQQQKGCGHHTALRALAFKWQRIIWKCWQSRQPYKEEIYEAALRKNRSPIVALFDKIELGKSPVKTAAKKS

SEQ ID NO: 362697 - protein, 370 aa, unidentified
MEKTTPLFVGLDVHKDSIAVAHAAAGSAEPPVFVGSIGTRQADIDKLIRRLRTKASALVFAYEAGPCGYGLHRFLTAKGIECRVVAPSLIPKKPGDKVKNDRRDTVEIARHLRSGDLTTVYVPRVEDEAIRDLSRARDAARVTLKAAKQRLKSFLLRQGLHYVGRADWNDAHKRYLAQVVCPTAAQQIVFQESIRAVDEQVERLARIENELLEAAPAWRLFPVIQALQALRGVQTVVAITVVAELGDLTRFHDPRQLASFVGLIPSEYSSGDKRRQGGITKTGNSRARRALTEAAWAYRYNAKISPIIQKRLGGLPANIRAIGWKAQVRLCKRYRRLLARGKHANVVITAVARELIAFMWAIAKEVPLAT

SEQ ID NO: 362698 - protein, 345 aa, unidentified
MEIIAMDSHKYYSQICVQQKDGRFLCEKRIEHRKGQISEFLSQWSCGSPVALETIGNWYWIVDEIEQAGMQPRLVHAHKAKLMIGSINKTDKLDARGLNKLQRTGTLPTVWIPPKQVRDHRELPRTRMVFANLRTRLKNRIHSVLDKYGLHTDFETIADIFGKTGREQMALTIKKLPPETRYTFRCLMRELDTAENQIRRIEKRMKKVFIKTEQVSRLMTIPGIGFILAVTIANEIGDISRFSTPQRFASYSGTVPRVHSSGGYTRYGKLRNDVNHYLKWAYSEAGNSTAVNHKRFQSRHTSKLYKRIKEKKGHAKAVGAVARHLAEASFWVLTRNEDYKEPKKI

SEQ ID NO: 362699 - protein, 423 aa, unidentified
MVSIRSKVCGIDVHKKILVATVLDRFGNKQTNNFTNNISGIYLLRNWIYQEKCEIVAFESTGDYWVQLYESLEPIVPIEVANAFHIKHFPGKKTDVEDSEWIAQLALNSQITPSRIFQGEQRDLRSLTRYRELLIQQRTLLKNKIHHILDASNVRLSHVLTDIFGKTGNLVINALINGTCIDEVLKNIPKNLNKRKDEIREAISCSLSQRELLMLKSSLNLINGINSEIKEIETMIDYYITANHQDKMKILLSIPGVGHTGACVLISEIGNASDFSSGEKLAAWAGIVPSVYQSAGTLRMGSITKRGNSHLRTILVEIAHACARKKGTKLWEFFERIKNHSGYKKAIVALARKLITIIWHLLMNKETYADENYTQKQKTTIPEFLKMVSKIGIDEAIELIENAKKEVNNQLETGSLFKSGEGI

SEQ ID NO: 362700 - protein, 343 aa, unidentified
MKLMRIGVDLAKNVFQIHGVDHHEQPIWRQRLPRDRWLQTVLEKIEPGCEIGMESCGGAHHWARQLQAHGFRVRLIAPQFVKPYVKSNKNDANDAEAICEAMSRPSMRFVAVKTIEQQDIQATHRIRAGLIEQRTAKANQIRGLIAEYGLVAPKELLMLRRAIPCWLEDADNGLTARFRRLLNGLWDDLRALDYRVRELDGEISAIAASDPAAARLQQLRGVGPMISTALVAAIGDASQFDNGRQLAASLGLTPKQHSSGGKDRLLGISKRGDAYLRTLMIHGARSALRTAKSKDDRLSQWAVRLAERSHPNVAAIALANKTARMAWAMLRNGTDYQPDRAAA

SEQ ID NO: 362701 - protein, 356 aa, unidentified
MYYVGLDVHATRSSLCILDANGKLVKHLDVKGAWPRLLEVVDAQVPKPFAICYEASCGYGYLYDQFARRAERVAVAHPGQLRLIFRSKKKHDRVDGEKLAKLLYLDEVPQVHVPGVDVRAWRGLINYRRKLVARRAAAKTQLRALLRGSGIAMGVKGGLWTKRGIAWLTELGLASSADGVRRDVLVDDLEHLAGKVAAVEKELDRIARGHPGVALLRTIPGVGPRTAEAFVAHVDDVTRFARVKRVGSYFGLVPCQDASADKNRLGHITKDGPAQARWLLAEAAWQGRRRSPRIRAFFERVMRGDPGRKKVALVATAHYLTRVMAAMLRSGEAWREEPPQTPAVNQQEGQKTAERE

SEQ ID NO: 362702 - protein, 336 aa, unidentified
MSHYCGIDLHSNNHVLVVIDEEDKRLYEKRLGNDLSQTLKALSPCRESLHGIAVESTFNWYWLVDGPQEHGYDLQLVNTAAVKQYDGLKYIDDHHDAFHLAHLMRLGILPTGYIYPKEQRAIRDLLRPRLSLVRTASAQLISVQSQLWRSTGIRIQSGELRKLEFAPPLLDDYTLQAVQAGLAVYQVIQREIDALEQTAHQAVKLTDAFKILQTITGIGKILGLTIMLETGTIDRFAGAGNFASYCRCVDSKRTSNGKKKGEGNAKAGNKYLSWAFSEAAHFAVRFEPLAQRFYERKKAKTNGIIAIRAVARKLARATWMMLKHQVPYDARRMFPG

SEQ ID NO: 362703 - protein, 344 aa, unidentified
MWIIGCDYHPSFQQIAFVNQVTGEYDERRLEHKGGEAEQFYRNLAGQQVRVGMEATGGMRWFERLLGELGIELWIGDPVKVRAAAARKPKTDKEDARLLLRLLLEKRFPRIWIPTVEQRDARQLVLHRHRLVQTRTRAKNQLQAIARSEGLHAKCRVWSQAGQRELMALPLSPWGTVRRQDWQELLVELNQRIDPLDRALEQEAEQRPEVRLLMTHPGVGPVTAMAFVLTLCDPWRFSTSKQVAAYLGLVPQENSSGKNKQRLGHITKQGNRLLRGLLTEAAHAAAKHDPEWRRKYVRLAMKKNRSIATVAVARCLAVRLWWMWKLGLDYGQIQESRSHAEQPA

SEQ ID NO: 362704 - protein, 339 aa, unidentified
MLYVGLDVSVRRTSVCVMDVRGHVADEKSVPSTPEAIAAVINAAGAKVERVGLEAGINSAWIARGLLAAKLPVIVIDATHAAAALKTGFRNKTDKNDARGIADLMRVNKFRAVWVKSPEAQRDRTLLLVREQLRRHMLETLNTIWSILQGEGLNPPKITNPSFEALVKTSLEDEALAPLLQPLVTVVEHLECQVAELDKVIATRAKASSVCKLLMKVPGVGPLVALTYVAGVDNPARFVNSRSVGAHFGLTPRRFQSGEMDWSGGISRAGDASVRRALYQAANVLIHHSRGWCALKSWAVRIARRRGLGRAKVALARKLAVVLHRMWTTGEDYRVKAAT

SEQ ID NO: 362705 - protein, 405 aa, unidentified
MPYILALDVSMGHSYSVLYKDDTCLFEDEIEHTQRGFHALLEEIQHLPERPLIVFEATGIYSRPVEKFFQDHHFSYCLLNPLEAKKQMEESTLRSWKTDKSDAHRLAQTHLKNQRQPKEVQSNFYLEMRDLARFYQEIEKKITRLRMDLHNCLQLTFPELEQFFSNRLTPYALTLIRLFPHPDFVLASTRTKIKNKLINETRKKISANRAEQKADQIIHYAQCAYPAVEKDSIHCQKTIYYAELLQDLLEQKEALATQMIKKAEGSPCFLLYQTFPGIGALTAALLLGELGDITRFKTHKQLNAFVGIDIRRYQSGKYTGQDRINKRGNPKARKIIFFTIRNMIRQQRAAPNHIVDYYYKLKKQPIPKKDKVATVACMNKLLKCMHAMVRAHTEYVYAYAVSVDH

SEQ ID NO: 362706 - protein, 346 aa, unidentified
MDHYAGIDVSLECSSVCVVGASGKIVREAKVASEPEALIGWFHSLGFDLARIGLEAGPLSQWLYASMKQVGLAVELLETRHVSDAFKAMPVKSDRNDARNIAQLMRLGWFRPVHCKSMDAQEVRAMLTARKLVQSKLLDVENSLRGILRGFGLKVGKTTRTSFASRIEELVVGHPNLEEIGRALLRARAVLLTEFNGFEKRVRAMSRLHAQARLLMSTPAVGPIVSLTYASAIDDPSRFTSSKKAGPLFGLTPKKYQSGETDYSGRISKLGDASVREALYEAAHIILTKPIKGCAQLKSWAMRIARRAGMNRAKVALARKLAVIMLRMLKDNVPFKPVARPTPAAA

SEQ ID NO: 362707 - protein, 452 aa, unidentified
MTKKEKNKAPKHVSLPVINPNAAGIDIGSRLMAVAVPAGRDKACVKEFGSFTCDLHDIAKWLKQCKIETVAMECTGVYWKNLFLVLTEYGFDVCLANARHTRNVSGKKTDESDAQWIQRLHSCGLLSSSFLPDDLTTTLRSLVRHRRSLSQDSSRYILRMKKALELMNIKFHSLVRSITGKTGTAIVEAIIGGERAPEKLLAHVDYRVKASKEDLLKSMQGNWRADQLFLLAQCYKMHQFVEEQIRVCESQIEIALQTMEAAKNDGVIEETNLVELKAKNKKQPQFNTRSYLQKIHSVDVLAIYGISDVAGIEILAETGTDLSKWPTQQHFVSWLNLCPNNKISGGKLISSSLLKKKPNGATQAFKYAANGLQRSTHWLGDYFRRMKAKGGNKYAIVATARKLAIIYYKMVRYQQNFTPFNNEEYKSRFQRAKIAYLERTLVKLKASVGAVI

SEQ ID NO: 362708 - protein, 458 aa, unidentified
MQEATQHDAVDVFVGVDVDVDVDVGKGRHHAVALRRNGKRLYNKALPNDEVKLRALIAELKTHRRLLFVVDQPSTIGALPVAVARAEGVLVAYLPGLAMRRIADLHAGEAKTDARDAAIIAEAARSMPHTLRSLRLADEQLAELTMLRGFDDDLAAQLTQTSNRIRGLLTQIHPALERVLGPRLDHPAVLDLLERYPSPSALAAANEKTLANRLTKLAPRMGKNWAAEIVQALNEQAGIVPGTQAAAIVMPRLAQQLAALRKQRDEIAAEVERLVLAHPFWPVLTSMPGVGVRTAARRLTEAAPKAFATAAHLAAYVGLAPVTRRSGSSIRGEHPSRRGNKVLNAPCSSPPSLPYETQSHGPITRARSSRASATTKHSSRSHGDAATSCLPCCATAPFTHPSQPLTLDERHRGTRACCAATSPRGAAPLRRMRSRPDVARAPTPLHAVNLSPGRRRPL

SEQ ID NO: 362709 - protein, 399 aa, unidentified
MAQQLWAGVDAGKTEHHCVVINAEGQRLLSQRVPNDEAALLELINAVQALADRREITWAIDLNSGGAALLITLLITAEQRLLYIPGRTVYHASGGYRGDGKTDAKDAAIIADQGRMRRDLQPLRPGDEIAVDLRILTARRSDLVADRTRAINRLRAQLLEYFPALERAFDYSHSKAALILLSGYQTPDGLRRAGVARLEAWLRKRKAYNAAAVAARAIEAADAQHTTVPGQQIAAAMVARLAKEVMALDTEIGDTETMIEDRFRRHRHAEIILSMPGFGVALGAEFLAATGGDISAFDSVDRLAGVSGLAPVPRDSGRISGNLKRPRRYDRRLLRACYLSAQIAIRTDSASRTYYDRKRSEGKTHTQAVLALARRRLNVLWAMLRDHAAYQPTTTAAAA

SEQ ID NO: 362710 - protein, 403 aa, unidentified
MSTFFAGLDWASRTHSVCIIDERGTVCEQLEVTHDAAGLVQLQRRLTHYGRPPVAIERPSGMVVDTLVEAGFTVVPIHPNAVKATRPRYRSHGAKSDASDAYLLADLLRTDGHRFKPLAAQSDEIGALRALVRGRDDLVATRVQLANQLRSLLQSFWPGAADVFAEVDSPIALAFIERYPTPDSASRLGPRRMATFCAQHAYCGRRSPEELLERLRRAPAAVCEELAMDAKGELSRCLARTLARLVEQIRLLSSRIEHHVASLEDGRILMSFRRAGRLCAAQILAELGSVRERFDSDEQLAAEAGVVPLTYASGKSKAVTFRWACNHRLRAALTCLADNSRHASAWAAHVYAKARARGCDHPHAVRILSRAWLRVIWRAWTDRKLYDPTKHRAAQTLLQTAGA

SEQ ID NO: 362711 - protein, 405 aa, unidentified
MARVFVGHDWAEAHHDVFVEDEAGRRLGGGRLPEGVEGVARFHALVADHVEDPTDVVVATETDRGLFVGSLVAAGYTVLAVNPMSTSRYRERHTTSGAKSDPGDAWVLAELARTDHHNHRPIAGDSELVESIKVLTRAHQSLIWTRQRQTNQLRSTLREFYPAALDAFGELASTDALAVLAVAPTPSLGRQLSLSKIASALRRGGRQRRIDERAGEIQAALRSEQLTAPDLVTESMGSVVKALVGVTAELTAQIAELETELADRFDQHPDAKVIRSLPGLGMILGARVLAEFGDDPNRYVDAKSRKNYAGTSPITRASGKSHVVLARYARNKRLADACYLWAFAAITASAGARAFYDHRRTGGDTHNRALRALANRLVGILHGCLRHGTLYDEHTAWAHRTALAA

SEQ ID NO: 362712 - protein, 342 aa, unidentified
MTYYAGIDVSLECSSVCIVDASGKIVREAKVASEPEALIGWFGSLVFGVERIGLEAGPLSQWLFAGLKEAGLAVELLETRHVRAAFKTMPVKTDRKDAHGIADLMRLGWFRPVHCKSMGAQEVRAVLTARTLVQAKLHDIEMSLRGILRGFGLKVGRTTSNRFAGRIKELVGGHASLQVIAEALLGVHAVLLREFKGFEKRVRMMAREDGNTRLLMTTTGVGSVVSLTYASAIDDPGRFKRSKMVGAHFGLAQKKYQSGETDITGGISRCGDESVRTALFQAAHIILTRPVKSSVLKSWGHRLARRIGMKRAKVAVARKLAVIMHRMLVEQKPFNPAAAAAA

SEQ ID NO: 362713 - protein, 366 aa, unidentified
MIVIGTDTHKRTHALAAVDDGTGRIRGNREIKADETGHLAALKWARGLDDERVWAIEDCRSVSRRLEEALIAAGERVVRVAPHRMGASRRGEREPGKSDEIDSLAIARAVVKDGVECFPAAFLDEHAMEIRLIADHRHDLVVERTRMQNRLRWHLVTLAPELEASLRRGALADTRQLDRIDRQLRRIAAGARVRVAREQITQIRSLTRQINNLKDELAILITSHRPALLSETGCGPLTAAILIGRTAGAERFATDASFAQQTGTAPLKCSSGQRQQHRLNRGGDRQLNHALHIIAITRARYDPATRAYLARKQAEGKTTKGALRCLKRHLARRFHHLLAQPPAPELGRPDHDQKEQPTNTQLANIA

SEQ ID NO: 362714 - protein, 438 aa, unidentified
MSNKVIFNLDELFISVGIDVGADFSWMSIALPNQQFVGKPYKILHNSIDSLTTAVSKIKEAEELYSLESRIFLESTGIYHYPLFCYLRDKGFNCSVINPIITKNSTNINIRKVHNDRFDSKKAALVGLKPDLKVSLIPSDLALNCRNLCREYYDLMDNRSAYVNKLQGELRMAFPQYLGIFSKVTINTSLTLLETYTSPSAFLEADKQEIIDIIKSTARFGLTYAQNKYNAIIQAATDANQFGYIIDSNIKRIRLYISFIRKYDEEINSILESLHELVDANEDADFVKQIHLIETFKGAGFLSAVSIMGEIGNFSAFSKPKQLFAYFGLDPAVKQSGKFEGTKVQMSKRGSAIARRVIHTLTLQSISISRNGEAKNPVLREYYLKKCDSKPKLVAMGAVSHKVCNMIFAILRDNKPFKIIAPQEHIKQYNAAKCDIAA

SEQ ID NO: 362715 - protein, 462 aa, unidentified
MANEDQKDQPECREAIDEGFLVLRGDVAGIDVGSEEHWVCAPARTGTGREVAVFAATTPGVEQLAAWLKDRGVSSVALESTGVYWIVPHEMLEAHSFDVVLVDTRWLGRVPGRKKTDRRDCEWIQRLHSCGLLRGAFRPVEQVCMLRTLVRDKGTLIAERADWVRRIQKALDQMNVRVHRAVADVDGATGMAIIRAIVGGERDPHQLATLRDHRCRKSEAQIAEQLTGHWRDDHLFSLRQALHMYDALSDTIAAYAREILRHLETMTSVDRRDDQAPPPTSPTKARAIKSRGQDPLRHALYRMSGVDLTTIDAVGVDTVSVVLSEYGPNLLQFPTEKQFVSHVGLAPHLPKSGGKVVKKKKKPGSASARVGAALRMAATSLRHSQTALGAYYRQVARRAGADVAVFATARKLAQYIYRLLRWGQPYLDEGAAAYDKRYQLARAKRLAATAKDLGYTLIPVEA

SEQ ID NO: 362716 - protein, 316 aa, unidentified
MYLGIDVSKLTIDCCLIADGQNYQKKFQNNKGGFEQLTKWLQIHKVSDKLHCVCEATGTYYEALAEYLYSRYTITVENPRKIKGYAIAELQRSKTDTQDAKLIAQYCQDRKHKLKAWQPPAKEQKQLQEIARYLDYLKQQRATEKAKQHEAPDYIKSHIQTTISNLTAQIQTVKKQLLQFYKDNPSYNNLRKRLKTITGIGEQATAVLLSTYKRHEFKNAKQFTAYLGLDPRKYQSGTSVNGKSRISKIGSSEIRKSLYMPAVVAYRCNAFPEFVGRLKNKGKHIKMILIAIMRKLAVIAFTLLKNGQDFQVERYK

SEQ ID NO: 362717 - protein, 523 aa, unidentified
MASTRSSKRSRAAAEFLQKPRGIIHPRVQQVGPDHFGIVSVDCAKARCKWMLTDFYGTILVPPTEVANNRVELDAAVARCRAAMIQHALGDAIVAIERTGRYHHPVKNAFARAGFETRIVHPYATKQFRQPANPDNKTDDTDLAAIARAAVNGFALVENPLPEAWRQLQLCIRHRRDLVRKTSALACQIREHLDAAMPGYAACFADKLWDSNVAFCLVRQFGSATVLLQQGLTGLCHYLRQQKVRFQQRTLDTVLAWAQSAAAPDPAAELHRQIALAYHDDRQRKTEEILVLERNIAHRLAQTPYILLLSFPGINVVSAADYAGEMGPIENYANPRSITGRAGLFPSRYQSDRVDHADGPLVRRANRALRAVIMGIADNLILCNQRFRMLAAAWKAAGKDPRLSHVKVACRFCRMSFHMVAGRQVFRHPSLRERGYILDKLLAFHLEHQTPYQQSLRDLNLAFTQIPAKEHAAEAQPLIDRQRTARRGRARGPQHIGEILAIVLARLGVGALPSTPSGDQDLP

SEQ ID NO: 362718 - protein, 386 aa, unidentified
MQYPSDTSRCLAALDQDTTLIAVIEMSLSTWLVAGVVPGIERQPLKKLAADEHALLKLLHRWRCEAAKAGHKITRIAVAFEAGRDGFWLARWLRAHGIEAHVIHSSSVAVPREHRRAKTDRLDTEMLKRAFLGWLRGERDHCKTVAIPTLAEEDAKRPNREREGLVGEAGRLVNRMKAVFVRLGIRGFNPKLKKAAERLDALHTPEGEPIPPNTVAALRRDMERLRLVREQIRQIEAARQERLQSAPEEGAHAMVRLLASVRGIGIETADMLVQEVLSRELRDRRAAARYSGLTGSPDESGRRRREKGLAKAGNPRVRRGMIQLAWRFLMFQKNSALAQWFHLRTQNAPRTRKTMIVALARKLLIALWRFVREGVVPEGLLLRPVG

SEQ ID NO: 362719 - protein, 400 aa, unidentified
MISVGIDVSKEKSTVCILKPYGEVVSRPFEVCHVEKELSELTSMLLRLNDDIRVVMEATGIYHLPVLSYLKEKGLFVAVINPFEMKEYRCQGLRRVKTDKQDAITISNYGIDHWYRLKNYEAEESVYAELKLLGRQYRHYMRMRVESVLELTHLLDYTMPGIKTLLKGWNETNGKDKLGDFAEEYWHYDNITKKSEEQFIESYLKWAKEKGYHQSQDKAVKIYALAKEGIPTVSSDTPSTKMLVQEAVRVLREVDNTLMTILTQMQALAKSLPEYPVVRAMGGVGNVLAPKLIAEIGDVRRFHSGKALIAHAGIDAPPYQSGQFIGTERKISKRGSSSLRKIGYEVMRCLKTHKEPEDAAVYKFILKKEKEGKSKRAAKIAGLNKFLRIYYARVMEVYQK

SEQ ID NO: 362720 - protein, 523 aa, unidentified
MSATRSRKRSKARSQQFIQKPRGVVHPRVQRVGPEHFGVVCVDCAKARFKWMLCDFYGNVLVPPTVVAHNRVELDAALFQLREARAAHDIQDLIVAIERTGRYHHVPRKTFARECSDVRTVHPFTTKQFRQPSDPGVKTDDTDLAAIFRAAINGFALVEAEPEPRYRELQLSIRHRRDLVHKSTAVRCQLREHLDAAFPGYAAGFANLWDSGVALLLVRHFDSAEALLHAGKAGLRDFLRQRRVRFQQRTLDNVLAWAAQAAPADTAALRHRRIALALDDDRTRKTQEIQAAERDIASQLVHTPYIILLSFPGINVVSAADFGGEAGPMSNYATGKAITGRAGLFPSRYQSDRVDRADGPLVRRANRSLRAAILGIAENLIGCNRHFGLLAEMWRAKGHDPRLNHVRVACRFCRIAFHMVAGQRVFKHPSMQQRHYILDKLSAFHREHDTPMKQTMTDLLAAIEQLPRSAHAEEAEPLRAELDRIQAGRRRGPQLLGDILPIVLARLGVGRVQSPKSGESDPA

SEQ ID NO: 362721 - protein, 369 aa, unidentified
MKKNSKNNKEKARQKALQAKSRKMKLTVGIDLGDEWSHCCFLGEDGEIVEESRVKTTREAVKSRFGELKLAVMALEVGTHSRWVSQMLSEFGHEVIVANARELRAITGSDRKSDRVDAEKLARYARVDRRILRPIKHRGEEAQVDLVVIRARAVLVKTRTQLVNSVRGVVKSFGYRMPNCSTERFVKLNNEVPEKLREHLAGLMEVLEHVQKQIEEYDQRVEKLAKEKYPETTVLRQIWGVGEITSVSYVLTIEDKGRFEKSRDVGPYLGLRPRRSQSSESDPELRITKAGDCFLRSLLVECAQRILSKKGPDTALKQFGLRIEARGKKKAKKRAIVAVARKLAVLLHKLWVTGEVYEPFPEATVRKAA

SEQ ID NO: 362722 - protein, 387 aa, unidentified
MQASTVSTPITDRISTIFGAIELSQKTWLVTIHSPDKDKISRHKVPGGDHVSLLALIDRVRDRAARTLGVAPAVVSCYEAGYDGFWLHRLLQAAGITNYVFDPSSIAVDQRARRVKTDRIDGEKMLRTLMAYLRGEPRVVRIVRVPAPEQEDARRDTRERDRLTKEQTAHTNRIKALLRLHGFAVGNPRRRDWLIWLAAQRDWQGQAVPPRILTEIEHEHARLMLVRKQLEALAQAPAAADLTPAAAEMARRSELLLRLKSLGPAFATTLTQEVFYKDFHNRREVASYFGLAPSPWQSGGTDRDQGISKAGNPRARCSAVELSWLWLRHQPDSELSQWFRQRTLNASKRTKRIAIVALARKLMVALWRYLTTGLVPAGAMLKSAEAQ

SEQ ID NO: 362723 - protein, 388 aa, unidentified
MSPSFDASKSLTALDQDSTLVAVIEMSQTKWLIAATVPGFERNPLKKLDADPDSVLRLLHRWRSEAIQAGREVRRIVVAYEAGRDGFWLARWLQARAVEAYVIHPSSVAVSREHRRAKTDRLDTELLMRAFLGWLRGEKRHCSMAAIPTIDEEEARRPNRERDNLVRERTRIVNRIKAILARFGIRTFKPNLRKAAEKLEALQTAEGMPLPERSRAELRRNLGRLHLLREQIHAIEQERLRQLAVVLDTEKGPLAMVRLLARIIGVGIETADMLVNEILSRGLRDRRAVARYAGLTGAPDESGQRRREKGLARAGNARVRYGMILLAWRFLQFQKDSALAHWFCARTADGRGGTRKTMIVALARKLLIAFWRLVTTGEIPKGVALRPA

SEQ ID NO: 362724 - protein, 392 aa, unidentified
MEVIVEKCCGIDVHQKQITLTTLIGRADQKPQKHSRRYGTTSPELRQCAAWLLAQDIEVVLMESTGQYWRPVWQILEPYGFKMILCNPRIIKNIPGKKTDQKDSEWIAELARLGLVAASFIPPRPIQELRESTRARKSFTQAATQVKNQIHNILQRSNIKLTTYVTDIFGTSGQRLLALLIRDQPITPKSVAACMHDRMKAQPEQLVAALDGCLSASDRRLLEIQLAHLADLKRTIRELELLIEEQLQPLEDLYLRLQTIPGVSQHIAKIIIAEIGTDVTPFPSARHLASWAGVSPGNYESAGISKGSHVTHGNVHLKSALVTAALAAKKQAHSGLKDFFYRLNRRMGAQKALVALAHKILKIIYAMIERGTCYQEYQKDQRVQSLTGPTDV

SEQ ID NO: 362725 - protein, 377 aa, unidentified
MYRIIKIGMDVHSKNYTLCAMEPVIGEEDRIFANIQVTADYKNVLMFIEDLKLKLGLDNEYDIVCGYEAGCLGYSLYNQLTAAGVKCVILAPTTMLTQQGKRVKTDARDALMIAQCLSYGGYHAVYIPTEEDDSVKEYLRMRDDHKDALKKIKQQINALCLRHGYHYDGTKWTIKHVTWLRKLELSPLYRETLNEYMASYDEQTAKIERFDKRIEEIASQEQYQEKSKRLGCFLGIKTHTALSLIVETGDFTRFAKGNTYAAFLGLAPGERSSGEKISRTGISKAGNSHLRLLLIEAARGICKGTVGHKSKELRSRQNGNPAEVIGYADKANTRLRSRYYKFIRHGKAKNVAVAAIARELACFVWGMMTDNISLKAE

SEQ ID NO: 362726 - protein, 413 aa, unidentified
MEVIIDRCAGLDVHKKTVAACVRSPGGGRSRRSEVRTFGTFAEELVELRDWLKAEGVTTVAMEATGVYWKPVFYALEDDFELLLVNATFVKKLPGRKTDVKDAEWLGQLLECGLLRGSFVPPPVIRELRDLTRYRKRLVQERARESQRVEKLLEDTGIKVSAVASCTLGASVRKMLDALVAGERDPAVLAELAKGRLRSKLPELRRSLDTSLFREHHAIMLSEHLAHIDHLSASIERLDGRVDQVIAPFAETRDRLMTIPGVGKTAAEVIIAEIGTDMSRFPTAAHLASWAGMCPGNNESAGKHRSGHTTSGDPWLAGMLTECGWAARYTKDTYLAAQFWQIARRRGQKRASIAVGHSLLVIAWHIISTPGLVYSELGGDYFNRRLDPELRARKLLAQLQSLGLKVTVEPAAA

SEQ ID NO: 362727 - protein, 413 aa, unidentified
MSIDPGTAAARVTAGVDWAKDDHAVCVVGGQGEALERFAVRHDAAGLREMAARLLRAGVSQAGIERGDGPVVDALLQAGLTVFVIPPGQVKNLRSRYGSAGNKDDRFDAYVLADVVRTDARRLRPMERDSDQTIALRSTVRARRDLVGHRVAAANQLRAHLQIVFPAGAALFAGIDSPITLSFLTRFTTQEQADWLSPLRLGAWLKSVSYSGKTDPAVLHARLLAAPRGQAGPPARVHAATTLALVAVLRALNAQIKALADSVDAQMAAHPDAAVFTSLPRSGTVRAARLLAEIGDARGRFPTRDSLTCLAGVAPSTRQSGKVKSVIFRWGADRQLRDALCDFAGDSRRASPWAADLYDRAIARGCDHPHAVRILARAWAHVIWRCWQDHAPYDPAAHNSLQAILNQQPPIAA

SEQ ID NO: 362728 - protein, 342 aa, unidentified
MRRPKYYVGIDISSASFTAGAGTTPWKVVIKATEFENTTDGFVAFMDWMKERSILADNAVLCMEATGVYGEKLAYYLYANHYRLAVEPPLKVKRAFMPHGHKNDRVDSQQIAEYSCRFYDELRYWEPKEELLEQIKVLLATREQFTVQKTTHQNILKALKRKVVATPLAEQLHQQSIRQIKQNIKQIDAEIQRLIDQDPKYGQMIKLLMTVPGVGLLLASNILLMMETTPDDPTNPRQLASYIGISPYECHSGSSVYRPASSRHYGPAMSRKLLYLASLSVRTHNQTFKKYFLRKVAEGKSKKLVLNNIANKLLKIMCAVVRTNTPYISNYRSVHPSLLLNP

SEQ ID NO: 362729 - protein, 373 aa, unidentified
MNVIYYVGLDVHKDSIAVSIAPSDSTEVRRWGVIGGTHDHVHRFLKQLQAAHPEATLQFCYEAGPCGFPLCRFIRGLGHECIIVCPSLVPRRPGDRVKTNRRDADQLARLYRAGELKGIHIPEPEDEAMRDLLRARDQVRRAQHRARQQLKMFLLRHNFRYAGATSWTPAHLRYLARIKMPFPTQQFVLQELMNSISEAGERLERFDTEIARQVAGWRWEPVVKALMSLRGVALLNAATLVAELGDLHRFTRSEQLMGYLGLVPSEESTGDERQQGGITKMGNGYARRALVEAAHHYRAPARLTPHLQKRQEGLPKGVTDVAWEAQRRLHHRYKHLSGVGRKKMPVVIAAVARELSGFVWAIARQVQPHPRKG

SEQ ID NO: 362730 - protein, 382 aa, unidentified
MEILHSCCAGLDVHKKTVVACVRRIGPDGQAESQVRSFGTVTAELLALGDWLAGHGVRQVAMESTGVYWKPVWHLLEDRFELLLINAQHIKQVPGRKTDVKDCQWIAELLQYGLLRPSFVPPPPIRELRDLTRQRTQLVGERARAVNRVQKTLEDANIKLAGVAADVLGVSGRAMIRALIAGGDDPKELAELARGRMRAKMPQLELALRGRVGEHHRFMLGLALDQIESLEALIGRIDARIAEAAAPFIETVERLRTIPGVDRRAAEVLLAEAGPDMSRFPTAGHLCSWAGMCPGNNESAGKRRSGRTTPGSRWLRSVLVQAAWAASHTKATSLGAAYRAWARRLGRKRALVALGHKILAIVYEMLSRQVDYLERFTPPRAA

SEQ ID NO: 362731 - protein, 358 aa, unidentified
MQHQVKELNFGGQNIYVGLDTHKNQTTVTVLGENLHHKTFSQPTAADILARYLKKNFPGANYYAAYEAGFSGFWLQETLQSQGINCIVVNAADVPTKGKERHQKNDNVDSRKIAYALRKGDLEAIYVPSKECQRDRGLLRARHRIVSNQTRCRNRIKALLNFFGIVYPEKFSKSGTHWSRRFMDWLKSVDLGGSGNDTLAIYLEEAEFLRALLAKTMKKINHLSNKERYAKNVKLLISVPGVGRLIAMILLTELERIDRFKTRDSLCNYVGLIPDVYSSDQTVHVGDITQRGNKSLKKFLIESSWIAARTDPALVMKYNQLCSRMNGNKAIIRIARMLLSRIRYILMHEQEYQMAVVA

SEQ ID NO: 362732 - protein, 387 aa, unidentified
MPQPNDLSRSLVALDQDSTIIAVVEMSQSSWLVAGMLPGIERQPRKKLEPSAERLLGLLHRWRDEAVKAGRKITRIALAFEAGRDGFWLARWLRAHGVEAHVIHPSSVAVSREHRRAKTDRLDTELLKRGFLGWLRGERGHCTMARIPTIAEEDAKRPNRERECLVRERTRIVNRMKGTLARLGIRNFKPTLRKAAERLATLHTPEGSVLPPNVSAELQRNMARLGFVVSQIKEIEGARQKRLEQEPETEPHAMVRQLARVVGVGVETADILVNEVLSRPMRDRKAVARYAGLTGSPDESGAKRREQGLAKAGNARVRRGMIQLAWRFLRFQKESALALWYRARTADSGVGTRKTMIVALARKLLIALWRFVTTGETLEGVVLRPAG

SEQ ID NO: 362733 - protein, 443 aa, unidentified
MSNLAVLDPRAAFVDVGSEKMHVSIAGGPPAVFGTVTSQLHALRDYLAEHQVRSVAMEATGVYWLPLYGVLEAAGMEVVMVDGRQTRNLPGRKTDMKDCQWGATLHAHGLLRAGFVPPAHIRRLQDYLRLRGEHIAAAAGHVQHMQKALERMNVKLHEVISSLTGASGLAVIRAILAGERDPQVLLGLCDVRIRNVKAERIVESLRGDWAEEHLFALAQAVQSWDHYQGLIAACDRQIAVVLRQMPDAKAPPSAASTKTGKPRTRPGVNAPDIAGLREILAQICGAKDLTTLPAHSEYSVLQLIGEVGTDLTKWRTEKHFTSWLGLAPGTAQSGKRKTSIKRRRNRAGQMFCVMARALARSKYVALGGFYRRMAARRGGLVANKALARKLATLFWRVMVKGLDFVETGVAQYEAKVLETKHRILQRLARQLGQQIVPNPAPVV

SEQ ID NO: 362734 - protein, 297 aa, unidentified
MSVYVGIDVHRKRSQVAVVTEDGTVQLNKNVVNGSEPFLRLIGDLPSGTPVAFEAAFGWSWLAELLEDYGFEAHLVHPLRCKAIASARLKNDKVDAAILAQLLRADLLPEAWLAPPRVRQLRALLRHRASLVRLGTQLRNRIHAVAADHGYDRSASYWTGPGRGWLAELDLPAASREIVGDCLAVIDGLAPVIDRIDGELHAHARADPRVKVLRTLPGVGEFTALVMLAEIGDITRFGSARKLASRAGLTPTVRGSDLKVRHGHISKMVCAGGMVPLHRPGGVRWRWLEDWICIGVS

SEQ ID NO: 362735 - protein, 442 aa, unidentified
MRLTPNKNNKKEVPNMKYTQNEKILQITEKTLIVGIDVGSEKHYARAFNFRGVEYGKLLIFDNSAEGFTKLVGWVQKLTNENGLSDVMLGMEPTGHYWFNLAENMKRHGMRVVLVNPHHVKKSKELDDNNPSKTDRKDPKTIAMLVKDGRYIEPYIPEGIYKELRTAMDIRWRLMEDLTAIRNRINRWINIYFPEYKEVFVDWEGKASLQILHECPTPVKVMEKGIDGIIAIWKGKGIRTVGKKRAIRLVEAAKVSIGSKEGLVAAESELKILLEDYERKREQYERVMMLIEELARQIPGFDRLLEIKGIGIVTAAGFVAEVGDISRFAHPKQIQKLAGLSLKENSSGKHKGKTTISKRGRKRLRYYLTFGIMPLLSKKEEFRLLHEYYTTRAERPLKKMQSLVALSNKLIRIFYVLLKKDVAYDPQKMLGDIKRPVEKMAA

SEQ ID NO: 362736 - protein, 334 aa, unidentified
MALELLAIDLGKRAFHIYGIDTDGVILSRKVSRAKLAEVVGDLEPTAIAMEACASAHYWARCWLAAGREVRLINPRFVKPFVKGSKNDAVDAEAIFEAAMRPTMRFVPVKSTDQQDLQSLHRARDRLICQRTALINHTRGLLAEYGVVLPQGPRRFMTQAPTAIAGADLSDLARAIFGELMDQLDDLDRRIQKLDAMIVTLCRTNETCWRLAKLPGVGPIVATAIIGAVNDGRQFRSGREMAAWIGLVPRQYTTGGKPRLGGIGRRANHYLRRQLIHGARAVVSRSAKHDDRQSTWLKALVARRGFNRTTVAFANKTARIAWVLLSRKQEYAAP

SEQ ID NO: 362737 - protein, 406 aa, unidentified
MDVHRDFLIACIATTDANGVTQYQKRRFSTFSGELRKLRDWLKENNCTDVCMESTGKYWIPVHNILEDSCYVVVCHPKYVKAIKGKKTDKKDAKWIADIFKFDLVAGSFIPPPDIRQLRDLCRYWTKLTYCTTSEKARAQNCLTVSNLKLDSVFSNVSGKSATAIITYMLDHPGEKFNVKPFVDPRCKTPVDVIQEAVDGSINYYQANKLRIIREHIDGIEALQEKLRKYILELASPFQHQIDLLLTAPGIADPMTAIRIIAEIGIDMSVFETSKRCCSWAGLTPQNNESAGKKKTTRIGKAGQYLKPLLVQCAWAVSRSKKNPEIKSKYQQLKKRRGGKKASVAIARRLLTAYFQMLLKDEIYSPYAAQTKDSAPARRTLTPEQGLALLRKHGFIIEEKKPIKTA

SEQ ID NO: 362738 - protein, 336 aa, unidentified
MNRIIMIVGIDISMDDFHACIKVRTEFGKVTIKGTRTFKNTYVGFKEFLRWVMDRKKEDCALSFVMEATGVYYEDLAYFLYSSKQQVSVVLANKVKNYAKSLNVKTKTDKVDSKVIAGFGIERKLDGWKPMSPVYKELRDHCRELLSIKKEMNRARNQLHAMTRSHNKSKSIIKLKTDQIKFYEKAINSIEKELRKIVDIDPQLKEKLRKVQTITGIGFETSVILASETNGFALFKSIRQLVSYAGLDVEFKESGKFKGKTRITKKGNSRIRQALFMPAMSATLYNESIKALHERICERNPDIKRKGVVAGMRKLLIYTYVIWKKDTEYDRNYEWS

SEQ ID NO: 362739 - protein, 346 aa, unidentified
MDQQHYVGLDVSLETTSICVIDQSGAIIWRGKGNTEPEPISQAVRTHAPKAVRVGLETGQMSNWLTLQLRKLGLPVVCLDARHAKGALSMQLNKTDAHDAHGLAQVVRTGWFREVAIKSMDAQALRMLLMARAQLVSQRQAVANNIRGLLKTFGFVIARGSNGPFSARVREVIADNATLTVIIEPLLLAWQALREQVASLDQQVNLRAKSDAAARRLMTIPGVGVIVALAYIAVIDNPSRFKRATSVGAYLGLTPRRYQSGEVDKAGSISKCGDGLLRSYLFEAANVLLSRHPRSCKLKTWGLALAKRIGMRRAKVAVARKLAVVMHRVWKDDCDFDWGDVPAVAA

SEQ ID NO: 362740 - protein, 339 aa, unidentified
MSRFLGVDLHKNVFTVNFYDKSTETHKTSNYKLKNIESFKHELLKDDVVGVEMTGNTSHFVSKIKDKVKDVKILNPLRLSAISKSVKKTDKNDARTISELLSMGNLSEVVLKDELTAQISSIANTRDKFVHLRTTLKNKIHGLLNAYGIVVKRDSLSSKKSLLAVLKYNIPPIAKTELEVIVHQIESLNESIKKLDKEIEKCGKSLDGIKNITSIKGIGEKSGAILLSVIGDINRFKDAKRLAAYFGIVPIVRQSNEKEWHGHITKHGNKLGRTTLVQCTWVAIKYSKYLRAFYEKLKAKKGSGKAIIATAKKLLGIIYNTLKNKWVFEDFPNYVIKTV

SEQ ID NO: 362741 - protein, 355 aa, unidentified
MKKVSTATRCEFGKFAGQRLTIGLDLGDRSSWYCILDEQGELLLEQKVATTPKAMKEVFGAMPRSRIALETGMHSPWVSRLLSELGQEVIVAHARNVRLIGESRRKDDRFDARTLARLVRIDPQLLSPVQHRSRKAQADLTVIRARAGLVRARTALINTARGLTKSYGERLRGCSPRKMNGELAHLLEEIGSLSERIREYNEGVKQIAQESYPEVARLEQVKGVGTLIALTYVLTLEDAHRFGKSRDVGCYLGLQPGRRNSGQSEPQLHISKQGDPYLRTLLVQGAHHILGPFGADSDLRRWGLKLAERGGRNGKKRAIIAVARKLAVLLHRLWVSGETYEPLRNSSRPMLATAA

SEQ ID NO: 362742 - protein, 421 aa, unidentified
MKNTAARKRKQVPERYLIIGVDPHKKKHAAVAITQDFTLRDRFKFDNTREGLEFLLRRVKAEMVKSNCRGVMFAIETGGHYWRNVAYYLDERGIPFRFINQYTLKRRREGKDLNRRKNDYRDSEVAAQLLCTGEFVESVIPQGVYAELRTAHNAYRRLVKERTRITNLTKGLLDSLFPEFTQVFKDPCGLTALSVLSTCSIPGVIAGMTGEEFVATIEAKHQGRLMRKKLMALHYAAKSSIGIAAGAQSVSSEISFLVEKLELIRGHICAIEKTLVRLVDETEEGKYLLSIRGLNYIAVAGLLAELGCFKSYRSAKQMIKMAGSNPTESESAGKKRSRTPMSKQGRPVLRYCAWTSVIPMLRFNPDFRAWAKQRRERPVHANPLGGREIVGAALNRLLRLSFALVKNQTYYRSPQLVKMTG

SEQ ID NO: 362743 - protein, 357 aa, unidentified
MVKKKKNMNKILKQCLGVDVSKKSLSLVVGLLTPSLQKEFKVGNDVSNDLSGFKELDRWLVNVLAPNVEFMVLMEATGTYHQKLAHYLHGKGYKVCIMQSGRVKRYAQSLDQRSKTDALDSKMLSMLGLERELRSWHPPSDELLRLKALSRERSSLLKDRTMVGNRNDAIASGVYEDKKASKRHSQRIKLLNTQIMEIEEEMRELINESSELKRKLDFIMSIPGVSFISAATIVGETLGFESIANAKQLTSYAGYDVVLRESGTFSGKSGISKKGNSHIRAALHMPSMTCVRCNPTLRKFYLRLKPNKVKPLVALIAVQRKLLILMFTLWKNETLYDARYEEKKQQRSRPLLHRITN

SEQ ID NO: 362744 - protein, 318 aa, unidentified
MENQPTNTKKIMPNIIAIDIAKDSLQVHCAYGSFSLENGPRGFKALLSRLPDRDAILVVFEATGGYERALGEFLHAQNVPLSVVNPRLLRAFAKSEGIKAKTDPIDAEMIYRFATGKNLRPSPAPCAQQTQLSDLIDRRAQLAEFIAREKNRAQKTSHKAVIASLRRNIKALEKELSLIENQIRKLLDTHSELKASCRVITSVKGVGEVTAWTLLSQLREITAVNRNQLVALAGVAPYNNDSGAHRGKRFIYGGRSKVRRVLDMAAHTAARHNPVIHRYVEGLLARGKPYKCAITAAMRKLLLHIQSLLKSHELSLVS

SEQ ID NO: 362745 - protein, 338 aa, unidentified
MKLYAGIDLHSNNSVIAVIDEQDRVVFQKRLPNELERILLALASFKRWLVGVVVESTYNWYWLVDGLMQAGYVVHLANPAAIVQYQGLKYSGDEHDARWLAHLLRLKILREGYIYPREARAVRDLMRRRMQLVQTRSAQLACMHTQFTRSTASSPSSDALKRMLPEELETLLEEPNVASGVRANLEVVGTLNREIARLEREVIEQVRLAGQFAPLLSIPGIGRILALAIMLETGAIERFVKVGNFSSYARCVESKRLSNDKKKGEGNSKCGNKYLAWAFVEAAHFAVRYSPRIKRFYERKAAKTNKIVAAKAVAHKLARAAYHVMRERVPFDEARAFA

SEQ ID NO: 362746 - protein, 431 aa, unidentified
MKQSRVENNLEEIIPGTVIVGVDIAKEVHWARCIDNRGIEVGKAIAFKNDRAGYESMIAKTEGIRNNKVLREPIKKIIIGLEPTGHYWKGYANYMMKTGYRVVCINPYHTKKAKELDDNSPTANDKKDAMVIARLVKEGRYFEPYLPEGIYGELRVLTNTRESMMRRNNAVKNTITAIIDEYFPEIWKVFKYPLTGKASRQILRSCPFPAYIKALGADGVLGEIKKAVKKSVGKKKVEEIMKAAEESIGVEYGIESAKLRLWMLLEELELIEAHLTRIEAAMEQMLLMTGYSEQMLSIKGIGIVTAASFLGEAGDPLRFSDARQIANYAGYNLTEDSSGKNKSGTVISKRGRSQLRSLLYRMAITMVAVNGEMKALYQHMLTRKDNPLKKKQALVVISKKIITVIYSLLKKQALYDPALVLGAVRREKMAA

SEQ ID NO: 362747 - protein, 412 aa, unidentified
MRIVHTTCAGVDVHKQHVTVCLITRDASGQRTQEVRTYRTVTKELLAMRDWLQDHGCRVVAIESTGVYWKPVYNLLEGEFEVLLVNPAHLKHVPGRKTDVKDCEWIAELLEHGLLRGSFIPPREIRDLRDLTRYRRRLVQMRASEVNRLQKILEDANIKLASVVSDVMGVSGRAILNALLSGERDPQRLAELSKGRLRGKMAELTLALEGRFRPHHARLLARIVAHIDFLDQSIAECEAEIEEMCRPFAQEIELVDTVTGVGKRAAQDMIAEIGVDMSRFPSHKHLCSWARVCPGNNKSAGKRKSGHTGKRNKWLKAILVECAHAAGRTKGTYLSAQYARFARRKGEKRAAVAVGHSILEAVYFILRDKVPYRDLGPNHFDEINKAHTVRYHIRRFESLGLRIQVQELSALA

SEQ ID NO: 362748 - protein, 333 aa, unidentified
MEITTVGLDIAKRVFQLHGVDAAGKAVLRRKLQRSEVLAFFKALPPCLVGIEACGTAHYWAREIRELGHEVRLMPPSYVAAYVKRGKTDAADAAAICEAVTRPTMRFVPIKTAEQQAVLMLHRTRDLLVRQRTMLVNALRGHMAELGIIAPQGIARVADLIAVLLGEDTTNVPALAREALRGLAAEVEALDRRVKEIEVAIVTWHKDNEASRRLATIPGVGPITASAIVATITDPFQFHSARHLAAWIGLVPRQHSSGGKQRQGGISKQGDRYLRRLLVLGATAVIRHSRSKSTAEAGWLKSLLEVPALGSAQGGKPPFAPPPSISRGMPISD

SEQ ID NO: 362749 - protein, 334 aa, unidentified
MKHILGIDIASETFVGSVVTNEPTPKHTGEATTFPNTSSGFSACAQWLHSLGVVPSETMVVVEATGVYWEALALFFHHHHFTMSVANPAQVKYYAQSVLQRGKTDQLDAHLIARFGATMHPRTWEPPSAFSEELQVLMRQRDAYLGMLTQERNRLHSYERSGIPPQRAIAVSKKTITFLEQQIKELETNFKNMINTDERWKHMLELLQSIPSIGLVTAGILLTETQALESFHSSRQLTAFAGIAPAPYTSGKSVYKRSRISKIGNARIRKAFYMAAVSALRFNPTMKRFFDRLVANGKTKKVALVAVARKLLILCFAICKSNKPFQPNYLHLNS

SEQ ID NO: 362750 - protein, 438 aa, unidentified
MKVLHERVAGIDVHKDMIKVAIRSPGDKPWTRKTEVFEFRTFYGVLQEMARELRRRGVTHVVMEASGVYTEPVYHALCEQDFTEVIVVNPAHVKALKGHKTDARDCARMAELLECGLLHGSFIPSAEQKEVRDLTRYRMKTVQARTSEIQRLHKALESAGIKLGSVLTDITGVSARLMIDALIDGERRARVLADLAKGTLRSAGKQADLSMALTARFTDHHAMLCRLHRDQIKLADHAIAGLDGQIADRAGRWPRELGLLHSVPGFGDVVSAAWLAEIGPAPHRWFPGHDKLASWVTLCPGNNISARKRKSGRTGDAGTYIKPMLIQAAWGAVQVRGRLQARFRRLVRRFGGDKNPGAKKKAITAIAHTLLKIAYQVLKTGQPYTDLGADFYTRRESPEQQHAYLERRLQKLHPGCTVTITISPPPGSLPPGTPAEAA

SEQ ID NO: 362751 - protein, 408 aa, unidentified
MQILYERCAGLDVHKRSVVACLLFPENGQPRKERQTFSTMTPDLVRLRDWLKDHDCSCVAMESTGVFWKPIYNLLEEHFQVLVVNARHIKTVPGRKTDVKDAEWIADLLQHGLLRPSFIPPVWQRSLRDLTRSRSTLTQERTRVIARLQKGLEDANIKLASVVSDVMGTSAQHMLQALVKGELSPVAMAELAQGKMRPKREQLAQALTGHLQPHHRLLITEHLAHIGNLEQAITRLSAEIAERLTPYEEILLRLETIPGIKRRIAEILLAEMGPDMSRFPSAAHLASWAGMCPGNRESAGKRLSGKTRKGSQWLRTALVEAAHAASHCKESYLSAQYHHLAFRRGKKRAAVALGHTLLIIIYHLIAEKKEYEELGGDYLDQLDRQGKEKRLIRQLEKLGFEVSLTPTK

SEQ ID NO: 362752 - protein, 428 aa, unidentified
MNEEDRTRLEQFRQFKKEIRGSAEYLIVGIDVAKDKHHAFFGTATGKTLLKRLVFDNSLEGFEKLLVQVDALKVQHVLGKVVFGLEPTGNYHKPLGEHLIRCGHRVVLVSGVAAHENRKTLDGRWDTNDTRDAANVADLVSQGKCLFYEFAVGALQDLRDLLSLKRRLRRQEQGMRVRIRNHLLAKYFPELDRYCERSWAGSLAIVRWCLDPSVIAGLEYEAFAQRVAPGKRRLSQESRLQAIWKLAGDSIGCEVGSSVEFEGKVMVEGLKQIREVITATEEKIEEICSSYPEYSCLRSIPGFGPDVSAKVLGAIGDPFRFQNGKQVLKLAGLDLNAERSGKTSEAAVPVISKKGKADLRYALYQAAFIASSKNQGFMVYYTHKLRGREREPGIKTKMRVKLAAKLLIMAWTLMKKKEPFNPDYLKPE

SEQ ID NO: 362753 - protein, 424 aa, unidentified
MNNTQNQKIAQVTDMTLIVGVDIGGEKHFARAILARGYEVSKKPFPFMSTEEGFESFVSWAFNLAVTHKLTKIMIAMEPTGHYWFTFVAFLKKYDVQVVLVAPQHVKHSKEMDDNTQEKDDRKDPIVIARLVPEGRYLIPYIPEDVYAELRVAFNRRCELVEEQVQIANRMTRWFDIYFPEYRKVYGRIDAKTGLMILKRAPLPEDILGIGVDGIRKIWKDAKVRGYGPKKAKQLFDAAEHSVGMKGCASVRWNFWQLLEEYELIERQLNDILQLIEGCLYQIPGADKLLKVPGAGLVTVAGFLSEVGDIRRFSDPKQIQKLAGLAVVENSSGKRKGLPGISKRGRSRLRWVLFQLARSMVMFNSEMKAYHQYYTTRKDNPLKKLQSLIAIAARIARIFYGMLKNGTEYDPMMVMKDFNRAVAA

SEQ ID NO: 362754 - protein, 367 aa, unidentified
MKKVSTAGAKPSKKISQQKLTVGLDLGDRNSWYCILDESGQIQLEQRVRSNAKALREVFGQLPHSRIALEVGTHSPWISRLLSELGHEVIVANARKVRLIGESRKKDDRLDAQTLARLARIDPGFLSPVKHRSAQAQADLMMIRARAGLVRARTALVNTVRGLAKSYGERLRGCNVRNMNPEKADGLSPELQSALEPLLAGIEELSEQIREYNQRIEKLAQESYPQVALLRQIKGVGTLIALTFLLTLEDPHRFRKSRDVGCYLGLQPGRRNSGQSEPQLHISKEGDPYLRTLLVQGAQHILGPFGVDCDLRRWGLKLAERGGRSGKKRAIVATARKLAVLLHHLWVSGEVYEPLHNSRRTAVAAAA

SEQ ID NO: 362755 - protein, 359 aa, unidentified
MTASYDYHIGVDYHKSYSHLVVQDSGGKTLRSGRVKNDRQSLGGFLERYRENSHAVVEATRNWMVMYDWLDDICDDVVLAHPWKVKAIADAKIKTDKIDATVLAHLLRADLVPQAWAPSDKARELRVALRERMFYVRLRTMTKNRIVTVFDRYPEQTAQLKKLGDLFGKAGRVQLAQVKVSEIDRIQIDRGLAFIGDIDGRIKQSEATIRAMTKANANVKLLRTIPGIGEFFARLIDAEIDDISRFRNPKKLAAYAGLVPSTYSSGGKTFHGKIIRQGNKWLRWAFVEAVTPAIVSNAQLRAQYEHLKIRGVNKARVALARKLLTIAFQILRDQRADEPRGTSPMEGAVGDIPVVLMTA

SEQ ID NO: 362756 - protein, 405 aa, unidentified
MEVIVERACGMVIHKDNITACILTSKGKEIRTFSTKTASLLQLIDWIKQLECTHVAMESTGVFWKPIVNLLEAEYIEFLVMNAQHMKALPGRKTDVKDSEWIAKLLRHGLLKASFIPDRNQRELRELVRYRRSIIEERARQHNRIQKVLEGANIKLGSVVSDIMRFSSRDMLRAIAEGEDDPAKLASLSRRSMKRKKEELELALQGYVNPHQRLMIKTILNHIDFLSEQIAILDQEVALRVTPFHDYVERLDSIPGIATRMAEQILAEIGSDIEKQFPSASHLCSWAGLVPGHNESAGKRKSAKAKNGNKYLKPALVEAAHSVAASKNYLGAMYRRTAARKSKKRAAINVAHAMLRITFYLLTRKEMYVDLGEDYFDKQKQQSIVKYAVRRLENLGYSVSISEVS

SEQ ID NO: 362757 - protein, 311 aa, unidentified
MKKEIQFQQVIGVGCGLDVHKETIVATIRSSSKDYETKEFSSYTSSLTELRDWCKSHGVTHIAMESTGIYWKPVFNILEDDAFEIILVNARHVKNIPGHKTDKKDSAWLSKLLLSGLLKGSFIPPVDIRELRDLVRYKNKKTQVVASEKNRMIKILEDCNVKLSSVVSDVQGVSATKIVNAIADGETDIKKLMVHVHGKIQAKREDIKKALEGKVTEHHRFMLNMSRESIDVNEALIKKLDLQIEKAIEKYQVELDLLQTIDGIGKDSAIAIISEIGVDMKQFPNEHHLASWSGVSPGNNESGGKKKVQEP

SEQ ID NO: 362758 - protein, 314 aa, unidentified
MPCCIGIDVAKATLDVASEPAPALGARPTVTNDDAGHAALVAALTPLAPTLIVLEATGGYERALTVALAAAGLPVVVVNPRHVRDFAKATGQLAKTDRLDAALLARFAAQVQPAYRPVPDATTEALRDLLARRRQLVTMLTQERNRLAQARDHGIRRDLQQHIRWLERRVHTSDDDLRQAIEASPAWRVRDQLLQSVPGIGPVTAQTLLASLPELGTLRRKQIAALVGVAPLNRDSGQWRGRRQVWGGRAPVRAALYMAAFAGVRHNVVLRTFYQRLRAAGKPAKVALVATMHKLLTILNAMLAHQTSWSPAAA

SEQ ID NO: 362759 - protein, 349 aa, unidentified
MRFYNQQHRFYGGVDLHARTLALCILDSNGTIVRQQTITAGPDAFLHAVAPFRDGLAVACECMFAWYWLADLCQQEQIPFVLGHALYMKAIHGGKAKTDKIDAHKIAVLLRGGMLPQAYVYPKGMRETRDLLRRRTFLVRRRAEALVHLANTNSQYNQPPFAKKLAYAANRAELDIAARFTDPSVQKNVAVDLALLDAYDTQITELELYLARTAKVDDPQAFHRLRSVPGIGKVLALILLYEIHDIRRFPEVGQFLSYARLVRCTHESAGKKQGTGGNKIGNAHLKWAFSEATCLFLRESEQAKKWLARREKKHGKARALGALAARLGRAVYHLLRKREVFDRQRFFAS

SEQ ID NO: 362760 - protein, 354 aa, unidentified
MKVYVGLDVGLEETSLCVVDSEGQTVREVKVGTEPEAIRAALEGCADRLDRVGVEASSLGIWLYRELQPVGVPIIVVEARHMRVSLSTMRNKTDRNDARGIAQMMRLGWYRAVHVKNIDMQKMRTLLTNRKLLKRKLIDVENHVRGALRAYGLLIGPVARGAYEARVRELLERCDPVFVMTIETMLDVRRAIFEGFERLHRVLLQVVQHDAVCRRLMTVPGVGPVAALSFKVGVDDPRRFARSRTVGAHFGLAPKRHQSGTSIDYEGRISKQGDIAVREALCEAAASLLLRVRKWSALRAWGLRIAKRSSMLCAIVAVARKLAGILHRMWVDETDFHVGFGAKVTRRLRLKPAQ

SEQ ID NO: 362761 - protein, 333 aa, unidentified
MKKIIHFIGIDVSKHTFDLALIKNNDPGQIMQKLFSNNITGFKNLAFWMKQQSVCYEDTVFCIEHTGYYSKPLAKFIQAQKGNLWMEMSLKIIRSLGIQRGKNDKIDARRIAQFAQRNQQDYKPYNPPRVIIEKLKVLLMLRQKLIDNRTSIVVPVNELQYIDKQAGKEALHIVSSSLKAIKKNITGIEKKIDDLIAADKALSEQCNLVCSVPGIGKITFCYLTYFTNEFQNYSQPKQLACYCGVVPFEYTSGKSVKGKPKVHNMANKFMKKLLHLGALSAVNYYPEFKAYYERKVNEGKNKMLVLNNIRNKLIIRVAAVIRNNQPYKINISA

SEQ ID NO: 362762 - protein, 313 aa, unidentified
MKHVPSNVFIGVDVSKDCLDVAVAPSGESMRFANSEDGIALLADFLKPRNPELVLFEATGGWEMNAVNHLAAQRLPLVVLNPRQLRDFAKATGQLAKTDAIDARILARFGQAVRPEVRSLKPLELRKLDALNTRRRQIVEMLTAEQNRLVSAPEWVRPDIEELIAILKKRLAAINRDLNKLIRKSPLWREKDKILQSFPGVGPITASTIIAALPELGTLTRRQVAALVGVAPLNCDSGTHKGKRKIWGGRADIRSVLYMCAMTAARCNPVIRPFYQKLLRAGKPNKVARTACMRRVLVILNAMMRSNTCWQPT

SEQ ID NO: 362763 - protein, 343 aa, unidentified
MSEISIVGLDLAKNVFQVHGIDASGGVVLRRQLRRGAVEKFFAQLPPCTVGVEACGSAHHWARVIGRYGHQVRLMPPAYVKPYVKRNKNDGRDAEAICEAVSRPTMRFVPVKSVEQQATMAVHTTRGLLVRQRTMVANSLRAALSEIGIVAAQGIEGLRELMAKLEAPHEEVPEIMRGALLLLAKHWQALDADERVLERQIAKAVRSDREARRLMEVPGVGPIIASTVLAKVPDAKVFRSGRDFAAWIGLTGRDHGTGGKHRPGRISKQGDRMLRALLISGASAYLRHQRTRGVSDPWLRDLLARRPYKVVMVALAAKTARILWAMLVKGEPYRDRASASAAA

SEQ ID NO: 362764 - protein, 358 aa, unidentified
MNRKAGMSAGQVIGTVDGQQVFGLDIAKSVFQVHTVDMGSGEIVNQQLKRAKVLTYFANRTPCLIGIEACGGAHHWARKLTAQGHSVRLIHAKAVRPFVGGNKTDAADARAIWLAIQQPGTKFVGMKTLEQQATLVLHRQRELLMKMKAMQSNALRGLLYEFGATFARGRNALFAEIETALEALVGDIPQYVADSLREQVKRVKDLAKDILAIEGRLAQRLRDDKDMQRVAQMPGVGLLTATAAIATMGQASAFKSGREFCAWLGLVPRQSGTGGKVKLLEISKRGDTYLRTLLIHGARSVLTHTKEPGPWLEQLKARRPANVVIVAQAAKMARAIWAVTAKQEDYQRGYCSVKPKAA

SEQ ID NO: 362765 - protein, 402 aa, unidentified
MTYDYVIGMDACKYFHHACVLDIDGTQVLSKRINQNEQSLRALFSAFSAYDHKVLVVVDQPNNIGRLTVAVAQDIGIDVRYLLGLAMRQLSRIHAGNAKTDIRDAYIIAHAAKNLPESLRSVDRVEEAFLQLKVLNGIDEDLARSYTRLINQIRSALVGCYPQFEQALRGQIIHRKWVLHLLARYGGPTKIKRLGKAKAAAFARRYKARNPEPVLDAIFAAISEQTVTIAGAHYAEMGVAMSAKDALLKLEHRQQIEKEVIELINDIPHTQFLLSMPGIGPKTAAQILMTAGDMSDFPSAGHLASYAGLSPRTNQSGTSIMSNSLNRAGNKKLKNALWQSSFASIRSHERSRQFYERKRREGKRHNAAVVALARRRLNVLYAMMRNHEHYHDPAPSQEDLAA

SEQ ID NO: 362766 - protein, 403 aa, unidentified
MKYGVGIDVSKGKSMVAIMRPFGEIVSTPFEIKHTSSDINSLVKLIKSIEGESRIVMEHTGRYYEVLAHQLSEANLFVSAINPKLIKDFDNDSLRKVKTDKADSVKIARYALDKWQNLKQYSVMDELRNQLKTMNRQFGFYMKHKTAMKNNLIGILDQTYPGVNTYFDSPARSDGSQKWVDFASTYWHVDCVRKMSINAFIDHYENWCKRKKYNFSKSKAEEIYGKAKELVPVLPKDDITKLIIKQAVDQLNSASITVESLRTLMNETASKLPEYPVVMAMKGVGTSLGPQLMAEIGDVSRFTHKGAITAFAGVDPGVNESGSYEQKSVPTSKRGSSDLRKTLFQVMDVLIKTHPQDDPVYQFLDKKRAQKKPYYVYMTAGANKFLRIYYGRVKEYLASLPES

SEQ ID NO: 362767 - protein, 377 aa, unidentified
MKKVRFIGLDVHADTIAVAVAEPGGEVRSLGIVLNRPESIRKLVKKLGPVGSLRACYEAGPTGYVVYWQLTALGVSCEVVAPTLVPTKAGDRVKTDRRDALKLARSYRAGDLTPVWVPDAAHEALRDLVRAREAAKKDQLRARHRLGKFLLRQGRRPPTAMKAWTQAHLRWVKSAVHFDHAAQEATLLDYLQEVDHVADRIERLERAIDAAVKTAPGRIRAVIEALQALRGIALVSAVTIVAEVGTLSRFVKPRQLMGYSGAVASEDSTGDRIRRGGITKTGNAHLRRIVIEAAWAYRHRPSVGATLRKRHVALDTAVIAIAWKAQHRLHARYRTLTAKGKTKQQAVTAVGRELLGFIWAIGVTVEAKRPDAQPAAA

SEQ ID NO: 362768 - protein, 331 aa, unidentified
MQVRTIGLDIAKMVFQVHGVGADGAVAIRKRLPRSQVRRFFEDLPPCLIGIEACATAHYWARELSALGHDVRLMPAHYVKPYVKRSKNDAADAEAICEAVERPNMRFVPIKAPETQALVLMHRMRTQLVGQRTAMLNGLRAGLAEFGIVATSGLGGANEVLRIAAAGDDRLPDVIHNTYAMIADAVRSIELRLSDLDREIAANVKVDDACRRLSTIPGIGSVTSSTIVALAGDVSRFSTGRDFAAWLGLTPRQNSSGGKARLGRITKAGDQTLRTLLVLGAFTISGCAKRGNGVLVSAPASAVAFTKSVTPPIARSTPPSMLPLKRKSAFL

SEQ ID NO: 362769 - protein, 388 aa, unidentified
MIYVGIDIAKLNHFASAISSEGEILIEPFKFTNDADGFHLLASKLESFDKASTIIGLESTAHYGDNLVRYLVAGLYKVCVLNPIKTSQMRKNNIRKTKTDKVDTYVIAKTLMMQDTLKFISFYDLDLMELKALGRFRQKAIKQRTRLKIQLKTYVDQVFPELQYFFKSGLHQKAVYAVLKEAPSPNRIASMHMTHLATLLKTTSHGHFTKEQAKELRVLAQKSVGANDSTLSIQITQSIEQIELLDSQLKKIEEEMTDIMKFNDSVIMTIPGIGYINGGMILGEIGDIHRFSNPNKLLAFAGLDPSVYQSGNFQARRTRMSKRGSRVLRYALVNAAWNVIRNNFTFKSYYETKMDEGRTHYNALGHCSGKLVRIIWKMLTDKVEFNLK

SEQ ID NO: 362770 - protein, 367 aa, unidentified
MSDKEGINNEAQSFVGFDVSKASVDALSLPDGEYQRFENTDCGLQQCLAWVQGKRHCLCVVEASGGYETALAGVLAAAGVPIAVVNPKHVRDFARGMGILAKSDRIDARVLALFAQKRRPPIRALPGEAQRRFIDLVDRRRQLVSMRAQEQTRLTQAKGRPRKSIQAHIKWLNAAIDDVDRNLNDTLRGCELWLVDSQLLDSVPGVGKVTICTLLARLPELGHLDRAAIAALVGVAPFVRESGQWRGRRFIWGGRAEVRSVLYMAVISAIRCNPVIKAFYQKLLAAGKAPKVALTACMRKLLTILNCMMRTRTPWNPPLAQTLDTVAPPLRKGGNKLPGWRQHCSSAAKSNAFTHHGYPLPCEAGEG

SEQ ID NO: 362771 - protein, 357 aa, unidentified
MTKLTQMPNFFGRTIYVGMDVHLKSWNITLYHEQQYLRKFQQESNPQTLVNHLTSNYPGAHFKLAYEAGFCGFWIQRAFEQAGMECIVVNAADVPQTDKGSKMKNDVTDSYRIASSLKAGQLVPIHVPDIQTESDRSVIRYRHSLHKDLARCKTRVKSFLNHFGIKLLPRFENSKWTIAMIQWLKELPLPCPSQRLTLSRMIEQVELLQQKLLEISRDIRSMIANEKYKTDIKLLMSVPGIGVLTAISFLTEIGSIKRFPTFYNFNSYIGLCPTEHSTGENERKGSITPRHHAQLRSLLIEMTWTAIRLDPAMSLAFYEYKKRMTSKRAIIRVGRKMLSRIYFVLNNKQAYVTGLIK

SEQ ID NO: 362772 - protein, 370 aa, unidentified
MNKEKVVFVGLDASKSTLAVSVADDGRDGEIRDWGTVSTAPSSVDRLLKKLATRFHHVEVCYEAGPTGYGLYRQITAFGFTCYVIAPSLIPMRAGERIKTDRRDAERLARLLRAGELTPIWVPDETHEAMRDLVRARDSAAEDQRHKRQLISAFLLRHGRIYHRTKNWTMRYRRWLQRQSFDHPAQQIALQEMVLAERHAVERVARLTAGIEELVPDWKLGPVVEALQALRGVALISAVTFMAEIGDVRRFENPRKLMAYLGLVPSEYSTGQTTKRGGITKAGNSRVRRTLVEGAWTYRFPARIGEKKLYVLQRLPPEIQDIAWKAQSRLTARYRRLSQRGKKKTVITTAIARELSAFMWDIARRTMPVS

SEQ ID NO: 362773 - protein, 326 aa, unidentified
MQGKESSEQKAKVKSSAGIDVCKSWLDAHVLPEGCSLRVVNDARGHRRLIAWLSQYAVSLIAIEATGKWHRQVHRMLHARGFQVAVVNPRRARLFAEAIGLLAKTDRLDARMLALLAVDLSPPARAPAPEAIEALQELVAGRDSAVAEQTALENQLAAATTTFFTWQLKARIVRIAKDIASLQTEIERRIGCDEALARRYAILISIPGVGPVTAATLIANMAELGTCSTKQIAMLAGLAPVADQSGSREGRRAIRAGRAAVRRVLYLCALAAKRCNPAMTALYDRLMAAGRPHKVALVAVARKLIVLANTLIVQNRLWQSQPPIQA

SEQ ID NO: 362774 - protein, 336 aa, unidentified
MFQLGIDVSKKTLDLCLLREGVKGRVKTLKLQNDINAVSAVIAWLSKQHCKPEDVHIIMEATGVYHESLAYGLHKAGGRISLANPHRAREFARGMGMLTKNDRVDAYMLACYGVLKAPEPWLPPPEEVRHLSALLRRRDALVADSTCEKNRLEKYLATDTPSVIAESVEAMIGQLNAEIKRLDRLIRSHLNQHPELKKDFDLLTSIKSVGYQLGLNMLVILRSHDFATAEQAAAFLGVVPVEKYSGTSVRGCPKLSKIGPPEIRAKLYLASLCGLRFNPLMKAIYERLCLRGKAKMCAIGALMRKLVHWCYGVLKTQKPFDVGYLPSYARSACKAA

SEQ ID NO: 362775 - protein, 384 aa, unidentified
MAQMALQANDSGLVGVLYMALELSKSTWKVGFEYQGKRRIKNVTGGEVGELRQALDEAMQKLGVPAEALVRCCYEAGRDGFWLHRLLEDWGVENVVVDPASIEVSRQARRTKTDRVDLLSLLSKLRQYHAGEFGVWKVVKVPSEQDEEGRLLHRELERLKKERTGHVLRIKALLFAQGVRVEQVGGKKWAGYLMGLTRYDGRALPADLMAQVRRESERLAMVQEQIQAIEKEQERRVREAAEVGGVMAMVQALRQLKGIGSVAAWVFVMEFFGWRQFKNGKEVGALAGLTGTPYASGQMQREQGISKAGNRRVRALAVEIAWLWLRYQPDSALSRWYAERFAGTSKRHKRVGIVAVARKLLVALWRYLQTGELPTGARLKPAKA

SEQ ID NO: 362776 - protein, 344 aa, unidentified
MEYFAGLDISLRSCALCIVDTNGKVILERELACEVDDISECLSQFQYPIERVGFEAGTMSQHLFFGLTNKRFDVVCMEARQVNAALSAMRNKTDKNDARGIAQVLRTGWFSPVHMKSREAHGLRALLSTRKALLKKTMDLANEARGLLKIFGIRLPRTVKHGSFDGVARPMIEMDDVLAHALVPLLDARVVLYQHFLELDRRVKRAASQDEVCMRLMTVPGVGPIAALTFKGAIDDPARFKRSRTVAAHFGLTPRRYQSGEHDNPGRISKAGDKDVRATLYAAANALLMRTMASSQIKSWGMRLMRTKGRRRAVVAVARKLAVLLHRMWIDGTEFRQDQVGGRV

SEQ ID NO: 362777 - protein, 415 aa, unidentified
MNKVRSAENDTDPALEENGLAVLRRNVAGIDVGSTSHWVCAPTVDGTAREVEQFGATTPELEKLAQWLKQRKVESVAMESTGVYWIPLHEVLERHGLEVVLVNTRELAHVPGRKKSDRIDCKWIQRLHSCGLLRGSFRPAEQVCMLRTLVREKANLAAERADWVRRMQKSLDQMNVRVHRAVSDTEGTTGMAIIQAIVKGERDPMQLAKWRDPACRKSVEEIAEQLSGHWREDHLFSLEQSLKMHAAIEERIQAYQTEIQRRLAEMERADREGQQAPALKNKNKAKKIRQRREEPMRQALYRMSGVDLTAIDGVGVGVVEIVLTEYGSDLSCFPTEKQFVSHMTLAPKKPVSGGKPLKKKKRGSASSRVASALRSAALSLRHSQTALGAYFRHIQHRLGADVAAFATARKMATLV

SEQ ID NO: 362778 - protein, 371 aa, unidentified
MKETITSFVGLDIHKGSVAIAIADSGRAAPRFIGAINPMPSELCKVLRRQRCRPENTLLVYEAGPCGYGWVRYLRRQHWRCEVIAPSRIARSPNEQRLKTDRRDALMLARQVRAGELTNIVVPDERDEAMRDLSRAREDACAARLRIRQQMKAMLLRHGREDVRYKSWSHAHERHLATIRFEHPAQEITFNEYRQAARESCDRVERLTAALRELCESWRMKPLVQALMCLRGINFVSAVTFVAEVGDLARFAHPKDLMSYLGLIPSEYSSGSRRRQGEITRSGNQHARRMLVEAAWNNRFKAQIGRDLQIRQEGQPKAVREISWKAQLRLSKRWRRLALGRKLHQNKICVAIARELAGFVWDVGRHTALKL

SEQ ID NO: 362779 - protein, 418 aa, unidentified
MQTELSQFAAVIGIDWADKKHDICVQDMATGRRRRSRVRHRAEDLDEWAGSLYRRYGGPIAVALELSKGPIVSVLQKYDFFVIFPIDPSMLAYHRKTFTPSGAKDDPTDAELALDLLFKHSEHFKPLQPQSVEMRTLMLLVEHRRKLMNDRVRITNRLRSALKQYYPQVLEWFDRIDTLLFCDFIRRWPSLPQARRARRATLEKFFREHNMNRRALLERRIQAIKTAMPLTEDPAVIVPYRLQVLSLVAQLEVALESIKTYDKEIAELMPQHPDHELFDVLPGAGPVHTARLMVAFGEQRERYACADEVQMYGGIAPVTKRSGDSTWVHWRWQCPTFMRQTFVEWASQTINKSYWAGLYYYQQRAKGCSHQAAVRALAFKWIRILYRCWKTRTPYDEARYLKALQDRGSPLLKMAQTA

SEQ ID NO: 362780 - protein, 353 aa, unidentified
MRILGMDLGQSKSAWAQLDSTTGELQQGSIEHSDQALLRLLVRRQPDQVVIESGPLAARVHDLVTARGVAVLVADTTGEAWSWKHLKRKTDPDDALKLARLALVGQINPVHVPAPAVRQWRTLLEYRRALVAEQTRCKNRIRATVLASTGGRLASGAAAWTLSGRREWARGLCPLKDCRPDELWRGLVHCELQHLTDLEARLAEVESKLTALAQASPDVKRVDSVPGVGPLTAQVLVAVLDGAQRFPTRRQVSAYAGLTPRRFQSGAMDRSGRISKRGSRLLRWALNQAAWAAVRSRPEWRALFLRLGGGSKKRRKQAIVAVMRRLLVVAWAVLRDGTVYRSGRLQPKVAAAA

SEQ ID NO: 362781 - protein, 400 aa, unidentified
MLSIGIDVSKGKSTVCGMKPGGEIVYTPFEIQHTREGMSELVSLLHNSGEEVRAVLESTGSYHCPVVAALLENGIFVSVVNSLRMKRFCSQSIRKVKTDRIDAMQIALYGLAYWQELQPTRLPEDTYRELQLLARQYYQMTSILIKAKVDFNALCDQVLPGMQELMNDHAGRHKLSDFVLRYRHTTHILEMGETRFRKDYCKWAEKKGYRNRERMAALIFATAQNGIPVLPNAPSTQIVITEAIRVLHTVEASRDAILTQMQALAKTLPEYSLVREMPCIGDTLAPRLIAEIGDVRRFHSKRALIAYAGIDAPPYQSGKFCANNRHISKRGNRYLRKTGYEVMQSYVMHKPANDPIFTFIEKKRGEGKSGKLAMVAGLNKFLRIYYGKVTELYRSLPAIE

SEQ ID NO: 362782 - protein, 347 aa, unidentified
MKHGLRAGEIGLFIRVYMYKCEARPSQAKKAERRPGGRLQNQTEEDPMNSMNYVGMDVHKKSISYCVRQADGTVLREGSITANRKSLDAWMRELPDPWMAGMEATLFTGWIYDHLVGRGATVKVAHSAMLKAIAAGKKKNDQLDARKIADLLRCDYFPECHMAPREIRDRRRILRYRNLLVRQAVRMKNKVSGLLMEAGVPYNQQKVDGKKYFAELLKEQRKEMPPSLPQLLQLSRSTIETLTGMERQLMRALERDALLASRVERLETIPGVGRVLALTWALEMGEISRFSSVKKAVSYCGLCGAEKSSGGKMERTPISKQRNKHLQTMLIEAAKLAPRWNAELALV

SEQ ID NO: 362783 - protein, 338 aa, unidentified
MPVYGGIDLHSRNCYLAILNERQKLIAHGRLSNELEVVLAAVEPYREEMAGIVVESTFNWYWLVDGLMEHGYRVHLANTDRAQQYKGLKYTDDRHDARWLALMLLLGILPEGYIYPKAERPLRDLCRRRSFLVDKRTAMLTSARGIYGSWTGEQTHRNEMANWEEEDLEVLLPDPDIRLGVSCLLKPVEAINEQIAVIEAEVLRSAKLREEFRKLETVWGIGKVLALTIMYEVGEISRFADVGHFVSYCRLVNTDRRSDTKSKGKGNRKNGNPYLSWAFSEAAYYAARFRPLANQFVQRKKAKRNNIVANRALAHKLARASFYVMRDRVDFKPELTFR

SEQ ID NO: 362784 - protein, 412 aa, unidentified
MKDLLEISCGLDVHKEKIVACILTGPLGKPTRSEIREFSTLIPDMIALRNWIVSKNCHHVAMESTGIYWMPIYEILEDAFYGDITLLVVNARHMKNVPGKKTDMRDSEWISTLLRAGLLNGSFIPEKRIREFRDLNRYRKSVIHDITSQKNRIEKFLQSSGFRLSSFISDIFGASGRNIILHLIEHGQIDKTALDSCLKTKTRNRIDEILMSVNGTLSEHQKAFLRILMTHYDSLKKHLAEIETSLEKDMAPFALQVEQLNSIYGISTTASCAIIAEIGIDMKPFKTAEHICSWAGLCPGNNESAGKRKSTSVTKGNPYIKSMLCEIAWVIAGKRNTYLSAWYWRIKQKKGAKKAIVALARKLLVIIYTMLKQGTLFDESCFETRRKHCEQKQLSRYIRELEKHGYHVEAQS

SEQ ID NO: 362785 - protein, 421 aa, unidentified
MEVVAPHCAGLDVHRSMIAACALLSDEHGRARQVKSQFVTTRAGLERLAAWLRGLGVRDVGMESTGVYWMPVFAVLEAAGGLELLVLNPEHVKGIKGRKSDMKDAEWLANLVRHGLVRGSFVPPKPIRELRDLTRYRRTLVENQGSERRRLVKLLEAADIKLAGVVSDIFGVSGRAILRALIAGGQSAVAMSKLVRGRLRQKRALVIDALAGELAEHQRDLLAMQLARVEADEADIAALDRWIDERLAPYAQQMALLMTIPGIDRVVAATVIAEIGVDMSVFPSSRHLAAWGGTCPGNHESAGKRKPIGARNGNPYLKTALCNAATAAARKRGSFFKAKYHKLKSRRGGGRAALAIAHKLLVCIYHMLSGKTSYRELGEDYFDIRDTQRAARRYVRRLQDLGFSVILQPHREPQAEPAYAL

SEQ ID NO: 362786 - protein, 339 aa, unidentified
MNTSVIGLDIAKHIFHLATLGADGKMIKKKLKRSELLAFFANYPASTIGMEACGGAHHWARELTKLGHEVILLNARYVKSFVVGNKNDFNDAAAIYDAVSRPNKRVVAIKSVAQQDIQLIHSFRQELIDKRTALVNQLRGLLNERGIVINQGITQVRQQLPLILEDAENGLTALSRELFAEQCERLKALDDDIKAQDQRISRLCNANELSKRFLDVPGIGPLTATIVAADLGDNGKGYESSRDYAASLGVVPKQHSSGDKPVYLGISKRGNRYLRTLLIHGARAVLKNCTQKTDKLSLWLQALVARRGFNKAAVALANKNARILWAMATSGKDYQVLAA

SEQ ID NO: 362787 - protein, 345 aa, unidentified
MKLATVGIDLAKNVFQVHGVNEHGKCVLKKQLKRSQMIEFFANLEASLVGMEACGGAHYWARRLQTLGHTVRLMAPQFVKPYVKTNKNDAADAEAICEAVARPNMRFVPLKNVEQQAMLAVHRARQGFVIARTAQANQIRGLLAEFGIVFPQGLANVRRCARELIEDGRNELPGSFRLLIERLLDHLAELDKQVEELEAQIRSVHSTNEMSRKLERIPGIGPITASALVATIGDARDFTNGRQLAAWMGLVPGQSSSGGKTTLLGISKRGDVYLRTLLIHGARAALRAFQNKADQTGDNWLRKLLERRHFNIAAVALANRNARVIWALLARNRQYQADYKMNPAI

SEQ ID NO: 362788 - protein, 349 aa, unidentified
MTIVEDACVITGGVDTHAEVHVAAALDSLGGLLGVQEFPATAAGYARLLDWLGGFGNLAVVGVEGTGSYGAGLARHLAAAGVRVVEVDRADRQDRHRAGKSDPLDAVSAARAAQSGRAAGAPRGRDGAVEAIRALMVAKRSARAERTQAINQARALIVTGPDELRARFAGHRPAQLVAAIAALRPRPGDVPGYATRVALRELGRRAQFLDAQLERLDELIVPLVSTRAPGLLALHGVGPDTAALLLVAAGDHPERLRSESSWAHLCGAAPIPASSGKVSRHRLNRGGDRQANHALWRIVITRMGSRPGHPATRAYVTRRTKEGLSKKEIIRCLKRYVAREVYHQLRAGA

SEQ ID NO: 362789 - protein, 346 aa, unidentified
MLYAGLDLSRKRLDFHLLDDEGATVDVGAAAPDADGLHGLTRRLDRHGAPIRAAIESMNGARFVHDQLERAGWQVEIADAQKVKGLAPLACKTDRIDAWVLAELSRRELVPAIWLPDPHVRAERERARWRLHLVRHRSSLKQRVHAVLLTHGKPCPVSDLFGVSGRRLLARLALPEPWSSNVQASLRLIDELDREIESCQSELRRLGADHRYVPLLCTVPGIGWVLAYTIAAEIGDIHRFPSPRKLAGYTGLCPRVYQSGESDRRGPLAKQGPKYLRWALVEAAVHASTHPAYRDRYQRTKTRVGKQRGAKVAQVDLARKLAEAIWHMLTRNQPFAPAGATDPLTA

SEQ ID NO: 362790 - protein, 369 aa, unidentified
MEKSVLYVGLDVHKMSVDVAIAEPGTGETRYYGRIGGDLGALDRVTRKLESKGAELRFAYEAGPCGYQVYRHLTAQGYSCLVAAPALIPRRPGDRLKNDRRDALALARLLRAGELTAVKVPDEDDEAVRDLTRAREDAVCVERRAKQRTAAFLLRHGRVYSGKTTWGRGHWGWLLQQVIEHPAQQIVLQEYLDAVREASARVLRLTGQIRELIPQWRRAPWVTAYQALRGVSLIVAATVVAEVGDLGRFNNPKELMAYLGLVPSEHSSGTSVRRGHITKTGNGHARRVLVEAAWAYRLRARVTRPLLKRQEGLPENLRQLAWKAQLRLCARYRRFLARGKAKQTIVTAIARELAAFIWAIGQAVEPATA

SEQ ID NO: 362791 - protein, 347 aa, unidentified
MLYAGLDLSRKRLDFCLLDEAGELIERGAAPPDRDGLCSLAERVAAQQRQRVVAAVESMTGARFVHDQLESHGWRVEVADAARVRGLAPLACKTDRIDAWALAELCRRELVPAIWLPDGEVRGARERARFRLHLVKHRTALKNRIHQTLVGFGTPCPVSDLFGERGRRLLARLELPQPWAGSVAASLRLIDELDREINEIEAELRRLGADHPYLPLLLTVPGIAWVLGYTIAAEIGDINRFASPTKLAGYTGLCPRVYQSGEHDRRGPLTKRGPRYLRWALLEASIHASRHPLYADRYQRTKLRLGRQRGPRVAQVDLARRLAEAIWHMLTRNQPFAPAGATRALAA

SEQ ID NO: 362792 - protein, 347 aa, unidentified
MRKFIRIGVDLSKRYFQVHALLGEDGRAVTRKLRRDGFLAFFAEAAPCLIGMEACGSAHYWGRELRAMGHDVRLIPPIYVKPYVKRGKNDAVDAAAVCEAVSRPDMRFAPIKSAENQASLMLHKTRELLVKQRAMCVNALRGHLAEFGVVAAKGVGHAGELLAKAKNDATLPAIAKATVEIFAQQLEAINASIVALDKEIAAVHAQSETSRLLAGVPGVGKIAATAIVASVPDPSVFKSARDFAAWLGLTPRQNSSGGKEKLGSITKQGNRYLRKLLTLGATSLLRVAGKRKGALRDWLVALLARKPARLATVALANKLARIIWAMMTTGEAFRTQIIARAGEPSMA

SEQ ID NO: 362793 - protein, 337 aa, unidentified
MRRSDVMEQGVVIGVDVSKHELVMAVHPTGDTWTSETTAIAIEAVIARLQTYQPRLIVMEATGGYELPLAAACAAVKLPIAIVNPRQVRAFAHAIGRTAKTDAIDASVLALFGARVEPTPRAVADADTQALAGLITRRRQLLEMVGAERRRLEQAPPTGPITRDLRNHIRWLERRVADVDEEIGTAIQQSAVWRVSDDLLRTVPGIGPTTARTLLAELPELGRLDRRAIAALVGVAPFNCDSGQFRGRRRIWGGRAAVRASLYMAALVASRHNVVLAAFYRRLRDAGKPPKVALVAVMRKLLTILNAMMKHHCRWNPKAASTPASTSRPARGVAVLA

SEQ ID NO: 362794 - protein, 403 aa, unidentified
MNSVGIDISKGRSTVAVMRPFGEVVISPFEVRHTDSELSELARQLKSLDGETRVVMEATGNYHTPVAKLLHDAGLYVSVVNAKLVHGYGNNDLRRVKTDKKDSVKLANYGLDRWLTLPRYIPEEDTRLLLKNCYRQYRQYSKVQTVLKNNLISLLDTVFPNANRLFSSPIRGDGSEKWVDFVAEFWHCRCVSEKSERAFTSKYLRWCRKHGYNFSEAKAHTIYAEASGHIGVMPKSETTKLLVEQAVAQLRATSTALAALKHEMQTLVSQLPEYPAVMDMFGVGPTLGPQLIAEIGDVRRFYSKKALVAYAGLDAPPNDSGDVTGRHKSMSKIGASSLRRTLFLVMSVYLQTAPLDEPVYQFMDRKRAEGKPYRVYMMASANKFLRIYYATVKAYLESLEHTA

SEQ ID NO: 362795 - protein, 352 aa, unidentified
MNRFIGLDGHSSSCTFAVLSEKGKTLRTDVVETNGQSLVEYLRLIPGRLHLCLEEGTQSQWLFELLAPHTHEIAVVSGEKNQGDKSDERDALGLAERMRTGALGAKIFKAPLAFTSLRDLARIYGMVTGDVVRTKNRIKSFYRSRGVQPTAGKAVYAVGRREEELKRLKGGTRQSVQLLCRELDILEGIKADAQQALVAEAHKHAIAKVMETAPGLGPVRVAQLLAIVVSPHRFRTSRQFWAYCGLAIVMRSSSDWVQQPNSQWMKAPVTRTRGLNRNFNRTAKAVFKGAATTVITQLLKNQLYRDYRRLLKEKVKPNLAKLTIARRIAAITLAMWKNKEAYDPAKYQKKAA

SEQ ID NO: 362796 - protein, 356 aa, unidentified
MKNTIKYVGLDVHQSTVSVAVLDAEGKLILQSILATHAAAILDFVHGVRGSLQVTFEEGTQSAWLYDLLVRHVAKVVVCNPRKNALLKAGNKSDQIDARKLAELLRAGLLSPVYHGENSYRILQELVRSYTTLTEDTTRIMARLKALYRSHAVVCGGKKPYGKRHRQEWLQQVRQPGLASRAQRLYDQLDAVQTLRRAAKHEMLAESQKSGAYRLLASIPYLGPVRASILMARAQVPNRFRSKRQFWAYCGLALETRSSAEYHVVQGQVQRSRKPVFIRGLNLNHNHDLKNVFKGAATAASIHDGPLRQFYDRLLAKGMKPELARVTLARKIAAMALILWKKGESFDPKYLMLPAA

SEQ ID NO: 362797 - protein, 418 aa, unidentified
MKKHSKSSQRSEPSLKRTKARGPVQRDAKEVLAEVLGKLTGKLDAPAVSTSAKENRRGNTVGPNRDRLTVGVDLGDRWSQYCILGLEGETLAEGQLRTTQEDVREFFQALPAARVVIEVGTHSAWVQDVITEWGHEVLVANPRLMEGSKRRKRKSDRIDANKLARLGRVDPQSLYPIRHRSREVRQDLVVLRARDALVSVRTELINTARGLVKSMGTRLPRCSSPSFADKVKDAIPVEVREALLPLVQLVETVNDCIARYDQKIEELGQKKYGHTTLLRQVKGVGPITSLAYVLTLEDAQRFSSSREVGPYLGLVPKQEDSGDSQPQLGISKAGDRMLRRLLVGSSQYMLGAFGPDTDLRRYGLRLCERGGKNAKKRAVVAVARKLAVLLHHLWVTGDVYEPLHHTGVETRTAQATAA

SEQ ID NO: 362798 - protein, 408 aa, unidentified
MEVIYPRCAALDVHKKSVVAHAITPGQRETLTFGTMTKDLLELKKWLLDHKVTHVAMESAGVYWKPVYNLLEDTFTLLVVNAWHIKAVPGRKTDVKDAEWIADLLRHGLLRGSYIPDRPQRELKEIVRYRRILIRERSRIICRIQKVLEGANVKLSSVASDIVGISGRLILQAMINGIEDPKELAAMAKGKLRKKTQSLEEALLGLMGSHQRRMLECELEHLDFLDLKIAALDTDIAERMRPNDPIIERIDTVHGVGRRGAEELLAEIGPDVVSRFPDAHHLASWAKICPGNNESAGKRKSGKTGHGNPWLRSVLVEMAWAAIRVKGGYYSSLYHRLAGRRGKKRAIVAVAHSILVTIYSMLKNNTVYQDLGERFHDLLNPEQVLHRAVKRIERLGYKVSVETPALVT

SEQ ID NO: 362799 - protein, 322 aa, unidentified
MANKNIEFEPIATRCCGLDVHKVEIVATVEGEGLKRETRTFNSTTRSLTSLKEWLLSLEVTHVAMESTGVYWKPVFNILESGDFTILVVNARHIKYVPGHKTDKKDSAWICKLLRAGLLKGSFVPPKEQRELRDLTRYRRKLVQNVAAEHNRMIRVFEDANLKLSSVFSDVTGKTCTEVIDNIIAGNTSPEFLASLCTHWKLKSSQEEIALAVEGNFTEHHKFMLRAIRKSIENLEDQIKDIEDEINRYMQPIEAEVSLLCEIPGIKRTSAIDILAEIGVDMEVFPTDAHIASWAGLSPGNNESAGKKKAHTRTTATKRRKR

SEQ ID NO: 362800 - protein, 368 aa, unidentified
MEKFITFVGLDVHKNSINVALADAGRNAEVRHYGTIGGGLDDLDRLVKKLSSPNRKLHFVYEAGPCGYDIFRSLTAKGLDCAVASPAHIPKKPADRIKTDRRDAMMLARLHRAGELTYVFVPRVDDEAMRDLTRAREDAKKAQRVAQQQLGGMLLRLGFRYPKDNWTKQHFLWLADQKMPMPSQQVVFQEYINAINETIARVERLTRQIELLVPTWRMAPVVEALQALRGVSLIVAATTIAELGDLTRFEHPKKLMTYLGLVPSEHSSGEKKQRGKITKTGNGHARRVLVEASQAYSHPARITRPLLKRQEGLSQEVRDIAWKCQVRLCARFRRLMAKGKNRNAVITATARELAAFMWAIANHAPIAA

SEQ ID NO: 362801 - protein, 404 aa, unidentified
MSVTSHRTESSPVVRVDLGAIFCSLELSQSKWLVTSLSPGSGEKLSRFTLAAHDVAGLRARFAELQRKAEARTGQEYPIITIQEAGLDGFWLHRVLEAEGVESHVVDPASVAVSRRKRRVKTDRIDGETLIRTLLAFKRGEPRVCAMVRAPTPEEEDRRRVGRERKTLTCEVTRHINRIKGLLYGQGVTDYEPRKRDRRKRLEELRTGDGRTLPSRLKAQISRELDRLELVLNQIRDCEEERDAMLAEAATASRPNPSSSSTAIHTPPRPTVPAMLIELKGIGAESASVLWLEGLSRPFDNRRQVAAYAGLAPSHWQSGQVNHDQGVSKAGNPRLRTALIQLAWLWVRHQPDSALTLWFKNRVAHNGGKFKKSTIVALARKLLVALWRYVQAGVVIEGAVMQPS

SEQ ID NO: 362802 - protein, 355 aa, unidentified
MNEAKYIGLDVHQATISVAVRDSDGKLVMEAILETKAETILQFVRGLRGSLHVTFEEGTCAAWLYALLKPHVTQVLVCDPRKNALLKVGNKNDRIDSRKLAELLRANLLSSVFHEDTGLRAVKELARSYLTMTKDLTRVMVRLKALYRSWAIPCATKQVYAPRHRAEWLAKIREASVHRRAELYYQQLDALRSLQQQVRKELLIEGRKHSATKLLRQIPSIGPIRAVLLLALIQTPHRFRTKRQLWSYCGLALETRTSAEYRVVHGQLQRSKKPVAIRGLNKNHNHDLKNLFKGAALRAAAVEKPFQEFYAALVAKGIKPEMARLTLARKIAAITLIVWKKGARFDAEQLKQQAA

SEQ ID NO: 362803 - protein, 326 aa, unidentified
MDNTYYIGIDISSKTIDVAIHTNTKKKAPYKQFNNDPQGHKELLKWINKPTKALHITMEATNIYWEELAYFLVSKNIKVSVVNPKRIKGYANSLNLRNKTDKIDAILIARYCAKEQPGAWEAPNANERSLLLKLRQLEHLKKCLTAEKTRRSMLKESFSLESCQRTIDFLVDEIKLVEKSVNELIKSDDKLSANAKLLRSIPAIGASSVPWLLAYLGDGSRFDNSKQATCFAGLTPMIHQSGTSVNGKPRISKIGHSEIRKILFMPAMAFSFGRFKDRVYAPFVQRLLARGKSKSLIITALMRKLLSIAQGVLKSQKPFDESLHNV

SEQ ID NO: 362804 - protein, 341 aa, unidentified
MKNLNVISIDLAKNIFQVAVITAGKKCLFNKPMSRKKLAQWLIQQPKSLVIMEACGSMHFWAWKAQSAGHEVKAIPPQYVTPYRQGHKTDHNDALAIAEAGQRPQIKAAPIKSVEQLTIQSINRARALLNKEKVSTSNHIRAMLLEYGITFRKGYAHLKRHIPMILECADNDFPIALRSTLHRLYQRFIAVEADIAAQDKELLQLINQNTSCKQLQDLEGIGPICASLLYASLGNGEAFKNGREASAYIGMTPRQFSSGGKVTMLGIGKGGRSGNCELRSALIQGARSVVHQLKAPKTKKQQWLFDLIKRSGYGKAAVALANKNIRTAWAMLNTGQAYQVA

SEQ ID NO: 362805 - protein, 418 aa, unidentified
MTATHCIAPTLLVAIDISKHRHEVLIGIPGKKRRRRITITNTLDDFQRLSAVLASYDMPVRIGFEATGNYHRTLAHHLGRAGFELKLVSSVGLARTREALHNSWDKNDPKDAQVILHMLEIGAVQFFHDPLILGTADIQELSKTHEIVSRSKTELWHRILTHYLPLYFPEAERFHRSSRTDWFLAFLEKYPSPHMISAMDRDAFIADAWAVVGRKVSKEQLLSDIYATAVGSVGLPVHRDSDAVRMFRLVLAEGRSLVRQRDEIEARAVALLSDLPDYQLLTTIPGVGPINAMTILAEAGDLRRFRHHRQFLKFCGMDLATVQSGMFRGQSRISKYGNARLRRTLWMAGQTAVLKRTNSFRDKFERYISKDRHNAHLRRKAYTAIAAKMARTVHAVVKHGEPYRPFFEGVSPGGRTTL

SEQ ID NO: 362806 - protein, 272 aa, unidentified
MRRVIGIDIHRTFGEVVFWEDGRLRRAGRIDMTRTALEGFGKSLLASDEVVIEATANSMGESRVLAPFVARVIIANPLQVKAIAQAHVKTDKIDAGTLASLHTAGYLPQIWTPDAATERKRRLATRRYQVLRHRTRLKNEVRSILHAHLIPKCPHADLFNARGRTWLAAQPLPEDERVAIDRHVRELDRLAEDLAMLDRQIAQDAIDDPAVKRLMTITGVNLTVAAGIVAAIGDIGRFNSPQKLVSYFGLNPRVRQSGTRGCPSRSHQQGWP

SEQ ID NO: 362807 - protein, 398 aa, unidentified
MNHITKLLEKVNTESFKDIQTRNYPAYVGMDTHKDTIVVSIATPGRTKPKHLGTIANDPKKITILVKNISKKHNDEVVLFCYEAGPCGYILYHQITSLGHDCMVVAPSLIPQKSSKRVKTDRIDAQKLARYLRDGSLTSVWIPNTEQEAMRDLVRIRVDFKIQETKAKQQINGFILRNGHIWPTGKSRWSKSFYTWLEELKFKHPWQQVILQEYFDALSDCRDKLKRLCTYIGQVRLTWSQSAIIDSMRALRGIDTLAAMTILAEIGDFTRFEHPKKLMSYLGLTPSEYSSSTKRRQGAITKAGNSSARRILVECAWSYRYPARKTKHIKHKEKDASVHAKEVAWKAQTRLCTRYHKLVQSGKNKNQIIVAIARELVGFIWEIVVVETHKLKQAQSLK

SEQ ID NO: 362808 - protein, 366 aa, unidentified
MEESVVLFQEKFGVLTSDLNRLLGVMTSYDVSEVGMESTSIYWMPIWRVLEPHVPLKLVNPYFIKQLPGKKSDVKDAEWIATCLLKGLVKGSYVPDTIVQQLRQYDRRIHDLNKECVRKEAKLDAALQRCNIRLSNYVSDTGGKAYRKVVAFIADGLTDPDELLKLIHPRTVNKHGKEALRASLDGFITEVDIDVIRQLRQEIDLAQEHIEECQRKMSAMCREYCPTQFGNLQTIPGVKERSATAIIAELGTDMSSFETAGNLVAWAGLKPRNEESAGKIKARKITHGNKYIRQTLIECAWAASRTQGCFYNTFSYTQCTVRHKNRMKVQVAIARKMLVACWHILHDNVMYNDYSANGKKAQGSQE

SEQ ID NO: 362809 - protein, 343 aa, unidentified
MISVGIDVSKGKSTVCILKPYGEIVSKPFNITHTQKDLSELSSMLFRLNDEVKIVMEATGIYHLPVLTYLQEKGFFVSVINPYLMKSYRNESLRKAKTDKIDSRIIANYGIDHWFKMKEFQTSGEIYEELKLLGQQYRHYMKLHLLSLAELTHLLDLTMPGIKNLLASWNETNRKDKRSDFVERFWHYDVITSMSEQEFTEEYILWAKEKKYVPSQEKAKVIYALAQESIPTLPSETSSFKMLVTEAVRVLKEVDATLGLILSRMQEIAKTLPEYSVVREMGGVGNTLAPKLIAEIGDVRRFRNGKALVAFAGIDPPPYESGQFVGCNRKISKRGSASLRKVG

SEQ ID NO: 362810 - protein, 416 aa, unidentified
MPAFTLYIGIDWATQTHQVCIMDAYGTIVREFVVHHTGESIREFLRSLEAASDEPSKIAVGIEVPRGPIVEALLERGYAVFAINPKQLDRFRDRHSVAGAKDDRRDAFVLADSLRTDQHCFRRLSIEPATVVRLRELARAEQEAGEELRRAANQLFQLLLRYYPQILELCRFPDEPWIWALLDIAPTPEQARRLTLARVRNLLTKHRIRRVTAEEVREVLGRLALPVAAGVTEAISERVLLMLPRLRVAYQQRRQIVERMEALFKGISAPDDEACGSLRRDVAILISIPGVGRVIAAALLTEAFDALSQRDYEALRAHGGTAPVTRRSGKTTQIVMRYGCNQRFRTALYHWARTSVMHDERSKHHYARLRGVGHKHARALRGVADRLLAMLVAMLKAGQFYDAARRAVTPPVASAA

SEQ ID NO: 362811 - protein, 418 aa, unidentified
MNKTPEMSLAACVGLDWADRRHVICLRAVGREETESSQLEQKPDALHEWIAQLRVRFEGHKIGIAIEQSRGAVIHALMMYDFLELYPINPKALARFREAFRVSGAKDDPSDAELLMDFLRLHRSRLRAWLPDTVETRRLQILAEYRRKLINNRIRHTNRITSLLKMYFPQALDWAGELGTAQACDFLQNWPTLTAIQQTRPPLLQKFYLQHHCRNLALIQDRLTRILTARSLTDDPAIVDALSLAVQAEAAQLRPIIEWIPRFDQIIAQHFAQHPEHDLFESFPGAGPVYAPRLLTALGTDRSRWDSSADLLSHSGIAPVTEKSGNSCWVHRRLACSNFIRQTFHEFAAQSIRWSRWARAYYDQMRARGLRHPAAVRALAFKWIRIIYRCWKGHQLYDEQTYLKALRDKRSPLADKLD

SEQ ID NO: 362812 - protein, 342 aa, unidentified
MPNRPFILKIEYHHSRANRLNHKENAMNVIGFDISKDTIDVTLLRNSGQVDYIKIANACEGFEKLNDWIRSKRIRKISISMEATGIYYEEAADYFSAIYQVFVINPLKIKEYSKSQFSHTKTDKADSRLIAEYTKRHLDKLTPFKPSENPTLYKLISLLQQLKQQQNESQNRLHAAKDTFIRATHEAIILLLAKQIDQTAKRIDLMIQQQDSLNTHYKNLQTIPGIGKDTAAILLNHLTDKQFKTANKFVSFAGLSPRIEQSGTSVNKKGRLSRYGHRRLKRALFMPALVAYRIKAFPKLVQNLSKKPKMIVIVALMRKLAKIAYYIHKTQKPFEKMRYQIA

SEQ ID NO: 362813 - protein, 471 aa, unidentified
MSPLRPGAPGKDLRPDTLPRLVTSGRKLRRERLYRAESTDGPPELITDWRCTTDGQYDLYVGIDWGSREHQVCLLRANGTVLRDATVKHEGRALQEFAAWLVRRAGDPARVAVAIETPHGTLVDEFMARGCAVFHLNPKQLDRFRDRYSPAGAKDDRRDARVLAGALRTDLAAFHQLDLEQPLVIQLRETGRVDEQIGTDLTAWCNRLWELLHRSWPALLELSPAADDPWLWGLLERAPSPAQGRRLRRATIGALLRKHQVRRLTPDQVYQALQQPPVYLAPGAREANVYQVGMALPIIRSLHQRRLQSERRLQTLLAELTAEPALGATDDEQQQHRDAVILLSLPGVGTRIGATMLGEAARALATRDYHRLRSLCGVAPVTRQSGRQRRVVMRRAASKRLRNATHRWAGCMIQHDEAARSHYDALRDRGHSHAHALRSLADRLLNVLVAMLRDGTTYDASRRHRRVASAA

SEQ ID NO: 362814 - protein, 379 aa, unidentified
MTQFAVSTTTEQTIYAALELSKNSWLLAIQVAGRDKPSLHPIKGGNAEGLVAKLDAARDRVAKATGQRPNVVLCYEAGYDGFWLARLLDARGIECLVIEPASLQVNRRARRVKTDRIDVESILHALIAWCRGERHVCSLVVIPSVAEEDLRRSHRERDRLVRERTAHINRIKGLLFGQGIRGINVKRYYKSLKPAQLITGDGRPLPERLGREIAREIERLAQVQVQIVESEGERDSAPTPCVATERKRRDLLRLNGIGPALSAILAREVYYRRFANRRQVASYIGLAPSPYDSGEGRRSQGISKAGNGLARYALIQAAWLWLRHQPNSDLTQWFHHRTEGQSKRVRCIMIVALARKLAIALWRYVETGLIPQGATLTAR

SEQ ID NO: 362815 - protein, 421 aa, unidentified
MLKLRYLGLDVHAASIAVAVAESSGEVRLVGEIPNEPGAVRRLVKRLGPARQLRACYEAGPTGYVLYWQLTELGVHCDVVAPTLVPVKSGDRVKTDRRDAVRLARSYRAGDLTPVWVPDAEHEALRDLVRAREAAKRDELRARHRLGKFLLRHGRRAPQGVRPWTQRYMAWVQRDVHFAQSAQEAVLLDYVHEVEHAAARIERLERAIDEAVEVAPVRMRAVIAALQALRGIARVSAVTIVAELGNVTRFATPRQLMGYSGAVACEYSSGERTRRGGITKTGNAHVRRIVVEAAWAYRYRPAVVGKLRQRQAGLSTACHKYNDVSFRTPECYLRSIDPPEGERDAAEEPVLNRFGGGGASRPRSAGAKIYIIVSRGHSSQDRPVCRRRHGEQEHRRTTGYVAPDRQQVAQAVFREASRWTR

SEQ ID NO: 362816 - protein, 358 aa, unidentified
MAKYSLSSLQQFVSGFEKQPFWIGLDVHKRSYYVSLLRNDGQHTTWVTTASPASFTNQILHLNINIAAVAYETGPTGFALARVLESAGLRVIVAAASRIPRSVTAGAKCDRLDCIKLADYTSRGMLKPIAIPTADEEAHRALLRRRHNLVDSIRRSKQRIKSLLLFHGVNEPKEVTGWSGQAKEVLLTLPMEPGSQLTLESYLRELTFHQTELRRVERELRQLIASTKQNQSAQYLQTVPGVGPTVSTTYVLEMFCPERFNRAEEVASYLGLAPMVHHSGGRTPRGRLVPVGQKRLRSLLIEAAWMWKIKDPTAAELYNRLLARSGVAQKAIAAVARKLAIILWRLLIEQRPYRIAVS

SEQ ID NO: 362817 - protein, 345 aa, unidentified
MKIVGCDLHTRYQQIAMLDKETGELVERRLEHESGEARAFYAALSSPVRVGIEATGHTRWFERMLAELGHELWIGDAAQIRASVVRKQKTDARDAAHVLELLLSERFPRIWRPTMAERDLRQLVWHRQKLVWMRIAVGNQLHALAMGEGVCRKKKLFTKKGRAELEGLGLGVWASYRRQELLTMLDQFDASLQELDHAVAEQAEQSAAAVLLMTHPGVGPVTSLAFVLTLGPVERFERSKQVVSYLGLNPREHSSGGRQRLGAISKQGNPMMRSLWVEAGHSAARLDSELRQDYQRLKLRRGSGVAKVAIARKLAVRMYWILRGQASYAQLVRTQGSPWATLVKE

SEQ ID NO: 362818 - protein, 335 aa, unidentified
MQRPPWPKPPIPANLNLSAPNCRRTITTSSSRSRGIRSPVPDGLQCRMPNGPKGHAAVADLAHDRDAVVCFESTGGQEWQLWETLEAEGVIARQVPPAQVKAFARSRGTRAKTDRIDAELIARFFAFRPDAGRRLPAEKLRLLRALTSKRAQIVEMRKRLLAQIRAHQKLGTAEMFDSVDTELKARLDCLIKELEARIGAAISSDALVAETAGVLRSIPGIGPVASTMLIAEMPELGTITGEQAAALVGLAPVAHDSGTLRGKRTIAGGRRALRHVMFQAALVAAHHNPSMKAFADRLRKAGKPHKVIITAVARKLVNLANALCKSRQKWTPSTA

SEQ ID NO: 362819 - protein, 394 aa, unidentified
MFLVGIDIGKNKHSFCIIEKETGELIVKPKFFDNNNVGFEELISSIQKLSNQDILIGMEDTGHYHFALLKFLLDKKYQVALINPVTTNLTRKLQGGITKTDKLDTLTICDVLSSSQRVKSYRITKVDRFDMYEQKQLTREHHNLKEQLNVLKNRLQKSIDIVFPEFNSLFDSKYGIVYVNILKEFGSADAVARADIRTIRKCFDIKGKGRRIALTAEKLKEAAKNSVGFPSTAEVVQIKHLIIQVKLIEEQISEIDKKIEEFSISNNSPILSIPGISHFSGTSILAELGDIHNYSKPSQVIKFAGVAPITYESSQFTAQHTAITKKGSKYLRKTLYQIITSVIKNNEVFRNYYQLKLSQGKGNRCAQGHCVRKLMRVIFHLLSTNTQFNPSLLV

SEQ ID NO: 362820 - protein, 419 aa, unidentified
MSFKIIKNNCCGLDVHKTWIFACIGITDSNNRTEYKQARFSSFTKGLNELCDWLAKYNCNDVCMESTGKYWIPVFNILEQRSLWVTLSHPKYTKPMKGNKTDRKDAKWICDLYMCGMVKPSFIPPADIRELRDLVRYRFKLTCMITGEKNRAQNCLTVSNLKLDDVFSDVFGKSSRSITEQILQHPGETFDVAPFVNSRCKTPIVEIQAAIDGAISKEQAVKLRQCLDHIDELNKHISEVEQEILRLSDKYEVALNLIRTVPGFDKNPLTAIQVLSEIGGDMSVFPTAKHLVSWAGCCPRNDQSNQKIKSTRISRAGSYFKPVLVQVANALIKSKKHSEFTNRYKRIKARRGHKKAIIAICRMILTAIWHILSDLKPYTPEGFLESRPVKEEKVLSTSQALNLLKQRGYIIKDKPLAVF

SEQ ID NO: 362821 - protein, 355 aa, unidentified
MSHLNSGIAVIGIDIGKNSFHLVGQDRRGAIVLRQKWSRGQVEARLANLSPCLIGMEACVGAHHLSRKLQALGHQARLMPAKYVRPYSKGQKNDFRDAEAIAEAVQRPTMKFVATKTVDQLDLQALHRVRERLVSQRTGIINQIRAFLLERGVAVRQGLRFLRVELPGILATRTDVLSPRMLRILEDLSADWRRLDARIEGLSSEIETFAHQDQHCERLMTVPGIGPIISSAMVAAIGTGDVFSKGRDFGAWLGLVPKQISTGDRTILGSISRRGNRYLRALFVQAAWVVLVKLGPKQWERYGLKSWIEAAKKRLHHNVLAIALANKLARIAWAVLNKGRAFTCVKTDAMASRPV

SEQ ID NO: 362822 - protein, 341 aa, unidentified
MDEYIGLDVSMKETAVSIRRAGERIWRGKCASDPSIVAELIRKRAPSVKRVVFETGPLSVWFYHSLRIEGLPAICIDARHAKAALDMATNKTDANDADGLAQLAEVGFFREVRVKGFDSMLTRTLIAARTRLVRITTELSNQIRGVVKTFGLLVPAGKGSTFEKNVRSLLADQDRLASIVLPMLEAWRSIRVRAAELGRQLVRDARQSRACRILMSIPGIGAITATSFTTAIEDPDNFRKSRSVGAWIGLTTRRYQSGEVDYDGHISRRGDRPLRGLLYEAAAVILTRSSTHSTLRTWGLQLRERIGFKRAAVAVARKLAVIMHTMLKTGELFNPNAGATA

SEQ ID NO: 362823 - protein, 420 aa, unidentified
MTKEYLKVIAGIDTHADTHHVGVITDTGQHLADREFPASGTGYQGIIDFITGFGPVLAAGVEGTGSYGAELSRVLTRRGIPVVEVMRPNRQARRLQGKSDPLDAYQAAESVLSGRSGVIPKSRDGAVESLRVLRAERATAMRARVAVMAQVKTLLITAPETIRAKYRAMTSPALMAALEKTRPTGAPTEPLTSTATVLKRLAVRYRHLHQELALIDAELDTILTLHAPMLRDLAGVGTDVASQLLVTVGDNPERVTTEAKFAALVGVAPVPASSGKMTRHRLSRAGDRQANKAIHRVVLVRMRYDSRTRSYVARRRQEGKSTKEIMRCLKRYVAREIYDQLLHPQPAPDRGSLRTRRTAKRLTLQQAADALHVWPTTLSRLERGLAHDNDVHHRYETWLNCQSPATMQTPHPVLARVLPA

SEQ ID NO: 362824 - protein, 380 aa, unidentified
MPDVTPCLHPGQVRRWVSFDQHKFSIVAAVLPPDGGKPDVQRIETTERAIRRFIDKQGGPAGLSVCYEAGPGGFALWRLLTQLGVACDVVAPSLIPVRAGDRVKTDRRDAKKLVSLYRAGLLRFVHPPTPELEGLRDLLRARDDLRGVRLAARNRVLKQLLRHGRIYREGKTAWTKMHRAWLARQRLDDPLAQEALEQLLIHVDGVERQLELLDARLAEIAGSERWAAQVNILTRFRGIAIITALGLIAEIGDFSRFGHPRELASWLGITPSEYSSGDQQHRGHITLSGNRHARRLLTEAAWHYRHAPRRPASGPEPDERAWQAQVRLHHRYRHLTEHGKRTTVANVAVARELVGFLWAAMTNQPLRATDPATVPEEVAA

SEQ ID NO: 362825 - protein, 319 aa, unidentified
MTDHSTRAAGIDTAKHKLDVAIHGMPTPFTVENLPAGWRRLAGELRRAGVERVGIEATGGYERGVVGWLRRAGFAVLVLQPLQVKAYARLHLRRAKNDRLDAVLIAACAAALEAPPIAPDPRLPPLSDALTFIEQIEEDIARGKTRLEHIGQSRLRRLVLADITRLEARRAAELKRLAQAVRRHDDLARRLDLVQSVAGIGERTALCLILRLPELGHLSREQAAALAGLAPFDDDTGQHKGERHIAGGRARARRSLFAAALAAAFRWNPALIALYRRLTAKGKPHKLALIACARKLVIYANTVLQRGSPWTPRTSTAHP

SEQ ID NO: 362826 - protein, 341 aa, unidentified
MRLSIRTTGELQERRLEQREEAEKFYRGLGVQGMKVRVGMEASGHARWFERLLAELNFELWIGDATEIARKRERKQKTDRQDAQHILKLVLKDDFPRIWVPSWENRDLRQLLWHRHRMVQARTRIRNQLQAVALNEGLRCKKRLWREHGREQLESFRLAPWASRRRQDLLELLDRLNPTIAELSQAIEQEAEKFPEARWLMTHPGVGPLTALAFVLIIGRADRFQCGKQMASYLGLVPLEDSSGNRRRLGHITKQGSSILRFLMVEAAQVTVRSLPEWRSKYFHLMLRRGRKIAKVAMARRLAIGLYWMWRKGWDYEQVKKFGSQGRKSGCHAGVATDSTR

SEQ ID NO: 362827 - protein, 426 aa, unidentified
MKYTQNEKILQIKETTLIVGIDVGSEKHYARAINFRGVEYGKLLIFDNNAEGFAKLEKWTAMIVESNGFTEIVLGMEPTGHYWFNLAENTMKKGMHIVLVNPHHVKKSKELDDNNPTKNDRKDPKTIAMLVKDGRYIEPYIPEGIYKELRLAMDSRWRIVKELSAIRNRISRWICIHFPEFTTVFGDWEGKAALLILHECPTPKKVVEKGIEGIVAIWKKNKIRAVGIKRAVRLVECAKTSIGAREGLISAENELSMLLEDYESKMRHLERTMTLIEELANQIPGFEKLLEIKGVGLVVAAGFLAEVGDISRFSHPKQIQKLSGLSLKENSSGKHKGKTTICKRGRKRLRYYLTFGIMPLLSKNEEFRALHQYYTSRKERPLKKMQSLIALSNKLIRIFYAILTKDVTYDSQKMMSDIRRPEEKVA

SEQ ID NO: 362828 - protein, 413 aa, unidentified
MIKRERIKESRQEVYAGIDIAEEKHVIRFIDNLGREIGKPVSFTNNLEGFSQIEQCAKERGKFSVTFCVEPSGDYWKPLAYYLKERQYPVVLVNPYHTRQSKELIDNSQTKNDRKDAYLIADLGKQGKCFQAHLPEGSMADLKELVLAWTRTNRLLVQAKTYLHNFLTKYFPEYKGCFSMMYGKASMYCLVHFPLPADIQQIGLSRLTFLLKRASGGKLSEKKVQLLYQRACASIGMKEGAHAAKEALGDILQDIEMLLQRKRKMKEQMAFHLLQSGYRDSLLSVPGVGVITACFFLSEIGNPQWYTKATQIEKLAGLHLVENSSGKRHGRFIISKRGKHLLRYTGYLAALSAVAKNNELATLYEYRLNHTRNPKEDKMKLMTYLAAKMLRIMFVVCKKRTVYQPEAITQYWK

SEQ ID NO: 362829 - protein, 341 aa, unidentified
MSQVTTIGLDLAKQVFHVHGADTSGRPLFSRRIARAKLASFFAAQPKCTVAMETCGGSHYWARELQRMGHEVRLIAPSYVKPFVKRQKNDAADAEAICEAAQRPTMRFVPVKSEEQQASAAVFRARDLMVRQRTQTINALRGLLAEYGWIAPKGLFHVARLIARIEDPACDLPQAARSVFLLMIDSIGEQDKRIRELDREIARRAREDADARRLMTIPGIGPITATALLALAPPAESFRNGRDFAAWVGLTPLQRSTGGKQKLGEITKMGERTLRRLLIIGSAAVVLHASKRGAPQGSWLAHMLARKPRMLVTVALANKTARTVWAVLAKGEVYRAPVVAA

SEQ ID NO: 362830 - protein, 370 aa, unidentified
MRKKRTKKGMSNSAIAGVDLGGSDSLATILSPGGEVADRFSFPMTEEGYALFSSRVSRDARVAFEATLMAYPFSRKLSELGYTDVTVAHPTELAWIVRSKKKNDRADSLKIAKLHLAGLLPESHLLGKEEQIERDLLIQRVKLGLEIGRMKSSALSYLTREGVTQSLPETSDNFSVARRLAIRSLRFGDDRDVVLKTMTDRLEFMEGQCEPLEERIRRNAKDNRYARLIMSIPGVDYYLASLYASYIGDPRRFPTFDHVASYLGIIPVSKDSSNVRRRGRMSKDGPSIARWTLGVMVDTVMRRNPQIKEYYDRAKKRKERGSYARVLTMKKLARMIHHMLVTEQNWRWEDEELTEEKLSRLDREGGGESA

SEQ ID NO: 362831 - protein, 390 aa, unidentified
MEARTVNNLLPTAPHHDAVGCLVAIELSKKSWIVAVNTPLADKISRHTLKPGDGKELLDLCERIRTRVARETKRRVEIVSCYEAGYDGFWLHRLLEAHGIRNYVIDPASLQVDRRARRAKTDHVDVERLLRSLMAYLRGEPKVWSVVCVPSVAEEDDRRLNRERGRLINERIQHVNRIKGLLAIHGIYDYQPLRRDRMLRLERLRTAADGQTLPPRLKAEILRELQRLELILGMIKTIEAERDAIASPKTEVEHTNAKKIQDLAKIKSIGPEFATTLIGEVLYRSFDNRKQLASYVGLTPAHFQSGAMCRDQGISKAGNGKARTVMIELAWLWLRHQPDSPLSVWFRERVGKLKGRIRRITIVAVARKLLIALWRYLETGLVPKGAILKA

SEQ ID NO: 362832 - protein, 343 aa, unidentified
MKMASIGIDIGKTTFHLVALDEHGSTVIRRKFWRKALLTYGAKLKTSLIGMEACGGAHCLARLLRDQGHQVRLIPGQFVKPYRQSSKNDYLDAEAIAEAVTRKKLRFVAIKTEDQLDVQGLHRVRERLVHNRTEVINQIRGFLLERGVTFSRGPQSLRKGMPDLLEDAERNITPQLRSLLAHLWQEWQYLDSQMDQISDAMEAVAESDAACRRLRKIPGIGPLVSTATIAAIGNGAAFQRGRDFAAWLGLVPKQHSTGGKAKLLGITKRGNRYLRKLFVHGARAVLLRVKYDTGGFGQWVHRLAARAPRNKVIVAIANKLARIAWVVLSSGNEYQHPPLAAVA

SEQ ID NO: 362833 - protein, 358 aa, unidentified
MEHHILKVALGVDVSKDNLAVCLCRLTVNLTKEFEDPFEVSNDLPGFKKLISWLDKKVASRDDLWVVMESTGIYHEAFVYYLYEVDFNVSVMQSGRVKRYAQSLDQRSKTDALDSRMLAMLGCERALPVWTPPDPVLRELKGLSRERSFLLKEKQIEKNRLHASEHSVYSNKRELRRYKQRLKLIAKQLEEIEKEMAELINASSDLKARIKHLESIPGISFVSAATVVGETLGFTGFTNAKQLTSYAGFDVVLKESGAYKGKTRISKKGNKNIRRALYMPAMTAVRCNPTLKKFYERVKPTKAKPMIALVAVERKLLVLMYSLWKNEINYDSDYEQKKTARTEVLAAQDRSNLALTSS

SEQ ID NO: 362834 - protein, 346 aa, unidentified
MDKLIRIGMDTSKSVFQLHGVNEAEQPVLRKKLRRNQVLTFFAGLAPLKVGMEACGAAHYWARELRALGHEVLLMPAQHVKPYVQRSKSDAADADATCEAMNRPRMRFVAVKSADQQAAQMLAKLRAQFIDRRTQLSNSIRGFAAEFGLIAPKGLSRLGDLLADIRADATIPDMARDMFETLARDYAHISAEVAVLDEKLLAFHRQNEVSRRLAAIPAVGPVGATLLAIKVTDAHGFKSGRDFAAWLGLTPKNHSTAGKNRLGVITRAGDEMLRSVLVAGATALIQHMRRGSKRVWPWLQALIARKAPKLAAVALANKLARIAWKLMVSGEQYRPIGATYPAPVLP

SEQ ID NO: 362835 - protein, 406 aa, unidentified
MTAVMIGVDPHKGSHTAVAVSTAEQPLGKLRVRASADQAGRLVEWAAKWPERTWAVEGAGGLGHLLAQQLVAAGELVLDVQPKLAARVRLLDAGDSNKNDPNDAASVAVAALRSRARRPVRADDHAEVLKVWSRRHRDLGRAKNQAACRLHAVLCELVPGGVPEEITAAQATRILGSAEPYGAAGQARLDLAAEILADMRRLNQQMLESKKKLASAVRASGTSLTEVFGVGPVVAATVIGDVADVSRFASRDHFAAYNGTAPIEVSSGNRKIYRLSRRGNRRINHAIHMAAITQIRHAHSDGRAYYEKKVAEGKTHKEALRSLKRRISDAIYARLRADARQAASSTNKGPGGQQGNDTKSSAAGSHPKHRLFGQATPEPDPRLRPATPASPIMPPEPASKKLRRSP

SEQ ID NO: 362836 - protein, 430 aa, unidentified
MKSNTQNAKIEAITEKTLVLGIDVGSETHYARAFDYRGIEYSKKPFKFSNTEVGFATFKEWILDLKERHEKDKVVPGMEPTGHYWFNLGKFLQDNEMKPVLVNPHHVKKTKELDDNNPTKNDRKDPKVIAGLVREGRYMIPYLPDGVYADLRTASNIRFQLQAELTRIQNRISRWFNIYFPEYKTVYGKPDAKSGMLILKAAPLPEDILTLGIDGVNQIWRDAKLRAVGKARAKTLIEAAEHSVGSKEGAVSARMEIRMLLEDYESRNTRLQEVMVLIEELVRKIPMAEKLLEIKGVGIRTVSGFLAEVGDISRFNNPKELQKLAGLALVENSSGKHKGETTISRRGRKRLRYLLFEVAMSLVSKNQEFRELHNYYTTRRLNPLKKMQSLMAIAAKLIRVFYAMLTKGVDYDPKKMVSDIKRPAVYLQAA

SEQ ID NO: 362837 - protein, 377 aa, unidentified
MKRIKFVGLDVHAETIAVAVAEQGGEVRSLGVIPNREESVRKLVKKLGPVEQLQFCYEAGPTGYVVYWQLTALGAKCEVVAPTLVPVKSGERVKTDRRDALKLARTYRAGELTAVWVPDAKHEALRDLVRAREAAKKDQLRAKHRLGKFLLRHGRRPPTGVKPWTLKYLTWVKQGVHFEQPAQEATLLDYLHEVEHAEARIARLDLAIEEAVKLMPPEMKAVIEGLQALRGIAQVAAVTIVAELGEISRFSRARQLMGYGGIVASEHSSGESNWRGSITKTGNAHLRRVVVEAAWAYRHRPHVGAALRQRQERVSEEVREIAWKAQHRLNMRYRKLMARDKDKGKVITAIGRELLGFIWAIGVKVEAAQKTTERRAA

SEQ ID NO: 362838 - protein, 348 aa, unidentified
MYYVGIDYHKRYSVATVMNEAGAVMAQRTLANRLDDFRMFLKPFAEAKAAVEATRSWAIPVEILEQLVDEVVLANPYLVKAIAKTKFGRNDKIDSGVLAKLLQLDWLPEAYLRSKVNRDQQIILRIRCFFVRQRTQLKNRIHDLIDRQSEPVREHARTFSDLFGKKGLTWLRDLKLDDPYQSLLGRLLTAYDALSEQLAGSDELVKELFKADSNCQLVASVPGFGPFFAVLSNVEIGDIGRFPSSSQLCSYAGLVPWTASSGGKTWHGPIVKPSNRWLRWAFIEATIPAIVADDGLRSYYEYYRRLKGTKTAKVVIGRRLCCIVYRVLRQQTPYYAQKPRFSVYQRAG

SEQ ID NO: 362839 - protein, 413 aa, unidentified
MWSDAAIYVGWDWGTENHEVCVLGSGGVVLQQFSVRHTGEDLIAARARLIACAEDDPSQVAVAIETPHGAVVDTLLEGGVAVHSINPKQLDRFRDRFTVAGAKDDRLDAKVLADSLRTDGHLFRLVESDHPWTIELREWSRMREDLVKERLRHTNRLRQQLHRYFPQALELTSDLSVRWFLELLKKVPTHGKAKTIRKTVVSALLKKYGARRMDGPKALQILRKKSPGLAKGTVEAASANVSLTIERLQVVNTQIRTCESRLETLLQDPMSTMTESDDDPYDAHADVKIVLSAPGIAWRVAGVLLAEAGRLLRARNYRGLRALGGVAPVTRASGKQRGVHMRYACHRRLRSALLHWAGAACRTDPWAKAAYEGMRARGQTHSRALRGIADRQLKVLVSMLRNQTEYDPARRAA

SEQ ID NO: 362840 - protein, 339 aa, unidentified
MKYTPVGVDIAKHVIQIHFINEHTGEVVDKQLRRQDFLTFFGNREPCLIGMEACGGSQHWARELTKLGHKVRLLQARFVKAFVMGNKNDVMDARAIWMAVQQPGKEIAVKTEEQQSVLVLHRTRMQLVKFRTAQINALHGTLLEFGETINKGRAAMEREFPEALERMKERLPPYLIMVLENQYNRLNELDSLIEDIEKQLTSVARQNETCKRLLDIPGVGPLIATAAVATMGEASAFKSGREFAAYVGLVPKQTGSGGKVRLLGISKRGDTYLRTLFIHGARAVALVAKEPGPWITELKKRRPASVAIVAMANKLARTVWAITAHDRKYDRNHVSIRPY

SEQ ID NO: 362841 - protein, 338 aa, unidentified
MTIIRIGLDTSKHVFQLHGVDENEKPVLRRQIRRSEVEKFFAKLAPTQIGIEACGASHHWARLLRGLGHEVMLIPPQYIKAYVKRGKNDAIDAEAICEAMSRPTMRFVPVKTAEQQAALTMLGVRDLLVKQRTMLINAMRGHAAEFGVTVAKGPQQMVELLRRLATDEGVPALAREMLGLLAGQLEAINGKLKAIEARLMAWHRQDQTSRCLATIPGIGPIGGLSFALKVADAKAFRSGRHFAAWVGITPREDSTAGKHRPGRISRAGDEDLRRLLVLGATAVIQQAQAKRGRATPWLLGLLSRKPKKLAAVALANKMARIVWAMMVSGETYRRPQEA

SEQ ID NO: 362842 - protein, 433 aa, unidentified
MNDAILSIDVSLDQLDVALRTDDSGWQWPHRAYPNNRPGFEKLKAELLTELEPLSAEQLTVVAESTGPYWWPAFYQVAHDVDLADYQPHLAVLNPKHVKQFRKALPEQDKNDLLDPQVIDRYYQAFGVKHFHQFNDRYLPLRFLSRAYARLIHTLAAEKAYLRSLLFIAASDYQRLEPFSDLFGVTSLQVLDEFDDLAALADLPLADLADQLRGWSGNSLPDPDHNAHQLRQAADHSYPLPQALTTPLHLIVQHSIAHIRFLADNQKTMRGLIEQQLQQVPEADLALQQPGLGPSLVAGCLSEIQDTTRFITGTKFDRKRKCLRPRTYRDGQAAVAKLAGLWWPQNDSGRFQADDRPLARERNPYLRYWLVQAAHTLQRYDPDYRAYYWRKFYEVRTHQHKRALVLTARKAVRLIFALLHKGQLACREEGLMT

SEQ ID NO: 362843 - protein, 336 aa, unidentified
MVTIGVDAHKRTHTLVAVDEVGRKLAELTVEATTREHLRVLEWAAQLPGGRRWAIEDCRLVSRRLERDLLGAGERIARVPTKLMAGTRKSSRTYGKSDPIDALAVARAAQREPDLPEARLDGDERELRLLVDHRENLVAERTRLITRLRWYLHDLDPALEPRRSSLTSTAALRRLDAQLMPLSGTLVRIARELVTRCLELTGSIRSLERELTDRTRMLAPALLAIPGCGAITAAKLVAETAYIRRFRSASAYARHNGTAPLPASSGSARHRLSRTGNRQLNAALHRIAITQTRIHPAAQAMLSRLHNAGKTRAEARRILKRRLSDVVYRALLADCP

SEQ ID NO: 362844 - protein, 330 aa, unidentified
MESWNVILGVDVSKLTLDICWAERNLHIKIDNCSAGFCVLKKWCKTQEIDLKKTLVVMEYTGGYEYRFIQFCESSSIFYCRVPGLEIKQSRGMTRGKSDQADAFRIGEYGEQKIKKLTPSKPLDCNILTLRQLLSFRKRLVCEKAGFESTVKERKHMYPIKKTDTVIHIAQAKIKADKKYITQVEQQIMEIIKANESMWLNYRIIRSIKGIGPVNAWMTIAYTENFTSFTDPRKYAVFVGVIPFEHTSGTSVKRRSRVSPLANKGLKQELNQPAKAAIAHDPEIGAYAERKLKNKAYPLVLNNVKFKLILRMFSLVKRGEMYVENYQRAA

SEQ ID NO: 362845 - protein, 359 aa, unidentified
MCPEYIKVQFTGQHVYVGIDLAKKSWKVCVYLGTAYHKHFAQPPDPEVLVDYLRRNFSGASYHTVYEAGYFGFWVHRELIRMGVDSIVINPADVPTTDKERRTKTDRVDAAKLARSLANGELTPIYVPERAAEEDRALLRMRRTFVCKQTRTKNQIKAQLQLSGYRVPPDLTDRYWSRTYVRWLESITFDHDTGRAAFHTLLRELVTLRATIADLTKQIRHLSQQDRYRSRVELLFSICGIGLLTAMTFLCEIIAIERFKNLDCLLSYVGLVPGEHSTGETEEDTGLNPRRNSTLRYMLIECAWIAQREDPALLEAFNSYCKRMPKSMAIIPIARKLVSRMRFVLKHNQPYVIGVLSAR

SEQ ID NO: 362846 - protein, 340 aa, unidentified
MKITTVGFDLAKTVFQAHGVDERGQVKLKKTLKRAQVLPFFANLPPCRIGMEACAGAHYWARELAKQGHEVKLIAPQFVKPYVKGNKNDANDAEAICEAVGRPNMRFVPVKTVEQQDLQALHRVRSGRVKERTATVNQTRGLLGEYGIVINKGISQARRRLPEILEDAENGLSDAARALFAELRQQIVHLDEQVAKYQRQIEAICQESAACRKLLKVNGIGSLSATAMVASVGDGSAFERARQVPAWLGLTPRQASSGGKERLLGISKRGDSYLRTLLIHGARAVVKAAQNKDDAQSRWINDLVQRRNKNIAAVAVANKNARIAWALLTGDADYRAPVAA

SEQ ID NO: 362847 - protein, 341 aa, unidentified
MQQELSVVGIDIAKRVFHLVGMDERGKIILRKRLARGEVLSFMANLPQVTVGMEACGGAHEWARQLRNQGHDVKLMAPQYVKPYVKTNKNDMRDAEAIAEAITRPSMRFVPIKTVEQQDVQALHRVREQLMGARTGLINEMRGLLAEYGIVLPKGAEAFRKAVVGKLESEQDKLTSLSQEMFHRLFEELVKVEAEVAYYDEKLLSLATTHPECQRLLTIPGIGPITATALIAAVGDVSVFKNGRHFSAWLGLVPRQHSTGGQTRLLGISKQGDSYLRKLLIHGARSTLRWARLKTDGRSQWMRGLLERRGWNRTAVAVANKNARIVWALLSRGGVYSESAG

SEQ ID NO: 362848 - protein, 385 aa, unidentified
MLTDRQPTTGTETATILVSFELSQKDWLITLRQPGSAKLSRHSLPAGDTAALEGLLWRHRQLAQRSHGNDIAIASIQEAGLDGFWLHRWLEQHGVDSQVVDAASIAAPRRKRRAKSDGIDGETLLRVLAAWRRGEPRVCSMVQPASVEIEDQRRLIRERERLLSERVALTNRIGGLLLGQGVRGYQPLRADRHAVLATLRTGDGRDLPRRLHDEISRMLERIELLQRQIAAIEAEREALLRQAGAGSAPALLLDLRGIGPGFASVLWLECFWRSFASRRQVASFGGLSPTPWRSGGIVREQGVSGGGQPRLRHTMIELAWLWLSHQPTSALSQWFRARTAQASKRDRRIAIVALARKLLVALWRYVSDGVVPEGAMTKAAGGGAR

SEQ ID NO: 362849 - protein, 392 aa, unidentified
MIYVGIDVAKDKHDCFITNSDGDVLFKSFTIPNNREGFETLFQRIESVSDDLAKVKVGLEATGHYSYNLLGFLLDKDLTTFVINPLHTNLYRKSLSLRKTKTDKVDSRTIATMMMSDMNLKSYSDTSYHNEELKSLTRYRFDKVKERAKLKTSVSRLVCILFPELEKLVPTLHMASVYALLSEFPSAGAIASAHLTRLTNLLSESSKGRYGKDTAVMFRDAARSSIGSLMPAKSLELKHTIKLIQELTTEIEEIEAAIKRIMDEEIQSPITTIPGISYRMGAMIIAEIGDFSRFDSADKILAYAGMSPSTYQSGQLDNCYSHMEKRGSRYLRYALYNATKYVCHWDKSFATYLEKKRAEGKHYNVALSHATKKLVRLIFAMEKSGQAYIPAA

SEQ ID NO: 362850 - protein, 416 aa, unidentified
MPAFTLYIGIDWATQTHQVCIMDAYGTIVREFVVHHTGESIREFLRSLEAASDEPGKLAVGIEVPRGPIVEALLERGYAVFAINPKQLDRFRDRHSVAGAKDDRRDAFVLADSLRTDQHCFRRLSIEPATVVRLRELARAEQEAGEELRRAANQLFQLLLRYYPQILELCRFPDEPWIWALLDIAPTPEQARRLTLARVRNLLTKHRIRRVTAEEVREVLGRLALPVAAGVTEAISERVLLMLPRLRVAYQQRRQIIERMEALFEGISAPDDEACGSLRRDVAILISIPGVGRVIAAALLTEAFDALSQRDYEALRAHGGTAPVTRRSGKTTQIVMRYGCNQRFRTALYHWARTSVMHDERSKHHYARLRGVGHKHARALRGVADRLLAMLVAMLKAGQFYDAARRAVTPPVASAA

SEQ ID NO: 362851 - protein, 425 aa, unidentified
MKVTYQNCCGVDVHKSFLVATIIKTSGGVEPDYQKKRFSTFNNSILEFKQWLLDNECRYVCMESTGKYWVPVFNLLEDEINVTIANPKWVKAVKGNKDDTKDSKWIGDLFRLGLVKGSYIPCKKIRILREFTRYRYKLVSCRSSEKNRYQNALTVCNVALDSVVSDIFGKSSTSIIDYLLEQSDNSINHEVIASKLLRSLKSKEDAVIESIEGYQMTDSQKYRMHLVRAHMDYITAEINDIDRELESLLSSDTDFENAIQFLMTIPGVKRDSAITIISEIGIDMSQFSTSKRLCCWAGLVPGSNESGGKKKSVRITRAGVYLKPALVQCAHAAVKSEKSPYYKKKYESLTKRRGKKRAIVAIARMILTAIHQMLSTGEEWNPSDLYKVDMPEALIEKQKAKAIKQALKLLEREGLYPPPKEPQAS

SEQ ID NO: 362852 - protein, 387 aa, unidentified
MYFIGIDISKFKHDCAIIDEAGDTVTASWSFANNCEGFSLLKQLLDALDGQKKIGFESTGHYGHNLKLFLETNNFSFMEFNPLLVSKFVRSKSLRNTKTDSLDAVSIAQYLMTVEYKPYPPSFYHMDQLKSLTRFRDSLVRQHSRQLVELTNILDKVFPEFKPFFDGRFSATALYILAHYQSPEKIANMNAKSYEALRKKSRGKFSMVKFAQLKTLAKNTVGRSDAFLLKQMEITIDIENQLDAKIDEIESQILEFIRALNPPILTIPGIGELTAAIILSEYGNINKFENPAQLLSFAGLEPGYYQSGLAEHQGHMVKHGSSHLRYALMNACLPLITYEPVFAEYYAKKRAEGKPHRVALTHVAKKLLRVIFTLQTKNISYDPTLIR

SEQ ID NO: 362853 - protein, 492 aa, unidentified
MNQPTSIYANQHPKIRKIFEAAGSPSRALCVAIDYAKAQHVVLFCNGLGDVLKKQFAIDNSPKGLEKLLEEVRSTCSHRGIKTEHVFFGGEDNPPYVQNFIQALVDAGYWVARVNAWEAKHQRDNHQASTDNLDLPGIAKTLLHKSSYSAQEESKIILALKELSRTRAYFVGQLSEQKFQIHHYVNRLCPGFLNQKKSGIVPFSRTSLALLGQRFSAGRIRSWPRASLVKFLQRQGQHEPEAAADHLKTLAGQVLDPSPDMVSCWQNSLGQYLLQYQSLAQSVSSLEKELARSLAQTSGALLTSISGIGIVLASGILAELGDPTAWRAVRCLCSYSGIVPRTSQTGGPDKPAQTGKVQRRCNRRAKNWIVQAGSLTGRCGPAELKAQHQELERNGQHADFIMSKRLLRIFKDLMRRGALYRPKPLLAPETPSADLVAYYLALWEQILTKWQGRIEWEVLVDPRYPVGQWRQMAQQLYKISLPVPKIRTSKAA

SEQ ID NO: 362854 - protein, 410 aa, unidentified
METIVERPGALDVHKAQVTACVRGPAEGGGRDQHVAEFRTTVAGLLTLRDWLAAHGVTQVTMEATGVFWKPVWHMLEDEFELLLVNARHVKQVPGRKTDVQDAVWLCQLAEAGLLRSSFVPPKPIRALRNLTRYRKTQIQERAREANRLHKALEDTGIKLDCVASDILGKSGRAMLDALISGTTDPEVLADLAKGRMRAKLPALREALEGRFDHLHAVWIGAILSHVDFLDEQIASLTDTIGAQIAPFEKAVELLRTIPGVQRRTAETIIAEIGTDMSVFPDAKRLASWAGQCPGNDQSAGKRRSGKTRKGSKWLDWALEEAALAATRTNDTYLQAQYRRLRPRRGHKKALGAVKHSIIVACWHMLTTGEIYNDLGGDYFQRRDPDKTAKRLIAQLERLGHTVTLQEVAA

SEQ ID NO: 362855 - protein, 339 aa, unidentified
MKTTLIKLTHVLGIDVAKKTFQVALASVEEPGKTIDHNFDNTAKGHRALLSWLRKRCKTVELHACMEATGPCGDELATFLDTHIARLSVEQPRRIKGYANCRMMRSKSDPADARMIAHYCATQKPRAWKRPGGGQLRLRAASRRRDSLIGQLHAEKNRLGQTSDPFVCKDIRTHLRHLEVRIAVLEKEIRAIIKSDEKLATALDLLISIGGIGITSASIILAEIPDVANLDDARQLAAYAGVTPRHHQSGTSGSTHTPMSKNGSARLRKALFYPAMSALRFNPVCQTFGQRLLAKGKKKIVVIGAVMTKLMHLIFGVLKSGKPFDAKHHLQYHPKLQIS

SEQ ID NO: 362856 - protein, 392 aa, unidentified
MVYVGIDVAKDKHDCFIANSDGEILYDVFTIQNNMDGFEDLLFKIKTVSKNPDKVKVGLEATGHYNCNLLGFLKSKGLPTIVINPLHTNAYRKSLSLRKTKTDKVDARAIASMIMSDVSLKPYSDTLYHNEDLKSLSRYRFDKVSDRAKLKQSVSRLVNIMFPELEKLVSTVHAKAVYELLSEFPGAHQVASANLKHLTLLLETASKGHFGRDKANEIREAARRSISTYLPAKSLELKHTINLIRELSAEIDEIEAEIKKIMDAIDSPILSVPGISYGLGSMIVSEIGDFSRFDNPDKILAFAGCSPTTYQSGQIYSSHAVMEKRGSKYLRWALINAARYVCIWEPTFAVYLEKKRSEGKHYYVALSHAAKKLVRLLYHLETTGEKYKPVSV

SEQ ID NO: 362857 - protein, 350 aa, unidentified
MIIIGADYHPGFQQIAYVDTETGELQERRLQHREEAEKFYRELAAQGKKVRVGMEASGHARWFERLLGELNFELWIGDAAEIRTKRVRKQKTDRQDAQLILKLMLEDRFPQIWVPSWENRDVRQLLWHRHRMVQARTRIMNQLQAVALNEGLRAKKRLWREAGREQLTAIRLARWATRRRQDLLELLDRLNPIIGELTKAVEEEAEKCPEAQRLMTHPGVGPLTALAFVLVIGRAERFGCGKQIASYLGLVPSEDSSGERRRLGHISKQGNSLLRFLLVEAAQVTVRSNQEWRSTFFHLAMRRGRKIAKVAMARRLAIRLYWMWRKRWNYEQLTKFGAHAGQPGNPHGVR

SEQ ID NO: 362858 - protein, 410 aa, unidentified
METVVERPAALDVHKQQVTACVRVPAGRGRREQHVAEFKTTVQGLLALRDWLKAYAVTQVAMEASGVYWKPPWAILEAEFECLLVNARHVTQVPGRKTDVSDAAWLCQLLEAGLLQASFVPPKPIRTLRNLTRYRKAQVGERQREANRLHKILEDTGIKLDCVAADILGASGRAMLDALVSGTTDPAVLAELAKGKLRKKLPALREALEGRFDAEHGIVVGAILAHIDFLDEQIDLLSEAIEEQIRPFAPAIELLCTIPGVQRRTAEVVIAEIGADMSVFPSAGHLASWAGLCPGNHESAGKRRSGRTRKGSRWLGIALTEAAQANTRSRDNYLSAQYRRLKPRRGHRKAIGAVRHSIIVACWHMLTTGEIYRDAGGDYFTRIDPDKQTRRLVAQLERLGHVVTLQEAAA

SEQ ID NO: 362859 - protein, 414 aa, unidentified
MKLFVGIDVSSEELEACFMNPEGDTLETLKVENNLHGASHLRDRIVAACDKLPASEIHIGLEATSVYSWHPAMYLHEDASLQERKTKVFTINPKLIHKFREAYADLDKTDRIDAWIIADRLRFGRLTTTIVMQEQYFALQRLTRMRYHLVHNLTREKQYFLQNLFYKCNAFRSEVDSSVFGHAIMDMLSEKYSLDEIADMEVADLADYLKEKGRNRFPDPERVARCIQKAARASYRLSKVVEDSIDLVLGTSIQAIRSIQSQLKELDKAIERILAGIPGAQCLRSIPGIDRVYAAGILAEIGDIERFSDQAAVAKYAGLTWRKHQSGGFEAEDTKRIRSGNRFLRYYLVEAANSVKNREPEFGEYYRKKYNEVPKYQHKRALVLTARKLVRLVDALLRNGQLYTPGRKVKPAEH

SEQ ID NO: 362860 - protein, 341 aa, unidentified
MQEVSTIGLDLAKHVFQAHGASASGAVLFRRRLRREQVLSFFARQPRCCVAMEACASGHYWARAIGELGHEVRLIPPAYVKPFIKRQKNDMADAEAICEAAQRPTMRFVAVKSEAKQVAAVIFRARDLLVGQRTQIINALRGHLAEYGLIAPQGPSHIERLIAQIEDPACGMPEAARSCLARLVEMLRRLQDEITALDREITVRSKSDDVARRLMTIPGIGPLIATAIEALAPPSETFRSGRDFAAWIGLTPVQRSTGGKERLGQTSRMGERTLRRLLIFAASAVVRWAKRKGVPPGSWLARMLACKPPMLVIVALANKDARVAWALITKGGIYRAPAAAA

SEQ ID NO: 362861 - protein, 343 aa, unidentified
MQTVTTIGLDIAKSVFQVHGIDAEGKVVIRRQLKRRYVLAFFQKLAPCLVGIEACASSHHWSRELKGLGHTVRLMPPAYVKPYVKRQKNDAADAEAICEAVTRANMRFVATKTPEQQSCLMLHRTRHLFVRQQTAVINAIRAHLAEYGIVAPVGRNGVEELLGVVADPSDERVPEVARACLAALGAQLRMLKTQILEFDRMINAWHRSNETSKRLDEIPGVGPALATALVASVADPKAFRSGRDFSAWIGLVPKQHSSGGREKLGSISKQCDRYLRCLFTAGALAVIRYAKIHGTKHRPWLTALLARRPTKVAAIALANKIARMAWAMMAKNERYKEPVALAA

SEQ ID NO: 362862 - protein, 295 aa, unidentified
MGSIATDRQHKVVIGVDPHPGSHTFSAVDSNGGVLDELRIENTVAGREALWAWADRFPDRRWAVEGPGNRYAKELVSELILAGEQLHAVAPAMTAEYRKRYRRGKDDEIDAGSAARSVLANDDVPVYLPTEYEAELKELTRTYQRLVVQCKSTKMALDQLESREVREALRGVIDVLSDAIEELKRKIHHMVKKTAPGLLRAMGVGPVVAGTLLAETGRVDRFSTPAQFAAYSGCAPISWDSGAHQAHRVNPGGNRRINWAMHIVVMSRLRIDQRTQPFEIESSGRERRSVRYSEF

SEQ ID NO: 362863 - protein, 396 aa, unidentified
MKYLKQIVGIDVARNELVVTLGRMREDLSIELCARKTFANDKNGFWSLVCWAKKLTDSSVSVRFVMEATGAYHELLAYYLVERGDEVSIVLPSKISNYVRTLETKTVTDKTSADAIARFGLERQLDRWRRPSLVYATLRQLTRERNQLLDEQTVAKNQLHAELAGALVNKQSVKRLEERLALCERQSKEIVAELSAVVKADKKVGEQVVLLCSIPGIGFLTAVTLLGETNGFDLIRNKRQLTSYAGLDVREKQSGTSVKGQSRISKRGNKHIRKALYFPALAAIRCDERYKSLYHRILSRTGKRMKGAVAVQRKILEMAYTVFSTGVRYDKYYLAKQEAQAKAAVGQTTEVELSTAISHQVAAEPSVVPDQLQSKGMARKEKNILQLVKKAELVEQ

SEQ ID NO: 362864 - protein, 341 aa, unidentified
MESTQVAVDLAKSVFEIAVSHEVGRVAEHRRLNRSQFRRFLEEQEPSEILMEACGTAHYWGRECRAMGHRVRVLPAGDVRRYRDGNKTDRTDTKALLEAARNDAIDAVPVKSEEQQAIAALHRIRSGYLQTRTARINAVRGHLREFGVTIPPGARKVVPSARSALEQGAVPELLGEILLELLDDIERLAARAKDIEKRLERLTRHMPQTRHLMSVPGIGVLTATALIAFVGDIRRFPSCRSFADYLGLTPREHSSGAVRRLGRITKRGNTYLRMLLIHGARSALRAGMMTDEPDDLRTWALKVKDRKGFNLAAVALANKLARVAWRVWRDQRDFEPRPAAT

SEQ ID NO: 362865 - protein, 375 aa, unidentified
MQTDSITYVGLDVHKRTVVVAMLLPGRAEPVEWQEPHDATVARRLARRLLREAPGKVVCCYEAGPTGYILQRRLRAEKTMCQVVAPSLIPVRPGSRVKTDRRDARKLAELLRAGLLTEVHPPSEEQEALRDLCRCREDVQQDLIRARHRLSKFLLRRHYIYTETKHHWGSRHMAWLQQLRFEDPASQAVFDSYMLSIEQLDERLLQLENKIGEFGCQEPYREPVGWLRCFRGIDMVTAMSLVAELHDFRRFTSPRQLMSYLGLTPREDSSGERERRGSITKAGNSHVRRLLVEAAWHNRSRPAIGLPLRQRRQGQPTRVIAIADRAQERLHRRFVRMTFKGKPSQKVVVAMARELVGYIWAVLYWQPEAESPVAE

SEQ ID NO: 362866 - protein, 362 aa, unidentified
MKAEKTATRYVGIDLGKRTYEVAMVEKGGVKVSNGKTCVSGRQGLYKKLRPSDKVALEAGNLAFIIAKEIEASVGCRVYVLNPSHLPLIYASMKKTDKEDSLKLAHILEDFQEERLPEVPVPSDKEMKRRKLLASYRRAQQSRTREINRLHGLFLAQGIPTMRKEDLANGDSRREAVRTLTGIEREEANYLVACLELHEQQIEVLNREIKKESAGDEVLERLQSVPGVGPMVAFAFVSHVAAERFENTSQVSNYLGLVPRVYMSGDTVRYGRITKRGNGYVRALLVQGAWALTRTRNGGKLKERFEYMTVEKSISKKKAIVAIARRMAELLYTLMRDGTRYEYRPFIREKRAKELAQLAMSA

SEQ ID NO: 362867 - protein, 426 aa, unidentified
MSYRVAGIDVHKRMLAVVVADVHVAGEYQFERRHFGSNPEQLRLLAEWLLEQRVEEAVMESTAQYWKPVWGALEQYWKPICQKREGAEPLSGTLHLAQAQSNRGRQGRKRDFPDAERLVKRLVAHELVLSFVPDVEQRLWRTVMRGKHQLRRNHVRLQNQLEALLEEAHIKLSSLVSDLMGASARRMLQALADGETDPAALTALADTRLRATPAQLRDALGACSELNPVYRRLLKMVLKELQLIDEQIGQMDQIMASLLKQHQDAVQRLAEVPGLGPDSAQQIIAEVGVTAATFASPKNLSSWVGACPGDEESAGMNKSTRCPKGNRHMRRILNQAANAAVKQKGSIFEVVYRRLVPRLGHGQTIGAITHRLCRLIWIILHQGVSYEERGPAVSQKSKRRRTTRMIRELRSFGYEVQPLSVQAGNA

SEQ ID NO: 362868 - protein, 397 aa, unidentified
MSTRSVYDMVSAGGMDVHYKFSQVTMRDEQGQVVRRERLDHPDRQALRDRLAQWPKGVPFVMEASFGWGWVADLMNELELTPVLSNCLKVERMRKARGLAKTNKKDADLLSLLPSEKDDWWKVWMAPPEVRDQREWMRYRSGLVKIGTQTQNRIHAIFHRHGIFHEFSDLFGAKGRVFLAELCKDGRAPDVQLAPGALTGLRGQIRLLGHVRGQLAEVAKKLRGQLNRSPLAKRLDGIPGFGLILAHTLMAEIGEIVRFRNHRKVASYSLLSPIADDTGEDDPGRPPTGRRIGKRGNVTLKWAFIEAAHGAVRSGGKWRKIFDRYTDGGKKDRNRGYIKVARELVKVVDVVWRKGVDYTDNPPARPRASRRNKARRYFGSTRSGTGQPCRAMTAAQS

SEQ ID NO: 362869 - protein, 365 aa, unidentified
MQKISTMQTSEENIFKGQLTIGLDLGDRSSAYCVLNEAGKIVFEHKLATTPEAMKQVFSSMPRCRIAMETGTHSPWVSRLLTALGHEVIVGHAQKVRLITKSRRKDDRLDARTLARLARIDPELLSPVKHRSAQAQLHLAEIRARAGLVSARTALVNAVRGLVKSYGERVRKCGTQQFSRETMSGLSGGLREALEPLLREVESLNERIKEYDRRIEKMAKQTYPETALLKQVKGVGDLIATAYVLTLEDPHRFRKSRDAGCFVGLQPGRRNSGESEPQMHISKEGDEYLRTLLVQGAHYILGPFGEDSDLRRWGQKLAERGGKNGKKRAVVAVARKLAVLLHRLCVSGEVYEPLRNSQKAMSAAA

SEQ ID NO: 362870 - protein, 394 aa, unidentified
MRFIGIDVAADEHVVASVDAAGGVQLKPTAFAEDADGYAALFTRLGPPADTLVAMEATGHYWKNLFAALVARGFAVAVLNPLRTHRFAGEDLQRTKTDAIDAVGLARFAAQKRPAATRLPDPALEALRELVRFRDRLVQDFGDRVRQLHRLVDLGFPEFPHHVRDLGSELATTILHAYPTAAAFRGVPSRRVAGLRYDGRHRVGDALATQLRDAAARSVGQHHAEVYRVEVRYTCEDLDVLRRRLRTLERDIERLLEAHEVGRLLTTIPGIGPQTSARLVATFGDFSSFSSGAAVAAYVGAIPGLSQSGQRRSMRAGLTAIGAADLRAKLWMPVLVAVRRNPWLRAYYHRLITRGKLPKVALIAAMRKLLHALYSVATHRRPFVPQLPAPGTRP

SEQ ID NO: 362871 - protein, 423 aa, unidentified
MLAEVQDYEEIIERVAALDIGKAELVCCARVPGEGSSGRRLQEVRAFPTMTRSLLEMADHLRCLGVTRVVMESTSDYWKPAFYVLEAAGFDTWLVNAKDVKHLPGRPKTDRLDAVWLCKVAERQMLRPSFVPPAKFRQLRDLTRYRVDLVTARTAEKSRVEKLLEDARIKLSVVATDIFGISGRQMMAALVAGERDPRVLASMARGRLRVKAATLQEAFTGFFTDHHAFLLRRMLARVDMIDVDIQALDAEIEKQITSFASAVERLDEIPGVNPVAARVILSEVGVDMSRFPTSGHLVSWARFAPGVKESAGKKKGKSTTGRGNPYLARVLGNAAVAAGKTDTFLGERYRRIARRRGRKKAVVAVGRSLLVVIWHLLADPEARFHDLGTDYYDRHRHQPDRVKRTAIRQLEALGYRVVIEPAA

SEQ ID NO: 362872 - protein, 421 aa, unidentified
MFKIFRKNCCGLDVHKTWIYACIGITDTNGRTDYKESRFSSFSKGLCDLADWLATYDCKEVCMESAGKYWIPVFNILEKTCWVTLAHPKYTKPQRGNKTDRKDAKFICDLFMCDMVKPSFIPPADIRHLRDLMRYRFKLTNILTGEKNRAQNCLTVSNLKLDDVFSDVFGKSAMSITKHILDHPGEKFDVTPFVHKGCKHPIKEIQAAVDGSVSPEQAAKLREILKHIDEINAHKKNIEAEILQLAAPYQAVLDFIRTVPGFSSDPMTAIALISEIGADMSVFPTAKNLSSWAGCCPRNDSSGGKRKSTRISRAGVYIKPLLVQIANAVVKSDKYPEFKERYRRLKARRGHKKAIIAICRMLLTAIWNVLSKCENYSADGYFASLERPDCPSKTITTAQALNILRTRGYIIKDDVFTLAPA

SEQ ID NO: 362873 - protein, 456 aa, unidentified
MAHRRKKIPAQLVEDEAYQLRHERVAGIDVAKAKADVCTRLPPREGGVRRRSRTEEVPATVPEIAALAGRLLADGVELVVMESTSDYWRAWFYVLESAGLGVQLVSSSQARQLAGRPKTDRLDAQWIARLAEMGLLRPCFVPPAEVRELRDWTRARVHLVRDRTAEWQRLEKLLEGALVKVSSVVSALAGNKTARAIVEALIAGERDPRALAGLAKGPLRGKRDQLAAALEGNAFGAHHARLARMHLDRIDALDRDVAALDDEVAACLEGIEAAWGVDAAGVPCPDPGEGAAVLAAAARLAEIPGVSLELAAAIIAETGLDMSRFPTAGHLASWAGLAPAARQSGARSRKPGKGKGNAYLKGYCTQAANGTARTDTFLGERLRRLSRRTGGARALCAVARSIVVIIWHLLRDPTARFTDLGAGWHARKTDRDKKITGHLRQLRALGLEVTVTETAA

SEQ ID NO: 362874 - protein, 356 aa, unidentified
MSREVKYIGMDVHKEAIVIAVLNSSGQLVMESIVETKASSLLQFIHGLQGELHVTWEEGTWAAWLYDLLQPHVQQVLVCDPRRNALLKEGNKSDKIDARKLADLLRTGMLRPVYHGEHGLRTLRELARSYQTISKDLIRVMNRIKALYRGWSIPCAGTQVYAPRYREEWLHKIEQVGVHRRAELLYQQLDGLQTLRRTLRPELLAESRKHKAAKLLRQIPCIGPIRAARLIALMQTPHRFRSKRQLWTYSGLGIETRDSGQYCFVRGQLQRAKKPQQIRGLNRNHNHEMKEIFKGAATRASCGVGPLRDFYVALLDKGMKPEMARLTLARKIAAIALTLWKKEERFDGEQLKTQAA

SEQ ID NO: 362875 - protein, 338 aa, unidentified
MLHIGVDFHKRFSRVVTLDNAGSVVDRLTLRHSDREGMVEYFRSKAGSATVTVEAVRGWYWLSELLTDLGVEMKLAHPRKVRLIAESTIKTDTVDAGTLAQLERTGFLPEAYVPSREVRDSRELLRYRLTLVRIRTGLKNRVHTVVDKLGIDHPFSDLFGLSGRKFLQSLELRPVYQQQLTSYLELLDEVDRRLKAVTLQIKASVRPDPRAELLMTIPGVAHITAYLLLCEIGDIRRFPSAKKLCAYAGLVPVTRQSADHCWQGRITKEGNRYIRWGMVEAACVATRKDWGLAQYYRRVAVRRGSLKARVAVARKLLTAVWHILTDGQPYRLTKPDVT

SEQ ID NO: 362876 - protein, 403 aa, unidentified
MERRGFPCILPESVASGHSKPSARVSRRSRNTRTTESGDRSISLRSSEAVDERDRRRTCHRSPNSRLNRRRFRGSSSYLQGRDVFMSHGYDVYVGIDVAKESLEVFGLPPGSPSQFENTAEGRAKLLSLLPPAGASLCVVEATGGYERDLAAEMAVVGQHISVVNPRHVRDFAKGLGLLAKTDRIDAAVIARFAETTRPIPKGFCKQQEQLRELIVRRRQLVDHRVAEKNRCEKAQSTLVRNSVRKLIETIDKDLKRIDKAIIQLVESNDDWRGRYEQLKSVPGVGAQTAATLMAELPEIGRLNRQQVASLVGVAPFNRDSGQFRGRRTIRGGRATVRSGLYMAALSAKKHNPVIRAFAARLLAKGKPPKVVLTACMRKLLVILNAMLHSGEAWGPRLATVTE

SEQ ID NO: 362877 - protein, 338 aa, unidentified
MKRQYVAIDLHSRRSLIVRNNEHGEELEVVRIENDPVALSIALAAAGPEPEVAIEATYGWYWAVDVLQAEGARVHLVDPLGLNWDSRRVKNDYRDCRELLDRLRLGILPEAWIAPPEVRELRELVRYRAKLVALRTGLKAQVKAVLAKEGLHPPINDLWGVGGTHYLDGLKLPEAYAIRMQSLRQLVGVYSGEVEKLEREVHGLLADHAGYQAIQALDGVGRVLGAIFVAEIGDVSRFPNPQTLSSWAGLTPKHRESDVKVYRGGVTKRGSPLVRWAAIEAISHIRGGPKLKTDYHRIAARRGKNIARVAVARKLLTLVYYGLRDGEIRCLARADEAA

SEQ ID NO: 362878 - protein, 369 aa, unidentified
MGENTTFIGLDVHKETITVALAESGERGEVCEYGRIANSPEALKGLLRKLQRTGRQLQFCYEAGPCGYGIQRQLTAAGHECVVIAPSLIPRKPGERIKTDRRDAVSLARLHRAGELTPVWVPDPAHEAMRDLVRARLAAVRALRQARQQLSGFLLRHGRHYGRPAWTLMHRRWLSGLRFEQAVHHVVLEDLIAAVEAATERRDRLTRQIEAVLPEWSLASVAQALQALRGVALVNAVTLVAELGDITRFASPRQLMAYLGLVPSEQSSGQSRRQGGITKAGNGAARRMLIEAAWSYRFPARVSRDLLLRQEGLPQPVRATAWKAQLRLCRRYRRLAHAGKPATVVTTAIARELAGFVWAIAHQFASRTA

SEQ ID NO: 362879 - protein, 415 aa, unidentified
MTDERRWYAGVDWASESHHVLLTDGDGRKIGEKIFKHGGEGLAEMAAWLMAMSGVAEPRQIHIAIEVPHGPVVETLIERSFKVHAINPKQMDRFRDRFTLAGAKDDSRDAEVMASALRTDPRCFRLLAVADPVVIELREWSRIAEDLGAERNRLTNRLREQLWRYFPAMLDLESDLGAEWLLDLWETAPTPHKAIRIREATVAKVLKRNRVRRFDAAHVLDVLRKPPVQVAAGTTEAASAHITTLIARIRLVNQQLREAHRQLDALTARLIPSEETGLGQRKQHDVAILASLPGVGRIVLATLLAEAFDALQRRDYAALRSLTGVAPVTKRSGKSCIVVRRQACHDRLANAMYHWARVAVQHDPRSRSKYAALRSRGHSHGRALRSIADRLLNVACAMLKTGTTFTPSLATEKSP

SEQ ID NO: 362880 - protein, 347 aa, unidentified
MLIIGCDFHPGFQQVAIFDNRTGEVEEKRLQHRAEAEQFYRSLAGQEVLVGMEACGHYPWFERLLQELGMELWFGDAAKVRASVVRKQKTDRRDAEHLLRLLREDRFPRIWVPSLEVRDVRQLLVHRHKQVQSRTRTKNQLQSMALSCGVQKKYKLWTKAGRAELEQLPLLPYAAERRKRLLEALDGLEAEISELGRRVEEEARQRPEAVLLMTHPGVGSVTALAMVLTLGPAERFASAKQVGSYFGLIPSEESSGGKQRLGKISKQGSSFLRFLLVEAGQTAARLDPQLKRFYRRLAARKNRGVAKVAVARKLATRLYLMLREDWTYAQLCQAVMQVSPSHSVAGE

SEQ ID NO: 362881 - protein, 366 aa, unidentified
MKWLLSMRASSIGPRCAMTRSLIFEVLIVDHIGIDIGSRESQVCVCNDAGEVIEEVRCKTGDLSSVLAGRAKSRVIVETCTEAFRIADAAIAEGHEVRVVPATLVRSLGVGQRRIKNDERDARVLSQASSRIELPSVHIPSTTSREWKALSTSREALVRARTQLISTIRCYVRSRRSAALRATPESLPPKVRTALLGTEGGLPEHIERVLVVLESLNEQIAAAAKELAELAENNELTRRLMTTPGVGPVTAVRFVAAIDKVERFPSGTFVASYLGLTPGENTTGFRTKRTRLTKAGAPEVRWALGQAAWSIFLQRKESPMARWAKRVAARRGRQVAITALARKLSQVLYALWRDGTTYSSEKAQVH

SEQ ID NO: 362882 - protein, 286 aa, unidentified
MDHYAGIDVSLECSSVCVVDASGKIVREAKVASEPAALIAWFGSLGLGLERIGLEAGPLSQWLFAAMRQAGLALELLETRHVRKAFEAMPVKSDRNDARGIAQLMRLRWFRPVYCKSMGAQETRSLLTARKLVQSKLRDVENSVRGILRGFGLKVDKTTELEFAARIQELVAGHPHLELIAKALLAVHAVLRNEFKAFEKQARKMARSDTRTRLLMSTPAVGPIVSLTYASAIDDPARFRSSKQVGAHFGLTPGKYHPARPTIPAGSARSATARCARRSTRPPTSC

SEQ ID NO: 362883 - protein, 342 aa, unidentified
MKITTVGIDLAKNVIQVHGMDERGKAVLKKQIKRTQVASFFANLAPCLIGMEACGSAHHWARKLESLGHTVKLMAPQFVKPYVKTNKNDAADAEAICEAVSRPNMRFVPTKSGEQQAVLALHRARQGFVKARTAQANQIRGLLAEFGIVIPQGIGHIAKRLADILEDGENDLPGAFRQLLQRLGEHLKELDRQVGELEVQIQAWHRESAASKKLEQIPGIGPITASALVASIGDAKNFEDGRQLAAWLGLVPRQNSSGGKQTLLGISKRGDIYLRTLLIHGARAVIRVAERKANHADSWLAHLMVRRNKNVATVALANKNARIVWALLAHNREYKPDYRSAA

SEQ ID NO: 362884 - protein, 334 aa, unidentified
MWHVGIDLHRETVVIAAVNDAGEVTKPVTIRCEDAATIVTVAKALEPFRAVIEASATYRWLHDLLRPYGTILLAHPFQLRAMVQRRAKTDKLDAQLLANLLRINQIPLAYIPPEPFQQLRELTRRRARLGRELAQAKIHLRALLARKNMQAPFRTPFGVRGLAWFRGQDFGWIENLVRDELLARLKHFGQQATIIDQHIERMAAAFPQAEALTDIDGIGLYSALLIVAEIGEPERFRTAKQVGAYAGLTSRVHQSGGHCYRGSISRQGSTWLRWILVQAAIRAVRKDPALKNFYARVRKRSSAKIARVAVARKLAEICWKRLRRWQREHANQAA

SEQ ID NO: 362885 - protein, 382 aa, unidentified
MSGKTQNSKAVVTPAQLYLSFELGEQDWTLGFTIGLGQEPRKRKVAARDLKALEQEIARAKQRFGLPESAPVRSCYEAGRDGFWLHRYLLAHHIENLVVDSSSIEVNRRAKHAKTDRIDAGKLAMMLVRYTLGEHKLWSVVHVPSVEAEDARHLHRELLALKHDQTRHINRLKGLLAGQGVSLPVGAHFLEQLDTVRLWDGTALPPGVRARLEREHTCFQFIHQHILELEGKRAELLRTAKDASVDKVRRLLRLCGIGENSAWLYVMEFFGWREFHNRREVGGLAGLAATPFDSGEQSRDQGISKAGNSPIRAMAIEIAWCWLRYQPDSDLARWYNERFGKGGKRLRKIGIVALARKLLIALWRYLEDGIIPAGAQLKPVSA

SEQ ID NO: 362886 - protein, 293 aa, unidentified
MPSENTIRIAIELSVSSWLVAARLPGAEKSRLYRIEGGDTATLLARITELRSQAVKKCGQTVEMACCFEAGRDGFWLHRWLTAHGVVAYVLEPTSILVNRRARRAKTDRLDAEGMLRVLAAWQAGDRQVCSMVRVPTPEEEDAKRPHREREHLVRERQRIENRIEALLFTQGIRGRPSLRSWERDMAELRTGDGRAVPPLMQAELNRLRRQLVQILELIREVEAERADAQAAKIDEAATRKVMALQRIRGIGTNFAAVLVHEVFYRSFANRRQLGSYVGIAPMPYQTRTSDKS

SEQ ID NO: 362887 - protein, 315 aa, unidentified
MAMPVLASKPIVGVDVAKNELVIYQAECDLLEAIPNTKAAIKQWLKALPETVAIAIEATNIYHLEFADMAYEAGCTIYMVGGYELSHYRKGVKVRAKTDALDAKLLARYLKNEAEELHPWTPPSPLYRQLLSLFRRRAALVQARVGLVQSWANEPLLKAAFAEQVKSMQQLETLVEKTIKDHLKEAGLLGQLKRCLKVEGIGFLTGARLIAAFQRGDFRNANAFIAFLGMDLRVAKSGQKDSRRSLSKRGDPEARRLLHNAAMSASRTAAWKGFYEAQRARGFSTTQALVMLARKLARVVFALLNGQSEYQPKTS

SEQ ID NO: 362888 - protein, 410 aa, unidentified
MEAIVERCAGLDVHQATVVACLNIGAANARPSKQIRTFGTTLCELEELRDWLKANGCTLVAMESTGIYWKPVYAVLEGHFELVVGNAQHIKNVPGRKTDVKDCDWISDLARHGLIAKSFVPPQSIRDLRDLTRYRCKLTQAGSAERNRLLRLLESANIKLSGVASDPFGVSGWAMLKALVDGERSPAEMAQLARGRMRRKLAELERALHGRLEEHHRFLLGIQMRRIETMEADVAELDRRLREKLMPYHREMGLLRQIPGVDWVTAATIIAEIGVDMSAFVNAAHLASWATLCPGNYESAGKRRGGKTRKGNVHLKTALVLAARAAGKTKGTYLADKYRRLKARRGALRAGVAIGHKILVTAYRMLSAGSDYTDLGDGYLDRLNTHRNAANLLRRLRQMGYEVQVSAKAA

SEQ ID NO: 362889 - protein, 481 aa, unidentified
MKAKQRGKSDPASFAKRSKWHDMNRKQRRETMRKLQSEDLSLEVIHPDAAGIDIGNESHYVAVPQKRDSQPVRRFGCTTAELRAMADWLKQCGIRTVAMQSTGVYWIAVFDILEEAGFEVYLVNARETKNLPGRKSDVQESQWLMKLHTYGLLRNSFRPAQEIRTMRTYWRQRNDLVRSASRHIQRIQKTLTQMNIQLANVLSDVSGVTGQTIIKAILGGERDPHQLAAFRDPRVKASQEEIARSLEGHWEPDLLFVLKQEQEGYEFCQKQISQCDGQLEHYLLQREDRSHGAPLPEEKRKTRLRKKYGNNPQFDLRAELFRMTGTDLTRIDGIDIVTATTIFSEAGYDMSRWETENHFVSWLRLRPDNRISGEKIIGQGRLPTNNRATIALKMAASGLRKSQTYLGAQFRRLRTKLGAPVAIKAMAAKLARLVYRMLRYGMNYVDQGVQFYEAQHRKLQINSLKRKAAQFGFQIVEALAA

SEQ ID NO: 362890 - protein, 407 aa, unidentified
MQEATQHDAVDVFVGVDVDVGVDVGKGQHHAVALDRNGKRLYNKALPNDEVKLRALIAELKTHRRLLFVVDQPSTIGALPVAVARAEGVLVAYLPGLAMRRIADLHAGEAKTDARDAAIIAEAARSMPHTLRSLRLADEQLAELTMLRGFDDDLAAQVTQTSNRIRGLLTQIHPALERVLGPRLDHPAVLDLLERYPSPSALAAANEKTLANRLTKLAPRLGKNWAAEIVQVLNEQAVIVPGTQAAAIVMPRLAQQLAALRKQRDEIAAEVERLVLAHPLWPVLTSMPGVGVRTAARLLTEAAQKAFATAAHLAAYAGLAPVTRRSGSSIRGEHPSRRGNKVLKRALFLSAFAALRNPVSRAYYSCKIQQGKRHNQALIALARRRCDVLFAMLRDGTIYPPKSAPNA

SEQ ID NO: 362891 - protein, 452 aa, unidentified
MNKRPSSGTVKKHNRVWEQINEHAAGIDAGAAEHWVAVPAESSKVSVRKFATNTPGLYELADWIVECGVTTVAVEATGVYCVPLLEVLDARGLEVVLAKPSSLKSVNDRRKTDMADCQWIQMLHTFGLLRSSLRPTEQVAAFRTYNRHRQMLIVQAATAIEHMKKALTEMNVRLDQAVSDVTGQTGMRIIRAILGGERDPHVLAAMRDERCAKNEASIADDLTGKWADHHLFALRQAVASWDHLQGLIKECNVEIERQAHKFARKQSRSTLPKARRIEHLRKNVLTFEARELFYEVLGQDLTQIDGISVATVSAFLAEIGTDLSAFKTEKHFCSWLKACPGSNTSGGKNRSGRNRPTTNRFWTALRIAAQTLSRSKSALGAFYRRLRARLGPEKAINAAAHKLARMIYFTLKFQRPYLDPGPDAYAQHHRDQVLKSMEKRARQLGYTLLKVA

SEQ ID NO: 362892 - protein, 417 aa, unidentified
MRIVRPICCGADIHKDLIVATIAATNQDGITEYIQSSFSSQNFDLVRLKAWLIEHHCFEIAMESTGKYWIPVFNVLEGEIKVFVVHPKYTKAIKGKKTDKKDSKWIADLFKHDLLKFSFIPPKEIRELRELSRYRIKLIAMRSSERNRYQNSMTISNIGLASILSDPFGKSSRAVMKEVIRSSSVTEERISKLLERNAKKKVKEVLQSLVGSHIESDQRLKMNIASQHMDQIDSHVRRLETEMAIRCIPYATLINLLLDIPGISYLSAMTIIAEIGTDMSVFETSKQLSCWAGLAPANNESASKKKSVRISKAGSYLKPLLVQCALAAINSKSNPYYRIKYNRIKKRRGHKKAIIAIARMILVNIYHILSTGEVYSPCDMEQIINPKPVKKVMTIQNAIEFLQSQGFDTSKLISSSS

SEQ ID NO: 362893 - protein, 446 aa, unidentified
MNKRAYRATSVNDVNVGQLSSAVGPMRVVIGIDVAKSDFKAAVMNGEREVLITIKWKHPKQTQSLLELAESLRDSGAQVEVVMEPTGNYGSALAEQMNTAGFGVFMVSTKRVHDMAEVYDGVPSKHDGKDAAIIARLHWEKASRPWPFKSPERRELSAQIRTVSLFHEGTQRAVNQLEGRLAEYWPGITELLGLQSATLWSLLLEFGSPQRVAAAADQARGLMRRTGGHFLKPDKIESVLESAHKVQAYEPVGSEVIELQTLVGELRRNHELYSQSKRALLEACERNESARRMAEIVGPTAATAIVAMVGDPQTFLAAMTFVKAMGLNLAEHSSGKHQGRLKLTKRGSSTARKYLFLATLRLLQTDPVLKAWYLKKVKRDGGKVKLKAVIAVMRKVAAALWYVARGERFNARKLFDARRLGLEYEPDATTRMQAGEHTTDGLQRVA

SEQ ID NO: 362894 - protein, 394 aa, unidentified
MSTVVSIYRVKGWNVIEGITSCSIVTLCPWSTFECRTIHYSSTSNIIHTYSGHHSIKNMENNMETILFNCCGLDVHKDFITACILIKSYPLGDNVKEKVERHFREFGTFPDAINELTNWVVSFGCRHVAMESTGIFWLPVYEELEKAYDGDIELFVVNARHMRNVPGRKTDMKDAEWIADLLSFGVLKASFIPPESVRELRQLTRYRKNIVGDICTQKNRIEKTLQMSHNKLSSVLSDIFGVSGRNLINVLIEKGQLSRKDIEVNTICISSEKKVDLKRFLTKKLTDHQRNFLKMQVEQLDSLIAHLETIEQSIEECVSDTSNQFEEAINRLTTIPGIGKTAATAIIGEIGTDMSKFKTAEEFCSWAGLSPGNNMSAGKKKAHELTTETRILKA

SEQ ID NO: 362895 - protein, 451 aa, unidentified
MTQPSTKSSVHQLCPNAAGIDIGADTHWVSVPPERDRQPVRPFGCFTNDLHGLADWLQQCGITSVAMESTGVYWIPVFQILEIRGFEVCLVNAHHLKTVPGRKSDVLDCQWLRQLHSYGLLAASFRPDDAICVLRSYIRQRERLTECASVHIQRMQKALTEMNLQLPRVVSDITGVTGMKIIRAIVAGQRDPLQLAAMRDPRTKRSTDEIAAALEGDYRGEHVFVLEQELLLYDTYLQQIARCDDQIQACLETFEDKSAPDAPLPPRPKGRKPSRNAPQFDLRSHLYRLCGIDFTQIDGLEVLTVQTILSEVGLDPRRFPSVKHFASWLGLCPGSRVSGGKVLSSKTRKVVNRAAKAFRIAAQSLAHSQTAMGAFYRRIRNRLGAPKAVTATAHKLACLFYRLWSTGEAYVDIGADAYEQQYQQRVLKHLKQRAQQMGFELVPKPPLPEVS

SEQ ID NO: 362896 - protein, 337 aa, unidentified
MEYFAGLDISMNETHICVVDRNGKVALEAKAPSSPGAIAAELAKAPAPKRIVFETGRMAPALYHGLDALGLPVVCIESRQAYQALKLLATHKTDRNDARGLAHLARTGFYKPVHVKSLSAHAVWSLIVARKKLVGQRVTLENQIRGLAVVFGVRLPRGLSPAFAGQVINGSGGVAGLSGAMRGLLAARNAVLEAIAAINGDIRHLARSSEACRRLMTIPGVGQVTALAFVAAIDGPDRFRTSRDVGPYLGLVPRRWKSGEIDYTGSISKCGDRRVRTLLYEAANVMLTRYRGDLALRDWALRIGRRSTMRKARVALARRLAVIMHAMLRDGTEFHAA

SEQ ID NO: 362897 - protein, 385 aa, unidentified
MSELNDLSRSLTSLEQDKTIIAVIEMSQSSWLVAGIVPGIERHPLKKLEPSEEELVRLLMRWRTEATKNGHTITRFAVAFEAGRDGFWLARWLRARDIETYVIHPTSVAVSREHRRAKTDRLDTGLLKRVFIGWLRGEPDHCHMAAIPTLAEEDAKRPNREREGLVRERTRIVNRMKSCLARFGIRKFNPTLRKAPERLATLGMPEGVPLPPNTLLELRRDMARLRFVMDQIKEVEEARAQRLEQAPQEKTHAMVRLIARVIGVGIETADMLVHEILSRQLRDRRAVARYAGLTGAPDESGNKRREKGLAKAGNARVRRGMIQLAWRFLVFQKDSALARWYRTRTESAGKKRKTMIVALARKLLIALWRLVTIGEVPAGVVLRAA

SEQ ID NO: 362898 - protein, 422 aa, unidentified
MSYCPVAGIDVSKQFSDMCILSPDNKIFAQEKIYHDETSINRANALLQKAERLFFSKPVIVMESTSHYHLILFQFFSEHGYDVIVVNPLQSNSMKDFSIRKRKTDRVDAFKLAMMYRTKTLRPSQIPQTATRALRQLCRHRAELLNDVSSYKNRLTALLDQTFPGYDKVFSDVGGVTSCAVLVRFPTPTILLVEEESELVEVIAAASKSGYSFAKKKAGLLISAAQKAQTLGIHSCADETLIVCTIQMLRTLSESVLQIETAIDNLLAQIKEMRNNVSFPQSIPGVGSHSAALLLGEIGDISLFKKPKQLAAYFGLDPTERQSGSFRGTKNKLSKRGSPYARAALHMGVVNSICKRGKDSAANPVLLSYYEKKCKNKPAKVAQAASMHKLVFIVFAVLRDQKPFELKTPEQHAVEQGFVKAA

SEQ ID NO: 362899 - protein, 408 aa, unidentified
MSEQPHPAVFVGLDVGKSDHHAVAVTAAGKTVYDKALPNDETRLRAILEDLVAEHGPVLMVVDQPATIGALPVAVAEATDQVEVAYLPGLAMRRIADLHPGTAKTDARDALIIAEAARTMPHTLRNIRVDEEQIAELAVLAGFDDDLAAQITATSNRLRGMLTQIHPALERVLGPRVTHPAVADLLTRYPTPGKLSAAGRGHVRARLKKHAPRVAESLTEEVFTALGQQTVVVAGTEAAATVIPILAGQLAALIHQRATVATQVEALVEAHPLCPVLTSMPGIGVRTAARILTEVVGKDFADAGHLASYAGIAPVTRRSGTSIRGEHAAKGGNKRLKRALFLSAFASLHHPPSRAYYDRKRAQGKRHNQAIIALARRRTDVLFAMLRDGTLYQDPTEPRTPSPVALAA

SEQ ID NO: 362900 - protein, 343 aa, unidentified
MDYFAGLDVSVKDTSVCVVDDTGKITREVRVASEPDALLAVLSNPTYRFKRIGLEAGPLSQWLFSALAEAGLPAICVETRHMRAVLKAQINKTDRNDARGIAQMMRVGLYRPVHVKTLRSQKLRMLLTHRKLLQSKAIAIENDLRGTLRNFGLKVGIAGAMKFEARIRELMNDLPDLAVLVEPLLAVRRTLREQITVLHQRLLAIVRDDDVCRRLMTVPGVGPVVALTYRATVDTPARFRKSKSVGAAFGLTCAKYQSGETDRSGGISRCGDEMMRVMLYEAAQSMLRSKRWSWLKAWAMQVARRRGIKKAIVALARRLAVILHRIWVDGTEFRWTRDILAAA

SEQ ID NO: 362901 - protein, 469 aa, unidentified
MKDTQKKKKKAMKMKKMVKKYAKKIKKIGVLEQINLDAAGIDMGASEIYVAIPEERSDQFVRKFGTFTQDLHQIVKWLQEHGVTTVALESTGVYWMPLYDLLEKAGMDNYLVDARKTKNVSGRKSDVEDCQWIQQLHTYGLLRKAFVPDEQIRNLRTLERQRDMLSRYRSSHIQHMQKAMEEMNVKLTNVLADITGKSGMAIIRSIVAGERDPNQLAQHRDYRCRKSEKEIALSLEGNFNEGKIFVLKQALELYDHYTDLMIELDGESEKIFKSFARKVDCKSKPLKKLARSLENRNKNAPNYDLRSQLYEITGVDLTRVNGFEVLVLQRIISEVGLDMSKWVTMKNYTSWLGVSPNNKITGGKIISSATRKTKSRANKAFRMAAMGVARSNCAIGVFYRKIRAKDGPQAAITATAHKLARIFYVMVSKQVEYSEELVKGNEEKNKKRMIKYLQRGAAKLGYELVEKVA

SEQ ID NO: 362902 - protein, 413 aa, unidentified
MADETIHWFAGVDWGSAKHQVCLLNEAGKVVGEREFAHGGAGLAALCEWVVSMAGDPGTIAVAIEVPHGPVVDALLDRGFAVYAINPKQLERLRDRISIAGAKDDRRDARVAAAGLRTDRPLFRRVLAGDPSVVELREWSRLAEELQQERVRLGHRVRQQLWRYYPQLLALSDDVTAEWVLALWTRAPTPAQAARLREATLARLLRQHRIRKLDAPAVQGILRQPAITVAPGVTEAAVLHLRSLVARLRLANQEFHQAARKLEELCTALSETQPSTQDSGPSDVAILSSLPGVGPVTLATLLTEAAGPISRRDYTALRTLSGVAPVTKRSGKSCLVIMRYAAQVRLRNAVFHWARVAVLNDPKCRSRYAALRARGHSYGRALRSVADRLLGVACVLLQRQVLFDPNHGAPAEP

SEQ ID NO: 362903 - protein, 320 aa, unidentified
MQTPSAVLNIGADVAKKAIAVACSEGSFPVREVANQRTALLAFLKGLPAGSRIGVESTGSYHEVFAELAHQLGFLVFVLNPKDTRHYAKAVGVRGKTDRVDAELIARMIAHEHTKLHAWIPPTPQQREMDRLIKRRATLISLREAVEMSLHELSGFAADLKALRTRFNQLIARLDLRVKALVEASPERKQNFTRLCTITGVGPVVGTALVNTLERVPLKSADAFVAFTGLDPRPDDSGQHRGKRRLSKRGPGELRRLLYLAAMSAIKTKTWRPLYEHYRAKGLSSTATLVILARRIARTAWSIYTHKTEFDPGRLTKPLT

SEQ ID NO: 362904 - protein, 423 aa, unidentified
MNTLFVGIDVSTKNNQVCAVNFNQDVFFNLSFPNNPDGCDLLITSVLAFVDKEKFDSIIIVTESTSIYDYHICAYLSSQLSIVGTSVIIYSVNAKSIANYKKSYIEMEKTDLGDAFLIADFARVGRCKKLRPFKAAQHIALKRLTRERYHLAEQLIREKNYVLNNIYLKVSGLMTLPHKDLPFSDNFSASNTKFLTDYASPFDLAEKPLDEIIEYFKSASQNRCDDYGKIASLFDKAIRSSYRLDKTAYDPITISITASINLIQCIESQIKMVDKAIEKEMKGLYPNGYQSLMSITGIGPVFAAGILSEIGDISYFKSDASLAKYAGFHWKKNDSGNFIADEKHSANSCNKYLKYYITQSTQMSVMHGFDYTTSFYRKKYNEASTHKHRRALVLTSRKLVRLIYVLLRDSKLYVSVSHDTVIE

SEQ ID NO: 362905 - protein, 401 aa, unidentified
MVAIGIDVAKGKSKVAVIGEGKKVLQKPFDVFHTKTEMLKLAENLRQYGEEAHVVMEHTGVYYKVVAETLHKAGIRVSVVNPVLINQFGNNTLRKVKTDKKDSMKIARYALENRDELYEYESGEDIRDALKSFVKQFNFESKTLSAHKNNLNALLERVFPGVDDFFHSPAKPSGHQKWVDFAIAFWHNDCVSCLSESKFIEKYQKFCKKNRYIFNEVTAKAIHAKSRDNLTTMPKNGTTMLLIQGAAMRVLRLSEDVELLRTKMIELAKQLPEYETVLSIYGVGETLAAGLIGEVGDVRRFQNKRSLVAFAGVDPDKNDSGKKVSISGSVSRRGDSLLRKTVFQVVECYLKNSPADEPVYQFLDKKRSEGKQFFVYMTAACNKFLRVYYARVMECMNAQSA

SEQ ID NO: 362906 - protein, 324 aa, unidentified
MNVNSQGREAVTAPRANAGIDVSKDWLDVAFGSRSERFANDAAGMESLAVLLRQEGIDLVVLEASGGYEAAAAAALQAAGMAVAVVNPRQARDFAKSVGVLAKTDKVDARVLRAFADVIARHEKRSHFLHAVPDEQRAHLQALVIRRRQLLEMRKAEANRMGMAHKAARKSLNKVILFLDKQLAEIDRDLDQHMREHFRDLSKLLSSAKGIGPVTTTTLAAALPELGRLDRRAIASLVGVAPLACDSGKRRGGRHVWGGRATTNTVAVHRSANGLSDPVTASARTYTDIRTHEPNSRIFRSQGIGRLRITSSRISILVRKGGDE

SEQ ID NO: 362907 - protein, 378 aa, unidentified
MSKQSTFVGLDVHADTIAVAVVQGRDVVRSLGIVPNTPEALRRILGTLGPKKDLRVCYEAGPTGYVIYWQLTAMGIQCDVVAPSLVPAKPGDRIKTDRRDAERLARAHRSGDLTAVWVPSAEHEALRDLVRGREAAKEDETRAKQRLTKYLLRYGQRPRRGERAWSQPWWQWARSVTLLEENQNVTLLDLIMEVEHQAQRIARFDDSIERAITKAPERTRALVEALQSLRGVAKLTAVTVVTELGSPSRFERAAHAMSYTGLVPSEHSSGKKNKRGAITKTGNSHLRRVLVESAFHYRHPPKLAKRQRDMQSSLSPQIAAMAWKAQQRLHRRYWLLTSKSKPKGKVVTAVARELIGFIWAIARQVEADFVPQKRRAAA

SEQ ID NO: 362908 - protein, 310 aa, unidentified
MEQIYVGIDVAKDRLDVHVLPSREAFAVARDGEGVAALVARLRAMAPALIVSEATGGFEQVVAGALGAAGLPIVVVNPRQIRDFARATGKLAKTDRLDAAAIALFAERVRPELRPLPDDQARLLGELVARRRQVIEMIVAEGNRARLLESRRLKKRIERHRRALQDELTEIDAELGDAIRGSPIWRETENLLKSVPGVGDALARTLIAELPELGTLDRRQIAALVGVAPFNRDSGNWRGRRMVWGGRASIRAVLYMAALVASRFNPVIARFYRRLLAAGKPKKLALTACMRKLLTILNAILRDKTPWQTA

SEQ ID NO: 362909 - protein, 361 aa, unidentified
MKKNKPSTNTHTTDNEANPVGRYSQIKLGVDVHADSYRVVRQIDSATPQPAQQMAPERFLEFAARQRALAQEVHCCYEAGPFGYTLHRQLLNLGIHNVVVRPQNWDELGRKVKTDKTDALALVQRLDRFVQGNRKALAVITVPTPEQEQARAQSRHREQLQKDRQTHEAQGRSLLLYQGQRVRGQWWQERAWEKLKPRLADWLSAILESLRQLIQTADRLLQSLSRQIEHQAAPQPKGFGQLTSEVIGREILDWHRFDNRRQVASLTGMCPGVRASGQRSIAGPITKHGNPRLRRALVELAWRVVRFQPHYGPVVKWRPVFAQSQAKGARKKAIVAIGRRLAIDLWRLHTGRCTAADLKLT

SEQ ID NO: 362910 - protein, 346 aa, unidentified
MDHIAIDLGSRESQVCIRTAEGQIIEERRVSTRSLGKYLTKRPKSRVVLESCAEAFSVADAAMGAGHETVVVPATLAPSLGVGERGVKTDCRDARNLSEASCRMSKLPSIHVPGQASRNRKSICNFRESLVQTRTKLINSVRGWMRSEGLGVVRSGAPTSFPVRVRTHATERSTTLPAYVEPVLVVIDKLTVEISAMDDQLEEAAESDATCRLLMTAPGIGPTVSMRYTAAIDQVSRFPNAHRLQSYLGLTPGERSSSQRKRRTGLTKAGPSKLRRVLIQAAWAARRYYKDDPVVMWSFEVEKRRGKQVAAAGLARRLAGILYAMWRDEKPYDKAHQVTRATQATA

SEQ ID NO: 362911 - protein, 428 aa, unidentified
MNYNTQNAKIASITEKTLIVGIDVGSETHYARVFDWRNFEFTRKPLVFSNTQAGFLTFKAWIEEIQEKNGKTAVIPGMEPTGHYWFALGKFLQDNGMKPVHVNPHHVKKSKELDDNNPNKNDRKDPKTIAALVNEGRFSYPYIPTGIYAEMRSLSNLRFQTQEEVTRIKNRIARWFAIYFPEYKDVYGDLKAVSGRMILKAAQLPEDIGKLGVEGVNQIWRDAKLRGAGMKRAKTLVSAAEHSVGSKEAPEAARMELKNLLDDMDVYTSRLEELVQKIEGKLKEIPYIDKLLEIKGIGMVTVSGFIAEVGDIRRFDNPKQLQKLAGYAIVANDSGKHNGESRISYRGRKRLRYVLYEAAISLVGKNAGFREIHGYYRTRKENPLKKMQSVVAVACKVIRVFYTILTKGVDYDAARLLGDIKHPQMQTA

SEQ ID NO: 362912 - protein, 402 aa, unidentified
MNAVGIDVSKGKSMVAIMRPFGEIVSTPFEIKHTSSDINSLVKLIKSIEGESRIVMEHTGRYYEVLAHQLSEANLFVSAINPKLIKDFDNDSLRKVKTDKADSVKIARYALDKWQNLKQYSVMDELRNQLKTMNRQFGFYMKHKTAMKNNLIGILDQTYPGVNTYFDSPARSDGSQKWVDFASTYWHVDCVHKMSINAFIDHYENWCKRKKYNFSKSKAEEIYGKAKELVPVLPKDAITKLIIKQAVDQLNSASITVESLRTLMNETASKLPEYPVVMAMKGVGTSLGPQLMAEIGDVSRFTHKGAITAFAGVDPGVNESGSYEQKSVPTSKRGSSDLRKTLFQVMDVLIKTHPQDDPVYQFLDKKRAQKKPYYVYMTAGANKFLRIYYGRVKEYLASLPES

SEQ ID NO: 362913 - protein, 286 aa, unidentified
MRKHHHFGTFDAVRRGHPLHHYAGIDVSLELSSVCIVDAKGKIVREAKVASDPDALVAFFKQLGFRVVRIGLEAGPLSQWLYAGLAQAGFEAVLLETRHVKAALSAMTVKTDRKDARGIAQLIRMGWFRPVHCKSLGSQEVRALLVARKQLLGKLLDVELSIRGILRGFGLKMGVVTRKTFEARARELSSGQTMLETVVGAMLTARAALQSEYAKLHKTMLVIVRDDKICRRLMTAPGVGPVVAITFKTAVDDPTRISKSKAVGPLFGLTPKKYQSGETDVTGGTT

SEQ ID NO: 362914 - protein, 343 aa, unidentified
MEHVAIDLGGRESQICVRQADGSISMESRCRTIDLPNFFATRPPSRVIVETCAEAFHVADVARRAGHDVRVVAATLVRALGVGARRTKTDKRDAQILSEVSTRIELQGVHVPSLRSREHKSLCGARDALVRSRTKLINSTRGWLRAWATRLPTGSPKTFPDRVRNAVGPSIPLYVEAQLDVIETITLRVEELDDQIKTLAKGDPLCCRLMTVPGVGPITSLRFVATIDEIKRFPSATKVEAYLGLTPGENSSSERVVRTGITKAGAEPLRRVLVQAALSLKHRRRDEPMVMWALKIQARRGKHIATVALARKLAGVLFALWRDGTIYQSARTARVTPEMSETP

SEQ ID NO: 362915 - protein, 312 aa, unidentified
MSHITIGVDISKDTLDVYRLPEQEHCQFSNDANGFKSFIKWLDGAPVYRIVYEATGAYHRAFEQALGQTDLPLSKVNPLHAKRFGQAIGKLAKTDKMDAALLARFGVAVELRMRQVAPQIMYDLKELHIARKALIKDRTAAKNRQKNLTLPMLKRDARQTLKHIEARLKRIDKAMGDLIKSDTALAKRLAILMSIPGIGECSAYALIIDMPELGELDGQTAAGLSGTGPIVRQSGKWKGKSFVHGGRPHVRQALYMPALVASTYNPDMKILYRRLIKAGKPPKVALTAIMRKLIVLANALVRDQRKWNENMA

SEQ ID NO: 362916 - protein, 368 aa, unidentified
MNSEYYTTIGMDVSDRTTKVCVMAKERGARRILEEATIPTTVDGLRTYLSGKCADWPVVFETGSHSRWMKREVESLGMKAIVANPSRLRMVTESNTKNDRNDARELARFALADVELLHPVRLRGERCQQVLRLMKARDMLVKVRTMHVNELRGFAKSMGFRLPGCPANKVHALDKAGWPDDFESLAWPLMDMLETIDLKIRAYESQIRSLAESGELRDKIDRVREVYGIGLLSGAALVASIDADPGRFSKARDAGAYFGLVPKQRQSGEMDVQCHITRAGSDFVRRLMIEAAQIAMRDSARDTDVKLKGLRICARGGRIAKKRALVAVARCLVVTAVALLKKPDAEYVPLSESARREFEAMRSGTTVA

SEQ ID NO: 362917 - protein, 362 aa, unidentified
MKNHSKENAWKPRPEQTVGVDLGDRFSHYCVLNHDGEVMEEGRIRTSEEGFRQHWEGETRQRVVLETGTHSPWISRLLQSLGHEVIVANARKLRAISQNESKNDRQDAEMLARLGYSDPKLLRPIRHRSVERQRDLNLLRARDTLVRARTMLINAVRGLVKSAGGRLPAASSESFAAKVTAAVPAELVAATQPLLEQITALTAQIRGLDRTIEKLSQRYPEIHILRTVPGVGPVIAAAYVLTLDGVDAVQHSRSVGAFLGLRPRQGQSGDCDPELNISKTGNIYLRRLLVQAAHYVLGRFGPDSALRRWGLKLAAGGQRAKKRALVAVARKLAVLLHHLWRTGQNYRHFPDAISTPETASAS

SEQ ID NO: 362918 - protein, 346 aa, unidentified
MVVLGIDAHKRTHTVVAVDEVGRQLGVKVTQAASTAAHLELVVWADRFGGDRRWAVEDCRHLSRRLERDLLGAGEQIVRVPPKLMAHARDSARTYGKSDPIDALAVARAALREPGLPVARLEGPERELRLLVDHREDLVAERTRAINRLRWHLHELDPSWDPRPRSLARRKNITAVAARLAAMEGIVARLAAELASRIAALTAEADALEREITPRVQALAPSLLALPGAAALTAAKIVAETAGADRFKSKDAYARHNGTAPLPAWSANPVRHRLARTGNRQLNCAIHRIAITQKRCCPAAQAYLDRRTAAGDTPPEALRALKRRLSDIVYRMLLADSATAPLGQAA

SEQ ID NO: 362919 - protein, 357 aa, unidentified
MDNNTICDWTKATDYDVFIGMDVDKRSIALTTRDRMGLGKSLKMSYDPEMLLSYVHNHFEGKNPAFVYEAGPTGFGLHDAIREKGYPCIVVAPQTIPITRGKRVKTNRLDSVKLADLLRGGQLSGIRVPPSAYRELRELTGLRNAQIDAVRASKCRVKSLLLNNSLAFSDAQGRWSKRAICNLRELNCNRAVRFKLSTLLDDIEWHQKQALRTQVALRQLIDSEPEFAESMGFLMSIPGVGWIIASYTLARVGDWRLLGRSDEMSSFMGLVPCEDSTGDDTNRGSITKAGDQRLRSLIIQGAWTAIRNDHELGDFYERVRKNHPSHTAARIGIVAVARKMAIRMHCVLRERRNYEKR

SEQ ID NO: 362920 - protein, 317 aa, unidentified
MQTFLNVGVDVAKDAVVVACAAQSFPVHSVANQRAPLLVWLKSLPAGSRIGLESTGGYHELLADLAHAQGYTVFLLNPLDTKHYARAMGNRAKTDRVDAELIARLVAQEHSRLRPYTPPTANQRKLDRLIRRRAKIVCLKSSLQLTMRNLSGFSAELKAALLKLDALIAGIDSAMAALASCSPQHVDAQQRLQTIVGVGPVVGMALTNTLERVPFRRADAFVAFIGYDPRANDSGNKIGRRRLSKRGPAELRRLLFNAAMAAIKSKAWKPVYEHYRAQGWSTTAALVIIARKIARTAWSIHHYKSVFNPERITKCLT

SEQ ID NO: 362921 - protein, 382 aa, unidentified
MVIDAEGKRLLSQRVANDEATLLKLISTVATMADGGEVTWAIDLNAGGAALLITLLIAADQRLLYIPGRTVHHASGSYRGEGKTDAKDAAVIADQARMRRDLQPLRPGDDIAVELRILTSRRTDLVADRTRTINRLRAQLLEYFPALERAFDYSTSKAALLLLTGYQTPDGLRRAGAARLAAWLGKRKARNADAVAAKALQAAHAQHTVIPGQQLAAAMVARLAKEVMALDTEIGDTDAMIEERFRRHRHAEIIVSMSGFGVTLGAEFLAATGGDMSAFDSVDRLAGVAGLAPVPRDSGRISGNLQRPRRYNRRLLRACYLSALSSIRSDPVSRTYYNRKRAEGKRHSQAVLALARRRLNVLWAMLRDHTTYQPTTPTAAAA

SEQ ID NO: 362922 - protein, 378 aa, unidentified
MKRILKIGMDVHTTNYTLCAMEPIIGEDDRVFATIKVTPDYKNILMFIENLKLKLGLNDEYDIQCGYEAGCLGYSLYNQLTAAGIKCVILAPTTMLTPQGVRIKTDMRDAYMIAQCLSYGGYHAVYIPTEDDDSVKEYLRMRNDHKLALKKIKQQINAFCIRHGFCYDGTKWTLSHLKWLKKLEITNGLYRETLDEYMASYEEQEAKIERYDKRIGEIAEQTRYHDKVKKLGCFLGIKTHTALSLIVETGDFERFAKGNQYASYLGLAPGENSSSDNIHRLGITKAGNSHLRQLLIEASGGICKGAVGHKSKELRARQNGNMAEVIAYADKANTRLRSRYYKFIRHGKKRNVAVAAIARELACFVWGMMTDNIEMKAA

SEQ ID NO: 362923 - protein, 405 aa, unidentified
MKHVIAFDISMGKSFMVVYNPNKTCEFEKEIKHTRFEFLDLKKIIEDINIGYGKQPHIVFEATGVYSRQLERFMQENGYSYCLLNPLESKIQCDSLRIHKTDRSDAHKLAITHFSNERRIHTAENDVYRQLKGLSRHYGELDDELSVIRNRLHKVIQETFPEMEQVFKSKSELFLNVIQLYPHPDLILNYSKTVIKNRILANTEKRMSAAIAEKKAIELLDAAIQSYPAVSKEDVRCDQARSYANRYQELLLQKEECIAKMVSLAASLAEFDILLSIPGIGANTAVRLIAEIGDIRRFDNHKQLNAYTGIDIRRFQSGKTFYKDKINKRGNKHLRKLLYIIIQNMIKRRRYGGNHFVDYYDKIKMQPYNKCHKVASIACVNKLLKNIFFLVTHELNYDYRLAATS

SEQ ID NO: 362924 - protein, 408 aa, unidentified
MLEVKVERCAGIDVGKKFLEVCILIGPVHRKPAEEVRRFGTNVRDLETMRAWLLEKACTEVVMESTGSYWRPVFNILEGNLQVILANPEQVKALRGKKTDRKDCRWLAGLLRHGLVQASFIPPRDIRELRDLTRRRRKLLENGTEERNRVAKVLEDANVKIGNVLADVFGMSGQAMLEALLENKLSAEQMANLAHRRLRPKIPQIVEALEGHRMSDHHRLLIGQALKHMQFIEDMVEELNQEIQKKLQPYQRQIELACTVPGIARDAAASILAEIGIDMSDRGPFATCHHLASWAGVCPGNNSSGGKRKSGNIRKGNRWLKATLSQTAWAGAAKKNSTFQFRYQRLKTRRGGKRAAIAVAHAQIIALYWVLRNGVPYQQQIRELHQQQRESMIRHHLARLTQLGYSTT

SEQ ID NO: 362925 - protein, 388 aa, unidentified
MNTNTNTTTASTTILAIDLGKYKSVACVHDQATGEFAFTTFDTSRAELRKLIGKTQPAVVIIEACLLAGWVHDLCAAMGVRCLVANTASEAWKFKYLKRKTDKDDALRLAQLYLLDQLPTVTLPPTAVRQWRSLIACRQALVGRRVAVPNRLRALFVAQGLPTPRGAKAWAATGLAGMATWAKPLAECMADELWRGLLELSLTEYRQLCELINQAETKLDAIGKQHADVVLLETAPGLGPRTAETVAAYLHDAPRFKTGKHVSAYSGLVPRQHQSGEMDRRGRITKRGPALLRKMLVECAWCMIRYNAWARGIYQRLTGGGQRRKKQAIVALARKILVRCGAMLRDRKPWHDPQTGPKPTRPPSKQRRQAEARQRRQDKQAALTVATT

SEQ ID NO: 362926 - protein, 349 aa, unidentified
MVVMVGIDVHKDTHCAVAVDEAGRQIGQARTFRTTDAGCLRLWRWGQSFGPGLEFAVEDCRHLTGRLERTMLAAGARVRRVPPKLMAGQRRSARTRGKSDPIDALAIARAALREPDLPVAEHTHASREVKLLVDHREDLVRQRTQAINRLRWHLHELDPGIDPAKRSLDRAKQLDRVRAVLEPMPAGTVRRIALELVEDIRGLTARINALERELDALVRQQAPRLLELPGCGVLTAAKIVGETANPTRFRSEACFAMHAGVAPIPASSGRTNRHRLARGGNRQLNTALHRIAVTQIGRAGLGRTYFDKRRAAGDTKMEALRALKRRLARIVFNLLQPTDTARATQPLAA

SEQ ID NO: 362927 - protein, 391 aa, unidentified
MIYVGIDVAKDKHDCIIKNSVGEVVFRTFTIKNNLDGFNDLYQKIESVMEDVSKVKVGLEATGHYSYNLLGYLVDKGLPTFVINPLHTNLYRKSLSLRQTKTDKVDASTIASMLMSDVNLKSYSDTSYHNEELKSLTRYRFDKVKERAKLKTSISRLICILFPELEKLVPTLHMNSVYSLLYEFPGAKQVANAHLTKLSNLLAEASKGHYDKDAAITFRDAARASIGSNMPAKSLELKHTIKLIRELDSEIDEIEGEIKAIMDTINSPILSIPGISYRMGAMIIAEIGDFDRFDSADKILAYAGLSPSTYQSGQLDNCHPRMEKRGSRYLRYALFNATIYVCHWDSTFNAYLAKKRAEGKHYYVAVSHATKKLVRLIYQLEKSNQPYNKVV

SEQ ID NO: 362928 - protein, 410 aa, unidentified
MQILYPRCCGLDVHKASLTACILINEPERKERHVRRFGTMTGAVLALAAWLAEHHVRKVAMESTGVYWKPIWNLLEDRFDLMLVNAQHIKAVPGRKTDIRDCEWIAELLQHGLLRGSLVPPEAVRELRDLNRNRAILVQQRATVSNRIEKVLEDANIKLASVASHILGQSGRTMLQAMVDGISDPSKLAEMARAKLRNKIPELRLAFEGRFVEGHRFQMEQLLDQLHFLDATVAEFEQKIEERNRPFEDKINLLVTIPGVDWITASSLVAEIGGDINQFPTAQHLASWAGMCPGNEESAGKRYSGKTRKGSRWLRRVLCQAAWAASHTKNTYLSAQFRRLAAKRGKQRAIVAVAHSILVAAFYILKRNEPYREAGGNYFEQKNPAVVRRYLVRRLERLGHRVILEPAVAA

SEQ ID NO: 362929 - protein, 368 aa, unidentified
MNEYKLKAAPTAVSKEGNSQKEAKANRIAIGVDAHLKSYQAARKIDNGAVGVAQTFRSKEALLLYVEKQRGQAKEVVVVYEAGPLGYTLYRQLKAMGLECLVCAPRSGEQKRKRRKNNAIDARSLTSELANYLNGNEQALQLVRVPTEAQEQARVESRQHDALVEQRKRIGAMGNSLLLSQGYGSWSNWWRAKAFERLSKGVAPWIVKHLQRWVGVLRELDQQIQQAKVELTKHYQGARPKGMGAPSLAQLNAEVLDWNLYSSGRKIGCLAGMVPSEWSTGEAQRLGSITKVGVPAIRRIITEMVWRMILFQPEYKAVQKWREVLEGPNRGLKKKAVVAIGRQLMVDIWRLQTGRISAQELNLIMVEG

SEQ ID NO: 362930 - protein, 313 aa, unidentified
MSPNNPPSLYVGLDVAKLTLELHLGAKTHVLTNDPKGHAQLCKHLRARPGAHVVCEATGGYEQPGVRALHAAGLPVSVVEAARVRYFARAQGQRAKTDPIDAAVLTAYGDTFQPVATPPPSATQQRLADLSQRRRQLLQARNAERNHTEHYTDPLCVRQAKQLLKTLDRQIAQCDAELAKLVAADADLAHKARRLEAIPGVGTVVAVTMLAEMPELGQLTRSTAAALAGVAPYNRDSGRLKGVRHISGGRRAVRCALYMATLSAVRHNHIFKEIYLRLRANGKKPLVAMTAIMRKLIILMNHLLKYPNFTLAT

SEQ ID NO: 362931 - protein, 359 aa, unidentified
MTSIAPLAPPRKVIVGVDTHKHLHVAVAIDHNGARLAEHSASADTAGYAQLETWANSLGAVEVFGIEGTGSYGVGLASFLRRRGHRIIEVNRGDRRSRRQNGKSDTLDAEAAARSILSGSATSIPKNADGLSEMIRQVKVARDTARKARSSAIIALKAMIVNAPAELRESLEGLGDKALLERCAGFRIRTMDSTTASAKHTLRSLARRWLLLDQEIKEHDVALDQMTEQASPTLRDGFGIGPDTAAEILVVLGDNPDRIRYEAAFAKLCGTCPIPASSGMTNKHRLYRGGHRQANSDLYRAVIVRMRFHQPTIDYVARRTQEGLTKKDIIRCLKRYLAREVYQRVMIDHRARLELAEAS

SEQ ID NO: 362932 - protein, 347 aa, unidentified
MSICMIGLDTAKSMFQVHAVDEAGHAEIRRKLRRNDLIPFFEQQEPCTVVLEACGAAHYWARMLTGLGYDVKLIAPEAVRPFVKKGKKNDAADAAALCAAACRPDAKFVPAKSLEQQGVLALHSARSLLVKQQTMLANAMRGLATEFGLTVPKGIHKLDELMAVVDADEIIPKRAKQAIAGLHDYCNNLSDGVETFETEIVAHARRDETARRLATIPGIGPITASLIAATVGDISLFKTARQFAAWLGLVPRQSSTGGKTRLGRITKTGNREIRKLLVLGATSMVYRADGWNSAVGAWLRSVLERRPVRLVTVALANKMARIAWAVMTRKEVYRPKGGVAAVAQAAA

SEQ ID NO: 362933 - protein, 373 aa, unidentified
MNQNVIYVGIDVDDVRYHGSALDKRTGEGLDFQCRPTLKGLVQQLEKVRQYFNGAALKLCYEASYVGFSLQRDLKGRGYHCEVVAPSSIPRRGGKAVKTDRIDATELAEFYANGLLTVVAAPEAEVEQDRDLLRSRQQLMQQQGSLRRHIGSLLRRNGHHYKDETQRKTHWQTHHYGWLQRTIDGCSGSLKVNLDLLLRQLKSLDDILAAYGEEVEALAVTERYREPVTALTCYKGIKHLFALTMITEIGDVKRFAHPRQLTSWMGMDIREYASGGKSNRLGITRQGNRYLRTAFVEANQRGYRTTKLGKDIRARRANTKPAYITIADRCLRRLSKKGNRLLLAGKHPNKVKMACAREMVGFVWESLNQAAVA

SEQ ID NO: 362934 - protein, 410 aa, unidentified
MEVLYPHCAGLDVHKETVVACARHMVNGTVTREVRTFKTTTKDLLALSEWLSSQGCTHLAMEATGVYWKPVWHILSDGDFSLVLANAAHVKNVPGRKTDVNDATWLADLMAHGLIRGSFVPDAQTQELRGLLRTRKQFVRERSSHVQRLQKTLEDANIKLDSVISDILGLSGRAMIEALIAGESDPDALAAFAHRRIKAPVGVLREALRGRVTHHHRFLLQLHLRHIDALDDAIGVIDREVDAHVEPFHMAVLLLTTIPGVSDLSAQVIRAEIGGDMSRFPTVGHLISWAGLCPKNDESAGKRRSNRMRKGAPWLKTTLIQCAWAAARKNGSYFRAHFHRLRARRGAKKAIGALAASILTAAYHMLKDGTLYHDLGPDHFDCRAKTVQTKRLLTRLQRLGYAVQLTPLAA

SEQ ID NO: 362935 - protein, 326 aa, unidentified
MKAVTWIGVDIAKDSCVVAQRCPEGFQTEEFPITPQGLKALGNWLPQQPRLQIVLEATGPYWRAFTSGFNSVAPEIPIAVVNPRRVRDFAKASPHASKTDRLDAQVLVHFAETFQPGLMEASANRPDRQLRALTRHALQLTQRRDQVRDQMEKAQADPDTPKFVLRSLKRHLQHLEKALKLYWSQARVNLDQDPQLTQCSRLLLSIPGIGEKTALTLISEYGAGLRQVGPKQLTRYAGLDVVFFQSGSSVYRLPRISKQGNWRIRRALYMAALSAIRHNPVVRSYYLKLVANGRPKKSALVAAMRKLLHQCYGVLKNQSPFDPAYA

SEQ ID NO: 362936 - protein, 414 aa, unidentified
MTKFSVYIGIDWANDKHDVCVQVANSSTRKFEVIKHSAKSINEWITSIHKQYKGQIAVAIELSKGPIVYALQKFDFVTIHPVNTSMLAQYRKAFSPSGAKDDPTDAELALDLMLRYPNKIKALKMESESVRKLTYLVEQRRKLVEDKRRFSNRLIITLKEYYPHLLDWFSHRGSGMFCDFITRWPNLQKLKRARADTLKKFFSSYPGRTAACSVKRIQSISEAEPLTLDKAVIESHQLLAVALANQMLVAVKVIKVFDREISELFNALPDAELYNSLPGTGPCLAPRLLVAIGEDRSRFNSASEIQMYAGVAPVTVRSGQKSWIHWRYQCTKFTRQSFIEWAAKSIRQSYWAEIYYQQQREKGNTHQAAVRSLAFKWIRIVYRCWKTKEPYNEAKYLKALSDRNSPLLFKEKAC

SEQ ID NO: 362937 - protein, 416 aa, unidentified
MKIYPITRPIQRYIALDIHKEYVFAGGMNARQAWVLPPRRIEMSKFGEWAKKNLCESDAVVIETTTNVWAIFDIVQPLVGHAVVAHAGGVRQIAEARVKTDKEDVKRLIRLLMADILPEVWVPPQPVRALRGLISYRQRLVKTGAVFRNRLQSLLHSHNLVLPEEGLVSQEWWARQEKISPLEKLQIGQEIALLEQIEKLKAEVDQELGKQSLGETWGRDAVRLMQLPGIGVVIAMTILSAIGDVHRFASADKLVGYSGIGAGIHDSGQEHIEKPITKSGRKELRWVMVEAAWRAVRMSPYWKEQYEKFFHRMRRESQAIVVVARKLLVAVWHVLSKAETDERASEEDLAYKMLLWSWSLSEEARQGLTYKQFAKYALMRLGVPTDITRFVRGKVPRRIASRQEVLERIAELDLNV

SEQ ID NO: 362938 - protein, 461 aa, unidentified
MSKKKPGGRQKGSAQKKVDWKALEIVHPDAAGIDVGGSEHWVAVRPDRDAEPVRRFGPFTADLHEMARWLVEKGVRSVAMQSTGVYWMPVFEILEQHGLEVYLVNAQHTKNVPGRKSDVEECQWLLKLHAFGLLHNSFQPTDEIRIARTLWLQRGNLVAEVSSAIQRMQKVLTEMNVQLSNVLSDIRGVSGMKIIGAILKGERDPQTLASLARPEVKATPRDIAKSLEGNWREELLFVLRQQVELYRIYQEKIADCDLQLRKHLESFGSKVDLQKQPIGPKPKGKKGGRNTPQFDLRTELYRITGIDWAQINGIDVLTAQTVIAEAGADLSAFPSEKQFASWLGLCPTNEQSGGKILSRRTRKVVNRATVAFRNAASTLLRSQSYLGAQYRRLRTRLGAPKAVTAMARKLACLFYRLVQHGQQYVDKGTEYYESRYREQQIRSLAKRAQKLGLQLVIPKTA

SEQ ID NO: 362939 - protein, 348 aa, unidentified
MRFYRGVHQYYCGIDLHARTMYLCITDNHGTILLHESLPCQPAAFFTAIRPYMDDLVVTAECIFCWYWLADLCQQHSIKFVLAHALYLKAIHGGKTKNDRLDSEKLAVLLRGGVIPQAYVYPPELRPTRDLLRRRLFFTRKRAELLSHIQNTFHQYNLSVPAAPLLRRKHRDGVAERFTDPIVRKTVEADLLLCASYDERIKDLEKTVEREARDQEPHALFLLQTIHGVGRILALTILCEIHTIDRFPRVQDFSSYCRLVKATKTSAGKPLGTSGAKIGNAHLKWAFSEAAVCFLHNNPRGLQYKRRLQRRYGKGKSLSVLAAKLGRATYFMLKQKRPFDMDRFLVST

SEQ ID NO: 362940 - protein, 310 aa, unidentified
MTQTQRFVGIDVSKDGLDFETLPGGPRHHWDNTEASWRKARTLCRGAVVGIEPSGGYERGLIRTLLGAGIEVRRVNPYQLRHYAEALGIKAKTDRLDAGLIARFTAAMPTRPVLHDKTRERLAALVEARRALAEDGARLKNQAAHMEEPDLKRLWARRLTRIEADIRLLDARIAADVAKDAALDRRAALLSSVPGIGPVVAHGLLALLPELGQLPRRALAALVGVAPFAHDSGEKSGRREIWGGRQAVRRLLFLAAMSAVQHNPVLKAFHTRLKDQGKLPKVALVATMRKLLTILNAMLANDQAWTPKTA

SEQ ID NO: 362941 - protein, 341 aa, unidentified
MAEYVGLDVSMKETAVSIRRDGKRVWRGKCGSDPKLVAEVIRRRAPDAARVVFETGPLSVWFFHTLTAEGLPAICIDARHAKAALDMAPNKTDANDADGLAQLAEVGFFREVRVKGFDSMLARTLVAARNRLVQITTELSNQIRGLMKTFGLLVPAGKGSKFEEHVRGLLEDQAELARIILPVLEAWRGLRRQAAELSRQLIVSARQSQACQILMSIPGVGAVTAISFATAIEDPGNFRTSRSVGAWLGLTTRRYQSGEIDYDGPISRRGDTHLRGLLYEAATVVLTRTSAESSLRTWGLKLKERIGFKRAAVAVARKLAVVMHAMLRSGQLFERTAGGAA

SEQ ID NO: 362942 - protein, 398 aa, unidentified
MTESSDYESVQVFISVDVGKDTHHAVAINRSGKRLFDKALPNDENKLRSLISDLKQHGQILLVVDQPATIGALPVAVARSEGVLVGYLPGLAMRRIADLHAGEAKTDARDAAIIAEAARTLPHALRTLKLADEQIAELSMLCGFDDDLAAQTTQASNRIRGLLTQIHPALERVLGPRLDHSAVLDLLQRYPSPEKLASQGEKKLAAQLCKLAPRLGKRLAADIAQALAEQTVVVPGTNAAAVVLPRLALQLITLRKQRDEVALEVEQRVLAHPLYPVLTSMPGVGVRTAARLLTEVACRAFASAAHLAAYAGLAPVTRRSGSSIRGEHPSRRGNKALKRPLFLSAFAALRDPISRAYYTRKMSQGKRHNQALIALARRRCDVLFAMMRDGTFYTPQAS

SEQ ID NO: 362943 - protein, 319 aa, unidentified
MLIGIDVAKAELVVAARPSGERWSVTNDERGIKTLVDRLTRETPALIVLEATGGYEMLCVAALAAAALPVVVVNPRQVRDFAKATGQLAKTDRIDAALLALFAERVHPALRPIADADAQELDALLARRRQLLDMLQAERNRLGQVFGRGKPLVKKSLKQHIAFLERELRMADTDLGAMVRASPAWRERDDLLQSVPGVGRVLSLTMLAELPELGRLSRREIAKLVGVAPFSRDSGTQRGRRFVQGGRAAVRAVLYMGALVATRRNAVIRAFYARLLAAGKPKKLALVACMRKLLTILNTITRTRQRWSVHHVDAAHMPA

SEQ ID NO: 362944 - protein, 308 aa, unidentified
MRKISTAATGRIENFKDHQLTIGLDLGDRFSHYCILNEAGDVIGERNLPTTPKGIDEVFSRIPRNRIALETGTHSPWVSRHLARLGHEVIVAHARNVRLIGDSSRKDDRFDAQTLARLARIDPGLLGPAQHRSAQAQIHLTVIRARAGLVSARTALVNSARGLTKSYGERLRKCSTQKIREMAQGLSPELKDALDPLCGEIESLNERVAEYDRRIEQIAKEVYPQVALLKQVKGVGTLIALTYILTLDDPHRFRRSRDAGCFVGLRPGRRNSGMSQPQLRISKEGDVYLRTMLVQGAHYILGPFWRGQ

SEQ ID NO: 362945 - protein, 326 aa, unidentified
MTASQSSDNSFIGIDVGGASFDVAWHRGDCAHYANRPDGVAALLARLKAGPAISRIVVEPTGGYEKPLVKTLRRAGLPVEIVHTSRFSAYRVMVGARAKSDSSDARLLAAYAAAPDDVRGRKPHHVEVPEDAIREELAELASRRDQLKHMIHGETCRLTTVRSVKLRQAIIAHLDVLKAEDAQTHQTMLALVRARVDLKKAQGLLKTIKGLGDKSALACIALVPELGHVDNRAASALVGVAPFTRKSGTMTAPARIHGGRAAVRNILYMAAVSASRHNPVLRPFYQRLLARGKKVKVALIAVLRRLVVFANAVLRSAEPWKGATAS

SEQ ID NO: 362946 - protein, 322 aa, unidentified
MSKHSIVCAGIDTGKYKLDVALNGSREQLQIDNTADGHAALSAWLKRHKVQRVGIEASGGYEQNVVTRLRSDKFVVVVFQPAQVRAYAGFLLQRAKNDKIDAALIAACTAATKKIHAPPDPRLAPLAERMTLIDQLTDQIARLKNCREGSRDPRVRHFWKEQIAHFNGLLRAELKDLEAAIRQHRDLAERLDLIESVDGVGLKTAVAILVRMPEIGRLTREQAASLAGLAPFDDDSGMHAGIRHIAGGRERLRGSLYKASLSAAFHWNPQLTALYQRLIAAGKLHKVALIACARKLLIFVNTVVERGTPWVSNRSPAVRAAA

SEQ ID NO: 362947 - protein, 341 aa, unidentified
MNEVTMIGVDLAKSVFQAHGATATGEPVFRKKLSRGQFLKFLSEQPNCVVAMEACASSHYWGREILKLGHDVRLIPPIYVKPFVKRQKNDANDAEAIAEAAVRPTMRFVPVKSAEQQSRSMVFKTRDLFVRQRNSIINALRGHLMEYGVIAPPGRNFVKKLAEQIESPDCDLPSIVVDLSLVHLDHLSALTDKIVMIERRLKDEAKSDPETIRLQTAPGIGPVSAMAIKAFAPPLEGFKRGRDFAAWLGLVPVQKSTGGRQILGRTSKMGQRDIRRLLIIGAMTRIRWAIKNGPPKGSWLEQMLERKPRMLVAIALANKTARTIWAMMTKNEDYRDPIAAA

SEQ ID NO: 362948 - protein, 341 aa, unidentified
MGEYIGLDVSLKETAISVRRDGKRIWRGKCPSDPSLIAEVVRKHAPEPKRVVFETGPLSVWFYHALRAEGLPAICIDARHAKAALDMAPNKTDANDADGLAHLAEVGFYREVRVKGYDSMLVRTLVAARSRLVQITTELSNQIRGLMKTFGLVVPRSKGGTFEAEVQRLLVGQDELARIILPMLEAWRSVRTRASALGRQLLACARQSAACQQLMSIPGVGAITATSFTAAIEDPANFKTSRSVGAWLGLTTRRYQSGEVDYDGHISRRGDAHLRGLLYEAATVILTRTHADSDLRRWGLMLRERIGFKRAAVAVARKLAVIMHAMLKSGEVFNRAVSAPA

SEQ ID NO: 362949 - protein, 386 aa, unidentified
MQTLNDFSRSRIALEPNGTLIAVIEMSVSSWLVAGILPGVERQPLKKLAVDESALLKLLQRWREEAEKAGRRIERIAVAFEAGRDGFWLARWLKARSIEAHVIHAASVAVSREHRRAKTDRLDTALLKRAFLGWLRGERDHCKMVAIPTIKDEDAKRPNRERENLVSEQSRIINRMKATLIRLGIRGFNPKLKRAAGRLEDLRTPGGEPIPPNTLAELRRDMERRRLVRDQIRQIEEARLERFDHAPGDGSHPMVRLLARVIGVGIETADMLVHEVLSRNMRDRRAVARYAGLTGSPDESGRKRRERGLARSGNGRVRHGMIQLAWRFLLHQKDSALAQWFRARTENARGSRKRMIVALARKLLIALWRLVRQGVVPDGVVLRPAQ

SEQ ID NO: 362950 - protein, 373 aa, unidentified
MGEPSTFVGLDVHRKDIAVAMLVTGPEGLLEWRVANEPSAVRRLAKKLQREGGSPVHCVYEAGPCGYALQRQLQGLGLACDVVAPSMIPIRPGERIKTDRRDARKLAELGRAGLLTVVHPPSEDEEAVRDLCRGRDDARLDLMRARHRLGKFLLRRGRVFGTGAQRAWSQAHRWWLGQQTFERAAERIMFEDYLLAVEQTAARRGSLELHLEDLAREPRYAEAVGWLRCFRGIDTITAITLLAELHDFRRFRSPSQLMAYLGLVPSEYSSGPRQQRGGITHTGNRHVRRLLIEAAWHYRHKPRVGVALAQRRHGQPATVIALADKAQLRLCRRYRRMERRGKHPTKIVVAVARELVGYLWAALTPATIARVTT

SEQ ID NO: 362951 - protein, 364 aa, unidentified
MRDAKPDAPRPSLSTLEPAGTWVGIDVAAQTLAVVIARADQAPTPAESVANTAEGWQTLRRSLQAQGIQPASSQVVLEATGAYWVGVATALTAAGWTVSVVSPASARAYAQARLRRAKTDALDAAVLAAYGRDLHPAPWRPPPPEIQALQLLLRQRDDLVAMRTQTRNRQHALAQLPPAAVPPEVQASWEALLATLETQIADVTALIEQRVATTPIAEEVARLDAIKGVGWLTATLLLVETAPLGLALGASRIAGAGEVTPKQVVAYAGLDPAPRQSGTSVRGAGHLSKTGHPRLRQALYMAALAAVRSNDRLRAFYHRLLARGKLKRVALVAVARKLLVLMVTLLTHQRTWDPDWPARPARHP

SEQ ID NO: 362952 - protein, 331 aa, unidentified
MDDITTIGLDIAKNVFQLHGVDAQGPVVLRKALRRANMIAFFTKLPPCLIGMEACSTAHHWARTLMELGHEVRLISPAYVKPFVKRHKNDAADAAAICEAVVRPSMRFVSVKSEGQQATLMLHSAWELLISQRTALMNALRGHFAELGIVVAQGARNVGDLLLILERMGQGSNEKALPETMRLALQPLATDLIGIEAEIAKLDKEILAIHRKDDVSLRLASIPGIGPITASFLSASIPDPGLFEGGREFAAFLGLVPRQYSSGGKPRLGRISKMGNRHLRKLLVVGAHAALYSIKNGKTKSPLADWARALLAKKSFKLVAVALANKMARIA

SEQ ID NO: 362953 - protein, 410 aa, unidentified
MLFIGDDWAEAHHDIELEDDSGRLLVRRRLPEGLAGMTTLHELVAEHLDPNVEPDQVMVGIETERGPWVQALLAAGYLVYAVNPMQVARYRERHSTSGAKSDAGDAHLLAEMVRVDRAHHRPVAGDSDIAEHVKVAARAHQTMIWSRVRQVNALRSLLREYYPAALVAFGADLAGRDALAVLAAAPTPEQGRRLSQARIESLLGKGGRQRNLAATAAAMKTALAGDQLTARPGVVPAYAASASALIAVLTTMVAQTEVLAGQVEQGFGQHPDVEIYRSQPGLGVILGARVLAEFGDDPDRYRDARSRKNYSGMSPITKASGTRRVVLARYARNRRLGDALLLQAYAALRVSPGARAYYDKHRAAGATHYQALRTVANRLVGILHGCLASHTCYDEHRAWHTESRQEPAAA

SEQ ID NO: 362954 - protein, 338 aa, unidentified
MALYGGIDLHANNSVIVLIDDQDRVVDHKRLPNQLDHILARLAPHQAEISGLVVESTYNWYWLVDGLIEWGYPVHLANTAAIQQYEGIKYSNDFSDAQWLAHLLRLGILPEGYIYPKATRGVRDLLRKRMQLVQQRTTNLLSIQTQSARNTGQTWKANRIKRLTCEEVEAEVLDDYLSLSITSNLTVMQCLEGQIRKLEKVIKGQVKLDPAFEPLQTVPGIGDILGLTIMLETGDIGRFASVGDFASYCRCVGSERLSNGKRKGRGNTKNGNKYLAWAFVEAANFAIRYHPQIKSYYQRKAAKTNAIVAIKTVAHKLARACYYILRDQVPFDVKLGFG

SEQ ID NO: 362955 - protein, 340 aa, unidentified
MRLYTGIDLHSTNSYVGILDETGKRVFKKKLPNDPGVILNTLAQFKNDIVGIVVESTYNWYWLVDLLMAEKYTLHLANPTAMKKYSGLKYADDEHDAFWLAETLRLGILPEGYIYPKEDRPIRDLLRKRSHLVRLRSSLVVSLQNIINRNNGFKLKKNKIMASTTNHVTPYLETNEDLALAGRVSKDSIDFLTRQIKTVEATIEGKVELREPYAKLLSIQGVGKILGLTIMLETGPISRFDKAGNYVSYCRKVSSKWISNDKGKGKGNRKNGNKYLAWAFSEAAELARRYYPEARAYYNRKLKKTNVAIAHAALAHKLARVAYYVMRDQVPFMPEKLYGS

SEQ ID NO: 362956 - protein, 387 aa, unidentified
MYFVGIDISKFKHDCAIVDELGDVITPSWSFQNDCEGFSLLKELLNALDGEKKIGLEATGHYGQNLKLFLENNGFSFMEFNPLLINRFVRSKSLRKTKTDSIDALMIAQYLMTVEYKPYPPSFYTLEKLKSLTRFRDSLIRQRSRQLVELTNILDKVFPEFKPFFKGRFSATALYILSHYASPEKISNMNSKSYEPLRRLSRGRFSMVDFVELKTLARNTVGSTCDYLLQEMEITIDIYNQLQSKVEEVELQINDCVLGLAPPMLTVPGIGAASAAVILSEFGDFSRFKSPAKLLSFAGLEPGYFQSGTSESTGKMVKHGSSHLRYAIMNCAQTVVNNEPTFATYYTKKRAEGKEHRVALTHVAKKLLRVIYTLQTKEQSYNPDLVR

SEQ ID NO: 362957 - protein, 402 aa, unidentified
MNAVGIDVSKGKSMVAVMRPFGEMVLSPFEVPHSSSELSKLARLLKSLDGESRVVLESTGNYHTPVAKMLHDARLYVSVVNAMLVHDYGNNSLRRAKTDKKDAVKLANYGLDHWLSLPGYVPEEDTRLLLKNCYRQYQQYAKVQTMMKNNLLSLLDMIFPAVNRLFSSPVRTDGSEKWVDFIDAFWHVQCVSGLSANAFSAKYLKWCRKHGYNFSEEKALEIHRTARDHVAVMPKTDTTKLLVKQAVAQLRTVSSAKAALQNEMDALAASLPEYPVVMDMFGVGPKLGPQLMAEIGDVRRFHSKKALVAYAGIDAPPYQSGQLNVHSRSISKRGSPALRRTLFLVMSVYLQCSPADEPVYQYMAMKRAEGKPYLVYMMASANKFLRRYYAAVKAYLNALEQG

SEQ ID NO: 362958 - protein, 369 aa, unidentified
MLYLGIDLHTRQLTVCLRDEAGNILQRRQVGTHPEKLQPWFDELQVAANRQGGLAAILEVCGFCDWLVARLKELGCREIVVIQPDRAARKKTDRRDAARLSELLWINRLHLLEGRPAPGLRRVELPTETDGENRQLTSLRQRLGVQRTRTINRLKHLIHKHNLIHDQPTKTFGTKGVLAWLKKLPLPTVDRLETDLLLEQLAHTEAQLARVAVEIEARAAQDPACRLVRTIRGCGAFTALAITSRIGRIERFARGRSLANFFGLTPTCSSSGESGERLGHISREGSGIVRFLLGQLVTRALRVDPGLRRWYQEVRRRRGAKIAVVGVMRKLATSIHAMLKNRESYELLGVRKVRDRKQRGAVKPGTSTS

SEQ ID NO: 362959 - protein, 358 aa, unidentified
MQTQKTGLDFKGQNIFVGIDVHLKSWAVTILTDNLVHKTFTQPACADTLSNYLNRNFPCGDYYSVYEAGFSGFWTHYKLKEMGINNIVINPADVPTTQKEHLQKDDPTDSRKLARSLRAGDLKAIYIPEPSTLEDRSLIRLRATLVKDMVRFKQRIKSFLHFYGISIPAEFEKSGTHWSKRFMKWLNQGVSLQHESETLKVLVQEAGQQRILLLEVLRKIRVLSRNEKYATNMELLRTIPGVGFITAMTFLTEIENIERFENTDHFAGFVGLIPNRHSSGNKENNGDMTFRGQTALRKSLIESSWFAARLDPALSMSFNVYVRRMEPNKAIIRIARKVLNRIYYVLKNKSEYVSGVVK

SEQ ID NO: 362960 - protein, 438 aa, unidentified
MSNKVIFNLDELFISVGIDVGADFSWMSIALPNQQFVGKPYKILHNSIDSLTTAVSKIKEAEELYSLESRIFLESTGIYHYPLFCYLRDKGFNCSVINPIITKNSTNINIRKVHNDRFDSKKAALVGLNPDLKVSLMPSDLALNCRNLCREYYDLMDNRSAYVNKLQGELRMAFPQYFGIFSKVTINTSLTLLETYTSPSAFLKADRQEIIDIIRSTARFGLTYAQNKYNAIIQAATDANQFGYIIDSNIKRIRLYISFIRKYDEEINSILESLHELADANEDADFVKQIHLIETFKGAGFLSAVSIMGEIGDFSAFSKPKQLFAYFGLDPAVKQSGKFEGTKVQMSKRGSAIARRVIHTLTLQSISISRNGEAKNPVLREYYLKKCDSKPKLVSMGAVSHKVCNMIFAILRDNKPFKIIAPQEHIKQYNAAKCDIAA

SEQ ID NO: 362961 - protein, 324 aa, unidentified
MIDAILGIDVSKNTLDVSISSCTKVRTKSFANSSDGWHHLLDWLVAQKIQRVHACLESTGRYSLGIACSLYEAGHVVSIINPAQIRDFVRTKLGRNKTDGIDASRIREYCELFKPSPWAPPSEAHRRLGELQTIRAGIIAGLTEWKNRKNSGIVDTEAQALADATILHFTSQLGAVDKAIALTIDNDSDLRSKRDLLLSINGVGDTLAGVVLAELPGPDVLRSSGEVVAYAGLNPRQHQSGTSVDRATRISKIGNAILRAALYMPALSAMRYNPAIVALVTRLKSRGRLKPKQIVVAAMRKLLVLCFGVLKTGKPFDPAIAIGC

SEQ ID NO: 362962 - protein, 404 aa, unidentified
MYNAVGIDVSKGKSTIAVLQPGGTVIRKPFDVSHTSQSLIELAHYLGSLEGSTKIVMECTGRYHEPMLKALYEAGLFVSVVNPHLIKNFGNNSLRRVKSDPADARRIARYTLDNWAELRQYSGMDNTRTQLKTLNSQFSFFMKQKVAAKANLIALLDNTYPGVNKLFDSPPRQDGSEKWVDYAYSFWHVDCVRRIGLKTFTERYKAFCRKHHYIFQQDKPEKLFNASKKLVAVFPKEKTYKLLIQQSIQQLNLASGHVERLRQEMNALASTLPEYSTVMGIYGVGKTYGPQLIAEIGDVSRFTHREALTAFAGVDPGVDESGQHKSKSNRASKVGSARLRKTLFQVMTTLLQNAPEDDPVYRFLDKKRAQGKPYYVYMTAGANKFLRIYYGKVKECLRNLEQAE

SEQ ID NO: 362963 - protein, 347 aa, unidentified
MTIVEAPPGVTGGVDTHLDNHVAAALDPLGRLVGTESFRADAAGYKALLGWLETFGEVTKVGIEGTGSYGAGLSRFLRRRGIAIVEVNRPNRQARRNHGKSDPLDAVEAARAALSGRATGSGKTKDGPVEAIRVLVVAKRSARVARIAAITQMRHLGFTAPEQLHCRLKGLSVPALVAEATKLRPTRSTDPITAATKASLSSLGHRVQALDDEIAELDEKIESLLHITAPDLLALFGVGPDTAAALLVAAGDNPERLHSEAAWAHLCGVSPIPADSGKSSGHYRRHNGGDRQANSALWRIVMVRIAHDPETRIYFERRVKEGRSKRDIIRILKRYVAREVYRYLPRG

SEQ ID NO: 362964 - protein, 361 aa, unidentified
MPMQKYELNFNGENVYVGIDVHLKQWHVCVRTAHVSKKPFSQPPSALVLKQYLENNFPGGTYLSAYEAGFCGFSVHYELESAGIRNIVFNPADINDTQKERSRKTDAVDCIKICRNLMNDELKAIYVPSREELGLRGYLSARDTAVKKQRVAKQRIKSLLNRNGVKIPDELFPTSKTHWSRHFNGWLEQVAADLGSGEGYRLNDLLKDLHHAHSQVLAAGRRLNEVISAHHMDTNELLLSIPGIGRVTAARICLEVPHVSNFVNSDHLASYIGFVPDVHGSDDNVYVRGITYRRRVLLRSAFVESSWRAIGKDPAMGLAYSNYIKRGMKPNNAIIRIARKLVNRVFFVLRERKRYEIARVR

SEQ ID NO: 362965 - protein, 468 aa, unidentified
MSNRKRNCKNQRQRKMDTSTLEQLNNNAAGIDIGAEHHYVAVPKGRDPKGQDVRHFSTFTFDLHKLVDWLKQCQIDTVALESTGVYWIPLFEILDSQGFDVSLVNPRNIKNAPGRKTDVLDCQWIQQLHTFGLLQGSFRPENKICDLRAYLRQRAMLMSCASQHIQHMQKALEQMNIKLNHVISDIKGVTGMKIIRAIISGERNPVKLASMRNERCNNSEVVIAKSLEGNWRAEHIFSLQQAVELYDFYTNQMIECESRIQQQLESFEDRSNGTPLEKPSRNSRKSAQKLNFDARRYLYQMTGVNVTRIEGIEAPSALNIIGEIGIDMSHWPSEKHFSSWLGLCPGSKISGGRVLSSKSKPSANRAAHAFRLAAFSLQRSESAIGAFLRRKKAQIGAPKAITATAHKIARIFYNMLKYGTEYIDLGQEYYEQRYQDRVITNLKRKAKQFGFSLVNMEENKQVLELPAS

SEQ ID NO: 362966 - protein, 340 aa, unidentified
MEQIIGIDLAKRVFQLHLVSQQGQVKANKVITRERLMVFIVQQPPSRIVLEACGSANYWARQFRQYGHEVKQISPQYVAPFRMGNKNDKNDAIAIVEADSRPGMRYVPAKSLTQQDMQCLHRVRQRLMKNRTALINQIRGLGLEYGIAMPEGAHKVMSCLPDYLEDADNELTAMSRQLFQELLFELKAQQQRLKELDERLEHLSAQNEETCRLQSLPGVGVLGASALTIALGDSSEFSNGRHFASYLGLVPKEHSSGGKVKLLGITKRGDAYLRGLLIHGARSVVYRIGKLADSQCNGLQRWLKGVIARSGVNKAVVALANKNARMAWALVNKKTVYVPS

SEQ ID NO: 362967 - protein, 361 aa, unidentified
MNATTVAVDLAKSVFQLAVADEHWRVVETQRLTRTQFERWFANRDVSLVIMEACGSAHHWGRWLNGLGIEVRLLPAQYVRAYVKRNKTDAADAAALLEAARASDMRPVRIKSVEQQALQGMHRIRSLWMGTRTSRINALRGFCREFGIAIPVGARTGVEAISRVLADSNTAVPDLIRGTAKLLVEEIHLLEARIAQLERELAAIAKLSPACTTLLSIPGIGLLTATALVAATSGDVSHFQDARHFSSWFGLTPKEYSSGNNRYLGHISKKGDRYLRMLLTHGARSVLRASKVADNAGREVCGVRRWALDVQARSNHNKAACALANKLARICYATLRDKEPFGEQTVRLGKKISRESFVMPA

SEQ ID NO: 362968 - protein, 355 aa, unidentified
MKLNTMVLQDYDVFLGIDVDKKSFAVTAMSRYNTIGEQKMAANAVHLEHYIQNHYAGKRVLCAYEAGPTGYSLYDYLRSKNYPCFVVSPSNLLKMSNERVKNNRLDSQKIAGQLRSGELRSIRVPEEAYRELRHLVNARENYVEKRRQSRQRIQSLLLFENLYKQMKDPDKNWCRSYFEDLKLIECNPSVRLRMNTLISDHDYACGQLLMVYKQTRQFIADRPEIREYMRLLCTIPGVGFITAVTVLGRIGDPTLLQNVREIGCFVGLTPREWSTGDRVHKGSISHFGDGILRSLLVEAAWVAIRKDNELKMFYERLSRHNHPKGSAQKAIVAVARKLTMRIFRVLKDRRPYSVH

SEQ ID NO: 362969 - protein, 322 aa, unidentified
MAPREKQKIEIEKTHRDPLLSFHQAVTVDRSDFLGTALTRYQEIAWLDTDTGEIHERRLEHTGDETRKFYAAFSEPLRVGIEATGYSQWFERMLRELGHEYWIGDAGAIRASVVRKQKTDRRDAAHILDLLMTNRFPRIWVPTPAERDLRQLVLHRVKLVQLRTKVQNQWQALALGQGVCRKKKLWSVRGRAELESLPLDRWAQRRRQELLQLLDQLEGSIRELHAAVEQQARQHPEAVLLMTHPGVGPVTSLAFVLTIGPVSRFARSKKVSSYLGLNPGEHSSGGHQQMGPISKQGNSMMRWLLVEAGQTAARRDPVLGRM

SEQ ID NO: 362970 - protein, 334 aa, unidentified
MQNITLIGIDLGKHSFHVHCQDKSGKALLHKKFTRTKLIEFLAGCSSVTVVMEACVGAHFMARRIADLGHEAKLISPQFVRPFVKSNKNDFVDAEAICEAASRPSMRFVKPRTESQQAMRALHRIRESLVRDKVKTTNQMHAFLLEFGISMPKGIAVIRRLSTVLAENEIPPYLAQLLLRLHDHYQYLMVQITEQEKALEHELSRDETGKNLMTIPGIGPITASVLSSQLGDGRQYGCSRDFAASTGLVPRQYSTGGKNTLLGISKRGDKNLRRLLVQCARVFIQRIDFQSGKLADWVRTQLARKHSCVVCCALANKLARIAWAITTQKTVFEK

SEQ ID NO: 362971 - protein, 311 aa, unidentified
MDSEAYVGVDVSKDRLDVNVLPNNDAHQFANDDAGIIGLIKLLKKVAPKLIVFESTGGLEMPAISGLIEHQLPVVVINPRQIRDFAKATGRLAKTDAIDAAIIARFARDVHPELRPVKDEHTQLLSALNARRRQIVDMLVAEKNRLHTAHKKNQKSIHKHIQWLEKSLARINEDIDKTIKKSPSWRENDKILQSFKGVGPVVSATLLCDLPELGTLDRKKIATLVGVAPINCDSGRYRGTRRIKGGRANVRRKLYMAAVAAARHNPAIKDFYNRLINAGKPPKLALTACMRKILTILNAMMKNQSYWIAPS

SEQ ID NO: 362972 - protein, 427 aa, unidentified
MKKASVTHEAFESPAPIAPSVLVGIDWADKEHAFAIRTPDGKLHIGSFKHSPAAIREWIEAWNNRYPNLAIEICIEASRGSLINALREFPYVKIYPVNPKALANYRGAFAHGGGKNDPVDARLILKFIEQNREHLRPLQQDSPETRELYALTIHRRQLVEERVALANRIGTLWKQYFPAILELKPARTYSEFVIKLALKYPTLEDVQKAGKTKLRKFFYSIGTKEKMEHRLDLLMEAKPLTTDPTLLRTCARQCQAIGLQIDVLNQVIKGYNSEIKSLVRKHKDYGFVSTLPGASDNTHARIIAALGDDRNRYENAESLQAAAGIAPITTQSGKSRYVNARWACTKFLKQTFHEYAGLSVAKCTWAKRYYEQLQAKGKSKQMAKRALAYKWLRIIYRCWKTGQPYNEAHYMERLRKTGSKLGVASEA

SEQ ID NO: 362973 - protein, 426 aa, unidentified
MRKTYQICCGVDVHKTFLVATIVKTTNNIPHYEKKRFSTFAKDLKLLKQWLLDNNCFDLCMESTGKYWIPVWNMLEDKINVTIANPKWVSAVKGNKDDTKDSKWIADLFRMGIVPGSYIPCRAIRILREFTRYRYKLVCMRSSEKNRYQNAFTVSNCNLDAVVSDMFGKSAMDIENYLLEIDMEKFDPEYCKSLLQRSLKKKADSVIESVESFNMIVEQKERIKIIQEHFNDLDARINRIDEQIEKLIVTNKWQSAISLICSIPGIDRHMAITIISEIGTDMTPFSSSKRLCCWAGLTPGNNQSAGKKKSVKITRAGIYLKPALVQAAHAAVKSTTNPYFKNKYERIYKRRGKKRAIIAIARKILTAIYNMFKNGELFNPCDIYKESIPETVQLHQKKKAAKQAIKLLVNLGLIAEDTVPLELLAS

SEQ ID NO: 362974 - protein, 460 aa, unidentified
MGKKTTKGKKKSVRDPYGLPVIRTHVGAADLGSRFHMVCIPTGEDRQQTLRSFGTTTPQLQKLVDWLNSEKIESLAMESTYLYWIPLYEMLERAGIEAVLVNARHVRNVPGCKTDPKDSRWLQLLHSVGLLKGSFRPGPEICQWRALTRQSGKLVEARTRAVQWMQKSLDQMNIAVHRAVTDLTGVTGLSIIRAIVAGERDPLVLARLRDKRCRKSEAEIAEYLQGTWFEEHLFNLERALEDFDHYERQIVRYEVEIQRVIEKITPDEREDQTAPQHPKADKQKAMKRRGEECLRQLLWRFSGVDLTRIDGIRASAAQTILSELGLDLSSFPNEDHFVSWLRICPPSHTSAGKRVKKPNGNGSSRLSAVFRMAALSVRHADCSLGARYRRMARRKSAKTAVLEGARTIAKLVFRMLRYGQDYVDEGVTAYENRFQQRRLKGLINTAEQMGYVLVPKENAA

SEQ ID NO: 362975 - protein, 523 aa, unidentified
MVTRSKKRKSRGTKKRFIGKPTGQIQERVQAVGPEHFGIIAVDCAKRRSKWMLCNFYGKVIIEPTSVEHTAGGLRAMTQFVTKACKAEGLTDTIVAVEMTGIYHKPVYRAFRKARFDTRIVHPFASNHYRQPLHPDEKTDDKDLEAIFHAAVKGYGLATLPVGEVYQSLQAVSRHRHNLVKQRSRLMVQIRRLLHQTMPGFADLFEDGKLFHKSIALPVALKFTSAEAIGQAGSSGIASHLNKTKVRFQTRTIERIVAWAGTAAEPSELAAMHTRQWQQLNEIRQLLDEQVTAAEQEMAGFLAKTPYILLLSVTGINAISAARLAGEAGPIEHYASARAINGRAGLFPSRYQSDEVDHADGSLVRQCNRKLRGAAMLVAENLIKCHPYYRGLSGLWKQQKVDPRDRRCRIANRANRMVFQLVGGRQLWRGKGVDCEYVLAKLQEFHRVHKTPIDQSIRDMNEAFAWLPKSVYAAEAKPMAELARKKHRGPKRIGDLLIPLLLRLGISIEESVESNTSEARSSD

SEQ ID NO: 362976 - protein, 456 aa, unidentified
MSKRSKRLELMPIVYPNAAGLDIGSREIYACVPPERAEDNVKVFGTFTPDLNRLADWLAEHDADTVAMESTGVYWIPVFELLEARGFKVYLVNARNMKGVPGRKSDVQDCQWIQKLHSVGLLTNSFRPDAEMCALRAYLRHRADLLQHRASHILHMQKALAQMNIQLPQVLSDITGETGLAIVRAIVAGERDGVKLAQLRDYRCKSSAETIAKALTGTWKEEHVFALKQSLELYDFYTQQIANCDAQIQQHYAAMKPRWEATQPNSTPVERTLSRKKTHKNAPASDVRADIIRITGVDIAAVVGIGPGLAQTILSEIGTDMSQWPNEKHFTSWCGVAPRNDISGGRVLRSRTLPTRNRAGQAFRQAAQSVSHTSSAFGAFYRRKRAQGGPLFAQAATANKIARTVYHMLKYHVPYQDMGAEEFERQHRERDIKALRHKAAKLGFTLLASESVQATT

SEQ ID NO: 362977 - protein, 372 aa, unidentified
MQESSKIHVGLDVHKDSISIAAAEPGRVPGRLIGKVTHDVSKLLKVLAKVGNADQLHIVYEAGPTGFGLQRALHSRGYLCEIIAPSQIPRRPGDRIKTDGRDCVQLAECSRAGQLTAVWIPDPEDEAIRDLSRAREDAVNSRVQARHQLKGFLLRHDVRYTGKTSWCGAYYRWLGTLNFGAGAAQTAFTEYWQAVTAADDRVDRLTKALQASITGWRFEAVVGALQALRGVAAITAIGLAAEIGDLGRFAHPRKLMGYLGLVPSEHSSGQRTSRGSITKTGNAHARRLLTEAAWNYRFKARIGKQAQIRQQDLSEPIRRMAWTAQLRLTQRFAALSARGLQANKACIAVARELAGFVWAIGMQAQREQGQPN

SEQ ID NO: 362978 - protein, 431 aa, unidentified
MSDGMASGGRDAGAVTPAPFVMGEEPGAIVAGFDVHRRQITIDALDTASGEVSRGQIESTPAAVEEWVAGFPGRVVHVAVEACTGWLFVSRALERCGAAVHLAEPVETSALRGRKRRAKTDRADAKWLRQLLWEGRLPEAWLPPEHVRQWRSRARLRNTLVDERTSWTQRIRATLYHHGIVGAPDELRTLAGRQFLAGLELPVDARERITVALEIIDLLDAQLGELERDLRALARHQAGCRALMTQYGMGEISSLVTLCELGDVTRLHASRQAVRMAGIDIGVHRSDRHAQLGKLTRQGSAPLRWALFEAAQSASHSGSPDYADYHALKARGLSHTRACLTIARKLARRSYHLLRALGPAALEPPVTPAKRSAQAHPSPMRSKHAASSSSDRGTHAPRGGPRKTERPQSLHRNDRSTIKSPAANTSGRGPR

SEQ ID NO: 362979 - protein, 387 aa, unidentified
MSESFDVRKSDQPFDQSRSLVAVIELSQASWLVGGMVPGLKRRPLKKLEPEKEKLLALLVGWRDEALTAGHEIERIAVACESGRDGFWLVRWLRAQGIEAYVIHAASVAVSRVHRRPKTDRLDTEMLKRAFLGWLRGELGHCSMVTIPSCEEEDAKRPSRERETLVGERTRLINAMKADLTRLGICNFNPKQRNAAKQLESLRTAEGAAIPANTLAKLLRDMERLQLVVAQIKAIEAARLKRLERSPQEEPHAMVILLARVVGIGTETADMLVREVLYRNLRDRRAVARYAGLTGSPDESGSKRREKGLAKAGNARVRRGMIQLAWRLLRFQKDSALVQWYRERTADGRGGLRKTMIVALARKLLIALWRLVTLGEVPEGFILRPAL

SEQ ID NO: 362980 - protein, 401 aa, unidentified
MNAVGIDVSKGKSMVCVMRSFGEVVLEPFEVLHTAQNLHDLAEKLKALDGETRVVLEATGNYHKPVAFVLHNAGLFVSVVNPVLIHDYDNNSLRRVKTDKKDAVKIANYTLDKWTRLRQYLPEDDTRLALKNCYRQYQQAVAIRTMLKNNLISSLDLTFPDANKLFTSPAKSNGCEKWVDFIGDFWHSECISSLSANAFAKKYLKWCQKHGYVFTRSKSDEIYACAVNSASLPKSPTSKLLIQQQVAQLKAVSQSVAAFRQEMLRLSQQLPEFDTVMEMYGVGPSLGPQLMAEIGDVRRFSSKKSLIAFAGIEPQPNDSGKVVGNDKGISKVGSAVLRRTLFLIMTVILQTQPQDEPVFQFMNKKRSEGKPYKVYMMASANKFLRIYYARVKAVMDSERSQ

SEQ ID NO: 362981 - protein, 374 aa, unidentified
MSEIIRIGLDTSKSVFQVHGVDTADKPVLRKKLRRRDVLGFFAKLAPTRVGIEACGGAHYWARELQALGHEAVLLPPQYVKPYVQRNKNDAADAEAICEAMSRPRMRFVPVKSAEQEAAQMLMGMRDRLVRCRTQLSNAIRGYAAEFGVVAAKGLSKIEPLLARIESDPAVPDVAKQLFAAQGREYAALKAELREIEVKLIAWHRQNELSRRLAEVPVIGPIGACLLVMKVTDPHAFRCGRNLSAWVGLTPKDHSTAGKVRLGVITRAGDETLRRVLVAGATAVIQQVRKGRGHPEPWLVELVRRKPPKLAAVALANKMVRVAWRLMVSGERYNPHHRGGPRGALRSAMGGCAPRPSLPPCSIADATTAAAIGT

SEQ ID NO: 362982 - protein, 408 aa, unidentified
MEVLHSRCAGLDVHRDSVVACARIAEGNQVRHHVEQFGTTTAELGRLRDWLVSHGCTHVVMEATGVYWKPVWNVLHGSAELLLANAAHVKNVPGRKTDVNDATWLSDLLAHGLVRASFVPDKPAQELRALLRTRKQLVREKGQHVQRIEKVLQDANLKLTSSVSDIMGQSGRAILQALVDGETDPDRLLALTTGRLKASRSELREALRGHVTPHHRFLLKLHLEQIANLETAIATIDQEVGHGLDPFRAQVALLVTIPGVGDLMAQVIVSEIGIDMSRFPSAGHLISWAGLCPRNDESAGKRRSTRLRKGAPWLKTQLVQAAWCATRARRSYLRAQFLRLKTRRGPRKAIMAVAASMLNAIYYMLRDGVAYQDLGPDYFDRLEHGKILRRLVRKIEDLGYDIELKRVA

SEQ ID NO: 362983 - protein, 428 aa, unidentified
MDVMGMEVRWDGVPRDAVWAGVDTHADTNWLSVVDRLGAELFSGEFPTGAEGYARLIASARALGTLVAAGVECTGTFGAGLAREMASEGVRCYEVVVPTRSRRRRSAGKDDAADALRAARQVLSGDDLAVPKSQDGWVEEVRALYVAREGLVRSCTSLANIALATVRKAPDDLRARLEPLGTTGIMRACACWEDDGSAALVERAAMVSLRALGKAWVAQRSSARDLEGAIADAVRKGNPALAAMYGCGALSAAALAMAAGDNPGRMASEASFAALCGASPIEASSGKVRRHRLNRGGDRRANRALHVIAMHRMRTDPRTIAYVERRRAEGLSDREIRRCLKRYIAREAYRLLTNPEDVPAEGTGPGLREARIGAGVSQKDAAKALGVTASTLCDLELGHHQFRDLALRYRKWVDDGFPMDAEDPADGA

SEQ ID NO: 362984 - protein, 353 aa, unidentified
MSSLDFIGFDVHKKTISFCVKAGDGQILEEGKIVARRGDLIAWTKARSRPWMGAMEATLFSGWIYDLLRPQAQALKVAHPAMLRAIIASKKKNDRVDARKLADLLRCNLLPEGYMAPSQTRELRRILRYRNLVVREATRMKNRISGLLMETGTPYNKEKLHGRAYFAELLGTLQETPVSVRDLLRLSRGQLDLFESIQSRLVKELVGDPELAERVERLRSIDGVGPILALTWVLEIGEVKRFASIRQAHSYCGLTSAQHNSAGIDHRSPISKQRNKHLQTMLIEAAKLAPRFNEQLAAVHSRELGRGNRNRATLAVARKMVAYLMAVDKSGRPFQPRTSETGVMVAHERDRAA

SEQ ID NO: 362985 - protein, 343 aa, unidentified
MYYIGLDVHKRTISYCVKDAAGHVHQEGKIGSTRRELDAWIKTLPQPRTIAMEATIFTGWIYDQLLPHAEKVKVAHPLMLRAIAAAKKKNDRIDAGKIADCLRCDFLPECHMVSTEIRDRRRTLRYRNLVLKQMVQMKNRVSGLLMETGVSYNKQRLHKLGYFTELMSGNEEVDESIRPLLKLSRETIVRSQKLDYALVSSLERDPLLAERLKRLRTIPGVGPITALTWALEIGDVSRFQSIKQAISYCGLCSAERSSADKLVRMPISKQRNKHIQQTLVEAAKLAPRYSHELALVYERERQRGNKNRATLAVARKMVAYMLAVERRKQDFVPAEQLGGTAAA

SEQ ID NO: 362986 - protein, 348 aa, unidentified
MHYVGLDVHARRSSLCILDSCGKVVKRLEVKGSWPKLMERVAAEVPRPFAVCFEASCGYGHLHERLSALAERVAVAHPGKLRLIFRAKRKNDRVDAEKQAKLLYLDQVPLVHVPGADVRAWRGLIELRRKLVGRRTAVKSQLRALLRGAGCCDAPAGKALWSKRGLKWLAAAALGEADALRRDLLLEELAQADERVGRVTRELDRRADAHPGVALLRTIPGVGPRTAEAFVAYVDDVRRFARTRQVGCYLGLVPCQDSSAGRDRLGHITGDGPATARMLLCEAAWQAVRRSPSVKSFFERVMHGEPGRKKIALVAVAHKLARSMAAMLRSGEAWREQEQEQEQEQEPA

SEQ ID NO: 362987 - protein, 328 aa, unidentified
MYFIGIDVSKAKLDCSLLLDVATSKRRAKAVANSKAGIADLLAWCAKQHVLPHELHAILEGTGVYHEQAALALTDAGVTVSIVNPAQVKDFGRSLGIRTKTDGVDSLILARYGALLNPKPWHPPSQEARVLQALLSRREAIAQDLQRERNRLEKAGATDTPALIHQSLLDSIAFLEKQLAKLQHDIDEHIHKHPGLKADRELLTSIPAVGPQVGNHLLSVMHNHCFQSAEQLAAYLGLVPVERQSGTSLLGRPRLSKAGPARIRAILYMAAVVGTQHNPHLKALYLRLQARGKTKMSALGAVMRKLAHLCFGVLKTRQPYRPDYGIPA

SEQ ID NO: 362988 - protein, 346 aa, unidentified
MKIIGCDFHPSFQQIAVFETETGEMTEHKLVNGNGEAERFYRSLPVGSLIGIEACGNSHWFIDLLGRLGHQVWVGDAAKIRASYVRKQKTDRRDAAHILSLLLENRFPKLWTPSRQERDQRQLLIHRHKLVQIRTRVKNSLQHLALNQGVQKKQKLWSKAGQKLLIQLPLEGWTAVRRQDCRELLAHLDERIAKLDKAAEQAAEAHPQASLLMQQKGVGPITALAFALTIGDVSRFQHSNQVASYLGLIPSEHTSSSKRKLGSITKQGNGFLRMLLVESAQSVTRFDPQFHKHYVHLCRNKHKAVAKVAAARKLAVRLYWVLRTDQNSQNAVPIESSPRVPLVGGS

SEQ ID NO: 362989 - protein, 352 aa, unidentified
MNTLKYIGMDVHMATTVIAVVNSIGKVVSETILETKATTILDFLKSQRGTIHVAFEEGTQGAWLHDLICPHVAEVVVCNAREIHDYDNKDDKGDAKRIAELLRTNGLKAVYHGEHGTKALKELTRSYGAILSDSTRVKNRLKGIFRGRGICCTGTTVYSKKGRDQWLKKLDDSAIRSRISKLFKELDCLTELRNEAEKELLAEARKHPATKILRSIPGIGPLRAAVILGFTITPHRFRTKSQFWKYCGLAVTSEVTGEYVIIDGRVARSRKKPLVRGLNINYNHALKEAFKGAATTAAMGVWRSHFDTMVTNGTRSALVLLTLARKISSITLAIWKKGELYDSDKLKFMHAE

SEQ ID NO: 362990 - protein, 357 aa, unidentified
MTSPRARAQAPIRTVIAGVDAHKDTHHVVVLTGLGQRLADRAFPATIAGYADLRDRVGSHGPIRCFAMESTGSYNAALTRYLIGTGADVVEVNRPHPRTRSRVGKDDAIDAEAAARKALSGQCTARPKDTTTAVESIRVLTAARDSAVKAPTQAHAQLRDLLITAPADLRERITATTSAARAAACRRLRPGTSAPDRPAQAVRTALRSIATRISALDEEISALDTQLDALVTATAPTLTSRTGIGTHTAARLLITAGANIERLDGEAAFARLCGTAPVPVSSGRTRRTRLHRGGDRQANKALHQIAVCRLRHDPRTKTYMQRRLDQGLSKKDVLRCLKRSIARQAFKDLTTDLHPTP

SEQ ID NO: 362991 - protein, 412 aa, unidentified
MKDLLEISCGLDVHKDKIVACILSGPIGKTTVSEIREFTTLIPDMAALRDWIVSCNCHHVAMESTGIYWQPIYEILEDAYSGDITLLVVNARHMKNVPGKKTDMRDSEWIATLLRAGLLNGSFIPDKQIREFRYLNRYRKSIIRDITSQKNRVEKFLQSSGFRLSTFISDIFGASGRNIICHLIQHGCIDRESLDSCLKTKTRNHINEILVAVNGTLSQIQQDFLEMLMDHYDSLKSHLAEIETALEEAMAPFSLHIEQLTSIYGINTTASCAIIAEIGTDMSYFKTAEHICSWAGLCPGNNESAGKRKSTSITKGNPYIKSMLCEIAWVIAGKRNTYLSAWYWRIKQKKGAKKAIVALARKLLVIIYTMLKQGTLFGENCFETRRKNCKQKQLSHYIRELEKRGYHIEASA

SEQ ID NO: 362992 - protein, 422 aa, unidentified
MERSTGRGRAVQTIVERPAALDVHKAQVTACARVPDGRGRRGQHVAEFPTTVRGLLALPDWLAGHAVTQVVMEATGVYWKAPWAILEDEFKCMLVNARHVKQVPGRKTDVSDAAWLCQLAEAGLLKANFVPPKPIRELRNLTRYRKTQIQERAREVNRLHKALEDAGIKLDTVAADILGKSGRDMLDALVAGETDPAVLAELARRQMRKKIPALREALAGHFDAHHRLWVGAILRHIDFLDCQIEQLTGMIEEQIRPFAPAVELVCTMTGIQRRGAQCIIGEIGTDMTCFATARHLASWAGRCPGNDKSAGKRRSGKTRNGSKWLDFALEEAAMAAIRVKGHYLEAQYRRLKPRRGHKRALGAVKHTMICAIWHMLATGETYRDLGGDYFTNRDPERQTRRLVAQLERLGHHVTLTEEAAAT

SEQ ID NO: 362993 - protein, 347 aa, unidentified
MSRARIYKEGRETVQPNSNARELAAEACGPTSWVGIDVSQDWVDVVVLVAERKAEQFRCDRAAAALGELARRLLAYEPRGVVLEATGGLEGAVITALVAAGLKVMRMNPKRVRDFARAHGLLAKTDALDAHILALFGARMQPALRPWPEAERQQLAAWVARVQQVTAERAAERTRLRQASEPQLRQSLERVIAFLGKELARLEQQLAAWVEASETWKAQEALLRTAPGVGPKTAVRLLAQLPELGRLNRREIAALAGLAPFACDSGQWRGRRRIRGGRGAVRAALYLASWSAVRVPGRFKEAYQRMVAAGKPRQVALIAIARRLLLALNEMMRSNTPWRTQQNAIFT

SEQ ID NO: 362994 - protein, 338 aa, unidentified
MGYKRISIDTSKHVFAIHGVDEAERPTLRLELRRSQIEAFFARLAPTEVALEACGGAHHWGRQLSAMGHQVKLIPPQYVKPFIKRNKNDRHDAEAIGEAASRPSMPTVAVKTVDEQAATMIAKHRELLVGQRTAAINALRGHAAEFGVIAAKGTAKIEALLVVLTSEPGIPAAAKAMFAAMGEHIADLDAKLTAAERQLLEQHKRNPVSQRLAAIPGVGPITAITMALSVNPANFESGRHFAAWLGLTPRERSTGGKQRLGRISKAGNERLRQLLVVGATAVIRVARPGRPSSSVWLLGLLARKPKKLAAVALANKVARIIWAMMARGEAYRHQPITA

SEQ ID NO: 362995 - protein, 412 aa, unidentified
MELLYQRCAGLDVHKETVVAAVRLAVDGKVVTEVKTFATTTQCLLSLSDWLAENGCTHVAMEATGVYWKPVWHVLEDGEVELVLANASHVKNVPGRKTDVNDATWLAELLAHGLIRASFVPDGQTQELRALLRTRKQLVREKTRHTQRIHKTLEDANIKLDAVLSNVLGKSGRAMLDALIAGECDPARLATLAHAGVKCPQDKLREALRGRVTRHHRFLLQLHLRQIDALDAAIATIDQEVEGNLAPFRTAVELVSTVPGVSTLSAQVIVSEVGTDMSRFPTAGHLLSWAGLCPRNDESAGKRRSTRLRKGAAWLKTVLVQCAWAASRKKASYLQAQFLRLKARRGPQKAVCAVAASILKAVYHMLKNGTLYHDLGPDHFHRRSKTTQTQRLVRRLEHLGYSVEIKPLTTAA

SEQ ID NO: 362996 - protein, 342 aa, unidentified
MNITTLGIDLAKNTFSIVGMNQHGKVVCRKTISRNKLLPFIAQCPPCLIGMEACSGAHYWAREFEQLGHRVGIIAAKFVEPYRKGGKNDNNDAEAICEAVMRPNIWFVPVKSPDQQAVLCIHRARQGLIKDRTALLNQLRGLLAEFGIVIPKGRYPAQATIPDVLSNTNNGLPMLARNIITDLWERIQQSNKQILSYDRDLAKLVREDTVAKRLMTIPGVGEQVASGVVASVPDPRLFKNSRQFCAWLGLVPRQYSTGGKTRLGRITKHGDKYLRMCLVHGARAVVAALKDKQDHVSCWIRALVERRGYLRAVVALAARNARLIWTLMVKEENYKAIPIMEA

SEQ ID NO: 362997 - protein, 392 aa, unidentified
MYIVGIDIGKNHHEASIVSPEGKQIGRSLRFATTHKGADSLMSFIFKNIGNSPCVFGMEATGHYWYPIYSFLKAKGYTICVINPIQSDSLRKMYIRQTKNDSIDSFLIAEVIRFGQFGTTSMADENILAMRQLCRYRDSVISSRTEIKLRIGTIMEQIFPEYEKQFSSLWVSTSMGILEKYFTPENIENAPIDELFEIIKDKSHNRLTKAKAISIKEAAADTFGIKIAQDAFSFQLKQLIDRMNFLDKQIEALDIEIMKYYEQFDCYLHTIPGIGIIGAATILAEIGDISRFKNSSALVAFAGIDPTVRQSGEFNSTHNHMSKRGSPYLRHAIFLAATTCSFHNSPLNAYYKKKRDQGKHHLTATGAVARKLTTVIYAVLRDSKPYEPKKFC

SEQ ID NO: 362998 - protein, 315 aa, unidentified
MRNCIGIDVSKGSFDVFVLEKNKALVMTNDSEGICKCVELCQQIQPELIVMEATGGYEALLASTLQAKGFPVAVVNPRRIRDFAKAVGQMAKTDKLDAQIIARFAAILEPMPHELIDSNSRKLKALMSRRKQLVEMHTAECNRKEHAIDIEVTRSIEAIVNAIESQLSNVEKELDSWIQQMPELKQKAEYLQSIPGIGKTTAHMLVIELPELGVFNRRQIAALVGVAPINRDSGVFRGKRMTGGGRRHVRARLFMPTLVATQFNPVLRKYYRTLVDAQGKCKMVALTASMRKLLCIMNAMLKNEQYWQPNLIENA

SEQ ID NO: 362999 - protein, 414 aa, unidentified
MSLTDTTPTTRAATAGVDWAKDNHAVCVVDADGEPVERVTVVHNSVGLDRLIAVLARHRVDDVGIERPDGPVVDALLAAGHTVYVIAPSQIKALRLRYGAAGNKDDRFDAYVLADTIRTDRRRLTPLLRDTAATVVLRRLCRARKDLVAHRVAVANQLRAHLETALPAAIGLFRDIDSPITEAFLTRFTTQDAVDWISVVRLAGWLNRVKYSGGTRPQVLFRRLAEAPRGPTGIHGQALAGITRAYLAALAAIRAQIAALTEQIEQALEAHPDRNIFTSLPRAGTVRAARLLAEIGDARGRYPTASSLACIAGVAPSTRESGKSRIVSFRWAVDKQLRDAMCDFASDSRHNNPWAANLYAKARARGHDHPHAVRILGRAWTDIIWKCWTTNTAYQPDRHRALQRLLQQDQTVGG

SEQ ID NO: 363000 - protein, 343 aa, unidentified
MQVVTTIGLDIAKSVFQVHGVDAAGQVLIRRQLKRRAVLAFFQKLPVCLVGIEACASSHYWSRELQALGHSVRLMPPAYVKPYVKRQKNDMADAEAICEAVARANMRFVPTKTPEQQSCLMLHRTRHLFIRQQTAVINSIRAHLAEFGIVAPVGRKGVTELLHIVADPSDKRVPEVARACLAALGNQLLSLKEQIVEFDRMIMVWHRSNETSKRLHYIPGVGPMLATALVASVADPRTFRSGRNFSAWIGLVPKQHSSGGKDRLGSISKQGDRYLRSLFVAGALAVIRYAKIHGTKHRPWLTALLARRPTKVAAIALANKLARMAWAMMAKGERYRQPVALAA

SEQ ID NO: 363001 - protein, 360 aa, unidentified
MKEEQATAGRRTVVGGVDTHKDLHVAAVVDEHDRVLGSECFPTTRHGYKQMMIWMRSFGELARVGIECTGTYGAGLLRYLQQGVTVLEVTTPDKSDRRKRGKDDTLDAQNAAHAAFAGVRTVTPKTRDGMIESLRVLKVCRKTAIAARRVALQLIHNTIVCAPDELREPLRAMTRMQLIRTLAAWRPDLSDFRNLASAYGITLKSLGRRYLELHDEIADLDVMIAALVDELAQDLVSRNSIGYESASQLLLTAGDNSSRLKSEASFAALCGVSPVPASSGKVTRHRLNRGGDRAANSALHIIAIGRLRTDARTRAYVDKRVSEGHSKLEAIRCLKRYIAREVYYVIRQRNSQIGQTQIAT

SEQ ID NO: 363002 - protein, 369 aa, unidentified
MSNDTTVFVGLDVHKDSITAAFTGTNPDAPVIDAGTIGTQHYAIDRLCKKLSGRGTLRVVYEAGPCGFWLQRHLAAKGIDCQVAAPSLIPKKPGDRIKTDRRDARNLALALRAGTLSYVHVPTLGQEQFRDVVRAWHQSKRDVTAGRQRLKSFLLRQDIRYSGTASWSKAHRRWLADLTMPSPAHYLVFQELLEAINERERRRDRLERQLDSLAPQWSGYPLANALLAFRGIQKTVAYTVVAEVHDLARFPHPRHFMAWLGLIPGEHSSGNKRRQGPITRCGNRYARTLLVEAAWAYRYAPKVSRIIEVRAQDVDPAIRDIAWKAQLRLHHVYKKLINKGKHVNVAVTAVARELSAFIWDAARHLQKAS

SEQ ID NO: 363003 - protein, 343 aa, unidentified
MSEVSIVGLDLAKHVFQAHGADKDGHCVFRKRLRREEVVAFFARQPLCRVFMEACGSSHYWARQIAALGHEVKLIAPAHVKPFVRRNKTDAADAEAICEASVRPNARFVPIKSEAAQAGATLLRTRQLLERQRTQAINALRSHMAEYGFIAPQGRAHIDRLIAMIQDKEVALREEARIGLSALVSTISSLTQHLDRLDNQIKVSVKQNETARRLMTIPGVGPMTAAFIMALIPDPSVFRCGRDLSAWVGLTPTEHSSGGKQRLGAISKRGERSLRRLFLLGAAAVVRQALIKPPAPTSWLAKMLARKPRMLVITALANKIARVVWALLAKGGVYRERTEALAK

SEQ ID NO: 363004 - protein, 426 aa, unidentified
MKEFITSTLYVGLDVSARQNVLCALDFSGDKLLTIKDSNNHPGAENIAAQLKRCLLDNNLDRVTIALESTSFYSVHIANYLSACDELMPFHPMVYCLNPKTTARYKETFVDMDKTDPLDALTIADFARAQKITTEPWRGAQFLALQRLTRHRLHVVESIAREKMYMLNNIYLKFSELAVINDPAERPFSNRYSVTAQGVLTEFLTLEDIAECSLEELVLFVRDKGRNRFADAEHTAKLLQNAARDSYRLDKVLYEPLNLAIASSFNIVKALQQEIKIIDKGIAKQYKGINTNQFQCLLSIPGIGSTFASGILSEIGTITAFSSNDKLAKYAGLTWRVKQSGSYTADITRMTKTGNKYLRYYLIEAANSVRKSIPEYKEYYHKKYDETTTHQHKRALALTARKLVRLIFKLLSENQLYSSDNARSNN

SEQ ID NO: 363005 - protein, 343 aa, unidentified
MQTVTTVGLDIAKSVFQVHCVDAAGQVVIRRQLKRRYVLAFFQKLPPCLIGIEACASSHHWSRELQALGHTVRLMPPAYVKPYVKRQKNDATDAEAICEAVTRANMRFVPTKTPEQQSGLMLHRTRHLFIRQQTSVINAIRAHLAELGIVAPVGRKGVEELLHVVADPNDKRVPAVARACLAALGSQLLGLKKQILTFDRMIMDWYRSNETSKRLHYIPGVGPLLATALAASVADPKVFRSGRNFSAWIGLVPKQYSSGGKDRLGSISKKGDRYLRSLFVAGALSVIRYAKIHGTKHRPWLTALLARRPTKVAAIALANKLARMAWAMMARGERYRNPVALAA

SEQ ID NO: 363006 - protein, 410 aa, unidentified
MELLHPHCAGLDLHKETVVACIRHMLNGTVTTEVKSFQTTTQQLMELSDWLSSHGVTHIAMEATGVYWKPVWHILSGGEFELVLANAAHVKNVPGRKTDVNDATWLADLMAHGLIRASFVPDQPTQQMRDLLRTRKQFVRERSSHTQRIQKTLEDANIKLDSVITDIVGLSGRRMIEALIAGETAPEALAALAHGRIHATKAELEAALRGRVTAHHRFMLQLHLDHLDAVNAAIARIDKEVDANVEPFRVAVEMLTTIPGVSSLAAEVMVSEIGIDMSRFKTDGHLISWAGLCPKNDESAGKRRSTRMKKGAPWLKTTLIQCAWAASRTKGSYLQAQYLRIRSRRGPKKAIGAVAASILTAAYHMLKDGTLYQDLGANHFDNRDKGKQVLRLVNRLQSLGFAVQITSMAA

SEQ ID NO: 363007 - protein, 259 aa, unidentified
MNTLNKQNEINVGVDTGKTQLDIYIRPLDIYFTVENNDGGIKHAIKTLKKHPITRVTIEATGRLEHPFIMACAQANIPFVVANPVNIKRFAGAIGQKAKTDKLDAQLIAHFGEAIKPPLSSLKPEQMRLMSDLLSRRRQLMDMQTMEKNRSQIMPKTISSLIKPILTALKNQIDKVDLKLQKLIKECDEYKVKNDIIQSVPGVGNVVAFNLLSDMPELGCVNNKEAASLVGVAPFNRESGAYQGKRMIRGAAKLDSHSN

SEQ ID NO: 363008 - protein, 342 aa, unidentified
MNHYAGIDVSLECSSVCVVDASGKILREARVASAPEALIAWLRSSGFEFERIGLEAGPLSQWLFAGMKAAGLAVELLETRHVRKAFEAMPVKSDRNDARGIAQLMRLGWFRPVHCKSISAQETRSLLTARKLVQSKLLDVENSLRGILRGFGLKVGKTTGQKFAGRIEELVAGHPHLQTIAKALLAVRAVLRTEFAAFEKQTRRMARSDMQARLLTSVPAVGPIVALTYASAIDDPVRFKSSKQAGAHFGLTPKKHQSGETNYTGRISKIGDASVRTALYEAANVMLTKPVKGCSQLKSWAMRIAKRAGMSKAKVALARRLAVIMHRMLDDGTPFNAAAAAA

SEQ ID NO: 363009 - protein, 416 aa, unidentified
MEEPAHFAAHIGLDWSDQKHDICLVDAATGSQELSSIKHQPEALDEWARALRTRFGGGRVAVCLEQSRGSLIYALLKYDFLVLYPINPKTLARFREAFTPSRAKDDPTDAAYLVELLLHHRGHFKAWLPDDERTRELQLLVEHRRRLVGDQTRTSNRLTSLLKGYFPQVLQWFPDIRTELVCDFLLRWPSLAALKGVHRVTLLKFFSAHNSGRRDTLETRLRTIKEARPLVTDRAVVNSSVVMVKALAAQMKVTLAAVGEFDRQIAALCQAHEDFRIFASLPGAGRVYASRLLAAVGSNRGRWSSADELLRFSGVAPVIERSGKSSWTRWRYFCPKFFRQSFVEYAGESVRHSEWAKAFYLSQKAKGKSHQAAVRALAYKWIRIIWKCWQTRTNYDEARYLECLRKKGSALVPATT

SEQ ID NO: 363010 - protein, 321 aa, unidentified
MHSNNTVVYAGVDVAKATLQLHLQGQQSEFNNTPKGLHQLCAQLQKVPGVHVVCEATGGYERALVKVLHQGQIPVSVTNPARVRAAAQAQGQRAKTDQIDARGLTDYGQRYQPQPTPPTSATQEQLVALTQWLKQLIHGRALAKTQAEQHQDPFVRRQHAKLMTHLQSQIEAVEKQIQALLEQDAALQQRVNRLDEIAGVGPRTAWMVLAHMPELGRLNRHEVAALAGLAPWTRESGTMKGMRCIGGGRPEVRLALYMAALSAARCNPVLRSLYKRLRAKGKVAKVALTAVMRRLLTYMNHCIKALPSEPATASAKELKIA

SEQ ID NO: 363011 - protein, 405 aa, unidentified
MVDIMVSDFMKGRYNLMKIFVGIDIAKLNHFAAAISSDGEILIEPFKFTNDADGFQLLVSKLESFDKNSIIIGLESTAHYGDNLVRYLVAEFYQVCVLNPIKTCQMRKNNVRKTKTDKVDTFVIAKTLMMQDVLRFITFFDLDMMDLKALGRFRQKTIKQRTRLKIQLTTYVDQVFPEIQYFFKSGLHQNAVYALLKEAPSPKEIASMHMTHLANLLKVNSHGHFTKEQAKELRVLAQKSVGANDSAISIQITQTIQQIELLDSQLEKIEAEMTDIMKFNDSVIMTIPGIGYINGGMILGEIGDIHRFSNPNKLLAFAGLDPSVYQSGNFQAKTTRMSKRGSRVLRYALVNAAWNVVRNNATFKAYYDAKRAEGRSHYNALGHCAGKLVRVIWKMLTDEVEFNLE

SEQ ID NO: 363012 - protein, 460 aa, unidentified
MKNSTKIQNSDKHKNRLGYIDPTVAGIDIGDKVIHVAFPDGNGKAYVEEFETTTPALYKIADKLKAAGVTTAVMEATGVYWVPLYDTLESLGFTPVLVDSRKVKSPPGRKTDVLDSQWIQTLYSNGMLNPAFRPPRDRLALRAFVRHRMNIVKTKQTSLLRMEKVLQLMNLKLSTALSDIGGISGINIIRAIVSGERDAAKLAALRSPGCKKPEQLFIDALTGNYQKEYIFALKQDLALFDFGNVQLEECDRQILDELETYPTVTNTLPPSRDKDKNNPKRPSSTRKPNRNDVPSEIRTVLWQKSGRDFTALPGIEVNSALVIFAELGGTDVSAWESVKKFSSWLKVSPGNNVSGGKRRKSKRQPCANYITQTLRMASLSAKRSKTGLGAHIRKISSRTDKPRGIKAGAHKLAHMIYHMCKEGWAYFEKGEESYEKAHAERCYKNLQKKAQEMGYTLVAA

SEQ ID NO: 363013 - protein, 311 aa, unidentified
MPDKIDPHYVGLDIAKDQLDYCLNDIDEGRCAHTPEGRAQLIKKLKSLRNPRVIAEASGGYERIIVAELLEAGIEACVVQPGRVRALAYAEGLLAKTDRIDARLLRRYGQIVKPRLAEATDPAVALLRELLEHRRQLVTQLCEVEGRLPLAGPTLAQLLKKQRNFLQRQLEKVKKMIEEHIENDSDLGSKSKRLQEVKGVGPILSATLLAYVPELGTIESAQLSALIGVAPHPKDSGSTHSPRHIRGGRSQVRHVLYMAAVCSTRCNPILGAFYQRLRAKGKPAHVCLVAVMRKMLCLLNRLIQDPNFALA

SEQ ID NO: 363014 - protein, 320 aa, unidentified
MRNAVGLDISKLTFDASAMVGNAEYSAKFDNDSKGLNQFSDRLKSLGCQNLHICMEATGNYYEEVADYFAQYYSVYVVNPLKISKYAESRFKRTKTDKQDAKLIAQYCRSAQESELVKRQKPTDEQYRLSRMTAAYAQIKSECAAMKNRHHAAKDEEAAKAYAQIIKAMNEQLEVLKEKIKEQTEKPNCKEGVKRLETIPAIGRMTAAVLFHHLTSSKFETSNKFAAFAGLSPQQKESGTSVRGKGKLTKFGNRKLRAVLFMPAMVAYRIRAFPDFIKRLEEKKKPKKVIIAALMRKLAVIAYHVHKKGGDYDPSRYKSA

SEQ ID NO: 363015 - protein, 390 aa, unidentified
MLYIGIDIASKKHDCCIMGSNAELLAPVFTFENNAEGYGILLKNIRSHERDFSQVKIGLESTGHYGSNLISFLTSKGFELVVFNPLSVDLYRKAGSLRKTKTDKADAQFLARMLLSTENSSYVPNVPEITDLKALIRHRSRLKSIRSRLKISVSRLVTVLFPELPGAVWSVHQASSYAMFLEFPTAKAISECHLTRLTNLLSSASRQQYGKDKAIEIKVLASKSIGTNSRVIGFELQQTIRIITNVAAELKILDKEITALMKRIGSPILTIPGISYNLGSVILSEIGNIRNFANPSKLLAFAGLEPSTYQSGNYQATKTSMVKRGSPYLRWAILQAAKSVSRFDPTFRSYADKKLSEGKHYFVVLNHVGRKLIRVIFHLLKNNKVFESAV

SEQ ID NO: 363016 - protein, 339 aa, unidentified
MESKYYTGIDISAEFFTVSCLEVECKKITTFDNFENSAEGFRKFLKEINKISKDKSKFIIGMEATGVYGEKLAHFIYGNGYKLVIENPLKVKKSFGLSGKKSDAIDSRRIAEYLYRFNDELKFWQPKHENIEYIRVLLAQREQLNKQKVANINARKALQRKQYQIEESIQIYSDMISVLEIKIKDIERKAAELIKDDPELSQAISNITSIPGVGMIMSLYILVITNGFTENLDYKKIASYLGIVPLIYESGKSIRKRSSSSGIGPGELRKTLYLVSLSARNNNKIMKEYFLRKVAEGKSKRLVLNNIGNKLLKLIIAIVKSGKTYSENFRSINPVFLKN

SEQ ID NO: 363017 - protein, 442 aa, unidentified
MSESLPVASEPEWAAFAAIDWADQKNFWRLVPAGSQRQEQGELENTPEAVEVWAATLQQRFGGRPIAVCLEQSRGALVYMLAKYAHLVLFPVHPTTAARYRETFCTSGAKADPSDTTSLLDLLLRHRERLRQLRTDTTETRLLQFLVEARRRMVDEKTRQSNRLTDCLKLYFPQILHWFGDVASPLVGDLLQRWPSLEELQRAHPGTLHKFFHQHNCRGEERIQERLQAIYQATPATQDAAVREAGAMIARGLVALLATLRSQIVVFEQRIEELVRSHPDGVLFASLPGAGAALVPRLIVAFGTHRDRYQSAYQLQCYCGIAPVKEASGKTEWIHFRFTCPKFLRQTFHEFATHSIGQSEWAKAYYEHLRNDQKKSHHAAVRALAYKWIRIIYRCWKDGKSYDEEVYLRSLRRRGSLFAGALGLATGAAWKTVPGFQKFSAE

SEQ ID NO: 363018 - protein, 356 aa, unidentified
MSTKKDNGISFKGQHFHIGLDVHKKNWSVNIRNNGLRLKAFSMDPSPEQLKRFLEENYPEGTYHAVYEVGFCGFWICRRLRGMGIDCIVVNPADVPTGHKEKDRKTDPVDANKLARELEKGELKCIYIPDEADQHLRSLCRLYRCAVQDTTRVKNRIKGQLYFNGVELPHHTSQWSGKFITYLKSLPLDNGPAKECLSISIEELEQRRQTTVHILKKLKEYVGEHRNPSVFQNLLTVPGVGLKTALVLYTEIIDMKRFPTLDRLKSFVGLVPSTDSSGDNDWTRGLTYRKNKHLKHVIIEAAWVAIRQDPVLLHKYNKLIVRMKAQNAIIKIAVKLLDRIRYVWNNNCLYLKGVIQ

SEQ ID NO: 363019 - protein, 505 aa, unidentified
MAASTAKRQPAASSAASGQQAQAQAQRKAYQRRKDRAKAKNEARRQKEVAQVEAMPVLRPHAASIDIGSRSHWVCVGFTTDADSGLIEEFPAHTDGLKAIVAFLREHQVTSVAMESTGIYWIPLYELLVAEGFEVLLVDPRYTHQLRGRPKTDRRDCQWIYRLHSVGLLAAAFRPDEKTCQLRAYLRQRANLVRQGSRHVLHMQKALEQMNLKLTEILSDITGVTGRTIIRAILRGTRAPEKLAKYRDKQCKASEAEIAQALTGTYREEHLFELKLAYEAWQFSLTQVEKVDEQIALQLGRMKCDRALPPLKPKARTKRRVNSPRFDVRTALYYVVGLDLTEIEGFSELTALTLISEIGPGVSQFATMKKFCSWLGLCPNWKKTGGRVKSSRTRRGVNRAAQALRLAAQSLHHSQGAVGGFLRRMKGRLGNQAAVTATAHKLAQIVYLALKHGMTYVRKSQEEYDAQMKEKQIKALRRKARQLGLEVIEKTPVSGATAVAEPVQG

SEQ ID NO: 363020 - protein, 426 aa, unidentified
MQVTRGMRRRSEKMARRRDRLPADALIAGVDLAKKESVVVFVRASDRARVGRLRVSSDRAGTERLVARGRELVAEQGSGPLVIAMEPTSHFWKPVARAADGAGVGYVLVQGFVVARARELDDLTRDKTDARDAALIADLAAELRFTETRLPEGAWAELDLLVAARDARRIERAASLQEVRALLELAWPGLLSACPALAGTHLQALLRTGITPQAMAALSPRRFTALLRRHHPRRFLRWMAGRLHAAARDVAALRWRLAAERVALADIAIAELDARMIELIEASGYGWLRGQIRGLGDATLAALLALTGDPTRYDDARCLVKLAGSNPTERSSGEREAAGGIHRRGRPVLRYVAYHAAVTLVRHEPEFQRRYAELTDPERTNRLEPKQAYVALANKLLRTLWSMAVSGRGYEPAIARGEVRPLPRAA

SEQ ID NO: 363021 - protein, 322 aa, unidentified
MERRGFVGIDVSSGRLDVAFRPGTELFQVSNEPRGIARLVRMLERRQPELVVLEASGGYEIAVLERLLAKEVPVALLNPRQVRQFARASGRMAKTDAIDAEVLAHFAEVMRPHPRRWADLETRQLRALVNRRHQLVQMVTAESNRRRLALAVVRDGFGATLRCLKLQITAINKQLAALIRQIPTLRQKAELLRSVPGVGEVATATLLARLPELGSLDRKKIAALVGVAPFNRDSGRFNGKRAIWGGRGDVRTVLYMSTLVGVRRNPSLRDFYQRLRGAGKTPKMALTACMRKLIVTLNAIVKHETHWYCPLSLSGKASPNAT

SEQ ID NO: 363022 - protein, 345 aa, unidentified
MKIVGCDLHTRYQQIAMLDEETGELVERRLEHANGEAKEFYTHLAGPVRVGIEATGHTRWFEQLLAELGHELWVGDAARIRAAEVRKQKTDARDAALLLELLLSGRFPRLWRPAREQRDLRHLLWHRQKLVWMRNAVGNQLHALAMGEGLCRKKQLFTKKGRCELEALRLDKWASRQRQELLRLLDQLDASLAQFDQAVNEQAAANGSAVRLMTHPGVGPVTSLAFVLIVGPTARFERSKQLVSYLGLNPCEHSSGGKQKLGAISKQGNPMLRGLLVEAGHTAARMDPELRQDYQRLRLRRGGSVAKVAIARKLAVRMYWMLRRQVNYTQLVRTQGSSRATLVQQ

SEQ ID NO: 363023 - protein, 351 aa, unidentified
MLIIGCDFHTRFQQIAMMDGTTGELVKRRLEHGTGEAERFYAALAAPARVGIEATIATQWFEKMLTRYGHELWFGDAAEIRAAMVRKQKTDDRDALHILDLLMQNRFPRIWVPSAAERDVRQLVRHRHKLVRLRTSVMNQLHALAMGQGVCLRKKLWTRVGRQKLESLQLDPWASRRRRELLELLDRLDPSIEELNRAVISEAESRPTAVCLMQQAGVGPVTALAFVLTVGPASRFANSKKLVSYLGLNPSEESSGGRQRLGAISKQGNTMMRSLLVEAAQTASIYDPELRRDYQRLKFRRGHSGVAKVAIARKLAVRLYWKLREAAQPVPLAPMQGSPALSVVGASLSSF

SEQ ID NO: 363024 - protein, 323 aa, unidentified
MNKDIKYFGIDISHLVFDVTDSDGNYYQFKNRVSGFKKFVKLLNENSHCVMEATGYYHYQLAYFLLESGIKLSVENPLAVKRFIQMKLSKIKTDKSDSKLICEYAKQVELKLWQGNSKHQTECLQMTRLLSMYTKQSTMIKNKLHGEEVLGYPSKAVVQSLKRSLKQAKKEMKTLEDKLLILVKQEHQDMLTRLKTIPGIGAKTSLMLVVLTDGFERFTSGSELCSYAGLTPVIRKSGSSVKGRPRISKIGNQKLRNLLFMCSFNACKYNKACREIYERIIAKGKSKKLALIAVCNKLLKQAFAIAKSGLIYEDTYRGNLVKN

SEQ ID NO: 363025 - protein, 346 aa, unidentified
MHYIGMDCHISTLDFAVINEAGRLVKAHSVPTSVNNFMQFVRGITPPRTVYMEEGTLAAWALETCVKYGEKLMITDAKKNHWIGSSGQKDDSVDALKLAQLARGGYIKEVRHPVGERRRFRELMIAYHDTVRSTTRIKNKIKAKFRQNGIQCTGTTVYSGTCREEWKGKLPHEATSLLILEGLWRQLEQSEQTEKELLAAARVQAKHYPEIKHFEALPGIGFISAATISAILETPFRFADKRKVWMYAGLGIMTRSSGGKLYSEKLTTDYNRLLKYTMKQAAEAAIQAKDNPFRHKYLDMTLLHGIAPHRAKLTIARNMLATMWAIWRKGEKYSPEIREKAVCRQV

SEQ ID NO: 363026 - protein, 356 aa, unidentified
MNKRSKLNFSGQPIYIGLDVHKKSWSVSIFTQHGEYKTFSQPPEAETLSQYLHHHFPGAQYQSVYEAGYCGFWIHDRLKDEGIQNIVANPADIPTRDKERRTKRDRVDCRKLARGLRADEIEGIYTPPRWKLEDRSLIRTRLSMSRKQTRCKNQIKSMLLFYGVVIPERKEMGHWSRRFIRWIEGIRMERASGDLALQIHVEELCHMRQILAKLNRAILALARTEQYRSWVSLLKTIPGISTLTAMIVLTELYEITRFRSVDELCSYIGLIPDTQSTGEKEHVGGMTQRHHSQLRWLLIEASWIAVRKDPVMMEAYQEYCKRMRKTKAIIKIARKLLNRIRYVLKNQAEYVTGVIE

SEQ ID NO: 363027 - protein, 521 aa, unidentified
MAIMTSKKSNFEGRKEKVGHFPNGNENPKVRPVLRTFERMIGRKMPYRRLNSSRGGSLFLDFNFKVTKNMAKKAKKIETRKGLALKIVNPNAAGIDIAASEMQVCVPVDRDAENNRRFGTFTKDLNDIADYLHACKIDTVAMEATGVYWLSLFMLLKEQGFDVVLVNPRDVKSYSDKKTDEADAEWLMLLHSYGLLKASFQPENFARRIRNLCRHRDNQLSEGAKAIQHMQKAMEQMNIKLTNVLRDITGASGMRMIRAILSGNHDPKELAKLADSNCKASRETFEASLEGTWDEDHLFELKQSLENYEHFQRQARACELKMEELAKKYATVVSDDISKIKRTGKRISKKNAPAFDVEKYANALWGVNAMAIPGIGANALLTLIGELGHDFTDKFDTVTQFCKWLNLVPNNKISGGKVLSSHIPKRLNIAGQAFRQCANSVKDAKNLLGYYFRRKKSKGGHKYAIVCTAHKIAKIFYTMVKNKTEFDPKLCAIDEKLLLERKIARAQRALDSLNAKLRKSA

SEQ ID NO: 363028 - protein, 346 aa, unidentified
MGKITTVGVDLAKNVFALHGVDRSGKVVLKKTVSRARLLEEFSNLPACLVGMEACSGSHHWARQWERQGHTVRLMAVQFVRPYRKSEKNDANDACAICEAVSRPSMRFVPVKSVEQQAVLALHRARAGLVEMRTAVVNRLRGLLSEFGVVLPVGTQKLRRAMPEILEDGENGSPGLAREALAEHYALLGDLDQRIAVYDRRIEQLARQGEPSRRLMQIEGIGPITASAVVATVGDAKLFDSGRQFAAWLGLTPKQRSSGGKLRHGRISKRGDPYLRTLLILGTRAVMSRTQDKTDPKSNWVEALKARRGRHKAAVALAAKQARTIWALLAKAENYQSPRSAHSAAN

SEQ ID NO: 363029 - protein, 341 aa, unidentified
MFKVVTVGLDIAKSVFQVHGVDGFGGVAIRRQLRRAQVLPFFAKLPACLIGIEACATGHYWARELGALGHQVKLIPPSYVKPYVKRQKNDAADAEAICEAVTRPTMRFVEVKSPEQQSVMVLHRVRLTLMRQRIQLSNTIRGHMAEFGLVAPIGREGLQQLIRLVEESDSRVPNEARVCLVFLVAQLQLVNLQILETDRRIRTSARSTEVGRRLMSIPGVGPLLASALVATVGNPIAFKSGRNLAAWIGLVPKQNSSGGKDRLGGITKQGDRYLRQLLVVGALAVVRYAERHGTRRPWLVQLLAKRPTKVATVALANKIARIAWAIMTSGESYREPEPAAA

SEQ ID NO: 363030 - protein, 381 aa, unidentified
MTTEATRNTQAKTSEGPLFLAFELSEKTWKLGFTTGPGQKPRERNVTARNQERVLDEITQAKRRLGLPETAPVVSCYEAGREGFWLHRFLEAHGITNHVVDSSAIEVSRRQRRAKSDGLDVRKLLSMLIRYHEGERQVWQVVHVPSVEAEDQRHLHRDLETLKQERGDTTRRIKGLLSSQGLRVKNLTRLPEQLDALRLWDGSPIPPGLRQRVLRVYAHHQFLSEQIAAVEAERGTQLQDSNDTSIEKVRQLMLLKGIGINGAWLLVMEFFAWRGFKNRREVGGLAGLTPTPYHSGESAREQGITKSGNPHVRWMITELAWGWLRLQPQSALSVWFRERYGSGGKRLRRIGIVAVARKVLIALWRFLEMGALPEGAALKTR

SEQ ID NO: 363031 - protein, 338 aa, unidentified
MGVTTIGLDLAKNVFQVHGIDGDGKVLVRRQLRRGEVLKFFQGLPACLVGMEACGTAHHWAREIAALGHTVKLMPPAYVKPYLKRGKTDAADAEAICEAVTRPTMRFVAVKTVDQQAALMLHKTRDLLVRQRTMLINALRGHLAEFGIIAAKGPSGTKAAIEALHEAQDRLPELARRALHGLVDQLRLLGEEIDRLEARILEWHRASDVSRRLATIPGIGPITASAIAAAVPDGTLFRSGRQFAAWLGLTPKAHSSGGKDRQTGISKQGDGYIRRLLVVGATAVMRLARQDNAARCWAAKLLERKPAKLAAVALANKTARIAWAVLTRGGTYAAPTAA

SEQ ID NO: 363032 - protein, 461 aa, unidentified
MRKARRSGRKPGKKIADVTAGLEILRPQAAGIGVGNAEHYVAVPPGRRDPSVQTFGSFTADLHRMAQWLQACHIETVVMQATGVYGMALYQVLESYGFQVLVVNAKYTQTLPGRKTDVLECQWLQKLHTFGLLNNSFLPPEKIRVLRTSMRQRENLVAAAGTCIQQMQKVLTERNVQLANVISDLSGTTGMAMVQAILDGQRDPQRLAALADPRVQASRKEIAQSLEGHWREDRLFVLPQVHDLYFTYLESITACDRRIEAHLKTLEAKADVAAQPLPEMPRLPRRKHIPQTNLREELYRVTGEDLTRINGIQVQTAQVVISEVGVDMTRWPDEHHFASWLGRCPHHRITGGKVIRRGTKKVLNRAATALRLAAQSLHRSKSYLGAQYRRFRARMDGPVAITAMAHLLARLIYRLLRYGTQYHDQGVEHYERKYRETQTKWLKKQAALLDMQLIPAPGVAK

SEQ ID NO: 363033 - protein, 418 aa, unidentified
MQTELAGFTAIIGIDWADKKHDVCIQAAESGQRQRYQVQHKADKLDAWAQSLYRHYGGPIAVALELSKGPLVSALQKYDFFVIFPIDPTTLANHRKTFTLSGAKDDPTDAEYALNLLLTHTEHFKALKPQSVEMRTLMTLVEQRRRLMNDRVRLTNRLRNALKQYYPQALEWFDRIDTPLFCDFIRRWPSLAQARRARKATLERFFREHNMNRKALLERRMTAIKSAMPLTMDEAVIVPYRLQALTLVAQLEVALASIRIYDDEIATLAPQHPDYGLFSTLPGAGPSLAPRLLVAFGEQRERFANAAELQKYAGIAPVTERSGQKSWIHWRWQCPTFLRQTFVEWSAQTINKSYWAGLYYYQQRGKGCSHQAAVRALAFKWIRILYRCWITRTPYDEARYLKALQERGSPLLKIAEAA

SEQ ID NO: 363034 - protein, 347 aa, unidentified
MRFASPTAAFYCGIDLHARTLYLVVLDHAGDVRLRRNLPARPDAFLHAVAPFRPDLVVACECVHSWYWLADRCAAEGLPFILGDAWGMKAVHGNKTKSDAHDADTIARLLRGGNPPLAYAYPKENRSLRDLLRTRLRFVRLRARTYGHVHTALRQLNLPPVSSDVKYKTKRGSIADTIPDEHVRRAVAADLELLDPLDALIRHLERDLEVAAQQHFARELAVLQSIPGVGLIISLTVLLEIDTIDRFDTRQQFCSYARLIAPPQESAGKKVGVGCRKRGNAWLKWAFSEAAVLCAQKDERLGAYLQRLTARYGTGKALSILAHKLGRAMYHLLRTKKVFDLDKFLRH

SEQ ID NO: 363035 - protein, 415 aa, unidentified
MALKIVYKICCGIDVHKTFVVACIASTNDKGVTSYESHRFSTYTSGLKTLLQWLLDRNCKDVCMESTGKYWIPVYNILEKDCSIVLAHPKYVKAIRGKKTDKKDAKWIADLFKHDLVAGSFMPPAGIRQLRDLMRYRFKLTCFKSSEKNRLQNCLTVSNIQLGNVVSDTFGKSAQAILDKILENPADTSFDLEPLVFKSLKKKLPELRDSIDGYITPEQAGKLKVIKSHYENLEARKAELEELILALAAPYQQELAILQTAPGISSDFTAIGIISEIGTNMEAFPSAKHLCSWAGLTPTNNESAGKKKSVRVSKAGCYIKPLLVQCANAVVKSNKHPEIRNRYLRIKKRRGHKKAIIAIARMLLTALYHMLKNGENYNAELYRKSDLPPVDREITVEQAILIARNQGYKIKSATA

SEQ ID NO: 363036 - protein, 346 aa, unidentified
MIVIGADIHKRNHMLVAVGAQTGELRSELGIAADEQGHQAALRWARELDEERVWALEDCRQVSRRLEQALLAAGERVVRVAPRLTGLSRRADRRAGKSDPIDALAVARVAVREGPERLPAAYLDEEAMEIRLLADHREDLVAERTRAQNRLRWHLLDLCPELEAQLPVRSLGSGVHLRRLAEHLEGHSSTRARIARMLVDRICEITEEVERLQSEIKALIRAHRPALLEETGCGPLTAATLIGHAAGAERFAGEAQFARMAGVAPIPVSSGKSDRHRLHRGGDRQLNRALHVIAITRSRLDPETRAYLDKKRAEGKSNREALRCLKRHLARRFYRLLLDPSLSSSL

SEQ ID NO: 363037 - protein, 377 aa, unidentified
MHSENIAAYIGLDVHKETLAVAIAAPERLGEVRYYGTINNEAQAVRRLFQKLQGLYGNILSCYEAGPCGFGLYHQLTAMNIKCQVIAPSRIPKSPTDRIKNDHRDAISLARLLRAGELTPVWIPDLTHEAMRDLIRARAAAKRDSRVARQRILSMLLRTDKRYAGKHWTGKHRTWLANQSFSQLSQQIAFQHYCQSLEQIEDRILQLDQEISRLLPEWSLCNLVCQLQALKGVGQLTAITLVAELGDFSRFSSPKQLMAFLGLVPGEYSSGNSIRPRGITKVGNSELRRLLYEAAWSYRTPAKVGAWLIYYRPDSVTQYSKDIAWKAQQRLCSRYRSLTAKGKKSQVAITAVARELTGFMWDIALAAQSSFSQQKQN

SEQ ID NO: 363038 - protein, 378 aa, unidentified
MDRATNSTAPADRLFCAVELSKNSWLLGIQFPDRQKASVYPLKGGDSEGLMTKLVAACDRWTKVSGKKPSIILCYEAGYDAFWLARFLRARGIECLVVDSASMQVNRRSRRAKTDRIDLGKLLRALIAWCGGERHVWSVVRIPSVDEEDLRRSHRERSRLITERTAHINRIKGLLFAQGIRGINVKARYRTLRVDKLVTGEGRPLPPRLAQEITREIDRLGLVQQQIAAIEQERDESPTTCKETEKKRAQLLLLKGIGPTGSAVMAREVYYRQFSNRRQVAGFLGLATSPYDSGQMERSQGISRAGSGPVRATMIQMAWLWIKHQPKSAIAQWFVQRTEGQNGRIKRIMIVAVARKLAIALWRYLEQGLVPQGATLTR

SEQ ID NO: 363039 - protein, 409 aa, unidentified
MDVTIARVAGLDVHQASVVATVRVPDGAGGRAMTTATFGTMTADLIALRDWLQAHAVTHVALESTGVYWKPVYYVLEDAFTLLLINMLALKHVPGRKTDVKDSEWLAQLLECGLLRASFVPPPAIRELRDLTRYRVQQVRDRAQEVNRLCKVLEDAGLKLTTVMSDVMGASGRAMLTALVSGTTDPVVLADLARGKLRKKLPLLQQALVGRFRSHHAFLIEQVLAKIDFLDEAVGRLTGELDRRLVPFEPMLTALDTIPGVDRIGAVSILAETGGDMQRFATAAHLCSWGAMCPGHNESAGKRRSGKTRPGNRYLRATLIQAGLSAMRTRGSALQAKYVRVKRQRGHKKAVVAVGHQILEIAYYVMRDGVTYQELGADYFTARVKDRSVRRHVKQLEALGFRVTIEQAA

SEQ ID NO: 363040 - protein, 350 aa, unidentified
MLIIGCDFHSRFQQIAMVDSETGEFMERRLEHRNDEAKRFYAELQKPVRVGMEATGYAHWFEQMLAQLGHELWVGDAAGIRAAMVRKQKTDLRDARHILDLLLQDRFPRIWIPSPAERDLRQLLWHRHKMVGLRTSVRNQLQALAMGQGICRRKKLWASAGRGELEGLALDAWASRRRQELLAILDGLDPCLAELDQAVKREAQKCPAALDLMEQPGVGPVTALMFVLTIGPVERFRRSKQVVSYLGLNPRESSSGGRQRLGAISKQGNSMVRYLLVEAAQAAARYDKELRRDYQRLKFRRGSAVAKVAIARKLAVRLYWKLRNQPSPVPPARMQGSSDRLLVGASRSSL

SEQ ID NO: 363041 - protein, 343 aa, unidentified
MNDITTIGLDTAKSVFQVHGVDADGEVALRRQLKRRQVLAFFAKLPPCLVGIEACAASHHWSRELTKLGHTVRLIPPRYVKPYVKSQKNDATDAEAICEAVTRPNMRFVPTKTREQQSILMLHRTRHLLVRQRTSTINAIRSHLAEYGIIAGVGRNGVEALLKIISDEQDDRVPAVARDCLMALGAQLEMLKRQVLELDAKILATHRNNELSRRLEAIPGVGPCIATALVASISDPGAFRSGRQMAAWIGLVPKQNSSGGKDRLGGITKAGDRYLRSMLMLGALSVIKRAKQLGYTRRPWLAQLMARRPIKVAAIALANKIIRMVWAMMVRGESYREPVALAA

SEQ ID NO: 363042 - protein, 316 aa, unidentified
MSKRSTDHAGIDTGKRRLDAALNKRGEELQVENGPEGHRRLSAWLRKHGVKRVGIEASGGYEMDVVAHLRRDGFTVVVFQPAQVRAYAKFHLQLAKNDKIDARLIAACTAAKESIHAAPDPRLAPLAAHLTFIDQIVEDIACCKTRLETCRDPRAQVYWKQEIARLGKLQKAEIALLEEAIRQHRDRAARLDLIASVDGIGLKTAIVILVRIPEIGRLSREQVAALVGLAPYDDDSGSRHGHRHIRGGRKRVRWGVYAAALPASLLHNPQLMAMYQRLRAAGKEHKVALVACARKLVIFANTVVARGTPWLPLGAF

SEQ ID NO: 363043 - protein, 412 aa, unidentified
MPEEKPVELRVSVDVGYRRHSVAMGLSSGEVLEEFEIEHRLEGFQEFFSRIEKHNLQQGYSVAVAMEGYNGYARPLDSMVRQRGYRLYNINNLKLARFKEIFPGSAKSDRIDARKGLELFQLSDHLPLAKEVLQEVSGTPHENEVLKRLTRRRRRLVNERVRVVNNLQADLQAVCPGLLEITSEASNQWFLNFLLSADTLPQLARLRKATLLKIPAVGRKYASLIEGWQKRAHFGAEVEWVSEMIQEDAQRCLDLEGKIKTLEIKIKQVAKDSKIAKILLSIPGFGAVCTSELAGEIGTIERFSKEGSLALYLGMSTLDNSSGKYQGSKAPKHVNTRAKAAMMIALDRHRKHVPESQRYYEKKRSEGKKHNQTIRALGRHLCRIIYKLLKAEREYQIRPEKRNTKTKVRSRS

SEQ ID NO: 363044 - protein, 366 aa, unidentified
MLYLGIDQHHRQLTVSIRNDEGTVILKRQVSTQPDKARAFLDDVRRQAGDEGFMALLEVCGFNDWLIALLDECGCREVVLIHPEKRSRRKTDRRDAAKLSELLWPGGERLRQGQKPEGLRRVVIPSADDQADRQLTALRKRVGQQRTRTINKLKNILRRHNLSWQQPTKTFQTQAVRRWLAELELPAIDRLEMDQLLAQWRLWEEQLKQLEERIAHRFHQNKAAQILATAPGGGAYSALAIASRIGRVERFPRPRSLANYFGLTPGCRNSGEATDRLGSITKEGSSMVRFIVGQMVLHALKKDPHMREWYRRIRRRRGSKIARVAVMRRLVTIFWHMLTHEESYCVGGPPRLRLKAAQRKQKRKSA

SEQ ID NO: 363045 - protein, 317 aa, unidentified
MPKSNTAVVTIGIDPGKNTLHLVGLDARGAIVLRERVARARIVSRLANVPPCLIGIEVGMGTHYVTRELLALGHDVRQVPPVYAKPFRQTHKNDFRDAHAIAEAVQRPTTRCVPPKTDEQLDLQALHRVRYRLVGQRTAIINQIRCFLLEHGIAVRQRLHWLRQALPDILAQRADVLSPRMVRILEDLAQDWRRLDDRIEAVSGEIEALSKTTEPCRHLMTIPGIGPIISSAVVAAIGDGTAFTRGRDFAAWLGLVPKQISTGDRTILGRITKRGNRYLRMLFMQAARVVLLRPRNWMKHSYGPWLAAAAQRLHQMC

SEQ ID NO: 363046 - protein, 343 aa, unidentified
MLYVGLDVHKEFCQACVIDERGRALSNERFPSTHESLDVFLAGIKDAKFVLESTGIWEYIYEGIEDRGFEVVLAHPLKVRAIAEARVKTDKVDAETLAQLLRADLIPRSWVPSRDIRDLRQLVRQRTYLARQSTSFKNRISAELLRRGIRRPPELKTSFTKKDIERMRSLDVPTITSNLDCLERIQAQIEAMNQQLLVEFKRRPDAQLIATIPGIGFYGALLIHAEIDDINRFPDPEHLAAYAGLVPTVSQSASTVHYGGISKEGSAYLRWILIEAVHIHRHTHPESRLSRFHSKLEKRRGKNKATTATARKLTHIIYWMLKTREPYHSQGFNPVNKPARTSA

SEQ ID NO: 363047 - protein, 340 aa, unidentified
MKKRYIGIDLHRNRFTCCIRLDNDRTYVTEWALEALARLVKKLRATDEVAVEITSNTRLFHEAVLPHVARVVVGDTNQFRVISQSVKKTDPNDARLLSLYLSKNLLPEVRMKDKDLAQLASLTQTRDTLGKQRSALKNKVNNILSARGLNLAKEALSSEKKLAEVLELPFDEIVRIELRVIVEQIRGLNKSIAELEKTIGEEGSKLEGHKGLSSIKGIGKITGAILLSVIGDVNDFADEGRLASYFGIVPRVSNSNQTERSGRIHKRGTKLGRTALVQSALIAANYSPYLKRFYEQVKARKGAGKAIIALAHKFLGIIYRTLKNKWVFEDFPNFVLAEES

SEQ ID NO: 363048 - protein, 343 aa, unidentified
MKLMRVGIDLAKSVFQVHGVDRHERVVWRRKLTRANWLRVFLETVEPGCEVGMEACGGAHHWARLLQARGYSVKLIAPQFVKPYVKSNKNDANDAEAICEAMSRPNMRFVAVKSVAQQDVQAVHRVRAEISKQRKAKGNQIRGLVSEYGLVAPKELVHLRAAIPAWLEDAENGLTGRFRRLLNALWHDLHALDQRMIELDHEIAQIASADPVVKRLQQLRGVGPLIATALVATVGDVRQFANGRQLAASLGLTPRQNSSGGKERLLGISKRGDAYLRTLLVHGARSALRTAQNKEDRLSRWVSRIATTRHHNVAAVALANKTARIAWAMMKDGTDYAPDRAAA

SEQ ID NO: 363049 - protein, 398 aa, unidentified
MTESSDYESVQVFIGVDVGKDTHHAVAINRSGKRLFDKALPNDENKLRSLISDLKQHGQILLVVDQSATIGALPVAVARSEGVLVGYLPGLAMRRIADLHAGEAKTDARDAAIIAEAARTLPHALRTLKLADEQIAELSMLCGFDDDLAAQTTQASNRIRGLLTQIHPALERVLGPRLDHPAVLDLLQRYPSPEKLASLGEKKLAAQLCKLAPRLGKRLAADIAQALAEQTVVVPGTNAAAVVLPRLALPLITLRKQRDEVALAVEQRVLAHPLYPVLTSMPGVGVRTAARLLTEVACRAFASVAHLAAYAGLAPVTRRSGSSIRGEHPSRRGNKALKRALFLSAFAALRDPLSRAYYTRKMSQGKRHNQALIALARRRCDVLFAMMRDGTFYTPQAS

SEQ ID NO: 363050 - protein, 412 aa, unidentified
MKTSHKVAGIDVHKSMLAVVIADAAREGEWQFRRRKFGATVSQLRQLAAWLGEENVREVVMESTAQYWKPVWQELEGKCELYLAQAQSNRAPRGRKRDFADAERLLRRHVADELILSFVPNSEQRLWRTLTHTKYQLTRDRVRIHNQLESLLEDARIKLSGCVTDLLGVSSRRMLQAMAEGETDAARLAAMAHAGLHATSEQLQDALHAAATLSALHRRILGLFLVRLELIENQMAILDNSIGEALHGYHDAVLRLAEVPGFGIDSAQQVIAEVGPTAATFPSPEQLSSWVGACPGREESAEVSKSNRSPKGNRAMRRVLNQVANSAVKAKGSIFQAVYRRLVPRLGHSKAIWAIVHRLCRVTWKLLHHRVQYIEYGNRPNPKAVKTRMNKLIRQLRSLGYQVQVSPLPTTS

SEQ ID NO: 363051 - protein, 324 aa, unidentified
MTTNSVVVGVDVAKDRLDVAVRPSGEVWSEANNETGITTLVARLRPLGPALIVCEATGGFERAAIAALAAAGLPAAGLPVVVANPRQVRDFARATGQLAKTDQLDAGILALFAERVRPTPRPLADAAAQLLDAVLTRRRQLLEMLVAEKNRLGFAPKPLHRGIQAHIRWLERQLDDVTKELAGLIEASPVWRAKDDLLQSVPGVGPIVSSTLLGELPELGTLSHKQIAALVGVAPLARDSGTLRGKRLVWGGRASVRTALFMAALCGRRWNPQLKVFYERLKAAGKPTKVALIACARKLLTILNAMVRDHKRWAMPAPSVQYSC

SEQ ID NO: 363052 - protein, 370 aa, unidentified
MNNATTFVGLDVHARSIKACAFVPATGEIEGKSLGYEPGELASWMKSLPQPAKCVYESGVTGFHLCRELRAMGVDCVIGAVSKMHKPAADRGRKTDRRDAHFLAVQLALGVVTEVHVPDPECEGARDLTRALADARDDAVRAKQRLSKFLLRHGYVYDERNAAGQRKSRWTRDFWAWVGRIDLGDPSAMAALDHYCERVRRADEEKTSLEAKVKSLAQAPRWKPTCDALRCLKGIDAVTAASIACEADGFSRFAKASGFAAWIGLVPSEHSSGESQCRGGITKAGNKHLRKLLVEAAWHYKSASRAPKGLAKGQSVPPDARRHANAGVRRLVDRRRAMDAAGKQSSVANVAIARELACWCWAVGRMAEGA

SEQ ID NO: 363053 - protein, 347 aa, unidentified
MKITKKVNRNKQNTYSSLTDYNYYLALDWSQVNYALGVLTPKSKHPRYLRGPAKIDNIQNHLSGLRGKKILTIEETTSTHWLYAELYECVDKIVICDPYRNSLLSDGAKNDDIDAGKLSLLLRGGFLKEVYHTLDNSYQIRKLLSGYEDLIKMGVRLQNQKSALYRAEGLNSKKDSGLPADTFMSFVEEQQNSLITHYEETKQKYLEQFRQLRKNIPIINKMCRISGINTISAVKIYGTVLDAKRFSGKNKYWGYCGLVHHQKTSGGRNYGKRKIRHSRRLKSVYKTAALAAISGKNDIGEYYQELLSQGYSEYKARHAVARYIATSTYAMMKNATEYIPYSWRKKE

SEQ ID NO: 363054 - protein, 405 aa, unidentified
MSANKKRGPGPSHLLLTPDHAGNVVGVDPHKLTLTATVLDPRGGVLAGEHFRVSGDGHRALEAWARQFGPIARWGVEGAAGWGRHTAIFLARRGYDVRDVCANRTARNDRARQRGKSDALDSERIARETLAHPLLPKAFKRAGADSGPDEQQQLLALWHNRRRSILTSRQHLVNEAESLLCGLPLELREQLPSSKAVRPRLAALARRNRRRRYDAPTSLRLRMLDDYHAQITALDREDKQVVAELRTLVRASGSTLGELCGLDTRSVAELLVETGDPRRFTDGGFARFNGSAPLAASTAEGPREPVRHRYNPGGNRRINAILHRMAVTQLRCEPRAKKIYANARAEGHTKKEARRILKRHLSDVIHRRMIRDLASLPAQPLLAAQPRAAIAQSRVARQGRAKRAA

SEQ ID NO: 363055 - protein, 349 aa, unidentified
MRSFQPPPSTRFYAGVDLHARTLFLVVLDHDGQTRFARNLPAQPEPFLRAVQPFTDGLLVACECVHCWYWLADTCRDHGIAFVLGHAWAMKAVHGAKTKCDRKDAEAIARLLKGGNFPPAYAYPRERRGLRDLLRARLRLVRQRAEPYGHVHTARRQANLPPVSSDVKYKSKRAVLSADIADPFVRRRVETDLALLAPLDTAIRQLEAELEDAAREHYPTELAVLQSTPGVGLVLSLTILLEIDTIDRFDTRQQFCSYARLCGAVQTSDNKRAGAGNGKAGNAWLKWAFSEAAVLSAQKDERIGAYLQRLASRLGKAKALSALAHKLGRAFYHVLHTKEVFDVTRFVRH

SEQ ID NO: 363056 - protein, 453 aa, unidentified
MRPKRAARKPVRQRRATVRPDAAGIDIGARRIHVAVAAERDSQPVREFQTFTQDLYALADWLQACGVRTVAMESTSVFWIPLFQILETRGFEVCLVNARHVKHVPGRKTDIADCQWLQYLHAVGLLTASFRPAQTICGLRSLLRHRESLIQAAAAHVQRMQKALDQMNLQLHHVISDITGLTGLAIIDAILAGERDATTLAGLRNWRVHASEETIRKALVGDYRPEHVFTLRQSLSAYRYYQQLVADCDVEIERHLAALPAAKPGVVAPSAPTARRKPRGNEPDFDLRAHLHRIFGVDLTTVPGINVLTAHTLLAEVGPDLSRFPTPEAFASWLGLCPDNRISGGKILSVKTRRVKNRAALALRMSAQAVQGSRAALGGYYRRMRAKLGGPKAITATAHKLARVVYHLIETGQSYDESVFLRYEASHRDRVQKRLHAQAAALGFKLVPTSVVP

SEQ ID NO: 363057 - protein, 355 aa, unidentified
MNFVGIDIHKRYSVCTAQDEQGRKLAVARIDGNAASGFAQFFQGLGGESKAVLEACWSWGKIHDLLEDLPQVVEVVLAHPLKTHLIASAQIKTDKVDSNALATLLRGNFIARAHIPTKAVRQRRDTLRQRLYWARLRTRIRNRVHALLDRQPQLALPQCSDLFGVRGMCHLRKLRLAEPDHALLQEDLALLELLNLQIRDQEKRIAAQSQPDEDTRLIQSIPGFGPIFASIIAAEIDGIERFSDSAHLCACAGLVPTTYASGGHVSHGGLLPACNHWLRWAFIEGAWTAIGSSPYLASIYQRHRARGKQARAAIVIVAHRMCQIVYCLLKERRPYHDHPKQNHPKQFSPVAPASA
